(19) United States
(12) Patent Application Publication
(10) Pub. No.: US 2025/0283073 A1
(43) Pub. Date: Sep. 11, 2025

(54) Circular RNA Compositions and Methods

(71) Applicant: ORNA THERAPEUTICS, INC., Watertown, MA (US)

(72) Inventors: Robert Alexander Wesselhoeft, Somerville, MA (US); Kristen Ott, Watertown, MA (US); Thomas Barnes, Watertown, MA (US); Gregory Motz, Watertown, MA (US); Amy M Becker, Lexington, MA (US); Allen T Horhota, Westford, MA (US); Brian Goodman, Watertown, MA (US); Huan Shu, Watertown, MA (US); Varun Shivashankar, Watertown, MA (US)

(73) Assignee: ORNA THERAPEUTICS, INC., Watertown, MA (US)

(21) Appl. No.: 18/567,469

(22) PCT Filed: Jun. 10, 2022
(86) PCT No.: PCT/US2022/033091

§ 371 Date: Dec. 6, 2023

Related U.S. Application Data
(60) Provisional application No. 63/209,271, filed on Jun. 10, 2021.
(60) Provisional application No. 63/311,923, filed on Feb. 18, 2022.

(51) Int. Cl. C12N 15/113; A61P 35/00; C12N 15/10; C12N 15/85

(52) U.S. Cl. CPC C12N 15/113; A61P 35/00; C12N 15/1006; C12N 15/85; C12N 2310/532; C12N 2830/50; C12N 2840/203

(57) ABSTRACT

Circular RNA, along with related compositions and methods are described herein. In some embodiments, the inventive circular RNA comprises group I intron fragments, spacers, an IRES, duplex forming regions, and an expression sequence. In some embodiments, the expression sequence encodes an antigen. In some embodiments, circular RNA of the invention has improved expression, functional stability, immunogenicity, ease of manufacturing, and/or half-life when compared to linear RNA. In some embodiments, inventive methods and constructs result in improved circularization efficiency, splicing efficiency, and/or purity when compared to existing RNA circularization approaches.

### CROSS REFERENCE TO RELATED APPLICATIONS

[0001] This application is a national phase entry pursuant to 35 U.S.C. § 371 of International Application No. PCT/US2022/033091, filed Jun. 10, 2022, which claims the benefit of, and priority to, U.S. Provisional Application No. 63/209,271, filed on Jun. 10, 2021; and U.S. Provisional Application No. 63/311,923, filed on Feb. 18, 2022, the contents of each of which are hereby incorporated by reference in their entirety for all purposes.

### SEQUENCE LISTING

[0002] This application contains a Sequence Listing which has been submitted electronically in ASCII format and is hereby incorporated by reference in its entirety. Said ASCII copy, created on Jun. 9, 2022, is named OBS_017_SL.txt and is 3,370,624 bytes in size.

### BACKGROUND OF THE INVENTION

[0003] Conventional gene therapy involves the use of DNA for insertion of desired genetic information into host cells. The DNA introduced into the cell is usually integrated to a certain extent into the genome of one or more transfected cells, allowing for long-lasting action of the introduced genetic material in the host. While there may be substantial benefits to such sustained action, integration of exogenous DNA into a host genome may also have many deleterious effects. For example, it is possible that the introduced DNA will be inserted into an intact gene, resulting in a mutation which impedes or even totally eliminates the function of the endogenous gene. Thus, gene therapy with DNA may result in the impairment of a vital genetic function in the treated host, such as e.g., elimination or deleteriously reduced production of an essential enzyme or interruption of a gene critical for the regulation of cell growth, resulting in unregulated or cancerous cell proliferation. In addition, with conventional DNA based gene therapy it is necessary for effective expression of the desired gene product to include a strong promoter sequence, which again may lead to undesirable changes in the regulation of normal gene expression in the cell. It is also possible that the DNA based genetic material will result in the induction of undesired anti-DNA antibodies, which in turn, may trigger a possibly fatal immune response. Gene therapy approaches using viral vectors can also result in an adverse immune response. In some circumstances, the viral vector may even integrate into the host genome. In addition, production of clinical grade viral vectors is also expensive and time consuming. Targeting delivery of the introduced genetic material using viral vectors can also be difficult to control. Thus, while DNA based gene therapy has been evaluated for delivery of secreted proteins using viral vectors (U.S. Pat. No. 6,066,626; U.S. Publication No. US2004/0110709), these approaches may be limited for these various reasons.

[0004] In contrast to DNA, the use of RNA as a gene therapy agent is substantially safer because RNA does not involve the risk of being stably integrated into the genome of the transfected cell, thus eliminating the concern that the introduced genetic material will disrupt the normal functioning of an essential gene, or cause a mutation that results in deleterious or oncogenic effects, and extraneous promoter sequences are not required for effective translation of the encoded protein, again avoiding possible deleterious side effects. In addition, it is not necessary for mRNA to enter the nucleus to perform its function, while DNA must overcome this major barrier.

[0005] Circular RNA is useful in the design and production of stable forms of RNA. The circularization of an RNA molecule provides an advantage to the study of RNA structure and function, especially in the case of molecules that are prone to folding in an inactive conformation (Wang and Ruffner, 1998). Circular RNA can also be particularly interesting and useful for in vivo applications, especially in the research area of RNA-based control of gene expression and therapeutics, including protein replacement therapy and vaccination.

[0006] Prior to this invention, there were three main techniques for making circularized RNA in vitro: the splint-mediated method, the permuted intron-exon method, and the RNA ligase-mediated method. However, the existing methodologies are limited by the size of RNA that can be circularized, thus limiting their therapeutic application. The present invention addresses this need by providing methods and compositions for the manufacture and optimization of circularized RNAs via engineering of the sequences for the DNA template, precursor linear RNA and ultimately the circular RNA along with methods of treating a subject in need using the invented circular RNA.

### SUMMARY

[0007] Precursor RNAs, circular RNAs, and the related compositions and methods are described herein.

[0008] In one aspect, provided herein are precursor RNA polynucleotides comprising, in the following order: a. a 5′ enhanced intron element, b. a 5′ enhanced exon element, c. a core functional element, d. a 3′ enhanced exon element, and e. a 3′ enhanced intron element, wherein the core functional element comprises, in the following order: i. a translation initiation element (TIE), ii. a coding element, and iii. optionally, a stop codon or a stop cassette.

[0009] In one aspect, provided herein are precursor RNA polynucleotides comprising, in the following order: a. a 5′ enhanced intron element, b. a 5′ enhanced exon element, c. a core functional element, d. a 3′ enhanced exon element, and e. a 3′ enhanced intron element wherein the core functional element comprises, in the following order: i. a coding region, ii. optionally, a stop codon or a stop cassette, and iii. a translation initiation element (TIE).

[0010] In one aspect, provided herein are precursor RNA polynucleotides comprising, in the following order: a. a 5′ enhanced intron element, b. a 5′ enhanced exon element, c. a core functional element, d. a 3′ enhanced exon element, and e. a 3′ enhanced intron element, wherein the core functional element comprises a noncoding element.

[0011] In some embodiments, the TIE comprises an untranslated region (UTR) or a fragment thereof, a aptamer complex or a fragment thereof, or a combination thereof.

[0012] In some embodiments, the UTR or fragment thereof is derived from a viral or eukaryotic messenger RNA. In some embodiments, the UTR or fragment thereof comprises a viral internal ribosome entry site (IRES) or eukaryotic IRES. In some embodiments, core functional element comprises two or more IRESs. In some embodiments, the core functional element comprises a TIE, a coding element, a termination sequence, optionally a spacer, a TIE, a coding element, and a termination sequence, wherein the TIE comprises an IRES. In some embodiments, the IRES comprises a sequence selected from SEQ ID NOs: 1-2983 and 3282-3287, or a fragment thereof. In some embodiments, the IRES comprises a sequence selected from SEQ ID NOs: 75, 77, 137, 532, 566, 582, 648, 680, 693, 752, 785, 787, 791, 793, 820, 823, 839, 840, 843, 852, 857, 861, 862, 863, 864, 871, 874, 876, 922, 959, 983, 984, 1015, 1017, 1023, 1026, 1031, 1041, 1047, 1059, 1068, 1134, 1168, 1169, 1171, 1177, 1178, 1179, 1180, 1189, 1192, 1193, 1198, 1216, 1218, 1230, 1263, 1276, 1280, 1282, 1284, 1287, 1346, 1354, 1364, 1367, 1370, 1432, 1438, 1440, 2285, 2465, 2601, 2615, 2616, 2617, 2618, 2627, 2667, 2681, 2742, 2746, 2758, 2777, 2778, 3282, 3283, 3286, and 3287, or a fragment thereof. In some embodiments, the IRES comprises one or more modified nucleotides compared to the wild-type viral IRES or eukaryotic IRES.

[0013] In some embodiments, the IRES is capable of facilitating expression of a protein encoded by the precursor RNA in a cell. In some embodiments, the IRES is capable of facilitating expression of the protein, such that the expression level of the protein is comparable to or higher than when a control IRES is used. In some embodiments, the control IRES comprises the sequence of SEQ ID NO: 3282. In some embodiments, the IRES is derived from Enterovirus, Kobuvirus, Parechovirus, or Cardiovirus. In some embodiments, the IRES is derived from Enterovirus or Kobuvirus.

[0014] In some embodiments, the cell is a myotube. In some embodiments, the IRES is derived from Bopivirus, Oscivirus, Hunnivirus, Passerivirus, Mischivirus, Kobuvirus, Enterovirus, Cardiovirus, Salivirus, Rabovirus, Parechovirus, Gallivirus, or Sicinivirus. In some embodiments, the IRES is derived from Hunnivirus, Passerivirus, Kobuvirus, Bopivirus, or Enterovirus. In some embodiments, the IRES is derived from Enterovirus I, Enterovirus F, Enterovirus E, Enterovirus J, Enterovirus C, Enterovirus A, Enterovirus B, Aichivirus B, Parechovirus A, Cardiovirus F, Cardiovirus B, or Cardiovirus E. In some embodiments, the IRES comprises a sequence selected from SEQ ID NOs: 137, 580, 785, 791, 820, 922, 1041, 1047, 1068, 1168, 1169, 1171, 1177, 1178, 1179, 1180, 1189, 1192, 1263, 1276, 1280, 1282, 1284, 1287, 1354, 1356, 1432, 1436, 1439, 1440, 2285, 2667, 2746, 2777, 2778, 3283, and 3284.

[0015] In some embodiments, the cell is a hepatocyte. In some embodiments, the IRES is derived from Enterovirus, Bopivirus, Mischivirus, Gallivirus, Oscivirus, Cardiovirus, Kobuvirus, Rabovirus, Salivirus, Parechovirus, Hunnivirus, Tottorivirus, Passerivirus, Cosavirus, or Sicinivirus. In some embodiments, the IRES is derived from Enterovirus, Mischivirus, Kobuvirus, Bopivirus, or Gallivirus. In some embodiments, the IRES is derived from Enterovirus B, Enterovirus A, Enterovirus D, Enterovirus J, Enterovirus C, Rhinovirus B, Enterovirus H, Enterovirus I, Enterovirus E, Enterovirus F, Aichivirus B, Aichivirus A, Parechovirus A, Cardiovirus F, Cardiovirus E, or Cardiovirus B. In some embodiments, the IRES comprises a sequence selected from SEQ ID NOs: 137, 580, 648, 693, 752, 785, 791, 793, 820, 823, 839, 840, 861, 862, 863, 876, 922, 959, 983, 984, 1015, 1017, 1023, 1026, 1031, 1041, 1047, 1059, 1068, 1134, 1168, 1169, 1171, 1177, 1178, 1179, 1180, 1189, 1192, 1193, 1198, 1216, 1263, 1276, 1280, 1282, 1284, 1287, 1346, 1354, 1356, 1432, 1436, 1438, 1439, 1440, 2285, 2777, 2778, 3283, and 3284.

[0016] In some embodiments, the cell is a T cell. In some embodiments, the IRES is derived from Passerivirus, Bopivirus, Hunnivirus, Mischivirus, Enterovirus, Kobuvirus, Rabovirus, Tottorivirus, Salivirus, Cardiovirus, Parechovirus, Megrivirus, Allexivirus, Oscivirus, or Shanbavirus. In some embodiments, the IRES is derived from Passerivirus, Hunnivirus, Mischivirus, Enterovirus, or Kobuvirus. In some embodiments, the IRES is derived from Enterovirus I, Enterovirus D, Enterovirus C, Enterovirus A, Enterovirus J, Enterovirus H, Aichivirus B, Parechovirus A, or Cardiovirus B. In some embodiments, the IRES comprises a sequence selected from SEQ ID NOs: 77, 787, 793, 820, 839, 840, 843, 852, 857, 861, 862, 863, 864, 871, 874, 876, 959, 1193, 1216, 1284, 1287, 1346, 1356, 1364, 1432, 1438, 1440, 2667, 2681, 2742, 2746, 2758, 3283, and 3284.

[0017] In some embodiments, the aptamer complex or a fragment thereof comprises a natural or synthetic aptamer sequence. In some embodiments, the aptamer complex or a fragment thereof comprises a sequence selected from SEQ ID NOs: 3266-3268. In some embodiments, the aptamer complex or a fragment thereof comprises more than one aptamer.

[0018] In some embodiments, the TIE comprises an UTR and an aptamer complex. In some embodiments, the UTR is located upstream to the aptamer complex. In some embodiments, the TIE further comprises an accessory element. In some embodiments, the accessory element comprises a miRNA binding site or a fragment thereof, a restriction site or a fragment thereof, an RNA editing motif or a fragment thereof, a zip code element or a fragment thereof, an RNA trafficking element or a fragment thereof, or a combination thereof. In some embodiments, the accessory element comprises a binding domain to an IRES transacting factor (ITAF). In some embodiments, the binding domain comprises a polyA region, a polyC region, a poly AC region, a polyprimidine tract, or a combination or variant thereof. In some embodiments, the ITAF comprises a poly(rC)-binding protein 1 (PCBP1), PCBP2, PCBP3, PCBP4, poly(A)-binding protein 1 (PABP1), polyprimidine-tract binding protein (PTB), Argonaute protein family member, HNRNPK (heterogeneous nuclear ribonucleoprotein K protein), or La protein, or a fragment or combination thereof.

[0019] In some embodiments, the coding element comprises a sequence encoding for a therapeutic protein. In some embodiments, the therapeutic protein comprises a chimeric protein. In some embodiments, the chimeric protein comprises a chimeric antigen receptor (CAR), T-cell receptor (TCR), B-cell receptor (BCR), immune cell activation or inhibitory receptor, recombinant fusion protein, chimeric mutant protein, or fusion protein, or a combination thereof. In some embodiments, the therapeutic protein comprises an antibody, nanobody, non-antibody protein, immune modulatory ligand, receptor, structural protein, growth factor ligand or receptor, hormone or hormone receptor, transcription factor, checkpoint inhibitor or agonist, Fc fusion protein, anticoagulant, blood clotting factor, chaperone protein, antimicrobial protein, structural protein, biochemical enzyme, tight junction protein, mitochondrial stress response, cytoskeletal protein, metal-binding protein, or small molecule. In some embodiments, the immune modulatory ligand comprises an interferon, cytokine, chemokine, or interleukin. In some embodiments, the structural protein is a channel protein or nuclear pore protein.

[0020] In some embodiments, the noncoding element comprises more than one noncoding element. In some embodiments, the noncoding element comprises 50 to 15,000 nucleotides in length.

[0021] In some embodiments, the core functional element comprises a termination sequence. In some embodiments, the termination sequence is located at the 5′ end of the 3′ enhanced exon element. In some embodiments, the termination sequence is a stop codon. In some embodiments, termination sequence is a stop cassette. In some embodiments, the stop cassette comprises one or more stop codons in one or more frames. In some embodiments, each frame comprises a stop codon. In some embodiments, each frame comprises two or more stop codons.

[0022] In some embodiments, the 5′ enhanced intron element comprises a 3′ intron fragment. In some embodiments, the 3′ intron fragment further comprises a first or a first and a second nucleotides of a 3′ group I intron splice site dinucleotide. In some embodiments, the 3′ intron fragment is located at the 3′ end of the 5′ enhanced intron element. In some embodiments, the group I intron comprises is derived from a bacterial phage, viral vector, organelle genome, nuclear rDNA gene. In some embodiments, the nuclear rDNA gene comprises a nuclear rDNA gene derived from a fungi, plant, or algae, or a fragment thereof.

[0023] In some embodiments, the 5′ enhanced intron element comprises a leading untranslated sequence located at the 5′ end. In some embodiments, the leading untranslated sequence comprises a spacer. In some embodiments, the leading untranslated sequence comprises the last nucleotide of a transcription start site. In some embodiments, the leading untranslated sequence comprises 1 to 100 additional nucleotides.

[0024] In some embodiments, the 5′ enhanced intron element comprises a 5′ affinity sequence. In some embodiments, the 5′ affinity sequence comprises a polyA, polyAC, or polypyrimidine sequence. In some embodiments, the 5′ affinity sequence comprises 10 to 100 nucleotides. In some embodiments, the 5′ enhanced intron element comprises a 5′ external spacer sequence. In some embodiments, the 5′ external spacer sequence is located between the 5′ affinity sequence and the 3′ intron fragment. In some embodiments, the 5′ external spacer sequence has a length of about 6 to 60 nucleotides. In some embodiments, the 5′ external spacer sequence comprises or consists of a sequence selected from SEQ ID NOs: 3094-3152.

[0025] In some embodiments, the 5′ enhanced intron element comprises, in the following order: a. a leading untranslated sequence; b. a 5′ affinity sequence; c. a 5′ external spacer sequence; and d. a 3′ intron fragment including the first nucleotide of a 3′ Group I intron splice site; wherein the leading untranslated sequence comprises the last nucleotide of a transcription start site and 1 to 100 nucleotides.

[0026] In some embodiments, the 5′ enhanced intron element comprises, in the following order: a. a leading untranslated sequence; b. a 5′ external spacer sequence; c. a 5′ affinity sequence; and d. a 3′ intron fragment including the first nucleotide of a 3′ group I splice site; wherein the leading untranslated sequence comprises the last nucleotide of a transcription start site and 1 to 100 nucleotide.

[0027] In some embodiments, the 5′ enhanced intron element comprises, in the following order: a. a leading untranslated sequence; b. a 5′ affinity sequence; c. a 5′ external spacer sequence; and d. a 3′ intron fragment including the first and second nucleotides of a 3′ Group I intron splice site; wherein the leading untranslated sequence comprises the last nucleotide of a transcription start site and 1 to 100 nucleotides; and wherein the 5′ enhanced exon element comprises a 3′ exon fragment lacking the second nucleotide of a 3′ group I splice site dinucleotide.

[0028] In some embodiments, the 5′ enhanced intron element comprises, in the following order: a. a leading untranslated sequence; b. a 5′ external spacer sequence; c. a 5′ affinity sequence; and d. a 3′ intron fragment including the first and second nucleotides of a 3′ Group I splice site; wherein the leading untranslated sequence comprises the last nucleotide of a transcription start site and 1 to 100 nucleotide; and wherein the 5′ enhanced exon element comprises a 3′ exon fragment lacking the second nucleotide of a 3′ group I splice site dinucleotide.

[0029] In some embodiments, the 5′ enhanced exon element comprises a 3′ exon fragment. In some embodiments, the 3′ exon fragment further comprises the second nucleotide of a 3′ group I intron splice site dinucleotide. In some embodiments, the 3′ exon fragment comprises 1 to 100 natural nucleotides derived from a natural exon. In some embodiments, the natural exon derived from a Group I intron containing gene or a fragment thereof. In some embodiments, the natural exon derived from an anabaena bacterium, T4 phage virus, twort bacteriophage, tetrahymena, or azoarcus bacterium.

[0030] In some embodiments, the 5′ enhanced exon element comprises a 5′ internal spacer sequence located downstream from the 3′ exon fragment. In some embodiments, the 5′ internal spacer sequence is about 6 to 60 nucleotides in length. In some embodiments, the 5′ internal spacer sequence comprises or consists of a sequence selected from SEQ ID NOs: 3094-3152.

[0031] In some embodiments, the 5′ enhanced exon element comprises in the following order: a. a 3′ exon fragment including the second nucleotide of a 3′ group I intron splice site dinucleotide; and b. a 5′ internal spacer sequence, wherein the 3′ exon fragment comprises 1 to 100 natural nucleotides derived from a natural exon.

[0032] In some embodiments, the 5′ enhanced exon element comprises in the following order: a. a 3′ exon fragment; and b. a 5′ internal spacer sequence, wherein the 3′ exon fragment comprises 1 to 100 natural nucleotides derived from a natural exon; and wherein the 5′ enhanced intron element comprises a 3′ intron fragment comprising the first and second nucleotides of a 3′ group I splice site dinucleotide.

[0033] In some embodiments, the 3′ enhanced exon element comprises a 5′ exon fragment. In some embodiments, the 5′ exon fragment comprises the first nucleotide of a 5′ group I intron fragment. In some embodiments, the 5′ exon fragment further comprises 1 to 100 nucleotides derived from a natural exon. In some embodiments, the natural exon is derived from a Group I intron containing gene or a fragment thereof.

[0034] In some embodiments, the 3′ enhanced exon element comprises a 3′ internal spacer sequence. In some embodiments, the 3′ internal spacer sequence is located between the termination sequence and the 5′ exon fragment. In some embodiments, the 3′ internal spacer is about 6 to 60 nucleotides in length. In some embodiments, the 3′ internal spacer comprises or consists of a sequence selected SEQ ID NOs: 3094-3152.

[0035] In some embodiments, the 3′ enhanced exon element comprises: a. a 3′ internal spacer sequence; and b. a 5′ exon fragment including the first nucleotide of a 5′ group I intron splice site dinucleotide, wherein the 5′ exon fragment comprises 1 to 100 nucleotides derived from a natural exon.

[0036] In some embodiments, the 3′ enhanced exon element comprises: a. a 3′ internal spacer sequence; and b. a 5′ exon fragment, wherein the 5′ exon fragment comprises 1 to 100 nucleotides derived from a natural exon; wherein the 3′ enhanced intron element comprises a 5′ intron fragment comprising the first and second nucleotide of a 5′ group I intron splice site dinucleotide.

[0037] In some embodiments, the 3′ enhanced intron element comprises a 5′ intron fragment. In some embodiments, the 5′ intron fragment comprises a second nucleotide of a 5′ group I intron splice site dinucleotide.

[0038] In some embodiments, the 3′ enhanced intron element comprises a trailing untranslated sequence located at the 3′ end of the 5′ intron. In some embodiments, the trailing untranslated sequence comprises 3 to 12 nucleotides.

[0039] In some embodiments, the 3′ enhanced intron fragment comprises a 3′ external spacer sequence. In some embodiments, the 3′ external spacer sequence is located between the 5′ intron fragment and trailing untranslated sequence. In some embodiments, the 3′ external spacer sequence has a length of 6 to 60 nucleotides in length. In some embodiments, the 3′ external spacer sequence comprises or consists of a sequence selected from SEQ ID NOs: 3094-3152.

[0040] In some embodiments, the 3′ enhanced intron element comprises a 3′ affinity sequence. In some embodiments, the 3′ affinity sequence is located between the 3′ external spacer sequence and the trailing untranslated sequence. In some embodiments, the 3′ affinity sequence comprises a polyA, poly AC, or polypyrimidine sequence. In some embodiments, the affinity sequence comprises 10 to 100 nucleotides.

[0041] In some embodiments, the 5′ enhanced intron element further comprises a 5′ external duplex sequence; wherein the 3′ enhanced intron element further comprises a 3′ external duplex sequence. In some embodiments, the 5′ external duplex sequence and 3′ external duplex sequence are fully or partially complementary to each other. In some embodiments, the 5′ external duplex sequence comprises fully synthetic or partially synthetic nucleotides. In some embodiments, the 3′ external duplex sequence comprises fully synthetic or partially synthetic nucleotides. In some embodiments, the 3′ external duplex sequence is about 6 to about 50 nucleotides. In some embodiments, the 5′ external duplex sequence is about 6 to about 50 nucleotides.

[0042] In some embodiments, the 5′ enhanced exon element further comprises a 5′ internal duplex sequence; wherein the 3′ enhanced exon element further comprises a 3′ internal duplex sequence. In some embodiments, the 5′ internal duplex sequence and 3′ internal duplex sequence are fully or partially complementary to each other. In some embodiments, the 5′ internal duplex sequence comprises fully synthetic or partially synthetic nucleotides. In some embodiments, the 3′ internal duplex sequence comprises fully synthetic or partially synthetic nucleotides. In some embodiments, the 3′ internal duplex sequence is about 6 to about 19 nucleotides. In some embodiments, the 5′ internal duplex sequence is about 6 to about 19 nucleotides.

[0043] In some embodiments, the 3′ enhanced intron fragment comprises in the following order: a. a 5′ intron fragment including the second nucleotide of a 5′ group I intron splice site dinucleotide; b. a 3′ external spacer sequence; and c. a 3′ affinity sequence.

[0044] In some embodiments, the 3′ enhanced intron fragment comprises in the following order: a. a 5′ intron fragment including the first and second nucleotide of a 5′ group I intron splice site dinucleotide; b. a 3′ external spacer sequence; and c. a 3′ affinity sequence, wherein the 3′ enhanced exon element comprises a 5′ exon fragment lacking the first nucleotide of a 5′ group I intron splice site dinucleotide.

[0045] In some embodiments, a provided precursor RNA polynucleotide comprises in the following order: a. a leading untranslated sequence; b. a 5′ affinity sequence; c. 5′ external duplex sequence; d. 5′ spacer sequence; e. 3′ intron fragment; f. 3′ exon fragment; g. 5′ internal duplex sequence; h. 5′ internal spacer sequence; i. a translation initiation element; j. a coding element; k. a termination sequence; 1. a 3′ internal spacer sequence; m. a 3′ internal duplex sequence; n. a 5′ exon fragment; o. a 5′ intron fragment; p. a 3′ external duplex sequence; q. a 3′ affinity sequence; and r. a trailing untranslated sequence.

[0046] In some embodiments, a provided precursor RNA polynucleotide comprises in the following order: a. a leading untranslated sequence; b. a 5′ affinity sequence; c. a 5′ external spacer sequence; d. a 3′ intron fragment; e. a 3′ exon fragment; f. a 5′ internal duplex sequence; g. a 5′ internal spacer sequence; h. a noncoding element; i. a 3′ internal spacer sequence; j. a 3′ internal duplex sequence; k. a 5′ exon fragment; 1. a 5′ intron fragment; m. a 3′ external spacer sequence; n. a 3′ affinity sequence; and o. a trailing untranslated sequence.

[0047] In some embodiments, a provided precursor RNA polynucleotide comprises in the following order: a. a leading untranslated sequence; b. a 5′ affinity sequence; c. a 5′ external spacer sequence; d. a 3′ intron fragment; e. a 3′ exon fragment; f. a 5′ internal duplex sequence; g. a 5′ internal spacer sequence; h. a translation initiation element; i. a coding element; j. a termination sequence; k. a 3′ internal spacer sequence; 1. a 3′ internal duplex sequence; m. a 5′ exon fragment; n. a 5′ intron fragment; o. a 3′ external spacer sequence; and p. a 3′ affinity sequence.

[0048] In some embodiments, a provided precursor RNA polynucleotide comprises in the following order: a. a leading untranslated sequence; b. a 5′ affinity sequence; c. a 5′ external spacer sequence; d. a 3′ intron fragment; e. a 3′ exon fragment; f. a 5′ internal spacer sequence; g. a translation initiation element; h. a coding element; i. a termination sequence; j. a 3′ internal spacer sequence; k. a 5′ exon fragment; 1. a 5′ intron fragment; m. a 3′ external spacer sequence; and n. a 3′ affinity sequence.

[0049] In some embodiments, a provided precursor RNA polynucleotide comprises in the following order: a. a leading untranslated sequence; b. a 5′ affinity sequence; c. a 5′ external spacer sequence; d. a 3′ intron fragment; e. a 3′ exon fragment; f. a 5′ internal spacer sequence; g. a noncoding element; h. a 3′ internal spacer sequence; i. a 5′ exon fragment; j. a 5′ intron fragment; k. a 3′ external spacer sequence; 1. a 3′ affinity sequence; and m. a trailing untranslated sequence.

[0050] In some embodiments, a provided precursor RNA polynucleotide comprises in the following order: a. a leading untranslated sequence; b. a 5′ affinity sequence; c. 5′ external duplex sequence; d. 5′ spacer sequence; e. 3′ intron fragment; f. 3′ exon fragment; g. 5′ internal duplex sequence; h. 5′ internal spacer sequence; i. a termination sequence; j. a coding element; k. a translation initiation element; 1. a 3′ internal spacer sequence; m. a 3′ internal duplex sequence; n. a 5′ exon fragment; o. a 5′ intron fragment; p. a 3′ external duplex sequence; q. a 3′ affinity sequence; and r. a trailing untranslated sequence.

[0051] In some embodiments, the coding element comprises two or more protein coding regions. In some embodiments, the precursor RNA polynucleotide comprises a polynucleotide sequence encoding a proteolytic cleavage site or a ribosomal stuttering element between the first and second expression sequence. In some embodiments, the ribosomal stuttering element is a self-cleaving spacer. In some embodiments, the precursor RNA polynucleotide comprises a polynucleotide sequence encoding 2A ribosomal stuttering peptide.

[0052] In some embodiments, the core functional element comprises two or more internal ribosome entry sites (IRESs). In some embodiments, the core functional element comprises a TIE, a coding element, a termination sequence, optionally a spacer, a TIE, a coding element, and a termination sequence, wherein the TIE comprises an IRES.

[0053] Also provided herein are circular RNA polynucleotides produced from the precursor RNA polynucleotides provided herein. In some embodiments, the precursor RNA polynucleotide is transcribed from a vector or DNA comprising a PCR product, a linearized plasmid, non-linearized plasmid, linearized minicircle, a non-linearized minicircle, viral vector, cosmid, ceDNA, or an artificial chromosome. In some embodiments, the circular RNA polynucleotide consists of natural nucleotides. In some embodiments, the protein coding or non-coding sequence is codon optimized. In some embodiments, the circular RNA polynucleotide is from about 0.1 to about 15 kilobases in length. In some embodiments, the circular RNA polynucleotide is optimized to lack at least one microRNA binding site present in an equivalent pre-optimized polynucleotide. In some embodiments, the circular RNA polynucleotide is optimized to lack at least one RNA-editing susceptible site present in an equivalent pre-optimized polynucleotide. In some embodiments, the circular RNA polynucleotide has an in vivo duration of therapeutic effect in humans of at least 20 hours. In some embodiments, the circular RNA polynucleotide has a functional half-life of at least 6 hours. In some embodiments, the circular RNA polynucleotide has a duration of therapeutic effect in a human cell greater than or equal to that of an equivalent linear RNA polynucleotide comprising the same expression sequence. In some embodiments, the circular RNA polynucleotide has an in vivo duration of therapeutic effect in human greater than that of an equivalent linear RNA polynucleotide having the same expression sequence.

[0054] Also provided herein is a method of making a translation initiation element (TIE) comprising: a. obtaining a viral untranslated region (UTR); b. determining the functional unit of the UTR capable of binding to an initiation factor and/or initiating translation by progressively deleting sequence; c. removing non-functional units of the UTR; and optionally, modifying the ends of the UTR. In some embodiments, the modification of the ends of the UTR is about 1 percent to 75% of the viral UTR. In some embodiments, the functional unit of UTR is determined by deletion scanning from the 5′ and 3′ ends of the UTR or mutational scanning across the length of the UTR to identify important regions.

[0055] Also provided herein is a pharmaceutical composition comprising a circular RNA polynucleotide provided herein, a nanoparticle, and optionally, a targeting moiety operably connected to the nanoparticle. In some embodiments, the nanoparticle is a lipid nanoparticle, a core-shell nanoparticle, a biodegradable nanoparticle, a biodegradable lipid nanoparticle, a polymer nanoparticle, a polyplex or a biodegradable polymer nanoparticle. In some embodiments, the pharmaceutical composition comprises a targeting moiety, wherein the targeting moiety mediates receptor-mediated endocytosis, endosome fusion, or direct fusion into selected cells of a selected cell population or tissue in the absence of cell isolation or purification. In some embodiments, the pharmaceutical composition comprises a targeting moiety operably connected to the nanoparticle. In some embodiments, the targeting moiety is a small molecule, scFv, nanobody, peptide, cyclic peptide, di or tri cyclic peptide, minibody, polynucleotide aptamer, engineered scaffold protein, heavy chain variable region, light chain variable region, or a fragment thereof. In some embodiments, less than 1%, by weight, of the polynucleotides in the composition are double stranded RNA, DNA splints, DNA template, or triphosphorylated RNA. In some embodiments, less than 1%, by weight, of the polynucleotides and proteins in the pharmaceutical composition are double stranded RNA, DNA splints, DNA template, triphosphorylated RNA, phosphatase proteins, protein ligases, RNA polymerases, and capping enzymes.

[0056] Also provided herein is a pharmaceutical composition comprising a circular RNA polynucleotide provided herein and a liposome, dendrimer, carbohydrate carrier, glycan nanomaterial, fusome, exosome, or a combination thereof.

[0057] Also provided herein is a pharmaceutical composition a circular RNA polynucleotide provided herein and a pharmaceutical salt, buffer, diluent or combination thereof.

[0058] Also provided herein is a method of treating a subject in need thereof comprising administering a therapeutically effective amount of a composition comprising the circular RNA polynucleotide provided herein, a nanoparticle, and optionally, a targeting moiety operably connected to the nanoparticle. In some embodiments, the targeting moiety is a small molecule, scFv, nanobody, peptide, cyclic peptide, di or tri cyclic peptide, minibody, heavy chain variable region, engineered scaffold protein, light chain variable region or fragment thereof. In some embodiments, the nanoparticle is a lipid nanoparticle, a core-shell nanoparticle, or a biodegradable nanoparticle. In some embodiments, the nanoparticle comprises one or more cationic lipids, ionizable lipids, or poly β-amino esters. In some embodiments, the nanoparticle comprises one or more non-cationic lipids. In some embodiments, the nanoparticle comprises one or more PEG-modified lipids, polyglutamic acid lipids, or hyaluronic acid lipids. In some embodiments, the nanoparticle comprises cholesterol. In some embodiments, the nanoparticle comprises arachidonic acid, leukotriene, or oleic acid. In some embodiments, the composition comprises a targeting moiety, wherein the targeting moiety mediates receptor-mediated endocytosis selectively into cells of a selected cell population in the absence of cell selection or purification. In some embodiments, the nanoparticle comprises more than one circular RNA polynucleotide. In some embodiments, the subject has a cancer selected from the group consisting of: acute myeloid leukemia (AML); alveolar rhabdomyosarcoma; B cell malignancies; bladder cancer (e.g., bladder carcinoma); bone cancer; brain cancer (e.g., medulloblastoma and glioblastoma multiforme); breast cancer; cancer of the anus, anal canal, or anorectum; cancer of the eye; cancer of the intrahepatic bile duct; cancer of the joints; cancer of the neck; gallbladder cancer; cancer of the pleura; cancer of the nose, nasal cavity, or middle ear; cancer of the oral cavity; cancer of the vulva; chronic lymphocytic leukemia; chronic myeloid cancer; colon cancer; esophageal cancer, cervical cancer; fibrosarcoma; gastrointestinal carcinoid tumor; head and neck cancer (e.g., head and neck squamous cell carcinoma); Hodgkin lymphoma; hypopharynx cancer; kidney cancer; larynx cancer; leukemia; liquid tumors; lipoma; liver cancer; lung cancer (e.g., non-small cell lung carcinoma, lung adenocarcinoma, and small cell lung carcinoma); lymphoma; mesothelioma; mastocytoma; melanoma; multiple myeloma; nasopharynx cancer; non-Hodgkin lymphoma; B-chronic lymphocytic leukemia; hairy cell leukemia; Burkitt's lymphoma; ovarian cancer; pancreatic cancer; cancer of the peritoneum; cancer of the omentum; mesentery cancer; pharynx cancer; prostate cancer; rectal cancer; renal cancer; skin cancer; small intestine cancer; soft tissue cancer; solid tumors; synovial sarcoma; gastric cancer; teratoma; testicular cancer; thyroid cancer; and ureter cancer. In some embodiments, the subject has an autoimmune disorder selected from scleroderma, Grave's disease, Crohn's disease, Sjogren's disease, multiple sclerosis, Hashimoto's disease, psoriasis, myasthenia gravis, autoimmune polyendocrinopathy syndromes, Type I diabetes mellitus (TIDM), autoimmune gastritis, autoimmune uveoretinitis, polymyositis, colitis, thyroiditis, and the generalized autoimmune diseases typified by human Lupus.

[0059] Also provided herein is a eukaryotic cell comprising a circular RNA polynucleotide or pharmaceutical composition provided herein. In some embodiments, the eukaryotic cell is a human cell. In some embodiments, the eukaryotic cell is an immune cell. In some embodiments, the eukaryotic cell is a T cell, dendritic cell, macrophage, B cell, neutrophil, or basophil.

[0060] Also provided herein is a prokaryotic cell comprising a circular RNA polynucleotide provided herein.

[0061] In another aspect, provided herein are methods of purifying circular RNA, comprising hybridizing an oligonucleotide conjugated to a solid surface with an affinity sequence.

[0062] In some embodiments, one or more copies of the affinity sequence is present in a precursor RNA. In some embodiments, the precursor RNA is the precursor described herein. In some embodiments, the circular RNA is the circular RNA described herein. In some embodiments, the affinity sequence is removed during formation of the circular RNA. In some embodiments, the method comprises separating the circular RNA from the precursor RNA.

[0063] In some embodiments, the affinity sequence comprises a polyA sequence. In some embodiments, the oligonucleotide that hybridizes to the affinity sequence is a deoxythymidine oligonucleotide. In some embodiments, the affinity sequence comprises a dedicated binding site (DBS). In some embodiments, the DBS comprises the nucleotide sequence of: of TATAATTCTACCCTATTGAGGCATTGACTA (SEQ ID NO: 3269). In some embodiments, the oligonucleotide that hybridizes to the affinity sequence comprises a sequence complementary to the DBS.

[0064] In another aspect, provided herein are methods of purifying circular RNA comprising: a. contacting a composition comprising linear RNA and circular RNA with a binding agent that preferentially binds to the linear RNA over the circular RNA; and b. separating RNA bound to the binding agent from RNA that is not bound to the binding agent.

[0065] In some embodiments, the binding agent is conjugated to a solid support. In some embodiments, the solid support comprises agarose, an agarose-derived resin, cellulose, a cellulose fiber, a magnetic bead, a high throughput microtiter plate, a non-agarose resin, a glass surface, a polymer surface, or a combination thereof. In some embodiments, the solid support comprises agarose or cellulose.

[0066] In some embodiments, the binding agent comprises an oligonucleotide that is complementary to a sequence present in the linear RNA and absent from the circular RNA. In some embodiments, the binding agent comprises an oligonucleotide that is 100% complementary to a sequence present in the linear RNA and absent from the circular RNA. In some embodiments, the sequence present in the linear RNA and absent from the circular RNA is an affinity sequence. In some embodiments, the sequence present in the linear RNA and absent from the circular RNA comprises a polyA sequence. In some embodiments, the binding agent comprises an oligonucleotide comprising a poly-deoxythymidine sequence. In some embodiments, the sequence present in the linear RNA and absent from the circular RNA comprises a DBS sequence. In some embodiments, the DBS sequence comprises the nucleotide sequence of: of TATAATTCTACCCTATTGAGGCATTGACTA (SEQ ID NO: 3269). In some embodiments, the sequence present in the linear RNA and absent from the circular RNA is 10-150 nucleotides in length. In some embodiments, the sequence present in the linear RNA and absent from the circular RNA is 10-70 nucleotides in length. In some embodiments, the sequence present in the linear RNA and absent from the circular RNA is 20-30 nucleotides in length. In some embodiments, the sequence present in the linear RNA and absent from the circular RNA is present at two locations in the linear RNA. In some embodiments, the sequence present in the linear RNA and absent from the circular RNA is encoded into the linear RNA during transcription of the linear RNA. In some embodiments, the sequence present in the linear RNA and absent from the circular RNA is enzymatically added to the linear RNA. In some embodiments, the linear RNA does not comprise a methylguanylate cap. In some embodiments, the linear RNA comprises a precursor RNA or a fragment thereof.

[0067] In some embodiments, the precursor RNA is the precursor RNA described herein or a fragment thereof. In some embodiments, the precursor RNA is produced using in vitro transcription (IVT). In some embodiments, the fragment comprises an intron. In some embodiments, the linear RNA comprises a prematurely terminated RNA or RNA formed by abortive transcription.

[0068] In some embodiments, the circular RNA comprises the circular RNA described herein. In some embodiments, the circular RNA is produced using a method comprising splicing the precursor RNA. In some embodiments, the sequence present in the linear RNA and absent from the circular RNA is excised during the splicing. In some embodiments, the circular RNA is less than 6 kilobases in size.

[0069] In some embodiments, the separating comprises removing the unbound RNA from the solid support. In some embodiments, the removing comprises eluting the unbound RNA from the solid support.

[0070] In some embodiments, the method comprises heating the composition. In some embodiments, the method comprises buffer exchange. In some embodiments, buffer exchange is performed before the contacting. In some embodiments, buffer exchange is performed after the separating. In some embodiments, buffer exchange is performed before the contacting, and the resulting buffer comprises greater than 1 mM monovalent salt. In some embodiments, the monovalent salt is NaCl or KCl. In some embodiments, the resulting buffer comprises Tris. In some embodiments, the resulting buffer comprises EDTA. In some embodiments, buffer exchange is performed after the separating into storage buffer, wherein the storage buffer comprises 1 mM sodium citrate, pH 6.5. In some embodiments, the method comprises filtering the circular RNA after the separating.

### BRIEF DESCRIPTION OF THE DRAWINGS

[0071] FIG. 1 depicts luminescence in supernatants of HEK293 (FIGS. 1A, 1D, and 1E), HepG2 (FIG. 1B), or 1C1C7 (FIG. 1C) cells 24 hours after transfection with circular RNA comprising a Gaussia luciferase expression sequence and various IRES sequences.

[0072] FIG. 2 depicts luminescence in supernatants of HEK293 (FIG. 2A), HepG2 (FIG. 2B), or 1C1C7 (FIG. 2C) cells 24 hours after transfection with circular RNA comprising a Gaussia luciferase expression sequence and various IRES sequences having different lengths.

[0073] FIG. 3 depicts stability of select IRES constructs in HepG2 (FIG. 3A) or 1C1C7 (FIG. 3B) cells over 3 days as measured by luminescence.

[0074] FIGS. 4A and 4B depict protein expression from select IRES constructs in Jurkat cells, as measured by luminescence from secreted Gaussia luciferase in cell supernatants.

[0075] FIGS. 5A and 5B depict stability of select IRES constructs in Jurkat cells over 3 days as measured by luminescence.

[0076] FIG. 6 depicts comparisons of 24 hour luminescence (FIG. 6A) or relative luminescence over 3 days (FIG. 6B) of modified linear, unpurified circular, or purified circular RNA encoding Gaussia luciferase.

[0077] FIG. 7 depicts transcript induction of IFNγ (FIG. 7A), IL-6 (FIG. 7B), IL-2 (FIG. 7C), RIG-I (FIG. 7D), IFN-β1 (FIG. 7E), and TNFα (FIG. 7F) after electroporation of Jurkat cells with modified linear, unpurified circular, or purified circular RNA.

[0078] FIG. 8 depicts a comparison of luminescence of circular RNA and modified linear RNA encoding Gaussia luciferase in human primary monocytes (FIG. 8A) and macrophages (FIG. 8B and FIG. 8C).

[0079] FIG. 9 depicts relative luminescence over 3 days (FIG. 9A) in supernatant of primary T cells after transduction with circular RNA comprising a Gaussia luciferase expression sequence and varying IRES sequences or 24 hour luminescence (FIG. 9B).

[0080] FIG. 10 depicts 24 hour luminescence in supernatant of primary T cells (FIG. 10A) after transduction with circular RNA or modified linear RNA comprising a gaussia luciferase expression sequence, or relative luminescence over 3 days (FIG. 10B), and 24 hour luminescence in PBMCs (FIG. 10C).

[0081] FIG. 11 depicts HPLC chromatograms (FIG. 11A) and circularization efficiencies (FIG. 111B) of RNA constructs having different permutation sites.

[0082] FIG. 12 depicts HPLC chromatograms (FIG. 12A) and circularization efficiencies (FIG. 12B) of RNA constructs having different introns and/or permutation sites.

[0083] FIG. 13 depicts HPLC chromatograms (FIG. 13A) and circularization efficiencies (FIG. 13B) of 3 RNA constructs with or without homology arms.

[0084] FIG. 14 depicts circularization efficiencies of 3 RNA constructs without homology arms or with homology arms having various lengths and GC content.

[0085] FIGS. 15A and 15B depict HPLC chromatograms showing the contribution of strong homology arms to improved splicing efficiency, the relationship between circularization efficiency and nicking in select constructs, and combinations of permutations sites and homology arms hypothesized to demonstrate improved circularization efficiency.

[0086] FIG. 16 shows fluorescent images of T cells mock electroporated (left) or electroporated with circular RNA encoding a CAR (right) in co-cultured with Raji cells expressing GFP and firefly luciferase.

[0087] FIG. 17 shows bright field (left), fluorescent (center), and overlay (right) images of T cells mock electroporated (top) or electroporated with circular RNA encoding a CAR (bottom) and co-cultured with Raji cells expressing GFP and firefly luciferase.

[0088] FIG. 18 depicts specific lysis of Raji target cells by T cells mock electroporated or electroporated with circular RNA encoding different CAR sequences.

[0089] FIG. 19 depicts luminescence in supernatants of Jurkat cells (left) or resting primary human CD3+ T cells (right) 24 hours after transduction with linear or circular RNA comprising a Gaussia luciferase expression sequence and varying IRES sequences (FIG. 19A), and relative luminescence over 3 days (FIG. 19B).

[0090] FIG. 20 depicts transcript induction of IFN-β1 (FIG. 20A), RIG-I (FIG. 20B), IL-2 (FIG. 20C), IL-6 (FIG. 20D), IFNγ (FIG. 20E), and TNFα (FIG. 20F) after electroporation of human CD3+ T cells with modified linear, unpurified circular, or purified circular RNA.

[0091] FIG. 21 depicts specific lysis of Raji target cells by human primary CD3+ T cells electroporated with circRNA encoding a CAR as determined by detection of firefly luminescence (FIG. 21A), and IFNγ transcript induction 24 hours after electroporation with different quantities of circular or linear RNA encoding a CAR sequence (FIG. 21B).

[0092] FIG. 22 depicts specific lysis of target or non-target cells by human primary CD3+ T cells electroporated with circular or linear RNA encoding a CAR at different E:T ratios (FIG. 22A and FIG. 22B) as determined by detection of firefly luminescence.

[0093] FIG. 23 depicts specific lysis of target cells by human CD3+ T cells electroporated with RNA encoding a CAR at 1, 3, 5, and 7 days post electroporation.

[0094] FIG. 24 depicts specific lysis of target cells by human CD3+ T cells electroporated with circular RNA encoding a CD19 or BCMA targeted CAR.

[0095] FIG. 25 depicts total Flux of organs harvested from CD-1 mice dosed with circular RNA encoding FLuc and formulated with 50% Lipid 10b-15, 10% DSPC, 1.5% PEG-DMG, and 38.5% cholesterol.

[0096] FIG. 26 shows images highlighting the luminescence of organs harvested from CD-1 mice dosed with circular RNA encoding FLuc and formulated with 50% Lipid 10b-15, 10% DSPC, 1.5% PEG-DMG, and 38.5% cholesterol.

[0097] FIG. 27 depicts molecular characterization of Lipids 10a-26 and 10a-27. FIG. 27A shows the proton nuclear magnetic resonance (NMR) spectrum of Lipid 10a-26. FIG. 27B shows the retention time of Lipid 10a-26 measured by liquid chromatography-mass spectrometry (LC-MS). FIG. 27C shows the mass spectrum of Lipid 10a-26. FIG. 27D shows the proton NMR spectrum of Lipid 10a-27. FIG. 27E shows the retention time of Lipid 10a-27 measured by LC-MS. FIG. 27F shows the mass spectrum of Lipid 10a-27.

[0098] FIG. 28 depicts molecular characterization of Lipid 22-S14 and its synthetic intermediates. FIG. 28A depicts the NMR spectrum of 2-(tetradecylthio)ethan-1-ol. FIG. 28B depicts the NMR spectrum of 2-(tetradecylthio)ethyl acrylate. FIG. 28C depicts the NMR spectrum of bis(2-(tetradecylthio)ethyl) 3,3′-((3-(2-methyl-1H-imidazol-1-yl)propyl)azanediyl)dipropionate (Lipid 22-S14).

[0099] FIG. 29 depicts the NMR spectrum of bis(2-(tetradecylthio)ethyl) 3,3′-((3-(1H-imidazol-1-yl)propyl)azanediyl)dipropionate (Lipid 93-S14).

[0100] FIG. 30 depicts molecular characterization of heptadecan-9-yl 8-((3-(2-methyl-1H-imidazol-1-yl)propyl)(8-(nonyloxy)-8-oxooctyl)amino)octanoate (Lipid 10a-54). FIG. 30A shows the proton NMR spectrum of Lipid 10a-54. FIG. 30B shows the retention time of Lipid 10a-54measured by LC-MS. FIG. 30C shows the mass spectrum of Lipid 10a-54.

[0101] FIG. 31 depicts molecular characterization of heptadecan-9-yl 8-((3-(1H-imidazol-1-yl)propyl)(8-(nonyloxy)-8-oxooctyl)amino)octanoate (Lipid 10a-53). FIG. 31A shows the proton NMR spectrum of Lipid 10a-53. FIG. 31B shows the retention time of Lipid 10a-53 measured by LC-MS. FIG. 31C shows the mass spectrum of Lipid 10a-53.

[0102] FIG. 32A depicts total flux of spleen and liver harvested from CD-1 mice dosed with circular RNA encoding firefly luciferase (FLuc) and formulated with ionizable lipid of interest, DSPC, cholesterol, and DSPE-PEG 2000 (Avanti Polar Lipids Inc.) at a weight ratio of 16:1:4:1 or 62:4:33:1 molar ratio. FIG. 32B depicts average radiance for biodistribution of protein expression.

[0103] FIG. 33A depicts images highlighting the luminescence of organs harvested from CD-1 mice dosed with circular RNA encoding FLuc and formulated with ionizable Lipid 22-S14, DSPC, cholesterol, and DSPE-PEG 2000 (Avanti Polar Lipids Inc.) at a weight ratio of 16:1:4:1 or 62:4:33:1 molar ratio. FIG. 33B depicts whole body IVIS images of CD-1 mice dosed with circular RNA encoding FLuc and formulated with ionizable Lipid 22-S14, DSPC, cholesterol, and DSPE-PEG 2000 (Avanti Polar Lipids Inc.) at a weight ratio of 16:1:4:1 or 62:4:33:1 molar ratio.

[0104] FIG. 34A depicts images highlighting the luminescence of organs harvested from CD-1 mice dosed with circular RNA encoding FLuc and formulated with ionizable Lipid 93-S14, DSPC, cholesterol, and DSPE-PEG 2000 (Avanti Polar Lipids Inc.) at a weight ratio of 16:1:4:1 or 62:4:33:1 molar ratio. FIG. 34B depicts whole body IVIS images of CD-1 mice dosed with circular RNA encoding FLuc and formulated with ionizable Lipid 93-S14, DSPC, cholesterol, and DSPE-PEG 2000 (Avanti Polar Lipids Inc.) at a weight ratio of 16:1:4:1 or 62:4:33:1 molar ratio.

[0105] FIG. 35A depicts images highlighting the luminescence of organs harvested from CD-1 mice dosed with circular RNA encoding FLuc and formulated with ionizable Lipid 10a-26, DSPC, cholesterol, and DSPE-PEG 2000 (Avanti Polar Lipids Inc.) at a weight ratio of 16:1:4:1 or 62:4:33:1 molar ratio. FIG. 35B depicts whole body IVIS images of CD-1 mice dosed with circular RNA encoding FLuc and formulated with ionizable Lipid 10a-26, DSPC, cholesterol, and DSPE-PEG 2000 (Avanti Polar Lipids Inc.) at a weight ratio of 16:1:4:1 or 62:4:33:1 molar ratio.

[0106] FIG. 36 depicts images highlighting the luminescence of organs harvested from c57BL/6J mice dosed with circular RNA encoding FLuc and encapsulated in lipid nanoparticles formed with Lipid 10b-15 (FIG. 36A), Lipid 10a-53 (FIG. 36B), or Lipid 10a-54 (FIG. 36C). PBS was used as control (FIG. 36D).

[0107] FIGS. 37A and 37B depict relative luminescence in the lysates of human PBMCs after 24-hour incubation with testing lipid nanoparticles containing circular RNA encoding firefly luciferase.

[0108] FIG. 38 shows the expression of GFP (FIG. 38A) and CD19 CAR (FIG. 38B) in human PBMCs after incubating with testing lipid nanoparticle containing circular RNA encoding either GFP or CD19 CAR.

[0109] FIG. 39 depicts the expression of an anti-murine CD19 CAR in 1C1C7 cells lipotransfected with circular RNA comprising an anti-murine CD19 CAR expression sequence and varying IRES sequences.

[0110] FIG. 40 shows the cytotoxicity of an anti-murine CD19 CAR to murine T cells. The CD19 CAR is encoded by and expressed from a circular RNA, which is electroporated into the murine T cells.

[0111] FIG. 41 depicts the B cell counts in peripheral blood (FIGS. 41A and 41B) or spleen (FIG. 41C) in C57BL/6J mice injected every other day with testing lipid nanoparticles encapsulating a circular RNA encoding an anti-murine CD19 CAR.

[0112] FIGS. 42A and 42B compares the expression level of an anti-human CD19 CAR expressed from a circular RNA with that expressed from a linear mRNA.

[0113] FIGS. 43A and 43B compares the cytotoxic effect of an anti-human CD19 CAR expressed from a circular RNA with that expressed from a linear mRNA

[0114] FIG. 44 depicts the cytotoxicity of two CARs (anti-human CD19 CAR and anti-human BCMA CAR) expressed from a single circular RNA in T cells.

[0115] FIG. 45A shows representative FACS plots with frequencies of tdTomato expression in various spleen immune cell subsets following treatment with LNPs formed with Lipid 10a-27 or 10a-26 or Lipid 10b-15. FIG. 45B shows the quantification of the proportion of myeloid cells, B cells, and T cells expressing tdTomato (mean+std. dev., n=3), equivalent to the proportion of each cell population successfully transfected with Cre circular RNA. FIG. 45C illustrates the proportion of additional splenic immune cell populations, including NK cells, classical monocytes, nonclassical monocytes, neutrophils, and dendritic cells, expressing tdTomato after treatment with Lipids 27 and 26 (mean+std. dev., n=3).

[0116] FIG. 46A depicts an exemplary RNA construct design with built-in polyA sequences in the introns. FIG. 46B shows the chromatography trace of unpurified circular RNA. FIG. 46C shows the chromatography trace of affinity-purified circular RNA. FIG. 46D shows the immunogenicity of the circular RNAs prepared with varying in vitro transcription (IVT) conditions and purification methods. (Commercial=commercial IVT mix; Custom=customerized IVT mix; Aff=affinity purification; Enz=enzyme purification; GMP:GTP ratio=8, 12.5, or 13.75).

[0117] FIG. 47A depicts an exemplary RNA construct design with a dedicated binding sequence of TATAATTCTACCCTATTGAGGCATTGACTA (SEQ ID NO: 3269) as an alternative to polyA for hybridization purification. FIG. 47B shows the chromatography trace of unpurified circular RNA. FIG. 46C shows the chromatography trace of affinity-purified circular RNA.

[0118] FIG. 48A shows the chromatography trace of unpurified circular RNA encoding dystrophin. FIG. 48B shows the chromatography trace of enzyme-purified circular RNA encoding dystrophin.

[0119] FIG. 49 compares the expression (FIG. 49A) and stability (FIG. 49B) of purified circRNAs with different 5′ spacers between the 3′ intron fragment/5′ internal duplex region and the IRES in Jurkat cells. (AC=only A and C were used in the spacer sequence; UC=only U and C were used in the spacer sequence.)

[0120] FIG. 50 shows luminescence expression levels and stability of expression in primary T cells from circular RNAs containing the original or modified IRES elements indicated.

[0121] FIG. 51 shows luminescence expression levels and stability of expression in HepG2 cells from circular RNAs containing the original or modified IRES elements indicated.

[0122] FIG. 52 shows luminescence expression levels and stability of expression in 1C1C7 cells from circular RNAs containing the original or modified IRES elements indicated.

[0123] FIG. 53 shows luminescence expression levels and stability of expression in HepG2 cells from circular RNAs containing IRES elements with untranslated regions (UTRs) inserted or hybrid IRES elements. “Scr” means Scrambled, which was used as a control.

[0124] FIG. 54 shows luminescence expression levels and stability of expression in 1C1C7 cells from circular RNAs containing an IRES and variable stop codon cassettes operably linked to a gaussia luciferase coding sequence.

[0125] FIG. 55 shows luminescence expression levels and stability of expression in 1C1C7 cells from circular RNAs containing an IRES and variable untranslated regions (UTRs) inserted before the start codon of a gaussian luciferase coding sequence.

[0126] FIG. 56 shows expression levels of human erythropoietin (hEPO) in Huh7 cells from circular RNAs containing two miR-122 target sites downstream from the hEPO coding sequence.

[0127] FIG. 57 shows luminescence expression levels in SupT1 cells (from a human T cell tumor line) and MV4-11 cells (from a human macrophage line) from LNPs transfected with circular RNAs encoding for Firefly luciferase in vitro.

[0128] FIG. 58 shows a comparison of transfected primary human T cells LNPs containing circular RNAs dependency of ApoE based on the different helper lipid, PEG lipid, and ionizable lipid:phosphate ratio formulations.

[0129] FIG. 59 shows uptake of LNP containing circular RNAs encoding eGFP into activated primary human T cells with or without the aid of ApoE3.

[0130] FIG. 60 shows immune cell expression from a LNP containing circular RNA encoding for a Cre fluorescent protein in a Cre reporter mouse model.

[0131] FIG. 61 shows immune cell expression of mOX40L in wildtype mice following intravenous injection of LNPs that have been transfected with circular RNAs encoding mOX40L.

[0132] FIG. 62 shows single dose of mOX40L in LNPs transfected with circular RNAs capable of expressing mOX40L. FIGS. 62A and 62B provide percent of mOX40L expression in splenic T cells, CD4+ T cells, CD8+ T cells, B cells, NK cells, dendritic cells, and other myloid cells.

[0133] FIG. 62C provides mouse weight change 24 hours after transfection.

[0134] FIG. 63 shows B cell depletion of LNPs transfected intravenously with circular RNAs in mice. FIG. 63A quantifies B cell depletion through B220+ B cells of live, CD45+ immune cells and FIG. 63B compares B cell depletion of B220+ B cells of live, CD45+ immune cells in comparison to luciferase expressing circular RNAs. FIG. 63C provides B cell weight gain of the transfected cells.

[0135] FIG. 64 shows CAR expression levels in the peripheral blood (FIG. 64A) and spleen (FIG. 64B) when treated with LNP encapsulating circular RNA that expresses anti-CD19 CAR. Anti-CD20 (aCD20) and circular RNA encoding luciferase (oLuc) were used for comparison.

[0136] FIG. 65 shows the overall frequency of anti-CD19 CAR expression, the frequency of anti-CD19 CAR expression on the surface of cells and effect on anti-tumor response of IRES specific circular RNA encoding anti-CD19 CARs on T-cells. FIG. 65A shows anti-CD19 CAR geometric mean florescence intensity, FIG. 65B shows percentage of anti-CD19 CAR expression, and FIG. 65C shows the percentage target cell lysis performed by the anti-CD19 CAR. (CK=Caprine Kobuvirus; AP=Apodemus Picornavirus; CK*=Caprine Kobuvirus with codon optimization; PV=Parabovirus; SV=Salivirus.)

[0137] FIG. 66 shows CAR expression levels of A20 FLuc target cells when treated with IRES specific circular RNA constructs.

[0138] FIG. 67 shows luminescence expression levels for cytosolic (FIG. 67A) and surface (FIG. 67B) proteins from circular RNA in primary human T-cells.

[0139] FIG. 68 shows luminescence expression in human T-cells when treated with IRES specific circular constructs. Expression in circular RNA constructs were compared to linear mRNA. FIG. 68A, FIG. 68B, and FIG. 68G provide Gaussia luciferase expression in multiple donor cells. FIG. 68C, FIG. 68D, FIG. 68E, and FIG. 68F provides firefly luciferase expression in multiple donor cells.

[0140] FIG. 69 shows anti-CD19 CAR (FIG. 69A and FIG. 69B) and anti-BCMA CAR (FIG. 68B) expression in human T-cells following treatment of a lipid nanoparticle encompassing a circular RNA that encodes either an anti-CD19 or anti-BCMA CAR to a firefly luciferase expressing K562 cell.

[0141] FIG. 70 shows anti-CD19 CAR expression levels resulting from delivery via electroporation in vitro of a circular RNA encoding an anti-CD19 CAR in a specific antigen-dependent manner. FIG. 70A shows Nalm6 cell lysing with an anti-CD19 CAR. FIG. 70B shows K562 cell lysing with an anti-CD19 CAR.

[0142] FIG. 71 shows transfection of LNP mediated by use of ApoE3 in solutions containing LNP and circular RNA expressing green fluorescence protein (GFP). FIG. 71A showed the live-dead results. FIG. 71B, FIG. 71C, FIG. 71D, and FIG. 71E provide the frequency of expression for multiple donors.

[0143] FIG. 72A, FIG. 72B, FIG. 72C, FIG. 72D, FIG. 72E, FIG. 72F, FIG. 72G, FIG. 72H, FIG. 72I, FIG. 72J, FIG. 72K, and FIG. 72L show total flux and precent expression for varying lipid formulations. See Example 74.

[0144] FIG. 73 shows circularization efficiency of an RNA molecule encoding a stabilized (double proline mutant) SARS-CoV2 spike protein. FIG. 73A shows the in vitro transcription product of the ˜4.5kb SARS-CoV2 spike-encoding circRNA. FIG. 73B shows a histogram of spike protein surface expression via flow cytometry after transfection of spike-encoding circRNA into 293 cells. Transfected 293 cells were stained 24 hours after transfection with CR3022 primary antibody and APC-labeled secondary antibody. FIG. 73C shows a flow cytometry plot of spike protein surface expression on 293 cells after transfection of spike-encoding circRNA. Transfected 293 cells were stained 24 hours after transfection with CR3022 primary antibody and APC-labeled secondary antibody.

[0145] FIG. 74 provides multiple controlled adjuvant strategies. CircRNA as indicated on the figure entails an unpurified sense circular RNA splicing reaction using GTP as an indicator molecule in vitro. 3p-circRNA entails a purified sense circular RNA as well as a purified antisense circular RNA mixed containing triphosphorylated 5′ termini. FIG. 74A shows IFN-β Induction in vitro in wild type and MAVS knockout A549 cells and FIG. 74B shows in vivo cytokine response to formulated circRNA generated using the indicated strategy.

[0146] FIG. 75 illustrates an intramuscular delivery of LNP containing circular RNA constructs.

[0147] FIG. 75A provides a live whole body flux post a 6 hour period and 75B provides whole body IVIS 6 hours following a 1 μg dose of the LNP-circular RNA construct. FIG. 75C provides an ex vivo expression distribution over a 24-hour period.

[0148] FIG. 76 illustrates expression of multiple circular RNAs from a single lipid formulation.

[0149] FIG. 76A provides hEPO titers from a single and mixed set of LNP containing circular RNA constructs, while FIG. 76B provides total flux of bioluminescence expression from single or mixed set of LNP containing circular RNA constructs.

[0150] FIG. 77 illustrates SARS-CoV2 spike protein expression of circular RNA encoding spike SARS-CoV2 proteins. FIG. 77A shows frequency of spike CoV2 expression; FIG. 77B shows geometric mean fluorescence intensity (gMFI) of the spike CoV2 expression; and FIG. 77C compares gMFI expression of the construct to the frequency of expression.

[0151] FIG. 78 depicts a general sequence construct of a linear RNA polynucleotide precursor (10). The sequence as provided is illustrated in a 5′ to 3′ order of a 5′ enhanced intron element (20), a 5′ enhanced exon element (30), a core functional element (40), a 3′ enhanced exon element (50) and a 3′ enhanced intron element (60).

[0152] FIG. 79 depicts various exemplary iterations of the 5′ enhanced exon element (20). As illustrated, one iteration of the 5′ enhanced exon element (20) comprises in a 5′ to 3′ order in the following order: a leading untranslated sequence (21), a 5′ affinity tag (22), a 5′ external duplex region (24), a 5′ external spacer (26), and a 3′ intron fragment (28).

[0153] FIG. 80 depicts various exemplary iterations of the 5′ enhanced exon element (30). As illustrated, one iteration of the 5′ enhanced exon element (30) comprises in a 5′ to 3′ order: a 3′ exon fragment (32), a 5′ internal duplex region (34), and a 5′ internal spacer (36).

[0154] FIG. 81 depicts various exemplary iterations of the core functional element (40). As illustrated, one iteration of the core functional element (40) comprises a TIE (42), a coding region (46) and a stop region (e.g., a stop codon or stop cassette) (48). Another iteration is illustrated to show the core functional element (47) comprising a noncoding region (47).

[0155] FIG. 82 depicts various exemplary iterations of the 3′ enhanced exon element (50). As illustrated, one of the iterations of the 3′ enhanced exon element (50) comprises, in the following 5′ to 3′ order: a 3′ internal spacer (52), a 3′ internal duplex region (54), and a 5′ exon fragment (56).

[0156] FIG. 83 depicts various exemplary iterations of the 3′ enhanced intron element (60). As illustrated, one of the iterations of the 3′ enhanced intron element (60) comprises, in the following order, a 5′ intron fragment (62), a 3′ external spacer (64), a 3′ external duplex region (66), a 3′ affinity tag (68) and a terminal untranslated sequence (69).

[0157] FIG. 84 depicts various exemplary iterations a translation initiation element (TIE) (42). TIE (42) sequence as illustrated in one iteration is solely an IRES (43). In another iteration, the TIE (42) is an aptamer (44). In two different iterations, the TIE (42) is an aptamer (44) and IRES (43) combination. In another iteration, the TIE (42) is an aptamer complex (45).

[0158] FIG. 85 illustrates an exemplary linear RNA polynucleotide precursor (10) comprising in the following 5′ to 3′ order, a leading untranslated sequence (21), a 5′ affinity tag (22), a 5′ external duplex region (24), a 5′ external spacer (26), a 3′ intron fragment (28), a 3′ exon fragment (32), a 5′ internal duplex region (34), a 5′ internal spacer (36), a TIE (42), a coding element (46), a stop region (48), a 3′ internal spacer (52), a 3′ internal duplex region (54), a 5′ exon fragment (56), a 5′ intron fragment (62), a 3′ external spacer (64), a 3′ external duplex region (66), a 3′ affinity tag (68) and a terminal untranslated sequence (69).

[0159] FIG. 86 illustrates an exemplary linear RNA polynucleotide precursor (10) comprising in the following 5′ to 3′ order, a leading untranslated sequence (21), a 5′ affinity tag (22), a 5′ external duplex region (24), a 5′ external spacer (26), a 3′ intron fragment (28), a 3′ exon fragment (32), a 5′ internal duplex region (34), a 5′ internal spacer (36), a coding element (46), a stop region (48), a TIE (42), a 3′ internal spacer (52), a 3′ internal duplex region (54), a 5′ exon fragment (56), a 5′ intron fragment (62), a 3′ external spacer (64), a 3′ external duplex region (66), a 3′ affinity tag (68) and a terminal untranslated sequence (69).

[0160] FIG. 87 illustrates an exemplary linear RNA polynucleotide precursor (10) comprising in the following 5′ to 3′ order, a leading untranslated sequence (21), a 5′ affinity tag (22), a 5′ external duplex region (24), a 5′ external spacer (26), a 3′ intron fragment (28), a 3′ exon fragment (32), a 5′ internal duplex region (34), a 5′ internal spacer (36), a noncoding element (47), a 3′ internal spacer (52), a 3′ internal duplex region (54), a 5′ exon fragment (56), a 5′ intron fragment (62), a 3′ external spacer (64), a 3′ external duplex region (66), a 3′ affinity tag (68) and a terminal untranslated sequence (69).

[0161] FIG. 88 illustrates the general circular RNA (8) structure formed post splicing. The circular RNA as depicted includes a 5′ exon element (30), a core functional element (40) and a 3′ exon element (50).

[0162] FIG. 89 illustrates the various ways an accessory element (70) (e.g., a miRNA binding site) may be included in a linear RNA polynucleotide. FIG. 89A shows a linear RNA polynucleotide comprising an accessory element (70) at the spacer regions. FIG. 89B shows a linear RNA polynucleotide comprising an accessory element (70) located between each of the external duplex regions and the exon fragments. FIG. 89C depicts an accessory element (70) within a spacer. FIG. 89D illustrates various iterations of an accessory element (70) located within the core functional element. FIG. 89E illustrates an accessory element (70) located within an internal ribosome entry site (IRES).

[0163] FIG. 90 illustrates a screening of a LNP formulated with circular RNA encoding firefly luciferase and having a TIE in primary human (FIG. 90A), mouse (FIG. 90B), and cynomolgus monkey (FIG. 90C) hepatocyte with varying dosages in vitro.

[0164] FIG. 91A-C illustrates a screening of a LNP formulated with circular RNA encoding firefly luciferase and having a TIE, in primary human hepatocyte from three different donors with varying dosages in vitro.

[0165] FIG. 92 illustrates in vitro expression of LNP formulated with circular RNA encoding for GFP and having a TIE, in HeLa, HEK293, and HUH7 human cell models.

[0166] FIG. 93 illustrates in vitro expression of LNP formulated with circular RNAs encoding a GFO protein and having a TIE, in primary human hepatocytes.

[0167] FIG. 94 illustrates in vitro expression of circular RNA encoding firefly luciferase and having a TIE, in mouse myoblast (FIG. 94A) and primary human muscle myoblast (FIG. 94B) cells.

[0168] FIG. 95 illustrates in vitro expression of circular RNA encoding for firefly luciferase and having a TIE, in myoblasts and differentiated primary human skeletal muscle myotubes. FIG. 95A provides the data related to cells received from human donor 1; FIG. 95B provides the data related to cell received from human donor 2.

[0169] FIG. 96 illustrates cell-free in vitro translation of circular RNA of variable sizes. In FIG. 96A circular RNA encoding for firefly luciferase and linear mRNA encoding for firefly luciferase was tested for expression. In FIG. 96B, human and mouse cells were given circular RNAs encoding for ATP7B proteins. Some of the circular RNAs tested were codon optimized. Circular RNA expressing firefly luciferase was used for comparison.

[0170] FIG. 97 shows an exemplary RNA circularization process. The schematic shown in FIG. 97A depicts an autocatalytic circularization process. Briefly, precursor RNA molecules containing intron segments and accessory elements that enhance circularization efficiency undergo splicing, resulting in a synthetic circular RNA and two excised intron/accessory sequence segments (spliced out intron segments/fragments). Some circularized RNA (oRNA) is nicked during synthesis. FIG. 97B shows an exemplary chromatogram showing peak residence of different species after size exclusion HPLC analysis.

[0171] FIG. 98 depicts an exemplary negative selection purification method for circular RNA molecules such as oRNA. Oligonucleotides that are complementary to sequences present in the precursor RNA (such as the intron segments or external accessory regions) but not the oRNA are bound to a solid support, such as a bead. oRNA preparations are washed over the bead; precursor RNA, partially spliced RNA, incomplete transcripts, and post-splicing intron segments bind to the oligonucleotide under certain buffer conditions while oRNA and nicked oRNA flow through. Flowthrough is collected for further processing.

[0172] FIG. 99A and FIG. 99B depict an exemplary negative selection purification method for circular RNA molecule such as oRNA. The schematic shown in FIG. 99A depicts enzymatic polyadenylation of in vitro transcription reaction products containing oRNA and linear RNA, resulting in polyadenylation of only the linear RNA. The mixture of linear and circular RNA is washed over beads conjugated to deoxythymidine oligonucleotides (“Oligo dT”) under specific buffer conditions. Polyadenylated linear RNA anneals to the beads while oRNA flows through for collection. FIG. 99B shows exemplary SEC-HPLC chromatograms of in vitro transcription (IVT) reaction products prior to polyadenylation and purification (left panel) and of the eluant following polyadenylation using E. coli polyA polymerase and purification with oligo-dT beads in binding buffer (right panel).

[0173] FIG. 100A and FIG. 100B depict an exemplary circular RNA enzymatic purification method. In this method, oRNA is synthesized by IVT in the presence of excess GMP and is autocatalytically spliced during the process. The resulting reaction products are digested with Xrn1 (a 5′ to 3′ exonuclease requiring a 5′ terminal monophosphate) and RNase R (a 3′ to 5′ exonuclease) to remove non-circular RNA molecules. FIG. 100A shows such Xrn1 and RNaseR digestion of linear RNA. FIG. 100B shows exemplary SEC-HPLC chromatograms of IVT reaction products prior to enzymatic digestion (left pane) and of the final, enzymatically purified material (right panel).

[0174] FIG. 101A and FIG. 101B show induction of RIG-1 and IFNB1 RNA expression, markers of immune stimulation, following transfection of the cells with the various RNA preparations indicated. All RNA preparations except for the commerically available 3phpRNA were produced using in vitro transcription and circularization of RNA comprising an Anabaena permuted intron, GLuc reading frame, strong homology arms, 5′ and 3′ spacers, and a CVB3 IRES. RIG-1 and IFNB1 RNA expression was measured using RT-qPCR. In FIG. 101, “IVT” indicates an unpurified reaction mixture; “+GMP” indicates an unpurified reaction mixture in which the in vitro transcription was performed in the presence of 12.5-fold GMP relative to GTP; “+HPLC” indicates a reaction mixture purified by HPLC; “+HPLC/GMP” indicates a reaction mixture purified by HPLC in which the in vitro transcription was performed in the presence of 12.5-fold GMP relative to GTP; “3phpRNA” indicates a positive control comprising a triphosphate hairpin RNA (tIrl-hprna, Invivogen); and “mock” indicates a preparation containing no RNA. FIG. 101A shows immune stimulation of HeLa cells, and FIG. 101B shows immune stimulation of A594 cells.

[0175] FIG. 102A and FIG. 102B shows anti-CD19 CAR expression levels resulting from in vitro delivery via electroporation of various circular RNA encoding chimeric antigen receptors in human T cells. FIG. 102A provides representative dot plots from FACs analysis of human T cell expression of CD19-41BBζ, CD19-CD28ζ, HER2-41BBζ, and HER2-CD28ζ CARs. FIG. 102B depicts cumulative data for the MFI of CD19-41BBζ, CD19-CD28ζ, HER2-41BBζ, and HER2-CD28ζ expression collected via fluorescence-activated cell sorting (FACS).

[0176] FIGS. 103A-103C illustrate cytotoxic response to tumor cells upon electroporation of T cells with circular RNA encoding CD19-41BBζ and CD19-CD28ζ and subsequent co-culture with tumor cells. FIG. 103A provides the % specific lysis of tumor cells after coculture with T cells expressing oRNA encoding CD19-41BBζ, CD19-CD28ζ, HER2-41BBζ, and HER2-CD28ζ CARs in comparison to T cells expressing a circular RNA encoding mOX40L. FIGS. 103B and 103C depict IFN-g and IL-2 cytokine in pg/mL, respectively, secreted by T cells expressing the listed oRNA as compared to a circular RNA encoding mOX40L after co-cultured with tumor cells.

[0177] FIG. 104A and FIG. 104B show in vivo mOX40L expression in the splenic and peripheral blood T cells of humanized mice following intravenous administration of LNP formulated with circular RNAs encoding mOX40L. LNPs were formulated with either PBS (indicated as “vehicle” in said figure), or LNP-oRNA constructs formulated with lipid 10b-15 (Table 10b, Lipid 15), 10a-27 (Table 10a, Lipid 27), or 10a-26 (Table 10a, Lipid 26). FIG. 104A depicts mOX40L detection in T cells in the spleen of the humanized mice. FIG. 104B depicts mOX40L detection in T cells in the peripheral blood of the humanized mice.

[0178] FIG. 105 illustrates B cell aplasia in humanized mice after intravenous administration of LNP formulated with circular RNA encoding anti-CD19 chimeric antigen receptor (CAR). Representative FACS dot plots from the peripheral blood of untreated animals (left) and treated animals (right) show the percentage of B cells post 6 days from intravenous administration.

[0179] FIG. 106A and FIG. 106B show % killing of Nalm6 tumor cells after co-culture with LNP-oRNA encoding CAR or control (FIG. 106A) and chimeric antigen receptor (CAR) surface expression (FIG. 106B) following in vitro transfection of LNP-circular RNA (oRNA) encoding CD19-41BBζ or CD19-CD28ζ CARs. FIG. 106A illustrates killing of Nalm6 tumor cells after co-culture of T cells transfected with LNP-oRNA constructs encoding CARs of CD19-41BBζ and CD19-CD28ζ CARs along with HER2-41BBz, HER2-CD28z, or the control LNP-oRNA mOX40L. FIG. 106B provides mean fluorescence intensity (MFI) of the CAR surface expression on T cells treated with the LNP-oRNA CAR constructs.

[0180] FIG. 107 depicts antigen-dependent tumor regression measured by total flux (in photons/sec) following dosing of mice with either PBS, PBMC, LNP-oRNA encoding for mOx40L, LNP-oRNA encoding for CD19-41BBζ (“CD19-41BBζ isCAR”), oRNA encoding for and CD19-CD28ζ (“CD19-CD28ζ isCAR”), LNP-oRNA encoding for HER2-41BBz CAR (“HER2-41BBz isCAR”), or LNP-oRNA encoding for HER2-CD28z CAR (“HER2-CD28z isCAR”). PBS and PBMC solutions lacking oRNAs were used as negative control.

[0181] FIG. 108A, FIG. 108B, and FIG. 108C depict the correlation between IRES activities in myotubes and hepatocytes or myotubes and T cells. Each data point indicates the mean expression value of a circular RNA containing a IRES in front of a Gaussia luciferase coding region, wherein each IRES comprises a sequence selected from SEQ ID NOs: 1-2983 and 3282-3287 or a fragment thereof. Circular RNAs containing the IRESs were synthesized in an array format and formulated into LNPs before being transfected into activated primary human T cells, primary human myotubes, and primary human hepatocytes. All data points are normalized to a positive control IRES (SEQ ID NO: 3282).

[0182] FIG. 109A, FIG. 109B, and FIG. 109C depict IRES activities in hepatocytes (FIG. 109A), myotubes (FIG. 109B), and T cells (FIG. 109C) relative to IRESs commonly used (EMCV, CVB3). Each data point indicates the mean expression value of a circular RNA containing a IRES in front of a Gaussia luciferase coding region, wherein each IRES comprises a sequence selected from SEQ ID NOs: 1-2983 and 3282-3287 or a fragment thereof. Circular RNAs containing the IRESs were synthesized in an array format and formulated into LNPs before being transfected into activated primary human T cells, primary human myotubes, and primary human hepatocytes. All data points are normalized to a positive control IRES (SEQ ID NO: 3282).

### DETAILED DESCRIPTION

[0183] The present invention provides, among other things, methods and compositions for treating an autoimmune disorder, deficiency disease, or cancer based on circular RNA therapy. In particular, the present invention provides methods for treating an autoimmune disorder, deficiency disease, or cancer by administering to a subject in need of treatment a composition comprising a circular RNA encoding at least one therapeutic protein at an effective dose and an administration interval such that at least one symptom or feature of the relevant disease or disorder is reduced in intensity, severity, or frequency or is delayed in onset.

[0184] As disclosed herein, the improved circular RNA therapy, along with associated compositions and methods, allows for increased circular RNA stability, expression, and prolonged half-life, among other things. In some embodiments, the inventive circular RNA is transcribed from a linear RNA polynucleotide construct comprising enhanced intron elements, enhanced exon elements, and a core functional element. The enhanced intron element, in some embodiments, comprises post splicing group I intron fragments, spacers, duplex sequences, affinity sequences, and unique untranslated sequences that allows for optimal circularization. In some embodiments, the enhanced exon element comprises an exon fragment, spacers and duplex sequences to aid with the circularization process and for maintaining stability of the circular RNA post circularization. Within the same embodiments, the core functional element includes the essential elements for protein translation of a translation initiation element (TIE), a coding or noncoding element, and a termination sequence (e.g., a stop codon or stop cassette). Together, the enhanced intron elements, enhanced exon elements, and core functional element comprising a coding element provides an optimal circular RNA polynucleotide for encoding a therapeutic protein. In one embodiment, the enhanced intron elements, enhanced exon elements, and core functional element comprising a noncoding element provides an optimal circular RNA polynucleotide for triggering an immune system as an adjuvant.

[0185] Also disclosed herein is a DNA template (e.g., a vector) for making circular RNA. In some embodiments, the DNA template comprises a 3′ enhanced intron fragment, a 3′ enhanced exon fragment, a core functional element, a 5′ enhanced exon fragment, and a 5′ enhanced intron fragment. In some embodiments, these elements are positioned in the DNA template in the above order.

[0186] Additional embodiments include circular RNA polynucleotides, including circular RNA polynucleotides (e.g., a circular RNA comprising 3′ enhanced exon element, a core functional element, and a 5′ enhanced exon element) made using the DNA template provided herein, compositions comprising such circular RNA, cells comprising such circular RNA, methods of using and making such DNA template, circular RNA, compositions and cells.

[0187] In some embodiments, provided herein are methods comprising administration of circular RNA polynucleotides provided herein into cells for therapy or production of useful proteins. In some embodiments, the method is advantageous in providing the production of a desired polypeptide inside eukaryotic cells with a longer half-life than linear RNA, due to the resistance of the circular RNA to ribonucleases.

[0188] Circular RNA polynucleotides lack the free ends necessary for exonuclease-mediated degradation, causing them to be resistant to several mechanisms of RNA degradation and granting extended half-lives when compared to an equivalent linear RNA. Circularization may allow for the stabilization of RNA polynucleotides that generally suffer from short half-lives and may improve the overall efficacy of exogenous mRNA in a variety of applications. In an embodiment, the functional half-life of the circular RNA polynucleotides provided herein in eukaryotic cells (e.g., mammalian cells, such as human cells) as assessed by protein synthesis is at least 20 hours (e.g., at least 80 hours).

[0189] Various aspects of the invention are described in detail in the following sections. The use of sections is not meant to limit the invention. Each section can apply to any aspect of the invention. In this application, the use of “or” means “and/or” unless stated otherwise.

### 1. Definitions

[0190] Linear nucleic acid molecules are said to have a “5′-terminus” (or “5′ end”) and a “3′-terminus” (or “3′ end”) because nucleic acid phosphodiester linkages occur at the 5′ carbon and 3′ carbon of the sugar moieties of the substituent mononucleotides. The end nucleotide of a polynucleotide at which a new linkage would be to a 5′ carbon is its 5′ terminal nucleotide. The end nucleotide of a polynucleotide at which a new linkage would be to a 3′ carbon is its 3′ terminal nucleotide. A “terminal nucleotide,” as used herein, is the nucleotide at the end position of the 3′- or 5′-terminus.

[0191] As used herein, the term “3′ group I intron fragment” refers to a sequence with 75% or higher similarity to the 3′-proximal end of a natural group I intron including the splice site dinucleotide and optionally a stretch of natural exon sequence. As used herein, the term “5′ group I intron fragment” refers to a sequence with 75% or higher similarity to the 5′-proximal end of a natural group I intron including the splice site dinucleotide and optionally a stretch of natural exon sequence. As used herein, the term “permutation site” refers to the site in a group I intron where a cut is made prior to permutation of the intron. This cut generates 3′ and 5′ group I intron fragments that are permuted to be on either side of a stretch of precursor RNA to be circularized.

[0192] As used herein, the singular forms “a,” “an,” and “the” include plural referents unless the content clearly dictates otherwise. Thus, for example, reference to “a cell” includes combinations of two or more cells, or entire cultures of cells; reference to “a polynucleotide” includes, as a practical matter, many copies of that polynucleotide.

[0193] Unless specifically stated or obvious from context, as used herein, the term “about,” is understood as within a range of normal tolerance in the art, for example within 2 standard deviations of the mean. “About” can be understood as within 10%, 9%, 8%, 7%, 6%, 5%, 4%, 3%, 2%, 1%, 0.9%, 0.8%, 0.7%, 0.6%, 0.5%, 0.4%, 0.3%, 0.2%, 0.1%, 0.09%, 0.08%, 0.07%, 0.06%, 0.05%, 0.04%, 0.03%, 0.02%, or 0.01% of the stated value. Unless otherwise clear from the context, all numerical values provided herein are modified by the term “about.”

[0194] As used herein, an “affinity sequence” or “affinity tag” is a region of a polynucleotide sequence ranging from one (1) nucleotide to hundreds or thousands of nucleotides containing a repeated set of nucleotides for the purposes of aiding purification of a polynucleotide sequence. For example, an affinity sequence may comprise, but is not limited to, a polyA or polyAC sequence. In some embodiments, affinity tags are used in purification methods, referred to herein as “affinity-purification,” in which selective binding of a binding agent to molecules comprising an affinity tag facilitates separation from molecules that do not comprise an affinity tag. In some embodiments, an affinity-purification method is a “negative selection” purification method, in which unwanted species, such as linear RNA, are selectively bound and removed and wanted species, such as circular RNA, are eluted and separated from unwanted species.

[0195] An “anti-tumor effect” as used herein, refers to a biological effect that may present as a decrease in tumor volume, a decrease in the number of tumor cells, a decrease in tumor cell proliferation, a decrease in the number of metastases, an increase in overall or progression-free survival, an increase in life expectancy, or amelioration of various physiological symptoms associated with the tumor. An anti-tumor effect may also refer to the prevention of the occurrence of a tumor, e.g., a vaccine.

[0196] An “antigen” refers to any molecule that provokes an immune response or is capable of being bound by an antibody or an antigen binding molecule. The immune response may involve either antibody production, or the activation of specific immunologically-competent cells, or both. A person of skill in the art would readily understand that any macromolecule, including virtually all proteins or peptides, may serve as an antigen. An antigen may be endogenously expressed, i.e. expressed by genomic DNA, or may be recombinantly expressed. An antigen may be specific to a certain tissue, such as a cancer cell, or it may be broadly expressed. In addition, fragments of larger molecules may act as antigens. In some embodiments, antigens are tumor antigens.

[0197] An “antigen binding molecule,” “antigen binding portion,” or “antibody fragment” refers to any molecule that specifically binds to a desired antigen. In some embodiments, an antigen binding molecule comprises the antigen binding parts (e.g., CDRs) of an antibody or antibody-like molecule. An antigen binding molecule may include the antigenic complementarity determining regions (CDRs). Examples of antibody fragments include, but are not limited to, Fab, Fab′, F(ab′)2, Fv fragments, dAb, linear antibodies, scFv antibodies, and multispecific antibodies formed from antigen binding molecules. Peptibodies (i.e. Fc fusion molecules comprising peptide binding domains) are another example of suitable antigen binding molecules. In some embodiments, the antigen binding molecule binds to an antigen on a tumor cell. In some embodiments, the antigen binding molecule binds to an antigen on a cell involved in a hyperproliferative disease or to a viral or bacterial antigen. In some embodiments, the antigen binding molecule binds to BCMA. In further embodiments, the antigen binding molecule is an antibody fragment, including one or more of the complementarity determining regions (CDRs) thereof, that specifically binds to the antigen. In further embodiments, the antigen binding molecule is a single chain variable fragment (scFv). In some embodiments, the antigen binding molecule comprises or consists of avimers.

[0198] The term “antibody” (Ab) includes, without limitation, a glycoprotein immunoglobulin which binds specifically to an antigen. In general, an antibody may comprise at least two heavy (H) chains and two light (L) chains interconnected by disulfide bonds, or an antigen-binding molecule thereof. Each H chain may comprise a heavy chain variable region (abbreviated herein as VH) and a heavy chain constant region. The heavy chain constant region can comprise three constant domains, CH1, CH2 and CH3. Each light chain can comprise a light chain variable region (abbreviated herein as VL) and a light chain constant region. The light chain constant region can comprise one constant domain, CL. The VH and VL regions may be further subdivided into regions of hypervariability, termed complementarity determining regions (CDRs), interspersed with regions that are more conserved, termed framework regions (FR). Each VH and VL may comprise three CDRs and four FRs, arranged from amino-terminus to carboxy-terminus in the following order: FR1, CDR1, FR2, CDR2, FR3, CDR3, and FR4. The variable regions of the heavy and light chains contain a binding domain that interacts with an antigen. The constant regions of the Abs may mediate the binding of the immunoglobulin to host tissues or factors, including various cells of the immune system (e.g., effector cells) and the first component of the classical complement system. Antibodies may include, for example, monoclonal antibodies, recombinantly produced antibodies, monospecific antibodies, multispecific antibodies (including bispecific antibodies), human antibodies, engineered antibodies, humanized antibodies, chimeric antibodies, immunoglobulins, synthetic antibodies, tetrameric antibodies comprising two heavy chain and two light chain molecules, an antibody light chain monomer, an antibody heavy chain monomer, an antibody light chain dimer, an antibody heavy chain dimer, an antibody light chain-antibody heavy chain pair, intrabodies, antibody fusions (sometimes referred to herein as “antibody conjugates”), heteroconjugate antibodies, single domain antibodies, monovalent antibodies, single chain antibodies or single-chain variable fragments (scFv), camelized antibodies, affybodies, Fab fragments, F(ab′)2 fragments, disulfide-linked variable fragments (sdFv), anti-idiotypic (anti-id) antibodies (including, e.g., anti-anti-Id antibodies), minibodies, domain antibodies, synthetic antibodies (sometimes referred to herein as “antibody mimetics”), and antigen-binding fragments of any of the above. In some embodiments, antibodies described herein refer to polyclonal antibody populations.

[0199] An immunoglobulin may derive from any of the commonly known isotypes, including but not limited to IgA, secretory IgA, IgG and IgM. IgG subclasses are also well known to those in the art and include but are not limited to human IgG1, IgG2, IgG3 and IgG4. “Isotype” refers to the Ab class or subclass (e.g., IgM or IgG1) that is encoded by the heavy chain constant region genes. The term “antibody” includes, by way of example, both naturally occurring and non-naturally occurring Abs; monoclonal and polyclonal Abs; chimeric and humanized Abs; human or nonhuman Abs; wholly synthetic Abs; and single chain Abs. A nonhuman Ab may be humanized by recombinant methods to reduce its immunogenicity in humans. Where not expressly stated, and unless the context indicates otherwise, the term “antibody” also includes an antigen-binding fragment or an antigen-binding portion of any of the aforementioned immunoglobulins, and includes a monovalent and a divalent fragment or portion, and a single chain Ab.

[0200] A number of definitions of the CDRs are commonly in use: Kabat numbering, Chothia numbering, AbM numbering, or contact numbering. The AbM definition is a compromise between the two used by Oxford Molecular's AbM antibody modelling software. The contact definition is based on an analysis of the available complex crystal structures. The term “Kabat numbering” and like terms are recognized in the art and refer to a system of numbering amino acid residues in the heavy and light chain variable regions of an antibody, or an antigen-binding molecule thereof. In certain aspects, the CDRs of an antibody may be determined according to the Kabat numbering system (see, e.g., Kabat EA & Wu TT (1971) Ann NY Acad Sci 190: 382-391 and Kabat E A et al., (1991) Sequences of Proteins of Immunological Interest, Fifth Edition, U.S. Department of Health and Human Services, NIH Publication No. 91-3242). Using the Kabat numbering system, CDRs within an antibody heavy chain molecule are typically present at amino acid positions 31 to 35, which optionally may include one or two additional amino acids, following 35 (referred to in the Kabat numbering scheme as 35A and 35B) (CDR1), amino acid positions 50 to 65 (CDR2), and amino acid positions 95 to 102 (CDR3). Using the Kabat numbering system, CDRs within an antibody light chain molecule are typically present at amino acid positions 24 to 34 (CDR1), amino acid positions 50 to 56 (CDR2), and amino acid positions 89 to 97 (CDR3). In a specific embodiment, the CDRs of the antibodies described herein have been determined according to the Kabat numbering scheme. In certain aspects, the CDRs of an antibody may be determined according to the Chothia numbering scheme, which refers to the location of immunoglobulin structural loops (see, e.g., Chothia C & Lesk A M, (1987), J Mol Biol 196: 901-917; A1-Lazikani B et al, (1997) J Mol Biol 273: 927-948; Chothia C et al., (1992) J Mol Biol 227: 799-817; Tramontano A et al, (1990) J Mol Biol 215(1): 175-82; and U.S. Pat. No. 7,709,226). Typically, when using the Kabat numbering convention, the Chothia CDR-H1 loop is present at heavy chain amino acids 26 to 32, 33, or 34, the Chothia CDR-H2 loop is present at heavy chain amino acids 52 to 56, and the Chothia CDR-H3 loop is present at heavy chain amino acids 95 to 102, while the Chothia CDR-L1 loop is present at light chain amino acids 24 to 34, the Chothia CDR-L2 loop is present at light chain amino acids 50 to 56, and the Chothia CDR-L3 loop is present at light chain amino acids 89 to 97. The end of the Chothia CDR-HI loop when numbered using the Kabat numbering convention varies between H32 and H34 depending on the length of the loop (this is because the Kabat numbering scheme places the insertions at H35A and H35B; if neither 35A nor 35B is present, the loop ends at 32; if only 35A is present, the loop ends at 33; if both 35A and 35B are present, the loop ends at 34). In a specific embodiment, the CDRs of the antibodies described herein have been determined according to the Chothia numbering scheme.

[0201] As used herein, the term “variable region” or “variable domain” is used interchangeably and are common in the art. The variable region typically refers to a portion of an antibody, generally, a portion of a light or heavy chain, typically about the amino-terminal 110 to 120 amino acids in the mature heavy chain and about 90 to 115 amino acids in the mature light chain, which differ extensively in sequence among antibodies and are used in the binding and specificity of a particular antibody for its particular antigen. The variability in sequence is concentrated in those regions called complementarity determining regions (CDRs) while the more highly conserved regions in the variable domain are called framework regions (FR). Without wishing to be bound by any particular mechanism or theory, it is believed that the CDRs of the light and heavy chains are primarily responsible for the interaction and specificity of the antibody with antigen. In some embodiments, the variable region is a human variable region. In some embodiments, the variable region comprises rodent or murine CDRs and human framework regions (FRs). In particular embodiments, the variable region is a primate (e.g., non-human primate) variable region. In some embodiments, the variable region comprises rodent or murine CDRs and primate (e.g., non-human primate) framework regions (FRs). The terms “VL” and “VL domain” are used interchangeably to refer to the light chain variable region of an antibody or an antigen-binding molecule thereof. The terms “VH” and “VH domain” are used interchangeably to refer to the heavy chain variable region of an antibody or an antigen-binding molecule thereof.

[0202] As used herein, the terms “constant region” and “constant domain” are interchangeable and have a meaning common in the art. The constant region is an antibody portion, e.g., a carboxyl terminal portion of a light and/or heavy chain which is not directly involved in binding of an antibody to antigen but which may exhibit various effector functions, such as interaction with the Fc receptor. The constant region of an immunoglobulin molecule generally has a more conserved amino acid sequence relative to an immunoglobulin variable domain.

[0203] As used herein, “aptamer” refers in general to either an oligonucleotide of a single defined sequence or a mixture of said nucleotides, wherein the mixture retains the properties of binding specifically to the target molecule (e.g., eukaryotic initiation factor, 40S ribosome, polyC binding protein, polyA binding protein, polypyrimidine tract-binding protein, argonaute protein family, Heterogeneous nuclear ribonucleoprotein K and La and related RNA-binding protein). Thus, as used herein “aptamer” denotes both singular and plural sequences of nucleotides, as defined hereinabove. The term “aptamer” is meant to refer to a single- or double-stranded nucleic acid which is capable of binding to a protein or other molecule. In general, aptamers preferably comprise about 10 to about 100 nucleotides, preferably about 15 to about 40 nucleotides, more preferably about 20 to about 40 nucleotides, in that oligonucleotides of a length that falls within these ranges are readily prepared by conventional techniques. Optionally, aptamers can further comprise a minimum of approximately 6 nucleotides, preferably 10, and more preferably 14 or 15 nucleotides, that are necessary to effect specific binding.

[0204] As used herein, “autoimmunity” is defined as persistent and progressive immune reactions to non-infectious self-antigens, as distinct from infectious non self-antigens from bacterial, viral, fungal, or parasitic organisms which invade and persist within mammals and humans. Autoimmune conditions include scleroderma, Grave's disease, Crohn's disease, Sjorgen's disease, multiple sclerosis, Hashimoto's disease, psoriasis, myasthenia gravis, autoimmune polyendocrinopathy syndromes, Type I diabetes mellitus (TIDM), autoimmune gastritis, autoimmune uveoretinitis, polymyositis, colitis, and thyroiditis, as well as in the generalized autoimmune diseases typified by human Lupus. “Autoantigen” or “self-antigen” as used herein refers to an antigen or epitope which is native to the mammal and which is immunogenic in said mammal.

[0205] The term “autologous” refers to any material derived from the same individual to which it is later to be re-introduced. For example, the engineered autologous cell therapy (eACT™) method described herein involves collection of lymphocytes from a patient, which are then engineered to express, e.g., a CAR construct, and then administered back to the same patient. The term “allogeneic” refers to any material derived from one individual which is then introduced to another individual of the same species, e.g., allogeneic T cell transplantation.

[0206] “Binding affinity” generally refers to the strength of the sum total of non-covalent interactions between a single binding site of a molecule (e.g., an antibody) and its binding partner (e.g., an antigen). Unless indicated otherwise, as used herein, “binding affinity” refers to intrinsic binding affinity which reflects a 1:1 interaction between members of a binding pair (e.g., antibody and antigen). The affinity of a molecule X for its partner Y may generally be represented by the dissociation constant (K_{D} or K_{d}). Affinity may be measured and/or expressed in a number of ways known in the art, including, but not limited to, equilibrium dissociation constant (K_{D}), and equilibrium association constant (K_{A} or Kₐ). The K_{D} is calculated from the quotient of k^{off}/kₒₙ, whereas K_{A} is calculated from the quotient of kₒₙ/k_{off}. kₒₙ refers to the association rate constant of, e.g., an antibody to an antigen, and k_{off} refers to the dissociation of, e.g., an antibody to an antigen. The kₒₙ and k_{off} may be determined by techniques known to one of ordinary skill in the art, such as BIACORE® or KinExA.

[0207] As used herein, the terms “immunospecifically binds,” “immunospecifically recognizes,” “specifically binds,” and “specifically recognizes” are analogous terms in the context of antibodies and refer to molecules that bind to an antigen (e.g., epitope or immune complex) as such binding is understood by one skilled in the art. For example, a molecule that specifically binds to an antigen may bind to other peptides or polypeptides, generally with lower affinity as determined by, e.g., immunoassays, BIACORE®, KinExA 3000 instrument (Sapidyne Instruments, Boise, ID), or other assays known in the art. In a specific embodiment, molecules that specifically bind to an antigen bind to the antigen with a K_{A} that is at least 2 logs, 2.5 logs, 3 logs, 4 logs or greater than the K_{A} when the molecules bind to another antigen.

[0208] As used herein, “bicistronic RNA” refers to a polynucleotide that includes two expression sequences coding for two distinct proteins. These expression sequences can be separated by a nucleotide sequence encoding a cleavable peptide such as a protease cleavage site. They can also be separated by a ribosomal skipping element.

[0209] A “cancer” refers to a broad group of various diseases characterized by the uncontrolled growth of abnormal cells in the body. Unregulated cell division and growth results in the formation of malignant tumors that invade neighboring tissues and may also metastasize to distant parts of the body through the lymphatic system or bloodstream. A “cancer” or “cancer tissue” may include a tumor. Examples of cancers that may be treated by the methods disclosed herein include, but are not limited to, cancers of the immune system including lymphoma, leukemia, myeloma, and other leukocyte malignancies. In some embodiments, the methods disclosed herein may be used to reduce the tumor size of a tumor derived from, for example, bone cancer, pancreatic cancer, skin cancer, cancer of the head or neck, cutaneous or intraocular malignant melanoma, uterine cancer, ovarian cancer, rectal cancer, cancer of the anal region, stomach cancer, testicular cancer, uterine cancer, multiple myeloma, Hodgkin's Disease, non-Hodgkin's lymphoma (NHL), primary mediastinal large B cell lymphoma (PMBC), diffuse large B cell lymphoma (DLBCL), follicular lymphoma (FL), transformed follicular lymphoma, splenic marginal zone lymphoma (SMZL), cancer of the esophagus, cancer of the small intestine, cancer of the endocrine system, cancer of the thyroid gland, cancer of the parathyroid gland, cancer of the adrenal gland, cancer of the urethra, cancer of the penis, chronic or acute leukemia, acute myeloid leukemia, chronic myeloid leukemia, acute lymphoblastic leukemia (ALL) (including non T cell ALL), chronic lymphocytic leukemia (CLL), solid tumors of childhood, lymphocytic lymphoma, cancer of the bladder, cancer of the kidney or ureter, neoplasm of the central nervous system (CNS), primary CNS lymphoma, tumor angiogenesis, spinal axis tumor, brain stem glioma, pituitary adenoma, epidermoid cancer, squamous cell cancer, T cell lymphoma, environmentally induced cancers including those induced by asbestos, other B cell malignancies, and combinations of said cancers. In some embodiments, the methods disclosed herein may be used to reduce the tumor size of a tumor derived from, for example, sarcomas and carcinomas, fibrosarcoma, myxosarcoma, liposarcoma, chondrosarcoma, osteogenic sarcoma, Kaposi's sarcoma, sarcoma of soft tissue, and other sarcomas, synovioma, mesothelioma, Ewing's tumor, leiomyosarcoma, rhabdomyosarcoma, colon carcinoma, pancreatic cancer, breast cancer, ovarian cancer, prostate cancer, hepatocellular carcinomna, lung cancer, colorectal cancer, squamous cell carcinoma, basal cell carcinoma, adenocarcinoma (for example adenocarcinoma of the pancreas, colon, ovary, lung, breast, stomach, prostate, cervix, or esophagus), sweat gland carcinoma, sebaceous gland carcinoma, papillary carcinoma, papillary adenocarcinomas, medullary carcinoma, bronchogenic carcinoma, renal cell carcinoma, hepatoma, bile duct carcinoma, choriocarcinoma, Wilms' tumor, cervical cancer, testicular tumor, bladder carcinoma, carcinoma of the fallopian tubes, carcinoma of the endometrium, carcinoma of the cervix, carcinoma of the vagina, carcinoma of the vulva, carcinoma of the renal pelvis, CNS tumors (such as a glioma, astrocytoma, medulloblastoma, craniopharyogioma, ependymoma, pinealoma, hemangioblastoma, acoustic neuroma, oligodendroglioma, menangioma, melanoma, neuroblastoma and retinoblastoma). The particular cancer may be responsive to chemo- or radiation therapy or the cancer may be refractory. A refractory cancer refers to a cancer that is not amenable to surgical intervention and the cancer is either initially unresponsive to chemo- or radiation therapy or the cancer becomes unresponsive over time.

[0210] As used herein, the terms “circRNA,” “circular polyribonucleotide,” “circular RNA,” “circularized RNA,” and “oRNA” are used interchangeably and refer to a polyribonucleotide that forms a circular structure through covalent bonds. As used herein, such terms also include preparations comprising circRNAs.

[0211] As used herein, the term “circularization efficiency” refers to a measurement of the rate of formation of amount of resultant circular polyribonucleotide as compared to its linear starting material.

[0212] The expression sequences in the polynucleotide construct may be separated by a “cleavage site” sequence which enables polypeptides encoded by the expression sequences, once translated, to be expressed separately by the cell. A “self-cleaving peptide” refers to a peptide which is translated without a peptide bond between two adjacent amino acids, or functions such that when the polypeptide comprising the proteins and the self-cleaving peptide is produced, it is immediately cleaved or separated into distinct and discrete first and second polypeptides without the need for any external cleavage activity.

[0213] As used herein, “coding element,” “coding sequence,” “coding nucleic acid,” or “coding region” is region located within the expression sequence and encodings for one or more proteins or polypeptides (e.g., therapeutic protein). As used herein, a “noncoding element,” “noncoding sequence,” “non-coding nucleic acid,” or “noncoding nucleic acid” is a region located within the expression sequence. This sequence, but itself does not encode for a protein or polypeptide, but may have other regulatory functions, including but not limited, allow the overall polynucleotide to act as a biomarker or adjuvant to a specific cell.

[0214] As used herein, a “conservative” amino acid substitution is one in which the amino acid residue is replaced with an amino acid residue having a similar side chain. Families of amino acid residues having similar side chains have been defined in the art. These families include amino acids with basic side chains (e.g., lysine, arginine, histidine), acidic side chains (e.g., aspartic acid, glutamic acid), uncharged polar side chains (e.g., glycine, asparagine, glutamine, serine, threonine, tyrosine, cysteine, tryptophan), nonpolar side chains (e.g., alanine, valine, leucine, isoleucine, proline, phenylalanine, methionine), beta-branched side chains (e.g., threonine, valine, isoleucine) and aromatic side chains (e.g., tyrosine, phenylalanine, tryptophan, histidine). In some embodiments, one or more amino acid residues within a CDR(s) or within a framework region(s) of an antibody or antigen-binding molecule thereof may be replaced with an amino acid residue with a similar side chain.

[0215] A “costimulatory ligand,” as used herein, includes a molecule on an antigen presenting cell that specifically binds a cognate co-stimulatory molecule on a T cell. Binding of the costimulatory ligand provides a signal that mediates a T cell response, including, but not limited to, proliferation, activation, differentiation, and the like. A costimulatory ligand induces a signal that is in addition to the primary signal provided by a stimulatory molecule, for instance, by binding of a T cell receptor (TCR)/CD3 complex with a major histocompatibility complex (MHC) molecule loaded with peptide. A co-stimulatory ligand may include, but is not limited to, 3/TR6,4-IBB ligand, agonist or antibody that binds Toll-like receptor, B7-1 (CD80), B7-2 (CD86), CD30 ligand, CD40, CD7, CD70, CD83, herpes virus entry mediator (HVEM), human leukocyte antigen G (HLA-G), ILT4, immunoglobulin-like transcript (ILT) 3, inducible costimulatory ligand (ICOS-L), intercellular adhesion molecule (ICAM), ligand that specifically binds with B7-H3, lymphotoxin beta receptor, MHC class I chain-related protein A (MICA), MHC class I chain-related protein B (MICB), OX40 ligand, PD-L2, or programmed death (PD) LI. A co-stimulatory ligand includes, without limitation, an antibody that specifically binds with a co-stimulatory molecule present on a T cell, such as, but not limited to, 4-1BB, B7-H3, CD2, CD27, CD28, CD30, CD40, CD7, ICOS, ligand that specifically binds with CD83, lymphocyte function- associated antigen-1 (LFA-1), natural killer cell receptor C (NKG2C), OX40, PD-1, or tumor necrosis factor superfamily member 14 (TNFSF14 or LIGHT).

[0216] A “costimulatory molecule” is a cognate binding partner on a T cell that specifically binds with a costimulatory ligand, thereby mediating a costimulatory response by the T cell, such as, but not limited to, proliferation. Costimulatory molecules include, but are not limited to, 4-1BB/CD137, B7-H3, BAFFR, BLAME (SLAMF8), BTLA, CD 33, CD 45, CD100 (SEMA4D), CD103, CD134, CD137, CD154, CD16, CD160 (BY55), CD 18, CD19, CD19a, CD2, CD22, CD247, CD27, CD276 (B7-H3), CD28, CD29, CD3 (alpha; beta; delta; epsilon; gamma; zeta), CD30, CD37, CD4, CD4, CD40, CD49a, CD49D, CD49f, CD5, CD64, CD69, CD7, CD80, CD83 ligand, CD84, CD86, CD8alpha, CD8beta, CD9, CD96 (Tactile), CD1-1a, CD1-1b, CD1-1c, CD1-1d, CDS, CEACAM1, CRT AM, DAP-10, DNAM1 (CD226), Fc gamma receptor, GADS, GITR, HVEM (LIGHTR), IA4, ICAM-1, ICAM-1, ICOS, Ig alpha (CD79a), IL2R beta, IL2R gamma, IL7R alpha, integrin, ITGA4, ITGA4, ITGA6, IT GAD, ITGAE, ITGAL, ITGAM, ITGAX, ITGB2, ITGB7, ITGB1, KIRDS2, LAT, LFA-1, LFA-1, LIGHT, LIGHT (tumor necrosis factor superfamily member 14; TNFSFi4), LTBR, Ly9 (CD229), lymphocyte function-associated antigen-1 (LFA-1 (CD1 1a/CD18), MHC class I molecule, NKG2C, NKG2D, NKp30, NKp44, NKp46, NKp80 (KLRF1), OX40, PAG/Cbp, PD-1, PSGL1, SELPLG (CD162), signaling lymphocytic activation molecule, SLAM (SLAMF1; CD150; IPO-3), SLAMF4 (CD244; 2B4), SLAMF6 (NTB-A; Lyl08), SLAMF7, SLP-76, TNF, TNFr, TNFR2, Toll ligand receptor, TRANCE/RANKL, VLA1, or VLA-6, or fragments, truncations, or combinations thereof.

[0217] A “costimulatory signal,” as used herein, refers to a signal, which in combination with a primary signal, such as TCR/CD3 ligation, leads to a T cell response, such as, but not limited to, proliferation and/or upregulation or down regulation of key molecules.

[0218] As used herein, an antigen binding molecule, an antibody, or an antigen binding molecule thereof “cross-competes” with a reference antibody or an antigen binding molecule thereof if the interaction between an antigen and the first binding molecule, an antibody, or an antigen binding molecule thereof blocks, limits, inhibits, or otherwise reduces the ability of the reference binding molecule, reference antibody, or an antigen binding molecule thereof to interact with the antigen. Cross competition may be complete, e.g., binding of the binding molecule to the antigen completely blocks the ability of the reference binding molecule to bind the antigen, or it may be partial, e.g., binding of the binding molecule to the antigen reduces the ability of the reference binding molecule to bind the antigen. In some embodiments, an antigen binding molecule that cross-competes with a reference antigen binding molecule binds the same or an overlapping epitope as the reference antigen binding molecule. In other embodiments, the antigen binding molecule that cross-competes with a reference antigen binding molecule binds a different epitope as the reference antigen binding molecule. Numerous types of competitive binding assays may be used to determine if one antigen binding molecule competes with another, for example: solid phase direct or indirect radioimmunoassay (RIA); solid phase direct or indirect enzyme immunoassay (EIA); sandwich competition assay (Stahli et al., 1983, Methods in Enzymology 9:242-253); solid phase direct biotin-avidin EIA (Kirkland et al., 1986, J. Immunol. 137:3614-3619); solid phase direct labeled assay, solid phase direct labeled sandwich assay (Harlow and Lane, 1988, Antibodies, A Laboratory Manual, Cold Spring Harbor Press); solid phase direct label RIA using 1-125 label (Morel et al., 1988, Molec. Immunol. 25:7-15); solid phase direct biotin-avidin EIA (Cheung, et al., 1990, Virology 176:546-552); and direct labeled RIA (Moldenhauer et al., 1990, Scand. J. Immunol. 32:77-82).

[0219] A “cytokine,” as used herein, refers to a non-antibody protein that is released by one cell in response to contact with a specific antigen, wherein the cytokine interacts with a second cell to mediate a response in the second cell. A cytokine may be endogenously expressed by a cell or administered to a subject. Cytokines may be released by immune cells, including macrophages, B cells, T cells, neutrophils, dendritic cells, eosinophils and mast cells to propagate an immune response. Cytokines may induce various responses in the recipient cell. Cytokines may include homeostatic cytokines, chemokines, pro- inflammatory cytokines, effectors, and acute-phase proteins. For example, homeostatic cytokines, including interleukin (IL) 7 and IL-15, promote immune cell survival and proliferation, and pro- inflammatory cytokines may promote an inflammatory response. Examples of homeostatic cytokines include, but are not limited to, IL-2, IL-4, IL-5, IL-7, IL-10, IL-12p40, IL-12p70, IL-15, and interferon (IFN) gamma. Examples of pro-inflammatory cytokines include, but are not limited to, IL-1a, IL-1b, IL-6, IL-13, IL-17a, IL-23, IL-27, tumor necrosis factor (TNF)-alpha, TNF-beta, fibroblast growth factor (FGF) 2, granulocyte macrophage colony-stimulating factor (GM-CSF), soluble intercellular adhesion molecule 1 (sICAM-1), soluble vascular adhesion molecule 1 (sVCAM-1), vascular endothelial growth factor (VEGF), VEGF-C, VEGF-D, and placental growth factor (PLGF). Examples of effectors include, but are not limited to, granzyme A, granzyme B, soluble Fas ligand (sFasL), TGF-beta, IL-35, and perforin. Examples of acute phase-proteins include, but are not limited to, C-reactive protein (CRP) and serum amyloid A (SAA).

[0220] By “co-administering” is meant administering a therapeutic agent provided herein in conjunction with one or more additional therapeutic agents sufficiently close in time such that the therapeutic agent provided herein can enhance the effect of the one or more additional therapeutic agents, or vice versa.

[0221] As used herein, the term “co-formulate” refers to a nanoparticle formulation comprising two or more nucleic acids or a nucleic acid and other active drug substance. Typically, the ratios are equimolar or defined in the ratiometric amount of the two or more nucleic acids or the nucleic acid and other active drug substance.

[0222] The terms “deoxyribonucleic acid” and “DNA” as used herein mean a polymer composed of deoxyribonucleotides. The terms “ribonucleic acid” and “RNA” as used herein mean a polymer composed of ribonucleotides.

[0223] As used herein, the term “DNA template” refers to a DNA sequence capable of transcribing a linear RNA polynucleotide. For example, but not intending to be limiting, a DNA template may include a DNA vector, PCR product or plasmid.

[0224] As used herein, the terms “duplexed,” “double-stranded,” and “hybridized” are used interchangeably and refer to double-stranded nucleic acids formed by hybridization of two single strands of nucleic acids containing complementary sequences. Sequences of the two single-stranded nucleic acids can be fully complementary or partially complementary. In some embodiments, a nucleic acid provided herein may be fully double-stranded or partially double-stranded. In most cases, genomic DNA is double-stranded.

[0225] As used herein, two “duplex sequences,” “duplex forming sequences,” “duplex region,” “duplex forming regions,” “homology arms,” or “homology regions,” complement, or are complementary, fully or partially, to one another when the two regions share a sufficient level of sequence identity to one another's reverse complement to act as substrates for a hybridization reaction. In some embodiments, two duplex forming sequences are thermodynamically favored to cross-pair in a sequence specific interaction. As used herein, polynucleotide sequences have “homology” when they are either identical or share sequence identity to a reverse complement or “complementary” sequence. The percent sequence identity between a homology region and a counterpart homology region's reverse complement can be any percent of sequence identity that allows for hybridization to occur. In some embodiments, an internal duplex forming region of a polynucleotide disclosed herein is capable of forming a duplex with another internal duplex forming region and does not form a duplex with an external duplex forming region.

[0226] As used herein, the term “encode” refers broadly to any process whereby the information in a polymeric macromolecule is used to direct the production of a second molecule that is different from the first. The second molecule may have a chemical structure that is different from the chemical nature of the first molecule. For example, a DNA template (e.g., a DNA vector) may encode a RNA polynucleotide; a precursor RNA polynucleotide (e.g., a linear precursor RNA polynucleotide) may encode a mature RNA polynucleotide (e.g., a circular RNA polynucleotide).

[0227] As used herein, “endogenous” means a substance that is native to, i.e., naturally originated from, a biological system (e.g., an organism, a tissue, or a cell). For example, in some embodiments, a “endogenous polynucleotide” is normally expressed in a cell or tissue. In some embodiments, a polynucleotide is still considered endogenous if the control sequences, such as a promoter or enhancer sequences which activate transcription or translation, have been altered through recombinant techniques. As used herein, the term “heterologous” means from any source other than naturally occurring sequences.

[0228] As used herein, an “endonuclease site” refers to a stretch of nucleotides within a polynucleotide that is capable of being recognized and cleaved by an endonuclease protein.

[0229] An “eukaryotic initiation factor” or “eIF” refers to a protein or protein complex used in assembling an initiator tRNA, 40S and 60S ribosomal subunits required for initiating eukaryotic translation.

[0230] As used herein, an “epitope” is a term in the art and refers to a localized region of an antigen to which an antibody may specifically bind. An epitope may be, for example, contiguous amino acids of a polypeptide (linear or contiguous epitope) or an epitope can, for example, come together from two or more non-contiguous regions of a polypeptide or polypeptides (conformational, non-linear, discontinuous, or non-contiguous epitope). In some embodiments, the epitope to which an antibody binds may be determined by, e.g., NMR spectroscopy, X-ray diffraction crystallography studies, ELISA assays, hydrogen/deuterium exchange coupled with mass spectrometry (e.g., liquid chromatography electrospray mass spectrometry), array-based oligo-peptide scanning assays, and/or mutagenesis mapping (e.g., site- directed mutagenesis mapping). For X-ray crystallography, crystallization may be accomplished using any of the known methods in the art (e.g., Giege R et al., (1994) Acta Crystallogr D Biol Crystallogr 50(Pt 4): 339-350; McPherson A (1990) Eur J Biochem 189: 1-23; Chayen NE (1997) Structure 5: 1269-1274; McPherson A (1976) J Biol Chem 251: 6300-6303). Antibody: antigen crystals may be studied using well known X-ray diffraction techniques and may be refined using computer software such as X- PLOR (Yale University, 1992, distributed by Molecular Simulations, Inc.; see e.g. Meth Enzymol (1985) volumes 114 & 115, eds Wyckoff H W et al.; U.S. Patent Publication No. 2004/0014194), and BUSTER (Bricogne G (1993) Acta Crystallogr D Biol Crystallogr 49(Pt 1): 37-60; Bricogne G (1997) Meth Enzymol 276A: 361-423, ed Carter C W; Roversi P et al., (2000) Acta Crystallogr D Biol Crystallogr 56(Pt 10): 1316-1323).

[0231] As used herein, the term “expression sequence” refers to a nucleic acid sequence that encodes a product, e.g., a peptide or polypeptide, regulatory nucleic acid, or non-coding nucleic acid. An exemplary expression sequence that codes for a peptide or polypeptide can comprise a plurality of nucleotide triads, each of which can code for an amino acid and is termed as a “codon.”

[0232] As used herein, a “fusion protein” is a protein with at least two domains that are encoded by separate genes that have been joined to transcribe for a single peptide.

[0233] The term “genetically engineered” or “engineered” refers to a method of modifying the genome of a cell, including, but not limited to, deleting a coding or non-coding region or a portion thereof or inserting a coding region or a portion thereof. In some embodiments, the cell that is modified is a lymphocyte, e.g., a T cell, which may either be obtained from a patient or a donor. The cell may be modified to express an exogenous construct, such as, e.g., a chimeric antigen receptor (CAR) or a T cell receptor (TCR), which is incorporated into the cell's genome.

[0234] An “immune response” refers to the action of a cell of the immune system (for example, T lymphocytes, B lymphocytes, natural killer (NK) cells, macrophages, eosinophils, mast cells, dendritic cells and neutrophils) and soluble macromolecules produced by any of these cells or the liver (including Abs, cytokines, and complement) that results in selective targeting, binding to, damage to, destruction of, and/or elimination from a vertebrate's body of invading pathogens, cells or tissues infected with pathogens, cancerous or other abnormal cells, or, in cases of autoimmunity or pathological inflammation, normal human cells or tissues.

[0235] As used herein, the term “immunogenic” or “immunostimulatory” refers to a potential to induce an immune response to a substance. An immune response may be induced when an immune system of an organism or a certain type of immune cells is exposed to an immunogenic substance. The term “non-immunogenic” refers to a lack of or absence of an immune response above a detectable threshold to a substance. No immune response is detected when an immune system of an organism or a certain type of immune cells is exposed to a non-immunogenic substance. In some embodiments, a non-immunogenic circular polyribonucleotide as provided herein, does not induce an immune response above a pre-determined threshold when measured by an immunogenicity assay. In some embodiments, no innate immune response is detected when an immune system of an organism or a certain type of immune cells is exposed to a non-immunogenic circular polyribonucleotide as provided herein. In some embodiments, no adaptive immune response is detected when an immune system of an organism or a certain type of immune cell is exposed to a non-immunogenic circular polyribonucleotide as provided herein.

[0236] As used herein, an “internal ribosome entry site” or “IRES” refers to an RNA sequence or structural element ranging in size from 10 nt to 1000 nt or more, capable of initiating translation of a polypeptide in the absence of a typical RNA cap structure. An IRES is typically about 500 nt to about 700 nt in length.

[0237] “Isolated” or “purified” generally refers to isolation of a substance (for example, in some embodiments, a compound, a polynucleotide, a protein, a polypeptide, a polynucleotide composition, or a polypeptide composition) such that the substance comprises a significant percent (e.g., greater than 1%, greater than 2%, greater than 5%, greater than 10%, greater than 20%, greater than 50%, or more, usually up to about 90%-100^{%}) of the sample in which it resides. In certain embodiments, a substantially purified component comprises at least 50, 60, 70, 75, 80, 85, 90, 95, 96, 97, 98, or 99% of the sample. In additional embodiments, a substantially purified component comprises about, 80%-85%, or 90%-95%, 95-99%, 96-99%, 97-99%, or 95-100% of the sample. Techniques for purifying polynucleotides and polypeptides of interest are well-known in the art and include, for example, ion-exchange chromatography, affinity chromatography and sedimentation according to density. Generally, a substance is purified when it exists in a sample in an amount, relative to other components of the sample, that is more than as it is found naturally.

[0238] As used herein, a “leading untranslated sequence” is a region of polynucleotide sequences ranging from 1 nucleotide to hundreds of nucleotides located at the upmost 5′ end of a polynucleotide sequence. The sequences can be defined or can be random. An leading untranslated sequence is non-coding. As used herein, a “terminal untranslated sequence” is a region of polynucleotide sequences ranging from 1 nucleotide to hundreds of nucleotides located at the downmost 3′ end of a polynucleotide sequence. The sequences can be defined or can be random. A terminal untranslated sequence is non-coding.

[0239] The term “lymphocyte” as used herein includes natural killer (NK) cells, T cells, or B cells. NK cells are a type of cytotoxic (cell toxic) lymphocyte that represent a major component of the innate immune system. NK cells reject tumors and cells infected by viruses. It works through the process of apoptosis or programmed cell death. They were termed “natural killers” because they do not require activation in order to kill cells. T cells play a major role in cell-mediated-immunity (no antibody involvement). T cell receptors (TCR) differentiate T cells from other lymphocyte types. The thymus, a specialized organ of the immune system, is the primary site for T cell maturation. There are numerous types of T cells, including: helper T cells (e.g., CD4+cells), cytotoxic T cells (also known as TC, cytotoxic T lymphocytes, CTL, T-killer cells, cytolytic T cells, CD8+ T cells or killer T cells), memory T cells ((i) stem memory cells (TSCM), like naive cells, are CD45RO−, CCR7+, CD45RA+, CD62L+(L− selectin), CD27+, CD28+ and IL-7Ra+, but also express large amounts of CD95, IL-2R, CXCR3, and LFA-1, and show numerous functional attributes distinctive of memory cells); (ii) central memory cells (TCM) express L-selectin and CCR7, they secrete IL-2, but not IFNβ or IL-4, and (iii) effector memory cells (TEM), however, do not express L-selectin or CCR7 but produce effector cytokines like IFNγ and IL-4), regulatory T cells (Tregs, suppressor T cells, or CD4+CD25+ or CD4+FoxP3+regulatory T cells), natural killer T cells (NKT) and gamma delta T cells. B-cells, on the other hand, play a principal role in humoral immunity (with antibody involvement). B-cells make antibodies, are capable of acting as antigen-presenting cells (APCs) and turn into memory B-cells and plasma cells, both short-lived and long-lived, after activation by antigen interaction. In mammals, immature B-cells are formed in the bone marrow.

[0240] As used herein, a “miRNA site” refers to a stretch of nucleotides within a polynucleotide that is capable of forming a duplex with at least 8 nucleotides of a natural miRNA sequence.

[0241] As used herein, a “neoantigen” refers to a class of tumor antigens which arises from tumor-specific mutations in an expressed protein.

[0242] The term “nucleotide” refers to a ribonucleotide, a deoxyribonucleotide, a modified form thereof, or an analog thereof. Nucleotides include species that comprise purines, e.g., adenine, hypoxanthine, guanine, and their derivatives and analogs, as well as pyrimidines, e.g., cytosine, uracil, thymine, and their derivatives and analogs. Nucleotide analogs include nucleotides having modifications in the chemical structure of the base, sugar and/or phosphate, including, but not limited to, 5′-position pyrimidine modifications, 8′-position purine modifications, modifications at cytosine exocyclic amines, and substitution of 5-bromo-uracil; and 2′-position sugar modifications, including but not limited to, sugar-modified ribonucleotides in which the 2′-OH is replaced by a group such as an H, OR, R, halo, SH, SR, NH₂, NHR, NR₂, or CN, wherein R is an alkyl moiety as defined herein. Nucleotide analogs are also meant to include nucleotides with bases such as inosine, queuosine, xanthine; sugars such as 2′-methyl ribose; non-natural phosphodiester linkages such as methylphosphonate, phosphorothioate and peptide linkages. Nucleotide analogs include 5-methoxyuridine, 1-methylpseudouridine, and 6-methyladenosine.

[0243] All nucleotide sequences disclosed herein can represent an RNA sequence or a corresponding DNA sequence. It is understood that deoxythymidine (dT or T) in a DNA is transcribed into a uridine (U) in an RNA. As such, “T” and “U” are used interchangeably herein in nucleotide sequences.

[0244] The terms “nucleic acid” and “polynucleotide” are used interchangeably herein to describe a polymer of any length, e.g., greater than about 2 bases, greater than about 10 bases, greater than about 100 bases, greater than about 500 bases, greater than 1000 bases, or up to about 10,000 or more bases, composed of nucleotides, e.g., deoxyribonucleotides or ribonucleotides, and may be produced enzymatically or synthetically (e.g., as described in U.S. Pat. No. 5,948,902 and the references cited therein), which can hybridize with naturally occurring nucleic acids in a sequence specific manner analogous to that of two naturally occurring nucleic acids, e.g., can participate in Watson-Crick base pairing interactions. An “oligonucleotide” is a polynucleotide comprising fewer than 1000 nucleotides, such as a polynucleotide comprising fewer than 500 nucleotides or fewer than 100 nucleotides. Naturally occurring nucleic acids are comprised of nucleotides, including guanine, cytosine, adenine, thymine, and uracil containing nucleotides (G, C, A, T, and U respectively). As used herein, “polyA” means a polynucleotide or a portion of a polynucleotide consisting of nucleotides comprising adenine. As used herein, “polyT” means a polynucleotide or a portion of a polynucleotide consisting of nucleotides comprising thymine. As used herein, “polyAC” means a polynucleotide or a portion of a polynucleotide consisting of nucleotides comprising adenine or cytosine.

[0245] As used herein, the term “ribosomal skipping element” refers to a nucleotide sequence encoding a short peptide sequence capable of causing generation of two peptide chains from translation of one RNA molecule. While not wishing to be bound by theory, it is hypothesized that ribosomal skipping elements function by (1) terminating translation of the first peptide chain and re-initiating translation of the second peptide chain; or (2) cleavage of a peptide bond in the peptide sequence encoded by the ribosomai skipping element by an intrinsic protease activity of the encoded peptide, or by another protease in the environment (e.g., cytosol).

[0246] The term “sequence identity,” as used herein, refer to the extent that sequences are identical on a nucleotide-by-nucleotide basis or an amino acid-by-amino acid basis over a window of comparison. Thus, a “percentage of sequence identity” may be calculated by comparing two optimally aligned sequences over the window of comparison, determining the number of positions at which the identical nucleic acid base (e.g., A, T, C, G, I) or the identical amino acid residue (e.g., Ala, Pro, Ser, Thr, Gly, Val, Leu, Ile, Phe, Tyr, Trp, Lys, Arg, His, Asp, Glu, Asn, Gln, Cys and Met) occurs in both sequences to yield the number of matched positions, dividing the number of matched positions by the total number of positions in the window of comparison (i.e., the window size), and multiplying the result by 100 to yield the percentage of sequence identity. Included are nucleotides and polypeptides having at least about 50%, 55%, 60%, 65%, 70%, 75%, 80%, 85%, 90%, 95%, 96%, 97%, 98%, 99% or 100% sequence identity to any of the reference sequences described herein, typically where the polypeptide variant maintains at least one biological activity of the reference polypeptide.

[0247] As used herein, a “spacer” refers to a region of a polynucleotide sequence ranging from 1 nucleotide to hundreds or thousands of nucleotides separating two other elements along a polynucleotide sequence. The sequences can be defined or can be random. A spacer is typically non-coding. In some embodiments, spacers include duplex regions.

[0248] As used herein, the term “splice site” refers to a dinucleotide that is partially or fully included in a group I intron and between which a phosphodiester bond is cleaved during RNA circularization.

[0249] As used herein, “structured” with regard to RNA refers to an RNA sequence that is predicted by the RNAFold software or similar predictive tools to form a structure (e.g., a hairpin loop) with itself or other sequences in the same RNA molecule. As used herein, “unstructured” with regard to RNA refers to an RNA sequence that is not predicted by RNA structure predictive tools to form a structure (e.g., a hairpin loop) with itself or other sequences in the same RNA molecule. In some embodiments, unstructured RNA can be functionally characterized using nuclease protection assays.

[0250] As used herein, the term “therapeutic protein” refers to any protein that, when administered to a subject directly or indirectly in the form of a translated nucleic acid, has a therapeutic, diagnostic, and/or prophylactic effect and/or elicits a desired biological and/or pharmacological effect.

[0251] “Transcription” means the formation or synthesis of an RNA molecule by an RNA polymerase using a DNA molecule as a template. The invention is not limited with respect to the RNA polymerase that is used for transcription. For example, in some embodiments, a T7-type RNA polymerase can be used.

[0252] “Translation” means the formation of a polypeptide molecule by a ribosome based upon an RNA template. As used herein, the term “translation efficiency” refers to a rate or amount of protein or peptide production from a ribonucleotide transcript. In some embodiments, translation efficiency can be expressed as amount of protein or peptide produced per given amount of transcript that codes for the protein or peptide.

[0253] As used herein, the terms “transfect” or “transfection” refer to the intracellular introduction of one or more encapsulated materials (e.g., nucleic acids and/or polynucleotides) into a cell, or preferably into a target cell. The term “transfection efficiency” refers to the relative amount of such encapsulated material (e.g., polynucleotides) up-taken by, introduced into and/or expressed by the target cell which is subject to transfection. In some embodiments, transfection efficiency may be estimated by the amount of a reporter polynucleotide product produced by the target cells following transfection. In some embodiments, a transfer vehicle has high transfection efficiency. In some embodiments, a transfer vehicle has at least about 10%, 20%, 30%, 40%, 50%, 60%, 70%, 80%, or 90% transfection efficiency.

[0254] As used herein, “transfer vehicle” includes any of the standard pharmaceutical carriers, diluents, excipients, and the like, which are generally intended for use in connection with the administration of biologically active agents, including nucleic acids. In certain embodiments of the present invention, the transfer vehicles (e.g., lipid nanoparticles) are prepared to encapsulate one or more materials or therapeutic agents (e.g., circRNA). The process of incorporating a desired therapeutic agent (e.g., circRNA) into a transfer vehicle is referred to herein as or “loading” or “encapsulating” (Lasic, et al., FEBS Lett., 312: 255-258, 1992). The transfer vehicle-loaded or -encapsulated materials (e.g., circRNA) may be completely or partially located in the interior space of the transfer vehicle, within a bilayer membrane of the transfer vehicle, or associated with the exterior surface of the transfer vehicle.

[0255] The terms “treat,” and “prevent” as well as words stemming therefrom, as used herein, do not necessarily imply 100% or complete treatment or prevention. Rather, there are varying degrees of treatment or prevention of which one of ordinary skill in the art recognizes as having a potential benefit or therapeutic effect. The treatment or prevention provided by the method disclosed herein can include treatment or prevention of one or more conditions or symptoms of the disease. Also, for purposes herein, “prevention” can encompass delaying the onset of the disease, or a symptom or condition thereof.

[0256] The a and p chains of ap TCR's are generally regarded as each having two domains or regions, namely variable and constant domains/regions. The variable domain consists of a concatenation of variable regions and joining regions. In the present specification and claims, the term “TCR alpha variable domain” therefore refers to the concatenation of TRAV and TRAJ regions, and the term TCR alpha constant domain refers to the extracellular TRAC region, or to a C-terminal truncated TRAC sequence. Likewise, the term “TCR beta variable domain” refers to the concatenation of TRBV and TRBD/TRBJ regions, and the term TCR beta constant domain refers to the extracellular TRBC region, or to a C-terminal truncated TRBC sequence.

[0257] As used herein, the terms “upstream” and “downstream” refer to relative positions of genetic code, e.g., nucleotides, sequence elements, in polynucleotide sequences. In some embodiments, in an RNA polynucleotide, upstream is toward the 5′ end of the polynucleotide and downstream is toward the 3′ end. In some embodiments, in a DNA polynucleotide, upstream is toward the 5′ end of the coding strand for the gene in question and downstream is toward the 3′ end.

[0258] As used herein, a “vaccine” refers to a composition for generating immunity for the prophylaxis and/or treatment of diseases. Accordingly, vaccines are medicaments which comprise antigens and are intended to be used in humans or animals for generating specific defense and protective substances upon administration to the human or animal.

### A. Lipid Definitions

[0259] As used herein, the phrase “biodegradable lipid” or “degradable lipid” refers to any of a number of lipid species that are broken down in a host environment on the order of minutes, hours, or days ideally making them less toxic and unlikely to accumulate in a host over time. Common modifications to lipids include ester bonds, and disulfide bonds among others to increase the biodegradability of a lipid.

[0260] As used herein, the phrase “biodegradable PEG lipid” or “degradable PEG lipid” refers to any of a number of lipid species where the PEG molecules are cleaved from the lipid in a host environment on the order of minutes, hours, or days ideally making them less immunogenic. Common modifications to PEG lipids include ester bonds, and disulfide bonds among others to increase the biodegradability of a lipid.

[0261] As used herein, the term “cationic lipid” or “ionizable lipid” refers to any of a number of lipid species that carry a net positive charge at a selected pH, such as physiological pH 4 and a neutral charge at other pHs such as physiological pH 7.

[0262] As used herein, the term “PEG” means any polyethylene glycol or other polyalkylene ether polymer.

[0263] As generally defined herein, a “PEG-OH lipid” (also referred to herein as “hydroxy-PEGylated lipid”) is a PEGylated lipid having one or more hydroxyl (—OH) groups on the lipid.

[0264] As used herein, a “phospholipid” is a lipid that includes a phosphate moiety and one or more carbon chains, such as unsaturated fatty acid chains.

[0265] As used herein, the term “structural lipid” refers to sterols and also to lipids containing sterol moieties. As defined herein, “sterols” are a subgroup of steroids consisting of steroid alcohols.

[0266] The terms “head-group” and “tail-group,” when used herein to describe the compounds (e.g., lipids) of the present invention, and in particular functional groups that are comprised in such compounds, are used for ease of reference to describe the orientation of such compounds or of one or more functional groups relative to other functional groups. For example, in certain embodiments, a hydrophilic head-group (e.g., guanidinium) is bound (e.g., by one or more of hydrogen-bonds, van der Waals' forces, ionic interactions and covalent bonds) to a cleavable functional group (e.g., a disulfide group), which in turn is bound to a hydrophobic tail-group (e.g., cholesterol). In certain embodiments, the compounds disclosed herein comprise, for example, at least one hydrophilic head-group and at least one hydrophobic tail-group, each bound to at least one cleavable group, thereby rendering such compounds amphiphilic.

[0267] As used herein, the term “amphiphilic” means the ability to dissolve in both polar (e.g., water) and non-polar (e.g., lipid) environments. For example, in certain embodiments, the compounds (e.g., lipids) disclosed herein comprise at least one lipophilic tail-group (e.g., cholesterol or a C₆₋₂₀ alkyl) and at least one hydrophilic head-group (e.g., imidazole), each bound to a cleavable group (e.g., disulfide).

[0268] As used herein, the term “hydrophilic” is used to indicate in qualitative terms that a functional group is water-preferring, and typically such groups are water-soluble. For example, disclosed herein are compounds (e.g., ionizable lipids) that comprise a cleavable group (e.g., a disulfide (S—S) group) bound to one or more hydrophilic groups (e.g., a hydrophilic head-group), wherein such hydrophilic groups comprise or are selected from the group consisting of imidazole, guanidinium, amino, imine, enamine, an optionally-substituted alkyl amino (e.g., an alkyl amino such as dimethylamino) and pyridyl.

[0269] As used herein, the term “hydrophobic” is used to indicate in qualitative terms that a functional group is water-avoiding, and typically such groups are not water soluble. In certain embodiments, at least one of the functional groups of moieties that comprise the compounds disclosed herein is hydrophobic in nature (e.g., a hydrophobic tail-group comprising a naturally occurring lipid such as cholesterol). For example, disclosed herein are compounds (e.g., ionizable lipids) that comprise a cleavable functional group (e.g., a disulfide (S—S) group) bound to one or more hydrophobic groups, wherein such hydrophobic groups may comprise, or may be selected from, one or more naturally occurring lipids such as cholesterol, an optionally substituted, variably saturated or unsaturated C₆-C₂₀ alkyl, and/or an optionally substituted, variably saturated or unsaturated C₆-C₂₀ acyl.

[0270] As used herein, the term “liposome” generally refers to a vesicle composed of lipids (e.g., amphiphilic lipids) arranged in one or more spherical bilayer or bilayers. Such liposomes may be unilamellar or multilamellar vesicles which have a membrane formed from a lipophilic material and an aqueous interior that contains the encapsulated circRNA to be delivered to one or more target cells, tissues and organs.

[0271] As used herein, the phrase “lipid nanoparticle” refers to a transfer vehicle comprising one or more cationic or ionizable lipids, stabilizing lipids, structural lipids, and helper lipids.

[0272] In certain embodiments, the compositions described herein comprise one or more liposomes or lipid nanoparticles. Examples of suitable lipids (e.g., ionizable lipids) that may be used to form the liposomes and lipid nanoparticles contemplated include one or more of the compounds disclosed herein (e.g., HGT4001, HGT4002, HGT4003, HGT4004 and/or HGT4005). Such liposomes and lipid nanoparticles may also comprise additional ionizable lipids such as C12-200, DLin-KC2-DMA, and/or HGT5001, helper lipids, structural lipids, PEG-modified lipids, MC3, DLinDMA, DLinkC2DMA, cKK-E12, ICE, HGT5000, DODAC, DDAB, DMRIE, DOSPA, DOGS, DODAP, DODMA, DMDMA, DODAC, DLenDMA, DMRIE, CLinDMA, CpLinDMA, DMOBA, DOcarbDAP, DLinDAP, DLincarbDAP, DLinCDAP, KLin-K-DMA, DLin-K-XTC2-DMA, HGT4003, and combinations thereof.

[0273] In some embodiments, a lipid, e.g., an ionizable lipid, disclosed herein comprises one or more cleavable groups. The terms “cleave” and “cleavable” are used herein to mean that one or more chemical bonds (e.g., one or more of covalent bonds, hydrogen-bonds, van der Waals' forces and/or ionic interactions) between atoms in or adjacent to the subject functional group are broken (e.g., hydrolyzed) or are capable of being broken upon exposure to selected conditions (e.g., upon exposure to enzymatic conditions). In certain embodiments, the cleavable group is a disulfide functional group, and in particular embodiments is a disulfide group that is capable of being cleaved upon exposure to selected biological conditions (e.g., intracellular conditions). In certain embodiments, the cleavable group is an ester functional group that is capable of being cleaved upon exposure to selected biological conditions. For example, the disulfide groups may be cleaved enzymatically or by a hydrolysis, oxidation or reduction reaction. Upon cleavage of such disulfide functional group, the one or more functional moieties or groups (e.g., one or more of a head-group and/or a tail-group) that are bound thereto may be liberated. Exemplary cleavable groups may include, but are not limited to, disulfide groups, ester groups, ether groups, and any derivatives thereof (e.g., alkyl and aryl esters). In certain embodiments, the cleavable group is not an ester group or an ether group. In some embodiments, a cleavable group is bound (e.g., bound by one or more of hydrogen-bonds, van der Waals' forces, ionic interactions and covalent bonds) to one or more functional moieties or groups (e.g., at least one head-group and at least one tail-group). In certain embodiments, at least one of the functional moieties or groups is hydrophilic (e.g., a hydrophilic head-group comprising one or more of imidazole, guanidinium, amino, imine, enamine, optionally-substituted alkyl amino and pyridyl).

### B. Chemical Definitions

[0274] When describing the invention, which may include compounds and pharmaceutically acceptable salts thereof, pharmaceutical compositions containing such compounds and methods of using such compounds and compositions, the following terms, if present, have the following meanings unless otherwise indicated. It should also be understood that when described herein any of the moieties defined forth below may be substituted with a variety of substituents, and that the respective definitions are intended to include such substituted moieties within their scope as set out below. Unless otherwise stated, the term “substituted” is to be defined as set out below. It should be further understood that the terms “groups” and “radicals” can be considered interchangeable when used herein.

[0275] Compound described herein may also comprise one or more isotopic substitutions. For example, H may be in any isotopic form, including ¹H, ²H (D or deuterium), and ³H (T or tritium); C may be in any isotopic form, including ¹²C, ¹³C, and ¹⁴C; O may be in any isotopic form, including ¹⁶O and ¹⁸O; F may be in any isotopic form, including ¹⁸F and ¹⁹F; and the like.

[0276] When a range of values is listed, it is intended to encompass each value and sub-range within the range. For example, “C₁₋₆ alkyl” is intended to encompass, C₁, C₂, C₃, C₄, C₅, C₆, C₁₋₆, C₁₋₅, C₁₋₄, C₁₋₃, C₁₋₂, C₂₋₆, C₂₋₅, C₂₋₄, C₂₋₃, C₃₋₆, C₃₋₅, C₃₋₄, C₄₋₆, C₄₋₅, and C₅₋₆ alkyl.

[0277] As used herein, the term “alkyl” refers to both straight and branched chain C₁₋₄₀ hydrocarbons (e.g., C₆₋₂₀ hydrocarbons), and include both saturated and unsaturated hydrocarbons. In certain embodiments, the alkyl may comprise one or more cyclic alkyls and/or one or more heteroatoms such as oxygen, nitrogen, or sulfur and may optionally be substituted with substituents (e.g., one or more of alkyl, halo, alkoxyl, hydroxy, amino, aryl, ether, ester or amide). In certain embodiments, a contemplated alkyl includes (9Z,12Z)-octadeca-9,12-dien. The use of designations such as, for example, “C₆₋₂₀” is intended to refer to an alkyl (e.g., straight or branched chain and inclusive of alkenes and alkyls) having the recited range carbon atoms. In some embodiments, an alkyl group has 1 to 10 carbon atoms (“C₁₋₁₀ alkyl”). In some embodiments, an alkyl group has 1 to 9 carbon atoms (“C₁₋₉ alkyl”). In some embodiments, an alkyl group has 1 to 8 carbon atoms (“C₁₋₈ alkyl”). In some embodiments, an alkyl group has 1 to 7 carbon atoms (“C₁₋₇ alkyl”). In some embodiments, an alkyl group has 1 to 6 carbon atoms (“C₁₋₆ alkyl”). In some embodiments, an alkyl group has 1 to 5 carbon atoms (“C₁₋₅ alkyl”). In some embodiments, an alkyl group has 1 to 4 carbon atoms (“C₁₋₄ alkyl”). In some embodiments, an alkyl group has 1 to 3 carbon atoms (“C₁₋₃ alkyl”). In some embodiments, an alkyl group has 1 to 2 carbon atoms (“C₁₋₂ alkyl”). In some embodiments, an alkyl group has 1 carbon atom (“C₁ alkyl”). Examples of C₁₋₆ alkyl groups include methyl, ethyl, propyl, isopropyl, butyl, isobutyl, pentyl, hexyl, and the like.

[0278] As used herein, “alkenyl” refers to a radical of a straight-chain or branched hydrocarbon group having from 2 to 20 carbon atoms, one or more carbon-carbon double bonds (e.g., 1, 2, 3, or 4 carbon-carbon double bonds), and optionally one or more carbon-carbon triple bonds (e.g., 1, 2, 3, or 4 carbon-carbon triple bonds) (“C₂₋₂₀ alkenyl”). In certain embodiments, alkenyl does not contain any triple bonds. In some embodiments, an alkenyl group has 2 to 10 carbon atoms (“C₂₋₁₀ alkenyl”). In some embodiments, an alkenyl group has 2 to 9 carbon atoms (“C₂₋₉ alkenyl”). In some embodiments, an alkenyl group has 2 to 8 carbon atoms (“C₂₋₈ alkenyl”). In some embodiments, an alkenyl group has 2 to 7 carbon atoms (“C₂₋₇ alkenyl”). In some embodiments, an alkenyl group has 2 to 6 carbon atoms (“C₂₋₆ alkenyl”). In some embodiments, an alkenyl group has 2 to 5 carbon atoms (“C₂₋₅ alkenyl”). In some embodiments, an alkenyl group has 2 to 4 carbon atoms (“C₂₋₄ alkenyl”). In some embodiments, an alkenyl group has 2 to 3 carbon atoms (“C₂₋₃ alkenyl”). In some embodiments, an alkenyl group has 2 carbon atoms (“C₂ alkenyl”). The one or more carbon-carbon double bonds can be internal (such as in 2-butenyl) or terminal (such as in 1-butenyl). Examples of C₂₋₄ alkenyl groups include ethenyl (C₂), 1-propenyl (C₃), 2-propenyl (C₃), 1-butenyl (C₄), 2-butenyl (C₄), butadienyl (C₄), and the like. Examples of C₂₋₆ alkenyl groups include the aforementioned C₂₋₄ alkenyl groups as well as pentenyl (C₅), pentadienyl (C₅), hexenyl (C₆), and the like. Additional examples of alkenyl include heptenyl (C₇), octenyl (C₈), octatrienyl (C₈), and the like.

[0279] As used herein, “alkynyl” refers to a radical of a straight-chain or branched hydrocarbon group having from 2 to 20 carbon atoms, one or more carbon-carbon triple bonds (e.g., 1, 2, 3, or 4 carbon-carbon triple bonds), and optionally one or more carbon-carbon double bonds (e.g., 1, 2, 3, or 4 carbon-carbon double bonds) (“C₂₋₂₀ alkynyl”). In certain embodiments, alkynyl does not contain any double bonds. In some embodiments, an alkynyl group has 2 to 10 carbon atoms (“C₂₋₁₀ alkynyl”). In some embodiments, an alkynyl group has 2 to 9 carbon atoms (“C₂₋₉ alkynyl”). In some embodiments, an alkynyl group has 2 to 8 carbon atoms (“C₂₋₈ alkynyl”). In some embodiments, an alkynyl group has 2 to 7 carbon atoms (“C₂₋₇ alkynyl”). In some embodiments, an alkynyl group has 2 to 6 carbon atoms (“C₂₋₆ alkynyl”). In some embodiments, an alkynyl group has 2 to 5 carbon atoms (“C₂₋₅ alkynyl”). In some embodiments, an alkynyl group has 2 to 4 carbon atoms (“C₂₋₄ alkynyl”). In some embodiments, an alkynyl group has 2 to 3 carbon atoms (“C₂₋₃ alkynyl”). In some embodiments, an alkynyl group has 2 carbon atoms (“C₂ alkynyl”). The one or more carbon-carbon triple bonds can be internal (such as in 2-butynyl) or terminal (such as in 1-butynyl). Examples of C₂₋₄ alkynyl groups include, without limitation, ethynyl (C₂), 1-propynyl (C₃), 2-propynyl (C₃), 1-butynyl (C₄), 2-butynyl (C₄), and the like. Examples of C₂₋₆ alkenyl groups include the aforementioned C₂₋₄ alkynyl groups as well as pentynyl (C₅), hexynyl (C₆), and the like. Additional examples of alkynyl include heptynyl (C₇), octynyl (C₈), and the like.

[0280] As used herein, “alkylene,” “alkenylene,” and “alkynylene,” refer to a divalent radical of an alkyl, alkenyl, and alkynyl group respectively. When a range or number of carbons is provided for a particular “alkylene,” “alkenylene,” or “alkynylene” group, it is understood that the range or number refers to the range or number of carbons in the linear carbon divalent chain. “Alkylene,” “alkenylene,” and “alkynylene” groups may be substituted or unsubstituted with one or more substituents as described herein.

[0281] The term “alkoxy,” as used herein, refers to an alkyl group which is attached to another moiety via an oxygen atom (—O(alkyl)). Non-limiting examples include e.g., methoxy, ethoxy, propoxy, and butoxy.

[0282] As used herein, the term “aryl” refers to aromatic groups (e.g., monocyclic, bicyclic and tricyclic structures) containing six to ten carbons in the ring portion. The aryl groups may be optionally substituted through available carbon atoms and in certain embodiments may include one or more heteroatoms such as oxygen, nitrogen or sulfur. In some embodiments, an aryl group has six ring carbon atoms (“C₆ aryl”; e.g., phenyl). In some embodiments, an aryl group has ten ring carbon atoms (“C₁₀ aryl”; e.g., naphthyl such as 1-naphthyl and 2-naphthyl).

[0283] The term “cycloalkyl” refers to a monovalent saturated cyclic, bicyclic, or bridged cyclic (e.g., adamantyl) hydrocarbon group of 3-12, 3-8, 4-8, or 4-6 carbons, referred to herein, e.g., as “C₄₋₈ cycloalkyl,” derived from a cycloalkane. Exemplary cycloalkyl groups include, but are not limited to, cyclohexanes, cyclopentanes, cyclobutanes and cyclopropanes.

[0284] As used herein, “cyano” refers to —CN.

[0285] As used herein, “heteroaryl” refers to a radical of a 5-10 membered monocyclic or bicyclic 4n+2 aromatic ring system (e.g., having 6 or 10 electrons shared in a cyclic array) having ring carbon atoms and 1-4 ring heteroatoms provided in the aromatic ring system, wherein each heteroatom is independently selected from nitrogen, oxygen and sulfur (“5-10 membered heteroaryl”). In heteroaryl groups that contain one or more nitrogen atoms, the point of attachment can be a carbon or nitrogen atom, as valency permits. Heteroaryl bicyclic ring systems can include one or more heteroatoms in one or both rings. “Heteroaryl” includes ring systems wherein the heteroaryl ring, as defined above, is fused with one or more carbocyclyl or heterocyclyl groups wherein the point of attachment is on the heteroaryl ring, and in such instances, the number of ring members continue to designate the number of ring members in the heteroaryl ring system. “Heteroaryl” also includes ring systems wherein the heteroaryl ring, as defined above, is fused with one or more aryl groups wherein the point of attachment is either on the aryl or heteroaryl ring, and in such instances, the number of ring members designates the number of ring members in the fused (aryl/heteroaryl) ring system. Bicyclic heteroaryl groups wherein one ring does not contain a heteroatom (e.g., indolyl, quinolinyl, carbazolyl, and the like) the point of attachment can be on either ring, i.e., either the ring bearing a heteroatom (e.g., 2-indolyl) or the ring that does not contain a heteroatom (e.g., 5-indolyl).

[0286] As used herein, “heterocyclyl” or “heterocyclic” refers to a radical of a 3-to 10-membered non-aromatic ring system having ring carbon atoms and 1 to 4 ring heteroatoms, wherein each heteroatom is independently selected from nitrogen, oxygen, sulfur, boron, phosphorus, and silicon (“3-10 membered heterocyclyl”). In heterocyclyl groups that contain one or more nitrogen atoms, the point of attachment can be a carbon or nitrogen atom, as valency permits. A heterocyclyl group can either be monocyclic (“monocyclic heterocyclyl”) or a fused, bridged or spiro ring system such as a bicyclic system (“bicyclic heterocyclyl”), and can be saturated or can be partially unsaturated. Heterocyclyl bicyclic ring systems can include one or more heteroatoms in one or both rings. “Heterocyclyl” also includes ring systems wherein the heterocyclyl ring, as defined above, is fused with one or more carbocyclyl groups wherein the point of attachment is either on the carbocyclyl or heterocyclyl ring, or ring systems wherein the heterocyclyl ring, as defined above, is fused with one or more aryl or heteroaryl groups, wherein the point of attachment is on the heterocyclyl ring, and in such instances, the number of ring members continue to designate the number of ring members in the heterocyclyl ring system. The terms “heterocycle,” “heterocyclyl,” “heterocyclyl ring,” “heterocyclic group,” “heterocyclic moiety,” and “heterocyclic radical,” may be used interchangeably.

[0287] The terms “halo” and “halogen” as used herein refer to an atom selected from fluorine (fluoro, F), chlorine (chloro, Cl), bromine (bromo, Br), and iodine (iodo, I). In certain embodiments, the halo group is either fluoro or chloro.

[0288] As used herein, “oxo” refers to —C═O.

[0289] In general, the term “substituted”, whether preceded by the term “optionally” or not, means that at least one hydrogen present on a group (e.g., a carbon or nitrogen atom) is replaced with a permissible substituent, e.g., a substituent which upon substitution results in a stable compound, e.g., a compound which does not spontaneously undergo transformation such as by rearrangement, cyclization, elimination, or other reaction. Unless otherwise indicated, a “substituted” group has a substituent at one or more substitutable positions of the group, and when more than one position in any given structure is substituted, the substituent is either the same or different at each position.

[0290] As used herein, “pharmaceutically acceptable salt” refers to those salts which are, within the scope of sound medical judgment, suitable for use in contact with the tissues of humans and lower animals without undue toxicity, irritation, allergic response and the like, and are commensurate with a reasonable benefit/risk ratio. Pharmaceutically acceptable salts are well known in the art. For example, Berge et al., describes pharmaceutically acceptable salts in detail in J. Pharmaceutical Sciences (1977) 66:1-19. Pharmaceutically acceptable salts of the compounds of this invention include those derived from suitable inorganic and organic acids and bases. Examples of pharmaceutically acceptable, nontoxic acid addition salts are salts of an amino group formed with inorganic acids such as hydrochloric acid, hydrobromic acid, phosphoric acid, sulfuric acid and perchloric acid or with organic acids such as acetic acid, oxalic acid, maleic acid, tartaric acid, citric acid, succinic acid or malonic acid or by using other methods used in the art such as ion exchange. Other pharmaceutically acceptable salts include adipate, alginate, ascorbate, aspartate, benzenesulfonate, benzoate, bisulfate, borate, butyrate, camphorate, camphorsulfonate, citrate, cyclopentanepropionate, digluconate, dodecylsulfate, ethanesulfonate, formate, fumarate, glucoheptonate, glycerophosphate, gluconate, hemisulfate, heptanoate, hexanoate, hydroiodide, 2-hydroxy-ethanesulfonate, lactobionate, lactate, laurate, lauryl sulfate, malate, maleate, malonate, methanesulfonate, 2-naphthalenesulfonate, nicotinate, nitrate, oleate, oxalate, palmitate, pamoate, pectinate, persulfate, 3-phenylpropionate, phosphate, picrate, pivalate, propionate, stearate, succinate, sulfate, tartrate, thiocyanate, p-toluenesulfonate, undecanoate, valerate salts, and the like. Pharmaceutically acceptable salts derived from appropriate bases include alkali metal, alkaline earth metal, ammonium and N+(C1-4alkyl)4 salts. Representative alkali or alkaline earth metal salts include sodium, lithium, potassium, calcium, magnesium, and the like. Further pharmaceutically acceptable salts include, when appropriate, nontoxic ammonium, quaternary ammonium, and amine cations formed using counterions such as halide, hydroxide, carboxylate, sulfate, phosphate, nitrate, lower alkyl sulfonate, and aryl sulfonate.

[0291] In typical embodiments, the present invention is intended to encompass the compounds disclosed herein, and the pharmaceutically acceptable salts, pharmaceutically acceptable esters, tautomeric forms, polymorphs, and prodrugs of such compounds. In some embodiments, the present invention includes a pharmaceutically acceptable addition salt, a pharmaceutically acceptable ester, a solvate (e.g., hydrate) of an addition salt, a tautomeric form, a polymorph, an enantiomer, a mixture of enantiomers, a stereoisomer or mixture of stereoisomers (pure or as a racemic or non-racemic mixture) of a compound described herein.

[0292] Compounds described herein can comprise one or more asymmetric centers, and thus can exist in various isomeric forms, e.g., enantiomers and/or diastereomers. For example, the compounds described herein can be in the form of an individual enantiomer, diastereomer or geometric isomer, or can be in the form of a mixture of stereoisomers, including racemic mixtures and mixtures enriched in one or more stereoisomer. Isomers can be isolated from mixtures by methods known to those skilled in the art, including chiral high pressure liquid chromatography (HPLC) and the formation and crystallization of chiral salts; or preferred isomers can be prepared by asymmetric syntheses. See, for example, Jacques et al., Enantiomers, Racemates and Resolutions (Wiley Interscience, New York, 1981); Wilen et al., Tetrahedron 33:2725 (1977); Eliel, Stereochemistry of Carbon Compounds (McGraw-Hill, NY, 1962); and Wilen, Tables of Resolving Agents and Optical Resolutions p. 268 (E. L. Eliel, Ed., Univ. of Notre Dame Press, Notre Dame, IN 1972). The invention additionally encompasses compounds described herein as individual isomers substantially free of other isomers, and alternatively, as mixtures of various isomers.

[0293] In certain embodiments, the compounds (e.g., ionizable lipids) and the transfer vehicles (e.g., lipid nanoparticles) of which such compounds are a component exhibit an enhanced (e.g., increased) ability to transfect one or more target cells. Accordingly, also provided herein are methods of transfecting one or more target cells. Such methods generally comprise the step of contacting the one or more target cells with the compounds and/or pharmaceutical compositions disclosed herein such that the one or more target cells are transfected with the circular RNA encapsulated therein.

[0294] It is to be understood that the terminology used herein is for the purpose of describing particular embodiments only, and is not intended to be limiting. Unless specifically stated or obvious from context, as used herein, the term “or” is understood to be inclusive. Unless defined herein and below in the reminder of the specification, all technical and scientific terms used herein have the same meaning as commonly understood by one of ordinary skill in the art to which the invention pertains.

### 2. DNA Template, Precusor RNA & Circular RNA

[0295] According to the present invention, transcription of a DNA template provided herein (e.g., comprising a 3′ enhanced intron element, 3′ enhanced exon element, a core functional element, a 5′ enhanced exon element, and a 5′ enhanced intron element) results in formation of a precursor linear RNA polynucleotide capable of circularizing. In some embodiments, this DNA template comprises a vector, PCR product, plasmid, minicircle DNA, cosmid, artificial chromosome, complementary DNA (cDNA), extrachromosomal DNA (ecDNA), or a fragment therein. In certain embodiments, the minicircle DNA may be linearized or non-linearized. In certain embodiments, the plasmid may be linearized or non-linearized. In some embodiments, the DNA template may be single-stranded. In other embodiments, the DNA template may be double-stranded. In some embodiments, the DNA template comprises in whole or in part from a viral, bacterial or eukaryotic vector.

[0296] The present invention, as provided herein, comprises a DNA template that shares the same sequence as the precursor linear RNA polynucleotide prior to splicing of the precursor linear RNA polynucleotide (e.g., a 3′ enhanced intron element, a 3′ enhanced exon element, a core functional element, and a 5′ enhanced exon element, a 5′ enhanced intron element). In some embodiments, said linear precursor RNA polynucleotide undergoes splicing leading to the removal of the 3′ enhanced intron element and 5′ enhanced intron element during the process of circularization. In some embodiments, the resulting circular RNA polynucleotide lacks a 3′ enhanced intron fragment and a 5′ enhanced intron fragment, but maintains a 3′ enhanced exon fragment, a core functional element, and a 5′ enhanced exon element.

[0297] In some embodiments, the precursor linear RNA polynucleotide circularizes when incubated in the presence of one or more guanosine nucleotides or nucleoside (e.g., GTP) and a divalent cation (e.g., Mg²⁺). In some embodiments, the 3′ enhanced exon element, 5′ enhanced exon element, and/or core functional element in whole or in part promotes the circularization of the precursor linear RNA polynucleotide to form the circular RNA polynucleotide provided herein.

[0298] In certain embodiments, circular RNA provided herein is produced inside a cell. In some embodiments, precursor RNA is transcribed using a DNA template (e.g., in some embodiments, using a vector provided herein) in the cytoplasm by a bacteriophage RNA polymerase, or in the nucleus by host RNA polymerase II and then circularized.

[0299] In certain embodiments, the circular RNA provided herein is injected into an animal (e.g., a human), such that a polypeptide encoded by the circular RNA molecule is expressed inside the animal.

[0300] In some embodiments, the DNA (e.g., vector), linear RNA (e.g., precursor RNA), and/or circular RNA polynucleotide provided herein is between 300 and 10000, 400 and 9000, 500 and 8000, 600 and 7000, 700 and 6000, 800 and 5000, 900 and 5000, 1000 and 5000, 1100 and 5000, 1200 and 5000, 1300 and 5000, 1400 and 5000, and/or 1500 and 5000 nucleotides in length. In some embodiments, the polynucleotide is at least 300 nt, 400 nt, 500 nt, 600 nt, 700 nt, 800 nt, 900 nt, 1000 nt, 1100 nt, 1200 nt, 1300 nt, 1400 nt, 1500 nt, 2000 nt, 2500 nt, 3000 nt, 3500 nt, 4000 nt, 4500 nt, or 5000 nt in length. In some embodiments, the polynucleotide is no more than 3000 nt, 3500 nt, 4000 nt, 4500 nt, 5000 nt, 6000 nt, 7000 nt, 8000 nt, 9000 nt, or 10000 nt in length. In some embodiments, the length of a DNA, linear RNA, and/or circular RNA polynucleotide provided herein is about 300 nt, 400 nt, 500 nt, 600 nt, 700 nt, 800 nt, 900 nt, 1000 nt, 1100 nt, 1200 nt, 1300 nt, 1400 nt, 1500 nt, 2000 nt, 2500 nt, 3000 nt, 3500 nt, 4000 nt, 4500 nt, 5000 nt, 6000 nt, 7000 nt, 8000 nt, 9000 nt, or 10000 nt.

[0301] In some embodiments, the circular RNA provided herein has higher functional stability than mRNA comprising the same expression sequence. In some embodiments, the circular RNA provided herein has higher functional stability than mRNA comprising the same expression sequence, 5moU modifications, an optimized UTR, a cap, and/or a polyA tail.

[0302] In some embodiments, the circular RNA polynucleotide provided herein has a functional half-life of at least 5 hours, 10 hours, 15 hours, 20 hours. 30 hours, 40 hours, 50 hours, 60 hours, 70 hours or 80 hours. In some embodiments, the circular RNA polynucleotide provided herein has a functional half-life of 5-80, 10-70, 15-60, and/or 20-50 hours. In some embodiments, the circular RNA polynucleotide provided herein has a functional half-life greater than (e.g., at least 1.5-fold greater than, at least 2-fold greater than) that of an equivalent linear RNA polynucleotide encoding the same protein. In some embodiments, functional half-life can be assessed through the detection of functional protein synthesis.

[0303] In some embodiments, the circular RNA polynucleotide provided herein has a half-life of at least 5 hours, 10 hours, 15 hours, 20 hours. 30 hours, 40 hours, 50 hours, 60 hours, 70 hours or 80 hours. In some embodiments, the circular RNA polynucleotide provided herein has a half-life of 5-80, 10-70, 15-60, and/or 20-50 hours. In some embodiments, the circular RNA polynucleotide provided herein has a half-life greater than (e.g., at least 1.5-fold greater than, at least 2-fold greater than) that of an equivalent linear RNA polynucleotide encoding the same protein. In some embodiments, the circular RNA polynucleotide, or pharmaceutical composition thereof, has a functional half-life in a human cell greater than or equal to that of a pre-determined threshold value. In some embodiments the functional half-life is determined by a functional protein assay. For example in some embodiments, the functional half-life is determined by an in vitro luciferase assay, wherein the activity of Gaussia luciferase (GLuc) is measured in the media of human cells (e.g. HepG2) expressing the circular RNA polynucleotide every 1, 2, 6, 12, or 24 hours over 1, 2, 3, 4, 5, 6, 7, or 14 days. In other embodiments, the functional half-life is determined by an in vivo assay, wherein levels of a protein encoded by the expression sequence of the circular RNA polynucleotide are measured in patient serum or tissue samples every 1, 2, 6, 12, or 24 hours over 1, 2, 3, 4, 5, 6, 7, or 14 days. In some embodiments, the pre-determined threshold value is the functional half-life of a reference linear RNA polynucleotide comprising the same expression sequence as the circular RNA polynucleotide.

[0304] In some embodiments, the circular RNA provided herein may have a higher magnitude of expression than equivalent linear mRNA, e.g., a higher magnitude of expression 24 hours after administration of RNA to cells. In some embodiments, the circular RNA provided herein has a higher magnitude of expression than mRNA comprising the same expression sequence, 5moU modifications, an optimized UTR, a cap, and/or a polyA tail.

[0305] In some embodiments, the circular RNA provided herein may be less immunogenic than an equivalent mRNA when exposed to an immune system of an organism or a certain type of immune cell. In some embodiments, the circular RNA provided herein is associated with modulated production of cytokines when exposed to an immune system of an organism or a certain type of immune cell. For example, in some embodiments, the circular RNA provided herein is associated with reduced production of IFN-β1, RIG-I, IL-2, IL-6, IFNγ, and/or TNFα when exposed to an immune system of an organism or a certain type of immune cell as compared to mRNA comprising the same expression sequence. In some embodiments, the circular RNA provided herein is associated with less IFN-β1, RIG-I, IL-2, IL-6, IFNγ, and/or TNFα transcript induction when exposed to an immune system of an organism or a certain type of immune cell as compared to mRNA comprising the same expression sequence. In some embodiments, the circular RNA provided herein is less immunogenic than mRNA comprising the same expression sequence. In some embodiments, the circular RNA provided herein is less immunogenic than mRNA comprising the same expression sequence, 5moU modifications, an optimized UTR, a cap, and/or a polyA tail.

[0306] In certain embodiments, the circular RNA provided herein can be transfected into a cell as is, or can be transfected in DNA vector form and transcribed in the cell. Transcription of circular RNA from a transfected DNA vector can be via added polymerases or polymerases encoded by nucleic acids transfected into the cell, or preferably via endogenous polymerases.

### A. Enhanced Intron Elements & Enhanced Exon Elements

[0307] Polynucleotides provided herein may comprise one or more enhance intron elements and/or one or more enhanced exon elements. In some embodiments, the enhanced intron elements and enhanced exon elements may comprise spacers, duplex regions, affinity sequences, intron fragments, exon fragments, and/or various untranslated elements. These sequences within the enhanced intron elements or enhanced exon elements are arranged to optimize circularization or protein expression.

a. SPACER

[0308] In some embodiments, a provided polynucleotide (e.g., a DNA template, a precursor RNA polynucleotide, or a circular RNA polynucleotide) comprises one or more spacers. In certain embodiments, the polynucleotide comprises a first (5′) and/or a second (3′) spacer. In some embodiments, the polynucleotide (e.g., DNA template or precursor linear RNA polynucleotide) comprises one or more spacers in the enhanced intron elements. In some embodiments, the polynucleotide (e.g., DNA template, precursor linear RNA polynucleotide, or a circular RNA polynucleotide) comprises one or more spacers in the enhanced exon elements. In certain embodiments, the polynucleotide comprises a spacer in the 3′ enhanced intron fragment and a spacer in the 5′ enhanced intron fragment. In certain embodiments, the polynucleotide comprises a spacer in the 3′ enhanced exon fragment and another spacer in the 5′ enhanced exon fragment to aid with circularization or protein expression due to symmetry created in the overall sequence.

[0309] In some embodiments, including a spacer between the 3′ group I intron fragment and the core functional element may conserve secondary structures in those regions by preventing them from interacting, thus increasing splicing efficiency. In some embodiments, the first (between 3′ group I intron fragment and core functional element) and second (between the two expression sequences and core functional element) spacers comprise additional base pairing regions that are predicted to base pair with each other and not to the first and second duplex regions. In other embodiments, the first (between 3′ group I intron fragment and core functional element) and second (between the one of the core functional element and 5′ group I intron fragment) spacers comprise additional base pairing regions that are predicted to base pair with each other and not to the first and second duplex regions. In some embodiments, such spacer base pairing brings the group I intron fragments in close proximity to each other, further increasing splicing efficiency. Additionally, in some embodiments, the combination of base pairing between the first and second duplex regions, and separately, base pairing between the first and second spacers, promotes the formation of a splicing bubble containing the group I intron fragments flanked by adjacent regions of base pairing. Typical spacers are contiguous sequences with one or more of the following qualities: 1) predicted to avoid interfering with proximal structures, for example, the IRES, expression sequence, aptamer, or intron; 2) is at least 7 nt long and no longer than 100 nt; 3) is located after and adjacent to the 3′ intron fragment and/or before and adjacent to the 5′ intron fragment; and 4) contains one or more of the following: a) an unstructured region at least 5 nt long, b) a region of base pairing at least 5 nt long to a distal sequence, including another spacer, and c) a structured region at least 7 nt long limited in scope to the sequence of the spacer. Spacers may have several regions, including an unstructured region, a base pairing region, a hairpin/structured region, and combinations thereof. In an embodiment, the spacer has a structured region with high GC content. In an embodiment, a region within a spacer base pairs with another region within the same spacer. In an embodiment, a region within a spacer base pairs with a region within another spacer. In an embodiment, a spacer comprises one or more hairpin structures. In an embodiment, a spacer comprises one or more hairpin structures with a stem of 4 to 12 nucleotides and a loop of 2 to 10 nucleotides. In an embodiment, there is an additional spacer between the 3′ group I intron fragment and the core functional element. In an embodiment, this additional spacer prevents the structured regions of the IRES or aptamer of a TIE from interfering with the folding of the 3′ group I intron fragment or reduces the extent to which this occurs. In some embodiments, the 5′ spacer sequence is at least 7, 8, 9, 10, 11, 12, 13, 14, 15, 16, 17, 18, 19, 20, 25 or 30 nucleotides in length. In some embodiments, the 5′ spacer sequence is no more than 100, 90, 80, 70, 60, 50, 45, 40, 35 or 30 nucleotides in length. In some embodiments the 5′ spacer sequence is between 5 and 50, 10 and 50, 20 and 50, 20 and 40, and/or 25 and 35 nucleotides in length. In certain embodiments, the 5′ spacer sequence is 10, 11, 12, 13, 14, 15, 16, 17, 18, 19, 20, 21, 22, 23, 24, 25, 26, 27, 28, 29, 30, 31, 32, 33, 34, 35, 36, 37, 38, 39, 40, 41, 42, 43, 44, 45, 46, 47, 48, 49 or 50 nucleotides in length. In one embodiment, the 5′ spacer sequence is a polyA sequence. In another embodiment, the 5′ spacer sequence is a polyAC sequence. In one embodiment, a spacer comprises about 10%, 20%, 30%, 40%, 50%, 60%, 70%, 80%, 90%, or 100% polyAC content. In one embodiment, a spacer comprises about 10%, 20%, 30%, 40%, 50%, 60%, 70%, 80%, 90%, or 100% polypyrimidine (C/T or C/U) content.

b. Duplex Region

[0310] In some embodiments, a provided polynucleotide (e.g., a DNA template, a precursor linear RNA polynucleotide, or a circular RNA polynucleotide provided herein comprise one or more duplex regions. In some embodiments, the polynucleotide comprises a first (5′) duplex region and a second (3′) duplex region. In certain embodiments, the polynucleotide comprises a 5′ external duplex region located within the 3′ enhanced intron fragment and a 3′ external duplex region located within the 5′ enhanced intron fragment. In some embodiments, the polynucleotide comprise a 5′ internal duplex region located within the 3′ enhanced exon fragment and a 3′ internal duplex region located within the 5′ enhanced exon fragment. In some embodiments, the polynucleotide comprises a 5′ external duplex region, 5′ internal duplex region, a 3′ internal duplex region, and a 3′ external duplex region.

[0311] In certain embodiments, the first and second duplex regions may form perfect or imperfect duplexes. Thus, in certain embodiments at least 75%, 80%, 85%, 90%, 91%, 92%, 93%, 94%, 95%, 96%, 97%, 98%, 99% or 100% of the first and second duplex regions may be base paired with one another. In some embodiments, the duplex regions are predicted to have less than 50% (e.g., less than 45%, less than 40%, less than 35%, less than 30%, less than 25%) base pairing with unintended sequences in the RNA (e.g., non-duplex region sequences). In some embodiments, including such duplex regions on the ends of the precursor RNA strand, and adjacent or very close to the group I intron fragment, bring the group I intron fragments in close proximity to each other, increasing splicing efficiency. In some embodiments, the duplex regions are 3 to 100 nucleotides in length (e.g., 3-75 nucleotides in length, 3-50 nucleotides in length, 20-50 nucleotides in length, 35-50 nucleotides in length, 5-25 nucleotides in length, 9-19 nucleotides in length). In some embodiments, the duplex regions are about 3, 4, 5, 6, 7, 8, 9, 10, 11, 12, 13, 14, 15, 16, 17, 18, 19, 20, 21, 22, 23, 24, 25, 26, 27, 28, 29, 30, 31, 32, 33, 34, 35, 36, 37, 38, 39, 40, 41, 42, 43, 44, 45, 46, 47, 48, 49 or 50 nucleotides in length. In some embodiments, the duplex regions have a length of about 9 to about 50 nucleotides. In one embodiment, the duplex regions have a length of about 9 to about 19 nucleotides. In some embodiments, the duplex regions have a length of about 20 to about 40 nucleotides. In certain embodiments, the duplex regions have a length of about 30 nucleotides.

[0312] In other embodiments, the polynucleotide does not comprise of any duplex regions to optimize translation or circularization.

c. Affinity Sequence

[0313] As provided herein, a provided polynucleotide (e.g., a DNA template, a precursor linear RNA polynucleotide, or a circular RNA polynucleotide) may comprise an affinity sequence (or affinity tag). In some embodiments, the affinity tag is located in the 3′ enhanced intron element. In some embodiments, the affinity tag is located in the 5′ enhanced intron element. In some embodiments, both (3′ and 5′) enhanced intron elements each comprise an affinity tag. In one embodiment, an affinity tag of the 3′ enhanced intron element is the length as an affinity tag in the 5′ enhanced intron element. In some embodiments, an affinity tag of the 3′ enhanced intron element is the same sequence as an affinity tag in the 5′ enhanced intron element. In some embodiments, the affinity sequence is placed to optimize oligo-dT purification.

[0314] In some embodiments, the one or more affinity tags present in a precursor linear RNA polynucleotide are removed upon circularization. See, for example, FIG. 97A and FIG. 97B. In some embodiments, affinity tags are added to remaining linear RNA after circularization of RNA is performed. In some such embodiments, the affinity tags are added enzymatically to linear RNA. The presence of one or more affinity tags in linear RNA and their absence from circular RNA can facilitate purification of circular RNA. In some embodiments, such purification is performed using a negative selection or affinity-purification method. In some embodiments, such purification is performed using a binding agent that preferentially or specifically binds to the affinity tag.

[0315] In some embodiments, an affinity tag comprises a polyA sequence. In some embodiments the polyA sequence is at least 15, 30, or 60 nucleotides long. In some embodiments, the affinity tag comprising a polyA sequence is present in two places in a precursor linear RNA. In some embodiments, one or both polyA sequences are 15-50 nucleotides long. In some embodiments, one or both polyA sequences are 20-25 nucleotides long. In some embodiments, the polyA sequence(s) is removed upon circularization. Thus, an oligonucleotide hybridizing with the polyA sequence, such as a deoxythymidine oligonucleotide (oligo(dT)) conjugated to a solid surface (e.g., a resin), can be used to separate circular RNA from its precursor RNA.

[0316] In some embodiments, an affinity tag comprises a sequence that is absent from the circular RNA product. In some such embodiments, the sequence that is absent from the circular RNA product is a dedicated binding site (DBS). In some embodiments, the DBS is an unstructured sequence, i.e., a sequence that does not form a defined structural element, such as a hairpin loop, contiguous dsRNA region, or triple helix. In some embodiments, the DBS sequence forms a random coil. In some embodiments, the DBS comprises at least 25% GC content, at least 50% GC content, at least 75% GC content, or at least 100% GC content. In some embodiments, the DBS comprises at least 25% AC content, at least 50% AC content, at least 75% AC content, or 100% AC content. In some embodiments, the DBS is at least 15, 30, or 60 nucleotides long. In some embodiments, the affinity tag comprising a DBS is present in two places in a precursor linear RNA. In some embodiments, the DBS sequences are each independently 15-50 nucleotides long. In some embodiments, the DBS sequences are each independently 20-25 nucleotides long.

[0317] In some embodiments, the DBS sequence(s) is removed upon circularization. Thus, binding agents comprising oligonucleotides comprising a sequence that is complementary to the DBS can be used to facilitate purification of circular RNA. For example, the binding agent may comprise an oligonucleotide complementary to a DBS conjugated to a solid surface (e.g., a resin).

[0318] In some embodiments, an affinity sequence or other type of affinity handle, such as biotin, is added to linear RNA by ligation. In some embodiments, an oligonucleotide comprising an affinity sequence is ligated to the linear RNA. In some embodiments, an oligonucleotide conjugated to an affinity handle is ligated to the linear RNA. In some embodiments, a solution comprising the linear RNA ligated to the affinity sequence or handle and the circular RNA that does not comprise an affinity sequence or handle are contacted with a binding agent comprising a solid support conjugated to an oligonucleotide complementary to the affinity sequence or to a binding partner of the affinity handle, such that the linear RNA binds to the binding agent, and the circular RNA is eluted or separated from the solid support.

[0319] Any purification method for circular RNA described herein may comprise one or more buffer exchange steps. In some embodiments, buffer exchange is performed after in vitro transcription (IVT) and before additional purification steps. In some such embodiments, the IVT reaction solution is buffer exchanged into a buffer comprising Tris. In some embodiments, the IVT reaction solution is buffer exchanged into a buffer comprising greater than 1 mM or greater than 10 mM one or more monovalent salts, such as NaCl or KCl, and optionally comprising EDTA. In some embodiments, buffer exchange is performed after purification of circular RNA is complete. In some embodiments, buffer exchange is performed after IVT and after purification of circular RNA. In some embodiments, the buffer exchange that is performed after purification of circular RNA comprises exchange of the circular RNA into water or storage buffer. In some embodiments, the storage buffer comprises 1 mM sodium citrate, pH 6.5.

[0320] In certain embodiments, the 3′ enhanced intron element comprises a leading untranslated sequence. In some embodiments, the leading untranslated sequence is a the 5′ end of the 3′ enhanced intron fragment. In some embodiments, the leading untranslated sequence comprises of the last nucleotide of a transcription start site (TSS). In some embodiments, the TSS is chosen from a viral, bacterial, or eukaryotic DNA template. In one embodiment, the leading untranslated sequence comprise the last nucleotide of a TSS and 0 to 100 additional nucleotides. In some embodiments, the TSS is a terminal spacer. In one embodiment, the leading untranslated sequence contains a guanosine at the 5′ end upon translation of an RNA T7 polymerase.

[0321] In certain embodiments, the 5′ enhanced intron element comprises a trailing untranslated sequence. In some embodiments, the 5′ trailing untranslated sequence is located at the 3′ end of the 5′ enhanced intron element. In some embodiments, the trailing untranslated sequence is a partial restriction digest sequence. In one embodiment, the trailing untranslated sequence is in whole or in part a restriction digest site used to linearize the DNA template. In some embodiments, the restriction digest site is in whole or in part from a natural viral, bacterial or eukaryotic DNA template. In some embodiments, the trailing untranslated sequence is a terminal restriction site fragment.

d. Enhanced Intron Fragments

[0322] In some embodiments, the 3′ enhanced intron element and 5′ enhanced intron element each comprise an intron fragment. In certain embodiments, a 3′ intron fragment is a contiguous sequence at least 75% homologous (e.g., at least 80%, 85%, 90%, 91%, 92%, 93%, 94%, 95%, 96%, 97%, 98%, 99% or 100% homologous) to a 3′ proximal fragment of a natural group I intron including the 3′ splice site dinucleotide. Typically, a 5′ intron fragment is a contiguous sequence at least 75% homologous (e.g., at least 80%, 85%, 90%, 91%, 92%, 93%, 94%, 95%, 96%, 97%, 98%, 99% or 100% homologous) to a 5′ proximal fragment of a natural group I intron including the 5′ splice site dinucleotide. In some embodiments, the 3′ intron fragment includes the first nucleotide of a 3′ group I splice site dinucleotide. In some embodiments, the 5′ intron fragment includes the first nucleotide of a 5′ group I splice site dinucleotide. In other embodiments, the 3′ intron fragment includes the first and second nucleotides of a 3′ group I intron fragment splice site dinucleotide; and the 5′ intron fragment includes the first and second nucleotides of a 3′ group I intron fragment dinucleotide.

### E. Enhanced Exon Fragments

[0323] In certain embodiments, a provided polynucleotide (e.g., a DNA template, a linear precursor RNA polynucleotide, or a circular RNA polynucleotide) comprises an enhanced exon fragment. In some embodiments, following a 5′ to 3′ order, the 3′ enhanced exon element is located upstream to core functional element. In some embodiments, following a 5′ to 3′ order, the 5′ enhanced intron element is located downstream to the core functional element.

[0324] According to the present invention, the 3′ enhanced exon element and 5′ enhanced exon element each comprise an exon fragment. In some embodiments, the 3′ enhanced exon element comprises a 3′ exon fragment. In some embodiments, the 5′ enhanced exon element comprises a 5′ exon fragment. In certain embodiments, as provided herein, the 3′ exon fragment and 5′ exon fragment each comprises a group I intron fragment and 1 to 100 nucleotides of an exon sequence. In certain embodiments, a 3′ intron fragment is a contiguous sequence at least 75% homologous (e.g., at least 80%, 85%, 90%, 91%, 92%, 93%, 94%, 95%, 96%, 97%, 98%, 99% or 100% homologous) to a 3′ proximal fragment of a natural group I intron including the 3′ splice site dinucleotide. Typically, a 5′ group I intron fragment is a contiguous sequence at least 75% homologous (e.g., at least 80%, 85%, 90%, 91%, 92%, 93%, 94%, 95%, 96%, 97%, 98%, 99% or 100% homologous) to a 5′ proximal fragment of a natural group I intron including the 5′ splice site dinucleotide. In some embodiments, the 3′ exon fragment comprises a second nucleotide of a 3′ group I intron splice site dinucleotide and 1 to 100 nucleotides of an exon sequence. In some embodiments, the 5′ exon fragment comprises the first nucleotide of a 5′ group I intron splice site dinucleotide and 1 to 100 nucleotides of an exon sequence. In some embodiments, the exon sequence comprises in part or in whole from a naturally occurring exon sequence from a virus, bacterium or eukaryotic DNA vector. In other embodiments, the exon sequence further comprises a synthetic, genetically modified (e.g., containing modified nucleotide), or other engineered exon sequence.

[0325] In one embodiment, where the 3′ intron fragment comprises both nucleotides of a 3′ group I splice site dinucleotide and the 5′ intron fragment comprises both nucleotides of a 5′ group I splice site dinucleotide, the exon fragments located within the 5′ enhanced exon element and 3′ enhanced exon element does not comprise of a group I splice site dinucleotide.

f. Examplar Permutation of the Enhanced Intron Elements & Enhanced Exon Elements

[0326] For means of example and not intended to be limiting, in some embodiment, a 3′ enhanced intron element comprises in the following 5′ to 3′ order: a leading untranslated sequence, a 5′ affinity tag, an optional 5′ external duplex region, a 5′ external spacer, and a 3′ intron fragment. In same embodiments, the 3′ enhanced exon element comprises in the following 5′ to 3′ order: a 3′ exon fragment, an optional 5′ internal duplex region, an optional 5′ internal duplex region, and a 5′ internal spacer. In the same embodiments, the 5′ enhanced exon element comprises in the following 5′ to 3′ order: a 3′ internal spacer, an optional 3′ internal duplex region, and a 5′ exon fragment. In still the same embodiments, the 3′ enhanced intron element comprises in the following 5′ to 3′ order: a 5′ intron fragment, a 3′ external spacer, an optional 3′ external duplex region, a 3′ affinity tag, and a trailing untranslated sequence.

### B. Core Functional Element

[0327] In some embodiments, a provided polynucleotide (e.g., a DNA template, a linear precursor RNA polynucleotide, or a circular RNA polynucleotide) comprises a core functional element. In some embodiments, the core functional element comprises a coding or noncoding element. In certain embodiments, the core functional element may contain both a coding and noncoding element. In some embodiments, the core functional element further comprises translation initiation element (TIE) upstream to the coding or noncoding element. In some embodiments, the core functional element comprises a termination element. In some embodiments, the termination element is located downstream to the TIE and coding element. In some embodiments, the termination element is located downstream to the coding element but upstream to the TIE. In certain embodiments, where the coding element comprises a noncoding region, a core functional element lacks a TIE and/or a termination element.

a. Coding or Noncoding Element

[0328] In some embodiments, the polynucleotides provided herein comprise coding or noncoding element or a combination of both. In some embodiments, the coding element comprises an expression sequence. In some embodiments, the coding element encodes at least one therapeutic protein.

[0329] In some embodiments, a provided circular RNA encodes two or more polypeptides. In some embodiments, the circular RNA is a bicistronic RNA. The sequences encoding the two or more polypeptides can be separated by a ribosomal skipping element or a nucleotide sequence encoding a protease cleavage site. In certain embodiments, the ribosomai skipping element encodes thosea-asigna virus 2A peptide (T2A), porcine teschovirus-1 2 A peptide (P2A), foot-and-mouth disease virus 2 A peptide (F2A), equine rhinitis A vims 2A peptide (E2A), cytoplasmic polyhedrosis vims 2A peptide (BmCPV 2A), or flacherie vims of B. mori 2A peptide (BmIFV 2A).

b. Translation Initiation Element (Tie)

[0330] As provided herein in some embodiments, the core functional element comprises at least one translation initiation element (TIE). TIEs are designed to allow translation efficiency of an encoded protein. Thus, optimal core functional elements comprising only of noncoding elements lack any TIEs. In some embodiments, core functional elements comprising one or more coding element will further comprise one or more TIEs.

[0331] In some embodiments, a TIE comprises an untranslated region (UTR). In certain embodiments, the TIE provided herein comprise an internal ribosome entry site (IRES). Inclusion of an IRES permits the translation of one or more open reading frames from a circular RNA (e.g., open reading frames that form the expression sequences). The IRES element attracts a eukaryotic ribosomal translation initiation complex and promotes translation initiation. See, e.g., Kaufman et al., Nuc. Acids Res. (1991) 19:4485-4490; Gurtu et al., Biochem. Biophys. Res. Comm. (1996) 229:295-298; Rees et al., BioTechniques (1996) 20: 102-110; Kobayashi et al., BioTechniques (1996) 21:399-402; and Mosser et al., BioTechniques 1997 22 150-161.

i. Natural Ties: Viral, & Eukaryotic/Cellular Internal Ribosome Entry Site (Ires)

[0332] A multitude of IRES sequences are available and include sequences derived from a wide variety of viruses, such as from leader sequences of picornaviruses such as the encephalomyocarditis virus (EMCV) UTR (Jang et al., J. Virol. (1989) 63: 1651-1660), the polio leader sequence, the hepatitis A virus leader, the hepatitis C virus IRES, human rhinovirus type 2 IRES (Dobrikova et al., Proc. Natl. Acad. Sci. (2003) 100(25): 15125-15130), an IRES element From the foot and mouth disease virus (Ramesh et al., Nucl. Acid Res. (1996) 24:2697-2700), a Giardiavirus IRES (Garlapati et al., J. Biol. Chem. (2004) 279(5):3389-3397), and the like.

[0333] Different IRES sequences have varying ability to drive protein expression, and the ability of any particular identified or predicted IRES sequence to drive protein expression from linear mRNA or circular RNA constructs is unknown and unpredictable. In certain embodiments, potential IRES sequences can be bioinformatically identified based on sequence positions in viral sequences. However, the activity of such sequences has been previously uncharacterized. As demonstrated herein, such IRES sequences may have differing protein expression capability depending on cell type, for example in T cells, liver cells, or muscle cells. In some embodiments, the novel IRES sequences described herein may have at least 2, 3, 4, 5, 6, 7, 8, 9, 10, 20, 50, or 100 fold increased expression in a particular cell type compared to previously described EMCV IRES sequences.

[0334] In some embodiments, for driving protein expression, a provided circular RNA comprises an IRES operably linked to a protein coding sequence. In some embodiments, the IRES comprises a sequence selected from SEQ ID NOs: 1-2983 and 3282-3287 or a fragment thereof. In some embodiments, the the IRES comprises a sequence at least 80%, 85%, 90%, 91%, 92%, 93%, 94%, 95%, 96%, 97%, 98%, or 99% identical to a sequence selected from SEQ ID NOs: 1-2983 and 3282-3287. In some embodiments, the circular RNA disclosed herein comprises an IRES sequence at least 80%, 85%, 90%, 91%, 92%, 93%, 94%, 95%, 96%, 97%, 98%, or 99% identical to a sequence selected from SEQ ID NOs: 1-2983 and 3282-3287. In some embodiments, the circular RNA disclosed herein comprises an IRES sequence selected from SEQ ID NOs: 1-2983 and 3282-3287 or a fragment thereof. Modifications of IRES and accessory sequences are disclosed herein to increase or reduce IRES activities, for example, by truncating the 5′ and/or 3′ ends of the IRES, adding a spacer 5′ to the IRES, modifying the 6 nucleotides 5′ to the translation initiation site (Kozak sequence), modification of alternative translation initiation sites, and creating chimeric/hybrid IRES sequences. In some embodiments, the IRES sequence in the circular RNA disclosed herein comprises one or more of these modifications relative to a native IRES (e.g., SEQ ID NOs: 1-2983 and 3282-3287).

[0335] In some embodiments, the IRES is an Aalivirus, Ailurivirus, Ampivirus, Anativirus, Aphthovirus, Aquamavirus, Avihepatovirus, Avisivirus, Boosepivirus, Bopivirus, Caecilivirus, Cardiovirus, Cosavirus, Crahelivirus, Crohivirus, Danipivirus, Dicipivirus, Diresapivirus, Enterovirus, Erbovirus, Felipivirus, Fipivirus, Gallivirus, Gruhelivirus, Grusopivirus, Harkavirus, Hemipivirus, Hepatovirus, Hunnivirus, Kobuvirus, Kunsagivirus, Limnipivirus, Livupivirus, Ludopivirus, Malagasivirus, Marsupivirus, Megrivirus, Mischivirus, Mosavirus, Mupivirus, Myrropivirus, Orivirus, Oscivirus, Parabovirus, Parechovirus, Pasivirus, Passerivirus, Pemapivirus, Poecivirus, Potamipivirus, Pygoscepivirus, Rabovirus, Rafivirus, Rajidapivirus, Rohelivirus, Rosavirus, Sakobuvirus, Salivirus, Sapelovirus, Senecavirus, Shanbavirus, Sicinivirus, Symapivirus, Teschovirus, Torchivirus, Tottorivirus, Tremovirus, Tropivirus, Hepacivirus, Pegivirus, Pestivirus, Flavivirus IRES.

[0336] In some embodiments, the IRES is an IRES sequence of Taura syndrome virus, Triatoma virus, Theiler's encephalomyelitis virus, Simian Virus 40, Solenopsis invicta virus 1, Rhopalosiphum padi virus, Reticuloendotheliosis virus, Human poliovirus 1, Plautia stali intestine virus, Kashmir bee virus, Human rhinovirus 2, Homalodisca coagulata virus- 1, Human Immunodeficiency Virus type 1, Himetobi P virus, Hepatitis C virus, Hepatitis A virus, Hepatitis GB virus, Foot and mouth disease virus, Human enterovirus 71, Equine rhinitis virus, Ectropis obliqua picorna-like virus, Encephalomyocarditis virus, Drosophila C Virus, Human coxsackievirus B3, Crucifer tobamovirus, Cricket paralysis virus, Bovine viral diarrhea virus 1, Black Queen Cell Virus, Aphid lethal paralysis virus, Avian encephalomyelitis virus, Acute bee paralysis virus, Hibiscus chlorotic ringspot virus, Classical swine fever virus, Human FGF2, Human SFTPA1, Human AML1/RUNX1, Drosophila antennapedia, Human AQP4, Human AT1R, Human BAG-1, Human BCL2, Human BiP, Human c-IAP1, Human c-myc, Human eIF4G, Mouse NDST4L, Human LEF1, Mouse HIF1 alpha, Human n.myc, Mouse Gtx, Human p27kipl, Human PDGF2/c-sis, Human p53, Human Pim-1, Mouse Rbm3, Drosophila reaper, Canine Scamper, Drosophila Ubx, Human UNR, Mouse UtrA, Human VEGF-A, Human XIAP, Drosophila hairless, S. cerevisiae TFIID, S. cerevisiae YAP1, tobacco etch virus, turnip crinkle virus, EMCV-A, EMCV-B, EMCV-Bf, EMCV-Cf, EMCV pEC9, Picobirnavirus, HCV QC64, Human Cosavirus E/D, Human Cosavirus F, Human Cosavirus JMY, Rhinovirus NAT001, HRV14, HRV89, HRVC-02, HRV-A21, Salivirus A SH1, Salivirus FHB, Salivirus NG-J1, Human Parechovirus 1, Crohivirus B, Yc-3, Rosavirus M-7, Shanbavirus A, Pasivirus A, Pasivirus A 2, Echovirus E14, Human Parechovirus 5, Aichi Virus, Hepatitis A Virus HA16, Phopivirus, CVA10, Enterovirus C, Enterovirus D, Enterovirus J, Human Pegivirus 2, GBV-C GT110, GBV-C K1737, GBV-C Iowa, Pegivirus A 1220, Pasivirus A 3, Sapelovirus, Rosavirus B, Bakunsa Virus, Tremovirus A, Swine Pasivirus 1, PLV-CHN, Pasivirus A, Sicinivirus, Hepacivirus K, Hepacivirus A, BVDV1, Border Disease Virus, BVDV2, CSFV-PK15C, SF573 Dicistrovirus, Hubei Picorna-like Virus, CRPV, Salivirus A BN5, Salivirus A BN2, Salivirus A 02394, Salivirus A GUT, Salivirus A CH, Salivirus A SZ1, Salivirus FHB, CVB3, CVB1, Echovirus 7, CVB5, EVA71, CVA3, CVA12, EV24 or an aptamer to eIF4G.

[0337] In some embodiments, the IRES comprises in whole or in part from a eukaryotic or cellular IRES. In certain embodiments, the IRES is from a human gene, where the human gene is ABCF1, ABCG1, ACAD10, ACOT7, ACSS3, ACTG2, ADCYAP1, ADK, AGTR1, AHCYL2, AHI1, AKAP8L, AKR1A1, ALDH3A1, ALDOA, ALG13, AMMECR1L, ANGPTL4, ANK3, AOC3, AP4B1, AP4E1, APAF1, APBB1, APC, APH1A, APOBEC3D, APOM, APP, AQP4, ARHGAP36, ARL13B, ARMC8, ARMCX6, ARPC1A, ARPC2, ARRDC3, ASAP1, ASB3, ASB5, ASCL1, ASMTL, ATF2, ATF3, ATG4A, ATP5B, ATP6VOA1, ATXN3, AURKA, AURKA, AURKA, AURKA, B3GALNT1, B3GNTL1, B4GALT3, BAAT, BAG1, BAIAP2, BAIAP2L2, BAZ2A, BBX, BCAR1, BCL2, BCS1L, BET1, BID, BIRC2, BPGM, BPIFA2, BRINP2, BSG, BTN3A2, C12orf43, C14orf93, C17orf62, Clorf226, C21orf62, C2orfl5, C4BPB, C4orf22, C9orf84, CACNA1A, CALCOCO2, CAPN11, CASP12, CASP8AP2, CAV1, CBX5, CCDC120, CCDC17, CCDC186, CCDC51, CCN1, CCND1, CCNT1, CD2BP2, CD9, CDC25C, CDC42, CDC7, CDCA7L, CDIP1, CDK1, CDK11A, CDKN1B, CEACAM7, CEP295NL, CFLAR, CHCHD7, CHIA, CHIC1, CHMP2A, CHRNA2, CLCN3, CLEC12A, CLEC7A, CLECLI, CLRN1, CMSS1, CNIH1, CNR1, CNTN5, COG4, COMMD1, COMMD5, CPEB1, CPS1, CRACR2B, CRBN, CREM, CRYBG1, CSDE1, CSF2RA, CSNK2A1, CSTF3, CTCFL, CTH, CTNNA3, CTNNB1, CTNNB1, CTNND1, CTSL, CUTA, CXCR5, CYB5R3, CYP24A1, CYP3A5, DAG1, DAP3, DAP5, DAXX, DCAF4, DCAF7, DCLRElA, DCP1A, DCTN1, DCTN2, DDX19B, DDX46, DEFB123, DGKA, DGKD, DHRS4, DHX15, DI03, DLG1, DLL4, DMD UTR, DMD ex5, DMKN, DNAH6, DNAL4, DUSP13, DUSP19, DYNC1I2, DYNLRB2, DYRK1A, ECI2, ECT2, EIF1AD, EIF2B4, EIF4G1, EIF4G2, EIF4G3, ELANE, ELOVL6, ELP5, EMCN, ENO1, EPB41, ERMN, ERVV-1, ESRRG, ETFB, ETFBKMT, ETV1, ETV4, EXD1, EXT1, EZH2, FAM111B, FAM157A, FAM213A, FBXO25, FBXO9, FBXW7, FCMR, FGF1, FGF1, FGF1A, FGF2, FGF2, FGF-9, FHL5, FMR1, FN1, FOXP1, FTH1, FUBP1, G3BP1, GABBR1, GALC, GART, GAS7, gastrin, GATA1, GATA4, GFM2, GHR, GJB2, GLI1, GLRA2, GMNN, GPAT3, GPATCH3, GPR137, GPR34, GPR55, GPR89A, GPRASP1, GRAP2, GSDMB, GSTO2, GTF2B, GTF2H4, GUCY1B2, HAX1, HCST, HIGD1A, HIGD1B, HIPK1, HIST1H1C, HIST1H3H, HK1, HLA-DRB4, HMBS, HMGA1, HNRNPC, HOPX, HOXA2, HOXA3, HPCAL1, HR, HSP90AB1, HSPA1A, HSPA4L, HSPA5, HYPK, IFFO1, IFT74, IFT81, IGF1, IGF1R, IGF1R, IGF2, IL11, IL17RE, IL1RL1, IL1RN, IL32, IL6, ILF2, ILVBL, INSR, INTS13, IP6K1, ITGA4, ITGAE, KCNE4, KERA, KIAA0355, KIAA0895L, KIAA1324, KIAA1522, KIAA1683, KIF2C, KIZ, KLHL31, KLK7, KRR1, KRT14, KRT17, KRT33A, KRT6A, KRTAP10-2, KRTAP13-3, KRTAP13-4, KRTAP5-11, KRTCAP2, LACRT, LAMB1, LAMB3, LANCL1, LBX2, LCAT, LDHA, LDHAL6A, LEF1, LINC-PINT, LMO3, LRRC4C, LRRC7, LRTOMT, LSM5, LTB4R, LYRM1, LYRM2, MAGEAI1, MAGEA8, MAGEBI, MAGEB16, MAGEB3, MAPT, MARS, MC1R, MCCC1, METTL12, METTL7A, MGC16025, MGC16025, MIA2, MIA2, MITF, MKLN1, MNT, MORF4L2, MPD6, MRFAP1, MRPL21, MRPS12, MSI2, MSLN, MSN, MT2A, MTFR1L, MTMR2, MTRR, MTUS1, MYB, MYC, MYCL, MYCN, MYL10, MYL3, MYLK, MYO1A, MYT2, MZB1, NAP1L1, NAV1, NBAS, NCF2, NDRG1, NDST2, NDUFA7, NDUFBII, NDUFC1, NDUFS1, NEDD4L, NFAT5, NFE2L2, NFE2L2, NFIA, NHEJ1, NHP2, NIT1, NKRF, NME1-NME2, NPAT, NR3C1, NRBF2, NRF1, NTRK2, NUDCD1, NXF2, NXT2, ODC1, ODF2, OPTN, ORIOR2, OR11L1, OR2M2, OR2M3, OR2M5, OR2T10, OR4C15, OR4F17, OR4F5, OR5H1, OR5K1, OR6C3, OR6C75, OR6N1, OR7G2, p53, P2RY4, PAN2, PAQR6, PARP4, PARP9, PC, PCBP4, PCDHGC3, PCLAF, PDGFB, PDZRN4, PELO, PEMT, PEX2, PFKM, PGBD4, PGLYRP3, PHLDA2, PHTF1, PI4 KB, PIGC, PIM1, PKD2L1, PKM, PLCB4, PLD3, PLEKHA1, PLEKHB1, PLS3, PML, PNMA5, PNN, POC1A, POC1B, POLD2, POLD4, POU5F1, PPIG, PQBP1, PRAME, PRPF4, PRR11, PRRT1, PRSS8, PSMA2, PSMA3, PSMA4, PSMD11, PSMD4, PSMD6, PSME3, PSMG3, PTBP3, PTCH1, PTHLH, PTPRD, PUS7L, PVRIG, QPRT, RAB27A, RAB7B, RABGGTB, RAETIE, RALGDS, RALYL, RARB, RCVRN, REG3G, RFC5, RGL4, RGS19, RGS3, RHD, RINL, RIPOR2, RITA1, RMDN2, RNASE1, RNASE4, RNF4, RPA2, RPL17, RPL21, RPL26L1, RPL28, RPL29, RPL41, RPL9, RPS11, RPS13, RPS14, RRBP1, RSU1, RTP2, RUNX1, RUNX1T1, RUNX1T1, RUNX2, RUSC1, RXRG, S100A13, S100A4, SAT1, SCHIP1, SCMH1, SEC14L1, SEMA4A, SERPINA1, SERPINB4, SERTAD3, SFTPD, SH3D19, SHC1, SHMT1, SHPRH, SIM1, SIRT5, SLC11A2, SLC12A4, SLC16A1, SLC25A3, SLC26A9, SLC5A11, SLC6A12, SLC6A19, SLC7A1, SLFN11, SLIRP, SMAD5, SMARCAD1, SMN1, SNCA, SNRNP200, SNRPB2, SNX12, SOD1, SOX13, SOX5, SP8, SPARCL1, SPATA12, SPATA31C2, SPN, SPOP, SQSTM1, SRBD1, SRC, SREBF1, SRPK2, SSB, SSB, SSBP1, ST3GAL6, STAB1, STAMBP, STAU1, STAU1, STAU1, STAU1, STAU1, STK16, STK24, STK38, STMN1, STX7, SULT2B1, SYK, SYNPR, TAF1C, TAGLN, TANK, TAS2R40, TBC1D15, TBXAS1, TCF4, TDGF1, TDP2, TDRD3, TDRD5, TESK2, THAP6, THBD, THTPA, TIAM2, TKFC, TKTL1, TLR10, TM9SF2, TMC6, TMCO2, TMED10, TMEM116, TMEM126A, TMEM159, TMEM208, TMEM230, TMEM67, TMPRSS13, TMUB2, TNFSF4, TNIP3, TP53, TP53, TP73, TRAF1, TRAK1, TRIM31, TRIM6, TRMT1, TRMT2B, TRPM7, TRPM8, TSPEAR, TTC39B, TTLL11, TUBB6, TXLNB, TXNIP, TXNL1, TXNRD1, TYROBP, U2AF1, UBA1, UBE2D3, UBE2I, UBE2L3, UBE2V1, UBE2V2, UMPS, UNG, UPP2, USMG5, USP18, UTP14A, UTRN, UTS2, VDR, VEGFA, VEGFA, VEPH1, VIPAS39, VPS29, VSIG10L, WDHD1, WDR12, WDR4, WDR45, WDYHV1, WRAP53, XIAP, XPNPEP3, YAP1, YWHAZ, YY1AP1, ZBTB32, ZNF146, ZNF250, ZNF385A, ZNF408, ZNF410, ZNF423, ZNF43, ZNF502, ZNF512, ZNF513, ZNF580, ZNF609, ZNF707, or ZNRD1.

ii. Synthetic Ties: Aptamer Complexes, Modified Nucleotides, Ires Variants & Other Engineered Ties

[0338] As contemplated herein, in certain embodiments, a translation initiation element (TIE) comprises a synthetic TIE. In some embodiments, a synthetic TIE comprises aptamer complexes, synthetic IRES or other engineered TIES capable of initiating translation of a linear RNA or circular RNA polynucleotide.

[0339] In some embodiments, one or more aptamer sequences is capable of binding to a component of a eukaryotic initiation factor to either enhance or initiate translation. In some embodiments, aptamer may be used to enhance translation in vivo and in vitro by promoting specific eukaryotic initiation factors (eIF) (e.g., aptamer in WO 2019/081383 A1 is capable of binding to eukaryotic initiation factor 4F (eIF4F). In some embodiments, the aptamer or a complex of aptamers may be capable of binding to EIF4G, EIF4E, EIF4A, EIF4B, EIF3, EIF2, EIF5, EIF1, EIF1A, 40S ribosome, PCBP1 (polyC binding protein), PCBP2, PCBP3, PCBP4, PABP1 (polyA binding protein), PTB, Argonaute protein family, HNRNPK (heterogeneous nuclear ribonucleoprotein K), or La protein.

c. Termination Sequence

[0340] In certain embodiments, the core functional element comprises a termination sequence. In some embodiments, the termination sequence comprises a stop codon. In one embodiment, the termination sequence comprises a stop cassette. In some embodiments, the stop cassette comprises at least 2 stop codons. In some embodiments, the stop cassette comprises at least 2 frames of stop codons. In the same embodiment, the frames of the stop codons in a stop cassette each comprise 1, 2 or more stop codons. In some embodiments, the stop cassette comprises a LoxP or a RoxStopRox, or frt-flanked stop cassette. In the same embodiment, the stop cassette comprises a lox-stop-lox stop cassette.

### C. Variants

[0341] In certain embodiments, a provided polynucleotide (e.g., a DNA template, a precursor RNA polynucleotide, or a circular RNA polynucleotide) comprises modified nucleotides and/or modified nucleosides. In some embodiments, the modified nucleoside is m⁵C (5-methylcytidine). In another embodiment, the modified nucleoside is m⁵U (5-methyluridine). In another embodiment, the modified nucleoside is m⁶A (N⁶-methyladenosine). In another embodiment, the modified nucleoside is s²U (2-thiouridine). In another embodiment, the modified nucleoside is Ψ (pseudouridine). In another embodiment, the modified nucleoside is Um (2′-O-methyluridine). In other embodiments, the modified nucleoside is m¹A (1-methyladenosine); m²A (2-methyladenosine); Am (2′-O-methyladenosine); ms²m⁶A (2-methylthio-N⁶-methyladenosine); i⁶A (N⁶-isopentenyladenosine); ms²i6A (2-methylthio-N⁶ isopentenyladenosine); io⁶A (N⁶-(cis-hydroxyisopentenyl)adenosine); ms²io⁶A (2-methylthio-N⁶-(cis-hydroxyisopentenyl)adenosine); g⁶A (N⁶-glycinylcarbamoyladenosine); t⁶A (N⁶-threonylcarbamoyladenosine); ms²t⁶A (2-methylthio-N⁶-threonyl carbamoyladenosine); m⁶t⁶A (N⁶-methyl-N⁶-threonylcarbamoyladenosine); hn⁶A(N⁶-hydroxynorvalylcarbamoyladenosine); ms²hn⁶A (2-methylthio-N⁶-hydroxynorvalyl carbamoyladenosine); Ar(p) (2′-O-ribosyladenosine (phosphate)); I (inosine); m¹I (1-methylinosine); m¹Im (1,2′-O-dimethylinosine); m³C (3-methylcytidine); Cm (2′-O-methylcytidine); s²C (2-thiocytidine); ac⁴C (N⁴-acetylcytidine); f⁵C (5-formylcytidine); m⁵Cm (5,2′-O-dimethylcytidine); ac⁴Cm (N⁴-acetyl-2′-O-methylcytidine); k²C (lysidine); m¹G (1-methylguanosine); m²G (N²-methylguanosine); m⁷G (7-methylguanosine); Gm (2′-O-methylguanosine); m²₂G (N²,N²-dimethylguanosine); m²Gm (N²,2′-O-dimethylguanosine); m²₂Gm (N²,N²,2′-O-trimethylguanosine); Gr(p) (2′-O-ribosylguanosine(phosphate)); yW (wybutosine); o2yW (peroxywybutosine); OHyW (hydroxywybutosine); OHyW* (undermodified hydroxywybutosine); imG (wyosine); mimG (methylwyosine); Q (queuosine); oQ (epoxyqueuosine); galQ (galactosyl-queuosine); manQ (mannosyl-queuosine); preQ₀ (7-cyano-7-deazaguanosine); preQ₁ (7-aminomethyl-7-deazaguanosine); G⁺ (archaeosine); D (dihydrouridine); m⁵Um (5,2′-O-dimethyluridine); s⁴U (4-thiouridine); m⁵s²U (5-methyl-2-thiouridine); s²Um (2-thio-2′-O-methyluridine); acp³U (3-(3-amino-3-carboxypropyl)uridine); ho⁵U (5-hydroxyuridine); mo⁵U (5-methoxyuridine); cmo⁵U (uridine 5-oxyacetic acid); mcmo⁵U (uridine 5-oxyacetic acid methyl ester); chm⁵U (5-(carboxyhydroxymethyl)uridine)); mchm⁵U (5-(carboxyhydroxymethyl)uridine methyl ester); mcm⁵U (5-methoxycarbonylmethyluridine); mcm⁵Um (5-methoxycarbonylmethyl-2′-O-methyluridine); mcm⁵s²U (5-methoxycarbonylmethyl-2-thiouridine); nm⁵S²U (5-aminomethyl-2-thiouridine); mnm⁵U (5-methylaminomethyluridine); mnm⁵s²U (5-methylaminomethyl-2-thiouridine); mnm⁵se²U (5-methylaminomethyl-2-selenouridine); nCm⁵U (5-carbamoylmethyluridine); nCm⁵Um (5-carbamoylmethyl-2′-O-methyluridine); cmnm⁵U (5-carboxymethylaminomethyluridine); cmnm⁵Um (5-carboxymethylaminomethyl-2′-O-methyluridine); cmnm⁵s²U (5-carboxymethylaminomethyl-2-thiouridine); m⁶ ₂A (N⁶,N⁶-dimethyladenosine); Im (2′-O-methylinosine); m⁴C (N⁴-methylcytidine); m⁴Cm (N⁴,2′-O-dimethylcytidine); hm⁵C (5-hydroxymethylcytidine); m³U (3-methyluridine); cm⁵U (5-carboxymethyluridine); m⁶Am (N⁶,2′-O-dimethyladenosine); m⁶ ₂Am (N⁶,N⁶,O-2′-trimethyladenosine); m^{2,7}G (N²,7-dimethylguanosine); m^{2,2,7}G (N²,N²,7-trimethylguanosine); m³Um (3,2′-O-dimethyluridine); m⁵D (5-methyldihydrouridine); f⁵Cm (5-formyl-2′-O-methylcytidine); m¹Gm (1,2′-O-dimethylguanosine); m¹Am (1,2′-O-dimethyladenosine); τm ⁵U (5-taurinomethyluridine); ™⁵s²U (5-taurinomethyl-2-thiouridine)); imG-14 (4-demethylwyosine); imG2 (isowyosine); or ac⁶A (N⁶-acetyladenosine).

[0342] In some embodiments, the modified nucleoside may include a compound selected from the group of: pyridin-4-one ribonucleoside, 5-aza-uridine, 2-thio-5-aza-uridine, 2-thiouridine, 4-thio-pseudouridine, 2-thio-pseudouridine, 5-hydroxyuridine, 3-methyluridine, 5-carboxymethyl-uridine, 1-carboxymethyl-pseudouridine, 5-propynyl-uridine, 1-propynyl-pseudouridine, 5-taurinomethyluridine, 1-taurinomethyl-pseudouridine, 5-taurinomethyl-2-thio-uridine, 1-taurinomethyl-4-thio-uridine, 5-methyl-uridine, 1-methyl-pseudouridine, 4-thio-1-methyl-pseudouridine, 2-thio-1-methyl-pseudouridine, 1-methyl-1-deaza-pseudouridine, 2-thio-1-methyl-1-deaza-pseudouridine, dihydrouridine, dihydropseudouridine, 2-thio-dihydrouridine, 2-thio-dihydropseudouridine, 2-methoxyuridine, 2-methoxy-4-thio-uridine, 4-methoxy-pseudouridine, 4-m ethoxy-2-thio-pseudouridine, 5-aza-cytidine, pseudoisocytidine, 3-methyl-cytidine, N4-acetylcytidine, 5-formylcytidine, N4-methylcytidine, 5-hydroxymethylcytidine, 1-methyl-pseudoisocytidine, pyrrolo-cytidine, pyrrolo-pseudoisocytidine, 2-thio-cytidine, 2-thio-5-methyl-cytidine, 4-thio-pseudoisocytidine, 4-thio-1-methyl-pseudoisocytidine, 4-thio-1-methyl-1-deaza-pseudoisocytidine, 1-methyl-1-deaza-pseudoisocytidine, zebularine, 5-aza-zebularine, 5-methyl-zebularine, 5-aza-2-thio-zebularine, 2-thio-zebularine, 2-methoxy-cytidine, 2-methoxy-5-methyl-cytidine, 4-methoxy-pseudoisocytidine, 4-methoxy-1-methyl-pseudoisocytidine, 2-aminopurine, 2, 6-diaminopurine, 7-deaza-adenine, 7-deaza-8-aza-adenine, 7-deaza-2-aminopurine, 7-deaza-8-aza-2-aminopurine, 7-deaza-2,6-diaminopurine, 7-deaza-8-aza-2,6-diaminopurine, 1-methyladenosine, N6-methyladenosine, N6-isopentenyladenosine, N6-(cis-hydroxyisopentenyl)adenosine, 2-methylthio-N6-(cis-hydroxyisopentenyl) adenosine, N6-glycinylcarbamoyladenosine, N6-threonylcarbamoyladenosine, 2-methylthio-N6-threonyl carbamoyladenosine, N6,N6-dimethyladenosine, 7-methyladenine, 2-methylthio-adenine, 2-methoxy-adenine, inosine, 1-methyl-inosine, wyosine, wybutosine, 7-deaza-guanosine, 7-deaza-8-aza-guanosine, 6-thio-guanosine, 6-thio-7-deaza-guanosine, 6-thio-7-deaza-8-aza-guanosine, 7-methyl-guanosine, 6-thio-7-methyl-guanosine, 7-methylinosine, 6-methoxy-guanosine, 1-methylguanosine, N2-methylguanosine, N2,N2-dimethylguanosine, 8-oxo-guanosine, 7-methyl-8-oxo-guanosine, 1-methyl-6-thio-guanosine, N2-methyl-6-thio-guanosine, and N2,N2-dimethyl-6-thio-guanosine. In another embodiment, the modifications are independently selected from the group consisting of 5-methylcytosine, pseudouridine and 1-methylpseudouridine.

[0343] In some embodiments, the modified ribonucleosides include 5-methylcytidine, 5-methoxyuridine, 1-methyl-pseudouridine, N6-methyladenosine, and/or pseudouridine. In some embodiments, such modified nucleosides provide additional stability and resistance to immune activation.

[0344] In particular embodiments, polynucleotides may be codon-optimized. A codon optimized sequence may be one in which codons in a polynucleotide encoding a polypeptide have been substituted in order to increase the expression, stability and/or activity of the polypeptide. Factors that influence codon optimization include, but are not limited to one or more of: (i) variation of codon biases between two or more organisms or genes or synthetically constructed bias tables, (ii) variation in the degree of codon bias within an organism, gene, or set of genes, (iii) systematic variation of codons including context, (iv) variation of codons according to their decoding tRNAs, (v) variation of codons according to GC %, either overall or in one position of the triplet, (vi) variation in degree of similarity to a reference sequence for example a naturally occurring sequence, (vii) variation in the codon frequency cutoff, (viii) structural properties of mRNAs transcribed from the DNA sequence, (ix) prior knowledge about the function of the DNA sequences upon which design of the codon substitution set is to be based, and/or (x) systematic variation of codon sets for each amino acid. In some embodiments, a codon optimized polynucleotide may minimize ribozyme collisions and/or limit structural interference between the expression sequence and the core functional element.

### 3. Payloads

[0345] In some embodiments, the expression sequence encodes a therapeutic protein. In some embodiments, the therapeutic protein is selected from the proteins listed in the following table.

| | | Target | |
|---|---|---|---|
| | | cell/ | |
| Payload | Sequence | organ | Preferred delivery formulation |
| CD19 CAR | Any of sequences 309-314 | T cells | [chemical structure] |
| | | | (50 mol %) |
| | | | DSPC (10 mol %) |
| | | | Beta-sitosterol (28.5% mol %) |
| | | | Cholesterol (10 mol %) |
| | | | PEG DMG (1.5 mol %) |
| BCMA CAR* | MALPVTALLLPLALLL HAARPDIVLTQSPASLA VSLGERATINCRASESV SVIGAHLIHWYQQKPG QPPKLLIYLASNLETGV PARFSGSGSGTDFTLTIS SLQAEDAAIYYCLQSRI FPRTFGQGTKLEIKGST SGSGKPGSGEGSTKGQ VQLVQSGSELKKPGAS | T cells | [chemical structure] |
| | VKVSCKASGYTFTDYSI | | (50 mol %) |
| | NWVRQAPGQGLEWMG | | DSPC (10 mol %) |
| | WINTETREPAYAYDFR | | Beta-sitosterol (28.5% mol %) |
| | GRFVFSLDTSVSTAYLQ | | Cholesterol (10 mol %) |
| | ISSLKAEDTAVYYCAR | | PEG DMG (1.5 mol %) |
| | DYSYAMDYWGQGTLV | | |
| | TVSSAAATTTPAPRPPT | | |
| | PAPTIASQPLSLRPEACR | | |
| | PAAGGAVHTRGLDFAC | | |
| | DIYIWAPLAGTCGVLLL | | |
| | SLVITLYCKRGRKKLLY | | |
| | IFKQPFMRPVQTTQEED | | |
| | GCSCRFPEEEEGGCELR | | |
| | VKFSRSADAPAYQQGQ | | |
| | NQLYNELNLGRREEYD | | |
| | VLDKRRGRDPEMGGKP | | |
| | RRKNPQEGLYNELQKD | | |
| | KMAEAYSEIGMKGERR | | |
| | RGKGHDGLYQGLSTAT | | |
| | KDTYDALHMQALPPR | | |
| | (SEQ ID NO: 3270) | | |
| | *The BCMA CAR may be | | |
| | chosen from any of the anti- | | |
| | BCMA CARs disclosed in | | |
| | US Patent Application US | | |
| | 2021/0128618A1 | | |
| MAGE- A4 TCR | TCR alpha chain: KNQVEQSPQSLIILEGK NCTLQCNYTVSPFSNLR WYKQDTGRGPVSLTIM TFSENTKSNGRYTATLD ADTKQSSLHITASQLSD SASYICVVNHSGGSYIP TFGRGTSLIVHPYIQKP DPAVYQLRDSKSSDKS VCLFTDFDSQTNVSQSK | T cells | [chemical structure] |
| | DSDVYITDKTVLDMRS | | (50 mol %) |
| | MDFKSNSAVAWSNKS | | DSPC (10 mol %) |
| | DFACANAFNNSIIPEDT | | Beta-sitosterol (28.5% mol %) |
| | FFPSPESS (SEQ ID NO: | | Cholesterol (10 mol %) |
| | 3271) | | PEG DMG (1.5 mol %) |
| | TCR beta chain: | | |
| | DVKVTQSSRYLVKRTG | | |
| | EKVFLECVQDMDHEN | | |
| | MFWYRQDPGLGLRLIY | | |
| | FSYDVKMKEKGDIPEG | | |
| | YSVSREKKERFSLILES | | |
| | ASTNQTSMYLCASSFL | | |
| | MTSGDPYEQYFGPGTR | | |
| | LTVTEDLKNVFPPEVA | | |
| | VFEPSEAEISHTQKATL | | |
| | VCLATGFYPDHVELSW | | |
| | WVNGKEVHSGVSTDPQ | | |
| | PLKEQPALNDSRYCLSS | | |
| | RLRVSATFWQNPRNHF | | |
| | RCQVQFYGLSENDEWT | | |
| | QDRAKPVTQIVSAEAW | | |
| | GRAD (SEQ ID NO: 3272) | | |
| NY- ESO TCR | TCRalpha extracellular sequence MQEVTQIPAALSVPEGE NLVLNCSFTDSAIYNLQ WFRQDPGKGLTSLLLIQ SSQREQTSGRLNASLDK SSGRSTLYIAASQPGDS ATYLCAVRPTSGGSYIP TFGRGTSLIVHPY (SEQ ID NO: 3273) | T cells | [chemical structure] |
| | TCRbeta extracellular | | (50 mol %) |
| | sequence | | DSPC (10 mol %) |
| | MGVTQTPKFQVLKTGQ | | Beta-sitosterol (28.5% mol %) |
| | SMTLQCAQDMNHEYM | | Cholesterol (10 mol %) |
| | SWYRQDPGMGLRLIHY | | PEG DMG (1.5 mol %) |
| | SVGAGITDQGEVPNGY | | |
| | NVSRSTTEDFPLRLLSA | | |
| | APSQTSVYFCASSYVG | | |
| | NTGELFFGEGSRLTVL | | |
| | (SEQ ID NO: 3274) | | |
| EPO | APPRLICDSRVLERYLL | Kidney | |
| | EAKEAENITTGCAEHCS | or bone | |
| | LNENITVPDTKVNFYA | marrow | |
| | WKRMEVGQQAVEVW | | |
| | QGLALLSEAVLRGQAL | | |
| | LVNSSQPWEPLQLHVD | | |
| | KAVSGLRSLTTLLRALG | | |
| | AQKEAISPPDAASAAPL | | |
| | RTITADTFRKLFRVYSN | | |
| | FLRGKLKLYTGEACRT | | |
| | GDR (SEQ ID NO: 3275) | | |
| PAH | MSTAVLENPGLGRKLS DFGQETSYIEDNCNQN GAISLIFSLKEEVGALA KVLRLFEENDVNLTHIE SRPSRLKKDEYEFFTHL DKRSLPALTNIIKILRHD IGATVHELSRDKKKDT VPWFPRTIQELDRFANQ ILSYGAELDADHPGFKD PVYRARRKQFADIAYN YRHGQPIPRVEYMEEE | Hepatic cells | [chemical structure] |
| | KKTWGTVFKTLKSLYK | | (50 mol %) |
| | THACYEYNHIFPLLEKY | | DSPC (10 mol %) |
| | CGFHEDNIPQLEDVSQF | | Cholesterol (38.5% mol %) |
| | LQTCTGFRLRPVAGLLS | | PEG-DMG (1.5%) |
| | SRDFLGGLAFRVFHCT | | OR |
| | QYIRHGSKPMYTPEPDI | | MC3 (50 mol %) |
| | CHELLGHVPLFSDRSFA | | DSPC (10 mol %) |
| | QFSQEIGLASLGAPDEY | | Cholesterol (38.5% mol %) |
| | IEKLATIYWFTVEFGLC | | PEG-DMG (1.5%) |
| | KQGDSIKAYGAGLLSSF | | |
| | GELQYCLSEKPKLLPLE | | |
| | LEKTAIQNYTVTEFQPL | | |
| | YYVAESENDAKEKVRN | | |
| | FAATIPRPFSVRYDPYT | | |
| | QRIEVLDNTQQLKILAD | | |
| | SINSEIGILCSALQKIK | | |
| | (SEQ ID NO: 3257) | | |
| CPS1 | LSVKAQTAHIVLEDGT KMKGYSFGHPSSVAGE VVFNTGLGGYPEAITDP AYKGQILTMANPIIGNG GAPDTTALDELGLSKY LESNGIKVSGLLVLDYS KDYNHWLATKSLGQW LQEEKVPAIYGVDTRM LTKIIRDKGTMLGKIEF EGQPVDFVDPNKQNLI AEVSTKDVKVYGKGNP | Hepatic cells | [chemical structure] |
| | TKVVAVDCGIKNNVIR | | (50 mol %) |
| | LLVKRGAEVHLVPWN | | DSPC (10 mol %) |
| | HDFTKMEYDGILIAGGP | | Cholesterol (38.5% mol %) |
| | GNPALAEPLIQNVRKIL | | PEG-DMG (1.5%) |
| | ESDRKEPLFGISTGNLIT | | OR |
| | GLAAGAKTYKMSMAN | | MC3 (50 mol %) |
| | RGQNQPVLNITNKQAFI | | DSPC (10 mol %) |
| | TAQNHGYALDNTLPAG | | Cholesterol (38.5% mol %) |
| | WKPLFVNVNDQTNEGI | | PEG-DMG (1.5%) |
| | MHESKPFFAVQFHPEV | | |
| | TPGPIDTEYLFDSFFSLI | | |
| | KKGKATTITSVLPKPAL | | |
| | VASRVEVSKVLILGSGG | | |
| | LSIGQAGEFDYSGSQAV | | |
| | KAMKEENVKTVLMNP | | |
| | NIASVQTNEVGLKQAD | | |
| | TVYFLPITPQFVTEVIKA | | |
| | EQPDGLILGMGGQTAL | | |
| | NCGVELFKRGVLKEYG | | |
| | VKVLGTSVESIMATED | | |
| | RQLFSDKLNEINEKIAPS | | |
| | FAVESIEDALKAADTIG | | |
| | YPVMIRSAYALGGLGS | | |
| | GICPNRETLMDLSTKAF | | |
| | AMTNQILVEKSVTGWK | | |
| | EIEYEVVRDADDNCVT | | |
| | VCNMENVDAMGVHTG | | |
| | DSVVVAPAQTLSNAEF | | |
| | QMLRRTSINVVRHLGIV | | |
| | GECNIQFALHPTSMEYC | | |
| | IIEVNARLSRSSALASK | | |
| | ATGYPLAFIAAKIALGIP | | |
| | LPEIKNVVSGKTSACFE | | |
| | PSLDYMVTKIPRWDLD | | |
| | RFHGTSSRIGSSMKSVG | | |
| | EVMAIGRTFEESFQKAL | | |
| | RMCHPSIEGFTPRLPMN | | |
| | KEWPSNLDLRKELSEPS | | |
| | STRIYAIAKAIDDNMSL | | |
| | DEIEKLTYIDKWFLYK | | |
| | MRDILNMEKTLKGLNS | | |
| | ESMTEETLKRAKEIGFS | | |
| | DKQISKCLGLTEAQTRE | | |
| | LRLKKNIHPWVKQIDTL | | |
| | AAEYPSVTNYLYVTYN | | |
| | GQEHDVNFDDHGMMV | | |
| | LGCGPYHIGSSVEFDW | | |
| | CAVSSIRTLRQLGKKTV | | |
| | VVNCNPETVSTDFDEC | | |
| | DKLYFEELSLERILDIYH | | |
| | QEACGGCIISVGGQIPN | | |
| | NLAVPLYKNGVKIMGT | | |
| | SPLQIDRAEDRSIFSAVL | | |
| | DELKVAQAPWKAVNT | | |
| | LNEALEFAKSVDYPCLL | | |
| | RPSYVLSGSAMNVVFS | | |
| | EDEMKKFLEEATRVSQ | | |
| | EHPVVLTKFVEGAREV | | |
| | EMDA VGKDGR VISHAI | | |
| | SEHVEDAGVHSGDATL | | |
| | MLPTQTISQGAIEKVKD | | |
| | ATRKIAKAFAISGPFNV | | |
| | QFLVKGNDVLVIECNL | | |
| | RASRSFPFVSKTLGVDF | | |
| | IDVATKVMIGENVDEK | | |
| | HLPTLDHPIIPADYVAIK | | |
| | APMFSWPRLRDADPILR | | |
| | CEMASTGEVACFGEGI | | |
| | HTAFLKAMLSTGFKIPQ | | |
| | KGILIGIQQSFRPRFLGV | | |
| | AEQLHNEGFKLFATEA | | |
| | TSDWLNANNVPATPVA | | |
| | WPSQEGQNPSLSSIRKLI | | |
| | RDGSIDLVINLPNNNTK | | |
| | FVHDNYVIRRTAVDSGI | | |
| | PLLTNFQVTKLFAEAV | | |
| | QKSRKVDSKSLFHYRQ | | |
| | YSAGKAA (SEQ ID NO: | | |
| | 3276) | | |
| Cas9 | MKRNYILGLDIGITSVG YGIIDYETRDVIDAGVR LFKEANVENNEGRRSK RGARRLKRRRRHRIQR VKKLLFDYNLLTDHSE LSGINPYEARVKGLSQK LSEEEFSAALLHLAKRR GVHNVNEVEEDTGNEL STKEQISRNSKALEEKY VAELQLERLKKDGEVR | Immune cells | [chemical structure] |
| | GSINRFKTSDYVKEAK | | (50 mol %) |
| | QLLKVQKAYHQLDQSF | | DSPC (10 mol %) |
| | IDTYIDLLETRRTYYEG | | Beta-sitosterol (28.5% mol %) |
| | PGEGSPFGWKDIKEWY | | Cholesterol (10 mol %) |
| | EMLMGHCTYFPEELRS | | PEG DMG (1.5 mol %) |
| | VKYAYNADLYNALND | | |
| | LNNLVITRDENEKLEYY | | |
| | EKFQIIENVFKQKKKPT | | |
| | LKQIAKEILVNEEDIKG | | |
| | YRVTSTGKPEFTNLKV | | |
| | YHDIKDITARKEIIENAE | | |
| | LLDQIAKILTIYQSSEDI | | |
| | QEELTNLNSELTQEEIE | | |
| | QISNLKGYTGTHNLSLK | | |
| | AINLILDELWHTNDNQI | | |
| | AIFNRLKLVPKKVDLSQ | | |
| | QKEIPTTLVDDFILSPVV | | |
| | KRSFIQSIKVINAIIKKY | | |
| | GLPNDIIIELAREKNSKD | | |
| | AQKMINEMQKRNRQT | | |
| | NERIEEIIRTTGKENAKY | | |
| | LIEKIKLHDMQEGKCLY | | |
| | SLEAIPLEDLLNNPFNY | | |
| | EVDHIIPRSVSFDNSFNN | | |
| | KVLVKQEENSKKGNRT | | |
| | PFQYLSSSDSKISYETFK | | |
| | KHILNLAKGKGRISKTK | | |
| | KEYLLEERDINRFSVQK | | |
| | DFINRNLVDTRYATRG | | |
| | LMNLLRSYFRVNNLDV | | |
| | KVKSINGGFTSFLRRK | | |
| | WKFKKERNKGYKHHA | | |
| | EDALIIANADFIFKEWK | | |
| | KLDKAKKVMENQMFE | | |
| | EKQAESMPEIETEQEYK | | |
| | EIFITPHQIKHIKDFKDY | | |
| | KYSHRVDKKPNRELIN | | |
| | DTLYSTRKDDKGNTLI | | |
| | VNNLNGLYDKDNDKL | | |
| | KKLINKSPEKLLMYHH | | |
| | DPQTYQKLKLIMEQYG | | |
| | DEKNPLYKYYEETGNY | | |
| | LTKYSKKDNGPVIKKIK | | |
| | YYGNKLNAHLDITDDY | | |
| | PNSRNKVVKLSLKPYR | | |
| | FDVYLDNGVYKFVTVK | | |
| | NLDVIKKENYYEVNSK | | |
| | CYEEAKKLKKISNQAEF | | |
| | IASFYNNDLIKINGELY | | |
| | RVIGVNNDLLNRIEVN | | |
| | MIDITYREYLENMNDK | | |
| | RPPRIIKTIASKTQSIKK | | |
| | YSTDILGNLYEVKSKK | | |
| | HPQIIKKG (SEQ ID NO: | | |
| | 3277) | | |
| ADAM TS13 | AAGGILHLELLVAVGP DVFQAHQEDTERYVLT NLNIGAELLRDPSLGAQ FRVHLVKMVILTEPEG APNITANLTSSLLSVCG WSQTINPEDDTDPGHA DLVLYITRFDLELPDGN RQVRGVTQLGGACSPT WSCLITEDTGFDLGVTI AHEIGHSFGLEHDGAPG SGCGPSGHVMASDGAA | Hepatic cells | [chemical structure] |
| | PRAGLAWSPCSRRQLL | | (50 mol %) |
| | SLLSAGRARCVWDPPR | | DSPC (10 mol %) |
| | PQPGSAGHPPDAQPGL | | Cholesterol (38.5% mol %) |
| | YYSANEQCRVAFGPKA | | PEG-DMG (1.5%) |
| | VACTFAREHLDMCQAL | | OR |
| | SCHTDPLDQSSCSRLLV | | MC3 (50 mol %) |
| | PLLDGTECGVEKWCSK | | DSPC (10 mol %) |
| | GRCRSL VELTPIAAVHG | | Cholesterol (38.5% mol %) |
| | RWSSWGPRSPCSRSCG | | PEG-DMG (1.5%) |
| | GGVVTRRRQCNNPRPA | | |
| | FGGRACVGADLQAEM | | |
| | CNTQACEKTQLEFMSQ | | |
| | QCARTDGQPLRSSPGG | | |
| | ASFYHWGAAVPHSQG | | |
| | DALCRHMCRAIGESFIM | | |
| | KRGDSFLDGTRCMPSG | | |
| | PREDGTLSLCVSGSCRT | | |
| | FGCDGRMDSQQVWDR | | |
| | CQVCGGDNSTCSPRKG | | |
| | SFTAGRAREYVTFLTVT | | |
| | PNLTSVYIANHRPLFTH | | |
| | LAVRIGGRYVVAGKMS | | |
| | ISPNTTYPSLLEDGRVE | | |
| | YRVALTEDRLPRLEEIRI | | |
| | WGPLQEDADIQVYRRY | | |
| | GEEYGNLTRPDITFTYF | | |
| | QPKPRQAWVWAAVRG | | |
| | PCSVSCGAGLRWVNYS | | |
| | CLDQARKELVETVQCQ | | |
| | GSQQPPAWPEACVLEP | | |
| | CPPYWAVGDFGPCSAS | | |
| | CGGGLRERPVRCVEAQ | | |
| | GSLLKTLPPARCRAGA | | |
| | QQPAVALETCNPQPCP | | |
| | ARWEVSEPSSCTSAGG | | |
| | AGLALENETCVPGADG | | |
| | LEAPVTEGPGSVDEKLP | | |
| | APEPCVGMSCPPGWGH | | |
| | LDATSAGEKAPSPWGSI | | |
| | RTGAQAAHVWTPAAG | | |
| | SCSVSCGRGLMELRFLC | | |
| | MDSALRVPVQEELCGL | | |
| | ASKPGSRREVCQAVPC | | |
| | PARWQYKLAACSVSCG | | |
| | RGVVRRILYCARAHGE | | |
| | DDGEEILLDTQCQGLPR | | |
| | PEPQEACSLEPCPPRWK | | |
| | VMSLGPCSASCGLGTA | | |
| | RRSVACVQLDQGQDVE | | |
| | VDEAACAALVRPEASV | | |
| | PCLIADCTYRWHVGTW | | |
| | MECSVSCGDGIQRRRD | | |
| | TCLGPQAQAPVPADFC | | |
| | QHLPKPVTVRGCWAGP | | |
| | CVGQGTPSLVPHEEAA | | |
| | APGRTTATPAGASLEW | | |
| | SQARGLLFSPAPQPRRL | | |
| | LPGPQENSVQSSACGR | | |
| | QHLEPTGTIDMRGPGQ | | |
| | ADCAVAIGRPLGEVVT | | |
| | LRVLESSLNCSAGDML | | |
| | LLWGRLTWRKMCRKL | | |
| | LDMTFSSKTNTLVVRQ | | |
| | RCGRPGGGVLLRYGSQ | | |
| | LAPETFYRECDMQLFG | | |
| | PWGEIVSPSLSPATSNA | | |
| | GGCRLFINVAPHARIAI | | |
| | HALATNMGAGTEGAN | | |
| | ASYILIRDTHSLRTTAFH | | |
| | GQQVLYWESESSQAEM | | |
| | EFSEGFLKAQASLRGQ | | |
| | YWTLQSWVPEMQDPQ | | |
| | SWKGKEGT (SEQ ID | | |
| | NO: 3278) | | |
| FOXP3 | MPNPRPGKPSAPSLALG PSPGASPSWRAAPKAS DLLGARGPGGTFQGRD LRGGAHASSSSLNPMPP SQLQLPTLPLVMVAPSG ARLGPLPHLQALLQDR PHFMHQLSTVDAHART PVLQVHPLESPAMISLT PPTTATGVFSLKARPGL PPGINVASLEWVSREPA | Immune cells | [chemical structure] |
| | LLCTFPNPSAPRKDSTL | | (50 mol %) |
| | SAVPQSSYPLLANGVC | | DSPC (10 mol %) |
| | KWPGCEKVFEEPEDFL | | Beta-sitosterol (28.5% mol %) |
| | KHCQADHLLDEKGRA | | Cholesterol (10 mol %) |
| | QCLLQREMVQSLEQQL | | PEG DMG (1.5 mol %) |
| | VLEKEKLSAMQAHLAG | | |
| | KMALTKASSVASSDKG | | |
| | SCCIVAAGSQGPVVPA | | |
| | WSGPREAPDSLFAVRR | | |
| | HLWGSHGNSTFPEFLH | | |
| | NMDYFKFHNMRPPFTY | | |
| | ATLIRWAILEAPEKQRT | | |
| | LNEIYHWFTRMFAFFR | | |
| | NHPATWKNAIRHNLSL | | |
| | HKCFVRVESEKGAVWT | | |
| | VDELEFRKKRSQRPSRC | | |
| | SNPTPGP (SEQ ID NO: | | |
| | 3187) | | |
| IL-10 | SPGQGTQSENSCTHFPG NLPNMLRDLRDAFSRV KTFFQMKDQLDNLLLK ESLLEDFKGYLGCQALS EMIQFYLEEVMPQAEN QDPDIKAHVNSLGENL KTLRLRLRRCHRFLPCE NKSKAVEQVKNAFNKL QEKGIYKAMSEFDIFIN YIEAYMTMKIRN (SEQ | Immune cells | [chemical structure] |
| | ID NO: 3181) | | (50 mol %) |
| | | | DSPC (10 mol %) |
| | | | Beta-sitosterol (28.5% mol %) |
| | | | Cholesterol (10 mol %) |
| | | | PEG DMG (1.5 mol %) |
| IL-2 | APTSSSTKKTQLQLEHL LLDLQMILNGINNYKNP KLTRMLTFKFYMPKKA TELKHLQCLEEELKPLE EVLNLAQSKNFHLRPR DLISNINVIVLELKGSET TFMCEYADETATIVEFL NRWITFCQSIISTLT (SEQ ID NO: 3177) | Immune cells | [chemical structure] |
| | | | (50 mol %) |
| | | | DSPC (10 mol %) |
| | | | Beta-sitosterol (28.5% mol %) |
| | | | Cholesterol (10 mol %) |
| | | | PEG DMG (1.5 mol %) |

[0346] In some embodiments, the expression sequence encodes a therapeutic protein. In some embodiments, the expression sequence encodes a cytokine, e.g., IL-12p70, IL-15, IL-2, IL-18, IL-21, IFN-α, IFN-β, IL-10, TGF-beta, IL-4, or IL-35, or a functional fragment thereof. In some embodiments, the expression sequence encodes an immune checkpoint inhibitor. In some embodiments, the expression sequence encodes an agonist (e.g., a TNFR family member such as CD137L, OX40L, ICOSL, LIGHT, or CD70). In some embodiments, the expression sequence encodes a chimeric antigen receptor. In some embodiments, the expression sequence encodes an inhibitory receptor agonist (e.g., PDL1, PDL2, Galectin-9, VISTA, B7H4, or MHCII) or inhibitory receptor (e.g., PD1, CTLA4, TIGIT, LAG3, or TIM3). In some embodiments, the expression sequence encodes an inhibitory receptor antagonist. In some embodiments, the expression sequence encodes one or more TCR chains (alpha and beta chains or gamma and delta chains). In some embodiments, the expression sequence encodes a secreted T cell or immune cell engager (e.g., a bispecific antibody such as BiTE, targeting, e.g., CD3, CD137, or CD28 and a tumor-expressed protein e.g., CD19, CD20, or BCMA etc.). In some embodiments, the expression sequence encodes a transcription factor (e.g., FOXP3, HELIOS, TOX1, or TOX2). In some embodiments, the expression sequence encodes an immunosuppressive enzyme (e.g., IDO or CD39/CD73). In some embodiments, the expression sequence encodes a GvHD (e.g., anti-HLA-A2 CAR-Tregs).

[0347] In some embodiments, a polynucleotide encodes a protein that is made up of subunits that are encoded by more than one gene. For example, the protein may be a heterodimer, wherein each chain or subunit of the protein is encoded by a separate gene. It is possible that more than one circRNA molecule is delivered in the transfer vehicle and each circRNA encodes a separate subunit of the protein. Alternatively, a single circRNA may be engineered to encode more than one subunit. In certain embodiments, separate circRNA molecules encoding the individual subunits may be administered in separate transfer vehicles.

### A. Antigen-Recognition Receptors

a. Chimeric Antigen Receptors (Cars)

[0348] In some embodiments, a provided RNA polynucleotide encodes one or more chimeric antigen receptors (CARs or CAR-Ts). CARs are genetically-engineered receptors. These engineered receptors may be inserted into and expressed by immune cells, including T cells via circular RNA as described herein. With a CAR, a single receptor may be programmed to both recognize a specific antigen and, when bound to that antigen, activate the immune cell to attack and destroy the cell bearing that antigen. When these antigens exist on tumor cells, an immune cell that expresses the CAR may target and kill the tumor cell. In some embodiments, the CAR encoded by the polynucleotide comprises (i) an antigen-binding molecule that specifically binds to a target antigen, (ii) a hinge domain, a transmembrane domain, and an intracellular domain, and (iii) an activating domain.

[0349] In some embodiments, an orientation of the CARs in accordance with the disclosure comprises an antigen binding domain (such as an scFv) in tandem with a costimulatory domain and an activating domain. The costimulatory domain may comprise one or more of an extracellular portion, a transmembrane portion, and an intracellular portion. In other embodiments, multiple costimulatory domains may be utilized in tandem.

i. Antigen Binding Domain

[0350] CARs may be engineered to bind to an antigen (such as a cell-surface antigen) by incorporating an antigen binding molecule that interacts with that targeted antigen. In some embodiments, the antigen binding molecule is an antibody fragment thereof, e.g., one or more single chain antibody fragment (scFv). An scFv is a single chain antibody fragment having the variable regions of the heavy and light chains of an antibody linked together. See U.S. Pat. Nos. 7,741,465, and 6,319,494 as well as Eshhar et al., Cancer Immunol Immunotherapy (1997) 45: 131-136. An scFv retains the parent antibody's ability to specifically interact with target antigen. scFvs are useful in chimeric antigen receptors because they may be engineered to be expressed as part of a single chain along with the other CAR components. Id. See also Krause et al., J. Exp. Med., Volume 188, No. 4, 1998 (619-626); Finney et al., Journal of Immunology, 1998, 161: 2791-2797. It will be appreciated that the antigen binding molecule is typically contained within the extracellular portion of the CAR such that it is capable of recognizing and binding to the antigen of interest. Bispecific and multispecific CARs are contemplated within the scope of the invention, with specificity to more than one target of interest.

[0351] In some embodiments, the antigen binding molecule comprises a single chain, wherein the heavy chain variable region and the light chain variable region are connected by a linker. In some embodiments, the VH is located at the N terminus of the linker and the VL is located at the C terminus of the linker. In other embodiments, the VL is located at the N terminus of the linker and the VH is located at the C terminus of the linker. In some embodiments, the linker comprises at least about 5, at least about 8, at least about 10, at least about 13, at least about 15, at least about 18, at least about 20, at least about 25, at least about 30, at least about 35, at least about 40, at least about 45, at least about 50, at least about 60, at least about 70, at least about 80, at least about 90, or at least about 100 amino acids.

[0352] In some embodiments, the antigen binding molecule comprises a nanobody. In some embodiments, the antigen binding molecule comprises a DARPin. In some embodiments, the antigen binding molecule comprises an anticalin or other synthetic protein capable of specific binding to target protein.

[0353] In some embodiments, the CAR comprises an antigen binding domain specific for an antigen selected from the group CD19, CD123, CD22, CD30, CD171, CS-1, C-type lectin-like molecule-1, CD33, epidermal growth factor receptor variant III (EGFRvIII), ganglioside G2 (GD2), ganglioside GD3, TNF receptor family member B cell maturation (BCMA), Tn antigen ((Tn Ag) or (GaINAca-Ser/Thr)), prostate-specific membrane antigen (PSMA), Receptor tyrosine kinase-like orphan receptor 1 (ROR1), Fms-Like Tyrosine Kinase 3 (FLT3), Tumor-associated glycoprotein 72 (TAG72), CD38, CD44v6, Carcinoembryonic antigen (CEA), Epithelial cell adhesion molecule (EPCAM), B7H3 (CD276), KIT (CD117), Interleukin-13 receptor subunit alpha-2, mesothelin, Interleukin 11 receptor alpha (IL-11Ra), prostate stem cell antigen (PSCA), Protease Serine 21, vascular endothelial growth factor receptor 2 (VEGFR2), Lewis(Y) antigen, CD24, Platelet-derived growth factor receptor beta (PDGFR-beta), Stage-specific embryonic antigen-4 (SSEA-4), CD20, Folate receptor alpha, HER2, HER3, Mucin 1, cell surface associated (MUC1), epidermal growth factor receptor (EGFR), neural cell adhesion molecule (NCAM), Prostase, prostatic acid phosphatase (PAP), elongation factor 2 mutated (ELF2M), Ephrin B2, fibroblast activation protein alpha (FAP), insulin-like growth factor 1 receptor (IGF-I receptor), carbonic anhydrase IX (CAIX), Proteasome (Prosome, Macropain) Subunit, Beta Type, 9 (LMP2), glycoprotein 100 (gp100), oncogene fusion protein consisting of breakpoint cluster region (BCR) and Abelson murine leukemia viral oncogene homolog 1 (Abl) (bcr-abl), tyrosinase, ephrin type-A receptor 2 (EphA2), Fucosyl GM1, sialyl Lewis adhesion molecule (sLe), ganglioside GM3, transglutaminase 5 (TGS5), high molecular weight-melanoma-associated antigen (HMWMAA), o-acetyl-GD2 ganglioside (OAcGD2), Folate receptor beta, tumor endothelial marker 1 (TEM1/CD248), tumor endothelial marker 7-related (TEM7R), claudin 6 (CLDN6), thyroid stimulating hormone receptor (TSHR), G protein-coupled receptor class C group 5, member D (GPRC5D), chromosome X open reading frame 61 (CXORF61), CD97, CD179a, anaplastic lymphoma kinase (ALK), Polysialic acid, placenta-specific 1 (PLAC1), hexasaccharide portion of globoH glycoceramide (GloboH), mammary gland differentiation antigen (NY-BR-1), uroplakin 2 (UPK2), Hepatitis A virus cellular receptor 1 (HAVCR1), adrenoceptor beta 3 (ADRB3), pannexin 3 (PANX3), G protein-coupled receptor 20 (GPR20), lymphocyte antigen 6 complex, locus K 9 (LY6K), Olfactory receptor 51E2 (OR51E2), TCR Gamma Alternate Reading Frame Protein (TARP), Wilms tumor protein (WT1), Cancer/testis antigen 1 (NY-ESO-1), Cancer/testis antigen 2 (LAGE-1a), MAGE family members (including MAGE-A1, MAGE-A3 and MAGE-A4), ETS translocation-variant gene 6, located on chromosome 12p (ETV6-AML), sperm protein 17 (SPA17), X Antigen Family, Member 1A (XAGE1), angiopoietin-binding cell surface receptor 2 (Tie 2), melanoma cancer testis antigen-1 (MAD-CT-1), melanoma cancer testis antigen-2 (MAD-CT-2), Fos-related antigen 1, tumor protein p53 (p53), p53 mutant, prostein, surviving, telomerase, prostate carcinoma tumor antigen-1, melanoma antigen recognized by T cells 1, Rat sarcoma (Ras) mutant, human Telomerase reverse transcriptase (hTERT), sarcoma translocation breakpoints, melanoma inhibitor of apoptosis (ML-IAP), ERG (transmembrane protease, serine 2 (TMPRSS2) ETS fusion gene), N-Acetyl glucosaminyl-transferase V (NA17), paired box protein Pax-3 (PAX3), Androgen receptor, Cyclin B1, v-myc avian myelocytomatosis viral oncogene neuroblastoma derived homolog (MYCN), Ras Homolog Family Member C (RhoC), Tyrosinase-related protein 2 (TRP-2), Cytochrome P450 1B1 (CYP1B1), CCCTC-Binding Factor (Zinc Finger Protein)-Like, Squamous Cell Carcinoma Antigen Recognized By T Cells 3 (SART3), Paired box protein Pax-5 (PAX5), proacrosin binding protein sp32 (OY-TES1), lymphocyte-specific protein tyrosine kinase (LCK), A kinase anchor protein 4 (AKAP-4), synovial sarcoma, X breakpoint 2 (SSX2), Receptor for Advanced Glycation Endproducts (RAGE-1), renal ubiquitous 1 (RU1), renal ubiquitous 2 (RU2), legumain, human papilloma virus E6 (HPV E6), human papilloma virus E7 (HPV E7), intestinal carboxyl esterase, heat shock protein 70-2 mutated (mut hsp70-2), CD79a, CD79b, CD72, Leukocyte-associated immunoglobulin-like receptor 1 (LAIR1), Fc fragment of IgA receptor (FCAR or CD89), Leukocyte immunoglobulin-like receptor subfamily A member 2 (LTLRA2), CD300 molecule-like family member f (CD300LF), C-type lectin domain family 12 member A (CLECi2A), bone marrow stromal cell antigen 2 (BST2), EGF-like module-containing mucin-like hormone receptor-like 2 (EMR2), lymphocyte antigen 75 (LY75), Glypican-3 (GPC3), Fc receptor-like 5 (FCRL5), MUC16, 5T4, 8H9, avpE) integrin, avR6 integrin, alphafetoprotein (AFP), B7-H6, ca-125, CA9, CD44, CD44v7/8, CD52, E-cadherin, EMA (epithelial membrane antigen), epithelial glycoprotein-2 (EGP-2), epithelial glycoprotein-40 (EGP-40), ErbB4, epithelial tumor antigen (ETA), folate binding protein (FBP), kinase insert domain receptor (KDR), k-light chain, L1 cell adhesion molecule, MUC18, NKG2D, oncofetal antigen (h5T4), tumor/testis-antigen 1B, GAGE, GAGE-1, BAGE, SCP-1, CTZ9, SAGE, CAGE, CT10, MART-1, immunoglobulin lambda-like polypeptide 1 (IGLL1), Hepatitis B Surface Antigen Binding Protein (HBsAg), viral capsid antigen (VCA), early antigen (EA), EBV nuclear antigen (EBNA), HHV-6 p41 early antigen, HHV-6B U94 latent antigen, HHV-6B p98 late antigen, cytomegalovirus (CMV) antigen, large T antigen, small T antigen, adenovirus antigen, respiratory syncytial virus (RSV) antigen, haemagglutinin (HA), neuraminidase (NA), parainfluenza type 1 antigen, parainfluenza type 2 antigen, parainfluenza type 3 antigen, parainfluenza type 4 antigen, Human Metapneumovirus (HMPV) antigen, hepatitis C virus (HCV) core antigen, HIV p24 antigen, human T-cell lympotrophic virus (HTLV-1) antigen, Merkel cell polyoma virus small T antigen, Merkel cell polyoma virus large T antigen, Kaposi sarcoma-associated herpesvirus (KSHV) lytic nuclear antigen and KSHV latent nuclear antigen. In some embodiments, an antigen binding domain comprises an amino acid sequence selected from SEQ ID NOs: 3165-3176.

ii. Hinge/Spacer Domain

[0354] In some embodiments, a CAR of the instant disclosure comprises a hinge or spacer domain. In some embodiments, the hinge/spacer domain may comprise a truncated hinge/spacer domain (THD) the THD domain is a truncated version of a complete hinge/spacer domain (“CHD”). In some embodiments, an extracellular domain is from or derived from (e.g., comprises all or a fragment of) ErbB2, glycophorin A (GpA), CD2, CD3 delta, CD3 epsilon, CD3 gamma, CD4, CD7, CD8a, CD8[T CD1 1a (IT GAL), CD1 1b (IT GAM), CD1 1c (ITGAX), CD1 1d (IT GAD), CD18 (ITGB2), CD19 (B4), CD27 (TNFRSF7), CD28, CD28T, CD29 (ITGB1), CD30 (TNFRSF8), CD40 (TNFRSF5), CD48 (SLAMF2), CD49a (ITGA1), CD49d (ITGA4), CD49f (ITGA6), CD66a (CEACAM1), CD66b (CEACAM8), CD66c (CEACAM6), CD66d (CEACAM3), CD66e (CEACAM5), CD69 (CLEC2), CD79A (B-cell antigen receptor complex-associated alpha chain), CD79B (B-cell antigen receptor complex-associated beta chain), CD84 (SLAMF5), CD96 (Tactile), CD100 (SEMA4D), CD103 (ITGAE), CD134 (0X40), CD137 (4-1BB), CD150 (SLAMF1), CD158A (KIR2DL1), CD158B1 (KIR2DL2), CD158B2 (KIR2DL3), CD158C (KIR3DP1), CD158D (KIRDL4), CD158F1 (KIR2DL5A), CD158F2 (KIR2DL5B), CD158K (KIR3DL2), CD160 (BY55), CD162 (SELPLG), CD226 (DNAM1), CD229 (SLAMF3), CD244 (SLAMF4), CD247 (CD3-zeta), CD258 (LIGHT), CD268 (BAFFR), CD270 (TNFSF14), CD272 (BTLA), CD276 (B7-H3), CD279 (PD-1), CD314 (NKG2D), CD319 (SLAMF7), CD335 (NK-p46), CD336 (NK-p44), CD337 (NK-p30), CD352 (SLAMF6), CD353 (SLAMF8), CD355 (CRT AM), CD357 (TNFRSF18), inducible T cell co-stimulator (ICOS), LFA-1 (CD1 1a/CD18), NKG2C, DAP-10, ICAM-1, NKp80 (KLRF1), IL-2R beta, IL-2R gamma, IL-7R alpha, LFA-1, SLAMF9, LAT, GADS (GrpL), SLP-76 (LCP2), PAG1/CBP, a CD83 ligand, Fc gamma receptor, MHC class 1 molecule, MHC class 2 molecule, a TNF receptor protein, an immunoglobulin protein, a cytokine receptor, an integrin, activating NK cell receptors, a Toll ligand receptor, and fragments or combinations thereof. A hinge or spacer domain may be derived either from a natural or from a synthetic source.

[0355] In some embodiments, a hinge or spacer domain is positioned between an antigen binding molecule (e.g., an scFv) and a transmembrane domain. In this orientation, the hinge/spacer domain provides distance between the antigen binding molecule and the surface of a cell membrane on which the CAR is expressed. In some embodiments, a hinge or spacer domain is from or derived from an immunoglobulin. In some embodiments, a hinge or spacer domain is selected from the hinge/spacer regions of IgG1, IgG2, IgG3, IgG4, IgA, IgD, IgE, IgM, or a fragment thereof. In some embodiments, a hinge or spacer domain comprises, is from, or is derived from the hinge/spacer region of CD8 alpha. In some embodiments, a hinge or spacer domain comprises, is from, or is derived from the hinge/spacer region of CD28. In some embodiments, a hinge or spacer domain comprises a fragment of the hinge/spacer region of CD8 alpha or a fragment of the hinge/spacer region of CD28, wherein the fragment is anything less than the whole hinge/spacer region. In some embodiments, the fragment of the CD8 alpha hinge/spacer region or the fragment of the CD28 hinge/spacer region comprises an amino acid sequence that excludes at least 1, at least 2, at least 3, at least 4, at least 5, at least 6, at least 7, at least 8, at least 9, at least 10, at least 11, at least 12, at least 13, at least 14, at least 15, at least 16, at least 17, at least 18, at least 19, or at least 20 amino acids at the N-terminus or C-Terminus, or both, of the CD8 alpha hinge/spacer region, or of the CD28 hinge/spacer region.

iii. Transmembrane Domain

[0356] The CAR of the present disclosure may further comprise a transmembrane domain and/or an intracellular signaling domain. The transmembrane domain may be designed to be fused to the extracellular domain of the CAR. It may similarly be fused to the intracellular domain of the CAR. In some embodiments, the transmembrane domain that naturally is associated with one of the domains in a CAR is used. In some instances, the transmembrane domain may be selected or modified (e.g., by an amino acid substitution) to avoid binding of such domains to the transmembrane domains of the same or different surface membrane proteins to minimize interactions with other members of the receptor complex. The transmembrane domain may be derived either from a natural or from a synthetic source. Where the source is natural, the domain may be derived from any membrane-bound or transmembrane protein.

[0357] Transmembrane regions may be derived from (i.e. comprise) a receptor tyrosine kinase (e.g., ErbB2), glycophorin A (GpA), 4-1BB/CD137, activating NK cell receptors, an immunoglobulin protein, B7-H3, BAFFR, BFAME (SEAMF8), BTEA, CD100 (SEMA4D), CD103, CD160 (BY55), CD18, CD19, CD19a, CD2, CD247, CD27, CD276 (B7-H3), CD28, CD29, CD3 delta, CD3 epsilon, CD3 gamma, CD30, CD4, CD40, CD49a, CD49D, CD49f, CD69, CD7, CD84, CD8alpha, CD8beta, CD96 (Tactile), CD1 1a, CD1 1b, CD1 1c, CD1 Id, CDS, CEACAM1, CRT AM, cytokine receptor, DAP-10, DNAM1 (CD226), Fc gamma receptor, GADS, GITR, HVEM (EIGHTR), IA4, ICAM-1, ICAM-1, Ig alpha (CD79a), IE-2R beta, IE-2R gamma, IE-7R alpha, inducible T cell costimulator (ICOS), integrins, ITGA4, ITGA4, ITGA6, IT GAD, ITGAE, ITGAE, IT GAM, ITGAX, ITGB2, ITGB7, ITGB1, KIRDS2, EAT, LFA-1, LFA-1, a ligand that specifically binds with CD83, LIGHT, LIGHT, LTBR, Ly9 (CD229), lymphocyte function-associated antigen-1 (LFA-1; CD1-1a/CD18), MHC class 1 molecule, NKG2C, NKG2D, NKp30, NKp44, NKp46, NKp80 (KLRF1), OX-40, PAG/Cbp, programmed death-1 (PD-1), PSGL1, SELPLG (CD162), Signaling Lymphocytic Activation Molecules (SLAM proteins), SLAM (SLAMF1; CD150; IPO-3), SLAMF4 (CD244; 2B4), SLAMF6 (NTB-A; Lyl08), SLAMF7, SLP-76, TNF receptor proteins, TNFR2, TNFSF14, a Toll ligand receptor, TRANCE/RANKL, VLA1, or VLA-6, or a fragment, truncation, or a combination thereof.

[0358] In some embodiments, suitable intracellular signaling domain include, but are not limited to, activating Macrophage/Myeloid cell receptors CSFR1, MYD88, CD14, TIE2, TLR4, CR3, CD64, TREM2, DAP10, DAP12, CD169, DECTIN1, CD206, CD47, CD163, CD36, MARCO, TIM4, MERTK, F4/80, CD91, CiQR, LOX-1, CD68, SRA, BAI-1, ABCA7, CD36, CD31, Lactoferrin, or a fragment, truncation, or combination thereof.

[0359] In some embodiments, a receptor tyrosine kinase may be derived from (e.g., comprise) Insulin receptor (InsR), Insulin-like growth factor I receptor (IGF1R), Insulin receptor-related receptor (IRR), platelet derived growth factor receptor alpha (PDGFRa), platelet derived growth factor receptor beta (PDGFRfi). KIT proto-oncogene receptor tyrosine kinase (Kit), colony stimulating factor 1 receptor (CSFR), fms related tyrosine kinase 3 (FLT3), fms related tyrosine kinase 1 (VEGFR-1), kinase insert domain receptor (VEGFR-2), fms related tyrosine kinase 4 (VEGFR-3), fibroblast growth factor receptor 1 (FGFR1), fibroblast growth factor receptor 2 (FGFR2), fibroblast growth factor receptor 3 (FGFR3), fibroblast growth factor receptor 4 (FGFR4), protein tyrosine kinase 7 (CCK4), neurotrophic receptor tyrosine kinase 1 (trkA), neurotrophic receptor tyrosine kinase 2 (trkB), neurotrophic receptor tyrosine kinase 3 (trkC), receptor tyrosine kinase like orphan receptor 1 (ROR1), receptor tyrosine kinase like orphan receptor 2 (ROR2), muscle associated receptor tyrosine kinase (MuSK), MET proto-oncogene, receptor tyrosine kinase (MET), macrophage stimulating 1 receptor (Ron), AXL receptor tyrosine kinase (Axl), TYR03 protein tyrosine kinase (Tyro3), MER proto-oncogene, tyrosine kinase (Mer), tyrosine kinase with immunoglobulin like and EGF like domains 1 (TIEli), TEK receptor tyrosine kinase (TIE2), EPH receptor A1 (EphA1), EPH receptor A2 (EphA2), (EPH receptor A3) EphA3, EPH receptor A4 (EphA4), EPH receptor A5 (EphA5), EPH receptor A6 (EphA6), EPH receptor A7 (EphA7), EPH receptor A8 (EphA8), EPH receptor A10 (EphAlO), EPH receptor B1 (EphB1), EPH receptor B2 (EphB2), EPH receptor B3 (EphB3), EPH receptor B4 (EphB4), EPH receptor B6 (EphB6), ret proto oncogene (Ret), receptor-like tyrosine kinase (RYK), discoidin domain receptor tyrosine kinase 1 (DDR1), discoidin domain receptor tyrosine kinase 2 (DDR2), c-ros oncogene 1, receptor tyrosine kinase (ROS), apoptosis associated tyrosine kinase (Lmr1), lemur tyrosine kinase 2 (Lmr2), lemur tyrosine kinase 3 (Lmr3), leukocyte receptor tyrosine kinase (LTK), ALK receptor tyrosine kinase (ALK), or serine/threonine/tyrosine kinase 1 (STYK1).

iv. Costimulatory Domain

[0360] In certain embodiments, the CAR comprises a costimulatory domain. In some embodiments, the costimulatory domain comprises 4-1BB (CD137), CD28, or both, and/or an intracellular T cell signaling domain. In a preferred embodiment, the costimulatory domain is human CD28, human 4-1BB, or both, and the intracellular T cell signaling domain is human CD3 zeta (ζ). 4-1BB, CD28, CD3 zeta may comprise less than the whole 4-1BB, CD28 or CD3 zeta, respectively. Chimeric antigen receptors may incorporate costimulatory (signaling) domains to increase their potency. See U.S. Pat. Nos. 7,741,465, and 6,319,494, as well as Krause et al. and Finney et al. (supra), Song et al., Blood 119:696-706 (2012); Kalos et al., Sci Transl. Med. 3:95 (2011); Porter et al., N. Engl. J. Med. 365:725-33 (2011), and Gross et al., Amur. Rev. Pharmacol. Toxicol. 56:59-83 (2016).

[0361] In some embodiments, a costimulatory domain comprises the amino acid sequence of SEQ ID NO: 3162 or 3164.

v. Intracellular Signalling Domain

[0362] The intracellular (signaling) domain of the engineered T cells disclosed herein may provide signaling to an activating domain, which then activates at least one of the normal effector functions of the immune cell. Effector function of a T cell, for example, may be cytolytic activity or helper activity including the secretion of cytokines.

[0363] In some embodiments, suitable intracellular signaling domain include (e.g., comprise), but are not limited to 4-1BB/CD137, activating NK cell receptors, an Immunoglobulin protein, B7-H3, BAFFR, BLAME (SLAMF8), BTLA, CD100 (SEMA4D), CD103, CD160 (BY55), CD18, CD19, CD 19a, CD2, CD247, CD27, CD276 (B7-H3), CD28, CD29, CD3 delta, CD3 epsilon, CD3 gamma, CD30, CD4, CD40, CD49a, CD49D, CD49f, CD69, CD7, CD84, CD8alpha, CD8beta, CD96 (Tactile), CD1 1a, CD1 1b, CD1 1c, CD1 Id, CDS, CEACAM1, CRT AM, cytokine receptor, DAP-10, DNAM1 (CD226), Fc gamma receptor, GADS, GITR, HVEM (LIGHTR), IA4, ICAM-1, Ig alpha (CD79a), IL-2R beta, IL-2R gamma, IL-7R alpha, inducible T cell costimulator (ICOS), integrins, ITGA4, ITGA6, ITGAD, ITGAE, ITGAL, ITGAM, ITGAX, ITGB2, ITGB7, ITGB1, KIRDS2, LAT, LFA-1, ligand that specifically binds with CD83, LIGHT, LTBR, Ly9 (CD229), Lyl08, lymphocyte function-associated antigen- 1 (LFA-1; CD1-1a/CD18), MHC class 1 molecule, NKG2C, NKG2D, NKp30, NKp44, NKp46, NKp80 (KLRF1), OX-40, PAG/Cbp, programmed death-1 (PD-1), PSGL1, SELPLG (CD162), Signaling Lymphocytic Activation Molecules (SLAM proteins), SLAM (SLAMF1; CD150; IPO-3), SLAMF4 (CD244; 2B4), SLAMF6 (NTB-A), SLAMF7, SLP-76, TNF receptor proteins, TNFR2, TNFSF14, a Toll ligand receptor, TRANCE/RANKL, VLA1, or VLA-6, or a fragment, truncation, or a combination thereof.

[0364] CD3 is an element of the T cell receptor on native T cells, and has been shown to be an important intracellular activating element in CARs. In some embodiments, the CD3 is CD3 zeta. In some embodiments, the activating domain comprises an amino acid sequence at least about 60%, at least about 65%, at least about 70%, at least about 75%, at least about 80%, at least about 85%, at least about 90%, at least about 95%, at least about 96%, at least about 97%, at least about 98%, at least about 99%, or about 100% identical to the polypeptide sequence of SEQ ID NO: 3163.

### B. T-CELL RECEPTORS (TCR)

[0365] In some embodiments, a provided circular RNA polynucleotide encodes a T-cell receptor. TCRs are described using the International Immunogenetics (IMGT) TCR nomenclature, and links to the IMGT public database of TCR sequences. Native alpha-beta heterodimeric TCRs have an alpha chain and a beta chain. Broadly, each chain may comprise variable, joining and constant regions, and the beta chain also usually contains a short diversity region between the variable and joining regions, but this diversity region is often considered as part of the joining region. Each variable region may comprise three CDRs (Complementarity Determining Regions) embedded in a framework sequence, one being the hypervariable region named CDR3. There are several types of alpha chain variable (Vα) regions and several types of beta chain variable (Vβ) regions distinguished by their framework, CDR1 and CDR2 sequences, and by a partly defined CDR3 sequence. The Vα types are referred to in IMGT nomenclature by a unique TRAV number. Thus “TRAV2i” defines a TCR Vα region having unique framework and CDR1 and CDR2 sequences, and a CDR3 sequence which is partly defined by an amino acid sequence which is preserved from TCR to TCR but which also includes an amino acid sequence which varies from TCR to TCR. In the same way, “TRBV5-1” defines a TCR Vβ region having unique framework and CDR1 and CDR2 sequences, but with only a partly defined CDR3 sequence.

[0366] The joining regions of the TCR are similarly defined by the unique IMGT TRAJ and TRBJ nomenclature, and the constant regions by the IMGT TRAC and TRBC nomenclature.

[0367] The beta chain diversity region is referred to in IMGT nomenclature by the abbreviation TRBD, and, as mentioned, the concatenated TRBD/TRBJ regions are often considered together as the joining region.

[0368] The unique sequences defined by the IMGT nomenclature are widely known and accessible to those working in the TCR field. For example, they can be found in the IMGT public database. The “T cell Receptor Factsbook”, (2001) LeFranc and LeFranc, Academic Press, ISBN 0-12-441352-8 also discloses sequences defined by the IMGT nomenclature, but because of its publication date and consequent time-lag, the information therein sometimes needs to be confirmed by reference to the IMGT database.

[0369] Native TCRs exist in heterodimeric αβ or γδ forms. However, recombinant TCRs consisting of αα or ββ homodimers have previously been shown to bind to peptide MHC molecules. Therefore, the TCR of the invention may be a heterodimeric αβ TCR or may be an aa or RR homodimeric TCR.

[0370] For use in adoptive therapy, an αβ heterodimeric TCR may, for example, be transfected as full length chains having both cytoplasmic and transmembrane domains. In certain embodiments TCRs of the invention may have an introduced disulfide bond between residues of the respective constant domains, as described, for example, in WO 2006/000830.

[0371] TCRs of the invention, particularly alpha-beta heterodimeric TCRs, may comprise an alpha chain TRAC constant domain sequence and/or a beta chain TRBC1 or TRBC2 constant domain sequence. The alpha and beta chain constant domain sequences may be modified by truncation or substitution to delete the native disulfide bond between Cys4 of exon 2 of TRAC and Cys2 of exon 2 of TRBC1 or TRBC2. The alpha and/or beta chain constant domain sequence(s) may also be modified by substitution of cysteine residues for Thr 48 of TRAC and Ser 57 of TRBC1 or TRBC2, the said cysteines forming a disulfide bond between the alpha and beta constant domains of the TCR.

[0372] Binding affinity (inversely proportional to the equilibrium constant K_{D}) and binding half-life (expressed as T1/2) can be determined by any appropriate method. It will be appreciated that doubling the affinity of a TCR results in halving the K_{D}. T½ is calculated as ln 2 divided by the off-rate (koff). So doubling of T½ results in a halving in koff K_{D} and koff values for TCRs are usually measured for soluble forms of the TCR, i.e. those forms which are truncated to remove cytoplasmic and transmembrane domain residues. Therefore it is to be understood that a given TCR has an improved binding affinity for, and/or a binding half-life for the parental TCR if a soluble form of that TCR has the said characteristics. Preferably the binding affinity or binding half-life of a given TCR is measured several times, for example 3 or more times, using the same assay protocol, and an average of the results is taken.

[0373] Since the TCRs of the invention have utility in adoptive therapy, the invention includes a non-naturally occurring and/or purified and/or or engineered cell, especially a T-cell, presenting a TCR of the invention. There are a number of methods suitable for the transfection of T cells with nucleic acid (such as DNA, cDNA or RNA) encoding the TCRs of the invention (see for example Robbins et al., (2008) J Immunol. 180: 6116-6131). T cells expressing the TCRs of the invention will be suitable for use in adoptive therapy-based treatment of cancers such as those of the pancreas and liver. As will be known to those skilled in the art, there are a number of suitable methods by which adoptive therapy can be carried out (see for example Rosenberg et al., (2008) Nat Rev Cancer 8(4): 299-308).

[0374] As is well-known in the art TCRs of the invention may be subject to post-translational modifications when expressed by transfected cells. Glycosylation is one such modification, which may comprise the covalent attachment of oligosaccharide moieties to defined amino acids in the TCR chain. For example, asparagine residues, or serine/threonine residues are well-known locations for oligosaccharide attachment. The glycosylation status of a particular protein depends on a number of factors, including protein sequence, protein conformation and the availability of certain enzymes. Furthermore, glycosylation status (i.e oligosaccharide type, covalent linkage and total number of attachments) can influence protein function. Therefore, when producing recombinant proteins, controlling glycosylation is often desirable. Glycosylation of transfected TCRs may be controlled by mutations of the transfected gene (Kuball J et al. (2009), J Exp Med 206(2):463-475). Such mutations are also encompassed in this invention.

[0375] A TCR may be specific for an antigen in the group MAGE-A1, MAGE-A2, MAGE-A3, MAGE-A4, MAGE-A5, MAGE-A6, MAGE-A7, MAGE-A8, MAGE-A9, MAGE-A10, MAGE-A11, MAGE-A12, MAGE-A13, GAGE-1, GAGE-2, GAGE-3, GAGE-4, GAGE-5, GAGE-6, GAGE-7, GAGE-8, BAGE-1, RAGE-1, LB33/MUM-1, PRAME, NAG, MAGE-Xp2 (MAGE-B2), MAGE-Xp3 (MAGE-B3), MAGE-Xp4 (AGE-B4), tyrosinase, brain glycogen phosphorylase, Melan-A, MAGE-C1, MAGE-C2, NY-ESO-1, LAGE-1, SSX-1, SSX-2(HOM-MEL-40), SSX-1, SSX-4, SSX-5, SCP-1, CT-7, alpha-actinin-4, Bcr-Abl fusion protein, Casp-8, beta-catenin, cdc27, cdk4, cdkn2a, coa-1, dek-can fusion protein, EF2, ETV6-AML1 fusion protein, LDLR-fucosyltransferaseAS fusion protein, HLA-A2, HLA-A11, hsp70-2, KIAAO205, Mart2, Mum-2, and 3, neo-PAP, myosin class I, OS-9, pml-RARa fusion protein, PTPRK, K-ras, N-ras, Triosephosphate isomeras, GnTV, Herv-K-mel, Lage-1, Mage-C2, NA-88, Lage-2, SP17, and TRP2-Int2, (MART-I), gp100 (Pmel 17), TRP-1, TRP-2, MAGE-1, MAGE-3, p15(58), CEA, NY-ESO (LAGE), SCP-1, Hom/Mel-40, p53, H-Ras, HER-2/neu, BCR-ABL, E2A-PRL, H4-RET, IGH-IGK, MYL-RAR, Epstein Barr virus antigens, EBNA, human papillomavirus (HPV) antigens E6 and E7, TSP-180, MAGE-4, MAGE-5, MAGE-6, p185erbB2, p180erbB-3, c-met, nm-23H1, PSA, TAG-72-4, CA 19-9, CA 72-4, CAM 17.1, NuMa, K-ras, beta-catenin, CDK4, Mum-1, p16, TAGE, PSMA, PSCA, CT7, telomerase, 43-9F, 5T4, 791Tgp72, a-fetoprotein, 13HCG, BCA225, BTAA, CA 125, CA 15-3 (CA 27.29BCAA), CA 195, CA 242, CA-50, CAM43, CD68KP1, CO-029, FGF-5, G250, Ga733 (EpCAM), HTgp-175, M344, MA-50, MG7-Ag, MOV18, NB170K, NY-CO-1, RCAS1, SDCCAGi6, TA-90 (Mac-2 binding proteincyclophilin C-associated protein), TAAL6, TAG72, TLP, and TPS.

c. B-Cell Receptors (BCR)

[0376] In some embodiments, a provided circular RNA polynucleotide encodes one or more B-cell receptors (BCRs). BCRs (or B-cell antigen receptors) are immunoglobulin molecules that form a type I transmembrane protein on the surface of a B cell. A BCR is capable of transmitting activatory signal into a B cell following recognition of a specific antigen. Prior to binding of a B cell to an antigen, the BCR will remain in an unstimulated or “resting” stage. Binding of an antigen to a BCR leads to signaling that initiates a humoral immune response.

[0377] A BCR is expressed by mature B cells. These B cells work with immunoglobulins (Igs) in recognizing and tagging pathogens. The typical BCR comprises a membrane-bound immunoglobulin (e.g., mIgA, mIgD, mIgE, mIgG, and mIgM), along with associated and Igα/Igβ (CD79a/CD79b) heterodimers (α/β). These membrane-bound immunoglobulins are tetramers consisting of two identical heavy and two light chains. Within the BCR, the membrane bound immunoglobulins is capable of responding to antigen binding by signal transmission across the plasma membrane leading to B cell activation and consequently clonal expansion and specific antibody production (Friess M et al. (2018), Front. Immunol. 2947(9)). The Igα/Igβ heterodimers is responsible for transducing signals to the cell interior.

[0378] A Igα/Igβ heterodimer signaling relies on the presence of immunoreceptor tyrosine-based activation motifs (ITAMs) located on each of the cytosolic tails of the heterodimers. ITAMs comprise two tyrosine residues separated by 9-12 amino acids (e.g., tyrosine, leucine, and/or valine). Upon binding of an antigen, the tyrosine of the BCR's ITAMs become phosphorylated by Src-family tyrosine kinases Blk, Fyn, or Lyn (Janeway C et al., Immunobiology: The Immune System in Health and Disease (Garland Science, 5th ed. 2001)).

d. Other Chimeric Proteins

[0379] In addition to the chimeric proteins provided above, the circular RNA polynucleotide may encode for a various number of other chimeric proteins available in the art. The chimeric proteins may include recombinant fusion proteins, chimeric mutant protein, or other fusion proteins.

### B. Immune Modulatory Ligands

[0380] In some embodiments, the circular RNA polynucleotide encodes for an immune modulatory ligand. In certain embodiments, the immune modulatory ligand may be immunostimulatory; while in other embodiments, the immune modulatory ligand may be immunosuppressive.

a. Cytokines: Interferon, Chemokines, Interleukins, growth Factor & Others

[0381] In some embodiments, the circular RNA polynucleotide encodes for a cytokine. In some embodiments, the cytokine comprises a chemokine, interferon, interleukin, lymphokine, and tumor necrosis factor. Chemokines are chemotactic cytokine produced by a variety of cell types in acute and chronic inflammation that mobilizes and activates white blood cells. An interferon comprises a family of secreted α-helical cytokines induced in response to specific extracellular molecules through stimulation of TLRs (Borden, Molecular Basis of Cancer (Fourth Edition) 2015). Interleukins are cytokines expressed by leukocytes.

[0382] Descriptions and/or amino acid sequences of IL-2, IL-7, IL-10, IL-12, IL-15, IL-18, IL-270, IFNγ, and/or TGFβ1 are provided herein and at the www.uniprot.org database at accession numbers: P60568 (IL-2), P29459 (IL-12A), P29460 (IL-12B), P13232 (IL-7), P22301 (IL-10), P40933 (IL-15), Q14116 (IL-18), Q14213 (IL-27β), P01579 (IFNγ), and/or P01137 (TGFβ1).

### C. Transcription Factors

[0383] Regulatory T cells (Treg) are important in maintaining homeostasis, controlling the magnitude and duration of the inflammatory response, and in preventing autoimmune and allergic responses.

[0384] In general, Tregs are thought to be mainly involved in suppressing immune responses, functioning in part as a “self-check” for the immune system to prevent excessive reactions. In particular, Tregs are involved in maintaining tolerance to self-antigens, harmless agents such as pollen or food, and abrogating autoimmune disease.

[0385] Tregs are found throughout the body including, without limitation, the gut, skin, lung, and liver. Additionally, Treg cells may also be found in certain compartments of the body that are not directly exposed to the external environment such as the spleen, lymph nodes, and even adipose tissue. Each of these Treg cell populations is known or suspected to have one or more unique features and additional information may be found in Lehtimaki and Lahesmaa, Regulatory T cells control immune responses through their non-redundant tissue specific features, 2013, FRONTIERS IN IMMUNOL., 4(294): 1-10, the disclosure of which is hereby incorporated in its entirety.

[0386] Typically, Tregs are known to require TGF-β and IL-2 for proper activation and development. Tregs, expressing abundant amounts of the IL-2 receptor (IL-2R), are reliant on IL-2 produced by activated T cells. Tregs are known to produce both IL-10 and TGF-β, both potent immune suppressive cytokines. Additionally, Tregs are known to inhibit the ability of antigen presenting cells (APCs) to stimulate T cells. One proposed mechanism for APC inhibition is via CTLA-4, which is expressed by Foxp3+ Tregs. It is thought that CTLA-4 may bind to B7 molecules on APCs and either block these molecules or remove them by causing internalization resulting in reduced availability of B7 and an inability to provide adequate co-stimulation for immune responses. Additional discussion regarding the origin, differentiation and function of Tregs may be found in Dhamne et al., Peripheral and thymic Foxp3+ regulatory T cells in search of origin, distinction, and function, 2013, Frontiers in Immunol., 4 (253): 1-11, the disclosure of which is hereby incorporated in its entirety.

### D. Checkpoint Inhibitors & Agonists

[0387] As provided herein, in certain embodiments, the coding element of the circular RNA encodes for one or more checkpoint inhibitors or agonists.

[0388] In some embodiments, the immune checkpoint inhibitor is an inhibitor of Programmed Death-Ligand 1 (PD-L1, also known as B7-H1, CD274), Programmed Death 1 (PD-1), CTLA-4, PD-L2 (B7-DC, CD273), LAG3, TIM3, 2B4, A2aR, B7H1, B7H3, B7H4, BTLA, CD2, CD27, CD28, CD30, CD40, CD70, CD80, CD86, CD137, CD160, CD226, CD276, DR3, GAL9, GITR, HAVCR2, HVEM, IDO1, IDO2, ICOS (inducible T cell costimulator), KIR, LAIR1, LIGHT, MARCO (macrophage receptor with collageneous structure), PS (phosphatidylserine), OX-40, SLAM, TIGHT, VISTA, VTCN1, or any combinations thereof. In some embodiments, the immune checkpoint inhibitor is an inhibitor of IDO1, CTLA4, PD-1, LAG3, PD-L1, TIM3, or combinations thereof. In some embodiments, the immune checkpoint inhibitor is an inhibitor of PD-L1. In some embodiments, the immune checkpoint inhibitor is an inhibitor of PD-1. In some embodiments, the immune checkpoint inhibitor is an inhibitor of CTLA-4. In some embodiments, the immune checkpoint inhibitor is an inhibitor of LAG3. In some embodiments, the immune checkpoint inhibitor is an inhibitor of TIM3. In some embodiments, the immune checkpoint inhibitor is an inhibitor of IDO1.

[0389] As described herein, at least in one aspect, the invention encompasses the use of immune checkpoint antagonists. Such immune checkpoint antagonists include antagonists of immune checkpoint molecules such as Cytotoxic T-Lymphocyte Antigen 4 (CTLA-4), Programmed Cell Death Protein 1 (PD-1), Programmed Death-Ligand 1 (PDL-1), Lymphocyte-activation gene 3 (LAG-3), and T-cell immunoglobulin and mucin domain 3 (TIM-3). An antagonist of CTLA-4, PD-1, PDL-1, LAG-3, or TIM-3 interferes with CTLA-4, PD-1, PDL-1, LAG-3, or TIM-3 function, respectively. Such antagonists of CTLA-4, PD-1, PDL-1, LAG-3, and TIM-3 can include antibodies which specifically bind to CTLA-4, PD-1, PDL-1, LAG-3, and TIM-3, respectively and inhibit and/or block biological activity and function.

### E. Others

[0390] In some embodiments, the payload encoded within one or more of the coding elements is a hormone, FC fusion protein, anticoagulant, blood clotting factor, protein associated with deficiencies and genetic disease, a chaperone protein, an antimicrobial protein, an enzyme (e.g., metabolic enzyme), a structural protein (e.g., a channel or nuclear pore protein), protein variant, small molecule, antibody, nanobody, an engineered non-body antibody, or a combination thereof.

### 4. Additional Accessory Elements (Sequence Elements)

[0391] As described in this invention, the polynucleotide (e.g., circular RNA polynucleotide, linear RNA polynucleotide, and/or DNA template) may further comprise of accessory elements. In certain embodiments, these accessory elements may be included within the sequences of the circular RNA, linear RNA polynucleotide and/or DNA template for enhancing circularization, translation or both. Accessory elements are sequences, in certain embodiments that are located with specificity between or within the enhanced intron elements, enhanced exon elements, or core functional element of the respective polynucleotide. As an example, but not intended to be limiting, an accessory element includes, a IRES transacting factor region, a miRNA binding site, a restriction site, an RNA editing region, a structural or sequence element, a granule site, a zip code element, an RNA trafficking element or another specialized sequence as found in the art that enhances promotes circularization and/or translation of the protein encoded within the circular RNA polynucleotide.

### A. Ires Transacting Factors

[0392] In certain embodiments, the accessory element comprises an IRES transacting factor (ITAF) region. In some embodiments, the IRES transacting factor region modulates the initiation of translation through binding to PCBP1-PCBP4 (polyC binding protein), PABP1 (polyA binding protein), PTB (polyprimidine tract binding), Argonaute protein family, HNRNPK (Heterogeneous nuclear ribonucleoprotein K protein), or La protein. In some embodiments, the IRES transacting factor region comprises a polyA, polyC, polyAC, or polyprimidine track.

In some embodiments, the ITAF region is located within the core functional element. In some embodiments, the ITAF region is located within the TIE.
B. miRNA Binding Sites

[0393] In certain embodiments, the accessory element comprises a miRNA binding site. In some embodiments the miRNA binding site is located within the 5′ enhanced intron element, 5′ enhanced exon element, core functional element, 3′ enhanced exon element, and/or 3′ enhanced intron element.

[0394] In some embodiments, wherein the miRNA binding site is located within the spacer within the enhanced intron element or enhanced exon element. In certain embodiments, the miRNA binding site comprises the entire spacer regions.

[0395] In some embodiments, the 5′ enhanced intron element and 3′ enhanced intron elements each comprise identical miRNA binding sites. In another embodiment, the miRNA binding site of the 5′ enhanced intron element comprises a different, in length or nucleotides, miRNA binding site than the 3′ enhanced intron element. In one embodiment, the 5′ enhanced exon element and 3′ enhanced exon element comprise identical miRNA binding sites. In other embodiments, the 5′ enhanced exon element and 3′ enhanced exon element comprises different, in length or nucleotides, miRNA binding sites.

[0396] In some embodiments, the miRNA binding sites are located adjacent to each other within the circular RNA polynucleotide, linear RNA polynucleotide precursor, and/or DNA template. In certain embodiments, the first nucleotide of one of the miRNA binding sites follows the first nucleotide last nucleotide of the second miRNA binding site.

[0397] In some embodiments, the miRNA binding site is located within a translation initiation element (TIE) of a core functional element. In one embodiment, the miRNA binding site is located before, trailing or within an internal ribosome entry site (IRES). In another embodiment, the miRNA binding site is located before, trailing, or within an aptamer complex.

[0398] Incorporation of miRNA sequences within a circular RNA molecule can permit tissue-specific expression of a coding sequence within a core functional element. For example, in a circular RNA intended to express a protein in immune cells, miRNA binding sequences resulting in expression suppression in tissues such as the liver or kidney may be desired. Such miRNA binding sequences may be selected based on the cell or tissue expression of miRNAs.

[0399] The unique sequences defined by the miRNA nomenclature are widely known and accessible to those working in the microRNA field. For example, they can be found in the miRDB public database.

### 5. Production of Polynucleotides

[0400] The DNA templates provided herein can be made using standard techniques of molecular biology. For example, the various elements of the vectors provided herein can be obtained using recombinant methods, such as by screening cDNA and genomic libraries from cells, or by deriving the polynucleotides from a DNA template known to include the same.

[0401] The various elements of the DNA template provided herein can also be produced synthetically, rather than cloned, based on the known sequences. The complete sequence can be assembled from overlapping oligonucleotides prepared by standard methods and assembled into the complete sequence. See, e.g., Edge, Nature (1981) 292:756; Nambair et al., Science (1984) 223: 1299; and Jay et al., J. Biol. Chem. (1984) 259:631 1.

[0402] Thus, particular nucleotide sequences can be obtained from DNA template harboring the desired sequences or synthesized completely, or in part, using various oligonucleotide synthesis techniques known in the art, such as site-directed mutagenesis and polymerase chain reaction (PCR) techniques where appropriate. One method of obtaining nucleotide sequences encoding the desired DNA template elements is by annealing complementary sets of overlapping synthetic oligonucleotides produced in a conventional, automated polynucleotide synthesizer, followed by ligation with an appropriate DNA ligase and amplification of the ligated nucleotide sequence via PCR. See, e.g., Jayaraman et al., Proc. Natl. Acad. Sci. USA (1991) 88:4084-4088. Additionally, oligonucleotide-directed synthesis (Jones et al., Nature (1986) 54:75-82), oligonucleotide directed mutagenesis of preexisting nucleotide regions (Riechmann et al., Nature (1988) 332:323-327 and Verhoeyen et al., Science (1988) 239: 1534-1536), and enzymatic filling-in of gapped oligonucleotides using T4 DNA polymerase (Queen et al., Proc. Natl. Acad. Sci. USA (1989) 86: 10029-10033) can be used.

[0403] The precursor RNA provided herein can be generated by incubating a DNA template provided herein under conditions permissive of transcription of the precursor RNA encoded by the DNA template. For example, in some embodiments a precursor RNA is synthesized by incubating a DNA template provided herein that comprises an RNA polymerase promoter upstream of its 5′ duplex sequence and/or expression sequences with a compatible RNA polymerase enzyme under conditions permissive of in vitro transcription. In some embodiments, the DNA template is incubated inside of a cell by a bacteriophage RNA polymerase or in the nucleus of a cell by host RNA polymerase II.

[0404] In certain embodiments, provided herein is a method of generating precursor RNA by performing in vitro transcription using a DNA template provided herein as a template (e.g., a vector provided herein with an RNA polymerase promoter positioned upstream of the 5′ duplex region).

[0405] In certain embodiments, the resulting precursor RNA can be used to generate circular RNA (e.g., a circular RNA polynucleotide provided herein) by incubating it in the presence of magnesium ions and guanosine nucleotide or nucleoside at a temperature at which RNA circularization occurs (e.g., between 20° C. and 60° C.).

[0406] Thus, in certain embodiments provided herein is a method of making circular RNA. In certain embodiments, the method comprises synthesizing precursor RNA by transcription (e.g., run-off transcription) using a vector provided herein (e.g., a 5′ enhanced intron element, a 5′ enhanced exon element, a core functional element, a 3′ enhanced exon element, and a 3′ enhanced intron element) as a template, and incubating the resulting precursor RNA in the presence of divalent cations (e.g., magnesium ions) and GTP such that it circularizes to form circular RNA. In some embodiments, the precursor RNA disclosed herein is capable of circularizing in the absence of magnesium ions and GTP and/or without the step of incubation with magnesium ions and GTP. It has been discovered that circular RNA has reduced immunogenicity relative to a corresponding mRNA, at least partially because the mRNA contains an immunogenic 5′ cap. When transcribing a DNA vector from certain promoters (e.g., a T7 promoter) to produce a precursor RNA, it is understood that the 5′ end of the precursor RNA is G. To reduce the immunogenicity of a circular RNA composition that contains a low level of contaminant linear mRNA, an excess of GMP relative to GTP can be provided during transcription such that most transcripts contain a 5′ GMP, which cannot be capped. Therefore, in some embodiments, transcription is carried out in the presence of an excess of GMP. In some embodiments, transcription is carried out where the ratio of GMP concentration to GTP concentration is within the range of about 3:1 to about 15:1, for example, about 3:1 to about 10:1, about 3:1 to about 5:1, about 3:1, about 4:1, or about 5:1.

[0407] In some embodiments, a composition comprising circular RNA has been purified. Circular RNA may be purified by any known method commonly used in the art, such as column chromatography, gel filtration chromatography, and size exclusion chromatography. In some embodiments, purification comprises one or more of the following steps: phosphatase treatment, HPLC size exclusion purification, and RNase R digestion. In some embodiments, purification comprises the following steps in order: RNase R digestion, phosphatase treatment, and HPLC size exclusion purification. In some embodiments, purification comprises reverse phase HPLC. In some embodiments, a purified composition contains less double stranded RNA, DNA splints, triphosphorylated RNA, phosphatase proteins, protein ligases, capping enzymes and/or nicked RNA than unpurified RNA. In some embodiments, purification of circular RNA comprises an affinity-purification or negative selection method described herein. In some embodiments, purification of circular RNA comprises separation of linear RNA from circular RNA using oligonucleotides that are complementary to a sequence in the linear RNA but are not complementary to a sequence in the circular RNA. In some embodiments, a purified composition is less immunogenic than an unpurified composition. In some embodiments, immune cells exposed to a purified composition produce less TNFα, RIG-I, IL-2, IL-6, IFNγ, and/or a type 1 interferon, e.g., IFN-β1, than immune cells exposed to an unpurified composition.

### 6. Overview of Transfer Vehicle & Other Delivery Mechanisms

### A. Ionizable Lipids

[0408] In certain embodiments, disclosed herein are ionizable lipids that may be used as a component of a transfer vehicle to facilitate or enhance the delivery and release of circular RNA to one or more target cells (e.g., by permeating or fusing with the lipid membranes of such target cells). In certain embodiments, an ionizable lipid comprises one or more cleavable functional groups (e.g., a disulfide) that allow, for example, a hydrophilic functional head-group to dissociate from a lipophilic functional tail-group of the compound (e.g., upon exposure to oxidative, reducing or acidic conditions), thereby facilitating a phase transition in the lipid bilayer of the one or more target cells.

[0409] In some embodiments, an ionizable lipid is a lipid as described in international patent application PCT/US2018/058555.

[0410] In some of embodiments, a cationic lipid has the following formula:

[chemical structure]

[0411] wherein.
   [0412] R₁ and R₂ are either the same or different and independently optionally substituted C₁₀-C₂₄ alkyl, optionally substituted C₁₀-C₂₄ alkenyl, optionally substituted C₁₀-C₂₄ alkynyl, or optionally substituted C₁₀-C₂₄ acyl;
   [0413] R₃ and R₄ are either the same or different and independently optionally substituted C₁-C₆ alkyl, optionally substituted C₂-C₆ alkenyl, or optionally substituted C₂-C₆ alkynyl or R₃ and R₄ may join to form an optionally substituted heterocyclic ring of 4 to 6 carbon atoms and 1 or 2 heteroatoms chosen from nitrogen and oxygen;
   [0414] R₅ is either absent or present and when present is hydrogen or C₁-C₆ alkyl; m, n, and p are either the same or different and independently either 0 or 1 with the proviso that m, n, and p are not simultaneously 0; q is 0, 1, 2, 3, or 4; and
   [0415] Y and Z are either the same or different and independently O, S, or NH.

[0416] In one embodiment, R₁ and R₂ are each linoleyl, and the amino lipid is a dilinoleyl amino lipid.

[0417] In one embodiment, the amino lipid is a dilinoleyl amino lipid.

[0418] In various other embodiments, a cationic lipid has the following structure:

[chemical structure]

[0419] or a pharmaceutically acceptable salt, tautomer, prodrug or stereoisomer thereof, wherein:
   [0420] R₁ and R₂ are each independently selected from the group consisting of H and C₁-C₃ alkyls; and
   [0421] R₃ and R₄ are each independently an alkyl group having from about 10 to about 20 carbon atoms, wherein at least one of R₃ and R₄ comprises at least two sites of unsaturation.

[0422] In some embodiments, R₃ and R₄ are each independently selected from dodecadienyl, tetradecadienyl, hexadecadienyl, linoleyl, and icosadienyl. In an embodiment, R₃ and R₄ and are both linoleyl. In some embodiments, R₃ and/or R₄ may comprise at least three sites of unsaturation (e.g., R₃ and/or R₄ may be, for example, dodecatrienyl, tetradectrienyl, hexadecatrienyl, linolenyl, and icosatrienyl).

[0423] In some embodiments, a cationic lipid has the following structure:

[chemical structure]

[0424] or a pharmaceutically acceptable salt, tautomer, prodrug or stereoisomer thereof, wherein:
   [0425] R₁ and R₂ are each independently selected from H and C₁-C₃ alkyls;
   [0426] R₃ and R₄ are each independently an alkyl group having from about 10 to about 20 carbon atoms, wherein at least one of R₃ and R₄ comprises at least two sites of unsaturation.

[0427] In one embodiment, R₃ and R₄ are the same, for example, in some embodiments R₃ and R₄ are both linoleyl (C₁₈-alkyl). In another embodiment, R₃ and R₄ are different, for example, in some embodiments, R₃ is tetradectrienyl (C₁₄-alkyl) and R₄ is linoleyl (Cis-alkyl). In a preferred embodiment, the cationic lipid(s) of the present invention are symmetrical, i.e., R₃ and R₄ are the same. In another preferred embodiment, both R₃ and R₄ comprise at least two sites of unsaturation. In some embodiments, R₃ and R₄ are each independently selected from dodecadienyl, tetradecadienyl, hexadecadienyl, linoleyl, and icosadienyl. In an embodiment, R₃ and R₄ are both linoleyl. In some embodiments, R₃ and/or R₄ comprise at least three sites of unsaturation and are each independently selected from dodecatrienyl, tetradectrienyl, hexadecatrienyl, linolenyl, and icosatrienyl.

[0428] In various embodiments, a cationic lipid has the formula:

[chemical structure]

[0429] or a pharmaceutically acceptable salt, tautomer, prodrug or stereoisomer thereof, wherein:
   [0430] Xₐₐ is a D- or L-amino acid residue having the formula —NR^{N}—CR¹R²—C(C═O)—, or a peptide or a peptide of amino acid residues having the formula —{NR^{N}—CR¹R²—C(C═O)}ₙ—, wherein n is an integer from 2 to 20;
   [0431] R¹ is independently, for each occurrence, a non-hydrogen or a substituted or unsubstituted side chain of an amino acid;
   [0432] R² and R^{N} are independently, for each occurrence, hydrogen, an organic group consisting of carbon, oxygen, nitrogen, sulfur, and hydrogen atoms, or any combination of the foregoing, and having from 1 to 20 carbon atoms, C₍₁₋₅₎alkyl, cycloalkyl, cycloalkylalkyl, C₍₁₋₅₎alkenyl, C₍₁₋₅₎alkynyl, C₍₁₋₅₎alkanoyl, C₍₁₋₅₎alkanoyloxy, C₍₁₋₅₎alkoxy, C₍₁₋₅₎alkoxy- C₍₁₋₅₎alkyl, C₍₁₋₅₎alkoxy- C₍₁₋₅₎alkoxy, C₍₁₋₅₎alkyl-amino- C₍₁₋₅₎alkyl-, C₍₁₋₅₎dialkyl-amino- C₍₁₋₅₎alkyl-, nitro-C₍₁₋₅₎alkyl, cyano-C₍₁₋₅₎alkyl, aryl-C₍₁₋₅₎alkyl, 4-biphenyl-C₍₁₋₅₎alkyl, carboxyl, or hydroxyl;
   [0433] Z is —NH—, —O—, —S—, —CH₂S—, —CH₂S(O)—, or an organic linker consisting of 1-40 atoms selected from hydrogen, carbon, oxygen, nitrogen, and sulfur atoms (preferably, Z is —NH— or —O—);
   [0434] R^{x} and R^{y} are, independently, (i) a lipophilic tail derived from a lipid (which can be naturally occurring or synthetic), e.g., a phospholipid, a glycolipid, a triacylglycerol, a glycerophospholipid, a sphingolipid, a ceramide, a sphingomyelin, a cerebroside, or a ganglioside, wherein the tail optionally includes a steroid; (ii) an amino acid terminal group selected from hydrogen, hydroxyl, amino, and an organic protecting group; or (iii) a substituted or unsubstituted C₍₃₋₂₂₎alkyl, C₍₆₋₁₂₎cycloalkyl, C₍₆₋₁₂₎cycloalkyl- C₍₃₋₂₂₎alkyl, C₍₃₋₂₂₎alkenyl, C₍₃₋₂₂₎alkynyl, C₍₃₋₂₂₎alkoxy, or C₍₆₋₁₂₎-alkoxy C₍₃₋₂₂₎alkyl;

[0435] In some embodiments, one of R^{x} and R^{y} is a lipophilic tail as defined above and the other is an amino acid terminal group. In some embodiments, both R^{x} and R^{y} are lipophilic tails.

[0436] In some embodiments, at least one of R^{x} and R^{y} is interrupted by one or more biodegradable groups (e.g., —OC(O)—, —C(O)O—, —SC(O)—, —C(O)S—, —OC(S)—, —C(S)O—, —S—S—, —C(O)(NR⁵)—, —N(R⁵)C(O)—, —C(S)(NR⁵)—, —N(R⁵)C(O)—, —N(R⁵)C(O)N(R⁵)—, —OC(O)O—, —OSi(R⁵)₂O—, —C(O)(CR³R⁴)C(O)O—, —OC(O)(CR³R⁴)C(O)—, or

[chemical structure]

[0437] In some embodiments, R¹¹ is a C₂-C₈alkyl or alkenyl.

[0438] In some embodiments, each occurrence of R¹¹ is, independently, H or alkyl.

[0439] In some embodiments, each occurrence of R³ and R⁴ are, independently H, halogen, OH, alkyl, alkoxy, —NH₂, alkylamino, or dialkylamino; or R₃ and R₄, together with the carbon atom to which they are directly attached, form a cycloalkyl group. In some particular embodiments, each occurrence of R³ and R⁴ are, independently H or C₁-C4alkyl.

[0440] In some embodiments, R^{x} and R^{y} each, independently, have one or more carbon-carbon double bonds.

[0441] In some embodiments, the cationic lipid is one of the following:

[chemical structure]

[0442] or a pharmaceutically acceptable salt, tautomer, prodrug or stereoisomer thereof, wherein:
   [0443] R₁ and R₂ are each independently alkyl, alkenyl, or alkynyl, each of which can optionally substituted;
   [0444] R₃ and R₄ are each independently a C₁-C₆ alkyl, or R₃ and R₄ are taken together to form an optionally substituted heterocyclic ring.

[0445] A representative useful dilinoleyl amino lipid has the formula:

[chemical structure]

[0446] wherein n is 0, 1, 2, 3, or 4.

[0447] In one embodiment, a cationic lipid is DLin-K-DMA. In one embodiment, a cationic lipid is DLin-KC2-DMA (DLin-K-DMA above, wherein n is 2).

[0448] In one embodiment, a cationic lipid has the following structure:

[chemical structure]

[0449] or a pharmaceutically acceptable salt, tautomer, prodrug or stereoisomer thereof, wherein:
   [0450] R¹ and R² are each independently for each occurrence optionally substituted C₁₀-C₃₀ alkyl, optionally substituted C₁₀-C₃₀ alkenyl, optionally substituted C₁₀-C₃₀ alkynyl or optionally substituted C₁₀-C₃₀ acyl;
   [0451] R₃ is H, optionally substituted C₂-C₁₀ alkyl, optionally substituted C₂-C₁₀ alkenyl, optionally substituted C₂-C₁₀ alkylyl, alkylhetrocycle, alkylpbosphate, alkylphosphorothioate, alkylphosphorodithioate, alkylphosphonate, alkylamine, hydroxyalkyl, ω-aminoalkyl, ω-(substituted)aminoalkyl, ω-phosphoalkyl, ω-thiophosphoalkyl, optionally substituted polyethylene glycol (PEG, mw 100-40K), optionally substituted mPEG (mw 120-40K), heteroaryl, or heterocycle, or a linker ligand, for example, in some embodiments, R₃ is (CH₃)₂N(CH₂)ₙ—, wherein n is 1, 2, 3 or 4;
      [0452] E is O, S, N(Q), C(O), OC(O), C(O)O, N(Q)C(O), C(O)N(Q), (Q)N(CO)O, O(CO)N(Q), S(O), NS(O)₂N(Q), S(O)₂, N(Q)S(O)₂, SS, O═N, aryl, heteroaryl, cyclic or heterocycle, for example —C(O)O. wherein—is a point of connection to R₂; and
      [0453] Q is H, alkyl, ω-aminoalkyl, ω-(substituted)aminoalkyl, ω-phosphoalkyl or ω-thiophosphoalkyl.

[0454] In one specific embodiment, the cationic lipid of Embodiments 1, 2, 3, 4 or 5 has the following structure:

[chemical structure]

[0455] or a pharmaceutically acceptable salt, tautomer, prodrug or stereoisomer thereof,
[0456] wherein:
   [0457] E is O, S, N(Q), C(O), N(Q)C(O), C(O)N(Q), (Q)N(CO)O, O(CO)N(Q), S(O), NS(O)₂N(Q), S(O)₂, N(Q)S(O)₂, SS, O═N, aryl, heteroaryl, cyclic or heterocycle;
   [0458] Q is H, alkyl, ω-aminoalkyl, ω-(substituted)aminoalkyl, ω-phosphoalkyl or ω-thiophosphoalkyl;
   [0459] R₁ and R₂ and Rₓ are each independently for each occurrence H, optionally substituted C₁-C₁₀alkyl, optionally substituted C₁₀-C₃₀ alkyl, optionally substituted C₁₀-C₃₀ alkenyl, optionally substituted C₁₀-C₃₀ alkynyl, optionally substituted C₁₀-C₃₀ acyl, or linker-ligand, provided that at least one of R₁, R₂ and Rₓ is not H;
   [0460] R₃ is H, optionally substituted C₁-C₁₀ alkyl, optionally substituted C₂-C₁₀ alkenyl, optionally substituted C₂-C₁₀ alkynyl, alkylhetrocycle, alkylphosphate, alkylphosphorothioate, alkylphosphorodithioate, alkylphosphonate, alkylamine, hydroxyalkyl, ω-aminoalkyl, ω-(substituted)aminoalkyl, ω-phosphoalkyl, ω-thiophosphoalkyl, optionally substituted polyethylene glycol (PEG, mw 100-40K), optionally substituted mPEG (mw 120-40K), heteroaryl, or heterocycle, or linker-ligand; and
   [0461] n is 0, 1, 2, or 3.

[0462] In one embodiment, the cationic lipid of Embodiments 1, 2, 3, 4 or 5 has the structure of Formula I:

[chemical structure]

[0463] or a pharmaceutically acceptable salt, tautomer, prodrug or stereoisomer thereof, wherein:
   [0464] one of ^{L} or L² is —O(C═O)—, —(C═O)O—, —C(═O)—, —O—, —S(O)ₓ—, —S—S—, —C(═O)S—, SC(═O)—, —NR^{a}C(═O)—, —C(═O)NR^{a}—, NR^{a}C(═O)NR^{a}—, —OC(═O)NR^{a}— or —NR^{a}C(═O)O—, and the other of L¹ or L² is —O(C═O)—, —(C═O)O—, —C(═O)—, —O—, —S(O)ₓ—, —S—S—, —C(═O)S—, SC(═O)—, —NR^{a}C(═O)—, —C(═O)NR^{a}—, NR^{a}C(═O)NR^{a}—, —OC(═O)NR^{a}—or
[0465] —NR^{a}C(═O)O— or a direct bond;
   [0466] R^{a} is H or C₁-C₁₂ alkyl;
   [0467] R^{1a} and R^{1b} are, at each occurrence, independently either (a) H or C₁-C₁₂ alkyl, or (b) R^{1a} is H or C₁-C₁₂ alkyl, and R^{1b} together with the carbon atom to which it is bound is taken together with an adjacent R^{1b} and the carbon atom to which it is bound to form a carbon-carbon double bond;
   [0468] R^{2a} and R^{2b} are, at each occurrence, independently either (a) H or C₁-C₁₂ alkyl, or (b) R^{2a} is H or C₁-C₁₂ alkyl, and R^{2b} together with the carbon atom to which it is bound is taken together with an adjacent R^{2b} and the carbon atom to which it is bound to form a carbon-carbon double bond;
   [0469] R^{3a} and R^{3b} are, at each occurrence, independently either (a) H or C₁-C₁₂ alkyl, or (b) R^{3a} is H or C₁-C₁₂ alkyl, and R^{3b} together with the carbon atom to which it is bound is taken together with an adjacent R^{3b} and the carbon atom to which it is bound to form a carbon-carbon double bond;
   [0470] R^{4a} and R^{4b} are, at each occurrence, independently either (a) H or C₁-C₁₂ alkyl, or (b) R^{4a} is H or C₁-C₁₂ alkyl, and R^{4b} together with the carbon atom to which it is bound is taken together with an adjacent R^{4b} and the carbon atom to which it is bound to form a carbon-carbon double bond;
   [0471] R⁵ and R⁶ are each independently methyl or cycloalkyl;
   [0472] R⁷ is, at each occurrence, independently H or C₁-C₁₂ alkyl;
   [0473] R⁸ and R⁹ are each independently unsubstituted C₁-C₁₂ alkyl; or R⁸ and R⁹, together with the nitrogen atom to which they are attached, form a 5, 6 or 7-membered heterocyclic ring comprising one nitrogen atom;
   [0474] a and d are each independently an integer from 0 to 24;
   [0475] b and c are each independently an integer from 1 to 24;
   [0476] e is 1 or 2; and
   [0477] x is 0, 1 or 2.

[0478] In some embodiments of Formula I, L¹ and L² are independently —O(C═O)— or —(C═O)O—.

[0479] In certain embodiments of Formula I, at least one of R^{1a}, R^{2a}, R^{3a} or R^{4a} is C₁-C₁₂ alkyl, or at least one of L or L² is —O(C═O)— or —(C═O)O—. In other embodiments, R^{1a} and R^{1b} are not isopropyl when a is 6 or n-butyl when a is 8.

[0480] In still further embodiments of Formula I, at least one of R^{1a}, R^{2a}, R^{3a} or R^{4a} is C₁-C₁₂ alkyl, or at least one of L¹ or L2 is —O(C═O)— or —(C═O)O—; and R^{1a} and R^{1b} are not isopropyl when a is 6 or n-butyl when a is 8.

[0481] In other embodiments of Formula I, R⁸ and R⁹ are each independently unsubstituted C₁-C₁₂ alkyl; or R⁸ and R⁹, together with the nitrogen atom to which they are attached, form a 5, 6 or 7-membered heterocyclic ring comprising one nitrogen atom;

[0482] In certain embodiments of Formula I, any one of L¹ or L² may be —O(C═O)— or a carbon-carbon double bond. L¹ and L² may each be —O(C═O)— or may each be a carbon-carbon double bond.

[0483] In some embodiments of Formula I, one of L¹ or L² is —O(C═O)—. In other embodiments, both L¹ and L² are —O(C═O)—.

[0484] In some embodiments of Formula I, one of L¹ or L² is —(C═O)O—. In other embodiments, both L¹ and L² are —(C═O)O—.

[0485] In some other embodiments of Formula I, one of L or L² is a carbon-carbon double bond. In other embodiments, both L¹ and L² are a carbon-carbon double bond.

[0486] In still other embodiments of Formula I, one of L¹ or L² is —O(C═O)— and the other of L or L² is —(C═O)O—. In more embodiments, one of L¹ or L² is —O(C═O)— and the other of L¹ or L² is a carbon-carbon double bond. In yet more embodiments, one of L¹ or L² is —(C═O)O— and the other of L¹ or L² is a carbon-carbon double bond.

[0487] It is understood that “carbon-carbon” double bond, as used throughout the specification, refers to one of the following structures:

[chemical structure]

wherein R^{a} and R^{b} are, at each occurrence, independently H or a substituent. For example, in some embodiments R^{a} and R^{b} are, at each occurrence, independently H, C₁-C₁₂ alkyl or cycloalkyl, for example H or C₁-C₁₂ alkyl.

[0488] In other embodiments, the lipid compounds of Formula I have the following Formula (Ia):

[chemical structure]

[0489] In other embodiments, the lipid compounds of Formula I have the following Formula (Ib):

[chemical structure]

[0490] In yet other embodiments, the lipid compounds of Formula I have the following Formula (Ic):

[chemical structure]

[0491] In certain embodiments of the lipid compound of Formula I, a, b, c and d are each independently an integer from 2 to 12 or an integer from 4 to 12. In other embodiments, a, b, c and d are each independently an integer from 8 to 12 or 5 to 9. In some certain embodiments, a is 0. In some embodiments, a is 1. In other embodiments, a is 2. In more embodiments, a is 3. In yet other embodiments, a is 4. In some embodiments, a is 5. In other embodiments, a is 6. In more embodiments, a is 7. In yet other embodiments, a is 8. In some embodiments, a is 9. In other embodiments, a is 10. In more embodiments, a is 11. In yet other embodiments, a is 12. In some embodiments, a is 13. In other embodiments, a is 14. In more embodiments, a is 15. In yet other embodiments, a is 16.

[0492] In some other embodiments of Formula I, b is 1. In other embodiments, b is 2. In more embodiments, b is 3. In yet other embodiments, b is 4. In some embodiments, b is 5. In other embodiments, b is 6. In more embodiments, b is 7. In yet other embodiments, b is 8. In some embodiments, b is 9. In other embodiments, b is 10. In more embodiments, b is 11. In yet other embodiments, b is 12. In some embodiments, b is 13. In other embodiments, b is 14. In more embodiments, b is 15. In yet other embodiments, b is 16.

[0493] In some more embodiments of Formula I, c is 1. In other embodiments, c is 2. In more embodiments, c is 3. In yet other embodiments, c is 4. In some embodiments, c is 5. In other embodiments, c is 6. In more embodiments, c is 7. In yet other embodiments, c is 8. In some embodiments, c is 9. In other embodiments, c is 10. In more embodiments, c is 11. In yet other embodiments, c is 12. In some embodiments, c is 13. In other embodiments, c is 14. In more embodiments, c is 15. In yet other embodiments, c is 16.

[0494] In some certain other embodiments of Formula I, d is 0. In some embodiments, d is 1. In other embodiments, d is 2. In more embodiments, d is 3. In yet other embodiments, d is 4. In some embodiments, d is 5. In other embodiments, d is 6. In more embodiments, d is 7. In yet other embodiments, d is 8. In some embodiments, d is 9. In other embodiments, d is 10. In more embodiments, d is 11. In yet other embodiments, d is 12. In some embodiments, d is 13. In other embodiments, d is 14. In more embodiments, d is 15. In yet other embodiments, d is 16.

[0495] In some other various embodiments of Formula I, a and d are the same. In some other embodiments, b and c are the same. In some other specific embodiments, a and d are the same and b and c are the same.

[0496] The sum of a and b and the sum of c and d in Formula I are factors which may be varied to obtain a lipid of formula I having the desired properties. In one embodiment, a and b are chosen such that their sum is an integer ranging from 14 to 24. In other embodiments, c and d are chosen such that their sum is an integer ranging from 14 to 24. In further embodiment, the sum of a and b and the sum of c and d are the same. For example, in some embodiments the sum of a and b and the sum of c and d are both the same integer which may range from 14 to 24. In still more embodiments, a. b, c and d are selected such the sum of a and b and the sum of c and d is 12 or greater.

[0497] In some embodiments of Formula I, e is 1. In other embodiments, e is 2.

[0498] The substituents at R^{1a}, R^{2a}, R^{3a} and R^{4a} of Formula I are not particularly limited. In certain embodiments R^{1a}, R^{2a}, R^{3a} and R^{4a} are H at each occurrence. In certain other embodiments at least one of R^{1a}, R^{2a}, R^{3a} and R^{4a} is C₁-C₁₂ alkyl. In certain other embodiments at least one of R^{1a}, R^{2a}, R^{3a} and R^{4a} is C₁-C₈ alkyl. In certain other embodiments at least one of R^{1a}, R^{2a}, R^{3a} and R^{4a} is C₁-C₆ alkyl. In some of the foregoing embodiments, the C₁-C₈ alkyl is methyl, ethyl, n-propyl, iso-propyl, n-butyl, iso-butyl, tert-butyl, n-hexyl or n-octyl.

[0499] In certain embodiments of Formula I, R^{1a}, R^{1b}, R^{4a} and R^{4b} are C₁-C₁₂ alkyl at each occurrence.

[0500] In further embodiments of Formula I, at least one of R^{1b}, R^{2b}, R^{3b} and R^{4b} is H or R^{1b}, R^{2b}, R^{3b} and R^{4b} are H at each occurrence.

[0501] In certain embodiments of Formula I, R^{1b} together with the carbon atom to which it is bound is taken together with an adjacent R^{1b} and the carbon atom to which it is bound to form a carbon-carbon double bond. In other embodiments of the foregoing R^{4b} together with the carbon atom to which it is bound is taken together with an adjacent R^{4b} and the carbon atom to which it is bound to form a carbon-carbon double bond.

[0502] The substituents at R⁵ and R⁶ of Formula I are not particularly limited in the foregoing embodiments. In certain embodiments one or both of R⁵ or R⁶ is methyl. In certain other embodiments one or both of R⁵ or R⁶ is cycloalkyl for example cyclohexyl. In these embodiments the cycloalkyl may be substituted or not substituted. In certain other embodiments the cycloalkyl is substituted with C₁-C₁₂ alkyl, for example tert-butyl.

[0503] The substituents at R⁷ are not particularly limited in the foregoing embodiments of Formula I. In certain embodiments at least one R⁷ is H. In some other embodiments, R⁷ is H at each occurrence. In certain other embodiments R⁷ is C₁-C₁₂ alkyl.

[0504] In certain other of the foregoing embodiments of Formula I, one of R⁸ or R⁹ is methyl. In other embodiments, both R⁸ and R⁹ are methyl.

[0505] In some different embodiments of Formula I, R⁸ and R⁹, together with the nitrogen atom to which they are attached, form a 5, 6 or 7-membered heterocyclic ring. In some embodiments of the foregoing, R⁸ and R⁹, together with the nitrogen atom to which they are attached, form a 5-membered heterocyclic ring, for example a pyrrolidinyl ring.

[0506] In some embodiments of Embodiment 3, the first and second cationic lipids are each, independently selected from a lipid of Formula I.

[0507] In various different embodiments, the lipid of Formula I has one of the structures set forth in Table 1 below.

TABLE 1
Representative Lipids of Formula I

| No. | Structure | pKa |
|---|---|---|
| I-1 | [chemical structure] | — |
| I-2 | [chemical structure] | 5.64 |
| I-3 | [chemical structure] | 7.15 |
| I-4 | [chemical structure] | 6.43 |
| I-5 | [chemical structure] | 6.28 |
| I-6 | [chemical structure] | 6.12 |
| I-7 | [chemical structure] | — |
| I-8 | [chemical structure] | — |
| I-9 | [chemical structure] | — |
| I-10 | [chemical structure] | — |
| I-11 | [chemical structure] | 6.36 |
| I-12 | [chemical structure] | — |
| I-13 | [chemical structure] | 6.15 |
| I-14 | [chemical structure] | — |
| I-15 | [chemical structure] | 6.30 |
| I-16 | [chemical structure] | 6.63 |
| I-17 | [chemical structure] | — |
| I-18 | [chemical structure] | — |
| I-19 | [chemical structure] | 6.72 |
| I-20 | [chemical structure] | 6.44 |
| I-21 | [chemical structure] | 6.28 |
| I-22 | [chemical structure] | 6.53 |
| I-23 | [chemical structure] | 6.24 |
| I-24 | [chemical structure] | 6.28 |
| I-25 | [chemical structure] | 6.20 |
| I-33 | [chemical structure] | 6.27 |
| I-34 | [chemical structure] | — |
| I-35 | [chemical structure] | 6.21 |
| I-36 | [chemical structure] | — |
| I-37 | [chemical structure] | — |
| I-38 | [chemical structure] | 6.24 |
| I-39 | [chemical structure] | 5.82 |
| I-40 | [chemical structure] | 6.38 |
| I-41 | [chemical structure] | 5.91 |

[0508] In some embodiments, the cationic lipid of Embodiments 1, 2, 3, 4 or 5 has a structure of Formula II:

[chemical structure]

[0509] or a pharmaceutically acceptable salt, tautomer, prodrug or stereoisomer thereof, wherein:
   [0510] one of L¹ or L² is —O(C═O)—, —(C═O)O—, —C(═O)—, —O—, —S(O)ₓ—, —S—S—, —C(═O)S—, SC(═O)—, —NR^{a}C(═O)—, —C(═O)NR^{a}—, NR^{a}C(═O)NR^{a}—, —OC(═O)NR^{a}— or —NR^{a}C(═O)O—, and the other of L¹ or L² is —O(C═O)—, —(C═O)O—, —C(═O)—, —O—, —S(O)ₓ—, —S—S—, —C(═O)S—, SC(═O)—, —NR^{a}C(═O)—, —C(═O)NR^{a}—, NR^{a}C(═O)NR^{a}—, —OC(═O)NR^{a}—or
[0511] NR^{a}C(═O)O— or a direct bond;
   [0512] G¹ is C₁-C₂ alkylene, —(C═O)—, —O(C═O)—, —SC(═O)—, —NR^{a}C(═O)— or a direct bond;
   [0513] G² is —C(═O)—, —(C═O)O—, —C(═O)S—, —C(═O)NR^{a}— or a direct bond;
   [0514] G³ is C₁-C₆ alkylene;
   [0515] R^{a} is H or C₁-C₁₂ alkyl;
   [0516] R^{1a} and R^{1b} are, at each occurrence, independently either: (a) H or C₁-C₁₂ alkyl; or (b) R^{1a} is H or C₁-C₁₂ alkyl, and R^{1b} together with the carbon atom to which it is bound is taken together with an adjacent R^{1b} and the carbon atom to which it is bound to form a carbon-carbon double bond;
   [0517] R^{2a} and R^{2b} are, at each occurrence, independently either: (a) H or C₁-C₁₂ alkyl; or (b) R^{2a} is H or C₁-C₁₂ alkyl, and R^{2b} together with the carbon atom to which it is bound is taken together with an adjacent R^{2b} and the carbon atom to which it is bound to form a carbon-carbon double bond;
   [0518] R^{3a} and R^{3b} are, at each occurrence, independently either (a): H or C₁-C₁₂ alkyl; or (b) R^{3a} is H or C₁-C₁₂ alkyl, and R^{3b} together with the carbon atom to which it is bound is taken together with an adjacent R^{3b} and the carbon atom to which it is bound to form a carbon-carbon double bond;
   [0519] R^{4a} and R^{4b} are, at each occurrence, independently either: (a) H or C₁-C₁₂ alkyl; or (b) R^{4a} is H or C₁-C₁₂ alkyl, and R^{4b} together with the carbon atom to which it is bound is taken together with an adjacent R^{4b} and the carbon atom to which it is bound to form a carbon-carbon double bond;
   [0520] R⁵ and R⁶ are each independently H or methyl;
   [0521] R⁷ is C₄-C₂₀ alkyl;
   [0522] R⁸ and R⁹ are each independently C₁-C₁₂ alkyl; or R⁸ and R⁹, together with the nitrogen atom to which they are attached, form a 5, 6 or 7-membered heterocyclic ring;
   [0523] a, b, c and d are ach independently an integer from 1 to 24; and
   [0524] x is 0, 1 or 2.

[0525] In some embodiments of Formula (II), L¹ and L² are each independently —O(C═O)—, —(C═O)O— or a direct bond. In other embodiments, G¹ and G² are each independently —(C═O)— or a direct bond. In some different embodiments, L¹ and L² are each independently —O(C═O)—, —(C═O)O— or a direct bond; and G¹ and G² are each independently —(C═O)— or a direct bond.

[0526] In some different embodiments of Formula (II), L¹ and L² are each independently —C(═O)—, —O—, —S(O)ₓ—, —S—S—, —C(═O)S—, —SC(═O)—, —NR^{a}—, —NR^{a}C(═O)—, —C(═O)NR^{a}—, —NR^{a}C(═O)NR^{a}, —OC(═O)NR^{a}—, —NR^{a}C(═O)O—, —NR^{a}S(O)ₓNR^{a}—, —NR^{a}S (O)ₓ— or —S(O)ₓNR^{a}—.

[0527] In other of the foregoing embodiments of Formula (II), the lipid compound has one of the following Formulae (IIA) or (IIB):

[chemical structure]

[0528] In some embodiments of Formula (II), the lipid compound has Formula (IIA). In other embodiments, the lipid compound has Formula (IIB).

[0529] In any of the foregoing embodiments of Formula (II), one of L¹ or L² is —O(C═O)—. For example, in some embodiments each of L¹ and L² are —O(C═O)—.

[0530] In some different embodiments of Formula (11), one of L¹ or L² is —(C═O)O—. For example, in some embodiments each of L¹ and L² is —(C═O)O—.

[0531] In different embodiments of Formula (II), one of L¹ or L² is a direct bond. As used herein, a “direct bond” means the group (e.g., L¹ or L²) is absent. For example, in some embodiments each of L¹ and L² is a direct bond.

[0532] In other different embodiments of Formula (II), for at least one occurrence of R^{1a} and R^{1b}, R^{1a} is H or C₁-C₁₂ alkyl, and R^{1b} together with the carbon atom to which it is bound is taken together with an adjacent R^{1b} and the carbon atom to which it is bound to form a carbon-carbon double bond.

[0533] In still other different embodiments of Formula (II), for at least one occurrence of R^{4a} and R^{4b}, R^{4a} is H or C₁-C₁₂ alkyl, and R^{4b} together with the carbon atom to which it is bound is taken together with an adjacent R^{4b} and the carbon atom to which it is bound to form a carbon-carbon double bond.

[0534] In more embodiments of Formula (II), for at least one occurrence of R^{2a} and R^{2b}, R^{2a} is H or C₁-C₁₂ alkyl, and R^{2b} together with the carbon atom to which it is bound is taken together with an adjacent R^{2b} and the carbon atom to which it is bound to form a carbon-carbon double bond.

[0535] In other different embodiments of Formula (II), for at least one occurrence of R^{3a} and R^{3b}, R^{3a} is H or C₁-C₁₂ alkyl, and R^{3b} together with the carbon atom to which it is bound is taken together with an adjacent R^{3b} and the carbon atom to which it is bound to form a carbon-carbon double bond.

[0536] In various other embodiments of Formula (II), the lipid compound has one of the following Formulae (IIC) or (IID).

[chemical structure]

wherein e, f, g and h are each independently an integer from 1 to 12.

[0537] In some embodiments of Formula (II), the lipid compound has Formula (IIC). In other embodiments, the lipid compound has Formula (IID).

[0538] In various embodiments of Formulae (IIC) or (IID), e, f, g and h are each independently an integer from 4 to 10.

[0539] In certain embodiments of Formula (II), a, b, c and d are each independently an integer from 2 to 12 or an integer from 4 to 12. In other embodiments, a, b, c and d are each independently an integer from 8 to 12 or 5 to 9. In some certain embodiments, a is 0. In some embodiments, a is 1. In other embodiments, a is 2. In more embodiments, a is 3. In yet other embodiments, a is 4. In some embodiments, a is 5. In other embodiments, a is 6. In more embodiments, a is 7. In yet other embodiments, a is 8. In some embodiments, a is 9. In other embodiments, a is 10. In more embodiments, a is 11. In yet other embodiments, a is 12. In some embodiments, a is 13. In other embodiments, a is 14. In more embodiments, a is 15. In yet other embodiments, a is 16.

[0540] In some embodiments of Formula (II), b is 1. In other embodiments, b is 2. In more embodiments, b is 3. In yet other embodiments, b is 4. In some embodiments, b is 5. In other embodiments, b is 6. In more embodiments, b is 7. In yet other embodiments, b is 8. In some embodiments, b is 9. In other embodiments, b is 10. In more embodiments, b is 11. In yet other embodiments, b is 12. In some embodiments, b is 13. In other embodiments, b is 14. In more embodiments, b is 15. In yet other embodiments, b is 16.

[0541] In some embodiments of Formula (II), c is 1. In other embodiments, c is 2. In more embodiments, c is 3. In yet other embodiments, c is 4. In some embodiments, c is 5. In other embodiments, c is 6. In more embodiments, c is 7. In yet other embodiments, c is 8. In some embodiments, c is 9. In other embodiments, c is 10. In more embodiments, c is 11. In yet other embodiments, c is 12. In some embodiments, c is 13. In other embodiments, c is 14. In more embodiments, c is 15. In yet other embodiments, c is 16.

[0542] In some certain embodiments of Formula (II), d is 0. In some embodiments, d is 1. In other embodiments, d is 2. In more embodiments, d is 3. In yet other embodiments, d is 4. In some embodiments, d is 5. In other embodiments, d is 6. In more embodiments, d is 7. In yet other embodiments, d is 8. In some embodiments, d is 9. In other embodiments, d is 10. In more embodiments, d is 11. In yet other embodiments, d is 12. In some embodiments, d is 13. In other embodiments, d is 14. In more embodiments, d is 15. In yet other embodiments, d is 16.

[0543] In some embodiments of Formula (II), e is 1. In other embodiments, e is 2. In more embodiments, e is 3. In yet other embodiments, e is 4. In some embodiments, e is 5. In other embodiments, e is 6. In more embodiments, e is 7. In yet other embodiments, e is 8. In some embodiments, e is 9. In other embodiments, e is 10. In more embodiments, e is 11. In yet other embodiments, e is 12.

[0544] In some embodiments of Formula (II), f is 1. In other embodiments, f is 2. In more embodiments, f is 3. In yet other embodiments, f is 4. In some embodiments, f is 5. In other embodiments, f is 6. In more embodiments, f is 7. In yet other embodiments, f is 8. In some embodiments, f is 9. In other embodiments, f is 10. In more embodiments, f is 11. In yet other embodiments, f is 12.

[0545] In some embodiments of Formula (II), g is 1. In other embodiments, g is 2. In more embodiments, g is 3. In yet other embodiments, g is 4. In some embodiments, g is 5. In other embodiments, g is 6. In more embodiments, g is 7. In yet other embodiments, g is 8. In some embodiments, g is 9. In other embodiments, g is 10. In more embodiments, g is 11. In yet other embodiments, g is 12.

[0546] In some embodiments of Formula (II), h is 1. In other embodiments, e is 2. In more embodiments, h is 3. In yet other embodiments, h is 4. In some embodiments, e is 5. In other embodiments, h is 6. In more embodiments, h is 7. In yet other embodiments, h is 8. In some embodiments, h is 9. In other embodiments, h is 10. In more embodiments, h is 11. In yet other embodiments, h is 12.

[0547] In some other various embodiments of Formula (II), a and d are the same. In some other embodiments, b and c are the same. In some other specific embodiments and a and d are the same and b and c are the same.

[0548] The sum of a and b and the sum of c and d of Formula (II) are factors which may be varied to obtain a lipid having the desired properties. In one embodiment, a and b are chosen such that their sum is an integer ranging from 14 to 24. In other embodiments, c and d are chosen such that their sum is an integer ranging from 14 to 24. In further embodiment, the sum of a and b and the sum of c and d are the same. For example, in some embodiments the sum of a and b and the sum of c and d are both the same integer which may range from 14 to 24. In still more embodiments, a. b, c and d are selected such that the sum of a and b and the sum of c and d is 12 or greater.

[0549] The substituents at R^{1a}, R^{2a}, R^{3a} and R^{4a} of Formula (II) are not particularly limited. In some embodiments, at least one of R^{1a}, R^{2a}, R^{3a} and R^{4a} is H. In certain embodiments R^{1a}, R^{2a}, R^{3a} and R^{4a} are H at each occurrence. In certain other embodiments at least one of R^{1a}, R^{2a}, R^{3a} and R^{4a} is C₁-C₁₂ alkyl. In certain other embodiments at least one of R^{1a}, R^{2a}, R^{3a} and R^{4a} is C₁-C₈ alkyl. In certain other embodiments at least one of R^{1a}, R^{2a}, R^{3a} and R^{4a} is C₁-C₆ alkyl. In some of the foregoing embodiments, the C₁-C₈ alkyl is methyl, ethyl, n-propyl, iso-propyl, n-butyl, iso-butyl, tert-butyl, n-hexyl or n-octyl.

[0550] In certain embodiments of Formula (II), R^{1a}, R^{1b}, R^{4a} and R^{4b} are C₁-C₁₂ alkyl at each occurrence.

[0551] In further embodiments of Formula (II), at least one of R^{1b}, R^{2b}, R^{3b} and R^{4b} is H or R^{1b}, R^{2b}, R³ and R^{4b} are H at each occurrence.

[0552] In certain embodiments of Formula (II), R^{1b} together with the carbon atom to which it is bound is taken together with an adjacent R^{1b} and the carbon atom to which it is bound to form a carbon-carbon double bond. In other embodiments of the foregoing R^{4b} together with the carbon atom to which it is bound is taken together with an adjacent R^{4b} and the carbon atom to which it is bound to form a carbon-carbon double bond.

[0553] The substituents at R⁵ and R⁶ of Formula (II) are not particularly limited in the foregoing embodiments. In certain embodiments one of R⁵ or R⁶ is methyl. In other embodiments each of R⁵ or R⁶ is methyl.

[0554] The substituents at R⁷ of Formula (II) are not particularly limited in the foregoing embodiments. In certain embodiments R⁷ is C₆-C₁₆ alkyl. In some other embodiments, R⁷ is C₆-C₉ alkyl. In some of these embodiments, R⁷ is substituted with —(C═)OR, —O(C═O)R^{b}, —C(O)R^{b}, —OR^{b}, —S(O)ₓR^{b}, —S—SR^{b}, —C(═O)SR^{b}, —SC(═O)R^{b}, —NR^{a}R^{b}, —NR^{a}C(═O)R^{b}, —C(═O)NR^{a}R^{b}, —NR^{a}C(═O)NR^{a}R^{b}, —OC(═O)NR^{a}R^{b}, —NR^{a}C(═O)OR^{b}, —NR^{a}S(O)ₓNR^{a}R^{b}, —N^{a}S(O)ₓR^{b} or —S(O)ₓNR^{a}R^{b}, wherein: R^{a} is H or C₁-C₁₂ alkyl; R^{b} is C₁-C₁₅ alkyl; and x is 0, 1 or 2. For example, in some embodiments R is substituted with —(C═O)OR^{b} or —O(C═O)R^{b}.

[0555] In some of the foregoing embodiments of Formula (II), R^{b} is branched C₁-C₁₆ alkyl. For example, in some embodiments R^{b} has one of the following structures:

[chemical structure]

[0556] In certain other of the foregoing embodiments of Formula (II), one of R⁸ or R⁹ is methyl. In other embodiments, both R⁸ and R⁹ are methyl In some different embodiments of Formula (II), R⁸ and R⁹, together with the nitrogen atom to which they are attached, form a 5, 6 or 7-membered heterocyclic ring. In some embodiments of the foregoing, R⁸ and R⁹, together with the nitrogen atom to which they are attached, form a 5-membered heterocyclic ring, for example a pyrrolidinyl ring. In some different embodiments of the foregoing, R⁸ and R⁹, together with the nitrogen atom to which they are attached, form a 6-membered heterocyclic ring, for example a piperazinyl ring.

[0557] In certain embodiments of Embodiment 3, the first and second cationic lipids are each, independently selected from a lipid of Formula II.

[0558] In still other embodiments of the foregoing lipids of Formula (II), G³ is C₂-C₄ alkylene, for example C₃ alkylene. In various different embodiments, the lipid compound has one of the structures set forth in Table 2 below

TABLE 2
Representative Lipids of Formula (II)

| No. | Structure | pKa |
|---|---|---|
| II-1 | [chemical structure] | 5.64 |
| II-2 | [chemical structure] | — |
| II-3 | [chemical structure] | — |
| II-4 | [chemical structure] | — |
| II-5 | [chemical structure] | 6.27 |
| II-6 | [chemical structure] | 6.14 |
| II-7 | [chemical structure] | 5.93 |
| II-8 | [chemical structure] | 5.35 |
| II-9 | [chemical structure] | 6.27 |
| II-10 | [chemical structure] | 6.16 |
| II-11 | [chemical structure] | 6.13 |
| II-12 | [chemical structure] | 6.21 |
| II-13 | [chemical structure] | 6.22 |
| II-14 | [chemical structure] | 6.33 |
| II-15 | [chemical structure] | 6.32 |
| II-16 | [chemical structure] | 6.37 |
| II-17 | [chemical structure] | 6.27 |
| II-18 | [chemical structure] | — |
| II-19 | [chemical structure] | — |
| II-20 | [chemical structure] | — |
| II-21 | [chemical structure] | — |
| II-22 | [chemical structure] | — |
| II-23 | [chemical structure] | — |
| II-24 | [chemical structure] | 6.14 |
| II-25 | [chemical structure] | — |
| II-26 | [chemical structure] | — |
| II-27 | [chemical structure] | — |
| II-28 | [chemical structure] | — |
| II-29 | [chemical structure] | — |
| II-30 | [chemical structure] | — |
| II-31 | [chemical structure] | — |
| II-32 | [chemical structure] | — |
| II-33 | [chemical structure] | — |
| II-34 | [chemical structure] | — |
| II-35 | [chemical structure] | 5.97 |
| II-36 | [chemical structure] | 6.13 |
| II-37 | [chemical structure] | 5.61 |
| II-38 | [chemical structure] | 6.45 |
| II-39 | [chemical structure] | 6.45 |
| II-40 | [chemical structure] | 6.57 |
| II-41 | [chemical structure] | — |
| II-42 | [chemical structure] | — |
| II-43 | [chemical structure] | — |
| II-44 | [chemical structure] | — |
| II-45 | [chemical structure] | — |
| II-46 | [chemical structure] | — |

[0559] In some other embodiments, the cationic lipid of Embodiments 1, 2, 3, 4 or 5 has a structure of Formula III:

[chemical structure]

[0560] or a pharmaceutically acceptable salt, prodrug or stereoisomer thereof, wherein:
   [0561] one of L¹ or L² is —O(C═O)—, —(C═O)O—, —C(═O)—, —O—, —S(O)ₓ—, —S—S—, —C(═O)S—, SC(═O)—, —NR^{a}C(═O)—, —C(═O)NR^{a}—, NR^{a}C(═O)NR^{a}—, —OC(═O)NR^{a}— or —NR^{a}C(═O)O—, and the other of L¹ or L² is —O(C═O)—, —(C═O)O—, —C(═O)—, —O—, —S(O)ₓ—, —S—S—, —C(═O)S—, SC(═O)—, —NR^{a}C(═O)—, —C(═O)NR^{a}—, NR^{a}C(═O)NR^{a}—, —OC(═O)NR^{a}— or
[0562] —NR^{a}C(═O)O— or a direct bond;
   [0563] G¹ and G² are each independently unsubstituted C₁-C₁₂ alkylene or C₁-C₁₂ alkenylene;
   [0564] G³ is C₁-C₂₄ alkylene, C₁-C₂₄ alkenylene, C₃-C₈ cycloalkylene, C₃-C₈ cycloalkenylene;
   [0565] R^{a} is H or C₁-C₁₂ alkyl;
   [0566] R¹ and R² are each independently C₆-C₂₄ alkyl or C₆-C₂₄ alkenyl;
   [0567] R³ is H, OR⁵, CN, —C(═O)OR⁴, —OC(═O)R⁴ or —NR⁵C(═O)R⁴;
   [0568] R⁴ is C₁-C₁₂ alkyl;
   [0569] R⁵ is H or C₁-C₆ alkyl; and
   [0570] x is 0, 1 or 2.

[0571] In some of the foregoing embodiments of Formula (III), the lipid has one of the following Formulae (IIIA) or (IIIB):

[chemical structure]

[0572] wherein:
   [0573] A is a 3 to 8-membered cycloalkyl or cycloalkylene ring;
   [0574] R⁶ is, at each occurrence, independently H, OH or C₁-C₂₄ alkyl;
   [0575] n is an integer ranging from 1 to 15.

[0576] In some of the foregoing embodiments of Formula (III), the lipid has Formula (IIIA), and in other embodiments, the lipid has Formula (IIIB).

[0577] In other embodiments of Formula (III), the lipid has one of the following Formulae (IIC) or (IIID):

[chemical structure]

[0578] wherein y and z are each independently integers ranging from 1 to 12.

[0579] In any of the foregoing embodiments of Formula (III), one of L¹ or L² is —O(C═O)—. For example, in some embodiments each of L¹ and L² are —O(C═O)—. In some different embodiments of any of the foregoing, L¹ and L² are each independently —(C═O)O— or —O(C═O)—. For example, in some embodiments each of L¹ and L² is —(C═O)O—.

[0580] In some different embodiments of Formula (III), the lipid has one of the following Formulae (IIIE) or (IIIF):

[chemical structure]

[0581] In some of the foregoing embodiments of Formula (III), the lipid has one of the following Formulae (IIIG), (IIIH), (IIII), or (IIIJ).

[chemical structure]

[0582] In some of the foregoing embodiments of Formula (III), n is an integer ranging from 2 to 12, for example from 2 to 8 or from 2 to 4. For example, in some embodiments, n is 3, 4, 5 or 6. In some embodiments, n is 3. In some embodiments, n is 4. In some embodiments, n is 5. In some embodiments, n is 6.

[0583] In some other of the foregoing embodiments of Formula (III), y and z are each independently an integer ranging from 2 to 10. For example, in some embodiments, y and z are each independently an integer ranging from 4 to 9 or from 4 to 6.

[0584] In some of the foregoing embodiments of Formula (III), R⁶ is H. In other of the foregoing embodiments, R⁶ is C₁-C₂₄ alkyl. In other embodiments, R⁶ is OH.

[0585] In some embodiments of Formula (III), G³ is unsubstituted. In other embodiments, G3 is substituted. In various different embodiments, G³ is linear C₁-C₂₄ alkylene or linear C₁-C₂₄ alkenylene.

[0586] In some other foregoing embodiments of Formula (III), R¹ or R², or both, is C₆-C₂₄ alkenyl. For example, in some embodiments, R¹ and R² each, independently have the following structure:

[chemical structure]

[0587] wherein:
   [0588] R^{7a} and R^{7b} are, at each occurrence, independently H or C₁-C₁₂ alkyl; and
   [0589] a is an integer from 2 to 12,
   [0590] wherein R^{7a}, R^{7b} and a are each selected such that R¹ and R² each independently comprise from 6 to 20 carbon atoms. For example, in some embodiments a is an integer ranging from 5 to 9 or from 8 to 12.

[0591] In some of the foregoing embodiments of Formula (III), at least one occurrence of R^{7a} is H. For example, in some embodiments, R^{7a} is H at each occurrence. In other different embodiments of the foregoing, at least one occurrence of R^{7b} is C₁-C₈ alkyl. For example, in some embodiments, C₁-C₈ alkyl is methyl, ethyl, n-propyl, iso-propyl, n-butyl, iso-butyl, tert-butyl, n-hexyl or n-octyl.

[0592] In different embodiments of Formula (III), R¹ or R², or both, has one of the following structures:

[chemical structure]

[0593] In some of the foregoing embodiments of Formula (III), R³ is OH, CN, —C(═O)OR⁴, —OC(═O)R⁴ or —NHC(═O)R⁴. In some embodiments, R⁴ is methyl or ethyl.

[0594] In some specific embodiments of Embodiment 3, the first and second cationic lipids are each, independently selected from a lipid of Formula III.

[0595] In various different embodiments, a cationic lipid of any one of the disclosed embodiments (e.g., the cationic lipid, the first cationic lipid, the second cationic lipid) of Formula (III) has one of the structures set forth in Table 3 below.

TABLE 3
Representative Compounds of Formula (III)

| No. | Structure | pKa |
|---|---|---|
| III-1 | [chemical structure] | 5.89 |
| III-2 | [chemical structure] | 6.05 |
| III-3 | [chemical structure] | 6.09 |
| III-4 | [chemical structure] | 5.60 |
| III-5 | [chemical structure] | 5.59 |
| III-6 | [chemical structure] | 5.42 |
| III-7 | [chemical structure] | 6.11 |
| III-8 | [chemical structure] | 5.84 |
| III-9 | [chemical structure] | — |
| III-10 | [chemical structure] | — |
| III-11 | [chemical structure] | — |
| III-12 | [chemical structure] | — |
| III-13 | [chemical structure] | — |
| III-14 | [chemical structure] | — |
| III-15 | [chemical structure] | 6.14 |
| III-16 | [chemical structure] | 6.31 |
| III-17 | [chemical structure] | 6.28 |
| III-18 | [chemical structure] | — |
| III-19 | [chemical structure] | — |
| III-20 | [chemical structure] | 6.36 |
| III-21 | [chemical structure] | — |
| III-22 | [chemical structure] | 6.10 |
| III-23 | [chemical structure] | 5.98 |
| III-24 | [chemical structure] | — |
| III-25 | [chemical structure] | 6.22 |
| III-26 | [chemical structure] | 5.84 |
| III-27 | [chemical structure] | 5.77 |
| III-28 | [chemical structure] | — |
| III-29 | [chemical structure] | — |
| III-30 | [chemical structure] | 6.09 |
| III-31 | [chemical structure] | — |
| III-32 | [chemical structure] | — |
| III-33 | [chemical structure] | — |
| III-34 | [chemical structure] | — |
| III-35 | [chemical structure] | — |
| III-36 | [chemical structure] | — |
| III-37 | [chemical structure] | — |
| III-38 | [chemical structure] | — |
| III-39 | [chemical structure] | — |
| III-40 | [chemical structure] | — |
| III-41 | [chemical structure] | — |
| III-42 | [chemical structure] | — |
| III-43 | [chemical structure] | — |
| III-44 | [chemical structure] | — |
| III-45 | [chemical structure] | — |
| III-46 | [chemical structure] | — |
| III-47 | [chemical structure] | — |
| III-48 | [chemical structure] | — |
| III-49 | [chemical structure] | — |

[0596] In one embodiment, the cationic lipid of any one of Embodiments 1, 2, 3, 4 or 5 has a structure of Formula (IV):

[chemical structure]

[0597] or a pharmaceutically acceptable salt, prodrug or stereoisomer thereof, wherein:
   [0598] one of G¹ or G² is, at each occurrence, —O(C═O)—, —(C═O)O—, —C(═O)—, —O—, —S(O)_{y}—, —S—S—, —C(═O)S—, SC(═O)—, —N(R^{a})C(═O)—, —C(═O)N(R^{a})—, —N(R^{a})C(═O)N(R^{a})—, —OC(═O)N(R^{a})— or —N(R^{a})C(═O)O—, and the other of G¹ or G² is, at each occurrence, —O(C═O)—, —(C═O)O—, —C(═O)—, —O—, —S(O)_{y}—, —S—S—, —C(═O)S—, —SC(═O)—, —N(R^{a})C(═O)—, —C(═O)N(R^{a})—, —N(R^{a})C(═O)N(R^{a})—, —OC(═O)N(R^{a})— or —N(R^{a})C(═O)O— or a direct bond;
   [0599] L is, at each occurrence, ˜O(C═O)—, wherein ˜represents a covalent bond to X;
   [0600] X is CR^{a};
   [0601] Z is alkyl, cycloalkyl or a monovalent moiety comprising at least one polar functional group when n is 1; or Z is alkylene, cycloalkylene or a polyvalent moiety comprising at least one polar functional group when n is greater than 1;
   [0602] R^{a} is, at each occurrence, independently H, C₁-C₁₂ alkyl, C₁-C₁₂ hydroxylalkyl, C₁-C₁₂ aminoalkyl, C₁-C₁₂ alkylaminylalkyl, C₁-C₁₂ alkoxyalkyl, C₁-C₁₂ alkoxycarbonyl, C₁-C₁₂ alkylcarbonyloxy, C₁-C₁₂ alkylcarbonyloxyalkyl or C₁-C₁₂alkylcarbonyl;
   [0603] R¹ is, at each occurrence, independently either: (a) H or C₁-C₁₂ alkyl; or (b) R together with the carbon atom to which it is bound is taken together with an adjacent R and the carbon atom to which it is bound to form a carbon-carbon double bond;
   [0604] R¹ and R² have, at each occurrence, the following structure, respectively:

[chemical structure]

a and a² are, at each occurrence, independently an integer from 3 to 12;
   [0605] b¹ and b² are, at each occurrence, independently 0 or 1;
   [0606] c¹ and c² are, at each occurrence, independently an integer from 5 to 10;
   [0607] d¹ and d² are, at each occurrence, independently an integer from 5 to 10;
   [0608] y is, at each occurrence, independently an integer from 0 to 2; and
   [0609] n is an integer from 1 to 6,
   [0610] wherein each alkyl, alkylene, hydroxylalkyl, aminoalkyl, alkylaminylalkyl, alkoxyalkyl, alkoxycarbonyl, alkylcarbonyloxy, alkylcarbonyloxyalkyl and alkylcarbonyl is optionally substituted with one or more substituent.

[0611] In some embodiments of Formula (IV), G¹ and G² are each independently —O(C═O)— or —(C═O)O—.

[0612] In other embodiments of Formula (IV), X is CH.

[0613] In different embodiments of Formula (IV), the sum of a¹+b¹+c¹ or the sum of a²+b²+c² is an integer from 12 to 26.

[0614] In still other embodiments of Formula (IV), a¹ and a² are independently an integer from 3 to 10. For example, in some embodiments a¹ and a² are independently an integer from 4 to 9.

[0615] In various embodiments of Formula (IV), b¹ and b² are 0. In different embodiments, b¹ and b² are 1.

[0616] In more embodiments of Formula (IV), c¹, c², d¹ and d² are independently an integer from 6 to 8.

[0617] In other embodiments of Formula (IV), c and c² are, at each occurrence, independently an integer from 6 to 10, and di and d² are, at each occurrence, independently an integer from 6 to 10.

[0618] In other embodiments of Formula (IV), c and c² are, at each occurrence, independently an integer from 5 to 9, and d¹ and d² are, at each occurrence, independently an integer from 5 to 9.

[0619] In more embodiments of Formula (IV), Z is alkyl, cycloalkyl or a monovalent moiety comprising at least one polar functional group when n is 1. In other embodiments, Z is alkyl.

[0620] In various embodiments of the foregoing Formula (IV), R is, at each occurrence, independently either: (a) H or methyl; or (b) R together with the carbon atom to which it is bound is taken together with an adjacent R and the carbon atom to which it is bound to form a carbon-carbon double bond. In certain embodiments, each R is H. In other embodiments at least one R together with the carbon atom to which it is bound is taken together with an adjacent R and the carbon atom to which it is bound to form a carbon-carbon double bond.

[0621] In other embodiments of the compound of Formula (IV), R¹ and R² independently have. one. of the following structures

[chemical structure]

[0622] In certain embodiments of Formula (IV), the compound has one of the following structures:

[chemical structure]

[chemical structure]

[chemical structure]

[0623] In still different embodiments the cationic lipid of Embodiments 1, 2, 3, 4 or 5 has the structure of Formula (V):

[chemical structure]

[0624] or a pharmaceutically acceptable salt, prodrug or stereoisomer thereof, wherein:
   [0625] one of G¹ or G² is, at each occurrence, —O(C═O)—, —(C═O)O—, —C(═O)—, —O—, —S(O)_{y}—, —S—S—, —C(═O)S—, SC(═O)—, —N(R^{a})C(═O)—, —C(═O)N(R^{a}—, —N(R^{a})C(═O)N(R^{a})—, —OC(═O)N(R^{a})— or —N(R^{a})C(═O)O—, and the other of G¹ or G² is, at each occurrence, —O(C═O)—, —(C═O)O—, —C(═O)—, —O—, —S(O)_{y}—, —S—S—, —C(═O)S—, —SC(═O)—, —N(R^{a})C(═O)—, —C(═O)N(R^{a})—, —N(R^{a})C(═O)N(R^{a})—, —OC(═O)N(R^{a})— or —N(R^{a})C(═O)O— or a direct bond;
   [0626] L is, at each occurrence, ˜O(C═O)—, wherein ˜represents a covalent bond to X;
   [0627] X is CR^{a};
   [0628] Z is alkyl, cycloalkyl or a monovalent moiety comprising at least one polar functional group when n is 1; or Z is alkylene, cycloalkylene or a polyvalent moiety comprising at least one polar functional group when n is greater than 1;
   [0629] R^{a} is, at each occurrence, independently H, C₁-C₁₂ alkyl, C₁-C₁₂ hydroxylalkyl, C₁-C₁₂ aminoalkyl, C₁-C₁₂ alkylaminylalkyl, C₁-C₁₂ alkoxyalkyl, C₁-C₁₂ alkoxycarbonyl, C₁-C₁₂ alkylcarbonyloxy, C₁-C₁₂ alkylcarbonyloxyalkyl or C₁-C₁₂ alkylcarbonyl;
   [0630] R is, at each occurrence, independently either: (a) H or C₁-C₁₂ alkyl; or (b) R together with the carbon atom to which it is bound is taken together with an adjacent R and the carbon atom to which it is bound to form a carbon-carbon double bond;
   [0631] R¹ and R² have, at each occurrence, the following structure, respectively:

[chemical structure]

R′ is, at each occurrence, independently H or C₁-C₁₂ alkyl;
   [0632] a¹ and a² are, at each occurrence, independently an integer from 3 to 12;
   [0633] b¹ and b² are, at each occurrence, independently 0 or 1;
   [0634] c¹ and c² are, at each occurrence, independently an integer from 2 to 12;
   [0635] d¹ and d² are, at each occurrence, independently an integer from 2 to 12;
   [0636] y is, at each occurrence, independently an integer from 0 to 2; and
   [0637] n is an integer from 1 to 6,
   [0638] wherein a¹, a², c¹, c², d¹ and d² are selected such that the sum of a¹+c¹+d¹ is an integer from 18 to 30, and the sum of a²+c²+d² is an integer from 18 to 30, and wherein each alkyl, alkylene, hydroxylalkyl, aminoalkyl, alkylaminylalkyl, alkoxyalkyl, alkoxycarbonyl, alkylcarbonyloxy, alkylcarbonyloxyalkyl and alkylcarbonyl is optionally substituted with one or more substituent.

[0639] In certain embodiments of Formula (V), G¹ and G² are each independently

—O(C═O)— or —(C═O)O—.

[0640] In other embodiments of Formula (V), X is CH.

[0641] In some embodiments of Formula (V), the sum of a¹+c¹+d¹ is an integer from 20 to 30, and the sum of a²+c²+d² is an integer from 18 to 30. In other embodiments, the sum of a¹+c¹+di is an integer from 20 to 30, and the sum of a²+c²+d² is an integer from 20 to 30. In more embodiments of Formula (V), the sum of a¹+b¹+c¹ or the sum of a²+b²+c² is an integer from 12 to 26. In other embodiments, a¹, a², c¹, c², d¹ and d² are selected such that the sum of a1+c¹+d¹ is an integer from 18 to 28, and the sum of a²+c²+d² is an integer from 18 to 28,

[0642] In still other embodiments of Formula (V), a¹ and a² are independently an integer from 3 to 10, for example an integer from 4 to 9.

[0643] In yet other embodiments of Formula (V), b¹ and b² are 0. In different embodiments b¹ and b² are 1.

[0644] In certain other embodiments of Formula (V), c¹, c², d¹ and d² are independently an integer from 6 to 8.

[0645] In different other embodiments of Formula (V), Z is alkyl or a monovalent moiety comprising at least one polar functional group when n is 1; or Z is alkylene or a polyvalent moiety comprising at least one polar functional group when n is greater than 1.

[0646] In more embodiments of Formula (V), Z is alkyl, cycloalkyl or a monovalent moiety comprising at least one polar functional group when n is 1. In other embodiments, Z is alkyl.

[0647] In other different embodiments of Formula (V), R is, at each occurrence, independently either: (a) H or methyl; or (b) R together with the carbon atom to which it is bound is taken together with an adjacent R and the carbon atom to which it is bound to form a carbon-carbon double bond. For example in some embodiments each R is H. In other embodiments at least one R together with the carbon atom to which it is bound is taken together with an adjacent R and the carbon atom to which it is bound to form a carbon-carbon double bond.

[0648] In more embodiments, each R′ is H.

[0649] In certain embodiments of Formula (V), the sum of a¹+c¹+d¹ is an integer from 20 to 25, and the sum of a²+c²+d² is an integer from 20 to 25.

[0650] In other embodiments of Formula (V), R¹ and R² independently have one of the following structures:

[chemical structure]

[0651] In more embodiments of Formula (V), the compound has one of the following structures

[chemical structure]

[chemical structure]

[chemical structure]

[0652] In any of the foregoing embodiments of Formula (IV) or (V), n is 1. In other of the foregoing embodiments of Formula (IV) or (V), n is greater than 1.

[0653] In more of any of the foregoing embodiments of Formula (IV) or (V), Z is a mono- or polyvalent moiety comprising at least one polar functional group. In some embodiments, Z is a monovalent moiety comprising at least one polar functional group. In other embodiments, Z is a polyvalent moiety comprising at least one polar functional group.

[0654] In more of any of the foregoing embodiments of Formula (IV) or (V), the polar functional group is a hydroxyl, alkoxy, ester, cyano, amide, amino, alkylaminyl, heterocyclyl or heteroaryl functional group.

[0655] In any of the foregoing embodiments of Formula (IV) or (V), Z is hydroxyl, hydroxylalkyl, alkoxyalkyl, amino, aminoalkyl, alkylaminyl, alkylaminylalkyl, heterocyclyl or heterocyclylalkyl.

[0656] In some other embodiments of Formula (IV) or (V), Z has the following structure:

[chemical structure]

[0657] R⁵ and R⁶ are independently H or C₁-C₆ alkyl;
[0658] R⁷ and R⁸ are independently H or C₁-C₆ alkyl or R⁷ and R⁸, together with the nitrogen atom to which they are attached, join to form a 3-7 membered heterocyclic ring; and
[0659] x is an integer from 0 to 6.

[0660] In still different embodiments of Formula (IV) or (V), Z has the following structure:

[chemical structure]

[0661] wherein:
   [0662] R⁵ and R⁶ are independently H or C₁-C₆ alkyl;
   [0663] R⁷ and R⁸ are independently H or C₁-C₆ alkyl or R⁷ and R⁸, together with the nitrogen atom to which they are attached, join to form a 3-7 membered heterocyclic ring; and
   [0664] x is an integer from 0 to 6.

[0665] In still different embodiments of formula (IV) or (V), Z has the following structure:

[chemical structure]

[0666] wherein:
   [0667] R⁵ and R⁶ are independently H or C₁-C₆ alkyl;
   [0668] R⁷ and R⁸ are independently H or C₁-C₆ alkyl or R⁷ and R⁸, together with the nitrogen atom to which they are attached, join to form a 3-7 membered heterocyclic ring; and
   [0669] x is an integer from 0 to 6.

[0670] In some other embodiments of Formula (IV) or (V), Z is hydroxylalkyl, cyanoalkyl or an alkyl substituted with one or more ester or amide groups.

[0671] For example, in any of the foregoing embodiments of Formula (IV) or (V), Z has one of the following structures:

[chemical structure]

[0672] In other embodiments of Formula (IV) or (V), Z-L has one of the following structures:

[chemical structure]

[chemical structure]

[chemical structure]

[chemical structure]

[chemical structure]

[0673] In other embodiments, Z-L has one of the following structures:

[chemical structure]

[0674] In still other embodiments, X is CH and Z-L has one of the following structures:

[chemical structure]

[0675] In various different embodiments, a cationic lipid of any one Embodiments 1, 2, 3, 4 or 5 has one of the structures set forth in Table 4 below.

TABLE 4
Representative Compounds of Formula (IV) or (V)

| No. | Structure |
|---|---|
| IV-1 | [chemical structure] |
| IV-2 | [chemical structure] |
| IV-3 | [chemical structure] |

[0676] In one embodiment, the cationic lipid is a compound having the following structure (VI):

[chemical structure]

[0677] or a pharmaceutically acceptable salt, tautomer, prodrug or stereoisomer thereof,
[0678] wherein:
   [0679] L¹ and L² are each independently —O(C═O)—, —(C═O)O—, —C(═O)—, —O—, —S(O)ₓ—, —S—S—, —C(═O)S—, —SC(═O)—, —NR^{a}C(═O)—, —C(═O)NR^{a}—, —NR^{a}C(═O)NR^{a}—, —OC(═O)NR^{a}—, —NR^{a}C(═O)O— or a direct bond;
   [0680] G¹ is C₁-C₂ alkylene, —(C═O)—, —O(C═O)—, —SC(═O)—, —NR^{a}C(═O)— or a direct bond;
   [0681] G² is —C(═O)—, —(C═O)O—, —C(═O)S—, —C(═O)NR^{a}— or a direct bond;
   [0682] G³ is C₁-C₆ alkylene;
   [0683] R^{a} is H or C₁-C₁₂ alkyl;
   [0684] R^{1a} and R^{1b} are, at each occurrence, independently either: (a) H or C₁-C₁₂ alkyl; or (b) R^{1a} is H or C₁-C₁₂ alkyl, and R^{1b} together with the carbon atom to which it is bound is taken together with an adjacent R^{1b} and the carbon atom to which it is bound to form a carbon-carbon double bond;
   [0685] R^{2a} and R^{2b} are, at each occurrence, independently either: (a) H or C₁-C₁₂ alkyl; or (b) R^{2a} is H or C₁-C₁₂ alkyl, and R^{2b} together with the carbon atom to which it is bound is taken together with an adjacent R^{2b} and the carbon atom to which it is bound to form a carbon-carbon double bond;
   [0686] R^{3a} and R^{3b} are, at each occurrence, independently either (a): H or C₁-C₁₂ alkyl; or (b) R^{3a} is H or C₁-C₁₂ alkyl, and R^{3b} together with the carbon atom to which it is bound is taken together with an adjacent R^{3b} and the carbon atom to which it is bound to form a carbon-carbon double bond;
   [0687] R^{4a} and R^{4b} are, at each occurrence, independently either: (a) H or C₁-C₁₂ alkyl; or (b) R^{4a} is H or C₁-C₁₂ alkyl, and R^{4b} together with the carbon atom to which it is bound is taken together with an adjacent R^{4b} and the carbon atom to which it is bound to form a carbon-carbon double bond;
   [0688] R⁵ and R⁶ are each independently H or methyl;
   [0689] R⁷ is H or C₁-C₂₀ alkyl;
   [0690] R⁸ is OH, —N(R⁹)(C═O)R¹⁰, —(C═O)NR⁹R¹⁰, —NR⁹R¹⁰, —(C═O)OR¹¹ or —O(C═O)R¹¹, provided that G³ is C₄-C₆ alkylene when R⁸ is —NR⁹R¹⁰,
   [0691] R⁹ and R¹⁰ are each independently H or C₁-C₁₂ alkyl;
   [0692] R¹¹ is aralkyl;
   [0693] a, b, c and d are each independently an integer from 1 to 24; and
   [0694] x is 0, 1 or 2, wherein each alkyl, alkylene and aralkyl is optionally substituted.

[0695] In some embodiments of structure (VI), L¹ and L² are each independently —O(C═O)—, —(C═O)O— or a direct bond. In other embodiments, G¹ and G² are each independently —(C═O)— or a direct bond. In some different embodiments, L¹ and L² are each independently —O(C═O)—, —(C═O)O— or a direct bond; and G¹ and G² are each independently —(C═O)— or a direct bond.

[0696] In some different embodiments of structure (VI), L¹ and L² are each independently —C(═O)—, —O—, —S(O)ₓ—, —S—S—, —C(═O)S—, —SC(═O)—, —NR^{a}—, —NR^{a}C(═O)—, —C(═O)NR^{a}—, —NR^{a}C(═O)NR^{a}, —OC(═O)NR^{a}—, —NR^{a}C(═O)O—, —NR^{a}S(O)ₓNR^{a}—, —NR^{a}S(O)ₓ— or —S(O)ₓNR^{a}—.

[0697] In other of the foregoing embodiments of structure (VI), the compound has one of the following structures (VIA) or (VIB):

[chemical structure]

[0698] In some embodiments, the compound has structure (VIA). In other embodiments, the compound has structure (VIB).

[0699] In any of the foregoing embodiments of structure (VI), one of L¹ or L² is —O(C═O)—. For example, in some embodiments each of L¹ and L² are —O(C═O)—.

[0700] In some different embodiments of any of the foregoing, one of L¹ or L² is —(C═O)O—. For example, in some embodiments each of L¹ and L² is —(C═O)O—.

[0701] In different embodiments of structure (VI), one of L¹ or L² is a direct bond. As used herein, a “direct bond” means the group (e.g., L¹ or L²) is absent. For example, in some embodiments each of L¹ and L² is a direct bond.

[0702] In other different embodiments of the foregoing, for at least one occurrence of R^{1a} and R^{1b}, R^{1a} is H or C₁-C₁₂ alkyl, and R^{1b} together with the carbon atom to which it is bound is taken together with an adjacent R^{1b} and the carbon atom to which it is bound to form a carbon-carbon double bond.

[0703] In still other different embodiments of structure (VI), for at least one occurrence of R^{4a} and R^{4b}, R^{4a} is H or C₁-C₁₂ alkyl, and R^{4b} together with the carbon atom to which it is bound is taken together with an adjacent R^{4b} and the carbon atom to which it is bound to form a carbon-carbon double bond.

[0704] In more embodiments of structure (VI), for at least one occurrence of R^{2a} and R^{2b}, R^{2a} is H or C₁-C₁₂ alkyl, and R^{2b} together with the carbon atom to which it is bound is taken together with an adjacent R^{2b} and the carbon atom to which it is bound to form a carbon-carbon double bond.

[0705] In other different embodiments of any of the foregoing, for at least one occurrence of R^{3a} and R^{3b}, R^{3a} is H or C₁-C₁₂ alkyl, and R^{3b} together with the carbon atom to which it is bound is taken together with an adjacent R^{3b} and the carbon atom to which it is bound to form a carbon-carbon double bond.

[0706] It is understood that “carbon-carbon” double bond refers to one of the following structures:

[chemical structure]

[0707] wherein R^{c} and R^{d} are, at each occurrence, independently H or a substituent. For example, in some embodiments R^{c} and R^{d} are, at each occurrence, independently H, C₁-C₁₂ alkyl or cycloalkyl, for example H or C₁-C₁₂ alkyl.

[0708] In various other embodiments, the compound has one of the following structures (VIC) or (VID):

[chemical structure]

wherein e, f, g and h are each independently an integer from 1 to 12.

[0709] In some embodiments, the compound has structure (VIC). In other embodiments, the compound has structure (VID).

[0710] In various embodiments of the compounds of structures (VIC) or (VID), e, f, g and h are each independently an integer from 4 to 10.

[0711] In other different embodiments,

[chemical structure]

or both, independently has one of the following structures:

[chemical structure]

[chemical structure]

[0712] In certain embodiments of the foregoing, a, b, c and d are each independently an integer from 2 to 12 or an integer from 4 to 12. In other embodiments, a, b, c and d are each independently an integer from 8 to 12 or 5 to 9. In some certain embodiments, a is 0. In some embodiments, a is 1. In other embodiments, a is 2. In more embodiments, a is 3. In yet other embodiments, a is 4. In some embodiments, a is 5. In other embodiments, a is 6. In more embodiments, a is 7. In yet other embodiments, a is 8. In some embodiments, a is 9. In other embodiments, a is 10. In more embodiments, a is 11. In yet other embodiments, a is 12. In some embodiments, a is 13. In other embodiments, a is 14. In more embodiments, a is 15. In yet other embodiments, a is 16.

[0713] In some embodiments of structure (VI), b is 1. In other embodiments, b is 2. In more embodiments, b is 3. In yet other embodiments, b is 4. In some embodiments, b is 5. In other embodiments, b is 6. In more embodiments, b is 7. In yet other embodiments, b is 8. In some embodiments, b is 9. In other embodiments, b is 10. In more embodiments, b is 11. In yet other embodiments, b is 12. In some embodiments, b is 13. In other embodiments, b is 14. In more embodiments, b is 15. In yet other embodiments, b is 16.

[0714] In some embodiments of structure (VI), c is 1. In other embodiments, c is 2. In more embodiments, c is 3. In yet other embodiments, c is 4. In some embodiments, c is 5. In other embodiments, c is 6. In more embodiments, c is 7. In yet other embodiments, c is 8. In some embodiments, c is 9. In other embodiments, c is 10. In more embodiments, c is 11. In yet other embodiments, c is 12. In some embodiments, c is 13. In other embodiments, c is 14. In more embodiments, c is 15. In yet other embodiments, c is 16.

[0715] In some certain embodiments of structure (VI), d is 0. In some embodiments, d is 1. In other embodiments, d is 2. In more embodiments, d is 3. In yet other embodiments, d is 4. In some embodiments, d is 5. In other embodiments, d is 6. In more embodiments, d is 7. In yet other embodiments, d is 8. In some embodiments, d is 9. In other embodiments, d is 10. In more embodiments, d is 11. In yet other embodiments, d is 12. In some embodiments, d is 13. In other embodiments, d is 14. In more embodiments, d is 15. In yet other embodiments, d is 16.

[0716] In some embodiments of structure (VI), e is 1. In other embodiments, e is 2. In more embodiments, e is 3. In yet other embodiments, e is 4. In some embodiments, e is 5. In other embodiments, e is 6. In more embodiments, e is 7. In yet other embodiments, e is 8. In some embodiments, e is 9. In other embodiments, e is 10. In more embodiments, e is 11. In yet other embodiments, e is 12.

[0717] In some embodiments of structure (VI), f is 1. In other embodiments, f is 2. In more embodiments, f is 3. In yet other embodiments, f is 4. In some embodiments, f is 5. In other embodiments, f is 6. In more embodiments, f is 7. In yet other embodiments, f is 8. In some embodiments, f is 9. In other embodiments, f is 10. In more embodiments, f is 11. In yet other embodiments, f is 12.

[0718] In some embodiments of structure (VI), g is 1 In other embodiments, g is 2. In more embodiments, g is 3. In yet other embodiments, g is 4. In some embodiments, g is 5. In other embodiments, g is 6. In more embodiments, g is 7. In yet other embodiments, g is 8. In some embodiments, g is 9. In other embodiments, g is 10. In more embodiments, g is 11. In yet other embodiments, g is 12.

[0719] In some embodiments of structure (VI), h is 1. In other embodiments, e is 2. In more embodiments, h is 3. In yet other embodiments, h is 4. In some embodiments, e is 5. In other embodiments, h is 6. In more embodiments, h is 7. In yet other embodiments, h is 8. In some embodiments, h is 9. In other embodiments, h is 10. In more embodiments, h is 11. In yet other embodiments, h is 12.

[0720] In some other various embodiments of structure (VI), a and d are the same. In some other embodiments, b and c are the same. In some other specific embodiments a and d are the same and b and c are the same.

[0721] The sum of a and b and the sum of c and d are factors which may be varied to obtain a lipid having the desired properties. In one embodiment, a and b are chosen such that their sum is an integer ranging from 14 to 24. In other embodiments, c and d are chosen such that their sum is an integer ranging from 14 to 24. In further embodiment, the sum of a and b and the sum of c and d are the same. For example, in some embodiments the sum of a and b and the sum of c and d are both the same integer which may range from 14 to 24. In still more embodiments, a. b, c and d are selected such that the sum of a and b and the sum of c and d is 12 or greater.

[0722] The substituents at R¹, R^{2a}, R^{3a} and R^{4a} are not particularly limited. In some embodiments, at least one of R¹, R^{2a}, R^{3a} and R^{4a} is H. In certain embodiments R^{1a}, R^{2a}, R^{3a} and R^{4a} are H at each occurrence. In certain other embodiments at least one of R^{1a}, R^{2a}, R^{3a} and R^{4a} is C₁-C₁₂ alkyl. In certain other embodiments at least one of R^{1a}, R^{2a}, R^{3a} and R^{4a} is C₁-C₅ alkyl. In certain other embodiments at least one of R^{1a}, R^{2a}, R^{3a} and R^{4a} is C₁-C₆ alkyl. In some of the foregoing embodiments, the C₁-C₈ alkyl is methyl, ethyl, n-propyl, iso-propyl, n-butyl, iso-butyl, tert-butyl, n-hexyl or n-octyl.

[0723] In certain embodiments of the foregoing, R^{1a}, R^{1b}, R^{4a} and R^{4b} are C₁-C₁₂ alkyl at each occurrence.

[0724] In further embodiments of the foregoing, at least one of R^{1b}, R^{2b}, R^{3b} and R^{4b} is H or R, R², R^{3b} and R^{4b} are H at each occurrence.

[0725] In certain embodiments of the foregoing, R^{1b} together with the carbon atom to which it is bound is taken together with an adjacent R^{1b} and the carbon atom to which it is bound to form a carbon-carbon double bond. In other embodiments of the foregoing R^{4b} together with the carbon atom to which it is bound is taken together with an adjacent R^{4b} and the carbon atom to which it is bound to form a carbon-carbon double bond.

[0726] The substituents at R⁵ and R⁶ are not particularly limited in the foregoing embodiments. In certain embodiments one of R⁵ or R⁶ is methyl. In other embodiments each of R⁵ or R⁶ is methyl.

[0727] The substituents at R⁷ are not particularly limited in the foregoing embodiments. In certain embodiments R⁷ is C₆-C₁₆ alkyl. In some other embodiments, R⁷ is C₆-C₉ alkyl. In some of these embodiments, R⁷ is substituted with —(C═O)OR^{b}, —O(C═O)R^{b}, —C(═O)R^{b}, —OR^{b}, —S(O)ₓR^{b}, —S—SR^{b}, —C(═O)SR^{b}, —SC(═O)R^{b}, —NR^{a}R^{b}, —NR^{a}C(═O)R^{b}, —C(═O)NR^{a}R^{b}, —NR^{a}C(═O)NR^{a}R^{b}, —OC(═O)NR^{a}R^{b}, —NR^{a}C(═)OR^{b}, —NR^{a}S(O)ₓNR^{a}R^{b}, —NR^{a}S(O)ₓR^{b} or —S(O)ₓNR^{a}R^{b}, wherein: R^{a} is H or C₁-C₁₂ alkyl; R^{b} is C₁-C₁₅ alkyl; and x is 0, 1 or 2. For example, in some embodiments R⁷ is substituted with —(C═O)OR^{b} or —O(C═O)R^{b}.

[0728] In various of the foregoing embodiments of structure (VI), R^{b} is branched C₃-C₁₅ alkyl. For example, in some embodiments R^{b} has one of the following structures:

[chemical structure]

[0729] In certain embodiments, R⁸ is OH.

[0730] In other embodiments of structure (VI), R⁸ is —N(R⁹)(C═O)R¹⁰. In some other embodiments, R⁸ is —(C═O)NR⁹R¹⁰. In still more embodiments, R⁸ is —NR⁹R¹⁰. In some of the foregoing embodiments, R⁹ and R¹⁰ are each independently H or C₁-C₈ alkyl, for example H or C₁-C₃ alkyl. In more specific of these embodiments, the C₁-C₈ alkyl or C₁-C₃ alkyl is unsubstituted or substituted with hydroxyl. In other of these embodiments, R⁹ and R¹⁰ are each methyl.

[0731] In yet more embodiments of structure (VI), R⁸ is —(C═O)OR¹¹. In some of these embodiments R¹¹ is benzyl.

[0732] In yet more specific embodiments of structure (VI), R⁸ has one of the following structures:

[chemical structure]

[0733] In still other embodiments of the foregoing compounds, G³ is C₂-C₅ alkylene, for example C₂-C₄ alkylene, C₃ alkylene or C₄ alkylene. In some of these embodiments, R⁸ is OH. In other embodiments, G² is absent and R⁷ is C₁-C₂ alkylene, such as methyl.

[0734] In various different embodiments, the compound has one of the structures set forth in Table 5 below.

TABLE 5
Representative cationic lipids of structure (VI)

| No. | Structure |
|---|---|
| VI-1 | [chemical structure] |
| VI-2 | [chemical structure] |
| VI-3 | [chemical structure] |
| VI-4 | [chemical structure] |
| VI-5 | [chemical structure] |
| VI-6 | [chemical structure] |
| VI-7 | [chemical structure] |
| VI-8 | [chemical structure] |
| VI-9 | [chemical structure] |
| VI-10 | [chemical structure] |
| VI-11 | [chemical structure] |
| VI-12 | [chemical structure] |
| VI-13 | [chemical structure] |
| VI-14 | [chemical structure] |
| VI-15 | [chemical structure] |
| VI-16 | [chemical structure] |
| VI-17 | [chemical structure] |
| VI-18 | [chemical structure] |
| VI-19 | [chemical structure] |
| VI-20 | [chemical structure] |
| VI-21 | [chemical structure] |
| VI-22 | [chemical structure] |
| VI-23 | [chemical structure] |
| VI-24 | [chemical structure] |
| VI-25 | [chemical structure] |
| VI-26 | [chemical structure] |
| VI-27 | [chemical structure] |
| VI-28 | [chemical structure] |
| VI-29 | [chemical structure] |
| VI-30 | [chemical structure] |
| VI-31 | [chemical structure] |
| VI-32 | [chemical structure] |
| VI-33 | [chemical structure] |
| VI-34 | [chemical structure] |
| VI-35 | [chemical structure] |
| VI-36 | [chemical structure] |
| VI-37 | [chemical structure] |

[0735] In one embodiment, the cationic lipid is a compound having the following structure (VII):

[chemical structure]

[0736] or a pharmaceutically acceptable salt, prodrug or stereoisomer thereof, wherein:
   [0737] X and X′ are each independently N or CR;
   [0738] Y and Y′ are each independently absent, —O(C═O)—, —(C═O)O— or NR, provided that:
      [0739] a)Y is absent when X is N;
      [0740] b) Y′ is absent when X′ is N;
      [0741] c) Y is —O(C═O)—, —(C═O)O— or NR when X is CR; and
      [0742] d) Y is —O(C═O)—, —(C═O)O— or NR when X′ is CR,
   [0743] L¹ and L¹ are each independently —O(C═O)R¹, —(C═O)OR¹, —C(═O)R¹, —OR¹, —S(O)_{z}R¹, —S—SR¹, —C(═O)SR¹, —SC(═O)R¹, —NR^{a}C(═O)R¹, —C(═O)NR^{b}R^{c}, —NR^{a}C(═O)NR^{b}R^{c}, —OC(═O)NR^{b}R^{c} or —NR^{a}C(═O)OR¹;
   [0744] L² and L^{2′} are each independently —O(C═O)R², —(C═O)OR², —C(═O)R², —OR², —S(O)_{z}R², —S—SR², —C(═O)SR², —SC(═O)R², —NR^{d}C(═O)R², —C(═O)NRₑR^{f}, —NR^{d}C(═O)NR^{e}R^{f}, —OC(═O)NR^{e}R^{f}; —NR^{d}C(═O)OR² or a direct bond to R²;
   [0745] G¹, G^{1′}, G² and G^{2′} are each independently C₂-C₁₂ alkylene or C₂-C₁₂ alkenylene;
   [0746] G³ is C₂-C₂₄ heteroalkylene or C₂-C₂₄ heteroalkenylene;
   [0747] R^{a}, R^{b}, R^{d} and R^{e} are, at each occurrence, independently H, C₁-C₁₂ alkyl or C₂-C₁₂ alkenyl;
   [0748] R^{c} and R^{f} are, at each occurrence, independently C₁-C₁₂ alkyl or C₂-C₁₂ alkenyl
   [0749] R is, at each occurrence, independently H or C₁-C₁₂ alkyl;
   [0750] R¹ and R² are, at each occurrence, independently branched C₆-C₂₄ alkyl or branched C₆-C₂₄ alkenyl;
   [0751] z is 0, 1 or 2, and
[0752] wherein each alkyl, alkenyl, alkylene, alkenylene, heteroalkylene and heteroalkenylene is independently substituted or unsubstituted unless otherwise specified.

[0753] In other different embodiments of structure (VII):
[0754] X and X′ are each independently N or CR;
[0755] Y and Y′ are each independently absent or NR, provided that:
   [0756] a)Y is absent when X is N;
   [0757] b) Y′ is absent when X′ is N;
   [0758] c) Y is NR when X is CR; and
   [0759] d) Y′ is NR when X′ is CR,
[0760] L¹ and L^{1′} are each independently —O(C═O)R¹, —(C═O)OR¹, —C(═O)R¹, —OR¹, —S(O)_{z}R¹, —S—SR¹, —C(═O)SR¹, —SC(═O)R¹, —NR^{a}C(═O)R¹, —C(═O)NR^{b}R^{c}, —NR^{a}C(═O)NR^{b}R^{c}, —OC(═O)NR^{b}R^{c} or —NR^{a}C(═O)OR¹;
[0761] L² and L^{2′} are each independently —O(C═O)R², —(C═O)OR², —C(═O)R², —OR², —S(O)_{z}R², —S—SR², —C(═O)SR², —SC(═O)R², —NR^{d}C(═O)R², —C(═O)NR^{e}R^{f}, —NR^{d}C(═O)NR^{e}R^{f}, —OC(═O)NR^{e}R^{f}; —NR^{d}C(═O)OR² or a direct bond to R²;
[0762] G¹, G^{1′}, G² and G^{2′} are each independently C₂-C₁₂ alkylene or C₂-C₁₂ alkenylene;
[0763] G³ is C₂-C₂₄ alkyleneoxide or C₂-C₂₄ alkenyleneoxide;
[0764] R^{a}, R^{b}, R^{d} and R^{e} are, at each occurrence, independently H, C₁-C₂ alkyl or C₂-C₁₂ alkenyl;
[0765] R^{c} and R^{f}are, at each occurrence, independently C₁-C₁₂ alkyl or C₂-C₂ alkenyl;
[0766] R is, at each occurrence, independently H or C₁-C₁₂ alkyl;
[0767] R¹ and R² are, at each occurrence, independently branched C₆-C₂₄ alkyl or branched C₆-C₂₄ alkenyl;
[0768] z is 0, 1 or 2, and
   wherein each alkyl, alkenyl, alkylene, alkenylene, alkyleneoxide and alkenyleneoxide is independently substituted or unsubstituted unless otherwise specified.

[0769] In some embodiments of structure (VII), G³ is C₂-C₂₄ alkyleneoxide or C₂-C₂₄ alkenyleneoxide. In certain embodiments, G³ is unsubstituted. In other embodiments, G³ is substituted, for example substituted with hydroxyl. In more specific embodiments G³ is C₂-C₁₂ alkyleneoxide, for example, in some embodiments G³ is C₃-C₇ alkyleneoxide or in other embodiments G³ is C₃-C₁₂ alkyleneoxide.

[0770] In other embodiments of structure (VII), G³ is C₂-C₂₄ alkyleneaminyl or C₂-C₂₄ alkenyleneaminyl, for example C₆-C₁₂ alkyleneaminyl. In some of these embodiments, G³ is unsubstituted. In other of these embodiments, G³ is substituted with C₁-C₆ alkyl.

[0771] In some embodiments of structure (VII), X and X′ are each N, and Y and Y′ are each absent. In other embodiments, X and X′ are each CR, and Y and Y′ are each NR. In some of these embodiments, R is H.

[0772] In certain embodiments of structure (VII), X and X′ are each CR, and Y and Y′ are each independently —O(C═O)— or —(C═O)O—.

[0773] In some of the foregoing embodiments of structure (VII), the compound has one of the following structures (VIIA), (VIIB), (VIIC), (VIID), (VIIE), (VIIF), (VIIG) or (VIIH):

[chemical structure]

wherein R^{d} is, at each occurrence, independently H or optionally substituted C₁-C₆ alkyl. For example, in some embodiments R^{d} is H. In other embodiments, R^{d} is C₁-C₆ alkyl, such as methyl. In other embodiments, R^{d} is substituted C₁-C₆ alkyl, such as C₁-C₆ alkyl substituted with —O(C═O)R, —(C═O)OR, —NRC(═O)R or —C(═O)N(R)₂, wherein R is, at each occurrence, independently H or C₁-C₁₂ alkyl.

[0774] In some of the foregoing embodiments of structure (VII), L¹ and L^{1′} are each independently —O(C═O)R¹, —(C═O)OR¹ or —C(═O)NR^{b}R^{c}, and L² and L^{2′} are each independently —O(C═O)R², —(C═O)OR² or —C(═O)NR^{e}R^{f}. For example, in some embodiments L¹ and L^{1′} are each —(C═O)OR¹, and L² and L² are each —(C═O)OR². In other embodiments L¹ and L^{1′} are each —(C═O)OR¹, and L² and L^{2′} are each —C(═O)NR^{e}R^{f}. In other embodiments L¹ and L^{1′} are each —C(═O)NR^{b}R^{c}, and L² and L^{2′} are each —C(═O)NR^{e}R^{f}.

[0775] In some embodiments of the foregoing, G¹, G^{1′}, G² and G^{2′} are each independently C₂-C₈ alkylene, for example C₄-C₈ alkylene.

[0776] In some of the foregoing embodiments of structure (VII), R¹ or R², are each, at each occurrence, independently branched C₆-C₂₄ alkyl. For example, in some embodiments, R¹ and R² at each occurrence, independently have the following structure:

[chemical structure]

[0777] wherein:
   [0778] R^{7a} and R^{7b} are, at each occurrence, independently H or C₁-C₁₂ alkyl;
[0779] and
   [0780] a is an integer from 2 to 12,
[0781] wherein R^{7a}, R^{7b} and a are each selected such that R¹ and R² each independently comprise from 6 to 20 carbon atoms. For example, in some embodiments a is an integer ranging from 5 to 9 or from 8 to 12.

[0782] In some of the foregoing embodiments of structure (VII), at least one occurrence of R^{7a} is H. For example, in some embodiments, R^{7a} is H at each occurrence. In other different embodiments of the foregoing, at least one occurrence of R^{7b} is C₁-C₈ alkyl. For example, in some embodiments, C₁-C₈ alkyl is methyl, ethyl, n-propyl, iso-propyl, n-butyl, iso-butyl, tert-butyl, n-hexyl or n-octyl.

[0783] In different embodiments of structure (VII), R¹ or R², or both, at each occurrence independently has one of the following structures:

[chemical structure]

[0784] In some of the foregoing embodiments of structure (VII), R^{b}, R^{c}, R^{e} and R^{f}, when present, are each independently C₃-C₁₂ alkyl. For example, in some embodiments R^{b}, R^{c}, R^{e} and R^{f}, when present, are n-hexyl and in other embodiments R^{b}, R^{c}, R^{e} and R^{f}, when present, are n-octyl.

[0785] In various different embodiments of structure (VII), the cationic lipid has one of the structures set forth in Table 6 below.

TABLE 6
Representative cationic lipids of structure (VII)

| No. | Structure |
|---|---|
| VII-1 | [chemical structure] |
| VII-2 | [chemical structure] |
| VII-3 | [chemical structure] |
| VII-4 | [chemical structure] |
| VII-5 | [chemical structure] |
| VII-6 | [chemical structure] |
| VII-7 | [chemical structure] |
| VII-8 | [chemical structure] |
| VII-9 | [chemical structure] |
| VII- 10 | [chemical structure] |
| VII- 11 | [chemical structure] |

[0786] In one embodiment, the cationic lipid is a compound having the following structure (VIII):

[chemical structure]

[0787] or a pharmaceutically acceptable salt, prodrug or stereoisomer thereof, wherein:
   [0788] X is N, and Y is absent; or X is CR, and Y is NR;
   [0789] L¹ is —O(C═O)R¹, —(C═O)OR¹, —C(═O)R¹, —OR¹, —S(O)ₓR¹, —S—SR¹, —C(═O)SR¹, —SC(═O)R¹, —NR^{a}C(═O)R¹, —C(═O)NR^{b}R^{c}, —NR^{a}C(═O)NR^{b}R^{c}, —OC(═O)NR^{b}R^{c} or —NR^{a}C(═O)OR¹;
   [0790] L² is —O(C═O)R², —(C═O)OR², —C(═O)R², —OR², —S(O)ₓR², —S—SR², —C(═O)SR², —SC(═O)R², —NR^{d}C(═O)R², —C(═O)NR^{e}R^{f}, —NR^{d}C(═O)NR^{e}R^{f}, —OC(═O)NR^{e}R^{f}; —NR^{d}C(═O)OR² or a direct bond to R²
   [0791] L³ is —O(C═O)R³ or —(C═O)OR³;
   [0792] G¹ and G² are each independently C₂-C₁₂ alkylene or C₂-C₁₂ alkenylene;
   [0793] G³ is C₁-C₂₄ alkylene, C₂-C₂₄ alkenylene, C₁-C₂₄ heteroalkylene or C₂-C₂₄ heteroalkenylene;
   [0794] R^{a}, R^{b}, R^{d} and R^{e} are each independently H or C₁-C₁₂ alkyl or C₁-C₁₂ alkenyl;
   [0795] R^{c} and R^{f}are each independently C₁-C₁₂ alkyl or C₂-C₁₂ alkenyl;
   [0796] each R is independently H or C₁-C₁₂ alkyl;
   [0797] R¹, R² and R³ are each independently C₁-C₂₄ alkyl or C₂-C₂₄ alkenyl; and
   [0798] x is 0, 1 or 2, and
   [0799] wherein each alkyl, alkenyl, alkylene, alkenylene, heteroalkylene and heteroalkenylene is independently substituted or unsubstituted unless otherwise specified.

[0800] In more embodiments of structure (I):
[0801] X is N, and Y is absent; or X is CR, and Y is NR;
[0802] L¹ is —O(C═O)R¹, —(C═O)OR¹, —C(═O)R¹, —OR¹, —S(O),R¹, —S—SR¹, —C(═O)SR¹, —SC(═O)R¹, —NR^{a}C(═O)R¹, —C(═O)NR^{b}R^{c}, —NR^{a}C(═O)NR^{e}R^{f}, —OC(═O)NR^{b}R^{c} or —NR^{a}C(═O)OR¹;
[0803] L² is —O(C═O)R², —(C═O)OR², —C(═O)R², —OR², —S(O)ₓR², —S—SR², —C(═O)SR², —SC(═O)R², —NR^{d}C(═O)R², —C(═O)NR^{e}R^{f}, —NR^{d}C(═O)NR^{e}R^{f}, —OC(═O)NRₑR^{f}; —NR^{d}C(═O)OR² or a direct bond to R²;
[0804] L³ is —O(C═O)R³ or —(C═O)OR³;
[0805] G¹ and G² are each independently C₂-C₁₂ alkylene or C₂-C₁₂ alkenylene;
[0806] G³ is C₁-C₂₄ alkylene, C₂-C₂₄ alkenylene, C₁-C₂₄ heteroalkylene or C₂-C₂₄ heteroalkenylene when X is CR, and Y is NR; and G³ is C₁-C₂₄ heteroalkylene or C₂-C₂₄ heteroalkenylene when X is N, and Y is absent;
[0807] R^{a}, R^{b}, R^{d} and R^{e} are each independently H or C₁-C₁₂ alkyl or C₁-C₁₂ alkenyl;
[0808] R^{c} and R^{f} are each independently C₁-C₁₂ alkyl or C₂-C₁₂ alkenyl;
[0809] each R is independently H or C₁-C₁₂ alkyl;
[0810] R¹, R² and R³ are each independently C₁-C₂₄ alkyl or C₂-C₂₄ alkenyl; and
[0811] x is 0, 1 or 2, and
[0812] wherein each alkyl, alkenyl, alkylene, alkenylene, heteroalkylene and heteroalkenylene is independently substituted or unsubstituted unless otherwise specified.

[0813] In other embodiments of structure (I):
[0814] X is N and Y is absent, or X is CR and Y is NR;
[0815] L¹ is —O(C═O)R¹, —(C═O)OR¹, —C(═O)R¹, —OR¹, —S(O)ₓR¹, —S—SR¹, —C(═O)SR¹, —SC(═O)R¹, —NR^{a}C(═O)R¹, —C(═O)NR^{b}R^{c}, —NR^{a}C(═O)NR^{b}R^{c}, —OC(═O)NR^{b}R^{c} or —NR^{a}C(═O)OR¹;
[0816] L² is —O(C═O)R², —(C═O)OR², —C(═O)R², —OR², —S(O)ₓR², —S—SR², —C(═O)SR², —SC(═O)R², —NR^{d}C(═O)R², —C(═O)NR^{e}R^{f}, —NR^{d}C(═O)NR^{e}R^{f}, —OC(═O)NR^{e}R^{f}; —NR^{d}C(═O)OR² or a direct bond to R²;
[0817] L³ is —O(C═O)R³ or —(C═O)OR³;
[0818] G¹ and G² are each independently C₂-C₁₂ alkylene or C₂-C₁₂ alkenylene;
[0819] G³ is C₁-C₂₄ alkylene, C₂-C₂₄ alkenylene, C₁-C₂₄ heteroalkylene or C₂-C₂₄ heteroalkenylene;
[0820] R^{a}, R^{b}, R^{d} and R^{e} are each independently H or C₁-C₁₂ alkyl or C₁-C₁₂ alkenyl;
[0821] R^{c} and R^{f} are each independently C₁-C₁₂ alkyl or C₂-C₁₂ alkenyl;
[0822] each R is independently H or C₁-C₁₂ alkyl;
[0823] R¹, R² and R³ are each independently branched C₆-C₂₄ alkyl or branched C₆-C₂₄ alkenyl; and
[0824] x is 0, 1 or 2, and
   wherein each alkyl, alkenyl, alkylene, alkenylene, heteroalkylene and heteroalkenylene is independently substituted or unsubstituted unless otherwise specified.

[0825] In certain embodiments of structure (VIII), G³ is unsubstituted. In more specific embodiments G³ is C₂-C₁₂ alkylene, for example, in some embodiments G³ is C₃-C₇ alkylene or in other embodiments G³ is C₃-C₁₂ alkylene. In some embodiments, G³ is C₂ or C₃ alkylene.

[0826] In other embodiments of structure (VIII), G³ is C₁-C₁₂ heteroalkylene, for example C₁-C₁₂ aminylalkylene.

[0827] In certain embodiments of structure (VIII), X is N and Y is absent. In other embodiments, X is CR and Y is NR, for example in some of these embodiments R is H.

[0828] In some of the foregoing embodiments of structure (VIII), the compound has one of the following structures (VIIIA), (VIIIB), (VIIIC) or (VIIID):

[chemical structure]

[0829] In some of the foregoing embodiments of structure (VIII), L¹ is —O(C═O)R¹, —(C═O)OR¹ or

—C(═O)NR^{b}R^{c}, and L² is —O(C═O)R², —(C═O)OR² or —C(═O)NR^{e}R^{f}. In other specific embodiments, L¹ is —(C═O)OR′ and L² is —(C═O)OR². In any of the foregoing embodiments, L³ is —(C═O)OR³.

[0830] In some of the foregoing embodiments of structure (VIII), G¹ and G² are each independently C₂-C₁₂ alkylene, for example C₄-C₁₀ alkylene.

[0831] In some of the foregoing embodiments of structure (VIII), R¹, R² and R³ are each, independently branched C₆-C₂₄ alkyl. For example, in some embodiments, R¹, R² and R³ each, independently have the following structure:

[chemical structure]

[0832] wherein:
   [0833] R^{7a} and R^{7b} are, at each occurrence, independently H or C₁-C₁₂ alkyl;
[0834] and
   [0835] a is an integer from 2 to 12,
   [0836] wherein R^{7a}, R^{7b} and a are each selected such that R¹ and R² each independently comprise from 6 to 20 carbon atoms. For example, in some embodiments a is an integer ranging from 5 to 9 or from 8 to 12.

[0837] In some of the foregoing embodiments of structure (VIII), at least one occurrence of R^{7a} is H. For example, in some embodiments, R^{7a} is H at each occurrence. In other different embodiments of the foregoing, at least one occurrence of R^{7b} is C₁-C₈ alkyl. For example, in some embodiments, C₁-C₈ alkyl is methyl, ethyl, n-propyl, iso-propyl, n-butyl, iso-butyl, tert-butyl, n-hexyl or n-octyl.

[0838] In some of the foregoing embodiments of structure (VIII), X is CR, Y is NR and R³ is C₁-C₂ alkyl, such as ethyl, propyl or butyl. In some of these embodiments, R¹ and R² are each independently branched C₆-C₂₄ alkyl.

[0839] In different embodiments of structure (VIII), R¹, R² and R³ each, independently have one of the following structures:

[chemical structure]

[0840] In certain embodiments of structure (VIII), R¹ and R² and R³ are each, independently, branched C₆-C₂₄ alkyl and R³ is C₁-C₂₄ alkyl or C₂-C₂₄ alkenyl.

[0841] In some of the foregoing embodiments of structure (VIII), R^{b}, R^{c}, R^{e} and R^{f} are each independently C₃-C₁₂ alkyl. For example, in some embodiments R^{b}, R^{c}, R^{e} and R^{f} are n-hexyl and in other embodiments R^{b}, R^{c}, R^{e} and R^{f} are n-octyl.

[0842] In various different embodiments of structure (VIII), the compound has one of the structures set forth in Table 7 below.

TABLE 7
Representative cationic liipids of structure (VIII)

| No. | Structure |
|---|---|
| VIII-1 | [chemical structure] |
| VIII-2 | [chemical structure] |
| VIII-3 | [chemical structure] |
| VIII-4 | [chemical structure] |
| VIII-5 | [chemical structure] |
| VIII-6 | [chemical structure] |
| VIII-7 | [chemical structure] |
| VIII-8 | [chemical structure] |
| VIII-9 | [chemical structure] |
| VIII-10 | [chemical structure] |
| VIII-11 | [chemical structure] |
| VIII-12 | [chemical structure] |

[0843] In one embodiment, the cationic lipid is a compound having the following structure (IX):

[chemical structure]

[0844] or a pharmaceutically acceptable salt, prodrug or stereoisomer thereof, wherein:
   [0845] L¹ is —O(C═O)R¹, —(C═O)OR¹, —C(═O)R¹, —OR¹, —S(O)ₓR¹, —S—SR¹, —C(═O)SR¹, —SC(═O)R¹, —NR^{a}C(═O)R¹, —C(═O)NR^{b}R^{c}, —NR^{a}C(═O)NR^{b}R^{c}, —OC(═O)NR^{b}R^{c} or —NR^{a}C(═O)OR¹;
   [0846] L² is —O(C═O)R², —(C═O)OR², —C(═O)R², —OR², —S(O),R², —S—SR², —C(═O)SR², —SC(═O)R², —NR^{d}C(═O)R², —C(═O)NR^{e}R^{f}, —NR^{d}C(═O)NR^{e}R^{f}, —OC(═O)NR^{e}R^{f}, —NR^{d}C(═O)OR² or a direct bond to R²
   [0847] G¹ and G² are each independently C₂-C₁₂ alkylene or C₂-C₁₂ alkenylene;
   [0848] G³ is C₁-C₂₄ alkylene, C₂-C₂₄ alkenylene, C₃-C₈ cycloalkylene or C₃-C₈ cycloalkenylene;
   [0849] R^{a}, R^{b}, R^{d} and R^{e} are each independently H or C₁-C₁₂ alkyl or C₁-C₁₂ alkenyl;
   [0850] R^{c} and R^{f} are each independently C₁-C₁₂ alkyl or C₂-C₁₂ alkenyl;
   [0851] R¹ and R² are each independently branched C₆-C₂₄ alkyl or branched C₆-C₂₄ alkenyl;
   [0852] R³ is —N(R⁴)R⁵;
   [0853] R⁴ is C₁-C₁₂ alkyl;
   [0854] R⁵ is substituted C₁-C₁₂ alkyl; and
   [0855] x is 0, 1 or 2, and
[0856] wherein each alkyl, alkenyl, alkylene, alkenylene, cycloalkylene, cycloalkenylene, aryl and aralkyl is independently substituted or unsubstituted unless otherwise specified.

[0857] In certain embodiments of structure (XI), G³ is unsubstituted. In more specific embodiments G³ is C₂-C₁₂ alkylene, for example in some embodiments G³ is C₃-C₇ alkylene or in other embodiments G³ is C₃-C₁₂ alkylene. In some embodiments, G³ is C₂ or C₃ alkylene.

[0858] In some of the foregoing embodiments of structure (IX), the compound has the following structure (IX A)

[chemical structure]

[0859] wherein y and z are each independently integers ranging from 2 to 12, for example an integer from 2 to 6, from 4 to 10, or for example 4 or 5. In certain embodiments, y and z are each the same and selected from 4, 5, 6, 7, 8 and 9.

[0860] In some of the foregoing embodiments of structure (IX), L¹ is —O(C═O)R¹, —(C═O)OR¹ or —C(═O)NR^{b}R^{c}, and L² is —O(C═O)R², —(C═O)OR² or —C(═O)NR^{e}R^{f}. For example, in some embodiments L¹ and L² are —(C═O)OR¹ and —(C═O)OR², respectively. In other embodiments L¹ is —(C═O)OR¹ and L² is —C(═O)NR^{e}R^{f}. In other embodiments L¹ is
[0861] —C(═O)NR^{b}R^{c} and L² is —C(═O)NR^{e}R^{f}.

[0862] In other embodiments of the foregoing, the compound has one of the following structures (IXB), (IXC), (IXD) or (IXE):

[chemical structure]

[0863] In some of the foregoing embodiments, the compound has structure (IXB), in other embodiments, the compound has structure (IXC) and in still other embodiments the compound has the structure (IXD). In other embodiments, the compound has structure (IXE).

[0864] In some different embodiments of the foregoing, the compound has one of the following structures (IXF), (IXG), (IXH) or (IXJ):

[chemical structure]

[0865] wherein y and z are each independently integers ranging from 2 to 12, for example an integer from 2 to 6, for example 4.

[0866] In some of the foregoing embodiments of structure (IX), y and z are each independently an integer ranging from 2 to 10, 2 to 8, from 4 to 10 or from 4 to 7. For example, in some embodiments, y is 4, 5, 6, 7, 8, 9, 10, 11 or 12. In some embodiments, z is 4, 5, 6, 7, 8, 9, 10, 11 or 12. In some embodiments, y and z are the same, while in other embodiments y and z are different.

[0867] In some of the foregoing embodiments of structure (IX), R¹ or R², or both is branched C₆-C₂₄ alkyl. For example, in some embodiments, R¹ and R² each, independently have the following structure:

[chemical structure]

[0868] wherein:
   [0869] R^{7a} and R^{b} are, at each occurrence, independently H or C₁-C₁₂ alkyl;
[0870] and
   [0871] a is an integer from 2 to 12,
[0872] wherein R^{7a}, R^{7b} and a are each selected such that R¹ and R² each independently comprise from 6 to 20 carbon atoms. For example, in some embodiments a is an integer ranging from 5 to 9 or from 8 to 12.

[0873] In some of the foregoing embodiments of structure (IX), at least one occurrence of R^{7a} is H. For example, in some embodiments, R^{7a} is H at each occurrence. In other different embodiments of the foregoing, at least one occurrence of R^{7b} is C₁-C₈ alkyl. For example, in some embodiments, C₁-C₈ alkyl is methyl, ethyl, n-propyl, iso-propyl, n-butyl, iso-butyl, tert-butyl, n-hexyl or n-octyl.

[0874] In different embodiments of structure (IX), R¹ or R², or both, has one of the following structures:

[chemical structure]

[0875] In some of the foregoing embodiments of structure (IX), R^{b}, R^{c}, R^{e} and R^{f} are each independently C₃-C₁₂ alkyl. For example, in some embodiments R^{b}, R^{c}, R^{e} and R^{f} are n-hexyl and in other embodiments R^{b}, R^{c}, R^{e} and R^{f} are n-octyl.

[0876] In any of the foregoing embodiments of structure (IX), R⁴ is substituted or unsubstituted: methyl, ethyl, propyl, n-butyl, n-hexyl, n-octyl or n-nonyl. For example, in some embodiments R⁴ is unsubstituted. In other R⁴ is substituted with one or more substituents selected from the group consisting of —OR^{g}, —NR^{g}C(═O)R^{h}, —C(═O)NR^{g}R^{h}, —C(═O)R^{h}, —OC(═O)R^{h}, —C(═O)OR^{h} and —ORⁱOH, wherein:
[0877] R^{g} is, at each occurrence independently H or C₁-C₆ alkyl;
[0878] R^{h} is at each occurrence independently C₁-C₆ alkyl; and
[0879] Rⁱ is, at each occurrence independently C₁-C₆ alkylene.

[0880] In other of the foregoing embodiments of structure (IX), R⁵ is substituted: methyl ethyl, propyl, n-butyl n-hexyl n-octyl or n-nonyl. In some embodiments, R⁵ is substituted ethyl or substituted propyl. In other different embodiments, R⁵ is substituted with hydroxyl. In still more embodiments, R⁵ is substituted with one or more substituents selected from the group consisting of —OR^{g}, —NR^{g}C(═O)R^{h}, —C(═O)NR^{g}R^{h}, —C(═O)R^{h}, —OC(═O)R^{h}, —C(═O)OR^{h} and —ORⁱOH, wherein:
[0881] R^{g} is, at each occurrence independently H or C₁-C₆ alkyl;
[0882] R^{h} is at each occurrence independently C₁-C₆ alkyl; and
[0883] Rⁱ is, at each occurrence independently C₁-C₆ alkylene.

[0884] In other embodiments of structure (IX), R⁴ is unsubstituted methyl, and R⁵ is substituted: methyl, ethyl, propyl, n-butyl, n-hexyl, n-octyl or n-nonyl. In some of these embodiments, R⁵ is substituted with hydroxyl.

[0885] In some other specific embodiments of structure (IX), R³ has one of the following structures:

[chemical structure]

[0886] In various embodiments of structure (IX), the cationic lipid has one of the structures set forth in Table 8 below.

TABLE 8
Representative cationic lipids of structure (IX)

| No. | Structure |
|---|---|
| IX-1 | [chemical structure] |
| IX-2 | [chemical structure] |
| IX-3 | [chemical structure] |
| IX-4 | [chemical structure] |
| IX-5 | [chemical structure] |
| IX-6 | [chemical structure] |
| IX-7 | [chemical structure] |
| IX-8 | [chemical structure] |
| IX-9 | [chemical structure] |
| IX- 10 | [chemical structure] |
| IX- 11 | [chemical structure] |
| IX- 12 | [chemical structure] |
| IX- 13 | [chemical structure] |
| IX- 14 | [chemical structure] |
| IX- 15 | [chemical structure] |
| IX- 16 | [chemical structure] |
| IX- 17 | [chemical structure] |
| IX- 18 | [chemical structure] |

[0887] In one embodiment, the cationic lipid is a compound having the following structure (X):

[chemical structure]

[0888] or a pharmaceutically acceptable salt, tautomer, prodrug or stereoisomer thereof, wherein:
   [0889] G¹ is —OH, —NR³R⁴, —(C═O)NR′ or —NR³(C═O)R⁵;
   [0890] G² is —CH₂— or —(C═O)—;
   [0891] R is, at each occurrence, independently H or OH;
   [0892] R¹ and R² are each independently branched, saturated or unsaturated C₁₂-C₃₆ alkyl;
   [0893] R³ and R⁴ are each independently H or straight or branched, saturated or unsaturated C₁-C₆ alkyl;
   [0894] R⁵ is straight or branched, saturated or unsaturated C₁-C₆ alkyl; and
   [0895] n is an integer from 2 to 6.

[0896] In some embodiments, R¹ and R² are each independently branched, saturated or unsaturated C₁₂-C₃₀ alkyl, C₁₂-C₂₀ alkyl, or C₁₅-C₂₀ alkyl. In some specific embodiments, R¹ and R² are each saturated. In certain embodiments, at least one of R¹ and R² is unsaturated.

[0897] In some of the foregoing embodiments of structure (X), R¹ and R² have the following structure:

[chemical structure]

[0898] In some of the foregoing embodiments of structure (X), the compound has the following structure (XA):

[chemical structure]

[0899] wherein:
   [0900] R⁶ and R⁷ are, at each occurrence, independently H or straight or branched, saturated or unsaturated C₁-C₁₄ alkyl;
   [0901] a and b are each independently an integer ranging from 1 to 15,
   [0902] provided that R⁶ and a, and R⁷ and b, are each independently selected such that R¹ and R², respectively, are each independently branched, saturated or unsaturated C₁₂-C₃₆ alkyl.

[0903] In some of the foregoing embodiments, the compound has the following structure (XB):

[chemical structure]

[0904] wherein:
   [0905] R⁸, R⁹, R¹⁰ and R¹¹ are each independently straight or branched, saturated or unsaturated C₄-C₁₂ alkyl, provided that R⁸ and R⁹, and R¹⁰ and R¹¹, are each independently selected such that R¹ and R², respectively, are each independently branched, saturated or unsaturated C₁₂-C₃₆ alkyl. In some embodiments of (XB), R⁸, R⁹, R¹⁰ and R¹¹ are each independently straight or branched, saturated or unsaturated C₆-C₁₀ alkyl. In certain embodiments of (XB), at least one of R⁸, R⁹, R¹⁰ and R¹¹ is unsaturated. In other certain specific embodiments of (XB), each of R⁸, R⁹, R¹⁰ and R¹¹ is saturated.

[0906] In some of the foregoing embodiments, the compound has structure (XA), and in other embodiments, the compound has structure (XB).

[0907] In some of the foregoing embodiments, G¹ is —OH, and in some embodiments G is —NR³R⁴. For example, in some embodiments, G¹ is —NH₂, —NHCH₃ or —N(CH₃)₂. In certain embodiments, G¹ is —(C═O)NR⁵. In certain other embodiments, G¹ is —NR³(C═O)R⁵. For example, in some embodiments G¹ is —NH(C═O)CH₃ or —NH(C═O)CH₂CH₂CH₃.

[0908] In some of the foregoing embodiments of structure (X), C² is —CH₂—. In some different embodiments, G² is —(C═O)—.

[0909] In some of the foregoing embodiments of structure (X), n is an integer ranging from 2 to 6, for example, in some embodiments n is 2, 3, 4, 5 or 6. In some embodiments, n is 2. In some embodiments, n is 3. In some embodiments, n is 4.

[0910] In certain of the foregoing embodiments of structure (X), at least one of R¹, R², R³, R⁴ and R⁵ is unsubstituted. For example, in some embodiments, R¹, R², R³, R⁴ and R⁵ are each unsubstituted. In some embodiments, R³ is substituted. In other embodiments R⁴ is substituted. In still more embodiments, R⁵ is substituted. In certain specific embodiments, each of R³ and R⁴ are substituted. In some embodiments, a substituent on R³, R⁴ or R⁵ is hydroxyl. In certain embodiments, R³ and R⁴ are each substituted with hydroxyl.

[0911] In some of the foregoing embodiments of structure (X), at least one R is OH. In other embodiments, each R is H.

[0912] In various different embodiments of structure (X), the compound has one of the structures set forth in Table 9 below.

TABLE 9
Representative cationic lipids of structure (X)

| No. | Structure |
|---|---|
| X-1 | [chemical structure] |
| X-2 | [chemical structure] |
| X-3 | [chemical structure] |
| X-4 | [chemical structure] |
| X-5 | [chemical structure] |
| X-6 | [chemical structure] |
| X-7 | [chemical structure] |
| X-8 | [chemical structure] |
| X-9 | [chemical structure] |
| X-10 | [chemical structure] |
| X-11 | [chemical structure] |
| X-12 | [chemical structure] |
| X-13 | [chemical structure] |
| X-14 | [chemical structure] |
| X-15 | [chemical structure] |
| X-16 | [chemical structure] |
| X-17 | [chemical structure] |

[0913] In any of Embodiments 1, 2, 3, 4 or 5, the LNPs further comprise a neutral lipid. In various embodiments, the molar ratio of the cationic lipid to the neutral lipid ranges from about 2:1 to about 8:1. In certain embodiments, the neutral lipid is present in any of the foregoing LNPs in a concentration ranging from 5 to 10 mol percent, from 5 to 15 mol percent, 7 to 13 mol percent, or 9 to 11 mol percent. In certain specific embodiments, the neutral lipid is present in a concentration of about 9.5, 10 or 10.5 mol percent. In some embodiments, the molar ratio of cationic lipid to the neutral lipid ranges from about 4.1:1.0 to about 4.9:1.0, from about 4.5:1.0 to about 4.8:1.0, or from about 4.7:1.0 to 4.8:1.0. In some embodiments, the molar ratio of total cationic lipid to the neutral lipid ranges from about 4.1:1.0 to about 4.9:1.0, from about 4.5:1.0 to about 4.8:1.0, or from about 4.7:1.0 to 4.8:1.0.

[0914] Exemplary neutral lipids for use in any of Embodiments 1, 2, 3, 4 or 5 include, for example, distearoylphosphatidylcholine (DSPC), dioleoylphosphatidylcholine (DOPC), dipalmitoylphosphatidylcholine (DPPC), dioleoylphosphatidylglycerol (DOPG), dipalmitoylphosphatidylglycerol (DPPG), dioleoyl-phosphatidylethanolamine (DOPE), palmitoyloleoylphosphatidylcholine (POPC), palmitoyloleoyl-phosphatidylethanolamine (POPE) and dioleoyl-phosphatidylethanolamine 4-(N-maleimidomethyl)-cyclohexane-1carboxylate (DOPE-mal), dipalmitoyl phosphatidyl ethanolamine (DPPE), dimyristoylphosphoethanolamine (DMPE), distearoyl-phosphatidylethanolamine (DSPE), 16-O-monomethyl PE, 16-O-dimethyl PE, 18-1-trans PE, 1-stearioyl-2-oleoylphosphatidyethanol amine (SOPE), and 1,2-dielaidoyl-sn-glycero-3-phophoethanolamine (transDOPE). In one embodiment, the neutral lipid is 1,2-distearoyl-sn-glycero-3phosphocholine (DSPC). In some embodiments, the neutral lipid is selected from DSPC, DPPC, DMPC, DOPC, POPC, DOPE and SM. In some embodiments, the neutral lipid is DSPC.

[0915] In various embodiments of Embodiments 1, 2, 3, 4 or 5, any of the disclosed lipid nanoparticles comprise a steroid or steroid analogue. In certain embodiments, the steroid or steroid analogue is cholesterol. In some embodiments, the steroid is present in a concentration ranging from 39 to 49 molar percent, 40 to 46 molar percent, from 40 to 44 molar percent, from 40 to 42 molar percent, from 42 to 44 molar percent, or from 44 to 46 molar percent. In certain specific embodiments, the steroid is present in a concentration of 40, 41, 42, 43, 44, 45, or 46 molar percent.

[0916] In certain embodiments, the molar ratio of cationic lipid to the steroid ranges from 1.0:0.9 to 1.0:1.2, or from 1.0:1.0 to 1.0:1.2. In some of these embodiments, the molar ratio of cationic lipid to cholesterol ranges from about 5:1 to 1:1. In certain embodiments, the steroid is present in a concentration ranging from 32 to 40 mol percent of the steroid.

[0917] In certain embodiments, the molar ratio of total cationic to the steroid ranges from 1.0:0.9 to 1.0:1.2, or from 1.0:1.0 to 1.0:1.2. In some of these embodiments, the molar ratio of total cationic lipid to cholesterol ranges from about 5:1 to 1:1. In certain embodiments, the steroid is present in a concentration ranging from 32 to 40 mol percent of the steroid.

[0918] In some embodiments of Embodiments 1, 2, 3 4 or 5, the LNPs further comprise a polymer conjugated lipid. In various other embodiments of Embodiments 1, 2, 3 4 or 5, the polymer conjugated lipid is a pegylated lipid. For example, some embodiments include a pegylated diacylglycerol (PEG-DAG) such as 1-(monomethoxy-polyethyleneglycol)-2,3-dimyristoylglycerol (PEG-DMG), a pegylated phosphatidylethanoloamine (PEG-PE), a PEG succinate diacylglycerol (PEG-S-DAG) such as 4-O-(2′, 3′-di(tetradecanoyloxy)propyl-1-O-(ω-methoxy(polyethoxy)ethyl)butanedioate (PEG-S-DMG), a pegylated ceramide (PEG-cer), or a PEG dialkoxypropylcarbamate such as ω-methoxy(polyethoxy)ethyl-N-(2,3-di(tetradecanoxy)propyl)carbamate or 2,3-di(tetradecanoxy)propyl-N-(ω-methoxy(polyethoxy)ethyl)carbamate.

[0919] In various embodiments, the polymer conjugated lipid is present in a concentration ranging from 1.0 to 2.5 molar percent. In certain specific embodiments, the polymer conjugated lipid is present in a concentration of about 1.7 molar percent. In some embodiments, the polymer conjugated lipid is present in a concentration of about 1.5 molar percent.

[0920] In certain embodiments, the molar ratio of cationic lipid to the polymer conjugated lipid ranges from about 35:1 to about 25:1. In some embodiments, the molar ratio of cationic lipid to polymer conjugated lipid ranges from about 100:1 to about 20:1.

[0921] In certain embodiments, the molar ratio of total cationic lipid (i.e., the sum of the first and second cationic lipid) to the polymer conjugated lipid ranges from about 35:1 to about 25:1. In some embodiments, the molar ratio of total cationic lipid to polymer conjugated lipid ranges from about 100:1 to about 20:1.

[0922] In some embodiments of Embodiments 1, 2, 3 4 or 5, the pegylated lipid, when present, has the following Formula (XI):

[chemical structure]

[0923] or a pharmaceutically acceptable salt, tautomer or stereoisomer thereof, wherein:
[0924] R¹² and R¹³ are each independently a straight or branched, saturated or unsaturated alkyl chain containing from 10 to 30 carbon atoms, wherein the alkyl chain is optionally interrupted by one or more ester bonds; and
[0925] w has a mean value ranging from 30 to 60.

[0926] In some embodiments, R¹² and R¹³ are each independently straight, saturated alkyl chains containing from 12 to 16 carbon atoms. In other embodiments, the average w ranges from 42 to 55, for example, the average w is 42, 43, 44, 45, 46, 47, 48, 49, 50, 51, 52, 53, 54 or 55. In some specific embodiments, the average w is about 49.

[0927] In some embodiments, the pegylated lipid has the following Formula (XIa):

[chemical structure]

wherein the average w is about 49.

[0928] In some embodiments of Embodiments 1, 2, 3 4 or 5, the nucleic acid is selected from antisense and messenger RNA. For example, messenger RNA may be used to induce an immune response (e.g., as a vaccine), for example by translation of immunogenic proteins.

[0929] In other embodiments of Embodiments 1, 2, 3 4 or 5, the nucleic acid is mRNA, and the mRNA to lipid ratio in the LNP (i.e., N/P, were N represents the moles of cationic lipid and P represents the moles of phosphate present as part of the nucleic

[0930] In an embodiment, the transfer vehicle comprises a lipid or an ionizable lipid described in US patent publication number 20190314524.

[0931] Some embodiments of the present invention provide nucleic acid-lipid nanoparticle compositions comprising one or more of the novel cationic lipids described herein as structures listed in Table 10, that provide increased activity of the nucleic acid and improved tolerability of the compositions in vivo.

[0932] In one embodiment, an ionizable lipid has the following structure (XII):

[chemical structure]

[0933] or a pharmaceutically acceptable salt, tautomer, prodrug or stereoisomer thereof, wherein:
   [0934] one of L¹ or L² is —O(C═O)—, —(C═O)O—, —C(═O)—, —O—, —S(O)ₓ—, —S—S—, —C(═O)S—, SC(═O)—, —NR^{a}C(═O)—, —C(═O)NR^{a}—, NR^{a}C(═)NR^{a}—, —OC(═O)NR^{a}— or NR^{a}C(═O)O—, and the other of L¹ or L²is —O(C═O)—, —(C═O)O—, —C(═O)—, —O—, —S(O)ₓ—, —S—S—, —C(═O)S—, SC(═O)—, —NR^{a}C(═O)—, —C(═O)NR^{a}—, NR^{a}C(═O)NR^{a}—, —OC(═O)NR^{a}— or —NR^{a}C(═O)O— or a direct bond;
[0935] G¹ and G² are each independently unsubstituted C₁-C₁₂ alkylene or C₁-C₁₂ alkenylene;
[0936] G³ is C₁-C₂₄ alkylene, C₁-C₂₄ alkenylene, C₃-C₈ cycloalkylene, C₃-C₈ cycloalkenylene;
[0937] R^{a} is H or C₁-C₁₂ alkyl;
[0938] R¹ and R² are each independently C₆-C₂₄ alkyl or C₆-C₂₄ alkenyl;
[0939] R³ is H, OR⁵, CN, C(═O)OR⁴, OC(═O)R⁴ or NR⁵C(═O)R⁴;
[0940] R⁴is C₁-C₁₂ alkyl;
[0941] R⁵ is H or C₁-C₆ alkyl; and
[0942] x is 0, 1 or 2.

[0943] In some embodiments, an ionizable lipid has one of the following structures (XIIA) or (XIIB):

[chemical structure]

[0944] wherein:
   [0945] A is a 3 to 8-membered cycloalkyl or cycloalkylene ring;
   [0946] R⁶ is, at each occurrence, independently H, OH or C₁-C₂₄ alkyl; and
   [0947] n is an integer ranging from 1 to 15.

[0948] In some embodiments, the ionizable lipid has structure (XIIA), and in other embodiments, the ionizable lipid has structure (XIIB).

[0949] In other embodiments, an ionizable lipid has one of the following structures (XIIC) or (XIID):

[chemical structure]

[0950] wherein y and z are each independently integers ranging from 1 to 12.

[0951] In some embodiments, one of L¹ or L²is —O(C═O)—. For example, in some embodiments each of L¹ and L² are —O(C═O)—. In some different embodiments of any of the foregoing, L¹ and L² are each independently —(C═O)O— or —O(C═O)—. For example, in some embodiments each of L¹ and L² is —(C═O)O—.

[0952] In some embodiments, an ionizable lipid has one of the following structures (XIIE) or (XIIF):

[chemical structure]

[0953] In some embodiments, an ionizable lipid has one of the following structures (XIIG), (XIIH), (XIII) or (XIIJ):

[chemical structure]

[0954] In some embodiments, n is an integer ranging from 2 to 12, for example from 2 to 8 or from 2 to 4. For example, in some embodiments, n is 3, 4, 5 or 6. In some embodiments, n is 3. In some embodiments, n is 4. In some embodiments, n is 5. In some embodiments, n is 6.

[0955] In some embodiments, y and z are each independently an integer ranging from 2 to 10. For example, in some embodiments, y and z are each independently an integer ranging from 4 to 9 or from 4 to 6.

[0956] In some embodiments, R⁶ is H. In other embodiments, R⁶ is C₁-C₂₄ alkyl. In other embodiments, R⁶ is OH.

[0957] In some embodiments, G³ is unsubstituted. In other embodiments, G³ is substituted. In various different embodiments, G³ is linear C₁-C₂₄ alkylene or linear C₁-C₂₄ alkenylene.

[0958] In some embodiments, R¹ or R², or both, is C₆-C₂₄ alkenyl. For example, in some embodiments, R¹ and R² each, independently have the following structure:

[chemical structure]

[0959] wherein:
   [0960] R^{7a} and R^{7b} are, at each occurrence, independently H or C₁-C₁₂ alkyl; and
   [0961] a is an integer from 2 to 12,
   [0962] wherein R^{7a}, R^{7b} and a are each selected such that R¹ and R² each independently comprise from 6 to 20 carbon atoms.

[0963] In some embodiments, a is an integer ranging from 5 to 9 or from 8 to 12.

[0964] In some embodiments, at least one occurrence of R^{7a} is H. For example, in some embodiments, R^{7a} is H at each occurrence. In other different embodiments, at least one occurrence of R^{7b} is C₁-C₈ alkyl. For example, in some embodiments, C₁-C₈ alkyl is methyl, ethyl, n-propyl, iso-propyl, n-butyl, iso-butyl, tert-butyl, n-hexyl or n-octyl.

[0965] In different embodiments R¹ or R² or both has one of the following structures:

[chemical structure]

[0966] In some embodiments, R³ is —OH, —CN, —C(═O)OR⁴, —OC(═O)R⁴ or —NHC(═O)R⁴. In some embodiments, R⁴is methyl or ethyl.

[0967] In some embodiments, an ionizable lipid is a compound of Formula (1):

[chemical structure]

[0968] wherein:
   [0969] each n is independently 1, 2, 3, 4, 5, 6, 7, 8, 9, 10, 11, 12, 13, 14, or 15; and
   [0970] L¹ and L³ are each independently —OC(O)—* or —C(O)O—*, wherein “*” indicates the attachment point to R¹ or R³;
   [0971] R¹ and R₃ are each independently a linear or branched C₉-C₂₀ alkyl or C₉-C₂₀ alkenyl, optionally substituted by one or more substituents selected from oxo, halo, hydroxy, cyano, alkyl, alkenyl, aldehyde, heterocyclylalkyl, hydroxyalkyl, dihydroxyalkyl, hydroxyalkylaminoalkyl, aminoalkyl, alkylaminoalkyl, dialkylaminoalkyl, (heterocyclyl)(alkyl)aminoalkyl, heterocyclyl, heteroaryl, alkylheteroaryl, alkynyl, alkoxy, amino, dialkylamino, aminoalkylcarbonylamino, aminocarbonylalkylamino, (aminocarbonylalkyl)(alkyl)amino, alkenylcarbonylamino, hydroxycarbonyl, alkyloxycarbonyl, aminocarbonyl, aminoalkylaminocarbonyl, alkylaminoalkylaminocarbonyl, dialkylaminoalkylaminocarbonyl, heterocyclylalkylaminocarbonyl, (alkylaminoalkyl)(alkyl)aminocarbonyl, alkylaminoalkylcarbonyl, dialkylaminoalkylcarbonyl, heterocyclylcarbonyl, alkenylcarbonyl, alkynylcarbonyl, alkylsulfoxide, alkylsulfoxidealkyl, alkylsulfonyl, and alkylsulfonealkyl.

[0972] In some embodiments, R₁ and R₃ are the same. In some embodiments, R₁ and R₃ are different.

[0973] In some embodiments, R₁ and R₃ are each independently a branched saturated C₉-C₂₀ alkyl. In some embodiments, one of R₁ and R₃ is a branched saturated C₉-C₂₀ alkyl, and the other is an unbranched saturated C₉-C₂₀ alkyl. In some embodiments, R₁ and R₃ are each independently selected from a group consisting of:

[chemical structure]

[0974] In various embodiments, R₂ is selected from a group consisting of:

[chemical structure]

[0975] In some embodiments, R₂ may be as described in International Pat. Pub. No. WO2019/152848 A1, which is incorporated herein by reference in its entirety.

[0976] In some embodiments, an ionizable lipid is a compound of Formula (1-1) or Formula (1-2):

[chemical structure]

wherein n, R₁, R₂, and R₃ are as defined in Formula (1).

[0977] Preparation methods for the above compounds and compositions are described herein below and/or known in the art.

[0978] It will be appreciated by those skilled in the art that in the process described herein the functional groups of intermediate compounds may need to be protected by suitable protecting groups. Such functional groups include, e.g., hydroxyl, amino, mercapto, and carboxylic acid. Suitable protecting groups for hydroxyl include, e.g., trialkylsilyl or diarylalkylsilyl (for example, t-butyldimethylsilyl, t-butyldiphenylsilyl or trimethylsilyl), tetrahydropyranyl, benzyl, and the like. Suitable protecting groups for amino, amidino, and guanidino include, e.g., t-butoxycarbonyl, benzyloxycarbonyl, and the like. Suitable protecting groups for mercapto include, e.g., —C(O)—R″ (where R″ is alkyl, aryl, or arylalkyl), p-methoxybenzyl, trityl, and the like. Suitable protecting groups for carboxylic acid include, e.g., alkyl, aryl, or arylalkyl esters. Protecting groups may be added or removed in accordance with standard techniques, which are known to one skilled in the art and as described herein. The use of protecting groups is described in detail in, e.g., Green, T. W. and P. G. M. Wutz, Protective Groups in Organic Synthesis (1999), 3rd Ed., Wiley. As one of skill in the art would appreciate, the protecting group may also be a polymer resin such as a Wang resin, Rink resin, or a 2-chlorotrityl-chloride resin.

[0979] It will also be appreciated by those skilled in the art, although such protected derivatives of compounds of this invention may not possess pharmacological activity as such, they may be administered to a mammal and thereafter metabolized in the body to form compounds of the invention which are pharmacologically active. Such derivatives may therefore be described as prodrugs. All prodrugs of compounds of this invention are included within the scope of the invention.

[0980] Furthermore, all compounds of the invention which exist in free base or acid form can be converted to their pharmaceutically acceptable salts by treatment with the appropriate inorganic or organic base or acid by methods known to one skilled in the art. Salts of the compounds of the invention can also be converted to their free base or acid form by standard techniques.

[0981] The following reaction scheme illustrates an exemplary method to make compounds of Formula (1):

[chemical structure]

[0982] A1 are purchased or prepared according to methods known in the art. Reaction of A1 with diol A2 under appropriate condensation conditions (e.g., DCC) yields ester/alcohol A3, which can then be oxidized (e.g., with PCC) to aldehyde A4. Reaction of A4 with amine A5 under reductive amination conditions yields a compound of Formula (1).

[0983] The following reaction scheme illustrates a second exemplary method to make compounds of Formula (1), wherein R¹ and R³ are the same:

[chemical structure]

[0984] Modifications to the above reaction scheme, such as using protecting groups, may yield compounds wherein R₁ and R₃ are different. The use of protecting groups, as well as other modification methods, to the above reaction scheme will be readily apparent to one of ordinary skill in the art.

[0985] It is understood that one skilled in the art may be able to make these compounds by similar methods or by combining other methods known to one skilled in the art. It is also understood that one skilled in the art would be able to make other compounds of Formula (1) not specifically illustrated herein by using the appropriate starting materials and modifying the parameters of the synthesis. In general, starting materials may be obtained from sources such as Sigma Aldrich, Lancaster Synthesis, Inc., Maybridge, Matrix Scientific, TCI, and Fluorochem USA, etc. or synthesized according to sources known to those skilled in the art (see, e.g., Advanced Organic Chemistry: Reactions, Mechanisms, and Structure, 5th edition (Wiley, December 2000)) or prepared as described in this invention.

[0986] In some embodiments, an ionizable lipid is a compound of Formula (2):

[chemical structure]

wherein each n is independently 1, 2, 3, 4, 5, 6, 7, 8, 9, 10, 11, 12, 13, 14, or 15.

[0987] In some embodiments, as used in Formula (2), R₁ and R₂ are as defined in Formula (1).

[0988] In some embodiments, as used in Formula (2), R₁ and R₂ are each independently selected from a group consisting of:

[chemical structure]

[chemical structure]

[chemical structure]

[0989] In some embodiments, R₁ and/or R₂ as used in Formula (2) may be as described in International Pat. Pub. No. WO2015/095340 A1, which is incorporated herein by reference in its entirety. In some embodiments, R₁ as used in Formula (2) may be as described in International Pat. Pub. No. WO2019/152557 A1, which is incorporated herein by reference in its entirety.

[0990] In some embodiments, as used in Formula (2), R₃ is selected from a group consisting of.

[chemical structure]

[0991] In some embodiments, an ionizable lipid is a compound of Formula (3)

[chemical structure]

wherein X is selected from —O—, —S—, or —OC(O)—*, wherein * indicates the attachment point to R₁.

[0992] In some embodiments, an ionizable lipid is a compound of Formula (3-1):

[chemical structure]

[0993] In some embodiments, an ionizable lipid is a compound of Formula (3-2):

[chemical structure]

[0994] In some embodiments, an ionizable lipid is a compound of Formula (3-3):

[chemical structure]

[0995] In some embodiments, as used in Formula (3-1), (3-2), or (3-3), each R₁ is independently a branched saturated C₉-C₂₀ alkyl. In some embodiments, each R₁ is independently selected from a group consisting of;

[chemical structure]

[0996] In some embodiments, each R₁ in Formula (3-1), (3-2), or (3-3) are the same.

[0997] In some embodiments, as used in Formula (3-1), (3-2), or (3-3), R₂ is selected from a group consisting of:

[chemical structure]

[chemical structure]

[0998] In some embodiments, R₂ as used in Formula (3-1), (3-2), or (3-3) may be as described in International Pat. Pub. No. WO2019/152848A1, which is incorporated herein by reference in its entirety.

[0999] In some embodiments, an ionizable lipid is a compound of Formula (5):

[chemical structure]

[1000] wherein:
   [1001] each n is independently 1, 2, 3, 4, 5, 6, 7, 8, 9, 10, 11, 12, 13, 14, or 15; and
   [1002] R₂ is as defined in Formula (1).

[1003] In some embodiments, as used in Formula (5), R₄ and R₅ are defined as R₁ and R₃, respectively, in Formula (1). In some embodiments, as used in Formula (5), R₄ and R₅ may be as described in International Pat. Pub. No. WO2019/191780 A1, which is incorporated herein by reference in its entirety.

[1004] In some embodiments, an ionizable lipid is a compound of Formula (6):

[chemical structure]

[1005] wherein:
   [1006] each n is independently an integer from 0-15;
   [1007] L¹ and L³ are each independently —OC(O)—* or —C(O)O—*, wherein “*” indicates the attachment point to R₁ or R₃;
   [1008] R₁ and R₂ are each independently a linear or branched C₉-C₂₀ alkyl or C₉-C₂₀ alkenyl, optionally substituted by one or more substituents selected from a group consisting of oxo, halo, hydroxy, cyano, alkyl, alkenyl, aldehyde, heterocyclylalkyl, hydroxyalkyl, dihydroxyalkyl, hydroxyalkylaminoalkyl, aminoalkyl, alkylaminoalkyl, dialkylaminoalkyl, (heterocyclyl)(alkyl)aminoalkyl, heterocyclyl, heteroaryl, alkylheteroaryl, alkynyl, alkoxy, amino, dialkylamino, aminoalkylcarbonylamino, aminocarbonylalkylamino, (aminocarbonylalkyl)(alkyl)amino, alkenylcarbonylamino, hydroxycarbonyl, alkyloxycarbonyl, aminocarbonyl, aminoalkylaminocarbonyl, alkylaminoalkylaminocarbonyl, dialkylaminoalkylaminocarbonyl, heterocyclylalkylaminocarbonyl, (alkylaminoalkyl)(alkyl)aminocarbonyl, alkylaminoalkylcarbonyl, dialkylaminoalkylcarbonyl, heterocyclylcarbonyl, alkenylcarbonyl, alkynylcarbonyl, alkylsulfoxide, alkylsulfoxidealkyl, alkylsulfonyl, and alkylsulfonealkyl;
   [1009] R₃ is selected from a group consisting of:

[chemical structure]

and
R₄ is a linear or branched C₁-C₁₅ alkyl or C₁-C₁₅alkenyl.

[1010] In some embodiments, R₁ and R₂ are each independently selected from a group consisting of:

[chemical structure]

[chemical structure]

[chemical structure]

[1011] In some embodiments, R₁ and R₂ are the same. In some embodiments, R₁ and R₂ are different.

[1012] In some embodiments, an ionizable lipid of the disclosure is selected from Table 10a. In some embodiments, the ionizable lipid is Lipid 26 in Table 10a. In some embodiments, the ionizable lipid is Lipid 27 in Table 10a. In some embodiments, the ionizable lipid is Lipid 53 in Table 10a. In some embodiments, the ionizable lipid is Lipid 54 in Table 10a. In some embodiments, the ionizable lipid is Lipid 45 in Table 10a. In some embodiments, the ionizable lipid is Lipid 46 in Table 10a. In some embodiments, the ionizable lipid is Lipid 137 in Table 10a. In some embodiments, the ionizable lipid is Lipid 138 in Table 10a. In some embodiments, the ionizable lipid is Lipid 139 in Table 10a. In some embodiments, the ionizable lipid is Lipid 128 in Table 10a. In some embodiments, the ionizable lipid is Lipid 130 in Table 10a.

[1013] In some embodiments, an ionizable lipid of the disclosure is selected from the group consisting of:

[chemical structure]

[chemical structure]

[chemical structure]

[1014] In some embodiments, an ionizable lipid of the disclosure is selected from the group consisting of:

[chemical structure]

[1015] In some embodiments, an ionizable lipid of the disclosure is selected from the group consisting of:

[chemical structure]

[1016] In some embodiments an ionizable lipid of the disclosure is selected from the group consisting of:

[chemical structure]

[chemical structure]

TABLE 10a

| Ion- | |
|---|---|
| izable | |
| lipid | |
| num- | |
| ber | Structure |
| 1 | [chemical structure] |
| 2 | [chemical structure] |
| 3 | [chemical structure] |
| 4 | [chemical structure] |
| 5 | [chemical structure] |
| 6 | [chemical structure] |
| 7 | [chemical structure] |
| 8 | [chemical structure] |
| 9 | [chemical structure] |
| 10 | [chemical structure] |
| 11 | [chemical structure] |
| 12 | [chemical structure] |
| 13 | [chemical structure] |
| 14 | [chemical structure] |
| 15 | [chemical structure] |
| 16 | [chemical structure] |
| 17 | [chemical structure] |
| 18 | [chemical structure] |
| 19 | [chemical structure] |
| 20 | [chemical structure] |
| 21 | [chemical structure] |
| 22 | [chemical structure] |
| 23 | [chemical structure] |
| 24 | [chemical structure] |
| 25 | [chemical structure] |
| 26 | [chemical structure] |
| 27 | [chemical structure] |
| 28 | [chemical structure] |
| 29 | [chemical structure] |
| 30 | [chemical structure] |
| 31 | [chemical structure] |
| 32 | [chemical structure] |
| 33 | [chemical structure] |
| 34 | [chemical structure] |
| 35 | [chemical structure] |
| 36 | [chemical structure] |
| 37 | [chemical structure] |
| 38 | [chemical structure] |
| 39 | [chemical structure] |
| 40 | [chemical structure] |
| 41 | [chemical structure] |
| 42 | [chemical structure] |
| 43 | [chemical structure] |
| 44 | [chemical structure] |
| 45 | [chemical structure] |
| 46 | [chemical structure] |
| 47 | [chemical structure] |
| 48 | [chemical structure] |
| 49 | [chemical structure] |
| 50 | [chemical structure] |
| 51 | [chemical structure] |
| 52 | [chemical structure] |
| 53 | [chemical structure] |
| 54 | [chemical structure] |
| 55 | [chemical structure] |
| 56 | [chemical structure] |
| 57 | [chemical structure] |
| 58 | [chemical structure] |
| 59 | [chemical structure] |
| 60 | [chemical structure] |
| 61 | [chemical structure] |
| 62 | [chemical structure] |
| 63 | [chemical structure] |
| 64 | [chemical structure] |
| 65 | [chemical structure] |
| 66 | [chemical structure] |
| 67 | [chemical structure] |
| 68 | [chemical structure] |
| 69 | [chemical structure] |
| 70 | [chemical structure] |
| 71 | [chemical structure] |
| 72 | [chemical structure] |
| 73 | [chemical structure] |
| 74 | [chemical structure] |
| 75 | [chemical structure] |
| 76 | [chemical structure] |
| 77 | [chemical structure] |
| 78 | [chemical structure] |
| 79 | [chemical structure] |
| 80 | [chemical structure] |
| 81 | [chemical structure] |
| 82 | [chemical structure] |
| 83 | [chemical structure] |
| 84 | [chemical structure] |
| 85 | [chemical structure] |
| 86 | [chemical structure] |
| 87 | [chemical structure] |
| 88 | [chemical structure] |
| 89 | [chemical structure] |
| 90 | [chemical structure] |
| 91 | [chemical structure] |
| 92 | [chemical structure] |
| 93 | [chemical structure] |
| 94 | [chemical structure] |
| 95 | [chemical structure] |
| 96 | [chemical structure] |
| 97 | [chemical structure] |
| 98 | [chemical structure] |
| 99 | [chemical structure] |
| 100 | [chemical structure] |
| 101 | [chemical structure] |
| 102 | [chemical structure] |
| 103 | [chemical structure] |
| 104 | [chemical structure] |
| 105 | [chemical structure] |
| 106 | [chemical structure] |
| 107 | [chemical structure] |
| 108 | [chemical structure] |
| 109 | [chemical structure] |
| 110 | [chemical structure] |
| 111 | [chemical structure] |
| 112 | [chemical structure] |
| 113 | [chemical structure] |
| 114 | [chemical structure] |
| 115 | [chemical structure] |
| 116 | [chemical structure] |
| 117 | [chemical structure] |
| 118 | [chemical structure] |
| 119 | [chemical structure] |
| 120 | [chemical structure] |
| 121 | [chemical structure] |
| 122 | [chemical structure] |
| 123 | [chemical structure] |
| 124 | [chemical structure] |
| 125 | [chemical structure] |
| 126 | [chemical structure] |
| 127 | [chemical structure] |
| 128 | [chemical structure] |
| 129 | [chemical structure] |
| 130 | [chemical structure] |
| 131 | [chemical structure] |
| 132 | [chemical structure] |
| 133 | [chemical structure] |
| 134 | [chemical structure] |
| 135 | [chemical structure] |
| 136 | [chemical structure] |
| 137 | [chemical structure] |
| 138 | [chemical structure] |
| 139 | [chemical structure] |
| 140 | [chemical structure] |
| 141 | [chemical structure] |
| 142 | [chemical structure] |
| 143 | [chemical structure] |
| 144 | [chemical structure] |
| 145 | [chemical structure] |
| 146 | [chemical structure] |
| 147 | [chemical structure] |
| 148 | [chemical structure] |
| 149 | [chemical structure] |
| 150 | [chemical structure] |
| 151 | |

[1017] In some embodiments, the ionizable lipid has a beta-hydroxyl amine head group. In some embodiments, the ionizable lipid has a gamma-hydroxyl amine head group.

[1018] In some embodiments, an ionizable lipid of the disclosure is a lipid selected from Table 10b. In some embodiments, an ionizable lipid of the disclosure is Lipid 15 from Table 10b. In an embodiment, the ionizable lipid is described in US patent publication number US20170210697A1. In an embodiment, the ionizable lipid is described in US patent publication number US20170119904A1.

TABLE 10b

| Ionizable | |
|---|---|
| lipid | |
| number | Structure |
| 1 | [chemical structure] |
| 2 | [chemical structure] |
| 3 | [chemical structure] |
| 4 | [chemical structure] |
| 5 | [chemical structure] |
| 6 | [chemical structure] |
| 7 | [chemical structure] |
| 8 | [chemical structure] |
| 9 | [chemical structure] |
| 10 | [chemical structure] |
| 11 | [chemical structure] |
| 12 | [chemical structure] |
| 13 | [chemical structure] |
| 14 | [chemical structure] |
| 15 | [chemical structure] |
| 16 | [chemical structure] |
| 17 | [chemical structure] |
| 18 | [chemical structure] |
| 19 | [chemical structure] |
| 20 | [chemical structure] |
| 21 | [chemical structure] |
| 22 | [chemical structure] |
| 23 | [chemical structure] |
| 24 | [chemical structure] |
| 25 | [chemical structure] |
| 26 | [chemical structure] |
| 27 | [chemical structure] |
| 28 | [chemical structure] |
| 29 | [chemical structure] |
| 30 | [chemical structure] |
| 31 | [chemical structure] |
| 32 | [chemical structure] |
| 33 | [chemical structure] |
| 34 | [chemical structure] |
| 35 | [chemical structure] |
| 36 | [chemical structure] |
| 37 | [chemical structure] |
| 38 | [chemical structure] |
| 39 | |

[1019] In some embodiments, an ionizable lipid has one of the structures set forth in Table 10 below.

TABLE 10

| Number | Structure |
|---|---|
| 1 | [chemical structure] |
| 2 | [chemical structure] |
| 3 | [chemical structure] |
| 4 | [chemical structure] |
| 5 | [chemical structure] |
| 6 | [chemical structure] |
| 7 | [chemical structure] |
| 8 | [chemical structure] |
| 9 | [chemical structure] |
| 10 | [chemical structure] |
| 11 | [chemical structure] |
| 12 | [chemical structure] |
| 13 | [chemical structure] |
| 14 | [chemical structure] |
| 15 | [chemical structure] |
| 16 | [chemical structure] |
| 17 | [chemical structure] |
| 18 | [chemical structure] |
| 19 | [chemical structure] |
| 20 | [chemical structure] |
| 21 | [chemical structure] |
| 22 | [chemical structure] |
| 23 | [chemical structure] |
| 24 | [chemical structure] |
| 25 | [chemical structure] |
| 26 | [chemical structure] |
| 27 | [chemical structure] |
| 28 | [chemical structure] |
| 29 | [chemical structure] |
| 30 | [chemical structure] |
| 31 | [chemical structure] |
| 32 | [chemical structure] |
| 33 | [chemical structure] |
| 34 | [chemical structure] |
| 35 | [chemical structure] |
| 36 | [chemical structure] |
| 37 | [chemical structure] |
| 38 | [chemical structure] |
| 39 | [chemical structure] |
| 40 | [chemical structure] |
| 41 | [chemical structure] |
| 42 | [chemical structure] |
| 43 | [chemical structure] |
| 44 | [chemical structure] |
| 45 | [chemical structure] |
| 46 | [chemical structure] |
| 47 | [chemical structure] |
| 48 | [chemical structure] |
| 49 | [chemical structure] |

[1020] In some embodiments, the ionizable lipid has one of the structures set forth in Table 11 below. In some embodiments, the ionizable lipid as set forth in Table 11 is as described in international patent application PCT/US2010/061058.

TABLE 11

[chemical structure]

[chemical structure]

[chemical structure]

[chemical structure]

[chemical structure]

[chemical structure]

[chemical structure]

[chemical structure]

[chemical structure]

[chemical structure]

[chemical structure]

[chemical structure]

[chemical structure]

[chemical structure]

[chemical structure]

[chemical structure]

[chemical structure]

[chemical structure]

[chemical structure]

[chemical structure]

[chemical structure]

[chemical structure]

[chemical structure]

[chemical structure]

[chemical structure]

[chemical structure]

[chemical structure]

[chemical structure]

[chemical structure]

[chemical structure]

[chemical structure]

[chemical structure]

[chemical structure]

[chemical structure]

[chemical structure]

[chemical structure]

[chemical structure]

[chemical structure]

[chemical structure]

[chemical structure]

[chemical structure]

[chemical structure]

[chemical structure]

[chemical structure]

[chemical structure]

[chemical structure]

[chemical structure]

[chemical structure]

[chemical structure]

[chemical structure]

[chemical structure]

[chemical structure]

[chemical structure]

[chemical structure]

[chemical structure]

[chemical structure]

[chemical structure]

[chemical structure]

[chemical structure]

[chemical structure]

[chemical structure]

[chemical structure]

[chemical structure]

[chemical structure]

[chemical structure]

[chemical structure]

[chemical structure]

[chemical structure]

[chemical structure]

[chemical structure]

[chemical structure]

meso compound

[chemical structure]

[chemical structure]

[chemical structure]

racemic compound

[chemical structure]

racemic compound

[chemical structure]

racemic compound

[chemical structure]

[chemical structure]

[chemical structure]

[chemical structure]

[chemical structure]

[chemical structure]

[chemical structure]

[symbol]

cis Racemic and optically pure

[chemical structure]

meso compound

[chemical structure]

[chemical structure]

[chemical structure]

racemic compound

[chemical structure]

racemic compound

[chemical structure]

[chemical structure]

[chemical structure]

[chemical structure]

[chemical structure]

[chemical structure]

[chemical structure]

[chemical structure]

[chemical structure]

[chemical structure]

[chemical structure]

[chemical structure]

[chemical structure]

[chemical structure]

[chemical structure]

[chemical structure]

[chemical structure]

[chemical structure]

[chemical structure]

[chemical structure]

[chemical structure]

[chemical structure]

[chemical structure]

[chemical structure]

[chemical structure]

[chemical structure]

[chemical structure]

[chemical structure]

[chemical structure]

[chemical structure]

[chemical structure]

[chemical structure]

[chemical structure]

[chemical structure]

[chemical structure]

[chemical structure]

[chemical structure]

[chemical structure]

[chemical structure]

[chemical structure]

[chemical structure]

[chemical structure]

[chemical structure]

[chemical structure]

[chemical structure]

[chemical structure]

[chemical structure]

[chemical structure]

[chemical structure]

[chemical structure]

[chemical structure]

[chemical structure]

[chemical structure]

[chemical structure]

[chemical structure]

[chemical structure]

[chemical structure]

[chemical structure]

[chemical structure]

[chemical structure]

[chemical structure]

[chemical structure]

[chemical structure]

[chemical structure]

[chemical structure]

[chemical structure]

[chemical structure]

[chemical structure]

[chemical structure]

[chemical structure]

[chemical structure]

[chemical structure]

[chemical structure]

[chemical structure]

n = 0-6

[chemical structure]

[chemical structure]

[chemical structure]

[chemical structure]

[chemical structure]

[chemical structure]

[chemical structure]

[chemical structure]

[chemical structure]

[chemical structure]

[chemical structure]

[chemical structure]

[chemical structure]

[chemical structure]

[chemical structure]

[chemical structure]

[chemical structure]

[chemical structure]

[chemical structure]

[chemical structure]

[chemical structure]

[chemical structure]

[chemical structure]

[chemical structure]

[chemical structure]

[chemical structure]

[chemical structure]

[chemical structure]

[chemical structure]

[chemical structure]

[chemical structure]

[chemical structure]

[chemical structure]

[chemical structure]

[chemical structure]

[chemical structure]

[chemical structure]

[chemical structure]

[chemical structure]

[chemical structure]

[chemical structure]

[chemical structure]

[chemical structure]

[chemical structure]

[chemical structure]

[chemical structure]

[chemical structure]

[chemical structure]

[chemical structure]

[chemical structure]

[chemical structure]

[chemical structure]

[chemical structure]

[chemical structure]

[chemical structure]

[chemical structure]

[chemical structure]

[chemical structure]

[chemical structure]

Q is O, NH, NMe

[chemical structure]

Q is O, NH, NMe

[chemical structure]

Q is O, NH, NMe

[chemical structure]

[chemical structure]

[chemical structure]

[chemical structure]

[chemical structure]

[chemical structure]

[chemical structure]

[chemical structure]

[chemical structure]

Q is O, NH, NMe

[chemical structure]

Q is O, NH, NMe

[chemical structure]

Q is O, NH, NMe

[chemical structure]

[chemical structure]

[chemical structure]

[chemical structure]

[chemical structure]

Q is O, NH, NMe

[chemical structure]

Q is O, NH, NMe

[chemical structure]

Q is O, NH, NMe

[chemical structure]

Q is O, NH, NMe

[chemical structure]

Q is O, NH, NMe

[chemical structure]

Q is O, NH, NMe

[chemical structure]

Q is O, NH, NMe

[chemical structure]

Q is O, NH, NMe

[chemical structure]

Q is O, NH, NMe

[chemical structure]

[chemical structure]

[chemical structure]

[chemical structure]

Q is O, NH, NMe

[chemical structure]

Q is O, NH, NMe

[chemical structure]

Q is O, NH, NMe

[chemical structure]

Q is O, NH, NMe

[chemical structure]

Q is O, NH, NMe

[chemical structure]

Q is O, NH, NMe

[chemical structure]

Q is O, NH, NMe

[chemical structure]

Q is O, NH, NMe

[chemical structure]

Q is O, NH, NMe

[chemical structure]

Q is O, NH, NMe

[chemical structure]

Q is O, NH, NMe

[chemical structure]

Q is O, NH, NMe

[chemical structure]

[chemical structure]

Q is O, NH, NMe

[chemical structure]

[chemical structure]

[chemical structure]

[chemical structure]

[chemical structure]

[chemical structure]

[chemical structure]

[chemical structure]

[chemical structure]

Q is O, NH, NMe

[chemical structure]

Q is O, NH, NMe

[chemical structure]

Q is O, NH, NMe

[chemical structure]

[chemical structure]

[chemical structure]

[chemical structure]

[chemical structure]

[chemical structure]

[chemical structure]

[chemical structure]

[chemical structure]

[chemical structure]

[chemical structure]

[chemical structure]

[chemical structure]

[chemical structure]

X = O, S, NH, NMe n = 0-6

[chemical structure]

[chemical structure]

[chemical structure]

[chemical structure]

[chemical structure]

[chemical structure]

[chemical structure]

[chemical structure]

[chemical structure]

[chemical structure]

X = O, S, NH, NMe, n = 0-6

[chemical structure]

[chemical structure]

[chemical structure]

[chemical structure]

[chemical structure]

[chemical structure]

[chemical structure]

[chemical structure]

[chemical structure]

[chemical structure]

[chemical structure]

[chemical structure]

[chemical structure]

[chemical structure]

[chemical structure]

[chemical structure]

[chemical structure]

[chemical structure]

[chemical structure]

[chemical structure]

[chemical structure]

[chemical structure]

[chemical structure]

[chemical structure]

[chemical structure]

[chemical structure]

[chemical structure]

[chemical structure]

[chemical structure]

[chemical structure]

[chemical structure]

[chemical structure]

[chemical structure]

[chemical structure]

[chemical structure]

Q is O

[chemical structure]

Q is O

[chemical structure]

Q is O

[chemical structure]

Q is O

[chemical structure]

Q is O

[chemical structure]

Q is O

[chemical structure]

Q is O

[chemical structure]

Q is O

[chemical structure]

Q is O

[chemical structure]

Q is O

[chemical structure]

Q is O

[chemical structure]

Q is O

[chemical structure]

Q is O

[chemical structure]

Q is O

[chemical structure]

Q is O

[chemical structure]

Q is O

[chemical structure]

Q is O

[chemical structure]

Q is O

[chemical structure]

Q is O

[chemical structure]

Q is O

[chemical structure]

Q is O

[chemical structure]

Q is O

[chemical structure]

Q is O

[chemical structure]

[chemical structure]

X = O, S, NH, NMe, n = 0-6

[chemical structure]

[chemical structure]

[chemical structure]

[chemical structure]

[chemical structure]

[chemical structure]

[chemical structure]

[chemical structure]

[chemical structure]

[chemical structure]

[chemical structure]

[chemical structure]

[chemical structure]

[chemical structure]

X = O, S, NH, NMe, n = 0-6

[chemical structure]

[chemical structure]

[chemical structure]

[chemical structure]

[chemical structure]

[chemical structure]

[chemical structure]

[chemical structure]

[chemical structure]

[chemical structure]

[chemical structure]

[chemical structure]

[chemical structure]

[chemical structure]

[chemical structure]

[chemical structure]

[chemical structure]

[chemical structure]

[chemical structure]

[chemical structure]

[chemical structure]

[chemical structure]

[chemical structure]

[chemical structure]

[chemical structure]

[chemical structure]

[chemical structure]

[chemical structure]

[chemical structure]

[chemical structure]

[chemical structure]

[chemical structure]

[chemical structure]

[chemical structure]

[chemical structure]

[chemical structure]

e.g., X = Me, OH, Cl, etc

[chemical structure]

[chemical structure]

[chemical structure]

[chemical structure]

[chemical structure]

[chemical structure]

[chemical structure]

[chemical structure]

[chemical structure]

[chemical structure]

[chemical structure]

[chemical structure]

[chemical structure]

[chemical structure]

[chemical structure]

[chemical structure]

[chemical structure]

[chemical structure]

[chemical structure]

[chemical structure]

[chemical structure]

[chemical structure]

[chemical structure]

[chemical structure]

[chemical structure]

[chemical structure]

[chemical structure]

[chemical structure]

[chemical structure]

[chemical structure]

[chemical structure]

[chemical structure]

[chemical structure]

[chemical structure]

[chemical structure]

[chemical structure]

[chemical structure]

[chemical structure]

[chemical structure]

[chemical structure]

[chemical structure]

[chemical structure]

[chemical structure]

[chemical structure]

[chemical structure]

[chemical structure]

[chemical structure]

[chemical structure]

[chemical structure]

[chemical structure]

[chemical structure]

[chemical structure]

[chemical structure]

[chemical structure]

[chemical structure]

[chemical structure]

[chemical structure]

[chemical structure]

[chemical structure]

[chemical structure]

[chemical structure]

[chemical structure]

[chemical structure]

[chemical structure]

[chemical structure]

[chemical structure]

[chemical structure]

[chemical structure]

Q is NH, NMe

[chemical structure]

Q is NH, NMe

[chemical structure]

Q is NH, NMe

[chemical structure]

Q is NH, NMe

[chemical structure]

Q is NH, NMe

[chemical structure]

[chemical structure]

Q is NH, NMe

[chemical structure]

Q is NH, NMe

[chemical structure]

Q is NH, NMe

[chemical structure]

Q is NH, NMe

[chemical structure]

=0
Q is NH, NMe

[chemical structure]

Q is NH, NMe

[chemical structure]

Q is NH, NMe

[chemical structure]

Q is NH, NMe

[chemical structure]

Q is NH, NMe

[chemical structure]

Q is NH, NMe

[chemical structure]

Q is NH, NMe

[chemical structure]

Q is NH, NMe

[chemical structure]

Q is NH, NMe

[chemical structure]

Q is NH, NMe

[chemical structure]

[chemical structure]

[chemical structure]

[chemical structure]

[chemical structure]

Q is NH, NMe

[chemical structure]

Q is NH, NMe

[chemical structure]

Q is NH, NMe

[chemical structure]

Q is NH, NMe

[chemical structure]

Q is NH, NMe

[chemical structure]

[chemical structure]

[chemical structure]

[chemical structure]

[chemical structure]

[chemical structure]

[chemical structure]

[chemical structure]

[chemical structure]

[chemical structure]

[chemical structure]

[chemical structure]

[chemical structure]

[chemical structure]

[chemical structure]

[chemical structure]

[chemical structure]

[chemical structure]

[chemical structure]

[chemical structure]

[chemical structure]

[chemical structure]

[chemical structure]

[chemical structure]

[chemical structure]

[chemical structure]

[chemical structure]

[chemical structure]

[chemical structure]

[chemical structure]

[chemical structure]

[chemical structure]

[chemical structure]

[chemical structure]

[chemical structure]

[chemical structure]

[chemical structure]

[symbol]

indicates data missing or illegible when filed

[1021] In some embodiments, the transfer vehicle comprises Lipid A, Lipid B, Lipid C, and/or Lipid D. In some embodiments, inclusion of Lipid A, Lipid B, Lipid C, and/or Lipid D improves encapsulation and/or endosomal escape. In some embodiments, Lipid A, Lipid B, Lipid C, and/or Lipid D are described in international patent application PCT/US2017/028981.

[1022] In some embodiments, an ionizable lipid is Lipid A, which is (9Z,12Z)-3-((4,4-bis(octyloxy)butanoyl)oxy)-2-((((3-(diethylamino)propoxy)carbonyl)oxy)methyl)propyl octadeca9,12-dienoate, also called 3-((4,44bis(octyloxy)butanoyl)oxy)-2-((((3-(diethylamino)propoxy)carbonyl)oxy)methyl)propyl (9Z,12Z)-octadeca-9,12-dienoate. Lipid A can be depicted as:

[chemical structure]

[1023] Lipid A may be synthesized according to WO2015/095340 (e.g., pp. 84-86), incorporated by reference in its entirety.

[1024] In some embodiments, an ionizable lipid is Lipid B, which is ((5-((dimethylamino)methyl)-1,3-phenylene)bis(oxy))bis(octane-8,1-diyl)bis(decanoate). LipidB can be depicted as:

[chemical structure]

[1025] Lipid B may be synthesized according to WO2014/136086 (e.g., pp. 107-09), incorporated by reference in its entirety.

[1026] In some embodiments, an ionizable lipid is Lipid C, which is 2-((4-(((3-(dimethylamino)propoxy)carbonyl)oxy)hexadecanoyl)oxy)propane-1,3-diyl(9Z,9′Z,12Z,12′Z)-bis(octadeca-9,12-dienoate). Lipid C can be depicted as:

[chemical structure]

[1027] In some embodiments, an ionizable lipid is Lipid D, which is 3-(((3-(dimethylamino)propoxy)carbonyl)oxy)- 13-(octanoyloxy)tridecyl 3-octylundecanoate. Lipid D can be depicted as:

[chemical structure]

[1028] Lipid C and Lipid D may be synthesized according to WO2015/095340, incorporated by reference in its entirety.

[1029] In some embodiments, an ionizable lipid is described in US patent publication number 20190321489. In some embodiments, an ionizable lipid is described in international patent publication WO 2010/053572, incorporated herein by reference. In some embodiments, an ionizable lipid is C12-200, described at paragraph [00225] of WO 2010/053572.

[1030] Several ionizable lipids have been described in the literature, many of which are commercially available. In certain embodiments, such ionizable lipids are included in the transfer vehicles described herein. In some embodiments, the ionizable lipid N-[1-(2,3-dioleyloxy)propyl]-N,N,N-trimethylammonium chloride or “DOTMA” is used. (Felgner et al. Proc. Nat'l Acad. Sci. 84, 7413 (1987); U.S. Pat. No. 4,897,355). DOTMA can be formulated alone or can be combined with a neutral lipid, dioleoylphosphatidylethanolamine or “DOPE” or other cationic or non-cationic lipids into a lipid nanoparticle. Other suitable cationic lipids include, for example, ionizable cationic lipids as described in U.S. provisional patent application 61/617,468, filed Mar. 29, 2012 (incorporated herein by reference), such as, e.g., (15Z,18Z)-N,N-dimethyl-6-(9Z,12Z)-octadeca-9,12-dien-1-yl)tetracosa-15,18-dien-1-amine (HGT5000), (15Z,18Z)-N,N-dimethyl-6-((9Z,12Z)-octadeca-9,12-dien-1-yl)tetracosa-4,15,18-trien-1-amine (HGT5001), and (15Z,18Z)-N,N-dimethyl-6-((9Z,12Z)-octadeca-9,12-dien-1-yl)tetracosa-5,15,18-trien-1-amine (HGT5002), C₁₂₋₂₀₀ (described in WO 2010/053572), 2-(2,2-di((9Z,12Z)-octadeca-9,12-dien-1-yl)-1,3-dioxolan-4-yl)-N,N-dimethylethanamine (DLinKC2-DMA)) (See, WO 2010/042877; Semple et al., Nature Biotech. 28:172-176 (2010)), 2-(2,2-di((9Z,2Z)-octadeca-9,12-dien-1-yl)-1,3-dioxolan-4-yl)-N,N-dimethylethanamine (DLin-KC2-DMA), (3S,10R,13R,17R)-10,13-dimethyl-17-((R)-6-methylheptan-2-yl)-2, 3, 4, 7, 8, 9, 10, 11, 12, 13, 14, 15, 16, 17-tetradecahydro-1H-cyclopenta[a]phenanthren-3-yl 3-(1H-imidazol-4-yl)propanoate (ICE), (15Z,18Z)-N,N-dimethyl-6-(9Z,12Z)-octadeca-9,12-dien-1-yl)tetracosa-15,18-dien-1-amine (HGT5000), (15Z,18Z)-N,N-dimethyl-6-((9Z,12Z)-octadeca-9,12-dien-1-yl)tetracosa-4,15,18-trien-1-amine (HGT5001), (15Z, 18 Z)-N,N-dimethyl-6-((9Z,12Z)-octadeca-9,12-dien-1-yl)tetracosa-5,15,18-trien-1-amine (HGT5002), 5-carboxyspermylglycine-dioctadecylamide (DOGS), 2,3-dioleyloxy-N-[2(spermine-carboxamido)ethyl]-N,N-dimethyl-1-propanaminium (DOSPA) (Behr et al. Proc. Nat.'l Acad. Sci. 86, 6982 (1989); U.S. Pat. Nos. 5,171,678; 5,334,761), 1,2-Dioleoyl-3-Dimethylammonium-Propane (DODAP), 1,2-Dioleoyl-3-Trimethylammonium-Propane or (DOTAP). Contemplated ionizable lipids also include 1,2-distcaryloxy-N,N-dimethyl-3-aminopropane (DSDMA), 1,2-dioleyloxy-N,N-dimethyl-3-aminopropane (DODMA), 1,2-dilinoleyloxy-N,N-dimethyl-3-aminopropane (DLinDMA), 1,2-dilinolenyloxy-N,N-dimethyl-3-aminopropane (DLenDMA), N-dioleyl-N,N-dimethylammonium chloride (DODAC), N,N-distearyl-N,N-dimethylammonium bromide (DDAB), N-(1,2-dimyristyloxyprop-3-yl)-N,N-dimethyl-N-hydroxyethyl ammonium bromide (DMRIE), 3-dimethylamino-2-(cholest-5-en-3-beta-oxybutan-4-oxy)-1-(cis,cis-9,12-octadecadienoxy)propane (CLinDMA), 2-[5′-(cholest-5-en-3-beta-oxy)-3′-oxapentoxy)-3-dimethyl-1-(cis,cis-9′, 1-2′-octadecadienoxy)propane (CpLinDMA), N,N-dimethyl-3,4-dioleyloxybenzylamine (DMOBA), 1,2-N,N′-dioleylcarbamyl-3-dimethylaminopropane (DOcarbDAP), 2,3-Dilinoleoyloxy-N,N-dimethylpropylamine (DLinDAP), 1,2-N,N′-Dilinoleylcarbamyl-3-dimethylamninopropane (DLincarbDAP), 1,2-Dilinoleoylcarbamyl-3-dimethylaminopropane (DLinCDAP), 2,2-dilinoleyl-4-dimethylaminomethyl-[1,3]-dioxolane (DLin-K-DMA), 2,2-dilinoleyl-4-dimethylaminoethyl-[1,3]-dioxolane (DLin-K-XTC2-DMA) or GL67, or mixtures thereof (Heyes, J., et al., J Controlled Release 107: 276-287 (2005); Morrissey, D V., et al., Nat. Biotechnol. 23(8): 1003-1007 (2005); PCT Publication WO2005/121348A1). The use of cholesterol-based ionizable lipids to formulate the transfer vehicles (e.g., lipid nanoparticles) is also contemplated by the present invention. Such cholesterol-based ionizable lipids can be used, either alone or in combination with other lipids. Suitable cholesterol-based ionizable lipids include, for example, DC-Cholesterol (N,N-dimethyl-N-ethylcarboxamidocholesterol), and 1,4-bis(3-N-oleylamino-propyl)piperazine (Gao, et al., Biochem. Biophys. Res. Comm. 179, 280 (1991); Wolf et al. BioTechniques 23, 139 (1997); U.S. Pat. No. 5,744,335).

[1031] Also contemplated are cationic lipids such as dialkylamino-based, imidazole-based, and guanidinium-based lipids. For example, also contemplated is the use of the ionizable lipid (3S,10R, 13R, 17R)-10,13-dimethyl-17-((R)-6-methylheptan-2-yl)-2, 3, 4, 7, 8, 9, 10, 11, 12, 13, 14, 15, 16, 17-tetradecahydro-1H-cyclopenta[a]phenanthren-3-yl 3-(1H-imidazol-4-yl)propanoate (ICE), as disclosed in International Application No. PCT/US2010/058457, incorporated herein by reference.

[1032] Also contemplated are ionizable lipids such as the dialkylamino-based, imidazole-based, and guanidinium-based lipids. For example, certain embodiments are directed to a composition comprising one or more imidazole-based ionizable lipids, for example, the imidazole cholesterol ester or “ICE” lipid, (3S, 10R, 13R, 17R)-10, 13-dimethyl-17-((R)-6-methylheptan-2-yl)-2, 3, 4, 7, 8, 9, 10, 11, 12, 13, 14, 15, 16, 17-tetradecahydro-1H-cyclopenta[a]phenanthren-3-yl 3-(1H-imidazol-4-yl)propanoate, as represented by structure (XIII) below. In an embodiment, a transfer vehicle for delivery of circRNA may comprise one or more imidazole-based ionizable lipids, for example, the imidazole cholesterol ester or “ICE” lipid (3S, 10R, 13R, 17R)-10, 13-dimethyl-17-((R)-6-methylheptan-2-yl)-2, 3, 4, 7, 9, 10, 11, 12, 13, 14, 15, 16, 17-tetradecahydro-1H-cyclopenta[a]phenanthren-3-yl 3-(1H-imidazol-4-yl)propanoate, as represented by structure (XIII).

[chemical structure]

[1033] Without wishing to be bound by a particular theory, it is believed that the fusogenicity of the imidazole-based cationic lipid ICE is related to the endosomal disruption which is facilitated by the imidazole group, which has a lower pKa relative to traditional ionizable lipids. The endosomal disruption in turn promotes osmotic swelling and the disruption of the liposomal membrane, followed by the transfection or intracellular release of the nucleic acid(s) contents loaded therein into the target cell.

[1034] The imidazole-based ionizable lipids are also characterized by their reduced toxicity relative to other ionizable lipids.

[1035] In some embodiments, an ionizable lipid is described by US patent publication number 20190314284. In certain embodiments, the an ionizable lipid is described by structure 3, 4, 5, 6, 7, 8, 9, or 10 (e.g., HGT4001, HGT4002, HGT4003, HGT4004 and/or HGT4005). In certain embodiments, the one or more cleavable functional groups (e.g., a disulfide) allow, for example, a hydrophilic functional head-group to dissociate from a lipophilic functional tail-group of the compound (e.g., upon exposure to oxidative, reducing or acidic conditions), thereby facilitating a phase transition in the lipid bilayer of the one or more target cells. For example, when a transfer vehicle (e.g., a lipid nanoparticle) comprises one or more of the lipids of structures 3-10, the phase transition in the lipid bilayer of the one or more target cells facilitates the delivery of the circRNA into the one or more target cells.

[1036] In certain embodiments, the ionizable lipid is described by structure (XIV),

[chemical structure]

[1037] wherein:
   [1038] R₁ is selected from the group consisting of imidazole, guanidinium, amino, imine, enamine, an optionally-substituted alkyl amino (e.g., an alkyl amino such as dimethylamino) and pyridyl;
   [1039] R₂ is selected from the group consisting of structure XV and structure XVI;

[chemical structure]

wherein R₃ and R₄ are each independently selected from the group consisting of an optionally substituted, variably saturated or unsaturated C₆-C₂₀ alkyl and an optionally substituted, variably saturated or unsaturated C₆-C₂₀ acyl; and wherein n is zero or any positive integer (e.g., one, two, three, four, five, six, seven, eight, nine, ten, eleven, twelve, thirteen, fourteen, fifteen, sixteen, seventeen, eighteen, nineteen, twenty or more). In certain embodiments, R₃ and R₄ are each an optionally substituted, polyunsaturated C₁₈ alkyl, while in other embodiments R₃ and R₄ are each an unsubstituted, polyunsaturated C₁₈ alkyl. In certain embodiments, one or more of R₃ and R₄ are (9Z,12Z)-octadeca-9,12-dien.

[1040] Also disclosed herein are pharmaceutical compositions that comprise the compound of structure XIV, wherein R₁ is selected from the group consisting of imidazole, guanidinium, amino, imine, enamine, an optionally-substituted alkyl amino (e.g., an alkyl amino such as dimethylamino) and pyridyl; wherein R₂ is structure XV; and wherein n is zero or any positive integer. Further disclosed herein are pharmaceutical compositions comprising the compound of structure XIV, wherein R₁ is selected from the group consisting of imidazole, guanidinium, amino, imine, enamine, an optionally-substituted alkyl amino (e.g., an alkyl amino such as dimethylamino) and pyridyl; wherein R₂ is structure XVI; wherein R₃ and R₄ are each independently selected from the group consisting of an optionally substituted, variably saturated or unsaturated C₆-C₂₀ alkyl and an optionally substituted, variably saturated or unsaturated C₆-C₂₀ acyl; and wherein n is zero or any positive integer. In certain embodiments. R₃ and R₄ are each an optionally substituted, polyunsaturated C₁₈ alkyl, while in other embodiments R₃ and R₄ are each an unsubstituted, polyunsaturated C₁₈ alkyl (e.g., octadeca-9,12-dien).

[1041] In certain embodiments, the R₁ group or head-group is a polar or hydrophilic group (e.g., one or more of the imidazole, guanidinium and amino groups) and is bound to the R₂ lipid group by way of the disulfide (S—S) cleavable linker group, for example as depicted in structure XIV. Other contemplated cleavable linker groups may include compositions that comprise one or more disulfide (S—S) linker group bound (e.g., covalently bound) to, for example an alkyl group (e.g., C₁ to C₁₀ alkyl). In certain embodiments, the R₁ group is covalently bound to the cleavable linker group by way of a C₁-C₂₀ alkyl group (e.g., where n is one to twenty), or alternatively may be directly bound to the cleavable linker group (e.g., where n is zero). In certain embodiments, the disulfide linker group is cleavable in vitro and/or in vivo (e.g., enzymatically cleavable or cleavable upon exposure to acidic or reducing conditions).

[1042] In certain embodiments, the inventions relate to the compound 5-(((10,13-dimethyl-17-(6-methylheptan-2-yl)-2,3,4,7,8,9,10,11,12,13,14,15,16,17-tetradecahydro-1H-cyclopenta[a]phenanthren-3-yl)disulfanyl)methyl)-1H-imidazole, having structure XVII (referred to herein as “HGT4001”).

[chemical structure]

[1043] In certain embodiments, the inventions relate to the compound 1-(2-(((3S,10R,13R)-10,13-dimethyl-17-((R)-6-methylheptan-2-yl)-2,3,4,7,8,9,10,11,12,13,14,15,16,17-tetradecahydro-1H-cyclopenta[a]phenanthren-3-yl)disulfanyl)ethyl)guanidine, having structure XVIII (referred to herein as “HGT4002”).

[chemical structure]

[1044] In certain embodiments, the inventions relate to the compound 2-((2,3-Bis((9Z,12Z)-octadeca-9,12-dien-1-yloxy)propyl)disulfanyl)-N,N-dimethylethanamine, having structure XIX (referred to herein as “HGT4003”).

[chemical structure]

[1045] In other embodiments, the inventions relate to the compound 5-(((2,3-bis((9Z,12Z)-octadeca-9,12-dien-1-yloxy)propyl)disulfanyl)methyl)-1H-imidazole having the structure of structure XX (referred to herein as “HGT4004”).

[chemical structure]

[1046] In still other embodiments, the inventions relate to the compound 1-(((2,3-bis((9Z,12Z)-octadeca-9,12-dien-1-yloxy)propyl)disulfanyl)methyl)guanidine having structure XXI (referred to herein as “HGT4005”).

[chemical structure]

[1047] In certain embodiments, the compounds described as structures 3-10 are ionizable lipids.

[1048] The compounds, and in particular the imidazole-based compounds described as structures 3-8 (e.g., HGT4001 and HGT4004), are characterized by their reduced toxicity, in particular relative to traditional ionizable lipids. In some embodiments, the transfer vehicles described herein comprise one or more imidazole-based ionizable lipid compounds such that the relative concentration of other more toxic ionizable lipids in such pharmaceutical or liposomal composition may be reduced or otherwise eliminated.

[1049] The ionizable lipids include those disclosed in international patent application PCT/US2019/025246, and US patent publications 2017/0190661 and 2017/0114010, incorporated herein by reference in their entirety. The ionizable lipids may include a lipid selected from the following tables 12, 13, 14, or 15a.

TABLE 12

| ATX-001 | | [chemical structure] |
|---|---|---|
| ATX-002 | | [chemical structure] |
| ATX-003 | | [chemical structure] |
| ATX-004 | | [chemical structure] |
| ATX-005 | | [chemical structure] |
| ATX-006 | | [chemical structure] |
| ATX-007 | | [chemical structure] |
| ATX-008 | | [chemical structure] |
| ATX-009 | | [chemical structure] |
| ATX-010 | | [chemical structure] |
| ATX-011 | | [chemical structure] |
| ATX-012 | | [chemical structure] |
| ATX-013 | | [chemical structure] |
| ATX-014 | | [chemical structure] |
| ATX-015 | | [chemical structure] |
| ATX-016 | | [chemical structure] |
| ATX-017 | | [chemical structure] |
| ATX-018 | | [chemical structure] |
| ATX-019 | | [chemical structure] |
| ATX-020 | | [chemical structure] |
| ATX-021 | | [chemical structure] |
| ATX-022 | | [chemical structure] |
| ATX-023 | | [chemical structure] |
| ATX-024 | | [chemical structure] |
| ATX-025 | | [chemical structure] |
| ATX-026 | | [chemical structure] |
| ATX-027 | | [chemical structure] |
| ATX-028 | | [chemical structure] |
| ATX-029 | | [chemical structure] |
| ATX-030 | | [chemical structure] |
| ATX-031 | | [chemical structure] |
| | ATX-032 | [chemical structure] |

TABLE 13

| | |
|---|---|
| [chemical structure] | ATX-B-1 |
| [chemical structure] | ATX-B-2 |
| [chemical structure] | ATX-B-3 |
| [chemical structure] | ATX-B-4 |
| [chemical structure] | ATX-B-5 |
| [chemical structure] | ATX-B-6 |
| [chemical structure] | ATX-B-7 |
| [chemical structure] | ATX-B-8 |
| [chemical structure] | ATX-B-9 |
| [chemical structure] | ATX-B-10 |
| [chemical structure] | ATX-B-11 |
| [chemical structure] | ATX-B-12 |

TABLE 14

| Compound | ATX-# |
|---|---|
| [chemical structure] | 0063 |
| [chemical structure] | 0130 |
| [chemical structure] | 0131 |
| [chemical structure] | 0044 |
| [chemical structure] | 0111 |
| [chemical structure] | 0132 |
| [chemical structure] | 0134 |
| [chemical structure] | 0133 |
| [chemical structure] | 0064 |
| [chemical structure] | 0061 |
| [chemical structure] | 0100 |
| [chemical structure] | 0117 |
| [chemical structure] | 0114 |
| [chemical structure] | 0115 |
| [chemical structure] | 0101 |
| [chemical structure] | 0106 |
| [chemical structure] | 0116 |
| [chemical structure] | 0043 |
| [chemical structure] | 0086 |
| [chemical structure] | 0058 |
| [chemical structure] | 0081 |
| [chemical structure] | 0123 |
| [chemical structure] | 0122 |
| [chemical structure] | 0057 |
| [chemical structure] | 0088 |
| [chemical structure] | 0087 |
| [chemical structure] | 0124 |
| [chemical structure] | 0128 |
| [chemical structure] | 0127 |
| [chemical structure] | 0126 |
| [chemical structure] | 0129 |
| [chemical structure] | 0082 |
| [chemical structure] | 0085 |
| [chemical structure] | 0083 |
| [chemical structure] | 0121 |
| [chemical structure] | 0091 |
| [chemical structure] | 0102 |
| [chemical structure] | 0098 |
| [chemical structure] | 0092 |
| [chemical structure] | 0084 |
| [chemical structure] | 0095 |
| [chemical structure] | 0125 |
| [chemical structure] | 0094 |
| [chemical structure] | 0109 |
| [chemical structure] | 0110 |
| [chemical structure] | 0118 |
| [chemical structure] | 0108 |
| [chemical structure] | 0107 |
| [chemical structure] | 0093 |
| [chemical structure] | 0097 |
| [chemical structure] | 0096 |

TABLE 15a

| | |
|---|---|
| | 11 |
| [chemical structure] | |
| | 13 |
| [chemical structure] | |
| | 14 |
| [chemical structure] | |
| | 15 |
| [chemical structure] | |
| | 16 |
| [chemical structure] | |
| | 17 |
| [chemical structure] | |
| | 18 |
| [chemical structure] | |
| | 19 |
| [chemical structure] | |
| | 20 |
| [chemical structure] | |

[1050] In some embodiments, an ionizable lipid is as described in international patent application PCT/US2019/015913. In some embodiments, an ionizable lipid is chosen from the following:

[chemical structure]

[chemical structure]

[chemical structure]

[chemical structure]

[chemical structure]

[chemical structure]

[chemical structure]

[chemical structure]

[chemical structure]

[chemical structure]

[chemical structure]

[chemical structure]

[chemical structure]

[chemical structure]

[chemical structure]

[chemical structure]

[chemical structure]

[chemical structure]

[chemical structure]

[chemical structure]

[chemical structure]

[chemical structure]

[chemical structure]

[chemical structure]

[chemical structure]

[chemical structure]

[chemical structure]

[chemical structure]

[chemical structure]

[chemical structure]

[chemical structure]

[chemical structure]

[chemical structure]

[chemical structure]

[chemical structure]

[chemical structure]

[chemical structure]

[chemical structure]

[chemical structure]

[chemical structure]

[chemical structure]

[chemical structure]

[chemical structure]

[chemical structure]

[chemical structure]

[chemical structure]

[chemical structure]

[chemical structure]

[chemical structure]

[chemical structure]

[chemical structure]

[chemical structure]

[chemical structure]

[chemical structure]

[chemical structure]

[chemical structure]

[chemical structure]

[chemical structure]

[chemical structure]

[chemical structure]

[chemical structure]

[chemical structure]

[chemical structure]

[chemical structure]

[chemical structure]

a. Amine Lipids

[1051] In certain embodiments, transfer vehicle compositions for the delivery of circular RNA comprise an amine lipid. In certain embodiments, an ionizable lipid is an amine lipid. In some embodiments, an amine lipid is described in international patent applicationPCT/US2018/053569.

[1052] In some embodiments, the amine lipid is Lipid E, which is (9Z, 12Z)-3-((4,4-bis(octyloxy)butanoyl)oxy)-2-((((3-(diethylamino)propoxy)carbonyl)oxy)methyl)propyl octadeca-9, 12-dienoate.

[1053] Lipid E can be depicted as:

[chemical structure]

[1054] Lipid E may be synthesized according to WO2015/095340 (e.g., pp. 84-86). In certain embodiments, the amine lipid is an equivalent to Lipid E.

[1055] In certain embodiments, an amine lipid is an analog of Lipid E. In certain embodiments, a Lipid E analog is an acetal analog of Lipid E. In particular transfer vehicle compositions, the acetal analog is a C4-C12 acetal analog. In some embodiments, the acetal analog is a C5-C12 acetal analog. In additional embodiments, the acetal analog is a C5-C10 acetal analog. In further embodiments, the acetal analog is chosen from a C4, C5, C6, C7, C9, C10, C11 and C12 acetal analog.

[1056] Amine lipids and other biodegradable lipids suitable for use in the transfer vehicles, e.g., lipid nanoparticles, described herein are biodegradable in vivo. The amine lipids described herein have low toxicity (e.g., are tolerated in animal models without adverse effect in amounts of greater than or equal to 10 mg/kg). In certain embodiments, transfer vehicles composing an amine lipid include those where at least 75% of the amine lipid is cleared from the plasma within 8, 10, 12, 24, or 48 hours, or 3, 4, 5, 6, 7, or 10 days.

[1057] Biodegradable lipids include, for example, the biodegradable lipids of WO2017/173054, WO2015/095340, and WO2014/136086.

[1058] Lipid clearance may be measured by methods known by persons of skill in the art. See, for example, Maier, M.A., et al. Biodegradable Lipids Enabling Rapidly Eliminated Lipid Nanoparticles for Systemic Delivery of RNAi Therapeutics. Mol. Ther. 2013, 21(8), 1570-78.

[1059] Transfer vehicle compositions comprising an amine lipid can lead to an increased clearance rate. In some embodiments, the clearance rate is a lipid clearance rate, for example the rate at which a lipid is cleared from the blood, serum, or plasma. In some embodiments, the clearance rate is an RNA clearance rate, for example the rate at which an circRNA is cleared from the blood, serum, or plasma. In some embodiments, the clearance rate is the rate at which transfer vehicles are cleared from the blood, serum, or plasma. In some embodiments, the clearance rate is the rate at which transfer vehicles are cleared from a tissue, such as liver tissue or spleen tissue. In certain embodiments, a high rate of clearance leads to a safety profile with no substantial adverse effects. The amine lipids and biodegradable lipids may reduce transfer vehicle accumulation in circulation and in tissues. In some embodiments, a reduction in transfer vehicle accumulation in circulation and in tissues leads to a safety profile with no substantial adverse effects.

[1060] Lipids may be ionizable depending upon the pH of the medium they are in. For example, in a slightly acidic medium, the lipid, such as an amine lipid, may be protonated and thus bear a positive charge. Conversely, in a slightly basic medium, such as, for example, blood, where pH is approximately 7.35, the lipid, such as an amine lipid, may not be protonated and thus bear no charge.

[1061] The ability of a lipid to bear a charge is related to its intrinsic pKa. In some embodiments, the amine lipids of the present disclosure may each, independently, have a pKa in the range of from about 5.1 to about 7.4. In some embodiments, the bioavailable lipids of the present disclosure may each, independently, have a pKa in the range of from about 5.1 to about 7.4. For example, the amine lipids of the present disclosure may each, independently, have a pKa in the range of from about 5.8 to about 6.5. Lipids with a pKa ranging from about 5.1 to about 7.4 are effective for delivery of cargo in vivo, e.g., to the liver. Further, it has been found that lipids with a pKa ranging from about 5.3 to about 6.4 are effective for delivery in vivo, e.g., into tumors. See, e.g., WO2014/136086.

b. Lipids Containing a Disulfide Bond

[1062] In some embodiments, the ionizable lipid is described in U.S. Pat. No. 9,708,628.

[1063] The present invention provides a lipid represented by structure (XXII):

[chemical structure]

[1064] In structure (XXII), X^{a} and X^{b} are each independently X¹ or X² shown below.

[chemical structure]

[1065] R⁴ in X¹ is an alkyl group having 1-6 carbon atoms, which may be linear, branched or cyclic. The alkyl group preferably has a carbon number of 1-3. Specific examples of the alkyl group having 1-6 carbon atoms include methyl group, ethyl group, propyl group, isopropyl group, n-butyl group, sec-butyl group, isobutyl group, tert-butyl group, pentyl group, isopentyl group, neopentyl group, t-pentyl group, 1,2-dimethylpropyl group, 2-methylbutyl group, 2-methylpentyl group, 3-methylpentyl group, 2,2-dimethylbutyl group, 2,3-dimethylbutyl group, cyclohexyl group and the like. R⁴ is preferably a methyl group, an ethyl group, a propyl group or an isopropyl group, most preferably a methyl group.

[1066] The s in X² is 1 or 2. When s is 1, X² is a pyrrolidinium group, and when s is 2, X² is a piperidinium group. s is preferably 2. While the binding direction of X² is not limited, a nitrogen atom in X² preferably binds to R^{1a} and R^{1b}.

[1067] X^{a} may be the same as or different from X^{b}, and X^{a} is preferably the same group as X^{b}.

[1068] n^{a} and n^{b} are each independently 0 or 1, preferably 1. When n^{a} is 1, R^{3a} binds to X^{a} via Y^{a} and R^{2a}, and when n^{a} is 0, a structure of R^{3a}—X^{a}—R^{1a}—S— is taken. Similarly, when n^{b} is 1, R^{3b}binds to X^{b} via Y^{b} and R^{2b}, and when n^{b} is 0, a structure of R^{3b}—X^{b}—R^{1b}—S— is taken.

[1069] n^{a} may be the same as or different from n^{b}, and n^{a} is preferably the same as n^{b}.

[1070] R^{1a} and R^{1b} are each independently an alkylene group having 1-6 carbon atoms, which may be linear or branched, preferably linear. Specific examples of the alkylene group having 1-6 carbon atoms include methylene group, ethylene group, trimethylene group, isopropylene group, tetramethylene group, isobutylene group, pentamethylene group, neopentylene group and the like. R^{1a} and R^{1b} are each preferably a methylene group, an ethylene group, a trimethylene group, an isopropylene group or a tetramethylene group, most preferably an ethylene group.

[1071] R^{1a} may be the same as or different from R^{1b}, and R^{1a} is preferably the same group as R^{1b}.

[1072] R^{2a} and R^{2b} are each independently an alkylene group having 1-6 carbon atoms, which may be linear or branched, preferably linear. Examples of the alkylene group having 1-6 carbon atoms include those recited as the examples of the alkylene group having 1-6 carbon atoms for R^{1a} or R^{1b}. R^{2a} and R^{2b} are each preferably a methylene group, an ethylene group, a trimethylene group, an isopropylene group or a tetramethylene group.

[1073] When X^{a} and X^{b} are each X¹, R^{2a} and R^{2b} are preferably trimethylene groups. When X^{a} and X^{b} are each X², R^{2a} and R^{2b} are preferably ethylene groups.

[1074] R^{2a} may be the same as or different from R^{2b}, and R^{2a} is preferably the same group as R^{2b}.

[1075] Y^{a} and Y^{b} are each independently an ester bond, an amide bond, a carbamate bond, an ether bond or a urea bond, preferably an ester bond, an amide bond or a carbamate bond, most preferably an ester bond. While the binding direction of Y^{a} and Y^{b} is not limited, when Y^{a} is an ester bond, a structure of R^{3a}—CO—O—R^{2a}— is preferable, and when Y^{b} is an ester bond, a structure of R^{3b}—CO—O—R^{2b}— is preferable.

[1076] Y^{a} may be the same as or different from Y^{b}, and Y^{a} is preferably the same group as Y^{b}.

[1077] R^{3a} and R^{3b} are each independently a sterol residue, a liposoluble vitamin residue or an aliphatic hydrocarbon group having 12-22 carbon atoms, preferably a liposoluble vitamin residue or an aliphatic hydrocarbon group having 12-22 carbon atoms, most preferably a liposoluble vitamin residue.

[1078] Examples of the sterol residue include a cholesteryl group (cholesterol residue), a cholestaryl group (cholestanol residue), a stigmasteryl group (stigmasterol residue), a β-sitosteryl group (β-sitosterol residue), a lanosteryl group (lanosterol residue), and an ergosteryl group (ergosterol residue) and the like. The sterol residue is preferably a cholesteryl group or a cholestaryl group.

[1079] As the liposoluble vitamin residue, a residue derived from liposoluble vitamin, as well as a residue derived from a derivative obtained by appropriately converting a hydroxyl group, aldehyde or carboxylic acid, which is a functional group in liposoluble vitamin, to other reactive functional group can be used. As for liposoluble vitamin having a hydroxyl group, for example, the hydroxyl group can be converted to a carboxylic acid by reacting with succinic acid anhydride, glutaric acid anhydride and the like. Examples of the liposoluble vitamin include retinoic acid, retinol, retinal, ergosterol, 7-dehydrocholesterol, calciferol, cholecalciferol, dihydroergocalciferol, dihydrotachysterol, tocopherol, tocotrienol and the like. Preferable examples of the liposoluble vitamin include retinoic acid and tocopherol.

[1080] The aliphatic hydrocarbon group having 12-22 carbon atoms may be linear or branched, preferably linear. The aliphatic hydrocarbon group may be saturated or unsaturated. In the case of an unsaturated aliphatic hydrocarbon group, the aliphatic hydrocarbon group generally contains 1-6, preferably 1-3, more preferably 1-2 unsaturated bonds. While the unsaturated bond includes a carbon-carbon double bond and a carbon-carbon triple bond, it is preferably a carbon-carbon double bond. The aliphatic hydrocarbon group has a carbon number of preferably 12-18, most preferably 13-17. While the aliphatic hydrocarbon group includes an alkyl group, an alkenyl group, an alkynyl group and the like, it is preferably an alkyl group or an alkenyl group. Specific examples of the aliphatic hydrocarbon group having 12-22 carbon atoms include dodecyl group, tridecyl group, tetradecyl group, pentadecyl group, hexadecyl group, heptadecyl group, octadecyl group, nonadecyl group, icosyl group, henicosyl group, docosyl group, dodecenyl group, tridecenyl group, tetradecenyl group, pentadecenyl group, hexadecenyl group, heptadecenyl group, octadecenyl group, nonadecenyl group, icosenyl group, henicosenyl group, docosenyl group, decadienyl group, tridecadienyl group, tetradecadienyl group, pentadecadienyl group, hexadecadienyl group, heptadecadienyl group, octadecadienyl group, nonadecadienyl group, icosadienyl group, henicosadienyl group, docosadienyl group, octadecatrienyl group, icosatrienyl group, icosatetraenyl group, icosapentaenyl group, docosahexaenyl group, isostearyl group and the like. The aliphatic hydrocarbon group having 12-22 carbon atoms is preferably tridecyl group, tetradecyl group, heptadecyl group, octadecyl group, heptadecadienyl group or octadecadienyl group, particularly preferably tridecyl group, heptadecyl group or heptadecadienyl group.

[1081] In one embodiment, an aliphatic hydrocarbon group having 12-22 carbon atoms, which is derived from fatty acid, aliphatic alcohol, or aliphatic amine is used. When R^{3a} (or R^{3b}) is derived from fatty acid, Y^{a} (or Y^{b}) is an ester bond or an amide bond, and fatty acid-derived carbonyl carbon is included in Y^{a} (or Y^{b}). For example, when linoleic acid is used, R^{3a} (or R^{3b}) is a heptadecadienyl group.

[1082] R^{3a} may be the same as or different from R^{3b}, and R^{3a} is preferably the same group as R^{3b}.

[1083] In one embodiment, X^{a} is the same as X^{b}, n^{a} is the same as n^{b}, R^{1a} is the same as R^{1b}, R^{2a} is the same as R^{2b}, R^{3a} is the same as R^{3b}, and Y^{a} is the same as Y^{b}.

[1084] In one embodiment,
[1085] X^{a} and X^{b} are each independently X¹,
[1086] R⁴ is an alkyl group having 1-3 carbon atoms, n^{a} and n^{b} are each 1,
[1087] R^{1a} and R^{1b} are each independently an alkylene group having 1-6 carbon atoms,
[1088] R^{2a} and R^{2b} are each independently an alkylene group having 1-6 carbon atoms,
[1089] Y^{a} and Y^{b} are each an ester bond or an amide bond, and
[1090] R^{3a} and R^{3b} are each independently an aliphatic hydrocarbon group having 12-22 carbon atoms.

[1091] In one embodiment,
[1092] X^{a} and X^{b} are each X¹,
[1093] R⁴ is an alkyl group having 1-3 carbon atoms, n^{a} and n^{b} are each 1,
[1094] R^{1a} and R^{1b} are each an alkylene group having 1-6 carbon atoms,
[1095] R^{2a} and R^{2b} are each an alkylene group having 1-6 carbon atoms,
[1096] Y^{a} and Y^{b} are each an ester bond or an amide bond,
[1097] R^{3a} and R^{3b} are each an aliphatic hydrocarbon group having 12-22 carbon atoms,
[1098] X^{a} is the same as X^{b},
[1099] R^{1a} is the same as R^{1b},
[1100] R^{2a} is the same as R^{2b}, and
[1101] R^{3a} is the same as R^{3b}.

[1102] In one embodiment,
[1103] X^{a} and X^{b} are each X¹,
[1104] R⁴ is a methyl group, n^{a} and n^{b} are each 1,
[1105] R^{1a} and R^{1b} are each an ethylene group,
[1106] R^{2a} and R^{2b} are each a trimethylene group,
[1107] Y^{a} and Y^{b} are each —CO—O—, and
[1108] R^{3a} and R^{3b} are each independently an alkyl group or alkenyl group having 13-17 carbon atoms.

[1109] In one embodiment,
[1110] X^{a} and X^{b} are each X¹,
[1111] R⁴ is a methyl group, n^{a} and n^{b} are each 1,
[1112] R^{1a} and R^{1b} are each an ethylene group,
[1113] R^{2a} and R^{2b} are each a trimethylene group,
[1114] Y^{a} and Y^{b} are each —CO—O—,
[1115] R^{3a} and R^{3b} are each an alkyl group or alkenyl group having 13-17 carbon atoms, and
[1116] R^{3a} is the same as R^{3b}.

[1117] In one embodiment,
[1118] X^{a} and X^{b} are each independently X¹,
[1119] R⁴ is an alkyl group having 1-3 carbon atoms, n^{a} and n^{b} are each 1,
[1120] R^{1a} and R^{1b} are each independently an alkylene group having 1-6 carbon atoms,
[1121] R^{2a} and R^{2b} are each independently an alkylene group having 1-6 carbon atoms,
[1122] Y^{a} and Y^{b} are each an ester bond or an amide bond, and
[1123] R^{3a} and R^{3b} are each independently a liposoluble vitamin residue (e.g., retinoic acid residue, tocopherol residue).

[1124] In one embodiment,
[1125] X^{a} and X^{b} are each X¹,
[1126] R⁴ is an alkyl group having 1-3 carbon atoms, n^{a} and n^{b} are each 1,
[1127] R^{1a} and R^{1b} are each an alkylene group having 1-6 carbon atoms,
[1128] R^{2a} and R^{2b} are each an alkylene group having 1-6 carbon atoms,
[1129] Y^{a} and Y^{b} are each an ester bond or an amide bond,
[1130] R^{3a} and R^{3b} are each a liposoluble vitamin residue (e.g., retinoic acid residue, tocopherol
[1131] residue),
[1132] X^{a} is the same as X^{b},
[1133] R^{1a} is the same as R^{1b},
[1134] R^{2a} is the same as R^{2b}, and
[1135] R^{3a} is the same as R^{3b}.

[1136] In one embodiment,
[1137] X^{a} and X^{b} are each X¹,
[1138] R⁴ is a methyl group, n^{a} and n^{b} are each 1,
[1139] R^{1a} and R^{1b} are each an ethylene group,
[1140] R^{2a} and R^{2b} are each a trimethylene group,
[1141] Y^{a} and Y^{b} are each —CO—O—, and
[1142] R^{3a} and R^{3b} are each independently a liposoluble vitamin residue (e.g., retinoic acid residue, tocopherol residue).

[1143] In one embodiment,
[1144] X^{a} and X^{b} are each X¹,
[1145] R⁴ is a methyl group, n^{a} and n^{b} are each 1,
[1146] R^{1a} and R^{1b} are each an ethylene group,
[1147] R^{2a} and R^{2b} are each a trimethylene group,
[1148] Y^{a} and Y^{b} are each —CO—O—,
[1149] R^{3a} and R^{3b} are each a liposoluble vitamin residue (e.g., retinoic acid residue, tocopherol residue), and
[1150] R^{3a} is the same as R^{3b}.

[1151] In one embodiment,
[1152] X^{a} and X^{b} are each independently X²,
[1153] t is 2,
[1154] R^{1a} and R^{1b} are each independently an alkylene group having 1-6 carbon atoms,
[1155] R^{2a} and R^{2b} are each independently an alkylene group having 1-6 carbon atoms,
[1156] Y^{a} and Y^{b} are each an ester bond, and
[1157] R^{3a} and R^{3b} are each independently a liposoluble vitamin residue (e.g., retinoic acid residue, tocopherol residue) or an aliphatic hydrocarbon group having 12-22 carbon atoms (e.g., alkyl group having 12-22 carbon atoms).

[1158] In one embodiment,
[1159] X^{a} and X^{b} are each independently X²,
[1160] t is 2,
[1161] R^{1a} and R^{1b} are each independently an alkylene group having 1-6 carbon atoms,
[1162] R^{2a} and R^{2b} are each independently an alkylene group having 1-6 carbon atoms,
[1163] Y^{a} and Y^{b} are each an ester bond,
[1164] R^{3a} and R^{3b} are each independently a liposoluble vitamin residue (e.g., retinoic acid residue, tocopherol residue) or an aliphatic hydrocarbon group having 12-22 carbon atoms (e.g., alkyl group having 12-22 carbon atoms),
[1165] X^{a} is the same as X^{b},
[1166] R^{1a} is the same as R^{1b},
[1167] R^{2a} is the same as R^{2b}, and
[1168] R^{3a} is the same as R^{3b}.

[1169] In one embodiment,
[1170] X^{a} and X^{b} are each independently X²,
[1171] t is 2,
[1172] R^{1a} and R^{1b} are each an ethylene group,
[1173] R^{2a} and R^{2b} are each independently an alkylene group having 1-6 carbon atoms,
[1174] Y^{a} and Y^{b} are each an ester bond,
[1175] R^{3a} and R^{3b} are each independently a liposoluble vitamin residue (e.g., retinoic acid residue, tocopherol residue) or an aliphatic hydrocarbon group having 12-22 carbon atoms (e.g., alkyl group having 12-22 carbon atoms),
[1176] X^{a} is the same as X^{b},
[1177] R^{2a} is the same as R^{2b}, and
[1178] R^{3a} is the same as R^{3b}.

[1179] In some embodiments, an ionizable lipid has one of the structures set forth in Table 15b below.

TABLE 15b

| Number | Structure |
|---|---|
| 1 | [chemical structure] |
| 2 | [chemical structure] |
| 3 | [chemical structure] |
| 4 | [chemical structure] |
| 5 | [chemical structure] |
| 6 | [chemical structure] |
| 7 | [chemical structure] |
| 8 | [chemical structure] |
| 9 | [chemical structure] |
| 10 | [chemical structure] |
| 11 | [chemical structure] |
| 12 | [chemical structure] |
| 13 | [chemical structure] |
| 14 | [chemical structure] |
| 15 | [chemical structure] |

[1180] A lipid of the present invention may have an S—S(disulfide) bond. The production method for such a compound includes, for example, a method including producing

R^{3a}—(Y^{a}R^{2a})n^{a}—X^{a}—R^{1a}—SH, and

R^{3b}—(Y^{b}—R^{2b})n^{b}—X^{b}—R^{1b}—SH, and

subjecting them to oxidation (coupling) to give a compound containing —S—S—, a method including sequentially bonding necessary parts to a compound containing an —S—S— bond to finally obtain the compound of the present invention and the like. Preferred is the latter method.

[1181] A specific example of the latter method is shown below, which is not to be construed as limiting.

[1182] Examples of the starting compound include —S—S— bond-containing two terminal carboxylic acid, two terminal carboxylate, two terminal amine, two terminal isocyanate, two terminal alcohol, two terminal alcohol having a leaving group such as MsO (mesylate group) and the like, a two terminal carbonate having a leaving group such as pNP (p-nitrophenylcarbonate group) and the like.

[1183] For example, when a compound containing X¹ or X² for X^{a} and X^{b} is produced, two terminal functional groups of compound (1) containing an —S—S— bond are reacted with an —NH— group in compound (2) having the —NH— group and one functional group at the terminal, the functional group at the terminal in compound (2) which did not contribute to the reaction is reacted with a functional group in compound (3) containing R³, whereby the compound of the present invention containing an —S—S— bond, R^{1a} and R^{1b}, X^{a} and X^{b}, R^{2a} and R^{2b}, Y^{a} and Y^{b}, and R^{3a} and R^{3b} can be obtained.

[1184] In the reaction of compound (1) and compound (2), an alkali catalyst such as potassium carbonate, sodium carbonate, potassium t-butoxide and the like may be used as a catalyst, or the reaction may be performed without a catalyst. Preferably, potassium carbonate or sodium carbonate is used as a catalyst.

[1185] The amount of catalyst is 0.1-100 molar equivalents, preferably, 0.1-20 molar equivalents, more preferably 0.1-5 molar equivalents, relative to compound (1). The amount of compound (2) to be charged is 1-50 molar equivalents, preferably 1-10 molar equivalents, relative to compound (1).

[1186] The solvent to be used for the reaction of compound (1) and compound (2) is not particularly limited as long as it is a solvent or aqueous solution that does not inhibit the reaction. For example, ethyl acetate, dichloromethane, chloroform, benzene, toluene and the like can be mentioned. Among these, toluene and chloroform are preferable.

[1187] The reaction temperature is −20 to 200° C., preferably 0 to 800° C., more preferably 20 to 50° C., and the reaction time is 1-48 hr, preferably 2-24 hr.

[1188] When the reaction product of compound (1) and compound (2) is reacted with compound (3), an alkali catalyst such as potassium carbonate, sodium carbonate, potassium t-butoxide and the like, or an acid catalyst such as PTS (p-toluenesulfonic acid), MSA (methanesulfonic acid) and the like may be used, like the catalyst used for the reaction of compound (1) and compound (2), or the reaction may be performed without a catalyst.

[1189] In addition, the reaction product of compound (1) and compound (2) may be directly reacted with compound (3) by using a condensing agent such as DCC (dicyclohexylcarbodiimide), DIC (diisopropylcarbodiimide), EDC (1-ethyl-3-(3-dimethylaminopropyl)carbodiimide hydrochloride) and the like. Alternatively, compound (3) may be treated with a condensing agent to be once converted to an anhydride and the like, after which it is reacted with the reaction product of compound (1) and compound (2).

[1190] The amount of compound (3) to be charged is 1-50 molar equivalents, preferably 1-10 molar equivalents, relative to the reaction product of compound (1) and compound (2).

[1191] The catalyst to be used is appropriately selected according to the functional groups to be reacted.

[1192] The amount of catalyst is 0.05-100 molar equivalents, preferably 0.1-20 molar equivalents, more preferably 0.2-5 molar equivalent, relative to compound (1).

[1193] The solvent to be used for the reaction of the reaction product of compound (1) and compound (2) with compound (3) is not particularly limited as long as it is a solvent or aqueous solution that does not inhibit the reaction. For example, ethyl acetate, dichloromethane, chloroform, benzene, toluene and the like can be mentioned. Among these, toluene and chloroform are preferable.

[1194] The reaction temperature is 0 to 200° C., preferably 0 to 120° C., more preferably 20 to 50° C., and the reaction time is 1 hr-48 hr, preferably 2-24 hr.

[1195] The reaction product obtained by the above-mentioned reaction can be appropriately purified by a general purification method, for example, washing with water, silica gel column chromatography, crystallization, recrystallization, liquid-liquid extraction, reprecipitation, ion exchange column chromatography and the like.

c. Structure XXIII Lipids

[1196] In some embodiments, an ionizable lipid is described in U.S. Pat. No. 9,765,022.

[1197] The present invention provides a compound represented by structure (XXIII):

[chemical structure]

[1198] In structure XXIII, a hydrophilic and optionally positively charged head is

[chemical structure]

in which each of Rₐ, Rₐ′, Rₐ″, and Rₐ′″, independently, is H, a C₁-C₂₀ monovalent aliphatic radical, a C₁-C₂₀ monovalent heteroaliphatic radical, a monovalent aryl radical, or a monovalent heteroaryl radical, and Z is a C₁-C₂₀ bivalent aliphatic radical, a C₁-C₂₀ bivalent heteroaliphatic radical, a bivalent aryl radical, or a bivalent heteroaryl radical; B is a C₁-C₂₄ monovalent aliphatic radical, a C₁-C₂₄ monovalent heteroaliphatic radical, a monovalent aryl radical, a monovalent heteroaryl radical, or

[chemical structure]

each of R₁ and R₄, independently, is a bond, a C₁-C₁₀ bivalent aliphatic radical, a C₁-C₁₀ bivalent heteroaliphatic radical, a bivalent aryl radical, or a bivalent heteroaryl radical; each of R₂ and R₅, independently, is a bond, a C₁-C₂₀ bivalent aliphatic radical, a C₁-C₂₀ bivalent heteroaliphatic radical, a bivalent aryl radical, or a bivalent heteroaryl radical; each of R₃ and R₆, independently, is a C₁-C₂₀ monovalent aliphatic radical, a C₁-C₂₀ monovalent heteroaliphatic radical, a monovalent aryl radical, or a monovalent heteroaryl radical; each of

[chemical structure]

a hydrophobic tail, and

[chemical structure]

also a hydrophobic
tail has 8 to 24 carbon atoms; and each of X a linker and Y also a linker, independently, is

[chemical structure]

in which each of m, n, p, q, and t, independently, is 1-6; W is O, S, or NRₑ; each of L₁, L₃, L₅, L₇, and L₉, directly linked to R₁, R₂, R₄, or R₅, independently, is a bond, O, S, or NR_{d}; each of L₂, L₄, L₆, L₈, and L₁₀, independently, is a bond, O, S, or NRₑ; V is OR_{f}, SR_{g}, or NRₕRᵢ; and each of R_{b}, R_{c}, R_{d}, Rₑ, R_{f}, R_{g}, Rₕ, and Rᵢ, independently, is H, OH, C₁-C₁₀ oxyaliphatic radical, C₁-C₁₀ monovalent aliphatic radical, C₁-C₁₀ monovalent heteroaliphatic radical, a monovalent aryl radical, or a monovalent heteroaryl radical.

[1199] A subset of the above-described lipid-like compounds include those in which A is

[chemical structure]

each of Rₐ and Rₐ′, independently, being a C₁-C₁₀ monovalent monovalent aliphatic radical, a C₁-C₁₀ monovalent heteroaliphatic radical, a monovalent aryl radical, or a monovalent heteroaryl radical; and Z being a C₁-C₁₀ bivalent aliphatic radical, a C₁-C₁₀ bivalent heteroaliphatic radical, a bivalent aryl radical, or a bivalent heteroaryl radical.

[1200] Some lipid-like compounds of this invention feature each of R₁ and R₄, independently, being C₁-C₆ (e.g., C₁-C₄) bivalent aliphatic radical or a C₁-C₆ (e.g., C₁-C₄) bivalent heteroaliphatic radical, the total carbon number for R₂ and R₃ being 12-20 (e.g., 14-18), the total carbon number of R₅ and R₆ also being 12-20 (e.g., 14-18), and each of X and Y, independently, is

[chemical structure]

[1201] Specific examples of X and Y include

[chemical structure]

m being 2-6.

[1202] Still within the scope of this invention is a pharmaceutical composition containing a nanocomplex that is formed of a protein and a bioreducible compound. In this pharmaceutical composition, the nanocomplex has a particle size of 50 to 500 nm; the bioreducible compound contains a disulfide hydrophobic moiety, a hydrophilic moiety, and a linker joining the disulfide hydrophobic moiety and the hydrophilic moiety; and the protein binds to the bioreducible compound via a non-covalent interaction, a covalent bond, or both.

[1203] In certain embodiments, the disulfide hydrophobic moiety is a heteroaliphatic radical containing one or more —S—S— groups and 8 to 24 carbon atoms; the hydrophilic moiety is an aliphatic or heteroaliphatic radical containing one or more hydrophilic groups and 1-20 carbon atoms, each of the hydrophilic groups being amino, alkylamino, dialkylamino, trialkylamino, tetraalkylammonium, hydroxyamino, hydroxyl, carboxyl, carboxylate, carbamate, carbamide, carbonate, phosphate, phosphite, sulfate, sulfite, or thiosulfate; and the linker is 0, S, Si, C₁-C₆ alkylene,

[chemical structure]

in which the variables are defined above.

[1204] Specific examples of X and Y include O, S, Si, C₁-C₆ alkylene,

[chemical structure]

[1205] In some embodiments, a lipid-like compound of this invention, as shown instructure XXIII above, includes (i) a hydrophilic head, A; (ii) a hydrophobic tail, R₂—S—S—R₃; and (iii) a linker, X. Optionally, these compounds contain a second hydrophobic tail, R₅—S—S—R₆ and a second linker, Y.

[1206] The hydrophilic head of structure XXIII contains one or more hydrophilic functional groups, e.g., hydroxyl, carbonyl, carboxyl, amino, sulfhydryl, phosphate, amide, ester, ether, carbamate, carbonate, carbamide, and phosphodiester. These groups can form hydrogen bonds and are optionally positively or negatively charged.

[1207] Examples of the hydrophilic head include:

[chemical structure]

[chemical structure]

[chemical structure]

[chemical structure]

[1208] Other examples include those described in Akinc et al., Nature Biotechnology, 26, 561-69 (2008) and Mahon et al., US Patent Application Publication 2011/0293703.

[1209] The hydrophobic tail of structure XXIII is a saturated or unsaturated, linear or branched, acyclic or cyclic, aromatic or nonaromatic hydrocarbon moiety containing a disulfide bond and 8-24 carbon atoms. One or more of the carbon atoms can be replaced with a heteroatom, such as N, O, P, B, S, Si, Sb, A1, Sn, As, Se, and Ge. The tail is optionally substituted with one or more groups described above. The lipid-like compounds containing this disulfide bond can be bioreducible.

[1210] Examples include:

[chemical structure]

[1211] A linker of structure XXIII links the hydrophilic head and the hydrophobic tail. The linker can be any chemical group that is hydrophilic or hydrophobic, polar or non-polar, e.g., O, S, Si, amino, alkylene, ester, amide, carbamate, carbamide, carbonate, phosphate, phosphite, sulfate, sulfite, and thiosulfate. Examples include:

[chemical structure]

[1212] Shown below are exemplary lipid-like compounds of this invention:

[chemical structure]

[chemical structure]

[chemical structure]

[1213] The lipid-like compounds of structure XXIII can be prepared by methods well known the art. See Wang et al., ACS Synthetic Biology, 1, 403-07 (2012); Manoharan, et al., International Patent Application Publication WO 2008/042973; and Zugates et al., U.S. Pat. No. 8,071,082. The route shown below exemplifies synthesis of these lipid-like compounds:

[chemical structure]

[1214] Each of Lₐ, Lₐ′, L, and L′ can be one of L₁-L₁₀ each of Wₐ and W_{b}, independently, is W or V; and Rₐ and R₁-R₆ are defined above, as well as L₁-L₁₀, W, and V.

[1215] In this exemplary synthetic route, an amine compound, i.e., compound D, reacts with bromides E1 and E2 to form compound F, which is then coupled with both G¹ and G² to afford the final product, i.e., compound H. One or both of the double bonds in this compound (shown above) can be reduced to one or two single bonds to obtain different lipid-like compounds of structure XXIII.

[1216] Other lipid-like compounds of this invention can be prepared using other suitable starting materials through the above-described synthetic route and others known in the art. The method set forth above can include an additional step(s) to add or remove suitable protecting groups in order to ultimately allow synthesis of the lipid-like compounds. In addition, various synthetic steps can be performed in an alternate sequence or order to give the desired material. Synthetic chemistry transformations and protecting group methodologies (protection and deprotection) useful in synthesizing applicable lipid-like compounds are known in the art, including, for example, R. Larock, Comprehensive Organic Transformations (2nd Ed., VCH Publishers 1999); P. G. M. Wuts and T. W. Greene, Greene's Protective Groups in Organic Synthesis (4th Ed., John Wiley and Sons 2007); L. Fieser and M. Fieser, Fieser and Fieser's Reagents for Organic Synthesis (John Wiley and Sons 1994); and L. Paquette, ed., Encyclopedia of Reagents for Organic Synthesis (2nd ed., John Wiley and Sons 2009) and subsequent editions thereof. Certain lipid-like compounds may contain a non-aromatic double bond and one or more asymmetric centers. Thus, they can occur as racemates and racemic mixtures, single enantiomers, individual diastereomers, diastereomeric mixtures, and cis- or trans- isomeric forms. All such isomeric forms are contemplated.

[1217] As mentioned above, these lipid-like compounds are useful for delivery of pharmaceutical agents. They can be preliminarily screened for their efficacy in delivering pharmaceutical agents by an in vitro assay and then confirmed by animal experiments and clinic trials. Other methods will also be apparent to those of ordinary skill in the art.

[1218] Not to be bound by any theory, the lipid-like compounds of structure XXIII facilitate delivery of pharmaceutical agents by forming complexes, e.g., nanocomplexes and microparticles. The hydrophilic head of such a lipid-like compound, positively or negatively charged, binds to a moiety of a pharmaceutical agent that is oppositely charged and its hydrophobic moiety binds to a hydrophobic moiety of the pharmaceutical agent. Either binding can be covalent or non-covalent.

[1219] The above described complexes can be prepared using procedures described in publications such as Wang et al., ACS Synthetic Biology, 1, 403-07 (2012). Generally, they are obtained by incubating a lipid-like compound and a pharmaceutical agent in a buffer such as a sodium acetate buffer or a phosphate buffered saline (“PBS”).

i. Hydrophilic Groups

[1220] In certain embodiments, the selected hydrophilic functional group or moiety may alter or otherwise impart properties to the compound or to the transfer vehicle of which such compound is a component (e.g., by improving the transfection efficiencies of a lipid nanoparticle of which the compound is a component). For example, the incorporation of guanidinium as a hydrophilic head-group in the compounds disclosed herein may promote the fusogenicity of such compounds (or of the transfer vehicle of which such compounds are a component) with the cell membrane of one or more target cells, thereby enhancing, for example, the transfection efficiencies of such compounds. It has been hypothesized that the nitrogen from the hydrophilic guanidinium moiety forms a six-membered ring transition state which grants stability to the interaction and thus allows for cellular uptake of encapsulated materials. (Wender, et al., Adv. Drug Del. Rev. (2008) 60: 452-472.) Similarly, the incorporation of one or more amino groups or moieties into the disclosed compounds (e.g., as a head-group) may further promote disruption of the endosomal/lysosomal membrane of the target cell by exploiting the fusogenicity of such amino groups. This is based not only on the pKa of the amino group of the composition, but also on the ability of the amino group to undergo a hexagonal phase transition and fuse with the target cell surface, i.e. the vesicle membrane. (Koltover, et al. Science (1998) 281: 78-81.) The result is believed to promote the disruption of the vesicle membrane and release of the lipid nanoparticle contents into the target cell.

[1221] Similarly, in certain embodiments the incorporation of, for example, imidazole as a hydrophilic head-group in the compounds disclosed herein may serve to promote endosomal or lysosomal release of, for example, contents that are encapsulated in a transfer vehicle (e.g., lipid nanoparticle) of the invention. Such enhanced release may be achieved by one or both of a proton-sponge mediated disruption mechanism and/or an enhanced fusogenicity mechanism. The proton-sponge mechanism is based on the ability of a compound, and in particular a functional moiety or group of the compound, to buffer the acidification of the endosome. This may be manipulated or otherwise controlled by the pKa of the compound or of one or more of the functional groups comprising such compound (e.g., imidazole). Accordingly, in certain embodiments the fusogenicity of, for example, the imidazole-based compounds disclosed herein (e.g., HGT4001 and HGT4004) are related to the endosomal disruption properties, which are facilitated by such imidazole groups, which have a lower pKa relative to other traditional ionizable lipids. Such endosomal disruption properties in turn promote osmotic swelling and the disruption of the liposomal membrane, followed by the transfection or intracellular release of the polynucleotide materials loaded or encapsulated therein into the target cell. This phenomenon can be applicable to a variety of compounds with desirable pKa profiles in addition to an imidazole moiety. Such embodiments also include multi-nitrogen based functionalities such as polyamines, poly-peptide (histidine), and nitrogen-based dendritic structures.

[1222] Exemplary ionizable and/or cationic lipids are described in International PCT patent publications WO2015/095340, WO2015/199952, WO2018/011633, WO2017/049245, WO2015/061467, WO2012/040184, WO2012/000104, WO2015/074085, WO2016/081029, WO2017/004 143, WO2017/075531, WO2017/117528, WO2011/022460, WO2013/148541, WO2013/116126, WO2011/153120, WO2012/044638, WO2012/054365, WO2011/090965, WO2013/016058, WO2012/162210, WO2008/042973, WO2010/129709, WO2010/144740, WO2012/099755, WO2013/049328, WO2013/086322, WO2013/086373, WO2011/071860, WO2009/132131, WO2010/048536, WO2010/088537, WO2010/054401, WO2010/054406, WO2010/054405, WO2010/054384, WO2012/016184, WO2009/086558, WO2010/042877, WO2011/000106, WO2011/000107, WO2005/120152, WO2011/141705, WO2013/126803, WO2006/007712, WO2011/038160, WO2005/121348, WO2011/066651, WO2009/127060, WO2011/141704, WO2006/069782, WO2012/031043, WO2013/006825, WO2013/033563, WO2013/089151, WO2017/099823, WO2015/095346, and WO2013/086354, and US patent publications US2016/0311759, US2015/0376115, US2016/0151284, US2017/0210697, US2015/0140070, US2013/0178541, US2013/0303587, US2015/0141678, US2015/0239926, US2016/0376224, US2017/0119904, US2012/0149894, US2015/0057373, US2013/0090372, US2013/0274523, US2013/0274504, US2013/0274504, US2009/0023673, US2012/0128760, US2010/0324120, US2014/0200257, US2015/0203446, US2018/0005363, US2014/0308304, US2013/0338210, US2012/0101148, US2012/0027796, US2012/0058144, US2013/0323269, US2011/0117125, US2011/0256175, US2012/0202871, US2011/0076335, US2006/0083780, US2013/0123338, US2015/0064242, US2006/0051405, US2013/0065939, US2006/0008910, US2003/0022649, US2010/0130588, US2013/0116307, US2010/0062967, US2013/0202684, US2014/0141070, US2014/0255472, US2014/0039032, US2018/0028664, US2016/0317458, and US2013/0195920, the contents of all of which are incorporated herein by reference in their entirety. International patent application WO 2019/131770 is also incorporated herein by reference in its entirety.

### B. Stabilizing Lipids

[1223] A stabilizing lipid or surface stabilizing lipid may be used to enhance the structure of the LNP. A stabilizing lipid as contemplated herein may be a polyethylene glycol (PEG)-modified phospholipid. The use and inclusion of polyethylene glycol (PEG)-modified phospholipids and derivatized lipids such as derivatized ceramides (PEG-CER), including N-Octanoyl-Sphingosine-1-[Succinyl(Methoxy Polyethylene Glycol)-2000](C8 PEG-2000 ceramide) in the liposomal and pharmaceutical compositions described herein is contemplated, preferably in combination with one or more of the compounds and lipids disclosed herein. Contemplated PEG-modified lipids include, but are not limited to, a polyethylene glycol chain of up to 5 kDa in length covalently attached to a lipid with alkyl chain(s) of C6-C20 length. In some embodiments, the PEG-modified lipid employed in the compositions and methods of the invention is 1,2-dimyristoyl-sn-glycerol, methoxypolyethylene Glycol (2000 MW PEG) “DMG-PEG2000.” The addition of PEG-modified lipids to the lipid delivery vehicle may prevent complex aggregation and may also provide a means for increasing circulation lifetime and increasing the delivery of the lipid-polynucleotide composition to the target tissues, (Klibanov et al. (1990) FEBS Letters, 268 (1): 235-237), or they may be selected to rapidly exchange out of the formulation in vivo (see U.S. Pat. No. 5,885,613). Particularly useful exchangeable lipids are PEG-ceramides having shorter acyl chains (e.g., C14 or C18). The PEG-modified phospholipid and derivatized lipids of the present invention may comprise a molar ratio from about 0% to about 20%, about 0.5% to about 20%, about 1% to about 15%, about 4% to about 10%, or about 2% of the total lipid present in a liposomal lipid nanoparticle.

[1224] In an embodiment, a PEG-modified lipid is described in International Pat. Appl. No. PCT/US2019/015913, which is incorporated herein by reference in their entirety. In an embodiment, a transfer vehicle comprises one or more PEG-modified lipids.

[1225] Non-limiting examples of PEG-modified lipids include PEG-modified phosphatidylethanolamines and phosphatidic acids, PEG-ceramide conjugates (e.g., PEG-CerC14 or PEG-CerC20), PEG-modified dialkylamines and PEG-modified 1,2-diacyloxypropan-3-amines. In some further enbodiments, a PEG-modified lipid may be, e.g., PEG-c-DOMG, PEG-DMG, PEG-DLPE, PEG-DMPE, PEG-DPPC, or a PEG-DSPE.

[1226] In some still further embodiments, the PEG-modified lipid includes, but is not limited to 1,2-dimyristoyl-sn-glycerol methoxypolyethylene glycol (PEG-DMG), 1,2-distearoyl-sn-glycero-3-phosphoethanolamine-N-[amino(polyethylene glycol)](PEG-DSPE), PEG-disteryl glycerol (PEG-DSG), PEG-dipalmetoleyl, PEG-dioleyl, PEG-distearyl, PEG-diacylglycamide (PEG-DAG), PEG-dipalmitoyl phosphatidylethanolamine (PEG-DPPE), or PEG-1,2-dimyristyloxlpropyl-3-amine (PEG-c-DMA).

[1227] In various embodiments, a PEG-modified lipid may also be referred to as “PEGylated lipid” or “PEG-lipid.”

[1228] In one embodiment, the PEG-lipid is selected from the group consisting of a PEG-modified phosphatidylethanolamine, a PEG-modified phosphatidic acid, a PEG-modified ceramide, a PEG-modified dialkylamine, a PEG-modified diacylglycerol, a PEG-modified dialkylglycerol, and mixtures thereof.

[1229] In some embodiments, the lipid moiety of the PEG-lipids includes those having lengths of from about C₁₄ to about C₂₂, such as from about C₁₄ to about C₁₆. In some embodiments, a PEG moiety, for example a mPEG-NH₂, has a size of about 1000, about 2000, about 5000, about 10,000, about 15,000 or about 20,000 daltons. In one embodiment, the PEG-lipid is PEG2k-DMG.

[1230] In one embodiment, the lipid nanoparticles described herein can comprise a lipid modified with a non-diffusible PEG. Non-limiting examples of non-diffusible PEGs include PEG-DSG and PEG-DSPE.

[1231] PEG-lipids are known in the art, such as those described in U.S. Pat. No. 8,158,601 and International Pat. Publ. No. WO2015/130584 A2, which are incorporated herein by reference in their entirety.

[1232] In various embodiments, lipids (e.g., PEG-lipids), described herein may be synthesized as described International Pat. Publ. No. PCT/US2016/000129, which is incorporated by reference in its entirety.

[1233] The lipid component of a lipid nanoparticle composition may include one or more molecules comprising polyethylene glycol, such as PEG or PEG-modified lipids. Such species may be alternately referred to as PEGylated lipids. A PEG lipid is a lipid modified with polyethylene glycol. A PEG lipid may be selected from the non-limiting group including PEG-modified phosphatidylethanolamines, PEG-modified phosphatidic acids, PEG-modified ceramides, PEG-modified dialkylamines, PEG-modified diacylglycerols, PEG-modified dialkylglycerols, and mixtures thereof. For example, a PEG lipid may be PEG-c-DOMG, PEG-DMG, PEG-DLPE, PEG-DMPE, PEG-DPPC, or a PEG-DSPE lipid.

[1234] In some embodiments the PEG-modified lipids are a modified form of PEG-DMG. PEG-DMG has the following structure:

[chemical structure]

[1235] In some embodiments the PEG-modified lipids are a modified form of PEG-C18, or PEG-1. PEG-1 has the following structure

[chemical structure]

[1236] In one embodiment, PEG lipids useful in the present invention can be PEGylated lipids described in International Publication No. WO2012099755, the contents of which is herein incorporated by reference in its entirety. Any of these exemplary PEG lipids described herein may be modified to comprise a hydroxyl group on the PEG chain. In certain embodiments, the PEG lipid is a PEG-OH lipid. In certain embodiments, the PEG-OH lipid includes one or more hydroxyl groups on the PEG chain. In certain embodiments, a PEG-OH or hydroxy-PEGylated lipid comprises an —OH group at the terminus of the PEG chain. Each possibility represents a separate embodiment of the present invention.

[1237] In some embodiments, the PEG lipid is a compound of Formula (P1):

[chemical structure]

[1238] or a salt or isomer thereof, wherein:
[1239] r is an integer between 1 and 100;
[1240] R is C₁₀₋₄₀ alkyl, C₁₀₋₄₀ alkenyl, or C₁₀₋₄₀ alkynyl; and optionally one or more methylene groups of
[1241] R are independently replaced with C₃₋₁₀ carbocyclylene, 4 to 10 membered heterocyclylene, C₆₋₁₀ arylene, 4 to 10 membered heteroarylene, —N(R_{N})—, —O—, —S—, —C(O)—, —C(O)N(R^{N})—, —NR^{N}C(O)—, —NR^{N}C(O)N(R^{N})—, —C(O)O—, —OC(O)—, —OC(O)O—, —OC(O)N(R^{N})—, —NR^{N}C)—, —C(O)S—, —SC(O)—, —C(═NR^{N})—, —C(═NR^{N})N(R^{N})—, —NR^{N}C(═NR^{N})—, —NR^{N}C(═NR^{N})N(R^{N}) C(S)—, —C(S)N(R^{N})—, —NR^{N}C(S)—, —NR^{N}C(S)N(R^{N})—, —S(O)—, —OS(O)—, —S(O)O—, —OS(O)O—, —OS(O)₂—, —S(O)₂O—, —OS(O)₂O—, —N(R^{N})S(O)—, —S(O)N(R^{N})—, —N(R^{N})S(O)N(R^{N})—, —OS(O)N(R^{N})—, —N(R^{N})S(O)O—, —S(O)₂—, —N(R^{N})S(O)₂—, —S(O)₂N(R^{N})—, —N(R^{N})S(O)₂N(R^{N})—, —OS(O)₂N(R^{N})—, or —N(R^{N})S(O)₂O—; and
[1242] each instance of R^{N} is independently hydrogen, C₁₋₆ alkyl, or a nitrogen protecting group.

[1243] For example, R is C₁₇ alkyl. For example, the PEG lipid is a compound of Formula (P1-a):

[chemical structure]

[1244] or a salt or isomer thereof, wherein r is an integer between 1 and 100.

[1245] For example, the PEG lipid is a compound of the following formula:

[chemical structure]

### C. Helper Lipids

[1246] In some embodiments, the transfer vehicle (e.g., LNP) described herein comprises one or more non-cationic helper lipids. In some embodiments, the helper lipid is a phospholipid. In some embodiments, the helper lipid is a phospholipid substitute or replacement. In some embodiments, the phospholipid or phospholipid substitute can be, for example, one or more saturated or (poly)unsaturated phospholipids, or phospholipid substitutes, or a combination thereof. In general, phospholipids comprise a phospholipid moiety and one or more fatty acid moieties.

[1247] A phospholipid moiety can be selected, for example, from the non-limiting group consisting of phosphatidyl choline, phosphatidyl ethanolamine, phosphatidyl glycerol, phosphatidyl serine, phosphatidic acid, 2-lysophosphatidyl choline, and a sphingomyelin.

[1248] A fatty acid moiety can be selected, for example, from the non-limiting group consisting of lauric acid, myristic acid, myristoleic acid, palmitic acid, palmitoleic acid, stearic acid, oleic acid, linoleic acid, alpha-linolenic acid, erucic acid, phytanoic acid, arachidic acid, arachidonic acid, eicosapentaenoic acid, behenic acid, docosapentaenoic acid, and docosahexaenoic acid.

[1249] Phospholipids include, but are not limited to, glycerophospholipids such as phosphatidylcholines, phosphatidylethanolamines, phosphatidylserines, phosphatidylinositols, phosphatidy glycerols, and phosphatidic acids. Phospholipids also include phosphosphingolipid, such as sphingomyelin.

[1250] In some embodiments, the helper lipid is a 1,2-distearoyl-177-glycero-3-phosphocholine (DSPC) analog, a DSPC substitute, oleic acid, or an oleic acid analog.

[1251] In some embodiments, a helper lipid is a non-phosphatidyl choline (PC) zwitterionic lipid, a DSPC analog, oleic acid, an oleic acid analog, or a DSPC substitute.

[1252] In some embodiments, a helper lipid is described in PCT/US2018/053569. Helper lipids suitable for use in a lipid composition of the disclosure include, for example, a variety of neutral, uncharged or zwitterionic lipids. Such helper lipids are preferably used in combination with one or more of the compounds and lipids disclosed herein. Examples of helper lipids include, but are not limited to, 5-heptadecylbenzene-1,3-diol (resorcinol), dipalmitoylphosphatidylcholine (DPPC), distearoylphosphatidylcholine (DSPC), pohsphocholine (DOPC), dimyristoylphosphatidylcholine (DMPC), phosphatidylcholine (PLPC), 1,2-distearoylsn-glycero-3-phosphocholine (DAPC), phosphatidylethanolamine (PE), egg phosphatidylcholine (EPC), dilauryloylphosphatidylcholine (DLPC), dimyristoylphosphatidylcholine (DMPC), 1-myristoyl-2-palmitoyl phosphatidylcholine (MPPC), 1-paimitoyl-2-myristoyl phosphatidylcholine (PMPC), 1-palmitoyl-2-stearoyl phosphatidylcholine (PSPC), 1,2-diarachidoyl-sn-glycero-3-phosphocholine (DBPC), 1-stearoyl-2-palmitoyl phosphatidylcholine (SPPC), 1,2-dieicosenoyl-sn-glycero-3-phosphocholine (DEPC), paimitoyioieoyl phosphatidylcholine (POPC), lysophosphatidyl choline, dioleoyl phosphatidylethanol amine (DOPE) dilinoleoylphosphatidylcholine distearoylphosphatidylethanolamine (DSPE), dimyristoyl phosphatidylethanolamine (DMPE), dipalmitoyl phosphatidylethanolamine (DPPE), palmitoyloleoyl phosphatidylethanolamine (POPE), lysophosphatidylethanolamine and combinations thereof. In one embodiment, the helper lipid may be distearoylphosphatidylcholine (DSPC) or dimyristoyl phosphatidyl ethanolamine (DMPE). In another embodiment, the helper lipid may be distearoylphosphatidylcholine (DSPC). Helper lipids function to stabilize and improve processing of the transfer vehicles. Such helper lipids are preferably used in combination with other excipients, for example, one or more of the ionizable lipids disclosed herein. In some embodiments, when used in combination with an ionizable lipid, the helper lipid may comprise a molar ratio of 5% to about 90%, or about 10% to about 70% of the total lipid present in the lipid nanoparticle.

### D. Structural Lipids

[1253] In an embodiment, a structural lipid is described in international patent application PCT/US2019/015913.

[1254] The transfer vehicles described herein comprise one or more structural lipids. Incorporation of structural lipids in the lipid nanoparticle may help mitigate aggregation of other lipids in the particle. Structural lipids can include, but are not limited to, cholesterol, fecosterol, ergosterol, bassicasterol, tomatidine, tomatine, ursolic, alpha-tocopherol, and mixtures thereof. In certain embodiments, the structural lipid is cholesterol. In certain embodiments, the structural lipid includes cholesterol and a corticosteroid (such as, for example, prednisolone, dexamethasone, prednisone, and hydrocortisone), or a combination thereof.

[1255] In some embodiments, the structural lipid is a sterol. In certain embodiments, the structural lipid is a steroid. In certain embodiments, the structural lipid is cholesterol. In certain embodiments, the structural lipid is an analog of cholesterol. In certain embodiments, the structural lipid is alpha-tocopherol.

[1256] The transfer vehicles described herein comprise one or more structural lipids. Incorporation of structural lipids in a transfer vehicle, e.g., a lipid nanoparticle, may help mitigate aggregation of other lipids in the particle. In certain embodiments, the structural lipid includes cholesterol and a corticosteroid (such as, for example, prednisolone, dexamethasone, prednisone, and hydrocortisone), or a combination thereof.

[1257] In some embodiments, the structural lipid is a sterol. Structural lipids can include, but are not limited to, sterols (e.g., phytosterols or zoosterols).

[1258] In certain embodiments, the structural lipid is a steroid. For example, sterols can include, but are not limited to, cholesterol, P-sitosterol, fecosterol, ergosterol, sitosterol, campesterol, stigmasterol, brassicasterol, ergosterol, tomatidine, tomatine, ursolic acid, or alpha-tocopherol.

[1259] In some embodiments, a transfer vehicle includes an effective amount of an immune cell delivery potentiating lipid, e.g., a cholesterol analog or an amino lipid or combination thereof, that, when present in a transfer vehicle, e.g., an lipid nanoparticle, may function by enhancing cellular association and/or uptake, internalization, intracellular trafficking and/or processing, and/or endosomal escape and/or may enhance recognition by and/or binding to immune cells, relative to a transfer vehicle lacking the immune cell delivery potentiating lipid. Accordingly, while not intending to be bound by any particular mechanism or theory, in one embodiment, a structural lipid or other immune cell delivery potentiating lipid of the disclosure binds to Clq or promotes the binding of a transfer vehicle comprising such lipid to Clq. Thus, for in vitro use of the transfer vehicles of the disclosure for delivery of a nucleic acid molecule to an immune cell, culture conditions that include Clq are used (e.g., use of culture media that includes serum or addition of exogenous Clq to serum-free media). For in vivo use of the transfer vehicles of the disclosure, the requirement for Clq is supplied by endogenous Clq.

[1260] In certain embodiments, the structural lipid is cholesterol. In certain embodiments, the structural lipid is an analog of cholesterol. In some embodiments, the structural lipid is a lipid in Table 16:

TABLE 16

| CMPD | |
|---|---|
| No. S- | Structure |
| 1 | [chemical structure] |
| 22 | [chemical structure] |
| 2 | [chemical structure] |
| 23 | [chemical structure] |
| 3 | [chemical structure] |
| 24 | [chemical structure] |
| 4 | [chemical structure] |
| 25 | [chemical structure] |
| 5 | [chemical structure] |
| 26 | [chemical structure] |
| 6 | [chemical structure] |
| 27 | [chemical structure] |
| 7 | [chemical structure] |
| 28 | [chemical structure] |
| 8 | [chemical structure] |
| 29 | [chemical structure] |
| 9 | [chemical structure] |
| 30 | [chemical structure] |
| 10 | [chemical structure] |
| 31 | [chemical structure] |
| 11 | [chemical structure] |
| 32 | [chemical structure] |
| 12 | [chemical structure] |
| 33 | [chemical structure] |
| 13 | [chemical structure] |
| 34 | [chemical structure] |
| 14 | [chemical structure] |
| 35 | [chemical structure] |
| 15 | [chemical structure] |
| 36 | [chemical structure] |
| 16 | [chemical structure] |
| 37 | [chemical structure] |
| 17 | [chemical structure] |
| 38 | [chemical structure] |
| 18 | [chemical structure] |
| 39 | [chemical structure] |
| 19 | [chemical structure] |
| 40 | [chemical structure] |
| 20 | [chemical structure] |
| 41 | [chemical structure] |
| 21 | [chemical structure] |
| 42 | [chemical structure] |
| 150 | [chemical structure] |
| 165 | [chemical structure] |
| 154 | [chemical structure] |
| 169 | [chemical structure] |
| 162 | [chemical structure] |
| 170 | [chemical structure] |
| 163 | [chemical structure] |
| 171 | [chemical structure] |
| 164 | [chemical structure] |
| 172 | [chemical structure] |
| 184 | [chemical structure] |
| 43 | [chemical structure] |
| 47 | [chemical structure] |
| 44 | [chemical structure] |
| 48 | [chemical structure] |
| 45 | [chemical structure] |
| 49 | [chemical structure] |
| 46 | [chemical structure] |
| 50 | [chemical structure] |
| 175 | [chemical structure] |
| 177 | [chemical structure] |
| 176 | [chemical structure] |
| 178 | [chemical structure] |
| 51 | [chemical structure] |
| 60 | [chemical structure] |
| 52 | [chemical structure] |
| 61 | [chemical structure] |
| 53 | [chemical structure] |
| 62 | [chemical structure] |
| 54 | [chemical structure] |
| 63 | [chemical structure] |
| 55 | [chemical structure] |
| 64 | [chemical structure] |
| 56 | [chemical structure] |
| 65 | [chemical structure] |
| 57 | [chemical structure] |
| 66 | [chemical structure] |
| 58 | [chemical structure] |
| 67 | [chemical structure] |
| 59 | [chemical structure] |
| 149 | [chemical structure] |
| 153 | [chemical structure] |
| 68 | [chemical structure] |
| 71 | [chemical structure] |
| 69 | [chemical structure] |
| 72 | [chemical structure] |
| 70 | [chemical structure] |
| 73 | [chemical structure] |
| 74 | [chemical structure] |
| 77 | [chemical structure] |
| 75 | [chemical structure] |
| 78 | [chemical structure] |
| 76 | [chemical structure] |
| 79 | [chemical structure] |
| 80 | [chemical structure] |
| 81 | [chemical structure] |
| 85 | [chemical structure] |
| 82 | [chemical structure] |
| 86 | [chemical structure] |
| 83 | [chemical structure] |
| 87 | [chemical structure] |
| 84 | [chemical structure] |
| 152 | [chemical structure] |
| 157 | [chemical structure] |
| 88 | [chemical structure] |
| 93 | [chemical structure] |
| 89 | [chemical structure] |
| 94 | [chemical structure] |
| 90 | [chemical structure] |
| 95 | [chemical structure] |
| 91 | [chemical structure] |
| 96 | [chemical structure] |
| 92 | [chemical structure] |
| 97 | [chemical structure] |
| 98 | [chemical structure] |
| 102 | [chemical structure] |
| 99 | [chemical structure] |
| 103 | [chemical structure] |
| 100 | [chemical structure] |
| 104 | [chemical structure] |
| 101 | [chemical structure] |
| 105 | [chemical structure] |
| 180 | [chemical structure] |
| 182 | [chemical structure] |
| 181 | [chemical structure] |
| 106 | [chemical structure] |
| 107 | [chemical structure] |
| 108 | [chemical structure] |
| 109 | [chemical structure] |
| 110 | [chemical structure] |
| 121 | [chemical structure] |
| 111 | [chemical structure] |
| 122 | [chemical structure] |
| 112 | [chemical structure] |
| 123 | [chemical structure] |
| 113 | [chemical structure] |
| 124 | [chemical structure] |
| 114 | [chemical structure] |
| 125 | [chemical structure] |
| 115 | [chemical structure] |
| 126 | [chemical structure] |
| 116 | [chemical structure] |
| 127 | [chemical structure] |
| 117 | [chemical structure] |
| 128 | [chemical structure] |
| 118 | [chemical structure] |
| 129 | [chemical structure] |
| 119 | [chemical structure] |
| 130 | [chemical structure] |
| 120 | [chemical structure] |
| 155 | [chemical structure] |
| 156 | [chemical structure] |
| 167 | [chemical structure] |
| 158 | [chemical structure] |
| 168 | [chemical structure] |
| 160 | [chemical structure] |
| 173 | [chemical structure] |
| 161 | [chemical structure] |
| 174 | [chemical structure] |
| 166 | [chemical structure] |
| 179 | [chemical structure] |
| 131 | [chemical structure] |
| 133 | [chemical structure] |
| 132 | [chemical structure] |
| 134 | [chemical structure] |
| 142 | [chemical structure] |
| 135 | [chemical structure] |
| 143 | [chemical structure] |
| 136 | [chemical structure] |
| 144 | [chemical structure] |
| 137 | [chemical structure] |
| 145 | [chemical structure] |
| 138 | [chemical structure] |
| 146 | [chemical structure] |
| 139 | [chemical structure] |
| 147 | [chemical structure] |
| 140 | [chemical structure] |
| 148 | [chemical structure] |
| 141 | [chemical structure] |
| 151 | [chemical structure] |
| 159 | [chemical structure] |
| Composition | |
| S- No. | Structure |
| 183 | [chemical structure] |
| | [chemical structure] |
| | [chemical structure] |
| | [chemical structure] |

### E. Lipid Nanoparticle (Lnp) Formula Tions

[1261] In various embodiments, lipid nanoparticles (LNPs) may be used as a transfer vehicle to deliver a disclosed circular RNA (e.g., to one or more target cells).

[1262] The formation of a lipid nanoparticle (LNP) described herein may be accomplished by any methods known in the art. For example, as described in U.S. Pat. Pub. No. US2012/0178702 A1, which is incorporated herein by reference in its entirety. Non-limiting examples of lipid nanoparticle compositions and methods of making them are described, for example, in Semple et al. (2010) Nat. Biotechnol. 28:172-176; Jayarama et al. (2012), Angew. Chem. Int. Ed., 51:8529-8533; and Maier et al. (2013) Molecular Therapy 21, 1570-1578 (the contents of each of which are incorporated herein by reference in their entirety).

[1263] In one embodiment, the LNP formulation may be prepared by, e.g., the methods described in International Pat. Pub. No. WO 2011/127255 or WO 2008/103276, the contents of each of which are herein incorporated by reference in their entirety.

[1264] In one embodiment, LNP formulations described herein may comprise a polycationic composition. As a non-limiting example, the polycationic composition may be a composition selected from Formulae 1-60 of U.S. Pat. Pub. No. US2005/0222064 A1, the content of which is herein incorporated by reference in its entirety.

[1265] In one embodiment, the lipid nanoparticle may be formulated by the methods described in U.S. Pat. Pub. No. US2013/0156845 A1, and International Pat. Pub. No. WO2013/093648 A2 or WO2012/024526 A2, each of which is herein incorporated by reference in its entirety.

[1266] In one embodiment, the lipid nanoparticles described herein may be made in a sterile environment by the system and/or methods described in U.S. Pat. Pub. No. US2013/0164400 A1, which is incorporated herein by reference in its entirety.

[1267] In one embodiment, the LNP formulation may be formulated in a nanoparticle such as a nucleic acid-lipid particle described in U.S. Pat. No. 8,492,359, which is incorporated herein by reference in its entirety.

[1268] A nanoparticle composition may optionally comprise one or more coatings. For example, a nanoparticle composition may be formulated in a capsule, film, or tablet having a coating. A capsule, film, or tablet including a composition described herein may have any useful size, tensile strength, hardness, or density.

[1269] In some embodiments, the lipid nanoparticles described herein may be synthesized using methods comprising microfluidic mixers. Exemplary microfluidic mixers may include, but are not limited to, a slit interdigitial micromixer including, but not limited to, those manufactured by Precision Nanosystems (Vancouver, BC, Canada), Microinnova (Allerheiligen bei Wildon, Austria) and/or a staggered herringbone micromixer (SHM) (Zhigaltsev, I. V. et al. (2012) Langmuir. 28:3633-40; Belliveau, N. M. et al. Mol. Ther. Nucleic. Acids. (2012) 1:e37; Chen, D. et al. J. Am. Chem. Soc. (2012) 134(16):6948-51; each of which is herein incorporated by reference in its entirety).

[1270] In some embodiments, methods of LNP generation comprising SHM, further comprise the mixing of at least two input streams wherein mixing occurs by microstructure-induced chaotic advection (MICA). According to this method, fluid streams flow through channels present in a herringbone pattern causing rotational flow and folding the fluids around each other. This method may also comprise a surface for fluid mixing wherein the surface changes orientations during fluid cycling. Methods of generating LNPs using SHM include those disclosed in U.S. Pat. Pub. Nos. US2004/0262223 A1 and US2012/0276209 A1, each of which is incorporated herein by reference in their entirety.

[1271] In one embodiment, the lipid nanoparticles may be formulated using a micromixer such as, but not limited to, a Slit Interdigital Microstructured Mixer (SIMM-V2) or a Standard Slit Interdigital Micro Mixer (SSIMM) or Caterpillar (CPMM) or Impinging-jet (IJMM) from the Institut fur Mikrotechnik Mainz GmbH, Mainz Germany). In one embodiment, the lipid nanoparticles are created using microfluidic technology (see, Whitesides (2006) Nature. 442: 368-373; and Abraham et al. (2002) Science. 295: 647-651; each of which is herein incorporated by reference in its entirety). As a non-limiting example, controlled microfluidic formulation includes a passive method for mixing streams of steady pressure-driven flows in micro channels at a low Reynolds number (see, e.g., Abraham et al. (2002) Science. 295: 647651; which is herein incorporated by reference in its entirety).

[1272] In one embodiment, the circRNA of the present invention may be formulated in lipid nanoparticles created using a micromixer chip such as, but not limited to, those from Harvard Apparatus (Holliston, MA), Dolomite Microfluidics (Royston, UK), or Precision Nanosystems (Van Couver, BC, Canada). A micromixer chip can be used for rapid mixing of two or more fluid streams with a split and recombine mechanism.

[1273] In one embodiment, the lipid nanoparticles may have a diameter from about 10 to about 100 nm such as, but not limited to, about 10 to about 20 nm, about 10 to about 30 nm, about 10 to about 40 nm, about 10 to about 50 nm, about 10 to about 60 nm, about 10 to about 70 nm, about 10 to about 80 nm, about 10 to about 90 nm, about 20 to about 30 nm, about 20 to about 40 nm, about 20 to about 50 nm, about 20 to about 60 nm, about 20 to about 70 nm, about 20 to about 80 nm, about 20 to about 90 nm, about 20 to about 100 nm, about 30 to about 40 nm, about 30 to about 50 nm, about 30 to about 60 nm, about 30 to about 70 nm, about 30 to about 80 nm, about 30 to about 90 nm, about 30 to about 100 nm, about 40 to about 50 nm, about 40 to about 60 nm, about 40 to about 70 nm, about 40 to about 80 nm, about 40 to about 90 nm, about 40 to about 100 nm, about 50 to about 60 nm, about 50 to about 70 nm about 50 to about 80 nm, about 50 to about 90 nm, about 50 to about 100 nm, about 60 to about 70 nm, about 60 to about 80 nm, about 60 to about 90 nm, about 60 to about 100 nm, about 70 to about 80 nm, about 70 to about 90 nm, about 70 to about 100 nm, about 80 to about 90 nm, about 80 to about 100 nm and/or about 90 to about 100 nm. In one embodiment, the lipid nanoparticles may have a diameter from about 10 to 500 nm. In one embodiment, the lipid nanoparticle may have a diameter greater than 100 nm, greater than 150 nm, greater than 200 nm, greater than 250 nm, greater than 300 nm, greater than 350 nm, greater than 400 nm, greater than 450 nm, greater than 500 nm, greater than 550 nm, greater than 600 nm, greater than 650 nm, greater than 700 nm, greater than 750 nm, greater than 800 nm, greater than 850 nm, greater than 900 nm, greater than 950 nm or greater than 1000 nm. Each possibility represents a separate embodiment of the present invention.

[1274] In some embodiments, a nanoparticle (e.g., a lipid nanoparticle) has a mean diameter of 10-500 nm, 20-400 nm, 30-300 nm, or 40-200 nm. In some embodiments, a nanoparticle (e.g., a lipid nanoparticle) has a mean diameter of 50-150 nm, 50-200 nm, 80-100 nm, or 80-200 nm.

[1275] In some embodiments, the lipid nanoparticles described herein can have a diameter from below 0 0.1 μm to up to 1 mm such as, but not limited to, less than 0 0.1 μm, less than 1.0 μm, less than 5 μm, less than 10 μm, less than 15 μm, less than 20 μm, less than 25 μm, less than 30 μm, less than 35 μm, less than 40 μm, less than 50 μm, less than 55 μm, less than 60 μm, less than 65 μm, less than 70 μm, less than 75 μm, less than 80 μm, less than 85 μm, less than 90 μm, less than 95 μm, less than 100 μm, less than 125 μm, less than 150 μm, less than 175 μm, less than 200 μm, less than 225 μm, less than 250 μm, less than 275 μm, less than 300 μm, less than 325 μm, less than 350 μm, less than 375 μm, less than 400 μm, less than 425 μm, less than 450 μm, less than 475 μm, less than 500 μm, less than 525 μm, less than 550 μm, less than 575 μm, less than 600 μm, less than 625 μm, less than 650 μm, less than 675 μm, less than 700 μm, less than 725 μm, less than 750 μm, less than 775 μm, less than 800 μm, less than 825 μm, less than 850 μm, less than 875 μm, less than 900 μm, less than 925 μm, less than 950 μm, less than 975 μm.

[1276] In another embodiment, LNPs may have a diameter from about 1 nm to about 100 nm, from about 1 nm to about 10 nm, about 1 nm to about 20 nm, from about 1 nm to about 30 nm, from about 1 nm to about 40 nm, from about 1 nm to about 50 nm, from about 1 nm to about 60 nm, from about 1 nm to about 70 nm, from about 1 nm to about 80 nm, from about 1 nm to about 90 nm, from about 5 nm to about from 100 nm, from about 5 nm to about 10 nm, about 5 nm to about 20 nm, from about 5 nm to about 30 nm, from about 5 nm to about 40 nm, from about 5 nm to about 50 nm, from about 5 nm to about 60 nm, from about 5 nm to about 70 nm, from about 5 nm to about 80 nm, from about 5 nm to about 90 nm, about 10 to about 50 nM, from about 20 to about 50 nm, from about 30 to about 50 nm, from about 40 to about 50 nm, from about 20 to about 60 nm, from about 30 to about 60 nm, from about 40 to about 60 nm, from about 20 to about 70 nm, from about 30 to about 70 nm, from about 40 to about 70 nm, from about 50 to about 70 nm, from about 60 to about 70 nm, from about 20 to about 80 nm, from about 30 to about 80 nm, from about 40 to about 80 nm, from about 50 to about 80 nm, from about 60 to about 80 nm, from about 20 to about 90 nm, from about 30 to about 90 nm, from about 40 to about 90 nm, from about 50 to about 90 nm, from about 60 to about 90 nm and/or from about 70 to about 90 nm. Each possibility represents a separate embodiment of the present invention.

[1277] A nanoparticle composition may be relatively homogenous. A polydispersity index may be used to indicate the homogeneity of a nanoparticle composition, e.g., the particle size distribution of the nanoparticle compositions. A small (e.g., less than 0.3) polydispersity index generally indicates a narrow particle size distribution. A nanoparticle composition may have a polydispersity index from about 0 to about 0.25, such as 0.01, 0.02, 0.03, 0.04, 0.05, 0.06, 0.07, 0.08, 0.09, 0.10, 0.1 1, 0.12, 0.13, 0.14, 0.15, 0.16, 0.17, 0.18, 0.19, 0.20, 0.21, 0.22, 0.23, 0.24, or 0.25. In some embodiments, the polydispersity index of a nanoparticle composition may be from about 0.10 to about 0.20. Each possibility represents a separate embodiment of the present invention.

[1278] The zeta potential of a nanoparticle composition may be used to indicate the electrokinetic potential of the composition. For example, the zeta potential may describe the surface charge of a nanoparticle composition. Nanoparticle compositions with relatively low charges, positive or negative, are generally desirable, as more highly charged species may interact undesirably with cells, tissues, and other elements in the body. In some embodiments, the zeta potential of a nanoparticle composition may be from about −20 mV to about +20 mV, from about −20 mV to about +15 mV, from about −20 mV to about +10 mV, from about −20 mV to about +5 mV, from about −20 mV to about 0 mV, from about −20 mV to about −5 mV, from about −20 mV to about −10 mV, from about −20 mV to about −15 mV from about −20 mV to about +20 mV, from about −20 mV to about +15 mV, from about −20 mV to about +10 mV, from about −20 mV to about +5 mV, from about −20 mV to about 0 mV, from about 0 mV to about +20 mV, from about 0 mV to about +15 mV, from about 0 mV to about +10 mV, from about 0 mV to about +5 mV, from about +5 mV to about +20 mV, from about +5 mV to about +15 mV, or from about +5 mV to about +10 mV. Each possibility represents a separate embodiment of the present invention.

[1279] The efficiency of encapsulation of a therapeutic agent describes the amount of therapeutic agent that is encapsulated or otherwise associated with a nanoparticle composition after preparation, relative to the initial amount provided. The encapsulation efficiency is desirably high (e.g., close to 100%). The encapsulation efficiency may be measured, for example, by comparing the amount of therapeutic agent in a solution containing the nanoparticle composition before and after breaking up the nanoparticle composition with one or more organic solvents or detergents. Fluorescence may be used to measure the amount of free therapeutic agent (e.g., nucleic acids) in a solution. For the nanoparticle compositions described herein, the encapsulation efficiency of a therapeutic agent may be at least 50%, for example 50%, 55%, 60%, 65%, 70%, 75%, 80%, 85%, 90%, 91%, 92%, 93%, 94%, 95%, 96%, 97%, 98%, 99%, or 100%. In some embodiments, the encapsulation efficiency may be at least 80%. In certain embodiments, the encapsulation efficiency may be at least 90%. Each possibility represents a separate embodiment of the present invention. In some embodiments, the lipid nanoparticle has a polydiversity value of less than 0.4. In some embodiments, the lipid nanoparticle has a net neutral charge at a neutral pH. In some embodiments, the lipid nanoparticle has a mean diameter of 50-200 nm.

[1280] The properties of a lipid nanoparticle formulation may be influenced by factors including, but not limited to, the selection of the cationic lipid component, the degree of cationic lipid saturation, the selection of the non-cationic lipid component, the degree of noncationic lipid saturation, the selection of the structural lipid component, the nature of the PEGylation, ratio of all components and biophysical parameters such as size. As described herein, the purity of a PEG lipid component is also important to an LNP's properties and performance.

### F. Methods for Preparing Lipid Nanoparticles (Lnp) Formulations

[1281] In one embodiment, a lipid nanoparticle formulation may be prepared by the methods described in International Publication Nos. WO2011127255 or WO2008103276, each of which is herein incorporated by reference in their entirety. In some embodiments, lipid nanoparticle formulations may be as described in International Publication No. WO2019131770, which is herein incorporated by reference in its entirety.

[1282] In some embodiments, circular RNA is formulated according to a process described in U.S. patent application Ser. No. 15/809,680. In some embodiments, the present invention provides a process of encapsulating circular RNA in transfer vehicles comprising the steps of forming lipids into pre-formed transfer vehicles (i.e. formed in the absence of RNA) and then combining the pre-formed transfer vehicles with RNA. In some embodiments, the novel formulation process results in an RNA formulation with higher potency (peptide or protein expression) and higher efficacy (improvement of a biologically relevant endpoint) both in vitro and in vivo with potentially better tolerability as compared to the same RNA formulation prepared without the step of preforming the lipid nanoparticles (e.g., combining the lipids directly with the RNA).

[1283] For certain cationic lipid nanoparticle formulations of RNA, in order to achieve high encapsulation of RNA, the RNA in buffer (e.g., citrate buffer) has to be heated. In those processes or methods, the heating is required to occur before the formulation process (i.e. heating the separate components) as heating post-formulation (post-formation of nanoparticles) does not increase the encapsulation efficiency of the RNA in the lipid nanoparticles. In contrast, in some embodiments of the novel processes of the present invention, the order of heating of RNA does not appear to affect the RNA encapsulation percentage. In some embodiments, no heating (i.e. maintaining at ambient temperature) of one or more of the solutions comprising the pre-formed lipid nanoparticles, the solution comprising the RNA and the mixed solution comprising the lipid nanoparticle encapsulated RNA is required to occur before or after the formulation process.

[1284] RNA may be provided in a solution to be mixed with a lipid solution such that the RNA may be encapsulated in lipid nanoparticles. A suitable RNA solution may be any aqueous solution containing RNA to be encapsulated at various concentrations. For example, a suitable RNA solution may contain an RNA at a concentration of or greater than about 0.01 mg/ml, 0.05 mg/ml, 0.06 mg/ml, 0.07 mg/ml, 0.08 mg/ml, 0.09 mg/ml, 0.1 mg/ml, 0.15 mg/ml, 0.2 mg/ml, 0.3 mg/ml, 0.4 mg/ml, 0.5 mg/ml, 0.6 mg/ml, 0.7 mg/ml, 0.8 mg/ml, 0.9 mg/ml, or 1.0 mg/ml. In some embodiments, a suitable RNA solution may contain an RNA at a concentration in a range from about 0.01-1.0 mg/ml, 0.01-0.9 mg/ml, 0.01-0.8 mg/ml, 0.01-0.7 mg/ml, 0.01-0.6 mg/ml, 0.01-0.5 mg/ml, 0.01-0.4 mg/ml, 0.01-0.3 mg/ml, 0.01-0.2 mg/ml, 0.01-0.1 mg/ml, 0.05-1.0 mg/ml, 0.05-0.9 mg/ml, 0.05-0.8 mg/ml, 0.05-0.7 mg/ml, 0.05-0.6 mg/ml, 0.05-0.5 mg/ml, 0.05-0.4 mg/ml, 0.05-0.3 mg/ml, 0.05-0.2 mg/ml, 0.05-0.1 mg/ml, 0.1-1.0 mg/ml, 0.2-0.9 mg/ml, 0.3-0.8 mg/ml, 0.4-0.7 mg/ml, or 0.5-0.6 mg/ml.

[1285] Typically, a suitable RNA solution may also contain a buffering agent and/or salt. Generally, buffering agents can include HEPES, Tris, ammonium sulfate, sodium bicarbonate, sodium citrate, sodium acetate, potassium phosphate or sodium phosphate. In some embodiments, suitable concentration of the buffering agent may be in a range from about 0.1 mM to 100 mM, 0.5 mM to 90 mM, 1.0 mM to 80 mM, 2 mM to 70 mM, 3 mM to 60 mM, 4 mM to 50 mM, 5 mM to 40 mM, 6 mM to 30 mM, 7 mM to 20 mM, 8 mM to 15 mM, or 9 to 12 mM.

[1286] Exemplary salts can include sodium chloride, magnesium chloride, and potassium chloride. In some embodiments, suitable concentration of salts in an RNA solution may be in a range from about 1 mM to 500 mM, 5 mM to 400 mM, 10 mM to 350 mM, 15 mM to 300 mM, 20 mM to 250 mM, 30 mM to 200 mM, 40 mM to 190 mM, 50 mM to 180 mM, 50 mM to 170 mM, 50 mM to 160 mM, 50 mM to 150 mM, or 50 mM to 100 mM.

[1287] In some embodiments, a suitable RNA solution may have a pH in a range from about 3.5-6.5, 3.5-6.0, 3.5-5.5, 3.5-5.0, 3.5-4.5, 4.0-5.5, 4.0-5.0, 4.0-4.9, 4.0-4.8, 4.0-4.7, 4.0-4.6, or 4.0-4.5.

[1288] Various methods may be used to prepare an RNA solution suitable for the present invention. In some embodiments, RNA may be directly dissolved in a buffer solution described herein. In some embodiments, an RNA solution may be generated by mixing an RNA stock solution with a buffer solution prior to mixing with a lipid solution for encapsulation. In some embodiments, an RNA solution may be generated by mixing an RNA stock solution with a buffer solution immediately before mixing with a lipid solution for encapsulation.

[1289] According to the present invention, a lipid solution contains a mixture of lipids suitable to form transfer vehicles for encapsulation of RNA. In some embodiments, a suitable lipid solution is ethanol based. For example, a suitable lipid solution may contain a mixture of desired lipids dissolved in pure ethanol (i.e. 100% ethanol). In another embodiment, a suitable lipid solution is isopropyl alcohol based. In another embodiment, a suitable lipid solution is dimethylsulfoxide-based. In another embodiment, a suitable lipid solution is a mixture of suitable solvents including, but not limited to, ethanol, isopropyl alcohol and dimethylsulfoxide.

[1290] A suitable lipid solution may contain a mixture of desired lipids at various concentrations. In some embodiments, a suitable lipid solution may contain a mixture of desired lipids at a total concentration in a range from about 0.1-100 mg/ml, 0.5-90 mg/ml, 1.0-80 mg/ml, 1.0-70 mg/ml, 1.0-60 mg/ml, 1.0-50 mg/ml, 1.0-40 mg/ml, 1.0-30 mg/ml, 1.0-20 mg/ml, 1.0-15 mg/ml, 1.0-10 mg/ml, 1.0-9 mg/ml, 1.0-8 mg/ml, 1.0-7 mg/ml, 1.0-6 mg/ml, or 1.0-5 mg/ml.

### G. Liposomes

[1291] In certain embodiments, liposomes or other lipid bilayer vesicles are disclosed herein and may be used as a component or as the whole transfer vehicle to facilitate or enhance the delivery and release of circular RAN to one or more target cells. Liposomes are usually characterized by having an interior space sequestered from an outer medium by a membrane of one or more bilayers forming a microscopic sack or vesicle. Bilayer membranes of liposomes are typically formed by lipids, i.e. amphiphilic molecules of synthetic or natural origin that comprise spatially separated hydrophobic or hydrophilic domains (Lasic, D, and Papahadjopoulos, D., eds. Medical Applications of Liposomes. Elsevier, Amsterdam, 1998).

[1292] In some embodiments, the circular RNA is encapsulated, or the liposome can be prepared using various methods, including but not limited to mechanical dispersion, solvent dispersion, and or detergent removal. Each of these methods include the steps of drying the lipids from organic solvents, dispersing the lipid in aqueous media, resizing the liposomes and purifying the/liposome suspension (Gomez et al., ACS Omega. 2019. 4(6): 10866-10876). Various other methods of liposome preparation can be found in Akbarzadeh et al., Nanoscale Res Lett. 2013; 8(1): 102. In some embodiments, the circular RNA may be loaded passively (i.e. the circular RNA is encapsulated during liposome formation) or actively (i.e. after liposome formation).

[1293] In some embodiments, the liposome disclosed herein may comprise one or more bilayers. In certain embodiments, the liposome may comprise a multilamellar vesicle or a unilamellar vesicle.

[1294] In certain embodiments, the liposome as described herein comprises of naturally derived or engineered phospholipids. In some embodiments, the liposomes may further comprise PEG-lipids that aid with stability of the overall liposome structure. Other improvements, including but not limited to corticosteroid and other steroids may be used to help with maintaining structure and stability of the liposome.

### H. Dendrimer

[1295] In certain embodiments, the transfer vehicle for transporting the circular RNA comprises a dendrimer. Use of “dendrimer” describes the architectural motif of the transfer vehicle. In some embodiments, the dendrimer includes but is not limited to containing an interior core and one or more layers (i.e. generations) that extend or attach out from the interior core. In some of the embodiments, the generations may contain one or more branching points and an exterior surface of terminal groups that attach to the outermost generation. The branching points, in certain embodiments, may be mostly monodispersed and contain symmetric branching units built around the interior core. In some embodiments, the interior core

[1296] Synthesis of the dendrimer may comprise the divergent method, convergent growth, hypercore and branched monomer growth, double exponential growth, lego chemistry, click chemistry and other methods as available in the art (Mendes L. et al., Molecules. 2017. 22 (9): 1401 further describes these methods).

### I. Polymer-Based Delivery

[1297] In certain embodiments, as described herein, the transfer vehicle for the circular RNA polynucleotide comprises a polymer nanoparticle. In some embodiments, the polymer nanoparticle includes nanocapsules and nanospheres. Nanocapsules, in some embodiments, are composed of an oily core surrounded by a polymeric shell. In some embodiments, the circular RNA is contained within the core and the polymeric shell controls the release of the circular RNA. On the other hand, nanospheres comprise a continuous polymeric network in which the circular RNA is retained or absorbed onto the surface. In some embodiments, cationic polymers is used to encapsulate the circular RNA due to the favorable electrostatic interaction of the cations to the negatively charged nucleic acids and cell membrane.

[1298] The polymer nanoparticle may be prepared by various methods. In some embodiments, the polymer nanoparticle may be prepared by nanoprecipitation, emulsion techniques, solvent evaporation, solvent diffusion, reverse salting-out or other methods available in the art.

### J. Polymer-Lipid Hybrids

[1299] In certain embodiments, as described herein, the transfer vehicle for the circular RNA polynucleotide comprises a polymer-lipid hybrid nanoparticle (LPHNP). In some embodiments, the LPHNP comprises a polymer core enveloped within a lipid bilayer. In some embodiments, the polymer core encapsulates the circular RNA polynucleotide. In some embodiments, the LPHNP further comprises an outer lipid bilayer. In certain embodiments this outer lipid bilayer comprises a PEG-lipid, helper lipid, cholesterol or other molecule as known in the art to help with stability in a lipid-based nanoparticle. The lipid bilayer closest to the polymer core mitigates the loss of the entrapped circular RNA during LPHNP formation and protects from degradation of the polymer core by preventing diffusion of water from outside of the transfer vehicle into the polymer core (Mukherjee et al., In J. Nanomedicine. 2019; 14: 1937-1952).

[1300] There are various methods of developing and formulating a LPHNP. In certain embodiments, the LPHNP is developed using a one-step or a two-step method available in the art. In some embodiments, the one-step method for forming an LPHNP is through nanoprecipitation or emulsification-solvent evaporation. In certain embodiments, the two-step method includes nanoprecipitation, emulsification-solvent evaporation, high-pressure homogenization, or other method available in the art.

### K. Peptide-Based Delivery

[1301] In certain embodiments, the circular RNA can be transported using a peptide-based delivery mechanism. In some embodiments, the peptide-based delivery mechanism comprises a lipoprotein. Based on the size of the drug to be delivered, the lipoprotein may be either a low-density (LDL) or high-density lipoprotein (HDL). As seen in U.S. Pat. No. 8,734,853B2, high-density lipoproteins are capable of transporting a nucleic acid in vivo and in vitro.

[1302] In particular embodiments, the lipid component includes cholesterol. In more particular embodiments, the lipid component includes a combination of cholesterol and cholesterol oleate.

[1303] The HDL-nucleic acid particle can be of any size, but in particular embodiments the particle has a molecular size of from about 100 Angstroms to about 500 Angstroms. In more particular embodiments, the particle has a molecular size of from about 100 Angstroms to about 300 Angstroms. The size may be dependent on the size of the nucleic acid component incorporated into the particle.

[1304] The HDL-nucleic acid particle can have a broad range in molecular weight. The weight is dependent on the size of the nucleic acid incorporated into the particle. For example, in some embodiments, the particle has a molecular weight of between about 100,000 Daltons to about 1,000,000 Daltons. In more particular embodiments, the particle has a molecular weight of between about 100,000 Daltons to about 500,000 Daltons. In specific embodiments, the particle has a molecular weight of between about 100,000 Daltons to about 300,000 Daltons.

[1305] The HDL-nucleic acid particles of the present invention can be made by different methods. For example, a nucleic acid (e.g., siRNA) may be neutralized by combining the nucleic acid with peptides or polypeptides composed of contiguous positively-charged amino acids. For example, as discussed above, amino acid sequences may include 2 or more contiguous lysine residues. The positive charge of the amino acid sequences neutralizes the negatively charged nucleic acid molecule. The nucleic acid can then be encapsulated in an HDL particle using a method as described in Lacko et al. (2002).

### L. Carbohydrate Carrier

[1306] In certain embodiments, the circular RNA polynucleotide can be transported using a carbohydrate carrier or a sugar-nanocapsule. In certain embodiments, the carbohydrate carrier comprises a sugar-decorated nanoparticle, peptide- and saccharide-conjugated dendrimer, nanoparticles based on polysaccharides, and other carbohydrate-based carriers available in the art. As described herein, the incorporation of carbohydrate molecules may be through synthetic means.

[1307] In some embodiments, the carbohydrate carrier comprises polysaccharides. These polysaccharides may be made from the microbial cell wall of the target cell. For example, carbohydrate carriers comprise of mannan carbohydrates have been shown to successfully deliver mRNA (Son et al., Nano Lett. 2020. 20(3): 1499-1509).

### M. Glycan-Decorated Nanoparticles/Glyconanoparticles

[1308] In certain embodiments, as provided herein, the transfer vehicle for the circular RNA is a glyconanoparticle (GlycoNP). As known in the art, glyconanoparticles comprise a core comprising gold, iron oxide, semiconductor nanoparticles or a combination thereof. In some embodiments, the glyconanoparticle is functionalized using carbohydrates. In certain embodiments, the glyconanoparticle comprises a carbon nanotube or graphene. In one embodiment the glyconanoparticle comprises a polysaccharide-based GlycoNP (e.g., chitosan-based GlycoNP). In certain embodiments, the glyconanoparticle is a glycodendrimer.

### N. Exosomes, Fusome & Organelle-Based Delivery Systems

[1309] In certain embodiments, as provided herein, the circular RNA is transferred through use of an exosome, a type of extracellular vesicle. Exosomes naturally are secreted by various types of cells and are used as a transport vesicle for various forms of cargo. During delivery exosomes can contain and protecting specific mRNAs, regulatory microRNAs, lipids, and proteins (Luan et al., Acta Pharmacologica Sinica. 2017. 38:754-763). Naturally, exosomes may be 30 nm to 125 nm.

[1310] In some embodiments, the exosome may be made in part from an immune cell. As shown in Haney et al, use of immune cell derived exosomes are able to avoid mononuclear phagocytes (J Control Release. 2015. 207:18-30). In some embodiments, the exosome may be a dendritic cell, macrophage, T-cell, B-cell or derived from another immune cell. As seen in WO/2021/041473A1, various forms of RNAs of varying lengths may be transported through exosome delivery including messenger RNA (mRNA), microRNA (miRNA), long intergenic non-coding RNA (lincRNA), long non-coding RNA (lncRNA), non-coding RNA (ncRNA), non-messenger RNA (nmRNA), small RNA (sRNA), small non-messenger RNA (smnRNA), DNA damage response RNA (DD RNA), extracellular RNA (exRNA), small nuclear RNA (snRNA), small nucleolar RNA (snoRNA), and precursor messenger RNA (pre-mRNA).

[1311] In other embodiments, the transfer vehicle may comprise in whole or in part from a fusome. In some embodiments, the fusome is derived from an endoplasmic reticulum of a germline cyst. In certain embodiments, the germline cyst is from a Drosophila ovary.

### O. Microneedles, Electroporation, Continous Pumps, & Gene Gun

[1312] In certain embodiments, the circular RNA polynucleotide may be transported using noncellular and instead be through mechanical delivery mechanisms. In some embodiments, this delivery method includes microneedles, electroporation, continuous pumps and/or gene guns.

[1313] Various methods and apparatuses have been developed for microneedling a nucleic acid into a specific set of cells. A method for delivery of biological material across the biological tissue has been described by Kodgule et al and is taught for example in US 2011/0196308, the contents of which are incorporated herein by reference in their entirety. According to Kodgule, multiple biodegradable microneedles containing a therapeutic active ingredient are incorporated in a device which delivers proteins, carbohydrates, nucleic acid molecules, lipids and other pharmaceutically active ingredients or combinations thereof.

[1314] Intradermal delivery of biologically active agents by needle-free injection and electroporation has been described by Hoffmann et al and is taught for example in U.S. Pat. No. 7,171,264 the contents of which are incorporated herein by reference in their entirety. According to Hoffmann, one or more needle-free injectors are incorporated into an electroporation device and the combination of needle-free injection and electroporation is sufficient to introduce the agent into cells in skin, muscle or mucosa. In certain embodiments, the electroporation is through a continuous-flow microfluidic electroporation.

### P. Pharmaceutical Salts, Buffers, & Solutions

[1315] In some embodiments, the transfer vehicle of the circular RNA polynucleotide is a solution or diluent comprising of a salt or a buffer.

### 7. Combinations of Proteins and Ires

[1316] In certain embodiments, as provided herein, the payload encoded by the circular RNA polynucleotide may be optimized through use of a specific internal ribosome entry sites (IRES) within the translation initiation element (TIE). In some embodiments, IRES specificity within a circular RNA can significantly enhance expression of specific proteins encoded within the coding element.

### 8. Targeting

### A. Targeting Methods

[1317] The present invention also contemplates the discriminatory targeting of target cells and tissues by both passive and active targeting means. The phenomenon of passive targeting exploits the natural distributions patterns of a transfer vehicle in vivo without relying upon the use of additional excipients or means to enhance recognition of the transfer vehicle by target cells. For example, transfer vehicles which are subject to phagocytosis by the cells of the reticulo-endothelial system are likely to accumulate in the liver or spleen, and accordingly may provide a means to passively direct the delivery of the compositions to such target cells.

[1318] Alternatively, the present invention contemplates active targeting, which involves the use of targeting moieties that may be bound (either covalently or non-covalently) to the transfer vehicle to encourage localization of such transfer vehicle at certain target cells or target tissues. For example, targeting may be mediated by the inclusion of one or more endogenous targeting moieties in or on the transfer vehicle to encourage distribution to the target cells or tissues. Recognition of the targeting moiety by the target tissues actively facilitates tissue distribution and cellular uptake of the transfer vehicle and/or its contents in the target cells and tissues (e.g., the inclusion of an apolipoprotein-E targeting ligand in or on the transfer vehicle encourages recognition and binding of the transfer vehicle to endogenous low density lipoprotein receptors expressed by hepatocytes). As provided herein, the composition can comprise a moiety capable of enhancing affinity of the composition to the target cell. Targeting moieties may be linked to the outer bilayer of the lipid particle during formulation or post-formulation. These methods are well known in the art. In addition, some lipid particle formulations may employ fusogenic polymers such as PEAA, hemagluttinin, other lipopeptides (see U.S. patent application Ser. No. 08/835,281, and 60/083,294, which are incorporated herein by reference) and other features useful for in vivo and/or intracellular delivery. In other some embodiments, the compositions of the present invention demonstrate improved transfection efficacies, and/or demonstrate enhanced selectivity towards target cells or tissues of interest. Contemplated therefore are compositions which comprise one or more moieties (e.g., peptides, aptamers, oligonucleotides, a vitamin or other molecules) that are capable of enhancing the affinity of the compositions and their nucleic acid contents for the target cells or tissues. Suitable moieties may optionally be bound or linked to the surface of the transfer vehicle. In some embodiments, the targeting moiety may span the surface of a transfer vehicle or be encapsulated within the transfer vehicle. Suitable moieties and are selected based upon their physical, chemical or biological properties (e.g., selective affinity and/or recognition of target cell surface markers or features). Cell-specific target sites and their corresponding targeting ligand can vary widely. Suitable targeting moieties are selected such that the unique characteristics of a target cell are exploited, thus allowing the composition to discriminate between target and non-target cells. For example, compositions of the invention may include surface markers (e.g., apolipoprotein-B or apolipoprotein-E) that selectively enhance recognition of, or affinity to hepatocytes (e.g., by receptor-mediated recognition of and binding to such surface markers). As an example, the use of galactose as a targeting moiety would be expected to direct the compositions of the present invention to parenchymal hepatocytes, or alternatively the use of mannose containing sugar residues as a targeting ligand would be expected to direct the compositions of the present invention to liver endothelial cells (e.g., mannose containing sugar residues that may bind preferentially to the asialoglycoprotein receptor present in hepatocytes). (See Hillery A M, et al. “Drug Delivery and Targeting: For Pharmacists and Pharmaceutical Scientists” (2002) Taylor & Francis, Inc.) The presentation of such targeting moieties that have been conjugated to moieties present in the transfer vehicle (e.g., a lipid nanoparticle) therefore facilitate recognition and uptake of the compositions of the present invention in target cells and tissues. Examples of suitable targeting moieties include one or more peptides, proteins, aptamers, vitamins and oligonucleotides.

[1319] In particular embodiments, a transfer vehicle comprises a targeting moiety. In some embodiments, the targeting moiety mediates receptor-mediated endocytosis selectively into a specific population of cells. In some embodiments, the targeting moiety is capable of binding to a T cell antigen. In some embodiments, the targeting moiety is capable of binding to a NK, NKT, or macrophage antigen. In some embodiments, the targeting moiety is capable of binding to a protein selected from the group CD3, CD4, CD8, PD-1, 4-1BB, and CD2. In some embodiments, the targeting moiety is an single chain Fv (scFv) fragment, nanobody, peptide, peptide-based macrocycle, minibody, heavy chain variable region, light chain variable region or fragment thereof. In some embodiments, the targeting moiety is selected from T-cell receptor motif antibodies, T-cell α chain antibodies, T-cell β chain antibodies, T-cell γ chain antibodies, T-cell δ chain antibodies, CCR7 antibodies, CD3 antibodies, CD4 antibodies, CD5 antibodies, CD7 antibodies, CD8 antibodies, CD11b antibodies, CD11c antibodies, CD16 antibodies, CD19 antibodies, CD20 antibodies, CD21 antibodies, CD22 antibodies, CD25 antibodies, CD28 antibodies, CD34 antibodies, CD35 antibodies, CD40 antibodies, CD45RA antibodies, CD45RO antibodies, CD52 antibodies, CD56 antibodies, CD62L antibodies, CD68 antibodies, CD80 antibodies, CD95 antibodies, CD117 antibodies, CD127 antibodies, CD133 antibodies, CD137 (4-1BB) antibodies, CD163 antibodies, F4/80 antibodies, IL-4Rα antibodies, Sca-1 antibodies, CTLA-4 antibodies, GITR antibodies GARP antibodies, LAP antibodies, granzyme B antibodies, LFA-1 antibodies, transferrin receptor antibodies, and fragments thereof. In some embodiments, the targeting moiety is a small molecule binder of an ectoenzyme on lymphocytes. Small molecule binders of ectoenzymes include A2A inhibitors CD73 inhibitors, CD39 or adesines receptors A2aR and A2bR. Potential small molecules include AB928.

[1320] In some embodiments, transfer vehicles are formulated and/or targeted as described in Shobaki N, Sato Y, Harashima H. Mixing lipids to manipulate the ionization status of lipid nanoparticles for specific tissue targeting. Int J Nanomedicine. 2018; 13:8395-8410. Published 2018 Dec. 10. In some embodiments, a transfer vehicle is made up of 3 lipid types. In some embodiments, a transfer vehicle is made up of 4 lipid types. In some embodiments, a transfer vehicle is made up of 5 lipid types. In some embodiments, a transfer vehicle is made up of 6 lipid types.

### B. Target Cells

[1321] Where it is desired to deliver a nucleic acid to an immune cell, the immune cell represents the target cell. In some embodiments, the compositions of the invention transfect the target cells on a discriminatory basis (i.e., do not transfect non-target cells). The compositions of the invention may also be prepared to preferentially target a variety of target cells, which include, but are not limited to, T cells, B cells, macrophages, and dentritic cells.

[1322] In some embodiments, the target cells are deficient in a protein or enzyme of interest. For example, where it is desired to deliver a nucleic acid to a hepatocyte, the hepatocyte represents the target cell. In some embodiments, the compositions of the invention transfect the target cells on a discriminatory basis (i.e., do not transfect non-target cells). The compositions of the invention may also be prepared to preferentially target a variety of target cells, which include, but are not limited to, hepatocytes, epithelial cells, hematopoietic cells, epithelial cells, endothelial cells, lung cells, bone cells, stem cells, mesenchymal cells, neural cells (e.g., meninges, astrocytes, motor neurons, cells of the dorsal root ganglia and anterior horn motor neurons), photoreceptor cells (e.g., rods and cones), retinal pigmented epithelial cells, secretory cells, cardiac cells, adipocytes, vascular smooth muscle cells, cardiomyocytes, skeletal muscle cells, beta cells, pituitary cells, synovial lining cells, ovarian cells, testicular cells, fibroblasts, B cells, T cells, reticulocytes, leukocytes, granulocytes and tumor cells.

[1323] The compositions of the invention may be prepared to preferentially distribute to target cells such as in the heart, lungs, kidneys, liver, and spleen. In some embodiments, the compositions of the invention distribute into the cells of the liver or spleen to facilitate the delivery and the subsequent expression of the circRNA comprised therein by the cells of the liver (e.g., hepatocytes) or the cells of spleen (e.g., immune cells). The targeted cells may function as a biological “reservoir” or “depot” capable of producing, and systemically excreting a functional protein or enzyme. Accordingly, in one embodiment of the invention the transfer vehicle may target hepatocytes or immune cells and/or preferentially distribute to the cells of the liver or spleen upon delivery. In an embodiment, following transfection of the target hepatocytes or immune cells, the circRNA loaded in the vehicle are translated and a functional protein product is produced, excreted and systemically distributed. In other embodiments, cells other than hepatocytes (e.g., lung, spleen, heart, ocular, or cells of the central nervous system) can serve as a depot location for protein production.

[1324] In one embodiment, the compositions of the invention facilitate a subject's endogenous production of one or more functional proteins and/or enzymes. In an embodiment of the present invention, the transfer vehicles comprise circRNA which encode a deficient protein or enzyme. Upon distribution of such compositions to the target tissues and the subsequent transfection of such target cells, the exogenous circRNA loaded into the transfer vehicle (e.g., a lipid nanoparticle) may be translated in vivo to produce a functional protein or enzyme encoded by the exogenously administered circRNA (e.g., a protein or enzyme in which the subject is deficient). Accordingly, the compositions of the present invention exploit a subject's ability to translate exogenously- or recombinantly-prepared circRNA to produce an endogenously-translated protein or enzyme, and thereby produce (and where applicable excrete) a functional protein or enzyme. The expressed or translated proteins or enzymes may also be characterized by the in vivo inclusion of native post-translational modifications which may often be absent in recombinantly-prepared proteins or enzymes, thereby further reducing the immunogenicity of the translated protein or enzyme.

[1325] The administration of circRNA encoding a deficient protein or enzyme avoids the need to deliver the nucleic acids to specific organelles within a target cell. Rather, upon transfection of a target cell and delivery of the nucleic acids to the cytoplasm of the target cell, the circRNA contents of a transfer vehicle may be translated and a functional protein or enzyme expressed.

[1326] In some embodiments, a circular RNA comprises one or more miRNA binding sites. In some embodiments, a circular RNA comprises one or more miRNA binding sites recognized by miRNA present in one or more non-target cells or non-target cell types (e.g., Kupffer cells or hepatic cells) and not present in one or more target cells or target cell types (e.g., hepatocytes or T cells). In some embodiments, a circular RNA comprises one or more miRNA binding sites recognized by miRNA present in an increased concentration in one or more non-target cells or non-target cell types (e.g., Kupffer cells or hepatic cells) compared to one or more target cells or target cell types (e.g., hepatocytes or T cells). miRNAs are thought to function by pairing with complementary sequences within RNA molecules, resulting in gene silencing.

[1327] In some embodiments, the compositions of the invention transfect or distribute to target cells on a discriminatory basis (i.e. do not transfect non-target cells). The compositions of the invention may also be prepared to preferentially target a variety of target cells, which include, but are not limited to, hepatocytes, epithelial cells, hematopoietic cells, epithelial cells, endothelial cells, lung cells, bone cells, stem cells, mesenchymal cells, neural cells (e.g., meninges, astrocytes, motor neurons, cells of the dorsal root ganglia and anterior horn motor neurons), photoreceptor cells (e.g., rods and cones), retinal pigmented epithelial cells, secretory cells, cardiac cells, adipocytes, vascular smooth muscle cells, cardiomyocytes, skeletal muscle cells, beta cells, pituitary cells, synovial lining cells, ovarian cells, testicular cells, fibroblasts, B cells, T cells, reticulocytes, leukocytes, granulocytes and tumor cells.

### 9. Pharmaceutical Compositions

[1328] In certain embodiments, provided herein are compositions (e.g., pharmaceutical compositions) comprising a therapeutic agent provided herein. In some embodiments, the therapeutic agent is a circular RNA polynucleotide provided herein. In some embodiments the therapeutic agent is a vector provided herein. In some embodiments, the therapeutic agent is a cell comprising a circular RNA or vector provided herein (e.g., a human cell, such as a human T cell). In certain embodiments, the composition further comprises a pharmaceutically acceptable carrier. In some embodiments, the compositions provided herein comprise a therapeutic agent provided herein in combination with other pharmaceutically active agents or drugs, such as anti-inflammatory drugs or antibodies capable of targeting B cell antigens, e.g., anti-CD20 antibodies, e.g., rituximab.

[1329] With respect to pharmaceutical compositions, the pharmaceutically acceptable carrier can be any of those conventionally used and is limited only by chemico-physical considerations, such as solubility and lack of reactivity with the active agent(s), and by the route of administration. The pharmaceutically acceptable carriers described herein, for example, vehicles, adjuvants, excipients, and diluents, are well-known to those skilled in the art and are readily available to the public. It is preferred that the pharmaceutically acceptable carrier be one which is chemically inert to the therapeutic agent(s) and one which has no detrimental side effects or toxicity under the conditions of use.

[1330] The choice of carrier will be determined in part by the particular therapeutic agent, as well as by the particular method used to administer the therapeutic agent. Accordingly, there are a variety of suitable formulations of the pharmaceutical compositions provided herein.

[1331] In certain embodiments, the pharmaceutical composition comprises a preservative. In certain embodiments, suitable preservatives may include, for example, methylparaben, propylparaben, sodium benzoate, and benzalkonium chloride. Optionally, a mixture of two or more preservatives may be used. The preservative or mixtures thereof are typically present in an amount of about 0.0001% to about 2% by weight of the total composition.

[1332] In some embodiments, the pharmaceutical composition comprises a buffering agent. In some embodiments, suitable buffering agents may include, for example, citric acid, sodium citrate, phosphoric acid, potassium phosphate, and various other acids and salts. A mixture of two or more buffering agents optionally may be used. The buffering agent or mixtures thereof are typically present in an amount of about 0.001% to about 4% by weight of the total composition.

[1333] In some embodiments, the concentration of therapeutic agent in the pharmaceutical composition can vary, e.g., less than about 1%, or at least about 1%, 2%, 3%, 4%, 5%, 6%, 7%, 8%, 9% 10%, 15%, 20%, 25%, 30%, 35%, 40%, 45%, or about 50% or more by weight, and can be selected primarily by fluid volumes, and viscosities, in accordance with the particular mode of administration selected.

[1334] The following formulations for oral, aerosol, parenteral (e.g., subcutaneous, intravenous, intraarterial, intramuscular, intradermal, intraperitoneal, and intrathecal), and topical administration are merely exemplary and are in no way limiting. More than one route can be used to administer the therapeutic agents provided herein, and in certain instances, a particular route can provide a more immediate and more effective response than another route.

[1335] Formulations suitable for oral administration can comprise or consist of (a) liquid solutions, such as an effective amount of the therapeutic agent dissolved in diluents, such as water, saline, or orange juice; (b) capsules, sachets, tablets, lozenges, and troches, each containing a predetermined amount of the active ingredient, as solids or granules; (c) powders; (d) suspensions in an appropriate liquid; and (e) suitable emulsions. Liquid formulations may include diluents, such as water and alcohols, for example, ethanol, benzyl alcohol and the polyethylene alcohols, either with or without the addition of a pharmaceutically acceptable surfactant. Capsule forms can be of the ordinary hard or soft shelled gelatin type containing, for example, surfactants, lubricants, and inert fillers, such as lactose, sucrose, calcium phosphate, and corn starch. Tablet forms can include one or more of lactose, sucrose, mannitol, corn starch, potato starch, alginic acid, microcrystalline cellulose, acacia, gelatin, guar gum, colloidal silicon dioxide, croscarmellose sodium, talc, magnesium stearate, calcium stearate, zinc stearate, stearic acid, and other excipients, colorants, diluents, buffering agents, disintegrating agents, moistening agents, preservatives, flavoring agents, and other pharmacologically compatible excipients. Lozenge forms can comprise the therapeutic agent with a flavorant, usually sucrose, acacia or tragacanth. Pastilles can comprise the therapeutic agent with an inert base, such as gelatin and glycerin, or sucrose and acacia, emulsions, gels, and the like containing, in addition to, such excipients as are known in the art.

[1336] Formulations suitable for parenteral administration include aqueous and nonaqueous isotonic sterile injection solutions, which can contain antioxidants, buffers, bacteriostats, and solutes that render the formulation isotonic with the blood of the intended recipient, and aqueous and nonaqueous sterile suspensions that can include suspending agents, solubilizers, thickening agents, stabilizers, and preservatives. In some embodiments, the therapeutic agents provided herein can be administered in a physiologically acceptable diluent in a pharmaceutical carrier, such as a sterile liquid or mixture of liquids including water, saline, aqueous dextrose and related sugar solutions, an alcohol such as ethanol or hexadecyl alcohol, a glycol such as propylene glycol or polyethylene glycol, dimethylsulfoxide, glycerol, ketals such as 2,2-dimethyl-1,3-dioxolane-4-methanol, ethers, poly(ethyleneglycol) 400, oils, fatty acids, fatty acid esters or glycerides, or acetylated fatty acid glycerides with or without the addition of a pharmaceutically acceptable surfactant such as a soap or a detergent, suspending agent such as pectin, carbomers, methylcellulose, hydroxypropylmethylcellulose, or carboxymethylcellulose, or emulsifying agents and other pharmaceutical adjuvants.

[1337] Oils, which can be used in parenteral formulations in some embodiments, include petroleum, animal oils, vegetable oils, or synthetic oils. Specific examples of oils include peanut, soybean, sesame, cottonseed, corn, olive, petrolatum, and mineral oil. Suitable fatty acids for use in parenteral formulations include oleic acid, stearic acid, and isostearic acid. Ethyl oleate and isopropyl myristate are examples of suitable fatty acid esters.

[1338] Suitable soaps for use in certain embodiments of parenteral formulations include fatty alkali metal, ammonium, and triethanolamine salts, and suitable detergents include (a) cationic detergents such as, for example, dimethyl dialkyl ammonium halides. and alkyl pyridinium halides, (b) anionic detergents such as, for example, alkyl, aryl, and olefin sulfonates, alky, olefin, ether, and monoglyceride sulfates, and sulfosuccinates, (c) nonionic detergents such as, for example, fatty amine oxides, fatty acid alkanolamides, and polyoxyethylenepolypropylene copolymers, (d) amphoteric detergents such as, for example, alkyl-o-aminopropionates, and 2-alkyl-imidazoline quaternary ammonium salts, and (e) mixtures thereof.

[1339] In some embodiments, the parenteral formulations will contain, for example, from about 0.5% to about 25% by weight of the therapeutic agent in solution. Preservatives and buffers may be used. In order to minimize or eliminate irritation at the site of injection, such compositions may contain one or more nonionic surfactants having, for example, a hydrophile-lipophile balance (HLB) of from about 12 to about 17. The quantity of surfactant in such formulations will typically range, for example, from about 5% to about 15% by weight. Suitable surfactants include polyethylene glycol, sorbitan, fatty acid esters such as sorbitan monooleate, and high molecular weight adducts of ethylene oxide with a hydrophobic base formed by the condensation of propylene oxide with propylene glycol. The parenteral formulations can be presented in unit-dose or multi-dose sealed containers, such as ampoules or vials, and can be stored in a freeze-dried (lyophilized) condition requiring only the addition of a sterile liquid excipient, for example, water for injections, immediately prior to use. Extemporaneous injection solutions and suspensions can be prepared from sterile powders, granules, and tablets of the kind previously described.

[1340] In certain embodiments, injectable formulations are provided herein. The requirements for effective pharmaceutical carriers for injectable compositions are well-known to those of ordinary skill in the art (see, e.g., Pharmaceutics and Pharmacy Practice, J. B. Lippincott Company, Philadelphia, PA, Banker and Chalmers, eds., pages 238-250 (1982), and ASHP Handbook on Injectable Drugs, Toissel, 4th ed, pages 622-630 (1986)).

[1341] In some embodiments, topical formulations are provided herein. Topical formulations, including those that are useful for transdermal drug release, are suitable in the context of certain embodiments provided herein for application to skin. In some embodiments, the therapeutic agent alone or in combination with other suitable components, can be made into aerosol formulations to be administered via inhalation. These aerosol formulations can be placed into pressurized acceptable propellants, such as dichlorodifluoromethane, propane, nitrogen, and the like. They also may be formulated as pharmaceuticals for non-pressured preparations, such as in a nebulizer or an atomizer. Such spray formulations also may be used to spray mucosa.

[1342] In certain embodiments, the therapeutic agents provided herein can be formulated as inclusion complexes, such as cyclodextrin inclusion complexes, or liposomes. Liposomes can serve to target the therapeutic agents to a particular tissue. Liposomes also can be used to increase the half-life of the therapeutic agents. Many methods are available for preparing liposomes, as described in, for example, Szoka et al., Ann. Rev. Biophys. Bioeng., 9, 467 (1980) and U.S. Pat. Nos. 4,235,871, 4,501,728, 4,837,028, and 5,019,369.

[1343] In some embodiments, the therapeutic agents provided herein are formulated in time-released, delayed release, or sustained release delivery systems such that the delivery of the composition occurs prior to, and with sufficient time to, cause sensitization of the site to be treated. Such systems can avoid repeated administrations of the therapeutic agent, thereby increasing convenience to the subject and the physician, and may be particularly suitable for certain composition embodiments provided herein. In one embodiment, the compositions of the invention are formulated such that they are suitable for extended-release of the circRNA contained therein. Such extended-release compositions may be conveniently administered to a subject at extended dosing intervals. For example, in one embodiment, the compositions of the present invention are administered to a subject twice a day, daily or every other day. In an embodiment, the compositions of the present invention are administered to a subject twice a week, once a week, every ten days, every two weeks, every three weeks, every four weeks, once a month, every six weeks, every eight weeks, every three months, every four months, every six months, every eight months, every nine months or annually.

[1344] In some embodiments, a protein encoded by an inventive polynucleotide is produced by a target cell for sustained amounts of time. For example, the protein may be produced for more than one hour, more than four, more than six, more than 12, more than 24, more than 48 hours, or more than 72 hours after administration. In some embodiments the polypeptide is expressed at a peak level about six hours after administration. In some embodiments the expression of the polypeptide is sustained at least at a therapeutic level. In some embodiments, the polypeptide is expressed at least at a therapeutic level for more than one, more than four, more than six, more than 12, more than 24, more than 48, or more than 72 hours after administration. In some embodiments, the polypeptide is detectable at a therapeutic level in patient tissue (e.g., liver or lung). In some embodiments, the level of detectable polypeptide is from continuous expression from the circRNA composition over periods of time of more than one, more than four, more than six, more than 12, more than 24, more than 48, or more than 72 hours after administration.

[1345] In certain embodiments, a protein encoded by an inventive polynucleotide is produced at levels above normal physiological levels. The level of protein may be increased as compared to a control. In some embodiments, the control is the baseline physiological level of the polypeptide in a normal individual or in a population of normal individuals. In other embodiments, the control is the baseline physiological level of the polypeptide in an individual having a deficiency in the relevant protein or polypeptide or in a population of individuals having a deficiency in the relevant protein or polypeptide. In some embodiments, the control can be the normal level of the relevant protein or polypeptide in the individual to whom the composition is administered. In other embodiments, the control is the expression level of the polypeptide upon other therapeutic intervention, e.g., upon direct injection of the corresponding polypeptide, at one or more comparable time points.

[1346] In certain embodiments, the levels of a protein encoded by an inventive polynucleotide are detectable at 3 days, 4 days, 5 days, or 1 week or more after administration. Increased levels of protein may be observed in a tissue (e.g., liver or lung).

[1347] In some embodiments, the method yields a sustained circulation half-life of a protein encoded by an inventive polynucleotide. For example, the protein may be detected for hours or days longer than the half-life observed via subcutaneous injection of the protein or mRNA encoding the protein. In some embodiments, the half-life of the protein is 1 day, 2 days, 3 days, 4 days, 5 days, or 1 week or more.

[1348] Many types of release delivery systems are available and known to those of ordinary skill in the art. They include polymer based systems such as poly(lactide-glycolide), copolyoxalates, polycaprolactones, polyesteramides, polyorthoesters, polyhydroxybutyric acid, and polyanhydrides. Microcapsules of the foregoing polymers containing drugs are described in, for example, U.S. Pat. No. 5,075,109. Delivery systems also include non-polymer systems that are lipids including sterols such as cholesterol, cholesterol esters, and fatty acids or neutral fats such as mono-di-and tri-glycerides; hydrogel release systems; sylastic systems; peptide based systems: wax coatings; compressed tablets using conventional binders and excipients; partially fused implants; and the like. Specific examples include, but are not limited to: (a) erosional systems in which the active composition is contained in a form within a matrix such as those described in U.S. Pat. Nos. 4,452,775, 4,667,014, 4,748,034, and 5,239,660 and (b) diffusional systems in which an active component permeates at a controlled rate from a polymer such as described in U.S. Pat. Nos. 3,832,253 and 3,854,480. In addition, pump-based hardware delivery systems can be used, some of which are adapted for implantation.

[1349] In some embodiments, the therapeutic agent can be conjugated either directly or indirectly through a linking moiety to a targeting moiety. Methods for conjugating therapeutic agents to targeting moieties is known in the art. See, for instance, Wadwa et al., J, Drug Targeting 3:111 (1995) and U.S. Pat. No. 5,087,616.

[1350] In some embodiments, the therapeutic agents provided herein are formulated into a depot form, such that the manner in which the therapeutic agent is released into the body to which it is administered is controlled with respect to time and location within the body (see, for example, U.S. Pat. No. 4,450,150). Depot forms of therapeutic agents can be, for example, an implantable composition comprising the therapeutic agents and a porous or non-porous material, such as a polymer, wherein the therapeutic agents are encapsulated by or diffused throughout the material and/or degradation of the non-porous material. The depot is then implanted into the desired location within the body and the therapeutic agents are released from the implant at a predetermined rate.

### 10. Therapeutic Methods

### A. Areas for Treatment & Relevant Diseases/Disorders

[1351] In certain aspects, provided herein is a method of treating and/or preventing a condition, e.g., an autoimmune disorder or cancer.

[1352] In certain embodiments, the therapeutic agents provided herein are co-administered with one or more additional therapeutic agents (e.g., in the same pharmaceutical composition or in separate pharmaceutical compositions). In some embodiments, the therapeutic agent provided herein can be administered first and the one or more additional therapeutic agents can be administered second, or vice versa. Alternatively, the therapeutic agent provided herein and the one or more additional therapeutic agents can be administered simultaneously.

[1353] In some embodiments, the subject is a mammal. In some embodiments, the mammal referred to herein can be any mammal, including, but not limited to, mammals of the order Rodentia, such as mice and hamsters, or mammals of the order Logomorpha, such as rabbits. The mammals may be from the order Carnivora, including Felines (cats) and Canines (dogs). The mammals may be from the order Artiodactyla, including Bovines (cows) and Swines (pigs), or of the order Perssodactyla, including Equines (horses). The mammals may be of the order Primates, Ceboids, or Simoids (monkeys) or of the order Anthropoids (humans and αpes). Preferably, the mammal is a human.

### EXAMPLES

[1354] Wesselhoeft et al., (2019) RNA Circularization Diminishes Immunogenicity and Can Extend Translation Duration In vivo. Molecular Cell. 74(3), 508-520 and Wesselhoeft et al., (2018) Engineering circular RNA for Potent and Stable Translation in Eukaryotic Cells. Nature Communications. 9, 2629 are incorporated by reference in their entirety.

[1355] The invention is further described in detail by reference to the following examples but are not intended to be limited to the following examples. These examples encompass any and all variations of the illustrations with the intention of providing those of ordinary skill in the art with complete disclosure and description of how to make and use the subject invention and are not intended to limit the scope of what is regarded as the invention.

### Example 1

### Example 1a: External Duplex Regions Allow for Circularization of Long Precursor RNA Using the Permuted Intron Exon (PIE) Circularization Strategy

[1356] A 1.1kb sequence containing a full-length encephalomyocarditis virus (EMCV) IRES, a Gaussia luciferase (GLuc) expression sequence, and two short exon fragments of the permuted intron-exon (PIE) construct were inserted between the 3′ and 5′ introns of the permuted group I catalytic intron in the thymidylate synthase (Td) gene of the T4 phage. Precursor RNA was synthesized by run-off transcription. Circularization was attempted by heating the precursor RNA in the presence of magnesium ions and GTP, but splicing products were not obtained.

[1357] Perfectly complementary 9 nucleotide and 19 nucleotide long duplex regions were designed and added at the 5′ and 3′ ends of the precursor RNA. Addition of these homology arms increased splicing efficiency from 0 to 16% for 9 nucleotide duplex regions and to 48% for 19 nucleotide duplex regions as assessed by disappearance of the precursor RNA band.

[1358] The splicing product was treated with RNase R. Sequencing across the putative splice junction of RNase R-treated splicing reactions revealed ligated exons, and digestion of the RNase R-treated splicing reaction with oligonucleotide-targeted RNase H produced a single band in contrast to two bands yielded by RNase H-digested linear precursor. This shows that circular RNA is a major product of the splicing reactions of precursor RNA containing the 9 or 19 nucleotide long external duplex regions

### Example 1B: Spacers that Conserve Secondary Structures of IRES and PIE Splice Sites Increase Circularization Efficiency

[1359] A series of spacers was designed and inserted between the 3′ PIE splice site and the IRES. These spacers were designed to either conserve or disrupt secondary structures within intron sequences in the IRES, 3′ PIE splice site, and/or 5′ splice site. The addition of spacer sequences designed to conserve secondary structures resulted in 87% splicing efficiency, while the addition of a disruptive spacer sequences resulted in no detectable splicing.

### Example 2

### Example 2a: Internal Duplex Regions in Addition to External Duplex Regions Create a Splicing Bubble and Allows for Translation of Several Expression Sequences

[1360] Spacers were designed to be unstructured, non-homologous to the intron and IRES sequences, and to contain spacer-spacer duplex regions. These were inserted between the 5′ exon and IRES and between the 3′ exon and expression sequence in constructs containing external duplex regions, EMCV IRES, and expression sequences for Gaussia luciferase (total length: 1289 nt), Firefly luciferase (2384 nt), eGFP (1451 nt), human erythropoietin (1313 nt), and Cas9 endonuclease (4934 nt). Circularization of all 5 constructs was achieved. Circularization of constructs utilizing T4 phage and Anabaena introns were roughly equal. Circularization efficiency was higher for shorter sequences. To measure translation, each construct was transfected into HEK293 cells. Gaussia and Firefly luciferase transfected cells produced a robust response as measured by luminescence, human erythropoietin was detectable in the media of cells transfected with erythropoietin circRNA, and EGFP fluorescence was observed from cells transfected with EGFP circRNA. Co-transfection of Cas9 circRNA with sgRNA directed against GFP into cells constitutively expressing GFP resulted in ablated fluorescence in up to 97% of cells in comparison to an sgRNA-only control.

### Example 2B: Use of CVB3 IRES Increases Protein Production

[1361] Constructs with internal and external duplex regions and differing IRES containing either Gaussia luciferase or Firefly luciferase expression sequences were made. Protein production was measured by luminescence in the supernatant of HEK293 cells 24 hours after transfection. The Coxsackievirus B3 (CVB3) IRES construct produced the most protein in both cases.

### Example 2C: Use of polyA or polyAC Spacers Increases Protein Production

[1362] Thirty nucleotide long polyA or polyAC spacers were added between the IRES and splice junction in a construct with each IRES that produced protein in example 2B. Gaussia luciferase activity was measured by luminescence in the supernatant of HEK293 cells 24 hours after transfection. Both spacers improved expression in every construct over control constructs without spacers.

### Example 3

Hek293 or HeLa Cells Transfected with Circular RNA Produce More Protein than Those Transfected with Comparable Unmodified or Modified Linear RNA.

[1363] HPLC-purified Gaussia luciferase-coding circRNA (CVB3-GLuc-pAC) was compared with a canonical unmodified 5′ methylguanosine-capped and 3′ polyA-tailed linear GLuc mRNA, and a commercially available nucleoside-modified (pseudouridine, 5-methylcytosine) linear GLuc mRNA (from Trilink). Luminescence was measured 24 h post-transfection, revealing that circRNA produced 811.2% more protein than the unmodified linear mRNA in HEK293 cells and 54.5% more protein than the modified mRNA. Similar results were obtained in HeLa cells and a comparison of optimized circRNA coding for human erythropoietin with linear mRNA modified with 5-methoxyuridine.

[1364] Luminescence data was collected over 6 days. In HEK293 cells, circRNA transfection resulted in a protein production half-life of 80 hours, in comparison with the 43 hours of unmodified linear mRNA and 45 hours of modified linear mRNA. In HeLa cells, circRNA transfection resulted in a protein production half-life of 116 hours, in comparison with the 44 hours of unmodified linear mRNA and 49 hours of modified linear mRNA. CircRNA produced substantially more protein than both the unmodified and modified linear mRNAs over its lifetime in both cell types.

### Example 4

### Example 4a: Purification of circRNA by RNase Digestion, HPLC Purification, and Phosphatase Treatment Decreases Immunogenicity. Completely Purified Circular RNA is Significantly Less Immunogenic than Unpurified or Partially Purified Circular RNA. Protein Expression Stability and Cell Viability are Dependent on Cell Type and Circular RNA Purity

[1365] Human embryonic kidney 293 (HEK293) and human lung carcinoma A549 cells were transfected with:
[1366] a. products of an unpurified GLuc circular RNA splicing reaction,
[1367] b. products of RNase R digestion of the splicing reaction,
[1368] c. products of RNase R digestion and HPLC purification of the splicing reaction, or
[1369] d. products of RNase digestion, HPLC purification, and phosphatase treatment of the splicing reaction.

[1370] RNase R digestion of splicing reactions was insufficient to prevent cytokine release in A549 cells in comparison to untransfected controls.

[1371] The addition of HPLC purification was also insufficient to prevent cytokine release, although there was a significant reduction in interleukin-6 (IL-6) and a significant increase in interferon-α1 (IFNα1) compared to the unpurified splicing reaction.

[1372] The addition of a phosphatase treatment after HPLC purification and before RNase R digestion dramatically reduced the expression of all upregulated cytokines assessed in A549 cells. Secreted monocyte chemoattractant protein 1 (MCP1), IL-6, IFNα1, tumor necrosis factor α (TNFα), and IFNγ inducible protein-10 (IP-10) fell to undetectable or un-transfected baseline levels.

[1373] There was no substantial cytokine release in HEK293 cells. A549 cells had increased GLuc expression stability and cell viability when transfected with higher purity circular RNA. Completely purified circular RNA had a stability phenotype similar to that of transfected 293 cells.

### Example 4B: Circular RNA does not Cause Significant Immunogenicity and is not a RIG-I ligand

[1374] A549 cells were transfected with:
[1375] a. unpurified circular RNA,
[1376] b. high molecular weight (linear and circular concatenations) RNA,
[1377] c. circular (nicked) RNA,
[1378] d. an early fraction of purified circular RNA (more overlap with nicked RNA peak),
[1379] e. a late fraction of purified circular RNA (less overlap with nicked RNA peak),
[1380] f. introns excised during circularization, or
[1381] g. vehicle (i.e. untransfected control).

[1382] Precursor RNA was separately synthesized and purified in the form of the splice site deletion mutant (DS) due to difficulties in obtaining suitably pure linear precursor RNA from the splicing reaction. Cytokine release and cell viability was measured in each case.

[1383] Robust IL-6, RANTES, and IP-10 release was observed in response to most of the species present within the splicing reaction, as well as precursor RNA. Early circRNA fractions elicited cytokine responses comparable to other non-circRNA fractions, indicating that even relatively small quantities of linear RNA contaminants are able to induce a substantial cellular immune response in A549 cells. Late circRNA fractions elicited no cytokine response in excess of that from untransfected controls. A549 cell viability 36 hours post-transfection was significantly greater for late circRNA fractions compared with all of the other fractions.

[1384] RIG-I and IFN-β1 transcript induction upon transfection of A549 cells with late circRNA HPLC fractions, precursor RNA or unpurified splicing reactions were analyzed. Induction of both RIG-I and IFN-β1 transcripts were weaker for late circRNA fractions than precursor RNA and unpurified splicing reactions. RNase R treatment of splicing reactions alone was not sufficient to ablate this effect. Addition of very small quantities of the RIG-I ligand 3p-hpRNA to circular RNA induced substantial RIG-I transcription. In HeLa cells, transfection of RNase R-digested splicing reactions induced RIG-I and IFN-β1, but purified circRNA did not. Overall, HeLa cells were less sensitive to contaminating RNA species than A549 cells.

[1385] A time course experiment monitoring RIG-I, IFN-β1, IL-6, and RANTES transcript induction within the first 8 hours after transfection of A549 cells with splicing reactions or fully purified circRNA did not reveal a transient response to circRNA. Purified circRNA similarly failed to induce pro-inflammatory transcripts in RAW264.7 murine macrophages.

[1386] A549 cells were transfected with purified circRNA containing an EMCV IRES and EGFP expression sequence. This failed to produce substantial induction of pro-inflammatory transcripts. These data demonstrate that non-circular components of the splicing reaction are responsible for the immunogenicity observed in previous studies and that circRNA is not a natural ligand for RIG-I.

### Example 5

### Circular RNA Avoids Detection by TLRs.

[1387] TLR 3, 7, and 8 reporter cell lines were transfected with multiple linear or circular RNA constructs and secreted embryonic alkaline phosphatase (SEAP) was measured.

[1388] Linearized RNA was constructed by deleting the intron and homology arm sequences. The linear RNA constructs were then treated with phosphatase (in the case of capped RNAs, after capping) and purified by HPLC.

[1389] None of the attempted transfections produced a response in TLR7 reporter cells. TLR3 and TLR8 reporter cells were activated by capped linearized RNA, polyadenylated linearized RNA, the nicked circRNA HPLC fraction, and the early circRNA fraction. The late circRNA fraction and m1ψ-mRNA did not provoke TLR-mediated response in any cell line.

[1390] In a second experiment, circRNA was linearized using two methods: treatment of circRNA with heat in the presence of magnesium ions and DNA oligonucleotide-guided RNase H digestion. Both methods yielded a majority of full-length linear RNA with small amounts of intact circRNA. TLR3, 7, and 8 reporter cells were transfected with circular RNA, circular RNA degraded by heat, or circular RNA degraded by RNase H, and SEAP secretion was measured 36 hours after transfection. TLR8 reporter cells secreted SEAP in response to both forms of degraded circular RNA, but did not produce a greater response to circular RNA transfection than mock transfection. No activation was observed in TLR3 and TLR7 reporter cells for degraded or intact conditions, despite the activation of TLR3 by in vitro transcribed linearized RNA.

### Example 6

Unmodified Circular RNA Produces Increased Sustained In Vivo Protein Expression than Linear RNA

[1391] Mice were injected and HEK293 cells were transfected with unmodified and m1ψ-modified human erythropoietin (hEpo) linear mRNAs and circRNAs. Equimolar transfection of m1ψ-mRNA and unmodified circRNA resulted in robust protein expression in HEK293 cells. hEpo linear mRNA and circRNA displayed similar relative protein expression patterns and cell viabilities in comparison to GLuc linear mRNA and circRNA upon equal weight transfection of HEK293 and A549 cells.

[1392] In mice, hEpo was detected in serum after the injection of hEpo circRNA or linear mRNA into visceral adipose. hEpo detected after the injection of unmodified circRNA decayed more slowly than that from unmodified or m1ψ-mRNA and was still present 42 hours post-injection. Serum hEpo rapidly declined upon the injection of unpurified circRNA splicing reactions or unmodified linear mRNA. Injection of unpurified splicing reactions produced a cytokine response detectable in serum that was not observed for the other RNAs, including purified circRNA.

### Example 7

### Circular RNA can be Effectively Delivered In Vivo or In Vitro Via Lipid Nanoparticles.

[1393] Purified circular RNA was formulated into lipid nanoparticles (LNPs) with the ionizable lipidoid cKK-E12 (Dong et al., 2014; Kauffman et al., 2015). The particles formed uniform multilamellar structures with an average size, polydispersity index, and encapsulation efficiency similar to that of particles containing commercially available control linear mRNA modified with 5moU.

[1394] Purified hEpo circRNA displayed greater expression than 5moU-mRNA when encapsulated in LNPs and added to HEK293 cells. Expression stability from LNP-RNA in HEK293 cells was similar to that of RNA delivered by transfection reagent, with the exception of a slight delay in decay for both 5moU-mRNA and circRNA. Both unmodified circRNA and 5moU-mRNA failed to activate RIG-I/IFN-β1 in vitro.

[1395] In mice, LNP-RNA was delivered by local injection into visceral adipose tissue or intravenous delivery to the liver. Serum hEpo expression from circRNA was lower but comparable with that from 5moU-mRNA 6 hours after delivery in both cases. Serum hEpo detected after adipose injection of unmodified LNP-circRNA decayed more slowly than that from LNP-5moU-mRNA, with a delay in expression decay present in serum that was similar to that noted in vitro, but serum hEpo after intravenous injection of LNP-circRNA or LNP-5moU-mRNA decayed at approximately the same rate. There was no increase in serum cytokines or local RIG-I, TNFα, or IL-6 transcript induction in any of these cases.

### Example 8

### Expression and Functional Stability by IRES in HEK293, HepG2, and ICIC7 Cells.

[1396] Constructs including anabaena intron/exon regions, a Gaussia luciferase expression sequence, and varying IRES were circularized. 100 ng of each circularization reaction was separately transfected into 20,000 HEK293 cells, HepG2 cells, and 1C1C7 cells using Lipofectamine MessengerMax. Luminescence in each supernatant was assessed after 24 hours as a measure of protein expression. In HEK293 cells, constructs including Crohivirus B, Salivirus FHB, Aichi Virus, Salivirus HG-J1, and Enterovirus J IRES produced the most luminescence at 24 hours (FIG. 1A). In HepG2 cells, constructs including Aichi Virus, Salivirus FHB, EMCV-Cf, and CVA3 IRES produced high luminescence at 24 hours (FIG. 1B). In 1C1C7 cells, constructs including Salivirus FHB, Aichi Virus, Salivirus NG-J1, and Salivirus A SZ-1 IRES produced high luminescence at 24 hours (FIG. 1C).

[1397] A trend of larger IRES producing greater luminescence at 24 hours was observed. Shorter total sequence length tends to increase circularization efficiency, so selecting a high expression and relatively short IRES may result in an improved construct. In HEK293 cells, a construct using the Crohivirus B IRES produced the highest luminescence, especially in comparison to other IRES of similar length (FIG. 2A). Expression from IRES constructs in HepG2 and 1C1C7 cells plotted against IRES size are in FIGS. 2B and 2C.

[1398] Functional stability of select IRES constructs in HepG2 and 1C1C7 cells were measured over 3 days. Luminescence from secreted Gaussia luciferase in supernatant was measured every 24 hours after transfection of 20,000 cells with 100 ng of each circularization reaction, followed by complete media replacement. Salivirus A GUT and Salivirus FHB exhibited the highest functional stability in HepG2 cells, and Salivirus N-J1 and Salivirus FHB produced the most stable expression in 1C1C7 cells (FIGS. 3A and 3B).

### Example 9

### Expression and Functional Stability by IRES in Jurkat Cells.

[1399] 2 sets of constructs including anabaena intron/exon regions, a Gaussia luciferase expression sequence, and a subset of previously tested IRES were circularized. 60,000 Jurkat cells were electroporated with 1 μg of each circularization reaction. Luminescence from secreted Gaussia luciferase in supernatant was measured 24 hours after electroporation. A CVB3 IRES construct was included in both sets for comparison between sets and to previously defined IRES efficacy. CVB1 and Salivirus A SZ1 IRES constructs produced the most expression at 24h. Data can be found in FIGS. 4A and 4B.

[1400] Functional stability of the IRES constructs in each round of electroporated Jurkat cells was measured over 3 days. Luminescence from secreted Gaussia luciferase in supernatant was measured every 24 hours after electroporation of 60,000 cells with 1 μg of each circularization reaction, followed by complete media replacement (FIGS. 5A and 5B).

[1401] Salivirus A SZ1 and Salivirus A BN2 IRES constructs had high functional stability compared to other constructs.

### Example 10

### Expression, Functional Stability, and Cytokine Release of Circular and Linear RNA in Jurkat Cells

[1402] A construct including anabaena intron/exon regions, a Gaussia luciferase expression sequence, and a Salivirus FHB IRES was circularized. mRNA including a Gaussia luciferase expression sequence and a ˜150nt polyA tail (e.g., SEQ ID NO: 3279), and modified to replace 100% of uridine with 5-methoxy uridine (5moU) is commercially available and was purchased from Trilink. 5moU nucleotide modifications have been shown to improve mRNA stability and expression (Bioconjug Chem. 2016 Mar. 16; 27(3):849-53). Expression of modified mRNA, circularization reactions (unpure), and circRNA purified by size exclusion HPLC (pure) in Jurkat cells were measured and compared (FIG. 6A). Luminescence from secreted Gaussia luciferase in supernatant was measured 24 hours after electroporation of 60,000 cells with 1 μg of each RNA species.

[1403] Luminescence from secreted Gaussia luciferase in supernatant was measured every 24 hours after electroporation of 60,000 cells with lug of each RNA species, followed by complete media replacement. A comparison of functional stability data of modified mRNA and circRNA in Jurkat cells over 3 days is in FIG. 6B.

[1404] IFNγ (FIG. 7A), IL-6 (FIG. 7B), IL-2 (FIG. 7C), RIG-I (FIG. 7D), IFN-β1 (FIG. 7E), and TNFα (FIG. 7F) transcript induction was measured 18 hours after electroporation of 60,000 Jurkat cells with 1 μg of each RNA species described above and 3p-hpRNA (5′ triphosphate hairpin RNA, which is a known RIG-I agonist).

### Example 11

### Expression of Circular and Linear RNA in Monocytes and Macrophages.

[1405] A construct including anabaena intron/exon regions, a Gaussia luciferase expression sequence, and a Salivirus FHB IRES was circularized. mRNA including a Gaussia luciferase expression sequence and a ˜150 nt polyA tail (e.g., SEQ ID NO: 3279), and modified to replace 100% of uridine with 5-methoxy uridine (5moU) was purchased from Trilink. Expression of circular and modified mRNA was measured in human primary monocytes (FIG. 8A) and human primary macrophages (FIG. 8B). Luminescence from secreted Gaussia luciferase in supernatant was measured 24 hours after electroporation of 60,000 cells with 1 μg of each RNA species. Luminescence was also measured 4 days after electroporation of human primary macrophages with media changes every 24 hours (FIG. 8C). The difference in luminescence was statistically significant in each case (p<0.05).

### Example 12

### Expression and Functional Stability by IRES in Primary T Cells.

[1406] Constructs including anabaena intron/exon regions, a Gaussia luciferase expression sequence, and a subset of previously tested IRES were circularized and reaction products were purified by size exclusion HPLC. 150,000 primary human CD3+ T cells were electroporated with 1 μg of each circRNA. Luminescence from secreted Gaussia luciferase in supernatant was measured 24 hours after electroporation (FIG. 9A). Aichi Virus and CVB3 IRES constructs had the most expression at 24 hours.

[1407] Luminescence was also measured every 24 hours after electroporation for 3 days in order to compare functional stability of each construct (FIG. 9B). The construct with a Salivirus A SZ1 IRES was the most stable.

### Example 13

### Expression and Functional Stability of Circular and Linear RNA in Primary T Cells and PBMCs.

[1408] Constructs including anabaena intron/exon regions, a Gaussia luciferase expression sequence, and a Salivirus A SZ1 IRES or Salivirus FHB IRES were circularized. mRNA including a Gaussia luciferase expression sequence and a ˜150 nt polyA tail (e.g., SEQ ID NO: 3279), and modified to replace 100% of uridine with 5-methoxy uridine (5moU) and was purchased from Trilink. Expression of Salivirus A SZ1 IRES HPLC purified circular and modified mRNA was measured in human primary CD3+ T cells. Expression of Salivirus FHB HPLC purified circular, unpurified circular and modified mRNA was measured in human PBMCs. Luminescence from secreted Gaussia luciferase in supernatant was measured 24 hours after electroporation of 150,000 cells with 1 μg of each RNA species. Data for primary human T cells is in FIGS. 10A and 10B, and data for PBMCs is in FIG. 10C. The difference in expression between the purified circular RNA and unpurified circular RNA or linear RNA was significant in each case (p<0.05).

[1409] Luminescence from secreted Gaussia luciferase in primary T cell supernatant was measured every 24 hours after electroporation over 3 days in order to compare construct functional stability. Data is shown in FIG. 10B. The difference in relative luminescence from the day 1 measurement between purified circular RNA and linear RNA was significant at both day 2 and day 3 for primary T cells.

### Example 14

### Circularization Efficiency by Permutation Site in Anabaena Intron.

[1410] RNA constructs including a CVB3 IRES, a Gaussia luciferase expression sequence, anabaena intron/exon regions, spacers, internal duplex regions, and homology arms were produced. Circularization efficiency of constructs using the traditional anabaena intron permutation site and 5 consecutive permutations sites in P9 was measured by HPLC. HPLC chromatograms for the 5 consecutive permutation sites in P9 are shown in FIG. 11A.

[1411] Circularization efficiency was measured at a variety of permutation sites. Circularization efficiency is defined as the area under the HPLC chromatogram curve for each of circRNA/(circRNA+precursor RNA). Ranked quantification of circularization efficiency at each permutation site is in FIG. 11B. 3 permutation sites (indicated in FIG. 11B) were selected for further investigation.

[1412] Circular RNA in this example was circularized by in vitro transcription (IVT) then purified via spin column. Circularization efficiency for all constructs would likely be higher if the additional step of incubation with Mg²⁺ and guanosine nucleotide were included; however, removing this step allowed for comparison between, and optimization of, circular RNA constructs. This level of optimization is especially useful for maintaining high circularization efficiency with large RNA constructs, such as those encoding chimeric antigen receptors.

### Example 15

### Circularization Efficiency of Alternative Introns.

[1413] Precursor RNA containing a permuted group 1 intron of variable species origin or permutation site and several constant elements including: a CVB3 IRES, a Gaussia luciferase expression sequence, spacers, internal duplex regions, and homology arms were created. Circularization data can be found in FIG. 12. FIG. 12A shows chromatograms resolving precursor, CircRNA and introns. FIG. 12B provides ranked quantification of circularization efficiency, based on the chromatograms shown in FIG. 12A, as a function of intron construct.

[1414] Circular RNA in this example was circularized by in vitro transcription (IVT) then spin column purification. Circularization efficiency for all constructs would likely be higher if the additional step of incubation with Mg²⁺ and guanosine nucleotide were included; however, removing this step allows for comparison between, and optimization of, circular RNA constructs. This level of optimization is especially useful for maintaining high circularization efficiency with large RNA constructs, such as those encoding chimeric antigen receptors.

### Example 16

### Circularization Efficiency by Homology Arm Presence or Length.

[1415] RNA constructs including a CVB3 IRES, a Gaussia luciferase expression sequence, anabaena intron/exon regions, spacers, and internal duplex regions were produced. Constructs representing 3 anabaena intron permutation sites were tested with 30nt, 25% GC homology arms or without homology arms (“NA”). These constructs were allowed to circularize without the step of incubation with Mg²⁺. Circularization efficiency was measured and compared. Data can be found in FIG. 13. Circularization efficiency was higher for each construct lacking homology arms. FIG. 13A provides ranked quantification of circularization efficiency; FIG. 13B provides chromatograms resolving precursor, circRNA and introns.

[1416] For each of the 3 permutation sites, constructs were created with 10 nt, 20 nt, and 30 nt arm length and 25%, 50%, and 75% GC. Splicing efficiency of these constructs was measured and compared to constructs without homology arms (FIG. 14). Splicing efficiency is defined as the proportion of free introns relative to the total RNA in the splicing reaction.

[1417] FIG. 15 A (left) contains HPLC chromatograms showing the contribution of strong homology arms to improved splicing efficiency. Top left: 75% GC content, 10 nt homology arms. Center left: 75% GC content, 20 nt homology arms. Bottom left: 75% GC content, 30 nt homology arms.

[1418] FIG. 15 A (right) shows HPLC chromatograms indicating increased splicing efficiency paired with increased nicking, appearing as a shoulder on the circRNA peak. Top right: 75% GC content, 10 nt homology arms. Center right: 75% GC content, 20 nt homology arms. Bottom right: 75% GC content, 30 nt homology arms.

[1419] FIG. 15 B (left) shows select combinations of permutation sites and homology arms hypothesized to demonstrate improved circularization efficiency.

[1420] FIG. 15 B (right) shows select combinations of permutation sites and homology arms hypothesized to demonstrate improved circularization efficiency, treated with E. coli polyA polymerase.

[1421] Circular RNA in this example was circularized by in vitro transcription (IVT) then spin-column purified. Circularization efficiency for all constructs would likely be higher if an additional Mg²⁺ incubation step with guanosine nucleotide were included; however, removing this step allowed for comparison between, and optimization of, circular RNA constructs. This level of optimization is especially useful for maintaining high circularization efficiency with large RNA constructs, such as those encoding chimeric antigen receptors.

### Example 17

### Circular RNA Encoding Chimeric Antigen Receptors.

[1422] Constructs including anabaena intron/exon regions, a Kymriah chimeric antigen receptor (CAR) expression sequence, and a CVB3 IRES were circularized. 100,000 human primary CD3+ T cells were electroporated with 500ng of circRNA and co-cultured for 24 hours with Raji cells stably expressing GFP and firefly luciferase. Effector to target ratio (E:T ratio) 0.75:1. 100,000 human primary CD3+ T cells were mock electroporated and co-cultured as a control (FIG. 16).

[1423] Sets of 100,000 human primary CD3+ T cells were mock electroporated or electroporated with 1 μg of circRNA then co-cultured for 48 hours with Raji cells stably expressing GFP and firefly luciferase. E:T ratio 10:1 (FIG. 17).

[1424] Quantification of specific lysis of Raji target cells was determined by detection of firefly luminescence (FIG. 18). 100,000 human primary CD3+ T cells either mock electroporated or electroporated with circRNA encoding different CAR sequences were co-cultured for 48 hours with Raji cells stably expressing GFP and firefly luciferase. % Specific lysis defined as 1-[CAR condition luminescence]/[mock condition luminescence]. E:T ratio 10:1.

### Example 18

Expression and Functional Stability of Circular and Linear RNA in Jurkat Cells and Resting human T cells.

[1425] Constructs including anabaena intron/exon regions, a Gaussia luciferase expression sequence, and a subset of previously tested IRES were circularized and reaction products were purified by size exclusion HPLC. 150,000 Jurkat cells were electroporated with 1 μg of circular RNA or 5moU-mRNA. Luminescence from secreted Gaussia luciferase in supernatant was measured 24 hours after electroporation (FIG. 19A left). 150,000 resting primary human CD3+ T cells (10 days post-stimulation) were electroporated with 1 μg of circular RNA or 5moU-mRNA. Luminescence from secreted Gaussia luciferase in supernatant was measured 24 hours after electroporation (FIG. 19A right).

[1426] Luminescence from secreted Gaussia luciferase in supernatant was measured every 24 hours after electroporation, followed by complete media replacement. Functional stability data is shown in FIG. 19B. Circular RNA had more functional stability than linear RNA in each case, with a more pronounced difference in Jurkat cells.

### Example 19

IFN-β1, RIG-I, IL-2, IL-6, IFNγ, and TNFα Transcript Induction of Cells Electroporated with Linear RNA or Varying Circular RNA Constructs.

[1427] Constructs including anabaena intron/exon regions, a Gaussia luciferase expression sequence, and a subset of previously tested IRES were circularized and reaction products were purified by size exclusion HPLC. 150,000 CD3+ human T cells were electroporated with 1 μg of circular RNA, 5moU-mRNA, or immunostimulatory positive control poly inosine:cytosine. IFN-β1 (FIG. 20A), RIG-I (FIG. 20B), IL-2 (FIG. 20C), IL-6 (FIG. 20D), IFN-γ (FIG. 20E), and TNF-α (FIG. 20F) transcript induction was measured 18 hours after electroporation.

### Example 20

Specific Lysis of Target Cells and IFNγ Transcript Induction by CAR Expressing Cells Electroporated with Different Amounts of Circular or Linear RNA; Specific Lysis of Target and Non-Target Cells by CAR Expressing Cells at Different E: T Ratios.

[1428] Constructs including anabaena intron/exon regions, an anti-CD19 CAR expression sequence, and a CVB3 IRES were circularized and reaction products were purified by size exclusion HPLC. 150,000 human primary CD3+ T cells either mock electroporated or electroporated with different quantities of circRNA encoding an anti-CD19 CAR sequence were co-cultured for 12 hours with Raji cells stably expressing GFP and firefly luciferase at an E:T ratio of 2:1. Specific lysis of Raji target cells was determined by detection of firefly luminescence (FIG. 21A). % Specific lysis was defined as 1-[CAR condition luminescence]/[mock condition luminescence]. IFNγ transcript induction was measured 24 hours after electroporation (FIG. 21B).

[1429] 150,000 human primary CD3+ T cells were either mock electroporated or electroporated with 500ng circRNA or m1ψ-mRNA encoding an anti-CD19 CAR sequence, then co-cultured for 24 hours with Raji cells stably expressing firefly luciferase at different E:T ratios. Specific lysis of Raji target cells was determined by detection of firefly luminescence (FIG. 22A). Specific lysis was defined as 1-[CAR condition luminescence]/[mock condition luminescence].

[1430] CAR expressing T cells were also co-cultured for 24 hours with Raji or K562 cells stably expressing firefly luciferase at different E:T ratios. Specific lysis of Raji target cells or K562 non-target cells was determined by detection of firefly luminescence (FIG. 22B). % Specific lysis is defined as 1-[CAR condition luminescence]/[mock condition luminescence].

### Example 21

Specific Lysis of Target Cells by T Cells Electroporated with Circular RNA or Linear RNA Encoding a CAR.

[1431] Constructs including anabaena intron/exon regions, an anti-CD19 CAR expression sequence, and a CVB3 IRES were circularized and reaction products were purified by size exclusion HPLC. Human primary CD3+ T cells were electroporated with 500 ng of circular RNA or an equimolar quantity of m1ψ-mRNA, each encoding a CD19-targeted CAR. Raji cells were added to CAR-T cell cultures over 7 days at an E:T ratio of 10:1. % Specific lysis was measured for both constructs at 1, 3, 5, and 7 days (FIG. 23).

### Example 22

### Specific Lysis of Raji Cells by T Cells Expressing an Anti-CD19 CAR or an Anti-BCMA CAR.

[1432] Constructs including anabaena intron/exon regions, anti-CD19 or anti-BCMA CAR expression sequence, and a CVB3 IRES were circularized and reaction products were purified by size exclusion HPLC. 150,000 primary human CD3+ T cells were electroporated with 500ng of circRNA, then were co-cultured with Raji cells at an E:T ratio of 2:1. % Specific lysis was measured 12 hours after electroporation (FIG. 24).

### Example 23

### Expression, Functional Stability, and Cytokine Transcript Induction of Circular and Linear RNA Expressing Antigens.

[1433] Constructs including one or more antigen expression sequences are circularized and reaction products are purified by size exclusion HPLC. Antigen presenting cells are electroporated with circular RNA or mRNA.

[1434] In vitro antigen production is measured via ELISA. Optionally, antigen production is measured every 24 hours after electroporation. Cytokine transcript induction or release is measured 18 hours after electroporation of antigen presenting cells with circular or linear RNA encoding antigens. The tested cytokines may include IFN-β1, RIG-I, IL-2, TL-6, IFNγ, RANTES, and TNFα.

[1435] In vitro antigen production and cytokine induction are measured using purified circRNA, purified circRNA plus antisense circRNA, and unpurified circRNA in order to find the ratio that best preserves expression and immune stimulation.

### Example 24

### In Vivo Antigen and Antibody Expression in Animal Models.

[1436] To assess the ability of antigen encoding circRNAs to facilitate antigen expression and antibody production in vivo, escalating doses of RNA encoding one or more antigens is introduced into mice via intramuscular injection.

[1437] Mice are injected once, blood collected after 28 days, then injected again, with blood collected 14 days thereafter. Neutralizing antibodies against antigen of interest is measured via ELISA.

### Example 25

### Protection Against Infection.

[1438] To assess the ability of antigen encoding circRNAs to protect against or cure an infection, RNA encoding one or more antigens of a virus (such as influenza) is introduced into mice via intramuscular injection.

[1439] Mice receive an initial injection and boost injections of circRNA encoding one or more antigens. Protection from a virus such as influenza is determined by weight loss and mortality over 2 weeks.

### Example 26

### Example 26a: Synthesis of Compounds

[1440] Synthesis of representative ionizable lipids of the invention are described in PCT applications PCT/US2016/052352, PCT/US2016/068300, PCT/US2010/061058, PCT/US2018/058555, PCT/US2018/053569, PCT/US2017/028981, PCT/US2019/025246, PCT/US2018/035419, PCT/US2019/015913, and US applications with publication numbers 20190314524, 20190321489, and 20190314284, the contents of each of which are incorporated herein by reference in their entireties.

### Example 26B: Synthesis of Compounds

[1441] Synthesis of representative ionizable lipids of the invention are described in US patent publication number US20170210697A1, the contents of of which is incorporated herein by reference in its entirety.

### Example 27

### Protein Expression by Organ

[1442] Circular or linear RNA encoding FLuc was generated and loaded into transfer vehicles with the following formulation: 50% ionizable Lipid 10b-15 represented by

[chemical structure]

10% DSPC, 1.5% PEG-DMG, 38.5% cholesterol. CD-1 mice were dosed at 0.2 mg/kg and luminescence was measured at 6 hours (live IVIS) and 24 hours (live IVIS and ex vivo IVIS). Total Flux (photons/second over a region of interest) of the liver, spleen, kidney, lung, and heart was measured (FIGS. 25 and 26).

### Example 28

### Distribution of Expression in the Spleen

[1443] Circular or linear RNA encoding GFP is generated and loaded into transfer vehicles with the following formulation: 50% ionizable Lipid 10b-15 represented by

[chemical structure]

10% DSPC, 1.5% PEG-DMG, 38.5% cholesterol. The formulation is administered to CD-1 mice. Flow cytometry is run on spleen cells to determine the distribution of expression across cell types.

### Example 29

### Example 29a: Production of Nanoparticle Compositions

[1444] In order to investigate safe and efficacious nanoparticle compositions for use in the delivery of circular RNA to cells, a range of formulations are prepared and tested. Specifically, the particular elements and ratios thereof in the lipid component of nanoparticle compositions are optimized.

[1445] Nanoparticles can be made in a 1 fluid stream or with mixing processes such as microfluidics and T-junction mixing of two fluid streams, one of which contains the circular RNA and the other has the lipid components.

[1446] Lipid compositions are prepared by combining an ionizable lipid, optionally a helper lipid (such as DOPE, DSPC, or oleic acid obtainable from Avanti Polar Lipids, Alabaster, AL), a PEG lipid (such as 1,2-dimyristoyl-sn-glycerol methoxypolyethylene glycol, also known as PEG-DMG, obtainable from Avanti Polar Lipids, Alabaster, AL), and a structural lipid such as cholesterol at concentrations of about, e.g., 40 or 50 mM in a solvent, e.g., ethanol. Solutions should be refrigerated for storage at, for example, −20° C. Lipids are combined to yield desired molar ratios (see, for example, Tables 17a and 17b below) and diluted with water and ethanol to a final lipid concentration of e.g., between about 5.5 mM and about 25 mM.

TABLE 17a

| Formulation | |
|---|---|
| number | Description |
| 1 | Aliquots of 50 mg/mL ethanolic solutions of C12-200, DOPE, Chol and DMG- |
| | PEG2K (40:30:25:5) are mixed and diluted with ethanol to 3 mL final volume. |
| | Separately, an aqueous buffered solution (10 mM citrate/150 mM NaCl, pH |
| | 4.5) of circRNA is prepared from a 1 mg/mL stock. The lipid solution is |
| | injected rapidly into the aqueous circRNA solution and shaken to yield a final |
| | suspension in 20% ethanol. The resulting nanoparticle suspension is filtered, |
| | diafiltrated with 1 × PBS (pH 7.4), concentrated and stored at 2-8° C. |
| 2 | Aliquots of 50 mg/mL ethanolic solutions of DODAP, DOPE, cholesterol and |
| | DMG-PEG2K (18:56:20:6) are mixed and diluted with ethanol to 3 mL final |
| | volume. Separately, an aqueous buffered solution (10 mM citrate/150 mM |
| | NaCl, pH 4.5) of EPO circRNA is prepared from a 1 mg/mL stock. The lipid |
| | solution is injected rapidly into the aqueous circRNA solution and shaken to |
| | yield a final suspension in 20% ethanol. The resulting nanoparticle suspension |
| | is filtered, diafiltrated with 1 × PBS (pH 7.4), concentrated and stored at 2-8° C. |
| | Final concentration = 1.35 mg/mL EPO circRNA (encapsulated). Zave = 75.9 nm |
| | (Dv(50) = 57.3 nm; Dv(90) = 92.1 nm). |
| 3 | Aliquots of 50 mg/mL ethanolic solutions of HGT4003, DOPE, cholesterol and |
| | DMG-PEG2K (50:25:20:5) are mixed and diluted with ethanol to 3 mL final |
| | volume. Separately, an aqueous buffered solution (10 mM citrate/150 mM |
| | NaCl, pH 4.5) of circRNA is prepared from a 1 mg/mL stock. The lipid solution |
| | is injected rapidly into the aqueous circRNA solution and shaken to yield a final |
| | suspension in 20% ethanol. The resulting nanoparticle suspension is filtered, |
| | diafiltrated with 1 × PBS (pH 7.4), concentrated and stored at 2-8° C. |
| 4 | Aliquots of 50 mg/mL ethanolic solutions of ICE, DOPE and DMG-PEG2K |
| | (70:25:5) are mixed and diluted with ethanol to 3 mL final volume. Separately, |
| | an aqueous buffered solution (10 mM citrate/150 mM NaCl, pH 4.5) of |
| | circRNA is prepared from a 1 mg/mL stock. The lipid solution is injected |
| | rapidly into the aqueous circRNA solution and shaken to yield a final |
| | suspension in 20% ethanol. The resulting nanoparticle suspension is filtered, |
| | diafiltrated with 1 × PBS (pH 7.4), concentrated and stored at 2-8° C. |
| 5 | Aliquots of 50 mg/mL ethanolic solutions of HGT5000, DOPE, cholesterol and |
| | DMG-PEG2K (40:20:35:5) are mixed and diluted with ethanol to 3 mL final |
| | volume. Separately, an aqueous buffered solution (10 mM citrate/150 mM |
| | NaCl, pH 4.5) of EPO circRNA is prepared from a 1 mg/mL stock. The lipid |
| | solution is injected rapidly into the aqueous circRNA solution and shaken to |
| | yield a final suspension in 20% ethanol. The resulting nanoparticle suspension |
| | is filtered, diafiltrated with 1 × PBS (pH 7.4), concentrated and stored at 2-8° C. |
| | Final concentration = 1.82 mg/mL EPO mRNA (encapsulated). Zave = 105.6 nm |
| | (Dv(50) = 53.7 nm; Dv(90) = 157 nm). |
| 6 | Aliquots of 50 mg/mL ethanolic solutions of HGT5001, DOPE, cholesterol and |
| | DMG-PEG2K (40:20:35:5) are mixed and diluted with ethanol to 3 mL final |
| | volume. Separately, an aqueous buffered solution (10 mM citrate/150 mM |
| | NaCl, pH 4.5) of EPO circRNA is prepared from a 1 mg/mL stock. The lipid |
| | solution is injected rapidly into the aqueous circRNA solution and shaken to |
| | yield a final suspension in 20% ethanol. The resulting nanoparticle suspension |
| | is filtered, diafiltrated with 1 × PBS (pH 7.4), concentrated and stored at 2-8° C. |
| 7 | Aliquots of 50 mg/mL ethanolic solutions of HGT5001, DOPE, cholesterol and |
| | DMG-PEG2K (35:16:46.5:2.5) are mixed and diluted with ethanol to 3 mL |
| | final volume. Separately, an aqueous buffered solution (10 mM citrate/150 mM |
| | NaCl, pH 4.5) of EPO circRNA is prepared from a 1 mg/mL stock. The lipid |
| | solution is injected rapidly into the aqueous circRNA solution and shaken to |
| | yield a final suspension in 20% ethanol. The resulting nanoparticle suspension |
| | is filtered, diafiltrated with 1 × PBS (pH 7.4), concentrated and stored at 2-8° C. |
| 8 | Aliquots of 50 mg/mL ethanolic solutions of HGT5001, DOPE, cholesterol and |
| | DMG-PEG2K (40:10:40:10) are mixed and diluted with ethanol to 3 mL final |
| | volume. Separately, an aqueous buffered solution (10 mM citrate/150 mM |
| | NaCl, pH 4.5) of EPO circRNA is prepared from a 1 mg/mL stock. The lipid |
| | solution is injected rapidly into the aqueous circRNA solution and shaken to |
| | yield a final suspension in 20% ethanol. The resulting nanoparticle suspension |
| | is filtered, diafiltrated with 1 × PBS (pH 7.4), concentrated and stored at 2-8° C. |
| 9 | Aliquots of 50 mg/mL ethanolic solutions of LP-01, DSPC, cholesterol and |
| | DMG-PEG2K (45:9:44:2) are mixed and diluted with ethanol to 3 mL final |
| | volume. Separately, an aqueous buffered solution (50 mM Na Acetate, pH 4.5) |
| | of FLuc, hEPO, micro-dystrophin, mini-dystrophin, or dystrophin circRNA is |
| | prepared from a 1 mg/mL stock. The lipid solution is injected rapidly into the |
| | aqueous circRNA solution and shaken to yield a final suspension in 25% |
| | ethanol. The resulting nanoparticle suspension is filtered, diafiltrated with |
| | 1 × PBS (pH 7.4), concentrated and stored at 2-8° C. |
| 10 | Aliquots of 50 mg/mL ethanolic solutions of LP-01, DSPC, cholesterol and |
| | DMG-PEG2K, and DMSO solution of Ethyl Lauroyl Arginate |
| | (38.25:7.65:37.4:1.7:15) are mixed and diluted with ethanol to 3 mL final |
| | volume. Separately, an aqueous buffered solution (50 mM Bis-Tris, pH 7.0) of |
| | FLuc, hEPO, micro-dystrophin, mini-dystrophin, or dystrophin circRNA is |
| | prepared from a 1 mg/mL stock. The lipid solution is injected rapidly into the |
| | aqueous circRNA solution and shaken to yield a final suspension in 25% |
| | ethanol. The resulting nanoparticle suspension is filtered, diafiltrated with |
| | 1 × PBS (pH 7.4), concentrated and stored at 2-8° C. |
| 11 | Aliquots of 50 mg/mL ethanolic solutions of SM-102, DSPC, cholesterol and |
| | DMG-PEG2K (50:10:38.5:1.5) are mixed and diluted with ethanol to 3 mL |
| | final volume. Separately, an aqueous buffered solution (6.25 mM Na Acetate, |
| | pH 4.5) of FLuc, hEPO, micro-dystrophin, mini-dystrophin, or dystrophin |
| | circRNA is prepared from a 1 mg/mL stock. The lipid solution is injected |
| | rapidly into the aqueous circRNA solution and shaken to yield a final |
| | suspension in 25% ethanol. The resulting nanoparticle suspension is filtered, |
| | diafiltrated with 1 × PBS (pH 7.4), concentrated and stored at 2-8° C. |
| 12 | Aliquots of 50 mg/mL ethanolic solutions of SM-102, DSPC, cholesterol and |
| | DMG-PEG2K, and DMSO solution of Ethyl Lauroyl Arginate |
| | (42.5:8.5:32.73:1.275:15) are mixed and diluted with ethanol to 3 mL final |
| | volume. Separately, an aqueous buffered solution (20 mM Na Acetate, pH 4.5) |
| | of FLuc, hEPO, micro-dystrophin, mini-dystrophin, or dystrophin circRNA is |
| | prepared from a 1 mg/mL stock. The lipid solution is injected rapidly into the |
| | aqueous circRNA solution and shaken to yield a final suspension in 25% |
| | ethanol. The resulting nanoparticle suspension is filtered, diafiltrated with |
| | 1 × PBS (pH 7.4), concentrated and stored at 2-8° C. |

[1447] In some embodiments, transfer vehicle has a formulation as described in Table 17a.

TABLE 17b

| Composition (mol %) | Components |
|---|---|
| 40:20:38.5:1.5 | Compound:Phospholipid:Phytosterol*:PEG- |
| | DMG |
| 45:15:38.5:1.5 | Compound:Phospholipid:Phytosterol*:PEG- |
| | DMG |
| 50:10:38.5:1.5 | Compound:Phospholipid:Phytosterol*:PEG- |
| | DMG |
| 55:5:38.5:1.5 | Compound:Phospholipid:Phytosterol*:PEG- |
| | DMG |
| 60:5:33.5:15 | Compound:Phospholipid:Phytosterol*:PEG- |
| | DMG |
| 45:20:33.5:1.5 | Compound:Phospholipid:Phytosterol*:PEG- |
| | DMG |
| 50:20:28.5:1.5 | Compound:Phospholipid:Phytosterol*:PEG- |
| | DMG |
| 55:20:23.5:1.5 | Compound:Phospholipid:Phytosterol*:PEG- |
| | DMG |
| 60:20:18.5:1.5 | Compound:Phospholipid:Phytosterol*:PEG- |
| | DMG |
| 40:15:43.5:1.5 | Compound:Phospholipid:Phytosterol*:PEG- |
| | DMG |
| 50:15:33.5:1.5 | Compound:Phospholipid:Phytosterol*:PEG- |
| | DMG |
| 55:15:28.5:1.5 | Compound:Phospholipid:Phytosterol*:PEG- |
| | DMG |
| 60:15:23.5:1.5 | Compound:Phospholipid:Phytosterol*:PEG- |
| | DMG |
| 40:10:48.5:1.5 | Compound:Phospholipid:Phytosterol*:PEG- |
| | DMG |
| 45:10:43.5:1.5 | Compound:Phospholipid:Phytosterol*:PEG- |
| | DMG |
| 55:10:33.5:1.5 | Compound:Phospholipid:Phytosterol*:PEG- |
| | DMG |
| 60:10:28.5:1.5 | Compound:Phospholipid:Phytosterol*:PEG- |
| | DMG |
| 40:5:53.5:1.5 | Compound:Phospholipid:Phytosterol*:PEG- |
| | DMG |
| 45:5:48.5:1.5 | Compound:Phospholipid:Phytosterol*:PEG- |
| | DMG |
| 50:5:43.5:1.5 | Compound:Phospholipid:Phytosterol*:PEG- |
| | DMG |
| 40:20:40:0 | Compound:Phospholipid:Phytosterol*:PEG- |
| | DMG |
| 45:20:35:0 | Compound:Phospholipid:Phytosterol*:PEG- |
| | DMG |
| 50:20:30:0 | Compound:Phospholipid:Phytosterol*:PEG- |
| | DMG |
| 55:20:25:0 | Compound:Phospholipid:Phytosterol*:PEG- |
| | DMG |
| 60:20:20:0 | Compound:Phospholipid:Phytosterol*:PEG- |
| | DMG |
| 40:15:45:0 | Compound:Phospholipid:Phytosterol*:PEG- |
| | DMG |

[1448] In some embodiments, transfer vehicle has a formulation as described in Table 17b.

[1449] For nanoparticle compositions including circRNA, solutions of the circRNA at concentrations of 0.1 mg/ml in deionized water are diluted in a buffer, e.g., 50 mM sodium citrate buffer at a pH between 3 and 4 to form a stock solution. Alternatively, solutions of the circRNA at concentrations of 0.15 mg/ml in deionized water are diluted in a buffer, e.g., 6.25 mM sodium acetate buffer at a pH between 3 and 4.5 to form a stock solution.

[1450] Nanoparticle compositions including a circular RNA and a lipid component are prepared by combining the lipid solution with a solution including the circular RNA at lipid component to circRNA wt:wt ratios between about 5:1 and about 50:1. The lipid solution is rapidly injected using, e.g., a NanoAssemblr microfluidic based system at flow rates between about 10 ml/min and about 18 ml/min or between about 5 ml/min and about 18 ml/min into the circRNA solution, to produce a suspension with a water to ethanol ratio between about 1:1 and about 4:1.

[1451] Nanoparticle compositions can be processed by dialysis to remove ethanol and achieve buffer exchange. Formulations are dialyzed twice against phosphate buffered saline (PBS), pH 7.4, at volumes 200 times that of the primary product using Slide-A-Lyzer cassettes (Thermo Fisher Scientific Inc., Rockford, IL) with a molecular weight cutoff of 10 kDa or 20 kDa. The formulations are then dialyzed overnight at 4° C. The resulting nanoparticle suspension is filtered through 0.2 μm sterile filters (Sarstedt, Numbrecht, Germany) into glass vials and sealed with crimp closures. Nanoparticle composition solutions of 0.01 mg/ml to 0.15 mg/ml are generally obtained.

[1452] The method described above induces nano-precipitation and particle formation.

[1453] Alternative processes including, but not limited to, T-junction and direct injection, may be used to achieve the same nano-precipitation. B. Characterization of nanoparticle compositions

[1454] A Zetasizer Nano ZS (Malvern Instruments Ltd, Malvern, Worcestershire, UK) can be used to determine the particle size, the polydispersity index (PDI) and the zeta potential of the nanoparticle compositions in 1×PBS in determining particle size and 15 mM PBS in determining zeta potential.

[1455] Ultraviolet-visible spectroscopy can be used to determine the concentration of circRNA in nanoparticle compositions. 100 μL of the diluted formulation in 1×PBS is added to 900 μL of a 4:1 (v/v) mixture of methanol and chloroform. After mixing, the absorbance spectrum of the solution is recorded, for example, between 230 nm and 330 nm on a DU 800 spectrophotometer (Beckman Coulter, Beckman Coulter, Inc., Brea, CA). The concentration of circRNA in the nanoparticle composition can be calculated based on the extinction coefficient of the circRNA used in the composition and on the difference between the absorbance at a wavelength of, for example, 260 nm and the baseline value at a wavelength of, for example, 330 nm.

[1456] A QUANT-ITT- RIBOGREEN® RNA assay (Invitrogen Corporation Carlsbad, CA) can be used to evaluate the encapsulation of circRNA by the nanoparticle composition. The samples are diluted to a concentration of approximately 5 μg/mL or 1 μg/mL in a TE buffer solution (10 mM Tris-HCl, 1 mM EDTA, pH 7.5). 50 μL of the diluted samples are transferred to a polystyrene 96 well plate and either 50 μL of TE buffer or 50 μL of a 2-4% Triton X-100 solution is added to the wells. The plate is incubated at a temperature of 37° C. for 15 minutes. The RIBOGREEN® reagent is diluted 1:100 or 1:200 in TE buffer, and 100 μL of this solution is added to each well. The fluorescence intensity can be measured using a fluorescence plate reader (Wallac Victor 1420 Multilabel Counter; Perkin Elmer, Waltham, MA) at an excitation wavelength of, for example, about 480 nm and an emission wavelength of, for example, about 520 nm. The fluorescence values of the reagent blank are subtracted from that of each of the samples and the percentage of free circRNA is determined by dividing the fluorescence intensity of the intact sample (without addition of Triton X-100) by the fluorescence value of the disrupted sample (caused by the addition of Triton X-100). C.

### Example 29B: In Vivo Formulation Studies

[1457] In order to monitor how effectively various nanoparticle compositions deliver circRNA to targeted cells, different nanoparticle compositions including circRNA are prepared and administered to rodent populations. Mice are intravenously, intramuscularly, intraarterially, or intratumorally administered a single dose including a nanoparticle composition with a lipid nanoparticle formulation. In some instances, mice may be made to inhale doses. Dose sizes may range from 0.001 mg/kg to 10 mg/kg, where 10 mg/kg describes a dose including 10 mg of a circRNA in a nanoparticle composition for each 1 kg of body mass of the mouse. A control composition including PBS may also be employed.

[1458] Upon administration of nanoparticle compositions to mice, dose delivery profiles, dose responses, and toxicity of particular formulations and doses thereof can be measured by enzyme-linked immunosorbent assays (ELISA), bioluminescent imaging, or other methods. Time courses of protein expression can also be evaluated. Samples collected from the rodents for evaluation may include blood and tissue (for example, muscle tissue from the site of an intramuscular injection and internal tissue); sample collection may involve sacrifice of the animals.

[1459] Higher levels of protein expression induced by administration of a composition including a circRNA will be indicative of higher circRNA translation and/or nanoparticle composition circRNA delivery efficiencies. As the non-RNA components are not thought to affect translational machineries themselves, a higher level of protein expression is likely indicative of a higher efficiency of delivery of the circRNA by a given nanoparticle composition relative to other nanoparticle compositions or the absence thereof.

### Example 30

### Characterization of Nanoparticle Compositions

[1460] A Zetasizer Nano ZS (Malvern Instruments Ltd, Malvern, Worcestershire, UK) can be used to determine the particle size, the polydispersity index (PDI) and the zeta potential of the transfer vehicle compositions in 1×PBS in determining particle size and 15 mM PBS in determining zeta potential.

[1461] Ultraviolet-visible spectroscopy can be used to determine the concentration of a therapeutic and/or prophylactic (e.g., RNA) in transfer vehicle compositions. 100 μL of the diluted formulation in 1×PBS is added to 900 μL of a 4:1 (v/v) mixture of methanol and chloroform. After mixing, the absorbance spectrum of the solution is recorded, for example, between 230 nm and 330 nm on a DU 800 spectrophotometer (Beckman Coulter, Beckman Coulter, Inc., Brea, CA). The concentration of therapeutic and/or prophylactic in the transfer vehicle composition can be calculated based on the extinction coefficient of the therapeutic and/or prophylactic used in the composition and on the difference between the absorbance at a wavelength of, for example, 260 nm and the baseline value at a wavelength of, for example, 330 nm.

[1462] For transfer vehicle compositions including RNA, a QUANT-IT- RIBOGREEN® RNA assay (Invitrogen Corporation Carlsbad, CA) can be used to evaluate the encapsulation of RNA by the transfer vehicle composition. The samples are diluted to a concentration of approximately 5 μg/mL or 1 μg/mL in a TE buffer solution (10 mM Tris-HCl, 1 mM EDTA, pH 7.5). 50 μL of the diluted samples are transferred to a polystyrene 96 well plate and either 50 μL of TE buffer or 50 μL of a 2-4% Triton X-100 solution is added to the wells. The plate is incubated at a temperature of 37° C. for 15 minutes. The RIBOGREEN® reagent is diluted 1:100 or 1:200 in TE buffer, and 100 μL of this solution is added to each well. The fluorescence intensity can be measured using a fluorescence plate reader (Wallac Victor 1420 Multilablel Counter; Perkin Elmer, Waltham, MA) at an excitation wavelength of, for example, about 480 nm and an emission wavelength of, for example, about 520 nm. The fluorescence values of the reagent blank are subtracted from that of each of the samples and the percentage of free RNA is determined by dividing the fluorescence intensity of the intact sample (without addition of Triton X-100) by the fluorescence value of the disrupted sample (caused by the addition of Triton X-100).

### Example 31

### T Cell Targeting

[1463] To target transfer vehicles to T-cells, T cell antigen binders, e.g., anti-CD8 antibodies, are coupled to the surface of the transfer vehicle. Anti-T cell antigen antibodies are mildly reduced with an excess of DTT in the presence of EDTA in PBS to expose free hinge region thiols. To remove DTT, antibodies are passed through a desalting column. The heterobifunctional cross-linker SM(PEG)24 is used to anchor antibodies to the surface of circRNA-loaded transfer vehicles (Amine groups are present in the head groups of PEG lipids, free thiol groups on antibodies were created by DTT, SM(PEG)24 cross-links between amines and thiol groups). Transfer vehicles are first incubated with an excess of SM(PEG)24 and centrifuged to remove unreacted cross-linker. Activated transfer vehicles are then incubated with an excess of reduced anti-T cell antigen antibody. Unbound antibody is removed using a centrifugal filtration device.

### Example 32

### RNA Containing Transfer Vehicle Using RV88.

[1464] In this example RNA containing transfer vehicles are synthesized using the 2-D vortex microfluidic chip with the cationic lipid RV88 for delivery of circRNA.

[chemical structure]

TABLE 18a

| Materials and Instrument | Vendor | Cat # |
|---|---|---|
| 1M Tris-HCl, pH 8.0, Sterile | Teknova | T1080 |
| 5M Sodium Chloride solution | Teknova | S0250 |
| QB Citrate buffer, pH | Teknova | Q2446 |
| 6.0 (100 mM) | | |
| Nuclease-free water | Ambion | AM9937 |
| Triton X-100 | Sigma-Aldrich | T8787-100ML |
| RV88 | GVK bio | |
| DSPC | Lipoid | 556500 |
| Cholesterol | Sigma | C3045-5G |
| PEG2K | Avanti Polar Lipids | 880150 |
| Ethanol | Acros Organic | 615090010 |
| 5 mL Borosilicate glass vials | Thermo Scientific | ST5-20 |
| PD MiniTrap G-25 | GE Healthcare | VWR Cat. |
| Desalting Columns | | #95055-984 |
| Quant-iT RiboGreen RNA | Molecular Probes/ | R11490 |
| Assay kit | Life Technologies | |
| Black 96-well microplates | Greiner | 655900 |

[1465] RV88, DSPC, and cholesterol all being prepared in ethanol at a concentration of 10 mg/ml in borosilica vials. The lipid 14.0-PEG2K PE is prepared at a concentration of 4 mg/ml also in a borosilica glass vial. Dissolution of lipids at stock concentrations is attained by sonication of the lipids in ethanol for 2 min. The solutions are then heated on an orbital tilting shaker set at 170 rpm at 37° C. for 10 min. Vials are then equilibrated at 26° C. for a minimum of 45 mn. The lipids are then mixed by adding volumes of stock lipid as shown in Table 18b. The solution is then adjusted with ethanol such that the final lipid concentration was 7.92 mg/ml.

TABLE 18b

| | | | | | Stock | | Ethanol |
|---|---|---|---|---|---|---|---|
| Composition | MW | % | nmoles | mg | (mg/ml) | ul | (ul) |
| RV88 | 794.2 | 40% | 7200 | 5.72 | 10 | 571.8 | 155.3 |
| DSPC | 790.15 | 10% | 1800 | 1.42 | 10 | 142.2 | |
| Cholesterol | 386.67 | 48% | 8640 | 3.34 | 10 | 334.1 | |
| PEG2K | 2693.3 | 2% | 360 | 0.97 | 4 | 242.4 | |

[1466] RNA is prepared as a stock solution with 75 mM Citrate buffer at pH 6.0 and a concentration of RNA at 1.250 mg/ml. The concentration of the RNA is then adjusted to 0.1037 mg/ml with 75 mM citrate buffer at pH 6.0, equilibrated to 26° C. The solution is then incubated at 26° C. for a minimum of 25 min.

[1467] The microfluidic chamber is cleaned with ethanol and neMYSIS syringe pumps are prepared by loading a syringe with the RNA solution and another syringe with the ethanolic lipid. Both syringes are loaded and under the control of neMESYS software. The solutions are then applied to the mixing chip at an aqueous to organic phase ratio of 2 and a total flow rate of 22 ml/min (14.67 ml/min for RNA and 7.33 ml/min for the lipid solution. Both pumps are started synchronously. The mixer solution that flowed from the microfluidic chip is collected in 4×1 ml fractions with the first fraction being discarded as waste. The remaining solution containing the RNA-liposomes is exchanged by using G-25 mini desalting columns to 10 mM Tris-HCl, 1 mM EDTA, at pH 7.5. Following buffer exchange, the materials are characterized for size, and RNA entrapment through DLS analysis and Ribogreen assays, respectively.

### Example 33

### RNA Containing Transfer Vehicle Using RV94.

[1468] In this example, RNA containing liposome are synthesized using the 2-D vortex microfluidic chip with the cationic lipid RV94 for delivery of circRNA.

[chemical structure]

TABLE 19

| Materials and Instrument | Vendor | Cat # |
|---|---|---|
| 1M Tris-HCl, pH 8.0, Sterile | Teknova | T1080 |
| 5M Sodium Chloride solution | Teknova | S0250 |
| QB Citrate buffer, pH | Teknova | Q2446 |
| 6.0 (100 mM) | | |
| Nuclease-free water | Ambion | AM9937 |
| Triton X-100 | Sigma-Aldrich | T8787-100ML |
| RV94 | GVKbio | |
| DSPC | Lipoid | 556500 |
| Cholesterol | Sigma | C3045-SG |
| PEG2K | Avanti Polar Lipids | 880150 |
| Ethanol | Acros Organic | 615090010 |
| 5 mL Borosilicate glass vials | Thermo Scientific | ST5-20 |
| PD MiniTrap G-25 | GE Healthcare | VWR Cat. |
| Desalting Columns | | #95055-984 |
| Quant-iT RiboGreen RNA | Molecular Probes/ | R11490 |
| Assay kit | Life Technologies | |
| Black 96-well microplates | Greiner | 655900 |

[1469] The lipids were prepared as in Example 32 using the material amounts named in Table 19 to a final lipid concentration of 7.92 mg/ml.

TABLE 20

| | | | | | Stock | | Ethanol |
|---|---|---|---|---|---|---|---|
| Composition | MW | % | nmoles | mg | (mg/ml) | ul | (ul) |
| RV94 | 808.22 | 40% | 2880 | 2.33 | 10 | 232.8 | 155.3 |
| DSPC | 790.15 | 10% | 720 | 0.57 | 10 | 56.9 | |
| Cholesterol | 386.67 | 48% | 3456 | 1.34 | 10 | 133.6 | |
| PEG2K | 2693.3 | 2% | 144 | 0.39 | 4 | 97.0 | |

[1470] The aqueous solution of circRNA is prepared as a stock solution with 75 mM Citrate buffer at pH 6.0 the circRNA at 1 0.250 mg/ml. The concentration of the RNA is then adjusted to 0.1037 mg/ml with 75 mM citrate buffer at pH 6.0, equilibrated to 26° C. The solution is then incubated at 26° C. for a minimum of 25 min.

[1471] The microfluidic chamber is cleaned with ethanol and neMYSIS syringe pumps are prepared by loading a syringe with the RNA solution and another syringe with the ethanolic lipid. Both syringes are loaded and under the control of neMESYS software. The solutions are then applied to the mixing chip at an aqueous to organic phase ratio of 2 and a total flow rate of 22 ml/min (14.67 ml/min for RNA and 7.33 ml/min for the lipid solution. Both pumps are started synchronously. The mixer solution that flowed from the microfluidic chip is collected in 4×1 ml fractions with the first fraction being discarded as waste. The remaining solution containing the circRNA-transfer vehicles is exchanged by using G-25 mini desalting columns to 10 mM Tris-HCl, 1 mM EDTA, at pH 7.5, as described above. Following buffer exchange, the materials are characterized for size, and RNA entrapment through DLS analysis and Ribogreen assays, respectively. The biophysical analysis of the liposomes is shown in Table 21.

TABLE 21

| | | | | RNA | RNA | | |
|---|---|---|---|---|---|---|---|
| | | | Ratio | encapsulation | encapsulation | | |
| Sample | N:P | TFR | (aqueous/org | amount | yield | size | |
| Name | Ratio | (ml/min) | phase) | (μg/ml) | % | d · nm | PDI |
| SAM- | 8 | 22 | 2 | 31.46 | 86.9 | 113.1 | 0.12 |
| RV94 | | | | | | | |

### Example 34

### General Protocol for in Line Mixing.

[1472] Individual and separate stock solutions are prepared—one containing lipid and the other circRNA. Lipid stock containing a desired lipid or lipid mixture, DSPC, cholesterol and PEG lipid is prepared by solubilized in 90% ethanol. The remaining 10% is low pH citrate buffer. The concentration of the lipid stock is 4 mg/mL. The pH of this citrate buffer can range between pH 3 and pH 5, depending on the type of lipid employed. The circRNA is also solubilized in citrate buffer at a concentration of 4 mg/mL. 5 mL of each stock solution is prepared.

[1473] Stock solutions are completely clear and lipids are ensured to be completely solubilized before combining with circRNA. Stock solutions may be heated to completely solubilize the lipids. The circRNAs used in the process may be unmodified or modified oligonucleotides and may be conjugated with lipophilic moieties such as cholesterol.

[1474] The individual stocks are combined by pumping each solution to a T-junction. A dual-head Watson-Marlow pump was used to simultaneously control the start and stop of the two streams. A 1.6 mm polypropylene tubing is further downsized to 0.8 mm tubing in order to increase the linear flow rate. The polypropylene line (ID=0.8 mm) are attached to either side of a T-junction. The polypropylene T has a linear edge of 1.6 mm for a resultant volume of 4.1 mm³. Each of the large ends (1.6 mm) of polypropylene line is placed into test tubes containing either solubilized lipid stock or solubilized circRNA. After the T-junction, a single tubing is placed where the combined stream exited. The tubing is then extended into a container with 2× volume of PBS, which is rapidly stirred. The flow rate for the pump is at a setting of 300 rpm or 110 mL/min. Ethanol is removed and exchanged for PBS by dialysis. The lipid formulations are then concentrated using centrifugation or diafiltration to an appropriate working concentration.

[1475] C57BL/6 mice (Charles River Labs, MA) receive either saline or formulated circRNA via tail vein injection. At various time points after administration, serum samples are collected by retroorbital bleed. Serum levels of Factor VII protein are determined in samples using a chromogenic assay (Biophen FVTI, Aniara Corporation, OH). To determine liver RNA levels of Factor VII, animals are sacrificed and livers are harvested and snap frozen in liquid nitrogen. Tissue lysates are prepared from the frozen tissues and liver RNA levels of Factor VII are quantified using a branched DNA assay (QuantiGene Assay, Panomics, CA).

[1476] FVII activity is evaluated in FVTI siRNA-treated animals at 48 hours after intravenous (bolus) injection in C57BL/6 mice. FVII is measured using a commercially available kit for determining protein levels in serum or tissue, following the manufacturer's instructions at a microplate scale. FVII reduction is determined against untreated control mice, and the results are expressed as % Residual FVII. Two dose levels (0.05 and 0.005 mg/kg FVII siRNA) are used in the screen of each novel liposome composition.

### Example 36

circRNA Formulation Using Preformed Vesicles.

[1477] Cationic lipid containing transfer vehicles are made using the preformed vesicle method. Cationic lipid, DSPC, cholesterol and PEG-lipid are solubilized in ethanol at a molar ratio of 40/10/40/10, respectively. The lipid mixture is added to an aqueous buffer (50 mM citrate, pH 4) with mixing to a final ethanol and lipid concentration of 30% (vol/vol) and 6.1 mg/mL respectively and allowed to equilibrate at room temperature for 2 min before extrusion. The hydrated lipids are extruded through two stacked 80 nm pore-sized filters (Nuclepore) at 220° C. using a Lipex Extruder (Northern Lipids, Vancouver, BC) until a vesicle diameter of 70-90 nm, as determined by Nicomp analysis, is obtained. For cationic lipid mixtures which do not form small vesicles, hydrating the lipid mixture with a lower pH buffer (50 mM citrate, pH 3) to protonate the phosphate group on the DSPC headgroup helps form stable 70-90 nm vesicles.

[1478] The FVII circRNA (solubilised in a 50 mM citrate, pH 4 aqueous solution containing 30% ethanol) is added to the vesicles, pre-equilibrated to 35° C., at a rate of ˜5 mL/min with mixing. After a final target circRNA/lipid ratio of 0.06 (wt wt) is achieved, the mixture is incubated for a further 30 min at 35° C. to allow vesicle re-organization and encapsulation of the FVII RNA. The ethanol is then removed and the external buffer replaced with PBS (155 mM NaCl, 3 mM Na2HP04, ImM KH2P04, pH 7.5) by either dialysis or tangential flow diafiltration. The final encapsulated circRNA-to-lipid ratio is determined after removal of unencapsulated RNA using size-exclusion spin columns or ion exchange spin columns.

### Example 37

### Example 37a: Expression of Trispecific Antigen Binding Proteins from Engineered Circular RNA

[1479] Circular RNAs are designed to include: (1) a 3′ post splicing group I intron fragment; (2) an Internal Ribosome Entry Site (IRES); (3) a trispecific antigen-binding protein coding region; and (4) a 3′ homology region. The trispecific antigen-binding protein regions are constructed to produce an exemplary trispecific antigen-binding protein that will bind to a target antigen, e.g., GPC3.

### Example 37B: Generation of a scFv CD3 Binding Domain

[1480] The Human CD3Epsilon Chain Canonical Sequence is Uniprot Accession No. P07766. The human CD3gamma chain canonical sequence is Uniprot Accession No. P09693. The human CD3delta chain canonical sequence is Uniprot Accession No. P043234. Antibodies against CD3epsilon, CD3gamma or CD3delta are generated via known technologies such as affinity maturation. Where murine anti-CD3 antibodies are used as a starting material, humanization of murine anti-CD3 antibodies is desired for the clinical setting, where the mouse-specific residues may induce a human-anti-mouse antigen (HAMA) response in subjects who receive treatment of a trispecific antigen-binding protein described herein. Humanization is accomplished by grafting CDR regions from murine anti-CD3 antibody onto appropriate human germline acceptor frameworks, optionally including other modifications to CDR and/or framework regions.

[1481] Human or humanized anti-CD3 antibodies are therefore used to generate scFv sequences for CD3 binding domains of a trispecific antigen-binding protein. DNA sequences coding for human or humanized VL and VH domains are obtained, and the codons for the constructs are, optionally, optimized for expression in cells from Homo sapiens. The order in which the VL and VH domains appear in the scFv is varied (i.e. VL-VH, or VH-VL orientation), and three copies of the “G₄S” (SEQ ID NO: 3280) subunit (G₄S)₃ (SEQ ID NO: 3281) connect the variable domains to create the scFv domain. Anti-CD3 scFv plasmid constructs can have optional Flag, His or other affinity tags, and are electroporated into HEK293 or other suitable human or mammalian cell lines and purified. Validation assays include binding analysis by FACS, kinetic analysis using Proteon, and staining of CD3-expressing cells.

### Example 37C: Generation of a scFv Glypican-3 (GPC3) Binding Domain

[1482] Glypican-3 (GPC3) is one of the cell surface proteins present on Hepatocellular Carcinoma but not on healthy normal liver tissue. It is frequently observed to be elevated in hepatocellular carcinoma and is associated with poor prognosis for HCC patients. It is known to activate Wnt signalling. GPC3 antibodies have been generated including MDX-1414, HN3, GC33, and YP7.

[1483] A scFv binding to GPC-3 or another target antigen is generated similarly to the above method for generation of a scFv binding domain to CD3.

### Example 37D: Expression of Trispecific Antigen-Binding Proteins In Vitro

[1484] A CHO cell expression system (Flp-In®, Life Technologies), a derivative of CHO-K1 Chinese Hamster ovary cells (ATCC, CCL-61) (Kao and Puck, Proc. Natl. Acad Sci USA 1968; 60(4):1275-81), is used. Adherent cells are subcultured according to standard cell culture protocols provided by Life Technologies.

[1485] For adaption to growth in suspension, cells are detached from tissue culture flasks and placed in serum-free medium. Suspension-adapted cells are cryopreserved in medium with 10% DMSO.

[1486] Recombinant CHO cell lines stably expressing secreted trispecific antigen-binding proteins are generated by transfection of suspension-adapted cells. During selection with the antibiotic Hygromycin B viable cell densities are measured twice a week, and cells are centrifuged and resuspended in fresh selection medium at a maximal density of 0.1×10⁶ viable cells/mL. Cell pools stably expressing trispecific antigen-binding proteins are recovered after 2-3 weeks of selection at which point cells are transferred to standard culture medium in shake flasks. Expression of recombinant secreted proteins is confirmed by performing protein gel electrophoresis or flow cytometry. Stable cell pools are cryopreserved in DMSO containing medium.

[1487] Trispecific antigen-binding proteins are produced in 10-day fed-batch cultures of stably transfected CHO cell lines by secretion into the cell culture supernatant. Cell culture supernatants are harvested after 10 days at culture viabilities of typically >75%. Samples are collected from the production cultures every other day and cell density and viability are assessed. On day of harvest, cell culture supernatants are cleared by centrifugation and vacuum filtration before further use.

[1488] Protein expression titers and product integrity in cell culture supernatants are analyzed by SDS-PAGE.

### Example 37E: Purification of Trispecific Antigen-Binding Proteins

[1489] Trispecific antigen-binding proteins are purified from CHO cell culture supernatants in a two-step procedure. The constructs are subjected to affinity chromatography in a first step followed by preparative size exclusion chromatography (SEC) on Superdex 200 in a second step. Samples are buffer-exchanged and concentrated by ultrafiltration to a typical concentration of >1 mg/mL Purity and homogeneity (typically >90%) of final samples are assessed by SDS PAGE under reducing and non-reducing conditions, followed by immunoblotting using an anti-(half-life extension domain) or anti idiotype antibody as well as by analytical SEC, respectively. Purified proteins are stored at aliquots at −80° C. until use.

### Example 38

Expression of Engineered Circular RNA with a Half-Life Extension Domain has Improved pharmacokinetic parameters than without a half-life extension domain

[1490] The trispecific antigen-binding protein encoded on a circRNA molecule of example 23 is administered to cynomolgus monkeys as a 0.5 mg/kg bolus injection intramuscularly. Another cynomolgus monkey group receives a comparable protein encoded on a circRNA molecule in size with binding domains to CD3 and GPC-3, but lacking a half-life extension domain. A third and fourth group receive a protein encoded on a circRNA molecule with CD3 and half-life extension domain binding domains and a protein with GPC-3 and half-life extension domains, respectively. Both proteins encoded by circRNA are comparable in size to the trispecific antigen-binding protein. Each test group consists of 5 monkeys. Serum samples are taken at indicated time points, serially diluted, and the concentration of the proteins is determined using a binding ELISA to CD3 and/or GPC-3.

[1491] Pharmacokinetic analysis is performed using the test article plasma concentrations. Group mean plasma data for each test article conforms to a multi-exponential profile when plotted against the time post-dosing. The data are fit by a standard two-compartment model with bolus input and first-order rate constants for distribution and elimination phases. The general equation for the best fit of the data for i.v. administration is: c(t)=Ae^{˜at}+Be^{˜pt}, where c(t) is the plasma concentration at time t, A and B are intercepts on the Y-axis, and a and β are the apparent first-order rate constants for the distribution and elimination phases, respectively. The a-phase is the initial phase of the clearance and reflects distribution of the protein into all extracellular fluid of the animal, whereas the second or β-phase portion of the decay curve represents true plasma clearance. Methods for fitting such equations are well known in the art. For example, A=D/V(a−k21)/(a−p), B=D/V(p−k21)/(a−p), and a and β (for a>R) are roots of the quadratic equation: r²+(k12+k21+k10)r+k21k10=0 using estimated parameters of V=volume of distribution, k10=elimination rate, k12=transfer rate from compartment 1 to compartment 2 and k21=transfer rate from compartment 2 to compartment 1, and D=the administered dose.

[1492] Data analysis: Graphs of concentration versus time profiles are made using KaleidaGraph (KaleidaGraph™ V. 3.09 Copyright 1986-1997. Synergy Software. Reading, Pa.). Values reported as less than reportable (LTR) are not included in the PK analysis and are not represented graphically. Pharmacokinetic parameters are determined by compartmental analysis using WinNonlin software (WinNonlin® Professional V. 3.1 WinNonlin™ Copyright 1998-1999. Pharsight Corporation. Mountain View, Calif). Pharmacokinetic parameters are computed as described in Ritschel W A and Kearns G L, 1999, EST: Handbook Of Basic Pharmacokinetics Including Clinical Applications, 5th edition, American Pharmaceutical Assoc., Washington, D C.

[1493] It is expected that the trispecific antigen-binding protein encoded on a circRNA molecule of Example 23 has improved pharmacokinetic parameters such as an increase in elimination half-time as compared to proteins lacking a half-life extension domain.

### Example 39

### Cytotoxicity of the Trispecific Antigen-Binding Protein

[1494] The trispecific antigen-binding protein encoded on a circRNA molecule of Example 23 is evaluated in vitro on its mediation of T cell dependent cytotoxicity to GPC-3+target cells.

[1495] Fluorescence labeled GPC3 target cells are incubated with isolated PBMC of random donors or T-cells as effector cells in the presence of the trispecific antigen-binding protein of Example 23. After incubation for 4 h at 37° C. in a humidified incubator, the release of the fluorescent dye from the target cells into the supernatant is determined in a spectrofluorimeter. Target cells incubated without the trispecific antigen-binding protein of Example 23 and target cells totally lysed by the addition of saponin at the end of the incubation serve as negative and positive controls, respectively.

[1496] Based on the measured remaining living target cells, the percentage of specific cell lysis is calculated according to the following formula: [1-(number of living targets(sample)/number of living targets(spontaneous))]×100%. Sigmoidal dose response curves and EC50 values are calculated by non-linear regression/4-parameter logistic fit using the GraphPad Software. The lysis values obtained for a given antibody concentration are used to calculate sigmoidal dose-response curves by 4 parameter logistic fit analysis using the Prism software.

### Example 40

### Synthesis of Ionizable Lipids

### 40.1 Synthesis of ((3-(2-methyl-1H-imidazol-1-yl)propyl)azanediyl)bis(hexane-6,1-diyl) bis(2-hexyldecanoate)(Lipid 10a-27) and ((3-(1H-imidazol-1-yl)propyl)azanediyl)bis(hexane-6,1-diyl) bis(2-hexyldecanoate))(Lipid 10a-26)

[1497] In a 100 mL round bottom flask connected with condenser, 3-(1H-imidazol-1-yl)propan-1-amine (100 mg, 0.799 mmol) or 3-(2-methyl-1H-imidazol-1-yl)propan-1-amine (0.799 mmol), 6-bromohexyl 2-hexyldecanoate (737.2 mg, 1.757 mmol), potassium carbonate (485 mg, 3.515 mmol) and potassium iodide (13 mg, 0.08 mmol) were mixed in acetonitrile (30 mL), and the reaction mixture was heated to 80° C. for 48 h. The mixture was cooled to room temperature and was filtered through a pad of Celite. The filtrate was diluted with ethyl acetate. After washing with water, brine and dried over anhydrous sodium sulfate. The solvent was evaporated and the crude residue was purified by flash chromatography (SiO₂: CH₂Cl₂=100% to 10% of methanol in CH₂Cl₂) and colorless oil product was obtained (92 mg, 15%). Molecular formula of ((3-(1H-imidazol-1-yl)propyl)azanediyl)bis(hexane-6,1-diyl) bis(2-hexyldecanoate)) is C₅₀H₉₅N₃O₄ and molecular weight (M_{w}) is 801.7.

### Reaction scheme for synthesis of ((3-(1H-imidazol-1-yl)propyl)azanediyl)bis(hexane-6,1-diyl) bis(2-hexyldecanoate)) (Lipid 10a-26)

[chemical structure]

[1498] Characterization of Lipid 10a-26 was performed by LC-MS. FIG. 27A-C shows characterization of Lipid 10a-26. FIG. 27A shows the proton NMR observed for Lipid 10a-26. FIG. 27B is a representative LC/MS trace for Lipid 10a-26 with total ion and UV chromatograms shown.

### 40.2 Synthesis of Lipid 22-S14

### 40.2.1 Synthesis of 2-(tetradecylthio)ethan-1-ol

[1499] To a mixture of 2-sulfanylethanol (5.40 g, 69.11 mmol, 4.82 mL, 0.871 eq) in acetonitrile (200 mL) was added 1-Bromotetradecane(22 g, 79.34 mmol, 23.66 mL, 1 eq) and potassium carbonate (17.55 g, 126.95 mmol, 1.6 eq) at 25° C. The reaction mixture was warmed to 40° C. and stirred for 12 hr. TLC (ethyl acetate/petroleum ether=25/1, R^{f}=0.3, stained by I₂) showed the starting material was consumed completely and a new main spot was generated. The reaction mixture was filtered and the filter cake was washed with acetonitrile (50 mL) and then the filtrate was concentrated under vacuum to get a residue which was purified by column on silica gel (ethyl acetate/petroleum ether=1/100 to 1/25) to afford 2-(tetradecylthio)ethan-1-ol (14 g, yield 64.28%) as a white solid.

[1500] ¹H NMR (ET36387-45-P1A, 400 MHz, CHLOROFORM-d) δ 0.87-0.91 (m, 3H) 1.27 (s, 20H) 1.35-1.43 (m, 2H) 1.53-1.64 (m, 2H) 2.16 (br s, 1H) 2.49-2.56 (m, 2H) 2.74 (t, J=5.93 Hz, 2H) 3.72 (br d, J=4.89 Hz, 2H). FIG. 28 shows corresponding Nuclear Magnetic Resonance (NMR) spectrum.

### 40.2.2 Synthesis of 2-(Tetradecylthio)Ethyl Acrylate

[1501] To a solution of 2-(tetradecylthio)ethan-1-ol (14 g, 51.00 mmol, 1 eq) in dichloromethane (240 mL) was added triethylamine (7.74 g, 76.50 mmol, 10.65 mL, 1.5 eq) and prop-2-enoyl chloride (5.54 g, 61.20 mmol, 4.99 mL, 1.2 eq) dropwise at 0° C. under nitrogen. The reaction mixture was warmed to 25° C. and stirred for 12 hr. TLC (ethyl acetate/petroleum ether=25/1, Rf=0.5, stained by 12) showed the starting material was consumed completely and a new main spot was generated. The reaction solution was concentrated under vacuum to get crude which was purified by column on silica gel (ethyl acetate/petroleum ether=1/100 to 1/25) to afford 2-(tetradecylthio)ethyl acrylate (12 g, yield 71.61%) as a colorless oil.

[1502] ¹H NMR (ET36387-49-P1A, 400 MHz, CHLOROFORM-d) δ 0.85-0.93 (m, 3H) 1.26 (s, 19H) 1.35-1.43 (m, 2H) 1.53-1.65 (m, 2H) 2.53-2.62 (m, 2H) 2.79 (t, J=7.03 Hz, 2H) 4.32 (t, J=7.03 Hz, 2H) 5.86 (dd, J=10.39, 1.47 Hz, 1H) 6.09-6.19 (m, 1H) 6.43 (dd, J=17.30, 1.41 Hz, 1H). FIG. 29 shows corresponding Nuclear Magnetic Resonance (NMR) spectrum.

### 40.2.3 Synthesis of bis(2-(tetradecylthio)ethyl) 3,3′-((3-(2-methyl-1H-imidazol-1-yl)propyl)azanediyl)dipropionate (Lipid 22-S14)

[1503] A flask was charged with 3-(2-methyl-1H-imidazol-1-yl)propan-1-amine (300 mg, 2.16 mmol) and 2-(tetradecylthio)ethyl acrylate (1.70 g, 5.17 mmol). The neat reaction mixture was heated to 80° C. and stirred for 48 hr. TLC (ethyl acetate, R_{f}=0.3, stained by I₂, one drop ammonium hydroxide added) showed the starting material was consumed completely and a new main spot was formed. The reaction mixture was diluted with dichloromethane (4 mL) and purified by column on silica gel (petroleum ether/ethyl acetate=3/1 to 0/1, 0.1% ammonium hydroxide added) to get bis(2-(tetradecylthio)ethyl) 3,3′-((3-(2-methyl-1H-imidazol-1-yl)propyl)azanediyl)dipropionate (501 mg, yield 29.1%) as colorless oil.

[1504] ¹H NMR (ET36387-51-P1A, 400 MHz, CHLOROFORM-d) δ 0.87 (t, J=6.73 Hz, 6H) 1.25 (s, 40H) 1.33-1.40 (m, 4H) 1.52-1.61 (m, 4H) 1.81-1.90 (m, 2H) 2.36 (s, 3H) 2.39-2.46 (m, 6H) 2.53 (t, J=7.39 Hz, 4H) 2.70-2.78 (m, 8H) 3.84 (t, J=7.17 Hz, 2H) 4.21 (t, J=6.95 Hz, 4H) 6.85 (s, 1H) 6.89 (s, 1H). FIG. 30 shows corresponding Nuclear Magnetic Resonance (NMR) spectrum.

### 40.3 Synthesis of bis(2-(tetradecylthio)ethyl) 3,3′-((3-(1H-imidazol-1-yl)propyl)azanediyl)dipropionate (Lipid 93-S14)

[1505] A flask was charged with 3-(1H-imidazol-1-yl)propan-1-amine (300 mg, 2.40 mmol, 1 eq) and 2-(tetradecylthio)ethyl acrylate (1.89 g, 5.75 mmol, 2.4 eq). The neat reaction mixture was heated to 80° C. and stirred for 48 hr. TLC (ethyl acetate, R_{f}=0.3, stained by I₂, one drop ammonium hydroxide added) showed the starting material was consumed completely and a new main spot was formed. The reaction mixture was diluted with dichloromethane (4 mL) and purified by column on silica gel (petroleum ether/ethyl acetate=1/20-0/100, 0.1% ammonium hydroxide added) to get bis(2-(tetradecylthio)ethyl) 3,3′-((3-(1H-imidazol-1-yl)propyl)azanediyl)dipropionate (512 mg, yield 27.22%) as colorless oil.

[1506] ¹H NMR (ET36387-54-P1A, 400 MHz, CHLOROFORM-d) δ 0.89 (t, J=6.84 Hz, 6H) 1.26 (s, 40H) 1.34-1.41 (m, 4H) 1.58 (br t, J=7.50 Hz, 4H) 1.92 (t, J=6.62 Hz, 2H) 2.36-2.46 (m, 6H) 2.55 (t, J=7.50 Hz, 4H) 2.75 (q, J=6.84 Hz, 8H) 3.97 (t, J=6.95 Hz, 2H) 4.23 (t, J=6.95 Hz, 4H) 6.95 (s, 1H) 7.06 (s, 1H) 7.51 (s, 1H). FIG. 31 shows corresponding Nuclear Magnetic Resonance (NMR) spectrum.

### 40.4 Synthesis of heptadecan-9-yl 8-((3-(2-methyl-1H-imidazol-1-yl)propyl)(8-(nonyloxy)-8-oxooctyl)amino)octanoate (Lipid 10a-54)

### 40.4.1 Synthesis of nonyl 8-bromooctanoate (3)

[chemical structure]

[1507] To a mixture of 8-bromooctanoic acid (2) (18.6 g, 83.18 mmol) and nonan-1-ol (1) (10 g, 69.32 mmol) in CH₂C12 (500 mL) was added DMAP (1.7 g, 13.86 mmol), DIPEA (48 mL, 277.3 mmol) and EDC (16 g, 83.18 mmol). The reaction was stirred at room temperature overnight. After concentration of the reaction mixture, the crude residue was dissolved in ethyl acetate (500 mL), washed with 1N HCl, sat. NaHCO₃, water and Brine. The organic layer was dried over anhydrous Na₂SO₄. The solvent was evaporated and the crude residue was purified by flash chromatography (SiO₂: Hexane=100% to 30% of EtOAc in Hexane) and colorless oil product 3 was obtained (9 g, 37%).

### 40.4.2 Synthesis of heptadecan-9-yl 8-bromooctanoate (5)

[chemical structure]

[1508] To a mixture of 8-bromooctanoic acid (2) (10 g, 44.82 mmol) and heptadecan-9-ol (4) (9.6 g, 37.35 mmol) in CH₂Cl₂ (300 mL) was added DMAP (900 mg, 7.48 mmol), DIPEA (26 mL, 149.7 mmol) and EDC (10.7 g, 56.03 mmol). The reaction was stirred at room temperature overnight. After concentration of the reaction mixture, the crude residue was dissolved in ethyl acetate (300 mL), washed with 1N HCl, sat. NaHCO₃, water and Brine. The organic layer was dried over anhydrous Na₂SO₄. The solvent was evaporated and the crude residue was purified by flash chromatography (SiO₂: Hexane=100% to 30% of EtOAc in Hexane) and colorless oil product 5 was obtained (5 g, 29%).

[1509] ¹H NMR (300 MHz, CDCl₃): δ ppm 4.86 (m, 1H), 3.39 (t, J=7.0 Hz, 2H), 2.27 (t, J=7.6 Hz, 2H), 1.84 (m, 2H), 1.62 (m, 2H), 1.5-1.4 (m, 8H), 1.35-1.2 (m, 26H) 0.87 (t, J=6.7 Hz, 6H).

### 40.4.3 Synthesis of heptadecan-9-yl 8-((3-(2-methyl-1H-imidazol-1-yl)propyl)amino)octanoate (7)

[chemical structure]

[1510] In a 100 mL round bottom flask connected with condenser, heptadecan-9-yl 8-bromooctanoate (5) (860 mg, 1.868 mmol) and 3-(2-methyl-1H-imidazol-1-yl)propan-1-amine (6) (1.3 g, 9.339 mmol) were mixed in ethanol (10 mL). The reaction mixture was heated to reflux overnight. MS (APCI) showed the expected product. The mixture was cooled to room temperature and concentrated. The crude residue was purified by flash chromatography (SiO₂: CH₂Cl₂=100% to 10% of methanol+1% NH₄OH in CH₂Cl₂) and colorless oil product 7 was obtained (665 mg, 69%).

### 40.4.4 Synthesis of heptadecan-9-yl 8-((3-(2-methyl-1H-imidazol-1-yl)propyl)(8-(nonyloxy)-8-oxooctyl)amino)octanoate (Lipid 10a-54)

[chemical structure]

[1511] In a 100 mL round bottom flask connected with condenser, heptadecan-9-yl 8-((3-(2-methyl-1H-imidazol-1-yl)propyl)amino)octanoate (7) (665 mg, 1.279 mmol) and nonyl 8-bromooctanoate (3) (536 mg, 1.535 mmol) were mixed in ethanol (10 mL), then DIPEA (0.55 mL, 3.198 mmol) was added. The reaction mixture was heated to reflux overnight. Both MS (APCI) and TLC (10% MeOH+1% NH₄OH in CH₂Cl₂) showed the product and some unreacted starting material. The mixture was cooled to room temperature and concentrated. The crude residue was purified by flash chromatography (SiO₂: CH₂Cl₂=100% to 10% of methanol+1% NH₄OH in CH₂Cl₂) and colorless oil was obtained (170 mg, 17%).

### 40.5 Synthesis of heptadecan-9-yl 8-((3-(1H-imidazol-1-yl)propyl)(8-(nonyloxy)-8-oxooctyl)amino)octanoate (Lipid 10a-53)

[chemical structure]

[chemical structure]

[1512] Lipid 10a-53 is synthesized according to the scheme above. Reaction conditions are identical to Lipid 10a-54 with the exception of 3-(1H-imidazol-1-yl)propan-1-amine as the imidazole amine.

### 40.6 Synthesis of Heptadecan-9-yl 8-((3-(1H-imidazol-1-yl)propyl)(8-(nonyloxy)-8-oxooctyl)amino)octanoate (Lipid 10a-45)

### 40.6.1 Synthesis of heptadecan-9-yl 8-bromooctanoate (3)

[chemical structure]

[1513] To a mixture of 8-bromooctanoic acid (2) (10 g, 44.82 mmol) and heptadecan-9-ol (1) (9.6 g, 37.35 mmol) in CH₂Cl₂ (300 mL) was added DMAP (900 mg, 7.48 mmol), DIPEA (26 mL, 149.7 mmol) and EDC (10.7 g, 56.03 mmol). The reaction was stirred at room temperature overnight. After concentration of the reaction mixture, the crude residue was dissolved in ethyl acetate (300 mL), washed with 1N HCl, sat. NaHCO₃, water and Brine. The organic layer was dried over anhydrous Na₂SO₄. The solvent was evaporated and the crude residue was purified by flash chromatography (SiO₂: Hexane=100% to 30% of EtOAc in Hexane) and colorless oil product 3 was obtained (5 g, 29%).

[1514] ¹H NMR (300 MHz, CDCl₃): δ ppm 4.86 (m, 1H), 3.39 (t, J=7.0 Hz, 2H), 2.27 (t, J=7.6 Hz, 2H), 1.84 (m, 2H), 1.62 (m, 2H), 1.5-1.4 (m, 8H), 1.35-1.2 (m, 26H) 0.87 (t, J=6.7 Hz, 6H).

### 40.6.2 Synthesis of heptadecan-9-yl 8-((3-(1H-imidazol-1-yl)propyl)amino)octanoate (6)

[chemical structure]

[1515] In a 100 mL round bottom flask connected with condenser, heptadecan-9-yl 8-bromooctanoate (3) (1 g, 2.167 mmol) and 3-(1H-imidazol-1-yl)propan-1-amine (4) (1.3 mL, 10.83 mmol) were mixed in ethanol (10 mL). The reaction mixture was heated to reflux overnight. MS (APCI) showed the expected product. The mixture was cooled to room temperature and concentrated. The crude residue was purified by flash chromatography (SiO₂: CH₂Cl₂=100% to 10% of methanol+1% NH₄OH in CH₂Cl₂) and colorless oil product 6 was obtained (498 mg, 45%).

[1516] ¹H NMR (300 MHz, CDCl₃): δ ppm 7.47 (s, 1H), 7.04 (s, 1H), 6.91 (s, 1H), 4.85 (m, 1H), 4.03 (t, J=7.0 Hz, 2H), 2.56 (dd, J=14.5, 7.4 Hz, 4H), 2.27 (t, J=7.4 Hz, 2H), 1.92 (m, 2H), 1.60 (m, 2H), 1.48 (m, 6H), 1.30-1.20 (m, 31H), 0.86 (t, J=6.6 Hz, 6H). MS (APCIJ: 506.4 (M+1).

### 40.6.3 Synthesis of nonyl 8-bromooctanoate (9)

[chemical structure]

[1517] To a mixture of 8-bromooctanoic acid (2) (18.6 g, 83.18 mmol) and nonan-1-ol (8) (10 g, 69.32 mmol) in CH₂Cl₂ (500 mL) was added DMAP (1.7 g, 13.86 mmol), DIPEA (48 mL, 277.3 mmol) and EDC (16 g, 83.18 mmol). The reaction was stirred at room temperature overnight. After concentration of the reaction mixture, the crude residue was dissolved in ethyl acetate (500 mL), washed with 1N HCl, sat. NaHCO₃, water and Brine. The organic layer was dried over anhydrous Na₂SO₄. The solvent was evaporated and the crude residue was purified by flash chromatography (SiO₂: Hexane=100% to 30% of EtOAc in Hexane) and colorless oil product 9 was obtained (9 g, 37%).

[1518] ¹H NMR (300 MHz, CDCl₃): δ ppm 4.05 (t, J=7.0 Hz, 2H), 3.39 (t, J=7.0 Hz, 2H), 2.29 (t, J=7.6 Hz, 2H), 1.84 (m, 2H), 1.62-1.56 (m, 6H), 1.40-1.20 (m, 16H), 0.87 (t, J=6.7 Hz, 3H).

### 40.6.4 Synthesis of heptadecan-9-yl 8-((3-(1H-imidazol-1-yl)propyl)(8-(nonyloxy)-8-oxoctyl)amino)octanoate

[chemical structure]

[1519] In a 100 mL round bottom flask connected with condenser, heptadecan-9-yl 8-((3-(1H-imidazol-1-yl)propyl)amino)octanoate (6) (242 mg, 0.478 mmol) and nonyl 8-bromooctanoate 9 (200 mg, 0.574 mmol) were mixed in ethanol (10 mL), then DIPEA (0.2 mL, 1.196 mmol) was added. The reaction mixture was heated to reflux overnight. Both MS (APCI) and TLC (10% MeOH+1% NH₄OH in CH₂Cl₂) showed the product and some unreacted starting material. The mixture was cooled to room temperature and concentrated. The crude residue was purified by flash chromatography (SiO₂: CH₂Cl₂=100% to 10% of methanol+1% NH₄OH in CH₂Cl₂) and colorless oil was obtained (35 mg, 10%).

[1520] ¹H NMR (300 MHz, CDCl₃): δ ppm 7.46 (s, 1H), 7.05 (s, 1H), 6.90 (s, 1H), 4.85 (m, 1H), 4.04 (t, J=6.6 Hz, 2H), 4.01 (t, J=6.6 Hz, 2H), 2.38 (m, 6H), 2.27 (t, J=3.8 Hz, 4H), 1.89 (m, 2H), 1.60-1.58 (m, 12H), 1.48 (m, 6H), 1.30-1.20 (m, 47H), 0.87 (t, J=7.1 Hz, 9H). MS (APCI+): 774.6 (M+1).

### 40.7 Synthesis of Heptadecan-9-yl 8-((3-(2-methyl-1H-imidazol-1-yl)propyl)(8-(nonyloxy)-8-oxooctyl)amino)octanoate (Lipid 10a-46)

[chemical structure]

[1521] Lipid 10a-46 is synthesized according to the scheme above. Reaction conditions are identical to Lipid 10a-45 with the exception of 3-(2-Methyl-1H-imidazol-1-yl)propan-1-amine as the imidazole amine.

[1522] ¹H NMR (300 MHz, CDCl₃): δ ppm 6.89 (s, 1H), 6.81 (s, 1H), 4.86 (m, 1H), 4.04 (t, J=6.8 Hz, 2H), 3.85 (t, J=7.4 Hz, 2H), 2.38-2.36 (m, 9H), 2.28 (m, 4H), 1.82 (m, 2H), 1.72-1.56 (m, 12H), 1.48 (m, 4H), 1.30-1.20 (m, 46H), 0.86 (t, J=6.6 Hz, 9H). MS (APCI⁺): 789.7 (M+1).

### 40.8 Synthesis of Heptadecan-9-yl 8-((3-(H-imidazol-1-yl)propyl)(8-oxo-8-(undecan-3-yloxy)octyl)amino)octanoate (Lipid 10a-137)

### 40.8.1 Synthesis of heptadecan-9-yl 8-bromooctanoate (3)

[chemical structure]

[1523] To a mixture of 8-bromooctanoic acid (2) (10 g, 44.82 mmol) and heptadecan-9-ol (1) (9.6 g, 37.35 mmol) in CH₂Cl₂ (300 mL) was added DMAP (900 mg, 7.48 mmol), DIPEA (26 mL, 149.7 mmol) and EDC (10.7 g, 56.03 mmol). The reaction was stirred at room temperature overnight. After concentration of the reaction mixture, the crude residue was dissolved in ethyl acetate (300 mL), washed with 1N HCl, sat. NaHCO₃, water and Brine. The organic layer was dried over anhydrous Na₂SO₄. The solvent was evaporated and the crude residue was purified by flash chromatography (SiO₂: Hexane=100% to 30% of EtOAc in Hexane) and colorless oil product 3 was obtained (5 g, 29%).

[1524] ¹H NMR (300 MHz, CDCl₃): δ ppm 4.86 (m, 1H), 3.39 (t, J=7.0 Hz, 2H), 2.27 (t, J=7.6 Hz, 2H), 1.84 (m, 2H), 1.62 (m, 2H), 1.5-1.4 (m, 8H), 1.35-1.2 (m, 26H) 0.87 (t, J=6.7 Hz, 6H).

### 40.8.2 Synthesis of heptadecan-9-yl 8-((3-(H-imidazol-1-yl)propyl)amino)octanoate (6)

[chemical structure]

[1525] In a 100 mL round bottom flask connected with condenser, heptadecan-9-yl 8-bromooctanoate (3) (1 g, 2.167 mmol) and 3-(1H-imidazol-1-yl)propan-1-amine (4) (1.3 mL, 10.83 mmol) were mixed in ethanol (10 mL). The reaction mixture was heated to reflux overnight. MS (APCI) showed the expected product. The mixture was cooled to room temperature and concentrated. The crude residue was purified by flash chromatography (SiO₂: CH₂Cl₂=100% to 10% of methanol+1% NH₄OH in CH₂Cl₂) and colorless oil product 6 was obtained (498 mg, 45%).

[1526] ¹H NMR (300 MHz, CDCl₃): δ ppm 7.47 (s, 1H), 7.04 (s, 1H), 6.91 (s, 1H), 4.85 (m, 1H), 4.03 (t, J=7.0 Hz, 2H), 2.56 (dd, J=14.5, 7.4 Hz, 4H), 2.27 (t, J=7.4 Hz, 2H), 1.92 (m, 2H), 1.60 (m, 2H), 1.48 (m, 6H), 1.30-1.20 (m, 31H), 0.86 (t, J=6.6 Hz, 6H). MS (APCIJ: 506.4 (M+1).

### 40.8.3 Synthesis of undecan-3-ol (11)

[chemical structure]

[1527] To a mixture of nonanal (10) (5 g, 35.2 mmol), in anhydrous THF (100 mL) at 0° C. ice-water bath was dropwise added ethylmagnesium bromide (47 mL, 42.2 mmol, 0.9M in THF). The reaction was stirred at room temperature overnight. The reaction was quenched with ice and diluted with ethyl acetate (500 mL), washed with 1N HCl, sat. NaHCO₃, water and Brine. The organic layer was dried over anhydrous Na₂SO₄. The solvent was evaporated and the crude residue was purified by flash chromatography (SiO₂: Hexane=100% to 50% of EtOAc in Hexane) and colorless oil product 11 was obtained (4 g, 66%).

[1528] ¹H NMR (300 MHz, CDCl₃): δ ppm 3.52 (m, 1H), 1.56-1.3 (m, 4H), 1.3-1.20 (m, 12H), 0.93 (t, J=7.4 Hz, 3H), 0.87 (t, J=7.4 Hz, 3H).

### 40.8.4 Synthesis of undecan-3-yl 8-bromooctanoate (12)

[chemical structure]

[1529] To a mixture of 8-bromooctanoic acid (2) (6.2 g, 27.9 mmol) and undecan-3-ol (11) (4 g, 23.2 mmol) in CH₂C12 (100 mL) was added DMAP (567.2 mg, 4.64 mmol), DIPEA (16.2 mL, 92.9 mmol) and EDC (6.7 g, 34.8 mmol). The reaction was stirred at room temperature overnight. After concentration of the reaction mixture, the crude residue was dissolved in ethyl acetate (500 mL), washed with 1N HCl, sat. NaHCO₃, water and Brine. The organic layer was dried over anhydrous Na₂SO₄. The solvent was evaporated and the crude residue was purified by flash chromatography (SiO₂: Hexane=100% to 30% of EtOAc in Hexane) and colorless oil product 12 was obtained (7.3 g, 83%).

[1530] ¹H NMR (300 MHz, CDCl₃): δ ppm 4.80 (m, 1H), 3.39 (t, J=6.8 Hz, 2H), 2.28 (t, J=7.7 Hz, 2H), 1.84 (m, 2H), 1.6-1.35 (m, 8H), 1.35-1.2 (m, 16H), 0.87 (t, J=7.4 Hz, 6H).

### 40.8.4 Synthesis of heptadecan-9-yl 8-((3-(1H-imidazol-1-yl)propyl)(8-(nonyloxy)-8-oxooctyl)amino)octanoate

[chemical structure]

[1531] In a 100 mL round bottom flask connected with condenser, heptadecan-9-yl 8-((3-(1H-imidazol-1-yl)propyl)amino)octanoate (6) (242 mg, 0.478 mmol) and undecan-3-yl 8-bromooctanoate (12) (200 mg, 0.574 mmol) were mixed in ethanol (10 mL), then DIPEA (0.2 mL, 1.196 mmol) was added. The reaction mixture was heated to reflux overnight. Both MS (APCI) and TLC (10% MeOH+1% NH₄OH in CH₂Cl₂) showed the product and some unreacted starting material. The mixture was cooled to room temperature and concentrated. The crude residue was purified by flash chromatography (SiO₂: CH₂Cl₂=100% to 10% of methanol+1% NH₄OH in CH₂Cl₂) and colorless oil was obtained (35 mg, 10%).

[1532] ¹H NMR (300 MHz, CDCl₃): δ ppm 7.45 (s, 1H), 7.04 (s, 1H), 6.90 (s, 1H), 4.82 (m, 2H), 3.97 (t, J=6.8 Hz, 2H), 2.35 (m, 6H), 2.27 (t, J=3.8 Hz, 4H), 1.89 (m, 2H), 1.60-1.48 (m, 14H), 1.30-1.20 (m, 50H), 0.87 (m, 12H). MS (APCI+): 802.8

### 40.9 Synthesis of Heptadecan-9-yl 8-((3-(2-methyl-1H-imidazol-1-yl)propyl)(8-(nonyloxy)-8-oxooctyl)amino)octanoate (Lipid 10a-138)

[chemical structure]

[1533] Lipid 10a-138 is synthesized according to the scheme above. Reaction conditions are identical to Lipid 10a-137 with the exception of 3-(2-Methyl-1H-imidazol-1-yl)propan-1-amine as the imidazole amine.

[1534] ¹H NMR (300 MHz, CDCl₃): δ ppm 6.89 (s, 1H), 6.81 (s, 1H), 4.82 (m, 2H), 3.86 (t, J=7.1 Hz, 2H), 2.38-2.3 (m, 9H), 2.27 (t, J=3.8 Hz, 4H), 1.84 (m, 2H), 1.60-1.37 (m, 14H), 1.30-1.20 (m, 50H), 0.87 (m, 12H). MS (APCI+): 816.8 (M+1).

### 40.10 Synthesis of (((2-(2-Methyl-1H-imidazol-1-yl)ethyl)azanediyl)bis(hexane-6,1-diyl) bis(2-hexyldecanoate (Lipid 10a-139)

### 40.10.1 Synthesis of 6-bromohexyl 2-hexyldecanoate (3)

[chemical structure]

[1535] To a mixture of 2-hexyldecanoic acid (1) (102 g, 0.398 mol) and 6-bromo-1-hexanol (2) (60 g, 0.331 mol) in CH₂Cl₂ (1 L) was added DMAP (8.1 g, 66 mmol), DIPEA (230 mL, 1.325 mol) and EDC (76 g, 0.398 mol). The reaction was stirred at room temperature overnight. After concentration of the reaction mixture, the crude residue was dissolved in ethyl acetate (1 L), washed with 1N HCl, sat. NaHCO₃, water and Brine. The organic layer was dried over anhydrous Na₂SO₄. The solvent was evaporated and the crude residue was purified by flash chromatography (SiO₂: Hexane=100% to 30% of EtOAc in Hexane) and colorless oil product 3 was obtained (67 g, 48%).

[1536] ¹H NMR (300 MHz, CDCl₃): δ ppm 4.06 (t, J=6.6 Hz, 2H), 3.4 (t, J=6.8 Hz, 2H), 2.3 (m, 1H), 1.86 (m, 2H), 1.64 (m, 2H), 1.5-1.4 (m, 2H), 1.35-1.2 (m, 26H) 0.87 (t, J=6.7 Hz, 6H).

### 40.10.2 Synthesis of 6-((3-(1H-imidazol-1-yl)butyl)amino)hexyl 2-hexyldecanoate (7a)

[chemical structure]

[1537] In a 100 mL round bottom flask connected with condenser, 6-bromohexyl 2-hexyldecanoate (3) (1.2 g, 2.87 mmol) and 3-(1H-imidazol-1-yl)butan-1-amine (7) (2 g, 14.37 mmol) were mixed in ethanol (20 mL). The reaction mixture was heated to reflux overnight. MS (APCI) showed the expected product. The mixture was cooled to room temperature and concentrated. The crude residue was purified by flash chromatography (SiO₂: CH₂Cl₂=100% to 10% of methanol+1% NH₄OH in CH₂Cl₂) and colorless oil product 7a was obtained (626 mg, 46%).

[1538] ¹H NMR (300 MHz, CDCl₃): δ ppm 7.51 (s, 1H), 7.05 (s, 1H), 6.93 (s, 1H), 4.35 (m, 1H), 4.04 (t, J=6.6 Hz, 2H), 2.6-2.4 (m, 4H), 2.29 (m, 1H), 1.94 (td, J=14, 6.8 Hz, 2H), 1.64-1.56 (m, 4H), 1.47 (s, 3H), 1.42-1.20 (m, 29H), 0.86 (m, 6H). MS (APCI+): 478.8 (M+1)

### 40.10.2 Synthesis of ((2-(2-Methyl-1H-imidazol-1-yl)ethyl)azanediyl)bis(hexane-6,1-diyl) bis(2-hexyldecanoate

[chemical structure]

[1539] In a 100 mL round bottom flask connected with condenser, 6-((3-(1H-imidazol-1-yl)butyl)amino)hexyl 2-hexyldecanoate (7a) (626 mg, 1.31 mmol) and 6-bromohexyl 2-hexyldecanoate (3) (550 mg, 1.31 mmol) were mixed in ethanol (20 mL), then DIPEA (0.6 mL, 3.276 mmol) was added. The reaction mixture was heated to reflux overnight. Both MS (APCI) and TLC (10% MeOH+1% NH₄OH in CH₂Cl₂) showed the product and unreacted starting material 7a. The mixture was cooled to room temperature and concentrated. The crude residue was purified by flash chromatography (SiO₂: CH₂Cl₂=100% to 10% of methanol+1% NH₄OH in CH₂Cl₂) and the obtained product was further purified by C18 reverse phase chromatography (H₂O=95% to 0.1% TFA in CH₃CN=100%) colorless oil (TFA salt) was obtained (140 mg, 13%).

[1540] ¹H-NMR (300 MHz, CDCl₃): δ 6.87 (s, 1H), 6.83 (s, 1H), 4,05 (t, J=6.7 Hz, 4H), 3.84 (t, J=6.9 Hz, 2H), 2.66 (t, J=6.9 Hz, 2H), 2.45-2.20 (m, 6H), 2.37 (s, 3H), 1.65-1.50 (m, 8H), 1.5-1.1 (m, 56H), 0.86 (t, J=6.5 Hz, 12H). MS (APCI): 802.6 (M+1).

### 40.11 Synthesis of (((1-Methyl-1H-imidazol-2-yl)methyl)azanediyl)bis(hexane-6,1-diyl) bis(2-hexyldecanoate) (Lipid 10a-130)

[chemical structure]

[1541] Lipid 10a-130 is synthesized according to the scheme above. Reaction conditions are identical to Lipid 10a-139 with the exception of 3-(1H-imidazol-1-yl)butyl amine as the imidazole amine.

### 40.12 Synthesis of (((1-Methyl-1H-imidazol-2-yl)methyl)azanediyl)bis(hexane-6,1-diyl) bis(2-hexyldecanoate) (Lipid 10a-128)

[chemical structure]

[1542] Lipid 10a-128 is synthesized according to the scheme above. Reaction conditions are identical to Lipid 10a-139 with the exception of 1-Methyl-1H-imidazol-2-yl)methyl amine as the imidazole amine.

[1543] ¹H-NMR (300 MHz, CDCl₃): δ 6.89 (d, J=1.4 Hz, 1H), 6.81 (d, J=1.4 Hz, 1H), 4,03 (t, J=6.7 Hz, 4H), 3.68 (s, 3H), 3.62 (s, 2H), 2.45-2.20 (m, 6H), 1.65-1.50 (m, 8H), 1.5-1.35 (m, 8H), 1.35-1.10 (m, 48H), 0.86 (t, J=6.5 Hz, 12H). MS (APCI⁺): 787.6 (M+1).

### Example 41

Lipid Nanoparticle Formulation with Circular RNA

[1544] Lipid Nanoparticles (LNPs) were formed using a Precision Nanosystems Ignite instrument with a ‘NextGen’ mixing chamber. Ethanol phase contained ionizable Lipid 10a-26, DSPC, Cholesterol, and DSPE-PEG 2000 (Avanti Polar Lipids Inc.) at a weight ratio of 16:1:4:1 or 62:4:33:1 molar ratio was combined with an aqueous phase containing circular RNA and 25 mM sodium acetate buffer at pH 5.2. A 3:1 aqueous to ethanol mixing ratio was used. The formulated LNP then were dialyzed in 1 L of water and exchanged 2 times over 18 hours. Dialyzed LNPs were filtered using 0.2 μm filter. Prior to in vivo dosing, LNPs were diluted in PBS. LNP sizes were determined by dynamic light scattering. A cuvette with 1 mL of 20 μg/mL LNPs in PBS (pH 7.4) was measured for Z-average using the Malvern Panalytical Zetasizer Pro. The Z-average and polydispersity index were recorded.

### 41.1 Formulation of Lipids 10a-26 and 10a-27

[1545] Lipid Nanoparticles (LNPs) were formed using a Precision Nanosystems Ignite instrument with a ‘NextGen’ mixing chamber. Ethanol phase contained ionizable Lipid 10a-26 or Lipid 10a-27, DOPE, Cholesterol, and DSPE-PEG 2000 (Avanti Polar Lipids Inc.) at a weight ratio of 16:1:4:1 or 62:4:33:1 molar ratio was combined with an aqueous phase containing circular RNA and 25 mM sodium acetate buffer at pH 5.2. A 3:1 aqueous to ethanol mixing ratio was used. The formulated LNPs were then dialyzed in 1 L of water and exchanged 2 times over 18 hours. Dialyzed LNPs were filtered using 0.2 μm filter. Prior to in vivo dosing, LNPs were diluted in PBS. LNP sizes were determined by dynamic light scattering. A cuvette with 1 mL of 20 μg/mL LNPs in PBS (pH 7.4) was measured for Z-average using the Malvern Panalytical Zetasizer Pro. The Z-average and polydispersity index were recorded.

### 41.2 Formulation of Lipids 10a-53 and 10a-54

[1546] Lipid Nanoparticles (LNPs) were formed using a Precision Nanosystems Ignite instrument with a ‘NextGen’ mixing chamber. Ethanol phase contained ionizable Lipid 10a-53 or 10a-54, DOPE, Cholesterol, and DSPE-PEG 2000 (Avanti Polar Lipids Inc.) at a molar ratio of 50:10:38.5:1.5 was combined with an aqueous phase containing circular RNA and 25 mM sodium acetate buffer at pH 5.2. A 3:1 aqueous to ethanol mixing ratio was used. The formulated LNPs were then dialyzed in IL of 1×PBS and exchanged 2 times over 18 hours. Dialyzed LNPs were filtered using 0.2 μm filter. Prior to in vivo dosing, LNPs were diluted in PBS. LNP sizes were determined by dynamic light scattering. A cuvette with 1 mL of 20 μg/mL LNPs in PBS (pH 7.4) was measured for Z-average using the Malvern Panalytical Zetasizer Pro. The Z-average and polydispersity index were recorded.

[1547] LNP zeta potential was measured using the Malvern Panalytical Zetasizer Pro. A mixture containing 200 μL of the particle solution in water and 800 μL of distilled RNAse-free water with a final particle concentration of 400 μg/mL was loaded into a zetasizer capillary cell for analysis.

[1548] RNA encapsulation was determined using a Ribogreen assay. Nanoparticle solutions were diluted in tris-ethylenediaminetetraacetic acid (TE) buffer at a theoretical circRNA concentration of 2 μg/mL. Standard circRNA solutions diluted in TE buffer were made ranging from 2 μg/mL to 0.125 μg/mL. The particles and standards were added to all wells and a second incubation was performed (37° C. at 350 rpm for 3 minutes). Fluorescence was measured using a SPECTRAmax® GEMINI XS microplate spectrofluorometer. The concentration of circular RNA in each particle solution was calculated using the standard curve. The encapsulation efficiency was calculated from the ratio of circRNA detected between lysed and unlysed particles.

TABLE 22a
Characterization of LNPs

| | | | Encapsulation | Zeta Data |
|---|---|---|---|---|
| Ionizable Lipid | Size (nm) | PDI | Efficiency (%) | Potential (mV) |
| 22-S14 | 88 | 0.09 | 96 | 3.968 |
| 93-S14 | 119 | 0.02 | 96 | −6.071 |
| Lipid 10a-26 | 86 | 0.08 | 92 | −15.24 |

TABLE 22b
Characterization of LNPs

| Ionizable Lipid | Z-Average(nm) | PDI | RNA Entrapment(%) |
|---|---|---|---|
| 22-S14 | 64 | 0.05 | 97 |
| 93-S14 | 74 | 0.04 | 95 |
| Lipid 10a-26 | 84 | 0.04 | 96 |

### Example 42

### In Vivo Analysis

[1549] Female CD-1 or female c57BL/6J mice ranging from 22-25 g were dosed at 0.5 mg/kg RNA intravenously. Six hours after injection, mice were injected intraperitoneally with 200 μL of D-luciferin at 15 mg/mL concentration. 5 minutes after injection, mice were anesthetized using isoflurane, and placed inside the IVIS Spectrum In Vivo Imaging System (Perkin Elmer) with dorsal side up. Whole body total IVIS flux of Lipids 22-S14, 93-S14, Lipid 10a-26 is presented in FIG. 32A. Post 10 minutes injection, mice were scanned for luminescence. Mice were euthanized and organs were extracted within 25 minutes of luciferin injection to scan for luminescence in liver, spleen, kidneys, lungs, and heart. Images (FIGS. 33A-B, 34A-B, 35A-B) were analyzed using Living Images (Perkin Elmer) software. Regions of interest were drawn to obtain flux and average radiance and analyzed for biodistribution of protein expression (FIG. 32A-B).

[1550] FIG. 32A illustrates the increased whole-body total flux observed from luciferase circRNA with Lipid 10a-26 LNPs compared to LNPs made with lipids 22-S14 and 93-S14. FIG. 32B shows the ex vivo IVIS analysis of tissues further highlighting the increased overall expression with Lipid 10a-26 while maintaining the desired spleen to liver ratios observed with lipids 22-S14 and 93-S14 despite the significant structural changes designed to improve expression. These data highlight the improvements afforded by Lipid 10a-26 compared to previously reported lipids.

[1551] Similar analysis as described above was also performed with circRNA encapsulated in LNPs formed with Lipid 10b-15 or Lipid 10a-53 or 10a-54. FIGS. 36A-C show the ex vivo IVIS analysis of tissues, respectively highlighting the overall expression with Lipid 10b-15, 10a-53, and 10a-54 while maintaining the desired spleen to liver ratios despite the significant structural changes designed to improve expression. FIG. 36D shows the results for PBS control. These data demonstrates the improvements afforded by Lipids 10b-15, 10a-53, and 10a-54 compared to previously reported lipids such as 93-S14 and 22-S14.

### Example 43

### Delivery of Luciferase

[1552] Human peripheral blood mononuclear cells (PBMCs) (Stemcell Technologies) were transfected with lipid nanoparticles (LNP) encapsulating firefly luciferase (f.luc) circular RNA and examined for luciferase expression. PBMCs from two different donors were incubated in vitro with five different LNP compositions, containing circular RNA encoding for firefly luciferase (200 ng), at 37° C. in RPMI, 2% human serum, IL-2 (10 ng/mL), and 50 uM BME. PBMCs incubated without LNP were used as a negative control. After 24 hours, the cells were lysed and analyzed for firefly luciferase expression based on bioluminescence (Promega BrightGlo).

[1553] Representative data are presented in FIGS. 37A and 37B, showing that that the tested LNPs are capable of delivering circular RNA into primary human immune cells resulting in protein expression.

### Example 44

### In Vitro Delivery of Green Fluorescent Protein (GFP) or Chimeric Antigen Receptor (CAR)

[1554] Human PBMCs (Stemcell Technologies) were transfected with LNP encapsulating GFP and examined by flow cytometry. PBMCs from five different donors (PBMC A-E) were incubated in vitro with one LNP composition, containing circular RNA encoding either GFP or CD19-CAR (200 ng), at 37° C. in RPMI, 2% human serum, IL-2 (10 ng/mL), and 50 uM BME. PBMCs incubated without LNP were used as a negative control. After 24, 48, or 72 hours post-LNP incubation, cells were analyzed for CD3, CD19, CD56, CD14, CD11b, CD45, fixable live dead, and payload (GFP or CD19-CAR).

[1555] Representative data are presented in FIGS. 38A and 38B, showing that the tested LNP is capable of delivering circular RNA into primary human immune cells resulting in protein expression.

### Example 45

[1556] Multiple IRES variants can mediate expression of murine CD19 CAR in vitro

[1557] Multiple circular RNA constructs, encoding anti-murine CD19 CAR, contains unique IRES sequences and were lipotransfected into 1C1C7 cell lines. Prior to lipotransfection, 1C1C7 cells are expanded for several days in complete RPMI Once the cells expanded to appropriate numbers, 1C1C7 cells were lipotransfected (Invitrogen RNAiMAX) with four different circular RNA constructs. After 24 hours, 1C1C7 cells were incubated with His-tagged recombinant murine CD19 (Sino Biological) protein, then stained with a secondary anti-His antibody. Afterwards, the cells were analyzed via flow cytometry.

[1558] Representative data are presented in FIGS. 39, showing that IRES sourced from the indicated virus (apodemus agrarius picornavirus, caprine kobuvirus, parabovirus, and salivirus) are capable of driving expression of an anti-mouse CD19 CAR in murine T cells.

### Example 46

### Murine CD19 CAR Mediates Tumor Cell Killing In Vitro

[1559] Circular RNA encoding anti-mouse CD19 CAR were electroporated into murine T cells to evaluate CAR-mediated cytotoxicity. For electroporation, T cells were electroporated with circular RNA encoding anti-mouse CD19 CAR using ThermoFisher's Neon Transfection System then rested overnight. For the cytotoxicity assay, electroporated T cells were co-cultured with Fluc+ target and non-target cells at 1:1 ratio in complete RPMI containing 10% FBS, IL-2 (10 ng/mL), and 50 uM BME and incubated overnight at 37° C. Cytotoxicity was measured using a luciferase assay system 24 hours post-co-culture (Promega Brightglo Luciferase System) to detect lysis of Fluc+ target and non-target cells. Values shown are calculated relative to the untransfected mock signal.

[1560] Representative data are presented in FIG. 40, showing that an anti-mouse CD19 CAR expressed from circular RNA is functional in murine T cells in vitro.

### Example 47

Functional Depletion of B Cells with a Lipid Encapsulated Circular RNA Encoding Murine CD19 CAR

[1561] C57BL/6J mice were injected with LNP formed with Lipid 10b-15, encapsulating circular RNA encoding anti-murine CD19 CAR. As a control, Lipid 10b-15 encapsulating circular RNA encoding firefly luciferase (f.Luc) were injected in different group of mice. Female C57BL.6J, ranging from 20-25 g, were injected intravenously with 5 doses of 0.5 mg/kg of LNP, every other day. Between injections, blood draws were analyzed via flow cytometry for fixable live/dead, CD45, TCRvb, B220, CD11b, and anti-murine CAR. Two days after the last injection, spleens were harvested and processed for flow cytometry analysis. Splenocytes were stained with fixable live/dead, CD45, TCRvb, B220, CD11b, NK1.1, F4/80, CD11c, and anti-murine CAR. Data from mice injected with anti-murine CD19 CAR LNP were normalized to mice that received f.Luc LNP.

[1562] Representative data are presented in FIGS. 41A, 41B, and 41C, showing that an anti-mouse CD19 CAR expressed from circular circRNA delivered in vivo with LNPs is functional in murine T cells in vivo.

### Example 48

Cd19 CAR Expressed from Circular RNA has Higher Yield and Greate Cytotoxic Effect Compared to that Expressed from mRNA

[1563] Circular RNA encoding encoding anti-CD19 chimeric antigen antigen receptor, which includes, from N-terminus to C-terminus, a FMC63-derived scFv, a CD8 transmembrane domain, a 4-1BB costimulatory domain, and a CD3 (intracellular domain, were electroporated into human peripheral T cells to evaluate surface expression and CAR-mediated cytotoxicity. For comparison, circular RNA-electroporated T cells were compared to mRNA-electroporated T cells in this experiment. For electroporation, CD3+ T cells were isolated from human PBMCs using commercially available T cell isolation kits (Miltenyi Biotec) from donor human PBMCs. After isolation, T cells were stimulated with anti-CD3/anti-CD28 (Stemcell Technologies) and expanded over 5 days at 37° C. in complete RPMI containing 10% FBS, IL-2 (10 ng/mL), and 50 uM BME. Five days post stimulation, T cells were electroporated with circular RNA encoding anti-human CD19 CAR using ThermoFisher's Neon Transfection System and then rested overnight. For the cytotoxicity assay, electroporated T cells were co-cultured with Fluc+ target and non-target cells at 1:1 ratio in complete RPMI containing 10% FBS, IL-2 (10 ng/mL), and 50 uM BME and incubated overnight at 37° C. Cytotoxicity was measured using a luciferase assay system 24 hours post-co-culture (Promega Brightglo Luciferase System) to detect lysis of Fluc+ target and non-target cells. Furthermore, an aliquot of electroporated T cells were taken and stained for live dead fixable staining, CD3, CD45, and chimeric antigen receptors (FMC63) at the day of analysis.

[1564] Representative data are presented in FIGS. 42 and 43. FIGS. 42A and 42B show that an anti-human CD19 CAR expressed from circular RNA is expressed at higher levels and longer than an anti-human CD19 CAR expressed from linear mRNA. FIGS. 43A and 43B show that an anti-human CD19 CAR expressed from circular RNA is exerts a greater cytotoxic effect relative to anti-human CD19 CAR expressed from linear mRNA.

### Example 49

Functional Expression of Two CARs from a Single Circular RNA

[1565] Circular RNA encoding chimeric antigen receptors were electroporated into human peripheral T cells to evaluate surface expression and CAR-mediated cytotoxicity. The purpose of this study is to evaluate if circular RNA encoding for two CARs can be stochastically expressed with a 2A (P2A) or an IRES sequence. For electroporation, CD3+ T cells were commercially purchased (Cellero) and stimulated with anti-CD3/anti-CD28 (Stemcell Technologies) and expanded over 5 days at 37° C. in complete RPMI containing 10% FBS, IL-2 (10 ng/mL), and 50 uM BME. Four days post stimulation, T cells were electroporated with circular RNA encoding anti-human CD19 CAR, anti-human CD19 CAR-2A-anti-human BCMA CAR, and anti-human CD19 CAR-IRES-anti-human BCMA CAR using ThermoFisher's Neon Transfection System then rested overnight. For the cytotoxicity assay, electroporated T cells were co-cultured with Fluc+ K562 cells expressing human CD19 or BCMA antigens at 1:1 ratio in complete RPMI containing 10% FBS, IL-2 (10 ng/mL), and 50 uM BME and incubated overnight at 37° C. Cytotoxicity was measured using a luciferase assay system 24 hours post-co-culture (Promega BrightGlo Luciferase System) to detect lysis of Fluc+ target cells.

[1566] Representative data are presented in FIG. 44, showing that two CARs can be functionally expressed from the same circular RNA construct and exert cytotoxic effector function.

### Example 50

### In Vivo Circular RNA Transfection Using Cre Reporter Mice

[1567] Circular RNAs encoding Cre recombinase (Cre) are encapsulated into lipid nanoparticles as previously described. Female, 6-8 week old B6.Cg-Gt(ROSA)26Sortm9(CAG-tdTomato)Hze/J (Ai9) mice were dosed with lipid nanoparticles at 0.5 mg/kg RNA intravenously. Fluorescent tdTomato protein was transcribed and translated in Ai9 mice upon Cre recombination, meaning circular RNAs have been delivered to and translated in tdTomato+ cells. After 48 hr, mice were euthanized and the spleens were harvested, processed into a single cell suspension, and stained with various fluorophore-conjugated antibodies for immunophenotyping via flow cytometry.

[1568] FIG. 45A shows representative FACS plots with frequencies of tdTomato expression in various spleen immune cell (CD45+, live) subsets, including total myeloid (CD11b+), B cells (CD19+), and T cells (TCR-B+) following treatment with LNPs formed with Lipid 10a-27 or 10a-26 or Lipid 10b-15. Ai9 mice injected with PBS represented background tdTomato fluorescence. FIG. 45B quantifies the proportion of myeloid cells, B cells, and T cells expressing tdTomato (mean+std. dev., n=3), which is equivalent to the proportion of each cell population which has been successfully transfected with Cre circular RNA. LNPs made with Lipids 10a-27 and 10a-26 exhibit significantly higher myeloid and T cell transfection compared with Lipid 93-S14, highlighting the improvements conferred by lipid structural modifications.

[1569] FIG. 45C illustrates the proportion of additional splenic immune cell populations expressing tdTomato with Lipids 10a-27 and 10a-26 (mean+std. dev., n=3), which also include NK cells (NKp46+, TCR-B−), classical monocytes (CD11b+, Ly-6G-, Ly-6C_hi), nonclassical monocytes (CD11b+, Ly-6G-, Ly-6C_1o), neutrophils (CD11b+, Ly-6G+), and dendritic cells (CD11c+, MHC-II+). These experiments demonstrate that LNPs made with Lipids 10a-27 and 10a-26 and Lipid 10b-15 are effective at delivering circular RNAs to many splenic immune cell subsets in mice and lead to successful protein expression from the circular RNA in those cells.

### Example 51

### Example 51a: Built-In polyA Sequences and Affinity-Purification to Produce Immue-Silent Circular RNA

[1570] PolyA sequences (20-30nt) were inserted into the 5′ and 3′ ends of the RNA construct (precursor RNA with built-in polyA sequences in the introns). See, for example, FIG. 97A. Precursor RNA and introns can alternatively be polyadenylated post-transcriptionally using, e.g., E coli. polyA polymerase or yeast polyA polymerase, which requires the use of an additional enzyme.

[1571] Circular RNA in this example was circularized by in vitro transcription (IVT) and affinity-purified by washing over a commercially available oligo-dT resin to selectively remove polyA-tagged sequences (including free introns and precursor RNA) from the splicing reaction. See, for example, FIG. 98. The IVT was performed with a commercial IVT kit (New England Biolabs) or a customerized IVT mix (Orna Therapeutics), containing guanosine monophosphate (GMP) and guanosine triphosphate (GTP) at different ratios (GMP:GTP=8, 12.5, or 13.75). In some embodiments, GMP at a high GMP:GTP ratio may be preferentially included as the first nucleotide, yielding a majority of monophosphate-capped precursor RNAs. As a comparison, the circular RNA product was alternatively purified by the treatment with Xrn1, Rnase R, and Dnase I (enzyme purification). See, for example, FIG. 100.

[1572] Immunogenicity of the circular RNAs prepared using the affinity purification or enzyme purification process were then assessed. Briefly, the prepared circular RNAs were transfected into A549 cells. After 24 hours, the cells were lysed and interferon beta-1 induction relative to mock samples was measured by qPCR. 3p-hpRNA, a triphosphorylated RNA, was used as a positive control.

[1573] FIGS. 46B and 46C and FIGS. 99A and 99B show that the negative selection affinity purification removes non-circular products from splicing reactions when polyA sequences are included on elements that are removed during splicing and present in unspliced precursor molecules. FIG. 46D shows circular RNAs prepared with tested IVT conditions and purification methods are all immunoquiescent. These results suggest the negative selection affinity purification is equivalent or superior to enzyme purification for circular RNA purification and that customized circular RNA synthesis conditions (IVT conditions) may reduce the reliance on GMP excess to achieve maximal immunoquiescence.

### Example 51B: Dedicated Binding Site and Affinity-Purification for Circular RNA Production

[1574] Instead of polyA tags, one can include specifically design sequences (DBS, dedicated binding site). See, for example, FIG. 47A.

[1575] Instead of a polyA tag, a dedicated binding site (DBS), such as a specifically designed complementary oligonucleotide that can bind to a resin, may be used to selectively deplete precursor RNA and free introns. In this example, DBS sequences (30nt) were inserted into the 5′ and 3′ ends of the precursor RNA, such as TATAATTCTACCCTATTGAGGCATTGACTA (SEQ ID NO: 3269), shown in FIG. 47A. RNA was transcribed and the transcribed product was washed over a custom complementary oligonucleotide linked to a resin.

[1576] FIGS. 47B and 47C demonstrates that including the designed DBS sequence in elements that are removed during splicing enables the removal of unspliced precursor RNA and free intron components in a splicing reaction, via negative affinity purification.

### Example 51C: Production of a Circular RNA Encoding Dystrophin

[1577] A 12kb 12,000nt circular RNA encoding dystrophin was produced by in vitro transcription of RNA precursors followed by enzyme purification using a mixture of Xrn1, DNase 1, and RNase R to degrade remaining linear components. FIG. 48 shows that the circular RNA encoding dystrophin was successfully produced.

### Example 51D: Negative Selection Affinity-Purification of Circular RNA

[1578] Affinity sequences are added to precursor RNAs, and circular RNA is produced by in vitro transcription (IVT), as described in Examples 51A and 51B. Oligonucleotides comprising a sequence that is 100% complementary to the affinity sequences are conjugated to a resin, or a commercially available resin conjugated to oligonucleotides complementary to the affinity sequences is obtained. The IVT reaction mixture may be directly added to the resin. Alternatively, the IVT reaction solution is buffer exchanged into binding buffer, such as a Tris buffer, comprising greater than 1 mM one or more monovalent salts, such as NaCl or KCl, or the one or more monovalent salts are simply added to the IVT reaction mixture before the IVT reaction mixture is added to the resin. Circular RNA that does not comprise an affinity sequence is then affinity-purified by washing the solution comprising linear RNA and circular RNA over the resin. The solution may be heated during this process in order to denature aberrantly hybridized sequences. The eluent from the beads is collected and buffer exchanged into water or storage buffer comprising 1 mM sodium citrate, pH 6.5, using a filtration threshold of 10-300 kDa.

### Example 52

### 5′ Spacer Between 3′ Intron Fragment and the IRES Improves Circular RNA Expression

[1579] Expression level of purified circRNAs with different 5′ spacers between the 3′ intron fragment and the IRES in Jurkat cells were compared. Briefly, luminescence from secreted Gaussia luciferase in supernatant was measured 24 hours after electroporation of 60,000 cells with 250ng of each RNA.

[1580] Additionally, stability of purified circRNAs with different 5′ spacers between the 3′ intron fragment and the IRES in Jurkat cells were compared. Briefly, luminescence from secreted Gaussia luciferase in supernatant was measured over 2 days after electroporation of 60,000 cells with 250ng of each RNA and normalized to day 1 expression.

[1581] The results are shown in FIGS. 49A and 49B, indicating that adding a spacer can enhance IRES function and the importance of sequence identity and length of the added spacer. A potential explanation is that the spacer is added right before the IRES and likely functions by allowing the IRES to fold in isolation from other structured elements such as the intron fragments.

### Example 53

[1582] This example describes deletion scanning from 5′ or 3′ end of the caprine kobuvirus IRES. IRES borders are generally poorly characterized and require empirical analysis, and this example can be used for locating the core functional sequences required for driving translation. Briefly, circular RNA constructs were generated with truncated IRES elements operably linked to a gaussia luciferase coding sequence. The truncated IRES elements had nucleotide sequences of the indicated lengths removed from the 5′ or 3′ end. Luminescence from secreted gaussia luciferase in supernatant was measured 24 and 48 hours after electroporation of primary human T cells with RNA. Stability of expression was calculated as the ratio of the expression level at the 48-hour time point relative to that at the 24-hour time point.

[1583] As shown in FIG. 50, deletion of more than 40 nucleotides from the 5′ end of the IRES reduced expression and disrupted IRES function. Stability of expression was relatively unaffected by the truncation of the IRES element but expression level was substantially reduced by deletion of 141 nucleotides from the 3′ end of the IRES, whereas deletion of 57 or 122 nucleotides from the 3′ end had a positive impact on the expression level.

[1584] It was also observed that deletion of the 6-nucleotide pre-start sequence reduced the expression level of the luciferase reporter. Replacement of the 6-nucleotide sequence with a classical kozak sequence (GCCACC) did not have a significant impact but at least maintained expression.

### Example 54

[1585] This example describes modifications (e.g., truncations) of selected selected IRES sequences, including Caprine Kobuvirus (CKV) IRES, Parabovirus IRES, Apodemus Picornavirus (AP) IRES, Kobuvirus SZAL6 IRES, Crohivirus B (CrVB) IRES, CVB3 IRES, and SAFV IRES. Briefly, circular RNA constructs were generated with truncated IRES elements operably linked to a gaussia luciferase coding sequence. HepG2 cells were transfected with the circular RNAs. Luminescence in the supernatant was assessed 24 and 48 hours after transfection. Stability of expression was calculated as the ratio of the expression level at the 48-hour time point relative to that at the 24-hour time point.

[1586] As shown in FIG. 51, truncations had variable effects depending on the identity of the IRES, which may depend on the initiation mechanism and protein factors used for translation, which often differs between IRESs. 5′ and 3′ deletions can be effectively combined, for example, in the context of CKV IRES. Addition of a canonical Kozak sequence in some cases significantly improved expression (as in SAFV, Full vs Full+K) or diminished expression (as in CKV, 5d40/3d122 vs 5d40/3d122+K).

### Example 55

[1587] This example describes modifications of CK-739, AP-748, and PV-743 IRES sequences, including mutations altative translation initiation sites. Briefly, circular RNA constructs were generated with modified IRES elements operably linked to a gaussia luciferase coding sequence. Luminescence from secreted gaussia luciferase in supernatant was measured 24 and 48 hours after transfection of 1C1C7 cells with RNA.

[1588] CUG was the most commonly found alternative start site but many others were also characterized. These triplets can be present in the IRES scanning tract prior to the start codon and can affect translation of correct polypeptides. Four alternative start site mutations of the IRES having the sequence of SEQ ID NO: 3282 were created. As shown in FIG. 52, mutations of alternative translation initiation sites in the CK-739 IRES affected translation of correct polypeptides, positively in some instances and negatively in other instances. Mutation of all the alternative translation initiation sites reduced the level of translation.

[1589] Alternative Kozak sequences, 6 nucleotides before start codon, can also affect expression levels. The 6-nucleotide sequence upstream of the start codon were gTcacG, aaagtc, gTcacG, gtcatg, gcaaac, and acaacc, respectively, in CK-739 IRES and Sample Nos. 1-5 in the “6nt Pre-Start” group. As shown in FIG. 52, substitution of certain 6-nucleotide sequences prior to the start codon affected translation.

[1590] It was also observed that 5′ and 3′ terminal deletions in AP-748 and PV-743 IRES sequences reduced expression. However, in the CK-739 IRES, which had a long scanning tract, translation was relatively unaffected by deletions in the scanning tract.

### Example 56

[1591] This example describes modifications of selected IRES sequences by inserting 5′ and/or 3′ untranslated regions (UTRs) and creating IRES hybrids. Briefly, circular RNA constructs were generated with modified IRES elements operably linked to a gaussia luciferase coding sequence. Luminescence from secreted gaussia luciferase in supernatant was measured 24 and 48 hours after transfection of HepG2 cells with RNA.

[1592] IRES sequences with UTRs inserted may comprise a sequence selected from SEQ ID NOs: 3192-3199. As shown in FIG. 53, insertion of 5′ UTR right after the 3′ end of the IRES and before the start codon slightly increased the translation from Caprine Kobuvirus (CK) IRES but in some instances abrogated translation from Salivirus SZ1 IRES. Insertion of 3′ UTR right after the stop cassette had no impact on both IRES sequences.

[1593] Hybrid CK IRES sequences were made with CK IRES as a base, with specific regions of the CK IRES replaced with similar-looking structures from other IRES sequences, for example, SZ1 and AV (Aichivirus). As shown in FIG. 53, certain hybrid synthetic IRES sequences were functional, indicating that hybrid IRES can be constructed using parts from distinct IRES sequences that show similar predicted structures while deleting these structures completely abrogates IRES function.

### Example 57

[1594] This example describes modifications of circular RNAs by introducing stop codon or cassette variants. Briefly, circular RNA constructs were generated with IRES elements operably linked to a gaussia luciferase coding sequence followed by variable stop codon cassettes, which included a stop codon in each frame and two stop codons in the reading frame of the gaussia luciferase coding sequence. 1C1C7 cells were transfected with the circular RNAs. Luminescence in supernatant was assessed 24 and 48 hours after transfection.

[1595] The sequences of the stop codon cassettes are set forth in SEQ ID NOs: 3203-3209. As shown in FIG. 54, certain stop codon cassettes improved expression levels, although they had little impact on expression stability. In particular, a stop cassette with two frame 1 (the reading frame of the gaussia luciferase coding sequence) stop codons, the first being TAA, followed by a frame 2 stop codon and a frame 3 stop codon, is effective for promoting functional translation.

### Example 58

[1596] This example describes modifications of circular RNAs by inserting 5′ UTR variants. Briefly, circular RNA constructs were generated with IRES elements with 5′ UTR variants inserted between the 3′ end of the IRES and the start codon, the IRES being operably linked to a gaussia luciferase coding sequence. 1C1C7 cells were transfected with the circular RNAs. Luminescence in supernatant was assessed 24 and 48 hours after transfection.

[1597] The sequences of the 5′ UTR variants are set forth in SEQ ID NOs: 3197 and 3200-3202. As shown in FIG. 55, a CK IRES with a canonical Kozak sequence (UTR4) was more effective when a 36-nucleotide unstructured/low GC spacer sequence was added (UTR2), suggesting that the GC-rich Kozak sequences may interfere with core IRES folding. Using a higher-GC/structured spacer with a kozak sequence did not show the same benefit (UTR3), possibly due to interference with IRES folding by the spacer itself. Mutating the kozak sequence to gTcacG (UTR1) enhanced translation to the same level as the Kozak+spacer alternative without the need for a spacer.

### Example 59

[1598] This example describes the impact of miRNA target sites in circular RNAs on expression levels. Briefly, circular RNA constructs were generated with IRES elements operably linked to a human erythropoietin (hEPO) coding sequence, where 2 tandem miR-122 target sites were inserted into the construct. miR-122-expressing Huh7 cells were transfected with the circular RNAs. hEPO expression in supernatant was assessed 24 and 48 hours after transfection by sandwich ELISA.

[1599] As shown in FIG. 56, the hEPO expression level was obrogated where the miR-122 target sites were inserted into the circular RNA. This result demonstrates that expression from circular RNA can be regulated by miRNA. As such, cell type- or tissue-specific expression can be achieved by incorporating target sites of the miRNAs expressed in the cell types in which expression of the recombinant protein is undesirable.

### Example 60

[1600] This example shows transfection of human tumor cells by LNPs in vitro. SupT1 cells (a human T cell tumor line) and MV4-11 cells (a human macrophage tumor line) were plated at 100,000 cells/well and 100,000 cells/well, respectively, in a 96-well plate overnight. Then, LNPs containing circRNA coding for Firefly Luciferase (FLuc) were added to the cells at 200 ng RNA/well. After 24-hour incubation, luminescence was quantified using the Bright-Glo Luciferase Assay System (Promega) according to manufacturer's instructions and background luminescence from cells not treated with LNP was subtracted. FIG. 57 quantifies the measured Firefly luminescence, indicating that LNPs comprising Lipid 10a-27 (10a-27 (4.5D) LNP, see Example 70) or Lipid 10a-26 (10a-26 (4.5D) LNP, see Example 70) can transfect and express circRNA in both human T cell and macrophage tumor lines in vitro. 10a-27 (4.5D) LNP resulted in higher luminescence than 10a-26 (4.5D) LNP showing that levels of transfection of LNPs to human tumor cells can be affected by formulation.

### Example 61

[1601] This example shows transfection of primary human activated T cells in vitro. Primary human T cells from independent donors were stimulated with aCD3/aCD28 and allowed to proliferate for 6 days in the presence of human serum and IL-2. Then, 100,000 cells were plated in a 96 well plate and LNPs containing circRNA coding for Firefly Luciferase (FLuc) were added to the cells at 200 ng RNA/well with or without Apolipoprotein E3 (ApoE3). After 24-hour incubation, luminescence was quantified using the Bright-Glo Luciferase Assay System (Promega) according to manufacturer's instructions and background luminescence from cells not treated with LNPs was subtracted. FIG. 58 shows the measured Firefly luminescence across 4 independent donors, demonstrating that all LNPs tested transfect primary human T cells in vitro. LNPs containing Lipid 10a-27 generally produced higher luminescence than those containing Lipid 10a-26. Furthermore, the addition of ApoE3 generally increased the expression of luciferase more for 10a-27 (5.7A) and 10a-26 (5.7A) (average of 4.4-fold and 9.3-fold across 4 donors, respectively) compared to 10a-27 (4.5D) and 10a-26 (4.5D) (3.1-fold and 2.6-fold, respectively). This suggests that the helper lipid, PEG lipid, and ionizable lipid:phosphate ratio all contribute to the ApoE-dependence of different formulations made with the same ionizable lipids. (See Example 70 for LNP formulation procesure, e.g., for 10a-27 (5.7A), 10a-26 (5.7A), 10a-27 (4.5D), and 10a-26 (4.5D) LNPs.)

### Example 62

[1602] This example shows that different tail chemistries of LNPs result in different uptake mechanisms into T cells. To quantify the percent of human T cells expressing circRNA, LNPs containing eGFP circRNA were added to activated primary human T cells (prepared as described above in Example 61) at 200 ng RNA/well with or without ApoE3. After 24-hour incubation, cells were analyzed by flow cytometry and the percentage of live, GFP+ T cells was quantified. FIG. 59 graphs the % GFP+ T cells for 2 independent donors, with 5-10% of cells being GFP+ for LNP containing Lipid 10a-27 (10a-27 (4.5D) LNP, see Example 70) and for LNP contatinig Lipid 10a-46 (10a-46 (5.7A) LNP, see Example 70). Although ApoE3 addition resulted in increased transfection for 10a-27 (4.5D) LNP, it did not appear to increase transfection for 10a-46 (5.7A) LNP, suggesting the different tail chemistries between Lipids 10a-27 and 10a-46 may mediate different uptake mechanisms into T cells.

### Example 63

[1603] This example describes immune cell expression of Cre in a Cre reporter mouse model.

[1604] Ai9 mice (B6.Cg-Gt(ROSA)26Sortm9(CAG-tdTomato)Hze/J, female, 6-8 weeks, n=3 per group) were injected i.v. with 0.5 mg/kg Cre circRNA LNPs or PBS. Ai9 mice transcribe and translate the fluorescent reporter tdTomato upon Cre recombination; meaning cells which are tdTomato+ have successfully been transfected with Cre circRNA. After 48 hours, mice were euthanized and their spleens were collected and manually processed into single cell suspensions. The splenocytes were stained for dead cells (LiveDead Fixable Aqua, Thermo) and with anti-mouse antibodies (TCR-B chain, BV421, H57-597; CD45, BV711, 30-F11; CD11b, BV785, ICRF44; NKp46, AF647, 29A1.4; CD19, APC/750, 6D5; TruStain FcX, 93; all antibodies from Biolegend) at 1:200 ratio. Flow cytometry was performed using an Attune Nxt Flow Cytometer (Thermo).

[1605] The percent of tdTomato+ cells in splenic myeloid cells (CD1 1b+), B cells (CD19+), and T cells (TCR-B+) is presented in FIG. 60. Lipid 10a-27 and Lipid 10a-46 differ only by their tail chemistries, and formulations made with Lipid 10a-27 transfect significantly more splenic immune cells than those made with Lipid 10a-46. Additionally, 10a-27 (4.5D) LNP (see Example 70) formulated with Cre circRNA transfected approximately twice as many T cells than those formulated with Cre linear mRNA, suggesting that circRNA may result in improved protein expression in splenic T cells compared to linear mRNA.

TABLE 23
Characterization of LNPs

| | | | RNA |
|---|---|---|---|
| | Z- | | Encapsulation |
| Formulation | Average (nm) | PDI | Efficiency (%) |
| 10a-27 (4.5D), Study 1 | 65 | 0.07 | 96 |
| 10a-26 (4.5D), Study 1 | 74 | 0.06 | 94 |
| 10a-27 (4.5D), with mCre, | 75 | 0.05 | 93 |
| Study 1 | | | |
| 10a-46 (5.7A), Study 2 | 86 | 0.01 | 94 |

### Example 64

[1606] This example shows immune cell expression of mOX40L circRNA in wildtype mice.

[1607] C57BL/6 mice (female, 6-8 weeks, n=3 or 4 per group) were injected intravenously with 0.5 mg/kg mOX40L circRNA LNPs or PBS. After 24 hours, mice were euthanized and their spleens were collected and manually processed into single cell suspensions. Splenocytes were stained for dead cells (LiveDead Fixable Aqua, Thermo) and with anti-mouse antibodies (TCR-B chain, PacBlue, H57-597; CD11b, FITC, ICRF44; B220, PE, RA3-6B2; CD45, PerCP, 30-F11; mOX40L, AF647, RM134L; NK1.1, APC/750, PK136; TruStain FcX, 93; all antibodies from Biolegend) at 1:200. Flow cytometry was performed using an Attune N×T Flow Cytometer (Thermo).

[1608] The percent of mOX40L+cells in splenic myeloid (CD1 1b+), T cells (TCR-B+), and NK cells (NK1.1+) is presented in FIG. 61. Notably, significantly different transfection efficiencies are observed between the same formulations injected intravenously in different buffers (hypotonic PBS, isotonic PBS, and isotonic TBS). 10a-27 4.5D LNP in hypotonic PBS results in approximately 14% myeloid cell transfection, 6% T cell transfection, and 21% NK cell transfection in the spleen. Of the formulations injected in isotonic buffer, 10a-27 DSPC 5.7A LNP demonstrates myeloid, T cell, and NK cell transfection in the spleen (9%, 3%, and 8%, respectively). (See Example 70 for LNP formulation procedure, e.g., for 10a-27 (4.5D) LNP and 10a-27 DSPC (5.7A) LNP.)

TABLE 24
Characterization of LNPs

| | Z- | | RNA Encapsulation |
|---|---|---|---|
| Formulation | Average (nm) | PDI | Efficiency (%) |
| 10a-27 (4.5D) | 63 | 0.02 | 93 |
| 10a-26 (4.5D) | 67 | 0.07 | 94 |
| 10a-27 DSPC (5.7A) | 82 | 0.05 | 96 |

### Example 65

[1609] This example shows single dose escalation of mOX40L circRNA-LNPs in wildtype mice.

[1610] 57BL/6 mice (female, 6-8 weeks, n=3 per group) were injected intravenously with 1 mg/kg or 3 mg/kg mOX40L circRNA LNPs or buffer control. After 24 hours, mice were euthanized and their spleens were collected and manually processed into single cell suspensions. Splenocytes were stained for dead cells (LiveDead Fixable Blue, Thermo) and stained with anti-mouse antibodies (TCR-B chain, BV421, H57-597; CD19, BV605, 6D5; CD45, BV711, 30-F11; CD11b, BV785, ICRF44; CD11c, FITC, N418; CD8a, PerCP, 53-6.7; mOX40L, PE, RM134L; NKp46, AF647, 29A1.4; CD4, APC/750, GK1.5; TruStain FcX, 93; all antibodies from Biolegend) at 1:200. Flow cytometry was performed using a BD FACSSymphony flow cytometer.

[1611] The percent of mOX40L+cells in splenic T cells (all TCR-B+), CD4+ T cells (TCR-B+, CD4+), CD8+ T cells (TCR-B+, CD8a+), B cells (CD19+), NK cells (NKp46+), dendritic cells (CD11c+), and other myeloid cells (CD11b+, CD11c−) are shown in FIG. 62A and FIG. 62B, with corresponding mouse weight change after 24 hours shown in FIG. 62C. A dose-dependent increase in immune cell subset transfection is observed across 1 mg/kg and 3 mg/kg for all groups, with the exception of 10a-27 (4.5D) LNP 1×PBS group. At the 3 mg/kg dose, three different LNPs (10a-27 (4.5D) in TBS, 10a-26 (4.5D) in PBS, and 10a-27 DSPC (5.7A) in TBS; see Example 70 for formulation procedures) achieve 10-20% mOX40L transfection in splenic T cells, with similar transfection rates observed among CD4+ and CD8+ subsets. These three formulations also result in approximately 20% B cell, 60-70% dendritic cell, 60-70% NK cell, and 30-40% other myeloid cell mOX40L transfection in the spleen at 3 mg/kg. These three formulations lead to only minor (0-3%) mouse weight loss at 24 hours at the 3 mg/kg single dose with no reported clinical observations.

TABLE 25
Characterization of LNPs

| | Z- | | RNA Encapsulation |
|---|---|---|---|
| Formulation | Average (nm) | PDI | Efficiency (%) |
| 10a-27 (4.5D) | 76 | 0.06 | 91 |
| 10a-26 (4.5D) | 67 | 0.01 | 88 |
| 10a-27 DSPC (5.7A) | 77 | 0.01 | 93 |

### Example 66

[1612] This example shows circRNA-LNP CAR-mediated B cell depletion in mice.

[1613] C57BL/6 mice (female, 6-8 weeks, n=5 per group) were injected intravenously with 0.5 mg/kg aCD19-CAR circRNA LNPs or control FLuc circRNA LNPs on Days 0, 2, 5, 7, and 9. On Days −1, 1, 8 and 12, submandibular bleeds were performed to collect blood. 30 μL of blood was lysed with ACK lysis buffer and washed with MACS buffer to isolate immune cells. On Day 12, mice were euthanized and their spleens were collected and manually processed into single cell suspensions. To assess the frequency of B cells in the blood and spleen, these single cell suspensions were stained for dead cells (LiveDead Fixable Aqua, Thermo) and stained with anti-mouse antibodies (TCR-B chain, PacBlue, H57-597; CD11b, FITC, ICRF44; B220, PE, RA3-6B2; CD45, PerCP, 30-F11; TruStain FcX, 93; all antibodies from Biolegend) at 1:200. Flow cytometry was performed using an Attune N×T Flow Cytometer (Thermo).

[1614] FIG. 63A quantifies the B cell depletion observed in this study, as defined by percentage of B220+ B cells of live, CD45+ immune cells. The B cell depletion in the aCD19-CAR circRNA LNP group was compared to its respective FLuc circRNA LNP control on Days 8 and 12 (for blood) and Day 12 (for spleen). In the blood, aCD19-CAR 10a-27 (4.5D) and 10a-26 (4.5D) LNPs resulted in approximately 28% and 17% reductions, respectively, in % B220+ of live CD45+ at Day 8 compared to FLuc control. In the spleen, aCD19-CAR 10a-27 (4.5D) and 10a-26 (4.5D) LNPs resulted in approximately 5% and 9% reductions in % B220+ of live CD45+ at Day 12 compared to FLuc control as shown in FIG. 63B. In all, these results suggest that CAR-mediated B cell depletion is occurring in mice treated with aCD19-CAR circRNA LNPs for Lipid 10a-27 (4.5D) and Lipid 10a-26 (4.5D).

[1615] In addition, FIG. 63C shows the percent weight gain of mice in this study. There was not significant weight loss on average from the 10a-27 4.5D or 10a-26 4.5D LNP treated mice (5×0.5 mg/kg over 9 days), suggesting that these LNPs may be well-tolerated in mice at this dose and schedule.

TABLE 26
Characterization of LNPs

| | | | RNA |
|---|---|---|---|
| | Z- | | Encapsulation |
| Formulation | Average (nm) | PDI | Efficiency (%) |
| 10a-27 (4.5D), oLuc | 65 | 0.03 | 93 |
| 10a-27 (4.5D), oaCD19-CAR | 74 | 0.02 | 96 |
| 10a-26 (4.5D), oLuc | 71 | 0.04 | 91 |
| 10a-26, (4.5D), oaCD19-CAR | 71 | 0.04 | 93 |

### Example 67

### Lnp and Circular RNA Construct Containing Anti-CD19 CAR Reduces B Cells in the Blood and Spleen In Vivo.

[1616] Circular RNA constructs encoding an anti-CD19 CAR expression were encapsulated within lipid nanoparticles as described above. For comparison, circular RNAs encoding luciferase expression were encapsulated within separate lipid nanoparticle.

[1617] C57BL/6 mice at 6 to 8 weeks old were injected with either LNP solution every other day for a total of 4 LNP injections within each mouse. 24 hours after the last LNP injection, the mice's spleen and blood were harvested, stained, and analyzed via flow cytometry. As shown in FIG. 64A and FIG. 64B, mice containing LNP-circular RNA constructs encoding an anti-CD19 CAR led to a statistically significant reduction in CD19+ B cells in the peripheral blood and spleen compared to mice treated with LNP-circular RNA encoding a luciferase.

### Example 68

Ires Sequences Contained within Circular RNA Encoding CARs Improves CAR Expressions and Cytotoxicity of T-Cells.

[1618] Activated murine T-cells were electroporated with 200ng of circular RNA constructs containing a unique IRES and a murine anti-CD19 1D3 ζ (CAR expression sequence. The IRES contained in these constructs were derived either in whole or in part from a Caprine Kobuvirus, Apodemus Picornavirus, Parabovirus, or Salivirus. A Caprine Kobuvirus derived IRES was additionally codon optimized. As a control, a circular RNA containing a wild-type zeta mouse CAR with no IRES was used for comparison. The T-cells were stained for the CD-19 CAR 24 hours post electroporation to evaluate for surface expression and then co-cultured with A20 Fluc target cells. The assay was then evaluated for cytotoxic killing of the Fluc+ A20 cells 24 hours after co-culture of the T-cells with the target cells.

[1619] As seen in FIGS. 65A, 65B, 65C, and 66, the unique IRES were able to increase the frequency that the T-cells expressed the CAR protein and level of CAR expression on the surface of the cells. The increase frequency of expression of the CAR protein and level of CAR expression on the surface of cells lead to an improved anti-tumor response.

### Example 69

Cytosolic and Surface Proteins Expressed from Circular RNA Construct in Primary Human T-Cells.

[1620] Circular RNA construct contained either a sequence encoding for a fluorescent cytosolic reporter or a surface antigen reporter. Fluorescent reporters included green fluorescent protein, mCitrine, mWasabi, Tsapphire. Surface reporters included CD52 and Thy1.1^{bio}. Primary human T-cells were activated with an anti-CD3/anti-CD28 antibody and electroporated 6 days post activation of the circular RNA containing a reporter sequence. T-cells were harvested and analyzed via flow cytometry 24 hours post electroporation. Surface antigens were stained with commercially available antibodies (e.g., Biolegend, Miltenyi, and BD).

[1621] As seen in FIG. 67A and FIG. 67B, cytosolic and surface proteins can be expressed from circular RNA encoding the proteins in primary human T-cells.

### Example 70

Circular RNAs Containing Unique IRES Sequences have Improved Translation Expression Over Linear mRNA.

[1622] Circular RNA constructs contained a unique IRES along with an expression sequence for Firefly luciferase (FLuc).

[1623] Human T-cells from 2 donors were enriched and stimulated with anti-CD3/anti-CD28 antibodies. After several days of proliferation, activated T cells were harvested and electroporated with equal molar of either mRNA or circular RNA expressing FLuc payloads. Various IRES sequences, including those derived from Caprine Kobuvirus, Apodemus Picornavirus, and Parabovirus, were studied to evaluate expression level and durability of the payload expression across 7 days. Across the 7 days, the T-cells were lysed with Promega Brightglo to evaluate for bioluminsences.

[1624] As shown in FIGS. 68C, 68D, 68E, 68F, and 68G, the presence of an IRES within a circular RNA can increase translation and expression of a cytosolic protein by orders of magnitude and can improve expression compared to linear mRNA. This was found consistent across multiple human T-cell donors.

### Example 71

### Example 71a: LNP-Circular RNA Encoding Anti-CD19 Mediates Human T-Cell Killing of K562 Cells

[1625] Circular RNA constructs contained a sequence encoding for anti-CD19 antibodies. Circular RNA constructs were then encapsulated within a lipid nanoparticle (LNP).

[1626] Human T-cells were stimulated with anti-CD3/anti-CD28 and left to proliferate up to 6 says. At day 6, LNP-circular RNA and ApoE3 (1 μg/mL) were co-cultured with the T-cells to mediate transfection. 24 hours later, Fluc+ K562 cells were electroporated with 200ng of circular RNA encoding anti-CD19 antibodies and were later co-cultured at day 7. 48 hours post co-culture, the assay was assessed for CAR expression and cytotoxic killing of K562 cells through Fluc expression.

[1627] As shown in FIG. 69A and FIG. 69B, there is T-cell expression of anti-CD19 CAR from the LNP-mediated delivery of a CAR in vitro to T-cells and its capability to lyse tumor cells in a specific, antigen dependent manner in engineered K562 cells.

### Example 71B: LNP-Circular RNA Encoding Anti-BCMA Antibody Mediates Human T-Cell Killing of K562 Cells

[1628] Circular RNA constructs contained a sequence encoding for anti-BCMA antibodies. Circular RNA constructs were then encapsulated within a lipid nanoparticle (LNP).

[1629] Human T-cells were stimulated with anti-CD3/anti-CD28 and left to proliferate up to 6 says. At day 6, LNP-circular RNA and ApoE3 (1 μg/mL) were co-cultured with the T-cells to mediate transfection. 24 hours later, Fluc+ K562 cells were electroporated with 200ng of circular RNA encoding anti-BCMA antibodies and were later co-cultured at day 7. 48 hours post co-culture, the assay was assessed for CAR expression and cytotoxic killing of K562 cells through Fluc expression.

[1630] As shown in FIG. 69B, there is T-cell expression of BCMA CAR from the LNP-mediated delivery of a CAR in vitro to T-cells and its capability to lyse tumor cells in a specific, antigen dependent manner in engineered K562 cells.

### Example 72

### Anti-CD19 CAR T-Cells Exhibit Anti-Tumor Activity In Vitro.

[1631] Human T-cells were activated with anti-CD3/anti-CD28 and electroporated once with 200ng of anti-CD19 CAR-expressing circular RNA. Electroporated T-cells were co-cultured with FLuc+ Nalm6 target cells and non-target Fluc+K562 cells to evaluate CAR-mediated killing. After 24 hours post co-culture, the T-cells were lysed and examined for remanent FLuc expression by target and non-target cells to evaluate expression and stability of expression across 8 days total.

[1632] As shown in FIGS. 70A and 70B, T-cells express circular RNA CAR constructs in specific, antigen-dependent manner. Results also shows improved cytotoxicity of circular RNAs encoding CARs compared to linear mRNA encoding CARs and delivery of a functional surface receptor.

### Example 73

Effective LNP Transfection of Circular RNA Mediated with ApoE3

[1633] Human T-cells were stimulated with anti-CD3/anti-CD28 and left to proliferate up to 6 days. At day 6, lipid nanoparticle (LNP) was and circular RNA expressing green fluorescence protein solution with or without ApoE3 (1 μg/mL) were co-cultured with the T-cells. 24 hours later, the T-cells were stained for live/dead T-cells and the live T-cells were analyzed for GFP expression on a flow cytometer.

[1634] As shown by FIGS. 71A, 71B, 71C, 72D, and 71E, efficient LNP transfection can be mediated by ApoE3 on activated T-cells, followed by significant payload expression. These results were exhibited across multiple donors.

### Example 74

### Example 74A: Lipid Nanoparticle Formulation Procedure

[1635] A Zetasizer Nano ZS (Malvern Instruments Ltd, Malvern, Worcestershire, UK) can be used to determine the particle size, the polydispersity index (PDI) and the zeta potential of the transfer vehicle compositions in 1×PBS in determining particle size and 15 mM PBS in determining zeta potential.

[1636] Ultraviolet-visible spectroscopy can be used to determine the concentration of a therapeutic and/or prophylactic (e.g., RNA) in transfer vehicle compositions. 100 μL of the diluted formulation in 1×PBS is added to 900 μL of a 4:1 (v/v) mixture of methanol and chloroform. After mixing, the absorbance spectrum of the solution is recorded, for example, between 230 nm and 330 nm on a DU 800 spectrophotometer (Beckman Coulter, Beckman Coulter, Inc., Brea, CA). The concentration of therapeutic and/or prophylactic in the transfer vehicle composition can be calculated based on the extinction coefficient of the therapeutic and/or prophylactic used in the composition and on the difference between the absorbance at a wavelength of, for example, 260 nm and the baseline value at a wavelength of, for example, 330 nm.

[1637] For transfer vehicle compositions including RNA, a QUANT-IT- RIBOGREEN® RNA assay (Invitrogen Corporation Carlsbad, CA) can be used to evaluate the encapsulation of RNA by the transfer vehicle composition. The samples are diluted to a concentration of approximately 5 μg/mL or 1 μg/mL in a TE buffer solution (10 mM Tris-HCl, 1 mM EDTA, pH 7.5). 50 μL of the diluted samples are transferred to a polystyrene 96 well plate and either 50 μL of TE buffer or 50 μL of a 2-4% Triton X-100 solution is added to the wells. The plate is incubated at a temperature of 37° C. for 15 minutes. The RIBOGREEN® reagent is diluted 1:100 or 1:200 in TE buffer, and 100 μL of this solution is added to each well. The fluorescence intensity can be measured using a fluorescence plate reader (Wallac Victor 1420 Multilablel Counter; Perkin Elmer, Waltham, MA) at an excitation wavelength of, for example, about 480 nm and an emission wavelength of, for example, about 520 nm. The fluorescence values of the reagent blank are subtracted from that of each of the samples and the percentage of free RNA is determined by dividing the fluorescence intensity of the intact sample (without addition of Triton X-100) by the fluorescence value of the disrupted sample (caused by the addition of Triton X-100).

### Example 74B: RNA Encapsulation, Total Flux, and Percent Expression In Vitro for Ionizable Lipid:DOPE:Cholesterol:DSPE-PEG(2000) Formulation Ratio of 62:4:33:1

[1638] Lipid nanoparticles were formulated using Lipid 10a-27, 10a-26, 10a-46, or 10a-45 in a ionizable lipid:DOPE:cholesterol:DSPE-PEG(2000) formulation ratio of 62:4:33:1 mol %, and encapsulate the RNA molecule at a lipid-nitrogen-to-phosphate ratio (N:P) of 4.5. Expression of the RNA was present in all formulations. There was a greater total flux and percent expression within the spleen as shown in FIGS. 72A and 72B respectively.

| | | | | Ionizable | | | |
|---|---|---|---|---|---|---|---|
| | | | | lipid:Helper | | | RNA |
| | | | | lipid:Cholesterol:PEG- | Z- | | Encapsulation |
| | Ionizable | Helper | PEG- | lipid | Average | | Efficiency |
| Formulation | lipid | lipid | lipid | (mol %) | (nm) | PDI | (%) |
| 10a-27 | Lipid | DOPE | DSPE- | 62:4:33:1 | 71 | 0.02 | 94 |
| (4.5D) | 10a-27 | | PEG(2000) | | | | |
| 10a-26 | Lipid | DOPE | DSPE- | 62:4:33:1 | 71 | 0.04 | 92 |
| (4.5D) | 10a-26 | | PEG(2000) | | | | |
| 10a-46 | Lipid | DOPE | DSPE- | 62:4:33:1 | 110 | 0.1 | 93 |
| (4.5D) | 10a-26 | | PEG(2000) | | | | |
| 10a-45 | Lipid | DOPE | DSPE- | 62:4:33:1 | 157 | 0.13 | 83 |
| (4.5D) | 10a-25 | | PEG(2000) | | | | |

### Example 74C. RNA Encapsulation, Total Flux, and Percent Expression In Vitro for Ionizable Lipid.DOPE:Cholesterol:DMG-PEG(2000) Formulation Ratio of S50:10:38.5:1.5

[1639] Lipid nanoparticles were formulated using Lipid 10a-46 or 10a-45 in a ionizable lipid:DOPE:cholesterol:DMG-PEG(2000) formulation ratio of 50:10:38.5:1.5 mol %, and encapsulate the RNA molecule at a lipid-nitrogen-to-phosphate ratio (N:P) of 5.7. Expression of the RNA was present in all formulations. There was a greater total flux and percent expression within the spleen as shown in FIGS. 72C and 72D respectively.

| | | | | | | | RNA |
|---|---|---|---|---|---|---|---|
| | | | | Ionizable | Z- | | Encapsulation |
| | Ionizable | Helper | PEG- | lipid:DOPE:Cholesterol:PEG- | Average | | Efficiency |
| Formulation | lipid | lipid | lipid | lipid (mol %) | (nm) | PDI | (%) |
| 10a-45 | Lipid | DOPE | DMG- | 50:10:38.5:1.5 | 74 | 0.04 | 95 |
| (5.7A) | 10a-45 | | PEG(2000) | | | | |
| 10a-46 | Lipid | DOPE | DMG- | 50:10:38.5:1.5 | 84 | 0.04 | 96 |
| (5.7A) | 10a-46 | | PEG(2000) | | | | |

### Example 74D: RNTA Encapsulation, Total Flux, and Percent Expression In Vitro for Ionizable Lipid:DOPE:Cholesterol:DMG-PEG(2000) Formulation Ratio of 50:10:38.5:1.5 or for ionizable lipid:DSPC:cholesterol:C₁₄-PEG(2000) Formulation Ratio 35.16:46.2.5

[1640] Lipid nanoparticles were formulated using Lipid 10a-45 or 10a-46 in an ionizable lipid: DOPE: cholesterol: DMG-PEG(2000) formulation ratio of 50:10:38.5:1.5 mol % or in an ionizable lipid: DSPC: cholesterol: C₁₄-PEG(2000) formulation ratio of 35:16:46.2.5 mol %, and encapsulate the RNA molecule at a lipid-nitrogen-to-phosphate ratio (N:P) of 5.7 or 4.5. Expression of the RNA was present in all formulations. There was a greater total flux and percent expression within the spleen as shown in FIGS. 72E and 72F respectively.

| | | | | Ionizable | | | |
|---|---|---|---|---|---|---|---|
| | | | | lipid:Helper | | | RNA |
| | | | | lipid:Cholesterol:PEG- | Z- | | Encapsulation |
| | Ionizable | Helper | PEG- | lipid | Average | | Efficiency |
| Formulation | lipid | lipid | lipid | (mol %) | (nm) | PDI | (%) |
| 10a-45 DSPC | Lipid | DSPC | C₁₄- | 35:16:46.2.5 | 56 | 0.22 | 94 |
| (5.7E) | 10a-45 | | PEG(2000) | | | | |
| 10a-46 DSPC | Lipid | DSPC | C₁₄- | 35:16:46.2.5 | 68 | 0.02 | 95 |
| (5.7E) | 10a-46 | | PEG(2000) | | | | |
| 10a-46 | Lipid | DOPE | DMG- | 50:10:38.5:1.5 | 91 | 0.13 | 93 |
| (4.5A) | 10a-46 | | PEG(2000) | | | | |
| 10a-46 | Lipid | DOPE | DMG- | 50:10:38.5:1.5 | 76 | 0.06 | 93 |
| (5.7A) | 10a-46 | | PEG(2000) | | | | |

### Example 74E: RNA Encapsulation, Total Flux, and Percent Expression In Vitro for Ionizable Lipid:DOPE:Cholesterol:DSPE-PEG(2000) Formulation Ratio of 62:4:33:1 or for Ionizable Lipid:DSPC:Cholesterol:DMGPEG(2000)Formulation Ratio of 50:10:38.5:1.5

[1641] Lipid nanoparticles were formulated using Lipid 10a-26 or 10a-27 in a ionizable lipid:DOPE:cholesterol:DSPE-PEG(2000) formulation ratio of 62:4:33:1 mol % (encapsulating the RNA molecule at a N:P ratio of 4.5) or ionizable lipid:DSPC:cholesterol:DMG-PEG(2000) formulation ratio of 50:10:38.5:1.5 mol % (encapsulating the RNA molecule at a N:P ratio of 5.7). Expression of the RNA was present in all formulations. There was a greater total flux and percent expression within the spleen as shown in FIGS. 72G and 72H respectively.

| | | | | Ionizable | | | |
|---|---|---|---|---|---|---|---|
| | | | | lipid:Helper | | | Encapsulation |
| | | | | lipid:Cholesterol:PEG- | Z- | | Efficiency |
| | Ionizable | Helper | PEG- | lipid | Average | | (EE) |
| Formulation | lipid | lipid | lipid | (mol %) | (nm) | PDI | (%) |
| 10a-27 | Lipid | DOPE | DSPE- | 62:4:33:1 | 82 | 0.06 | 94 |
| (4.5D) | 10a-27 | | PEG(2000) | | | | |
| 10a-26 | Lipid | DOPE | DSPE- | 62:4:33:1 | 68 | 0.08 | 91 |
| (4.5D) | 10a-26 | | PEG(2000) | | | | |
| 10a-27 DSPC | Lipid | DSPC | DMG- | 50:10:38.5:1.5 | 79 | 0.06 | 96 |
| (5.7A) | 10a-27 | | PEG(2000) | | | | |
| 10a-26 DSPC | Lipid | DSPC | DMG- | 50:10:38.5:1.5 | 79 | 0.05 | 93 |
| (5.7A) | 10a-26 | | PEG(2000) | | | | |

### Example 74F: RNA Encapsulation, Total Flux, and Percent Expression In Vitro for Ionizable Lipid:DOPE:Cholesterol:DMG-PEG(2000) Formulation Ratio of 50:10:38.5.1.5

[1642] Lipid nanoparticles were formulated using Lipid 10a-26, 10a-27, or 10a-130 and/or Lipid 3-III-1 (represented by

[chemical structure]

in a ionizable lipid: DSPC:cholesterol:DMG-PEG(2000) formulation ratio of 50:10:38.5:1.5 mol %, and encapsulate the RNA molecule at a N:P ratio of 5.7. Expression of the RNA was present in all formulations. There was a greater total flux and percent expression within the liver as shown in FIGS. 72I and 72J respectively.

[1643] TNS and the particle's pKₐ was also calculated. 5 μL of 60 μg/mL 2-(p-toluidino) naphthalene-6-sulfonic acid (TNS) and 5 μL of 30 μg of RNA/mL lipid nanoparticles were added in to wells with HTEPES buffer ranging from pH 2-12. The mixture was then shaken at room temperature for 5 minutes, and read for fluorescence (excitation 322 nm, emission 431 nm) using a plate reader. The inflection point of the fluorescence signal was calculated to determine the particle's pKa.

| | | | | Ionizable | | | | | |
|---|---|---|---|---|---|---|---|---|---|
| | | | | lipid:Helper | | | | | |
| | | | | lipid:Cholesterol:PEG- | | | | | |
| | Ionizable | Helper | PEG- | lipid | Z- | | EE | Conc. | |
| Formulation | lipid | lipid | lipid | (mol %) | Average | PDI | (%) | (ug/mL) | pKa |
| 10a-27/III-1 | Lipid 10a- | DOPE | DMG- | 50:10:38.5:1.5 | 74 | 0 | 96 | 55.8 | 7.4 |
| (5.7A) | 27/Lipid | | PEG(2000) | | | | | | |
| | 3-III-1 | | | | | | | | |
| | 3:1 ratio | | | | | | | | |
| 10a-27III-1 | Lipid 10a- | DOPE | DMG- | 50:10:38.5:1.5 | 85 | 0.1 | 93 | 51.9 | 6.3 |
| (5.7A) | 27/Lipid | | PEG(2000) | | | | | | |
| | 3-III- | | | | | | | | |
| | 11:3 ratio | | | | | | | | |
| 10a-26/III-1 | Lipid 10a- | DOPE | DMG- | 50:10:38.5:1.5 | 87 | 0.1 | 94 | 51.7 | 6.8 |
| (5.7A) | 26/Lipid | | PEG(2000) | | | | | | |
| | 3-III- | | | | | | | | |
| | 13:1 ratio | | | | | | | | |
| 10a-26/III-1 | Lipid 10a- | DOPE | DMG- | 50:10:38.5:1.5 | 97 | 0.1 | 90 | 53.1 | 6.2 |
| (5.7A) | 26/Lipid | | PEG(2000) | | | | | | |
| | 3-III- | | | | | | | | |
| | 11:3 ratio | | | | | | | | |
| 10a-130 | Lipid | DOPE | DMG- | 50:10:38.5:1.5 | 60 | 0.1 | 89 | 53.8 | 6.7 |
| (5.7A) | 10a-130 | | PEG(2000) | | | | | | |

### Example 74G: RNTA encapsulation, total flux, and percent expression in vitro for ionizable lipid:DOPE:cholesterol:DSPE-PEG(2000) formulation ratio of 62:4:33:1 or for ionizable lipid:DSPC:cholesterol:DMG-PEG(2000) formulation ratio of 50:10:38.5:1.5

[1644] Lipids nanoparticles were formulated using Lipid 10a-139 in a ionizable lipid:DOPE:cholesterol:DSPE-PEG(2000) formulation ratio of 62:4:33:1 mol % (encapsulating the RNA molecule at a N:P ratio of 4.5) or ionizable lipid:DOPE:cholesterol:DMG-PEG(2000) formulation ratio of 50:10:38.5:1.5 mol % (encapsulating the RNA molecule at a N:P ratio of 5.7). Expression of the RNA was present in all formulations. There was a greater total flux and percent expression within the liver as shown in FIGS. 72K and 72L respectively.

| | | | | Ionizable | | | |
|---|---|---|---|---|---|---|---|
| | | | | lipid:Helper | | | |
| | | | | lipid:Cholesterol:PEG- | Z- | | |
| | Ionizable | Helper | PEG- | lipid | Average | | EE |
| Formulation | lipid | lipid | lipid | (mol %) | (nm) | PDI | (%) |
| 10a-139 | Lipid | DOPE | DSPE- | 62:4:33:1 | 93 | 0.01 | 79 |
| (4.5D) | 10a-139 | | PEG(2000) | | | | |
| 10a-139 | Lipid | DSPC | DMG- | 50:10:38.5:1.5 | 122 | 0.02 | 95 |
| (5.7A) | 10a-139 | | PEG(2000) | | | | |

### Example 75

[1645] This example illustrates expression of SARS-CoV2 spike protein expression in vitro. Circular RNA encoding SARS-CoV2 stabilized spike protein was transfected into 293 cells using MessengerMax Transfection Reagent. 24 hours after transfection, the 293 cells were stained with a CR3022 anti-spike primary antibody and APC-labeled secondary antibody.

[1646] FIG. 73A shows circularization efficiency of roughly 4.5kb SARS-Cov2 stabilized spike protein-encoding RNA resulting from an in vitro transcription reaction. FIG. 73B and FIG. 73C show SARS-CoV2 stabilized spike protein expression on 293 cells after the circular RNA transfection with MessengerMax Transfection Reagent relative to mock transfected cells.

[1647] FIG. 77A and FIG. 77B show SARS-CoV2 stabilized spike protein expression by percentage of cells and gMFI on 293 cells after transfection of a panel of circular RNAs, containing variable IRES sequences, codon optimized coding regions, and stabilized SARS-CoV2 spike proteins, using MessengerMax Transfection Reagent. FIG. 77C shows the relationship between MFI and percentage.

### Example 76

[1648] This example shows in vivo cytokine response after IV injection of 0.2 mg/kg circRNA preparations encapsulated in a lipid nanoparticle formulation. circRNA splicing reactions synthesized with GTP as a precursor RNA initiator and splicing nucleotide incited greater cytokine responses than purified circRNA and linear m1 ψ-mRNA due to the presence of triphosphorylated 5′ termini in the splicing reaction. Levels of IL-1β, IL-6, IL-10, IL-12p70, RANTES, TNFα were measured from blood drawn 6 hours following intravenous injection of the LNP-formulated circRNA preparation. Mice injected with PBS were used as a control.

[1649] As seen in FIG. 74, circRNA splicing reactions synthesized with GTP as a precursor RNA initiator and splicing nucleotide incite greater cytokine responses than purified circRNA and linear m1ψ-mRNA due to the presence of triphosphorylated 5′ termini in the splicing reaction.

### Example 77

[1650] This example illustrates intramuscular delivery of varying doses of lipid nanoparticle containing circular RNAs. Mice were dosed with either 0.1 μg, 1 μg, or 10 μg of circRNA formulated in lipid nanoparticles. Whole body IVIS imagine was conducted at 6 hours following an injection of luciferin (FIG. 75A and FIG. 75B). Ex vivo IVIS imaging was conducted at 24-hour. Flux values for liver, quad, and calf are shown in FIG. 75C. FIG. 76B and FIG. 76C show that the expression of the circular RNA is present in the muscle tissue of the mice.

### Example 78

[1651] This example illustrates expression of multiple circular RNAs in LNP formulations. Circular RNA constructs encoding either hEPO or fLuc were dosed in a single and mixed set of LNPs. hEPO concentration in the serum (FIG. 76A) and total flux by IVIS imaging (FIG. 76B) was determined. The results show that the circular RNA hEPO or fLuc constructs individually formulated or co-formulated expressed protein efficiently.

### Example 79

### Example 79a: Hepatocyte Plating and Culture

[1652] Primary human hepatocytes (PHH), primary mouse hepatocytes (PMH), primary cynomolgus monkey hepatocytes (PCH) were thawed and resuspended in hepatocyte thawing medium (Xenotech, cat #K8600/K8650) followed by centrifugation. The supernatant was discarded, and the pelleted cells were resuspended in hepatocyte plating medium (Xenotech, cat #K8200). Cells were counted via hemocytometer and plated on Bio-coat collagen-I coated 96-well plates at a density of 25,000 cells/well for PHH, 25,000 cells/well for PMH, and 50,000 cells/well for PCH in 100 μL of plating media. Plated cells were allowed to settle and adhere for 6 hours in a tissue culture incubator at 370° C. and 5% CO₂ atmosphere. After incubation cells were checked for monolayer formation after which the plating media was aspirated and replaced with 100ul of culture media (Xenotech, cat #K8300). Media was replaced every 24 hours for the duration of the experiment.

### Example 79B: In Vitro Screening of LNP Formulated Circular RNA Encoding Firefly Luciferase in Primary Human, Mouse, and Cynomolgus Monkey Hepatocytes

[1653] A circular RNA construct comprising a TIE and a coding element encoding for firefly luciferase was produced and transfected into LNPs. Various concentrations of LNPs formulated with the circularized RNA (oRNA) were diluted in hepatocyte media supplemented with 3% fetal bovine serum (FBS) (ThermoFisher, cat #A3160401). Media was aspirated from the cells prior to addition of 100 μL of LNP/FBS/media mixture to the cells.

[1654] Luciferase activity was detected in primary human (FIG. 90A), mouse (FIG. 90B), and cynomolgus monkey (FIG. 90C) hepatocyte. 24 hours post-transfection plates were removed from the incubator and allowed to equilibrate to room temperature for 15 mins. A volume of 100 μL of Firefly Luciferase one-step glow assay working solution (Pierce, cat #16196) was added to each well. The plate was placed on a microplate shaker (ThermoFisher, cat #S72050) and mixed at 300 rpm for 3 min. Post-mixing, the plate was allowed to incubate at room temperature for 10 min. Luminescence was read using a Varioskan or Bio-Tek Cytation5 instrument.

[1655] As seen in FIG. 90A, FIG. 90B, and FIG. 90C, TIE containing circular RNAs are capable of driving firefly luciferase protein expression in primary hepatocytes from multiple species in a dose-dependent manner when transfected in vitro with an LNP.

### Example 79C: In Vitro Screening of LNP Formulated Circular RNA Encoding Firefly Luciferase in Multiple Primary Human Hepatocyte Donors

[1656] A circular RNA construct comprising a TIE and a coding element encoding for firefly luciferase was produced and transfected into LNPs. Various concentrations of LNPs formulated with the circularized RNA (oRNA) were diluted in hepatocyte media supplemented with 3% fetal bovine serum (FBS) (ThermoFisher, cat #A3160401). Media was aspirated from the cells prior to addition of 100ul of LNP/FBS/media mixture to the cells.

[1657] Luciferase activity was detected in primary human (FIG. 91A), mouse (FIG. 91B), and cynomolgus monkey (FIG. 91C) hepatocyte. 24 hours post-transfection plates were removed from the incubator and allowed to equilibrate to room temperature for 15 mins. A volume of 100 μL of Firefly Luciferase one-step glow assay working solution (Pierce, cat #16196) was added to each well. The plate was placed on a microplate shaker (ThermoFisher, cat #S72050) and mixed at 300 rpm for 3 min. Post-mixing, the plate was allowed to incubate at room temperature for 10 min. Luminescence was read using a Varioskan or Bio-Tek Cytation5 instrument.

[1658] As seen in FIG. 91A, FIG. 91B, and FIG. 91C, TIE containing circular RNAs are capable of driving firefly luciferase protein expression in primary hepatocytes from multiple human donors in a dose-dependent manner when transfected in vitro with an LNP.

### Example 80

In Vitro Expression of LNP Formulated with Circular RNA Encoding for GFP in Multiple Human Cell Models.

[1659] A circular RNA construct was produced comprising a TIE and coding element encoding for a GFP protein. LNP were formulated with the circular RNA construct. Then various concentrations of the LNP containing the circular RNA construct were diluted in hepatocyte media supplemented with 3% fetal bovine (FBS) (ThermoFisher, cat #A3160401). Media was aspirated from the cells prior to addition of 100ul of LNP/FBS/media mixture to the cells.

[1660] HeLa (human cervical adenocarcinoma; ATCC, cat #CCL-2), HEK293 (human embryonic kidney; ATCC, cat #CRL-1573), and HUH7 (human liver hepatocellular carcinoma; JCRB, cat #JCRB0403) were transfected as previously described with LNP formulated oRNAs. Twenty-four hours post-transfection, the media was removed and the cells were trypsinized. The trypsinized cells were neutralized with PBS supplemented with 10% FBS, harvested, and transferred to a tube. The tube was centrifuged to pellet the cells and the supernatant was aspirated. The pellet was stored at −80° C. prior to lysis. For lysis the cells were thawed on ice and were lysed with 100 μL/well RIPA buffer (Boston Bio Products, Cat. BP-115) plus freshly added 1 mM DTT, and 250 U/mL Benzonase (EMD Millipore, cat #71206-3), and protease inhibitor mixture consisting of complete protease inhibitor cocktail (Sigma, cat #11697498001). Cells were kept on ice for 30 minutes at which time NaCl (1M final concentration) was added. Cell lysates were thoroughly mixed and retained on ice for 30 min. The whole cell extracts (WCE) were centrifuged to pellet debris. A Bradford assay (Bio-Rad, cat #500-0001) was used to assess protein content of the lysates. The Bradford assay procedure was completed according to the manufacturer's protocol. Extracts were stored at −20° C. prior to use. Western blots were performed to assess GFP protein levels. Whole cell extract lysates were mixed with Laemmli buffer and denatured at 95° C. for 10 min. Western blots were run using the NuPage system on 4-12% Bis-Tris gels (ThermoFisher, cat #NP0335BOX) according to the manufacturer's protocol followed by wet transfer onto 0.45 μm nitrocellulose membrane (ThermoFisher, cat #LC2001). After transfer membranes were rinsed thoroughly with water and stained with Ponceau S solution (Boston Bio Products, cat #ST-180) to confirm complete and even transfer. Blots were blocked using 5% Dry Milk in TBS for 30 minutes on a lab rocker at room temperature. Blots were rinsed with 1X TBST (Boston BioProducts, cat #IBB-180) and probed with mouse dylight 680-tagged anti-GFP monoclonal antibody (ThermoFisher, cat #MA515256D680) at 1:1,000 in 1X TBST. Anti-p-actin or GAPDH was used as a loading control (ThermoFisher, cat #AM4302/AM4300) at 1:4,000 in 1X TBST and incubated simultaneously with the GFP primary antibody. Blots were sealed in a bag and kept overnight at 4° C. on a lab rocker. After incubation, blots were rinsed 3 times for 5 minutes each in 1X TBST and probed with mouse secondary antibodies (ThermoFisher, cat #PI35519) at 1:25,000 each in 1X TBST for 30 minutes at room temperature. After incubation, blots were rinsed 3 times for 5 minutes each in 1X TBST. Blots were visualized and analyzed using a Licor Odyssey system.

[1661] As shown in FIG. 92, TIE-containing circular RNA is capable of expressing GFP protein in diverse human cell lines (e.g., HeLa, HEK293, and HUH7 cells) in a dose dependent manner when transfected in vitro with an LNP.

### Example 81

In Vitro Expression of LNP Formulated with Circular RNA Encoding for GFP in Primary Human Hepatocytes.

[1662] A circular RNA construct was produced comprising a TIE and coding element encoding for a GFP protein. Various concentrations of LNP containing circularized RNA (oRNA) were diluted in hepatocyte media supplemented with 3% fetal bovine serum (FBS) (ThermoFisher, cat #A3160401). Media was aspirated from the cells prior to addition of 100 μL of LNP/FBS/media mixture to the cells.

[1663] Primary human hepatocytes (PHH) were thawed and resuspended in hepatocyte thawing medium (Xenotech, cat #K8600/K8650) followed by centrifugation. The supernatant was discarded, and the pelleted cells were resuspended in hepatocyte plating medium (Xenotech, cat #K8200). Cells were counted via hemocytometer and plated on Bio-coat collagen-I coated 96-well plates at a density of 25,000 cells/well for PHH, 25,000 cells/well for PMH, and 50,000 cells/well for PCH in 100ul of plating media. Plated cells were allowed to settle and adhere for 6 houra in a tissue culture incubator at 370° C. and 5% CO₂ atmosphere. After incubation cells were checked for monolayer formation after which the plating media was aspirated and replaced with 100ul of culture media (Xenotech, cat #K8300). Media was replaced every 24 hours for the duration of the experiment.

[1664] Primary human hepatocytes were transfected as previously described with LNP formulated oRNAs. Twenty-four hours post-transfection, the media was removed and the cells were trypsinized. The trypsinized cells were neutralized with PBS supplemented with 10% FBS, harvested, and transferred to a tube. The tube was centrifuged to pellet the cells and the supernatant was aspirated. The pellet was stored at −80° C. prior to lysis. For lysis the cells were thawed on ice and were lysed with 100 μL/well RIPA buffer (Boston Bio Products, Cat. BP-115) plus freshly added 1 mM DTT, and 250 U/ml Benzonase (EMD Millipore, cat #71206-3), and protease inhibitor mixture consisting of complete protease inhibitor cocktail (Sigma, cat #11697498001). Cells were kept on ice for 30 minutes at which time NaCl (1M final concentration) was added. Cell lysates were thoroughly mixed and retained on ice for 30 min. The whole cell extracts (WCE) were centrifuged to pellet debris. A Bradford assay (Bio-Rad, cat #500-0001) was used to assess protein content of the lysates. The Bradford assay procedure was completed according to the manufacturer's protocol. Extracts were stored at −20° C. prior to use. Western blots were performed to assess GFP protein levels. Whole cell extract lysates were mixed with Laemmli buffer and denatured at 95° C. for 10 min. Western blots were run using the NuPage system on 4-12% Bis-Tris gels (ThermoFisher, cat #NPO335BOX) according to the manufacturer's protocol followed by wet transfer onto 0.45 μm nitrocellulose membrane (ThermoFisher, cat #LC2001). After transfer membranes were rinsed thoroughly with water and stained with Ponceau S solution (Boston Bio Products, cat #ST-180) to confirm complete and even transfer. Blots were blocked using 5% Dry Milk in TBS for 30 minutes on a lab rocker at room temperature. Blots were rinsed with 1X TBST (Boston BioProducts, cat #IBB-180) and probed with mouse dylight 680-tagged anti-GFP monoclonal antibody (ThermoFisher, cat #MA515256D680) at 1:1,000 in 1X TBST. Anti-ρ-actin or GAPDH was used as a loading control (ThermoFisher, cat #AM4302/AM4300) at 1:4,000 in 1X TBST and incubated simultaneously with the GFP primary antibody. Blots were sealed in a bag and kept overnight at 4° C. on a lab rocker. After incubation, blots were rinsed 3 times for 5 minutes each in 1X TBST and probed with mouse secondary antibodies (ThermoFisher, cat #PI35519) at 1:25,000 each in 1X TBST for 30 minutes at room temperature. After incubation, blots were rinsed 3 times for 5 minutes each in 1X TBST. Blots were visualized and analyzed using a Licor Odyssey system.

[1665] As shown in the western blot in FIG. 93, circular RNAs containing a TIE is capable of successfully encoding a GFP protein in primary human hepatocytes when transfected in vivo with an LNP.

### Example 82

### In Vitro Expression of Firefly Luciferase in Circular RNA Encoding Firefly Luciferase in Mouse Myoblast and Primary Human Skeletal Muscle Myoblast Cells Using Lipofectamine.

[1666] A circular RNA construct comprising a TIE and coding element encoding firefly luciferase protein.

[1667] Primary human skeletal muscle (HSkM) cells (Lonza, cat #20TL356514) were thawed in a 37° C. water bath and plated at recommended seeding density (3,000 to 5,000 per cm²) in SkGM-2 BulletKit growth media (Lonza, cat #CC-3245) and allowed to grow overnight. Cells were detached using ReagentPack subculture reagents (Lonza, cat #CC-5034) and plated on tissue culture grade 96-well plates at recommended seeding density and allowed to grow overnight in a tissue culture incubator at 370° C. and 5% CO₂ atmosphere or to 70-80% confluency with growth media changed every 2 days.

[1668] For one 96-well plate reaction, 0.3 μL of Lipofectamine-3000 transfection reagent (Lipo3K) (ThermoFisher, cat #L3000015) was mixed with 5 μL Opti-MEM reduced serum media (ThermoFisher, cat #51985091). In a separate tube, per reaction, firefly luciferase (f.luc) oRNA (at 10-200ng) was combined with 5 μL Opti-MEM and 0.2 μL P3000TM enhancer reagent (ThermoFisher, cat #L3000015). Equal volumes of Lipo3K/Opti-MEM mix was combined with oRNA/Opti-MEM mix and incubated at room temperature for 15 min. The Lipo3K/oRNA mixture was added to each well to be transfected and placed in a tissue culture incubator at 37° C. and 5% CO₂ atmosphere for 24 hours.

[1669] After 24 hours, the transfection plates were removed from the incubator and allowed to equilibrate to room temperature for 15 minutes. A volume of 100 μL of firefly luciferase one-step glow assay working solution (Pierce, cat #16196) was added to each well. The plate was placed on a microplate shaker (ThermoFisher, cat #572050) and mixed at 300 rpm for 3 minutes. Post-mixing, the plate was allowed to incubate at room temperature for 10 minutes. Luminescence was read using a Varioskan or Bio-Tek Cytation5 instrument.

[1670] As shown in FIG. 94A and FIG. 94B, circular RNAs comprising a TIE is capable of driving firefly luciferase protein expression in myoblasts from different species in a dose-dependent manner when transfected in vitro with lipofectamine.

### Example 83

### In Vitro Expression of Firefly Luciferase in Circular RNA Encoding Firefly Luciferase in Differentiated Primary Human Skeletal Muscles Myotubes

[1671] A circular RNA construct comprising a TIE and coding element encoding firefly luciferase protein.

[1672] Primary human skeletal muscle (HSkM) cells (Lonza, cat #20TL356514) were thawed in a 37° C. water bath and plated at recommended seeding density (3,000 to 5,000 per cm²) in SkGM-2 BulletKit growth media (Lonza, cat #CC-3245) and allowed to grow overnight. Cells were detached using ReagentPack subculture reagents (Lonza, cat #CC-5034) and plated on tissue culture grade 96-well plates at recommended seeding density and allowed to grow overnight in a tissue culture incubator at 370° C. and 5% CO₂ atmosphere or to 70-80% confluency with growth media changed every 2 days. Once cells reached 70-80% confluency, growth media was removed, cells were washed twice in 1×PBS (Gibco, cat #10010023) and changed to differentiation media consisting of F-10 (1X) (Gibco, cat #11550-043) supplemented with 2% Horse Serum (Gibco, cat #26050088) and 1% Pen-Strep (Gibco, cat #15140-122). Media was changed daily for 5 to 6 days until nearly all myoblasts had fused to form myotubes.

[1673] For one 96-well plate reaction, 0.3 μL of Lipofectamine-3000 transfection reagent (Lipo3K) (ThermoFisher, cat #L3000015) was mixed with 5 ul Opti-MEM reduced serum media (ThermoFisher, cat #51985091). In a separate tube, per reaction, firefly luciferase (f.luc) oRNA (at 10-200ng) was combined with 5 μL Opti-MEM and 0.2 μL P3000TM enhancer reagent (ThermoFisher, cat #L3000015). Equal volumes of Lipo3K/Opti-MEM mix was combined with oRNA/Opti-MEM mix and incubated at room temperature for 15 min. The Lipo3K/oRNA mixture was added to each well to be transfected and placed in a tissue culture incubator at 37° C. and 5% CO₂ atmosphere for 24 hours.

[1674] After 24 hours, transfection plates were removed from the incubator and allowed to equilibrate to room temperature for 15 minutes. A volume of 100 μL of Firefly Luc one-step glow assay working solution (Pierce, cat #16196) was added to each well. The plate was placed on a microplate shaker (ThermoFisher, cat #S72050) and mixed at 300 rpm for 3 minutes. Post-mixing, the plate was allowed to incubate at room temperature for 10 minutes. Luminescence was read using a Varioskan or Bio-Tek Cytation5 instrument.

[1675] As shown in FIG. 95A and FIG. 95B, a circular RNA comprising a TIE is capable of driving firefly luciferase protein expression in primary muscles cells through differentiated states (e.g., in myoblast and differentiated myotubes) in multiple human donors in a dose-dependent manner when transfected in vitro with lipofectamine.

### Example 83

### Cell-Free In Vitro Translation of Circular RNAs Containing TIEs

[1676] A cell-free rabbit reticulocyte in vitro translation assay (Promega, cat #L4540) was completed to characterize protein products from various RNA templates. Both linear mRNA and circular oRNA templates were used in the assay and reaction components were assembled according to the manufacturer's protocol. Prior to assay, RNA templates were denatured at 65° C. for 3 minutes and immediately cooled on ice. All reaction components were assembled on ice. Flexi Rabbit Reticulocyte kit components, complete amino acid mixture (Promega, cat #L5061), RNAsin TIEuclease inhibitor (Promega, cat #N2111), and transcend tRNA (Promega, cat #L5061) were added to denatured RNA templates. The reaction was vortexed to mix and incubated at 300° C. for 60 minutes and then placed on ice.

[1677] The reaction mixture was added to 1×sample buffer (ThermoFisher, cat #NP0007) and heated at 70° C. for 15 minutes. The denatured protein sample was loaded onto 4-12% Bis-Tris gels (ThermoFisher, cat #NPO335BOX). Gel electrophoresis was completed, and the gel was wet transferred onto 0.45 μm nitrocellulose membrane (ThermoFisher, cat #LC2001). Post-transfer, the membrane was blocked for 1 hour with rocking in freshly made TBS with 0.5% Tween-20 (Boston Bioproducts Inc Cat #IBB-180). The membrane was incubated for 45 min with rocking with streptavidin-AP (Promega, cat #V5591) at a 1:2,500 dilution. The membrane was rinsed with four cycles of: twice with TBST and twice with deionized water for 1 min per rinse. The membrane was incubated with Western Blue substrate (Promega, cat #S3841) for 45 minutes and the membrane was rinsed in water and scanned on a LICOR Odyssey CLx imaging system.

[1678] As shown in FIG. 96A and FIG. 96B, a circular RNA comprising a TIE is capable of driving protein expression in a cell-free lysate, independent of any cell type. FIG. 96A illustrates expression of firefly luciferase from a linear or circular RNA input. FIG. 96B illustrates expression of human and mouse ATP7B proteins with different codon optimization (co) approaches compared to wild-type native sequence (WT). The codon optimized-circular RNAs expressing ARP7B protein and the circular RNA expressing firefly luciferase shoed protein full-length protein expression.

### Example 84

### Tie Selection Methodology

[1679] Putative TIEs were identified for activity assessment from sequences in GenBank. Briefly, Riboviria and Unclassified Virus sequences greater than 1kb in length were identified. 5′ and intergenic UTRs were extracted based on putative CDS start and end sites with a minimum length cutoff of 250nt. Reverse sequences were also collected for negative sense CDS annotations. For genuses not expected to contain TIE sequences, a few noncoding regions per genus were selected at random. Duplicates, >10nt repeat-containing sequences, sequences with both XbaI and BamHI sites, and low-quality sequences (non acgt) were culled, then sequences were clustered through CDHit with an 80% sequence similarity cutoff for clustering; representative sequences from each cluster were selected for further study. For unclassified sequences or sequences expected to contain a TIE, all 5′ and intergenic UTRs were selected; duplicates, >10nt repeat-containing sequences, sequences with both XbaI and BamHI sites, and low-quality sequences (non acgt) were culled, then sequences were clustered through CDHit with a 95% (low risk, known IRESs) sequence similarity cutoff for clustering; representative sequences from each cluster were selected for further study. For both strategies, sequences shorter than 300nt or unable to be synthesized due to sequence complexity were eliminated.

### Example 85

### Example 85a: TIE Activity in Primary Human T Cells

[1680] Nucleic acid sequences containing putative TIEs were inserted into a circular RNA (oRNA) construct prior to the start codon of a gaussia luciferase reporter sequence. oRNA containing the TIE was synthesized and purified. Purified oRNA was formulated into lipid nanoparticles. LNP-oRNA was transfected into T cells in vitro. Supernatant was harvested and replaced 24 and 48 hours after transfection, and gaussia luciferase expression from oRNA was determined using a coelenterazine-containing detection reagent and luminometer. Higher luminescence at 24 hours indicates higher TIE function. Higher luminescence at 48 hours relative to 24 hours indicates higher oRNA stability due to TIE function.

### Example 85B: TIE Activity in Primary Human Hepatocytes

[1681] Nucleic acid sequences containing putative TIEs were inserted into a circular RNA (oRNA) construct prior to the start codon of a gaussia luciferase reporter sequence. oRNA containing the TIE was synthesized and purified. Purified oRNA was formulated into lipid nanoparticles. LNP-oRNA was transfected into hepatocytes in vitro. Supernatant was harvested and replaced 24 and 48 hours after transfection, and gaussia luciferase expression from oRNA was determined using a coelenterazine-containing detection reagent and luminometer. Higher luminescence at 24 hours indicates higher TIE function. Higher luminescence at 48 hours relative to 24 hours indicates higher oRNA stability due to TIE function.

### Example 85C: TIE Activity in Primary Human Myotubes

[1682] Nucleic acid sequences containing putative TIEs were inserted into a circular RNA (oRNA) construct prior to the start codon of a gaussia luciferase reporter sequence. oRNA containing the TIE was synthesized and purified. Purified oRNA was formulated into lipid nanoparticles. LNP-oRNA was transfected into human myotubes in vitro. Supernatant was harvested and replaced 24 and 48 hours after transfection, and gaussia luciferase expression from oRNA was determined using a coelenterazine-containing detection reagent and luminometer. Higher luminescence at 24 hours indicates higher TIE function. Higher luminescence at 48 hours relative to 24 hours indicates higher oRNA stability due to TIE function.

### Example 86

### Tie Tissue Tropism

[1683] Select TIE-containing oRNAs were formulated into LNPs. LNP-oRNAs were transfected into T cells, hepatocytes, and myotubes. Supernatant was harvested and replaced 24 and 48 hours after transfection, and gaussia luciferase expression from oRNA was determined using a coelenterazine-containing detection reagent and luminometer. Higher luminescence at 24 hours indicates higher TIE function. Higher luminescence at 48 hours relative to 24 hours may indicate higher oRNA stability due to TIE function. TIE activity was compared between cell types and differences resulting from TIE tissue preference were noted. Differences may be a result of the TIE engaging proteins that show tissue-specific expression and promoting enhanced translation initiation, degradation, or stability.

### Example 86

### Example 86a: TIE Deletion Scanning

[1684] Select TIE sequences with progressive deletions from either the 5′ end or 3′ end of the TIE were inserted into a circular RNA (oRNA) construct prior to the start codon of a gaussia luciferase reporter sequence. oRNA containing the TIE variant was synthesized and purified. Purified oRNA was formulated into lipid nanoparticles. LNP-oRNA was transfected into human primary T cells. Supernatant was harvested and replaced 24 and 48 hours after transfection, and gaussia luciferase expression from oRNA was determined using a coelenterazine-containing detection reagent and luminometer. Higher luminescence at 24 hours indicates higher TIE function. Higher luminescence at 48 hours relative to 24 hours may indicate higher oRNA stability due to TIE function. Expression or stability impairment due to progressive deletions identifies the core functional unit of the TIE.

### Example 86B: TIE Variant Generation and Identification

[1685] Select TIE-containing oRNA synthesis plasmids were subjected to error-prone PCR to introduce random mutations into the PCR product. PCR product was used as a template for oRNA synthesis. Purified oRNA was formulated into LNPs and transfected into primary human T cells. Polysome fractions were harvested from T cells at 6, 24, 48, and 72 hours post-transfection by HPLC. RNA associated with each polysome fraction was extracted from polysome fractions and sequenced by NGS. TIE mutation enrichment in each polysome fraction at each time point was analyzed to identify mutations that 1) maintain or improve translation activity from the TIE and/or 2) improve stability of the oRNA.

### Example 86C: TIE Single and Multi-Variant Validation

[1686] Nucleic acid sequences containing putative beneficial TIE mutations from example 6 alone or in combination were inserted into a circular RNA (oRNA) construct prior to the start codon of a gaussia luciferase reporter sequence. oRNA containing the TIE variant was synthesized and purified. Purified oRNA was formulated into lipid nanoparticles. LNP-oRNA was transfected into human primary T cells. Supernatant was harvested and replaced 24 and 48 hours after transfection, and gaussia luciferase expression from oRNA was determined using a coelenterazine-containing detection reagent and luminometer. Higher luminescence at 24 hours indicates higher TIE function. Higher luminescence at 48 hours relative to 24 hours indicates higher oRNA stability due to TIE function.

### Example 87

### Example 87a: Selection of Eukaryotic TIEs

[1687] Selection of eukaryotic TIEs. Putative eukaryotic TIEs were identified using several databases. TIEs selected include sequences 40-1578 nucleotides in length and may or may not contain identified modification (m6A) sites.

### Example 87B: TIEs Containing Modified Nucleotides (m6a)

[1688] Nucleic acid sequences containing putative TIEs were inserted into a circular RNA (oRNA) construct preceding the coding region of a gaussia luciferase reporter sequence. oRNAs were synthesized with a titration of modified nucleotide. Purified oRNA was formulated into lipid nanoparticles. LNP-oRNAs were transfected into T cells, hepatocytes, and myotubes. Supernatant was harvested and replaced 24 and 48 hours after transfection, and gaussia luciferase expression from oRNA was determined using a coelenterazine-containing detection reagent and luminometer. Higher luminescence of modified nucleotide containing TIEs at 24 hours indicates necessity for modification for enhanced function. Higher luminescence at 48 hours relative to 24 hours indicates modified nucleotide containing TIEs enhance stability of oRNA.

### Example 88

Expression of TIEs in Cells Undergoing Oxidative and/or Hypoxic Stress

[1689] Nucleic acid sequences containing putative TIEs were inserted into a circular RNA (oRNA) construct preceding the coding region of a gaussia luciferase reporter sequence. Purified oRNA was formulated into lipid nanoparticles. Hepatocytes were treated with hydrogen peroxide to induce oxidative stress or CoCl₂ to induce hypoxic stress. LNP-oRNA was transfected into hepatocytes (under hypoxic stress, oxidative stress, or untreated) in vitro. Supernatant was harvested and replaced 24 and 48 hours after transfection, and gaussia luciferase expression from oRNA was determined using a coelenterazine-containing detection reagent and luminometer. Higher luminescence at 24 hours indicates higher TIE function. Higher luminescence at 48 hours relative to 24 hours may indicate higher oRNA stability due to TIE function.

### Example 89

### Aptamer as a TIE

[1690] Nucleic acid sequences containing aptamers against translation initiation factors (ie eIF4E, eIF4G, eIF4a) were inserted into a circular RNA (oRNA) construct preceding the coding region of a gaussia luciferase reporter sequence. Purified oRNA was formulated into lipid nanoparticles. LNP-oRNAs were transfected into hepatocytes. Supernatant was harvested and replaced 24 and 48 hours after transfection, and gaussia luciferase expression from oRNA was determined using a coelenterazine-containing detection reagent and luminometer. Higher luminescence at 24 hours indicates higher TIE function. Higher luminescence at 48 hours relative to 24 hours may indicate higher oRNA stability due to TIE function.

### Example 90

### Tandem TIEs

[1691] Select combinations of viral, eukaryotic, and/or aptamer TIEs were inserted into a circular RNA (oRNA) construct preceding the coding region of a gaussia luciferase reporter sequence. oRNAs were synthesized with a titration of modified nucleotide. Purified oRNA was formulated into lipid nanoparticles. LNP-oRNAs were transfected into T cells, hepatocytes, and myotubes. Supernatant was harvested and replaced 24 and 48 hours after transfection, and gaussia luciferase expression from oRNA was determined using a coelenterazine-containing detection reagent and luminometer. Higher luminescence of constructs containing multiple TIEs at 24 hours indicates a synergy of TIEs. Higher luminescence at 48 hours relative to 24 hours may indicate having multiple TIEs in one construct enhance stability of oRNA.

### Example 91

### Example 91a: Coding Aptamers to Enhance Cap-Independent Translation

[1692] Certain aptamers that bind to eIF4E, eIF4a, and other translation initiators are known to inhibit translation by forcing the proteins to adopt a non-functional conformation. Nucleic acid sequences containing aptamers against translation initiation factors (ie eIF4E, eIF4a) were inserted into a circular RNA (oRNA) construct preceding a functional TIE and the coding region of a gaussia luciferase reporter sequence. Purified oRNA was formulated into lipid nanoparticles. LNP-oRNAs were transfected into hepatocytes. Supernatant was harvested and replaced 24 and 48 hours after transfection, and gaussia luciferase expression from oRNA was determined using a coelenterazine-containing detection reagent and luminometer. Higher luminescence at 24 hours indicates a preference for cap-independent translation. Higher luminescence at 48 hours relative to 24 hours indicates higher oRNA stability due to inhibition of cap-dependent translation.

### Example 91B: Coding Aptamers to Enhance Cap-Independent Translation

[1693] Cotransfection of oRNA and aptamers. Certain aptamers that bind to eIF4E, eIF4a, and other translation initiators are known to inhibit translation by forcing the proteins to adopt a non-functional conformation. Nucleic acid sequences containing aptamers against translation initiation factors (ie eIF4E, eIF4a) were co-transfected with a circular RNA (oRNA) containing a TIE and the coding region of a gaussia luciferase reporter. Purified aptamer and oRNA were formulated into lipid nanoparticles together. LNP-oRNAs were transfected into hepatocytes. Supernatant was harvested and replaced 24 and 48 hours after transfection, and gaussia luciferase expression from oRNA was determined using a coelenterazine-containing detection reagent and luminometer. Higher luminescence at 24 hours indicates a preference for cap-independent translation. Higher luminescence at 48 hours relative to 24 hours may indicate higher oRNA stability due to inhibition of cap-dependent translation.

### Example 92

[1694] Immunogenicity of circular RNAs was assessed. Induction of RIG-1 and IFNB1 RNA expressions, markers of immune stimulation, was measured using RT-cPCR following transfection of the cells with various RNA preparations. All RNA preparations except for the commercially available 3phpRNA were produced using in vitro transcription (IVT) and circularization of RNA comprising an Anabaena permuted intron, GLuc reading frame, strong homology arms, 5′ and 3′ spacers, and a CVB3 IRES. In both HeLa cells (FIG. 101A) and A594 cells (FIG. 101B), the highest levels of RIG-1 and IFNB1 were induced by the IVT reaction product prepared in the absence of excess GMP and by the positive control 3phpRNA.

### Example 93

### Ires Selection and Screening

[1695] Roughly 3,000 potential internal ribosome entry site (IRES) sequence candidates were computationally identified from viral untranslated regions in partial and complete viral sequence available in the art (e.g., Genbank). Each DNA template was cloned to include a IRES sequence selected from SEQ ID NOs: 1-2983 and 3282-3287 or a fragment thereof. Exemplary constructs included a 5′ enhanced intron element, a 5′ enhanced exon element, a punitive IRES, a coding element encoding Gaussia Luciferase, a 3′ enhanced exon element, and a 3′ enhanced intron element. Engineered circular RNA (oRNA) was generated from the DNA template by in vitro transcription (IVT); and oRNA was subsequently purified from non-circular RNA components of the IVT reaction.

[1696] Purified oRNA was nanoprecipitated with lipids to form LNP-oRNA constructs. LNPs were formulated first by creating empty lipid nanoparticles using a Precision Nanosystems Ignite instrument with a “NextGen” mixing chamber. Ethanol phase contained Lipid 39 from Table 10b, DSPC, cholesterol, and DMG-PEG 2000 (Avanti Polar Lipids, Inc., Alabaster, AL) at a molar ratio of 45:9:44:2 was combined with 50 mM sodium acetate buffer at pH 4.5. A 3:1 aqueous to ethanol mixing ratio was used. The empty LNPs were then dialyzed in IL of 1×PBS and exchanged 2 times over 18 hours. Dialyzed empty LNPs were then mixed with a final circular RNA concentration of 40 μg/mL in 50 mM sodium acetate buffer at pH 4.5. A 3:1 aqueous to empty lipid nanoparticle mixing ratio was used. The LNPs final ionizable lipid to RNA phosphate ratio was at 6.0.

[1697] Primary human skeletal myotubes, primary human hepatocytes, and activated primary human T cells were treated with formulated LNP-oRNA in triplicate. Protein expression in supernatant was assessed by luminescence measurements 48 hours following transfection.

[1698] Total luminescent signal was normalized across replicate plates to control for plate-wide differences between replicates due to flash assay readout timing. Plates with positive controls having <1.5× signal over background were excluded from analysis. Background was subtracted based on empty wells. Each test well replicate was normalized to the average of the plate controls. Table 27 provides the protein expression and stability measurements for the screening. Measured numbers are normalized to a control (caprine kobuvirus IRES, SEQ ID NO: 3282) and represented as a fold change.

TABLE 27
Expression and functional stability screening of IRES

| | [Mod] | [Mod] | [Mod] |
|---|---|---|---|
| | Fold | T | PHH |
| SEQ | Change | Fold | Fold |
| ID NO | Myo | Change | Change |
| 97 | 0.260167 | 0.353177 | 1.163467 |
| 98 | 0.290648 | 0.677026 | 0.78802 |
| 99 | 0.163908 | 0.27666 | 1.020326 |
| 100 | 0.495163 | 0.48261 | 1.22777 |
| 101 | 0.533025 | 0.852995 | 1.370347 |
| 102 | 0.044695 | 0.030995 | 0.514093 |
| 103 | 0.045577 | 0.039508 | 0.647085 |
| 104 | 0.076071 | 0.168841 | 0.774536 |
| 105 | 0.249558 | 0.329006 | 0.642043 |
| 106 | 0.352419 | 0.648041 | 1.09325 |
| 107 | 0.287896 | 0.937122 | 1.119079 |
| 109 | 0.249157 | 0.626121 | 0.853308 |
| 110 | 0.242425 | 0.513277 | 0.717483 |
| 111 | 0.222321 | 0.465065 | 0.786969 |
| 112 | 0.371086 | 0.636962 | 0.807476 |
| 113 | 0.317071 | 0.43731 | 0.827882 |
| 114 | 0.05835 | 0.068124 | 0.789812 |
| 115 | 0.050735 | 0.046932 | 0.425032 |
| 116 | 0.039211 | 0.030739 | 0.529925 |
| 117 | 0.042734 | 0.046123 | 0.425775 |
| 118 | 0.154586 | 0.456184 | 0.666903 |
| 119 | 0.198021 | 0.987593 | 0.62119 |
| 120 | 0.275525 | 0.701885 | 0.489288 |
| 121 | 0.627572 | 1.028933 | 0.997696 |
| 122 | 0.388602 | 0.8876 | 0.832163 |
| 123 | 0.039714 | 0.030111 | 0.638047 |
| 125 | 0.382696 | 0.641754 | 0.649185 |
| 126 | 0.057929 | 0.06647 | 0.645602 |
| 127 | 0.293568 | 0.685807 | 0.674465 |
| 128 | 0.489317 | 0.583675 | 1.021214 |
| 129 | 0.053695 | 0.089454 | 0.668895 |
| 130 | 0.040577 | 0.060757 | 0.572842 |
| 131 | 0.039511 | 0.033359 | 0.53476 |
| 132 | 0.039977 | 0.031182 | 0.564324 |
| 133 | 0.039326 | 0.030041 | 0.541046 |
| 134 | 0.046625 | 0.052943 | 0.46727 |
| 136 | 0.047864 | 0.042316 | 0.428555 |
| 138 | 0.372287 | 0.637832 | 0.615651 |
| 139 | 0.059696 | 0.097316 | 0.520599 |
| 140 | 0.16008 | 0.399455 | 0.715372 |
| 141 | 0.040253 | 0.031062 | 0.546956 |
| 142 | 0.038521 | 0.027425 | 0.46798 |
| 143 | 0.03901 | 0.032654 | 0.420921 |
| 145 | 0.03927 | 0.026297 | 0.635934 |
| 146 | 0.043229 | 0.034645 | 0.587329 |
| 147 | 0.042637 | 0.036624 | 0.559359 |
| 148 | 0.039126 | 0.029094 | 0.736827 |
| 149 | 0.039186 | 0.028926 | 0.711791 |
| 150 | 0.03864 | 0.027048 | 0.514678 |
| 151 | 0.037309 | 0.026948 | 0.493258 |
| 152 | 0.038449 | 0.026258 | 0.615534 |
| 153 | 0.038341 | 0.025876 | 0.695107 |
| 154 | 0.0402 | 0.0304 | 0.722679 |
| 155 | 0.038723 | 0.027351 | 0.586864 |
| 156 | 0.038511 | 0.027142 | 0.627475 |
| 157 | 0.039049 | 0.027127 | 0.731503 |
| 158 | 0.038048 | 0.027701 | 0.672155 |
| 159 | 0.038668 | 0.025816 | 0.61191 |
| 160 | 0.039335 | 0.026247 | 0.5674 |
| 161 | 0.038824 | 0.025876 | 0.492452 |
| 162 | 0.038216 | 0.023393 | 0.575165 |
| 163 | 0.038264 | 0.027191 | 0.52053 |
| 164 | 0.038197 | 0.026151 | 0.524974 |
| 165 | 0.037817 | 0.026532 | 0.561699 |
| 166 | 0.038844 | 0.026828 | 0.575901 |
| 167 | 0.038524 | 0.025708 | 0.69976 |
| 168 | 0.038788 | 0.025543 | 0.731934 |
| 169 | 0.039231 | 0.027338 | 0.432891 |
| 170 | 0.037986 | 0.022969 | 0.541642 |
| 171 | 0.038154 | 0.027212 | 0.582587 |
| 172 | 0.037112 | 0.026558 | 0.639476 |
| 173 | 0.037335 | 0.026078 | 0.504809 |
| 174 | 0.037049 | 0.025905 | 0.577144 |
| 175 | 0.037822 | 0.025498 | 0.530502 |
| 177 | 0.038266 | 0.026051 | 0.561219 |
| 178 | 0.039045 | 0.027092 | 0.500802 |
| 179 | 0.037153 | 0.026609 | 0.50571 |
| 180 | 0.038755 | 0.028951 | 0.487148 |
| 181 | 0.037539 | 0.025831 | 0.659122 |
| 182 | 0.03747 | 0.025334 | 0.496612 |
| 183 | 0.038763 | 0.025478 | 0.768879 |
| 184 | 0.043604 | 0.030907 | 0.689648 |
| 185 | 0.039562 | 0.027297 | 0.687583 |
| 186 | 0.039007 | 0.026413 | 0.665244 |
| 187 | 0.038049 | 0.026641 | 0.587503 |
| 188 | 0.037709 | 0.026875 | 0.671188 |
| 189 | 0.037762 | 0.027089 | 0.52406 |
| 190 | 0.03731 | 0.026211 | 0.418576 |
| 191 | 0.038235 | 0.02599 | 0.484504 |
| 192 | 0.039939 | 0.027233 | 0.483419 |
| 194 | 0.020192 | 0.00648 | 0.519074 |
| 195 | 0.019531 | 0.006334 | 0.376436 |
| 196 | 0.019542 | 0.00641 | 0.498646 |
| 197 | 0.019244 | 0.006324 | 0.402627 |
| 198 | 0.018573 | 0.006291 | 0.419065 |
| 199 | 0.019198 | 0.006785 | 0.34161 |
| 200 | 0.019364 | 0.00696 | 0.385662 |
| 201 | 0.020124 | 0.006802 | 0.336954 |
| 202 | 0.019957 | 0.006958 | 0.433697 |
| 203 | 0.019453 | 0.006298 | 0.462718 |
| 204 | 0.019494 | 0.006471 | 0.441202 |
| 205 | 0.019442 | 0.006373 | 0.629439 |
| 206 | 0.018867 | 0.006885 | 0.374898 |
| 207 | 0.01914 | 0.006134 | 0.460931 |
| 208 | 0.018981 | 0.006092 | 0.433478 |
| 209 | 0.019624 | 0.006283 | 0.410556 |
| 210 | 0.019591 | 0.007049 | 0.588881 |
| 211 | 0.019397 | 0.006595 | 0.542165 |
| 212 | 0.019568 | 0.00626 | 0.532913 |
| 213 | 0.018989 | 0.006333 | 0.547859 |
| 214 | 0.01915 | 0.006268 | 0.425401 |
| 216 | 0.019187 | 0.006268 | 0.524257 |
| 217 | 0.019397 | 0.006238 | 0.390937 |
| 218 | 0.019339 | 0.006206 | 0.494667 |
| 219 | 0.018624 | 0.00708 | 0.490922 |
| 220 | 0.019181 | 0.006335 | 0.474431 |
| 221 | 0.019256 | 0.006244 | 0.457017 |
| 222 | 0.019112 | 0.006315 | 0.449704 |
| 223 | 0.01928 | 0.006732 | 0.413984 |
| 224 | 0.019162 | 0.006106 | 0.445024 |
| 225 | 0.019165 | 0.006185 | 0.408971 |
| 226 | 0.018975 | 0.006285 | 0.510492 |
| 227 | 0.019522 | 0.007133 | 0.437234 |
| 228 | 0.019859 | 0.006494 | 0.570592 |
| 229 | 0.019454 | 0.006315 | 0.473748 |
| 230 | 0.018871 | 0.006278 | 0.51804 |
| 231 | 0.019655 | 0.006844 | 0.511603 |
| 232 | 0.019285 | 0.006225 | 0.565024 |
| 233 | 0.019316 | 0.006211 | 0.442953 |
| 235 | 0.019002 | 0.007102 | 0.395003 |
| 236 | 0.018841 | 0.006315 | 0.509341 |
| 237 | 0.019316 | 0.006327 | 0.318761 |
| 238 | 0.019395 | 0.007836 | 0.596039 |
| 239 | 0.019249 | 0.006356 | 0.413194 |
| 241 | 0.019155 | 0.006661 | 0.275657 |
| 242 | 0.019203 | 0.006108 | 0.443553 |
| 243 | 0.019402 | 0.006124 | 0.451916 |
| 244 | 0.018854 | 0.007129 | 0.467265 |
| 245 | 0.019175 | 0.006401 | 0.543468 |
| 246 | 0.019056 | 0.007055 | 0.4824 |
| 247 | 0.018824 | 0.006353 | 0.484173 |
| 248 | 0.019655 | 0.006175 | 0.368398 |
| 249 | 0.01946 | 0.006185 | 0.396805 |
| 250 | 0.019 | 0.006117 | 0.480145 |
| 252 | 0.01904 | 0.007513 | 0.39182 |
| 253 | 0.018899 | 0.006977 | 0.575079 |
| 254 | 0.019338 | 0.006347 | 0.526008 |
| 255 | 0.019193 | 0.006255 | 0.287479 |
| 256 | 0.019022 | 0.006292 | 0.433444 |
| 257 | 0.01915 | 0.006647 | 0.428502 |
| 258 | 0.019567 | 0.006018 | 0.468423 |
| 259 | 0.019534 | 0.006067 | 0.58953 |
| 260 | 0.019436 | 0.007053 | 0.357243 |
| 261 | 0.019714 | 0.006449 | 0.480901 |
| 262 | 0.018951 | 0.006418 | 0.40858 |
| 263 | 0.019192 | 0.006212 | 0.560046 |
| 264 | 0.019612 | 0.006356 | 0.552301 |
| 265 | 0.019321 | 0.006195 | 0.401567 |
| 266 | 0.019369 | 0.006648 | 0.604516 |
| 267 | 0.019151 | 0.006684 | 0.464703 |
| 268 | 0.018286 | 0.007032 | 0.4753 |
| 269 | 0.01937 | 0.006374 | 0.5176 |
| 270 | 0.019261 | 0.006259 | 0.499406 |
| 271 | 0.019395 | 0.00619 | 0.412264 |
| 272 | 0.018911 | 0.006199 | 0.421016 |
| 274 | 0.019303 | 0.006349 | 0.455375 |
| 276 | 0.019357 | 0.006325 | 0.376791 |
| 278 | 0.019529 | 0.006257 | 0.583499 |
| 279 | 0.019217 | 0.006392 | 0.4111 |
| 281 | 0.019185 | 0.006136 | 0.587463 |
| 282 | 0.019681 | 0.006236 | 0.688522 |
| 283 | 0.020003 | 0.006456 | 0.361814 |
| 284 | 0.021001 | 0.008113 | 0.463016 |
| 285 | 0.019166 | 0.006828 | 0.350735 |
| 286 | 0.019521 | 0.006951 | 0.480012 |
| 287 | 0.019513 | 0.006754 | 0.469042 |
| 288 | 0.018469 | 0.006294 | 0.484396 |
| 289 | 0.019434 | 0.006129 | 0.551443 |
| 290 | 0.019277 | 0.006906 | 0.508385 |
| 291 | 0.021833 | 0.009489 | 0.384556 |
| 293 | 0.01252 | 0.006427 | 0.356902 |
| 294 | 0.011884 | 0.006276 | 0.322886 |
| 295 | 0.012392 | 0.00627 | 0.447166 |
| 297 | 0.012283 | 0.00621 | 0.567064 |
| 298 | 0.012177 | 0.006287 | 0.464133 |
| 299 | 0.012284 | 0.006151 | 0.348391 |
| 300 | 0.012339 | 0.006071 | 0.502548 |
| 301 | 0.012495 | 0.007116 | 0.35649 |
| 302 | 0.01222 | 0.006362 | 0.411845 |
| 303 | 0.012195 | 0.006278 | 0.26423 |
| 304 | 0.012215 | 0.006262 | 0.552091 |
| 305 | 0.01249 | 0.006788 | 0.42767 |
| 306 | 0.012402 | 0.006165 | 0.371097 |
| 307 | 0.012281 | 0.006139 | 0.520864 |
| 308 | 0.012497 | 0.00617 | 0.397038 |
| 309 | 0.012793 | 0.006274 | 0.245538 |
| 310 | 0.012404 | 0.006334 | 0.348876 |
| 311 | 0.012122 | 0.006441 | 0.294773 |
| 312 | 0.012249 | 0.006229 | 0.325353 |
| 313 | 0.012563 | 0.006174 | 0.365834 |
| 314 | 0.012287 | 0.006596 | 0.462958 |
| 315 | 0.012275 | 0.006142 | 0.298952 |
| 316 | 0.012716 | 0.007565 | 0.34122 |
| 317 | 0.012291 | 0.006397 | 0.309566 |
| 318 | 0.012115 | 0.006393 | 0.329808 |
| 319 | 0.01227 | 0.008317 | 0.304387 |
| 320 | 0.012221 | 0.006647 | 0.328903 |
| 321 | 0.012186 | 0.007163 | 0.399922 |
| 322 | 0.015035 | 0.031123 | 0.376798 |
| 323 | 0.012308 | 0.006096 | 0.237291 |
| 324 | 0.01192 | 0.006316 | 0.405807 |
| 325 | 0.012466 | 0.00625 | 0.493302 |
| 328 | 0.012498 | 0.00643 | 0.514255 |
| 329 | 0.012432 | 0.006216 | 0.374611 |
| 330 | 0.012053 | 0.006128 | 0.420442 |
| 331 | 0.012416 | 0.006082 | 0.375976 |
| 332 | 0.01236 | 0.006301 | 0.525602 |
| 333 | 0.012418 | 0.006263 | 0.410027 |
| 334 | 0.011605 | 0.006186 | 0.411457 |
| 335 | 0.011728 | 0.006232 | 0.357123 |
| 336 | 0.012106 | 0.006323 | 0.380811 |
| 337 | 0.012118 | 0.006278 | 0.325981 |
| 338 | 0.012218 | 0.006206 | 0.377091 |
| 339 | 0.012209 | 0.006258 | 0.32511 |
| 340 | 0.012372 | 0.006041 | 0.380202 |
| 341 | 0.012382 | 0.00629 | 0.480572 |
| 342 | 0.011896 | 0.006308 | 0.348783 |
| 343 | 0.01204 | 0.006332 | 0.37449 |
| 344 | 0.011928 | 0.006417 | 0.471347 |
| 345 | 0.01169 | 0.006267 | 0.36332 |
| 346 | 0.012345 | 0.006259 | 0.366717 |
| 347 | 0.012182 | 0.006163 | 0.363674 |
| 348 | 0.012163 | 0.00616 | 0.444482 |
| 349 | 0.012659 | 0.006222 | 0.317343 |
| 350 | 0.01182 | 0.006202 | 0.590775 |
| 351 | 0.011972 | 0.006135 | 0.408389 |
| 352 | 0.011885 | 0.006384 | 0.34904 |
| 353 | 0.011969 | 0.006398 | 0.336116 |
| 354 | 0.012428 | 0.006564 | 0.404646 |
| 355 | 0.012092 | 0.006308 | 0.299465 |
| 356 | 0.012409 | 0.006126 | 0.356694 |
| 357 | 0.012519 | 0.006278 | 0.390957 |
| 358 | 0.011963 | 0.006349 | 0.303741 |
| 359 | 0.012077 | 0.006261 | 0.334388 |
| 360 | 0.012007 | 0.006365 | 0.350437 |
| 361 | 0.012282 | 0.007154 | 0.317387 |
| 362 | 0.012469 | 0.007445 | 0.472965 |
| 363 | 0.012436 | 0.006211 | 0.393245 |
| 364 | 0.012106 | 0.006298 | 0.499986 |
| 365 | 0.012805 | 0.009062 | 0.426256 |
| 366 | 0.01212 | 0.006302 | 0.373071 |
| 367 | 0.01206 | 0.006217 | 0.396929 |
| 368 | 0.011994 | 0.006227 | 0.438247 |
| 369 | 0.011901 | 0.006318 | 0.340287 |
| 370 | 0.012341 | 0.007446 | 0.356303 |
| 371 | 0.012601 | 0.006237 | 0.447917 |
| 372 | 0.012511 | 0.007461 | 0.304352 |
| 373 | 0.012419 | 0.006273 | 0.445464 |
| 374 | 0.012212 | 0.006298 | 0.325297 |
| 375 | 0.012262 | 0.006342 | 0.253124 |
| 376 | 0.01206 | 0.00625 | 0.506673 |
| 377 | 0.012314 | 0.006239 | 0.391603 |
| 378 | 0.011869 | 0.006468 | 0.357757 |
| 380 | 0.013014 | 0.007118 | 0.33064 |
| 381 | 0.014152 | 0.007984 | 0.444288 |
| 382 | 0.012422 | 0.006289 | 0.366077 |
| 383 | 0.012649 | 0.0065 | 0.360518 |
| 384 | 0.012302 | 0.006376 | 0.350175 |
| 385 | 0.012345 | 0.006215 | 0.391858 |
| 386 | 0.012388 | 0.006074 | 0.51586 |
| 387 | 0.012519 | 0.007024 | 0.397167 |
| 388 | 0.013891 | 0.00748 | 0.425872 |
| 391 | 0.00426 | 0.025652 | 1.07762 |
| 392 | 0.004221 | 0.024819 | 0.967405 |
| 393 | 0.004402 | 0.026185 | 1.490273 |
| 395 | 0.004363 | 0.024306 | 1.116184 |
| 396 | 0.004078 | 0.025204 | 1.218613 |
| 397 | 0.004141 | 0.025195 | 1.186671 |
| 399 | 0.004058 | 0.025739 | 1.164329 |
| 400 | 0.004405 | 0.026216 | 0.849372 |
| 401 | 0.004166 | 0.025629 | 1.02162 |
| 402 | 0.004116 | 0.025377 | 1.037716 |
| 403 | 0.004734 | 0.028736 | 1.197277 |
| 404 | 0.004247 | 0.025532 | 0.859999 |
| 405 | 0.004301 | 0.025699 | 0.866291 |
| 406 | 0.004319 | 0.025744 | 1.453868 |
| 407 | 0.00439 | 0.026383 | 0.93497 |
| 408 | 0.00535 | 0.032252 | 0.865951 |
| 409 | 0.004149 | 0.025932 | 0.961605 |
| 410 | 0.004251 | 0.025634 | 1.117515 |
| 411 | 0.004339 | 0.025073 | 1.08764 |
| 412 | 0.004524 | 0.025372 | 0.873893 |
| 413 | 0.004216 | 0.025102 | 1.007087 |
| 414 | 0.004159 | 0.025802 | 0.964101 |
| 415 | 0.004389 | 0.025762 | 0.882981 |
| 416 | 0.004232 | 0.024642 | 1.018017 |
| 417 | 0.004211 | 0.025603 | 0.850283 |
| 418 | 0.004341 | 0.025106 | 0.846304 |
| 419 | 0.004202 | 0.024844 | 1.080883 |
| 420 | 0.004135 | 0.024946 | 0.97078 |
| 422 | 0.004459 | 0.025873 | 1.058666 |
| 423 | 0.004274 | 0.025787 | 1.226844 |
| 424 | 0.004383 | 0.024211 | 0.850711 |
| 425 | 0.004319 | 0.025464 | 0.973357 |
| 426 | 0.004226 | 0.025422 | 0.838836 |
| 427 | 0.004226 | 0.025762 | 0.973639 |
| 428 | 0.004161 | 0.025186 | 0.86052 |
| 429 | 0.004196 | 0.02512 | 1.028343 |
| 430 | 0.004215 | 0.0256 | 1.062937 |
| 431 | 0.00421 | 0.025733 | 1.00445 |
| 433 | 0.004741 | 0.027408 | 0.950117 |
| 434 | 0.004318 | 0.025754 | 1.092758 |
| 435 | 0.004428 | 0.025757 | 1.018609 |
| 436 | 0.004163 | 0.02512 | 0.727576 |
| 437 | 0.004243 | 0.025229 | 0.780294 |
| 438 | 0.00418 | 0.026218 | 1.039505 |
| 439 | 0.004887 | 0.026537 | 1.117939 |
| 440 | 0.005189 | 0.028072 | 0.889784 |
| 441 | 0.004272 | 0.025361 | 0.836717 |
| 442 | 0.004524 | 0.02738 | 0.921425 |
| 443 | 0.004218 | 0.025148 | 1.162762 |
| 444 | 0.004237 | 0.024847 | 0.728786 |
| 445 | 0.004293 | 0.025134 | 1.175772 |
| 446 | 0.005773 | 0.02595 | 0.999823 |
| 447 | 0.004274 | 0.025853 | 1.006288 |
| 448 | 0.004344 | 0.02546 | 0.863958 |
| 449 | 0.004346 | 0.025705 | 0.920647 |
| 450 | 0.004326 | 0.025476 | 0.816123 |
| 451 | 0.004237 | 0.025069 | 0.846299 |
| 452 | 0.005257 | 0.025596 | 0.800487 |
| 453 | 0.007428 | 0.026513 | 1.037012 |
| 454 | 0.004303 | 0.024553 | 0.94302 |
| 455 | 0.010434 | 0.037939 | 0.690676 |
| 456 | 0.007299 | 0.027948 | 1.099247 |
| 457 | 0.004251 | 0.025526 | 0.872239 |
| 458 | 0.004302 | 0.025162 | 1.050254 |
| 459 | 0.004217 | 0.025242 | 0.856808 |
| 460 | 0.004174 | 0.02491 | 0.771856 |
| 461 | 0.004283 | 0.023773 | 0.825394 |
| 462 | 0.004232 | 0.026042 | 1.06574 |
| 463 | 0.00424 | 0.02602 | 0.834992 |
| 464 | 0.004112 | 0.026109 | 1.215674 |
| 465 | 0.004229 | 0.025226 | 0.796978 |
| 466 | 0.004197 | 0.024889 | 1.287377 |
| 467 | 0.005177 | 0.025637 | 0.884542 |
| 469 | 0.00431 | 0.025306 | 1.013611 |
| 470 | 0.004249 | 0.025992 | 0.811355 |
| 471 | 0.004548 | 0.027775 | 0.99103 |
| 473 | 0.005266 | 0.027614 | 0.841048 |
| 474 | 0.005181 | 0.025263 | 1.045863 |
| 475 | 0.004214 | 0.024591 | 1.055417 |
| 476 | 0.004585 | 0.024957 | 0.96854 |
| 477 | 0.005587 | 0.026272 | 1.177024 |
| 478 | 0.005441 | 0.028445 | 0.988752 |
| 479 | 0.004717 | 0.027028 | 0.856542 |
| 480 | 0.004527 | 0.026333 | 0.732261 |
| 481 | 0.004189 | 0.026134 | 1.042274 |
| 482 | 0.004308 | 0.025592 | 1.144538 |
| 483 | 0.004232 | 0.025486 | 0.988084 |
| 484 | 0.005422 | 0.026264 | 0.930135 |
| 486 | 0.010488 | 0.036814 | 0.400608 |
| 487 | 0.009352 | 0.035227 | 0.398473 |
| 488 | 0.011628 | 0.039565 | 0.371609 |
| 489 | 0.010104 | 0.036386 | 0.522603 |
| 490 | 0.010243 | 0.035054 | 0.428049 |
| 491 | 0.009427 | 0.034974 | 0.456625 |
| 492 | 0.009978 | 0.034961 | 0.578826 |
| 493 | 0.017268 | 0.035854 | 0.439093 |
| 494 | 0.011939 | 0.036741 | 0.564414 |
| 495 | 0.009874 | 0.035139 | 0.393693 |
| 496 | 0.009436 | 0.033925 | 0.438625 |
| 499 | 0.017365 | 0.040412 | 0.408489 |
| 500 | 0.010443 | 0.035109 | 0.376297 |
| 501 | 0.098725 | 0.035501 | 0.705679 |
| 502 | 0.009362 | 0.036715 | 0.497175 |
| 503 | 0.010364 | 0.039033 | 0.408634 |
| 504 | 0.01097 | 0.034864 | 0.429402 |
| 505 | 0.011296 | 0.045354 | 0.444601 |
| 506 | 0.009332 | 0.034205 | 0.450232 |
| 507 | 0.009893 | 0.052264 | 0.571042 |
| 508 | 0.009472 | 0.034109 | 0.533749 |
| 510 | 0.010046 | 0.035326 | 0.405723 |
| 511 | 0.009439 | 0.03423 | 0.345853 |
| 512 | 0.009106 | 0.034492 | 0.364057 |
| 513 | 0.013017 | 0.036592 | 0.399432 |
| 514 | 0.029114 | 0.157091 | 0.665907 |
| 515 | 0.009588 | 0.035852 | 0.430589 |
| 516 | 0.01053 | 0.034159 | 0.347145 |
| 517 | 0.011616 | 0.049112 | 0.479119 |
| 518 | 0.010441 | 0.034833 | 0.526338 |
| 519 | 0.012705 | 0.03856 | 0.465362 |
| 520 | 0.036111 | 0.066426 | 0.601134 |
| 521 | 0.009721 | 0.035602 | 0.5263 |
| 522 | 0.009626 | 0.034174 | 0.411501 |
| 523 | 0.010243 | 0.034049 | 0.461773 |
| 524 | 0.009466 | 0.03404 | 0.450292 |
| 525 | 0.009484 | 0.035115 | 0.428652 |
| 526 | 0.034651 | 0.049443 | 0.470629 |
| 527 | 0.010225 | 0.035086 | 0.474979 |
| 528 | 0.01019 | 0.0345 | 0.559636 |
| 529 | 0.0097 | 0.044281 | 0.512486 |
| 531 | 0.011152 | 0.035546 | 0.358218 |
| 532 | 0.017782 | 0.037115 | 0.476891 |
| 533 | 0.010199 | 0.033963 | 0.420376 |
| 534 | 0.009483 | 0.035329 | 0.29936 |
| 535 | 0.90231 | 0.680855 | 0.881043 |
| 537 | 0.010176 | 0.034227 | 0.547417 |
| 539 | 0.009638 | 0.034846 | 0.4356 |
| 540 | 0.00967 | 0.035308 | 0.379571 |
| 541 | 0.020438 | 0.064563 | 0.553054 |
| 542 | 0.0096 | 0.035474 | 0.46663 |
| 543 | 0.010103 | 0.036928 | 0.391608 |
| 544 | 0.031817 | 0.071379 | 0.405136 |
| 545 | 0.011419 | 0.044632 | 0.471581 |
| 546 | 0.009434 | 0.034118 | 0.633882 |
| 547 | 0.009671 | 0.034574 | 0.37907 |
| 548 | 0.009753 | 0.03389 | 0.425888 |
| 549 | 0.009679 | 0.034543 | 0.416178 |
| 550 | 0.010414 | 0.035565 | 0.382037 |
| 551 | 0.009573 | 0.034555 | 0.569187 |
| 553 | 0.010895 | 0.037061 | 0.452852 |
| 554 | 0.0252 | 0.106556 | 0.399393 |
| 556 | 0.009499 | 0.034102 | 0.463958 |
| 557 | 0.016537 | 0.050391 | 0.406694 |
| 558 | 0.029851 | 0.098052 | 0.422865 |
| 559 | 0.240194 | 0.948046 | 0.755382 |
| 560 | 0.023732 | 0.142099 | 0.410883 |
| 561 | 0.009951 | 0.034656 | 0.525667 |
| 562 | 0.023838 | 0.071971 | 0.547672 |
| 563 | 0.029476 | 0.233222 | 0.518497 |
| 564 | 0.009775 | 0.033845 | 0.432675 |
| 565 | 0.014326 | 0.034722 | 0.462568 |
| 567 | 0.062129 | 0.223441 | 0.412738 |
| 568 | 0.010126 | 0.035292 | 0.406865 |
| 569 | 0.010231 | 0.035076 | 0.671012 |
| 570 | 0.010125 | 0.035003 | 0.480816 |
| 571 | 0.010039 | 0.034758 | 0.495482 |
| 572 | 0.010531 | 0.045745 | 0.522281 |
| 573 | 0.025354 | 0.034962 | 0.419466 |
| 574 | 0.243552 | 0.556199 | 0.762058 |
| 575 | 0.015572 | 0.035785 | 0.437496 |
| 576 | 0.013035 | 0.038805 | 0.531242 |
| 577 | 0.032586 | 0.079404 | 0.417157 |
| 578 | 0.02313 | 0.063316 | 0.474352 |
| 579 | 0.065246 | 0.302516 | 0.543815 |
| 581 | 0.354729 | 0.62217 | 1.144543 |
| 582 | 0.033618 | 0.058613 | 0.615124 |
| 583 | 0.308377 | 0.394948 | 0.932255 |
| 585 | 0.006337 | 0.020183 | 0.315108 |
| 586 | 0.163191 | 0.081969 | 0.381663 |
| 587 | 0.005108 | 0.023774 | 0.224587 |
| 588 | 0.021841 | 0.05963 | 0.370248 |
| 589 | 0.046721 | 0.333438 | 0.27475 |
| 590 | 0.090307 | 0.279891 | 0.29317 |
| 591 | 0.028787 | 0.07838 | 0.325743 |
| 592 | 0.005702 | 0.020121 | 0.306412 |
| 593 | 0.0099 | 0.046476 | 0.246072 |
| 594 | 0.015627 | 0.043937 | 0.215799 |
| 595 | 0.004629 | 0.019544 | 0.251833 |
| 596 | 0.046096 | 0.243097 | 0.24242 |
| 597 | 0.724998 | 0.981484 | 0.844379 |
| 598 | 0.026838 | 0.114469 | 0.289663 |
| 599 | 0.005828 | 0.019718 | 0.257416 |
| 600 | 0.005909 | 0.019865 | 0.251511 |
| 601 | 0.00614 | 0.020424 | 0.288905 |
| 602 | 0.005997 | 0.020776 | 0.216972 |
| 603 | 0.004669 | 0.019593 | 0.244223 |
| 604 | 0.008771 | 0.03346 | 0.323606 |
| 605 | 0.006624 | 0.020724 | 0.274329 |
| 606 | 0.005853 | 0.020382 | 0.242918 |
| 607 | 0.007747 | 0.021643 | 0.255363 |
| 608 | 0.005712 | 0.019678 | 0.221593 |
| 609 | 0.256073 | 0.504568 | 0.599603 |
| 610 | 0.005913 | 0.020199 | 0.199839 |
| 611 | 0.00447 | 0.019293 | 0.258074 |
| 612 | 0.005724 | 0.019734 | 0.360177 |
| 613 | 0.005694 | 0.019843 | 0.280102 |
| 614 | 0.005742 | 0.019885 | 0.286104 |
| 615 | 0.005705 | 0.019587 | 0.226829 |
| 616 | 0.006013 | 0.020573 | 0.266788 |
| 617 | 0.035272 | 0.094008 | 0.237734 |
| 618 | 0.026309 | 0.025971 | 0.242108 |
| 619 | 0.004687 | 0.020401 | 0.240359 |
| 620 | 0.00571 | 0.019825 | 0.218814 |
| 621 | 0.006001 | 0.020668 | 0.280146 |
| 622 | 0.082002 | 0.273485 | 0.335066 |
| 623 | 0.006029 | 0.020465 | 0.261982 |
| 624 | 0.140559 | 0.424388 | 0.42443 |
| 625 | 0.005826 | 0.019866 | 0.264531 |
| 626 | 0.051468 | 0.032244 | 0.306101 |
| 627 | 0.075104 | 0.276951 | 0.298932 |
| 628 | 0.005997 | 0.022048 | 0.26821 |
| 629 | 0.034034 | 0.401114 | 0.435605 |
| 630 | 0.011946 | 0.027566 | 0.254444 |
| 631 | 0.005914 | 0.020147 | 0.288981 |
| 632 | 0.037385 | 0.026122 | 0.362523 |
| 633 | 0.005826 | 0.019832 | 0.356419 |
| 634 | 0.010026 | 0.030547 | 0.206994 |
| 635 | 0.01508 | 0.04919 | 0.264614 |
| 636 | 0.296551 | 1.260655 | 0.610765 |
| 637 | 0.032124 | 0.375722 | 0.306647 |
| 638 | 0.005896 | 0.021846 | 0.271964 |
| 639 | 0.018881 | 0.148987 | 0.215144 |
| 640 | 0.018015 | 0.131161 | 0.288994 |
| 641 | 0.032334 | 0.02755 | 0.409355 |
| 642 | 0.067149 | 0.273403 | 0.35373 |
| 643 | 0.094609 | 0.53261 | 0.4944 |
| 644 | 0.006418 | 0.02472 | 0.231759 |
| 645 | 0.131335 | 0.734794 | 0.553125 |
| 646 | 0.029427 | 0.344127 | 0.390884 |
| 647 | 0.023863 | 0.136043 | 0.300959 |
| 650 | 0.010281 | 0.03014 | 0.242733 |
| 651 | 0.007994 | 0.028947 | 0.25194 |
| 652 | 0.15318 | 0.627023 | 0.43527 |
| 653 | 0.118823 | 0.69422 | 0.40527 |
| 654 | 0.105353 | 0.646828 | 0.388119 |
| 656 | 0.006783 | 0.02363 | 0.269316 |
| 657 | 0.307363 | 1.189775 | 0.605584 |
| 658 | 0.142732 | 0.450462 | 0.421859 |
| 659 | 0.22685 | 0.512994 | 0.582274 |
| 660 | 0.088314 | 0.402555 | 0.524885 |
| 661 | 0.180276 | 0.439707 | 0.530249 |
| 662 | 0.010698 | 0.060157 | 0.272901 |
| 663 | 0.161736 | 0.431703 | 0.609228 |
| 664 | 0.104153 | 0.348438 | 0.502663 |
| 665 | 0.509021 | 0.807128 | 0.717144 |
| 666 | 0.474224 | 0.60482 | 0.829418 |
| 667 | 0.04441 | 0.198916 | 0.289447 |
| 668 | 0.072205 | 0.466606 | 0.40305 |
| 669 | 0.026334 | 0.185174 | 0.304685 |
| 670 | 0.108713 | 0.572116 | 0.361198 |
| 671 | 0.054216 | 0.293384 | 0.286724 |
| 672 | 0.089022 | 0.461053 | 0.683679 |
| 673 | 0.052496 | 0.22393 | 0.290818 |
| 674 | 0.242917 | 0.426446 | 0.671781 |
| 675 | 0.020806 | 0.100778 | 0.254393 |
| 676 | 0.120498 | 0.594332 | 0.557211 |
| 677 | 0.083653 | 0.221249 | 0.399649 |
| 678 | 0.006713 | 0.026074 | 0.284843 |
| 679 | 0.012988 | 0.238136 | 0.251857 |
| 680 | 0.939588 | 1.168014 | 0.89748 |
| 682 | 0.116101 | 0.51627 | 0.411418 |
| 683 | 0.091835 | 0.41856 | 0.330861 |
| 684 | 0.269272 | 0.956985 | 0.388996 |
| 685 | 0.068553 | 0.420129 | 0.219238 |
| 686 | 0.118729 | 0.627236 | 0.408928 |
| 687 | 0.109438 | 0.486295 | 0.332833 |
| 688 | 0.136059 | 0.604523 | 0.382106 |
| 689 | 0.029476 | 0.230011 | 0.246326 |
| 690 | 0.713106 | 1.287446 | 0.527058 |
| 691 | 0.237497 | 0.831741 | 0.595391 |
| 692 | 0.223793 | 1.114774 | 0.464139 |
| 693 | 0.271839 | 2.152616 | 0.674694 |
| 694 | 0.05139 | 0.613276 | 0.240255 |
| 695 | 0.327666 | 1.036856 | 0.542561 |
| 696 | 0.098363 | 0.604772 | 0.25928 |
| 697 | 0.375897 | 0.957958 | 0.549728 |
| 698 | 0.026512 | 0.225899 | 0.241871 |
| 699 | 0.497694 | 1.50769 | 0.574673 |
| 700 | 0.288469 | 0.915024 | 0.510727 |
| 701 | 0.437509 | 1.020715 | 0.734873 |
| 702 | 0.046205 | 0.476705 | 0.190078 |
| 703 | 0.122863 | 0.83862 | 0.282447 |
| 704 | 0.147205 | 0.901082 | 0.301388 |
| 705 | 0.223074 | 0.853951 | 0.40577 |
| 706 | 0.008438 | 0.033092 | 0.191812 |
| 707 | 0.394494 | 0.997947 | 0.843619 |
| 708 | 0.186993 | 1.051411 | 0.468843 |
| 709 | 0.108893 | 0.601642 | 0.210326 |
| 710 | 0.091753 | 0.734575 | 0.237951 |
| 711 | 0.345755 | 1.159082 | 0.385849 |
| 712 | 0.115713 | 0.513471 | 0.287018 |
| 713 | 0.122493 | 0.686785 | 0.347889 |
| 714 | 0.191872 | 0.830288 | 0.567754 |
| 715 | 0.016321 | 0.055715 | 0.200218 |
| 716 | 0.020481 | 0.530732 | 0.198959 |
| 717 | 0.039274 | 0.234164 | 0.199885 |
| 718 | 0.344223 | 1.062216 | 0.47539 |
| 719 | 0.034917 | 0.299112 | 0.221854 |
| 720 | 0.149534 | 0.777313 | 0.356745 |
| 721 | 0.35108 | 1.01378 | 0.464163 |
| 722 | 0.234439 | 0.884539 | 0.353844 |
| 723 | 0.0088 | 0.035731 | 0.175315 |
| 724 | 0.302881 | 1.254204 | 0.495122 |
| 725 | 0.05075 | 0.39608 | 0.275113 |
| 726 | 0.081523 | 0.495768 | 0.301285 |
| 727 | 0.043541 | 0.247525 | 0.249821 |
| 728 | 0.33696 | 1.546341 | 0.460674 |
| 729 | 0.359043 | 1.008995 | 0.546047 |
| 730 | 0.097955 | 0.496152 | 0.329261 |
| 731 | 0.072919 | 0.443675 | 0.274429 |
| 732 | 0.015001 | 0.060524 | 0.182808 |
| 733 | 0.453244 | 1.410075 | 0.629982 |
| 734 | 0.342572 | 1.700432 | 0.413281 |
| 735 | 0.012613 | 0.050176 | 0.182816 |
| 736 | 0.016461 | 0.063952 | 0.182823 |
| 738 | 0.482005 | 1.605961 | 0.567678 |
| 739 | 0.58218 | 1.397435 | 0.754253 |
| 740 | 0.029093 | 0.051791 | 0.207152 |
| 741 | 0.349249 | 1.283688 | 0.511103 |
| 742 | 0.04606 | 0.482528 | 0.221214 |
| 743 | 0.141882 | 0.376925 | 2.230581 |
| 744 | 0.254656 | 0.939146 | 0.493241 |
| 745 | 0.015338 | 0.058975 | 0.213153 |
| 746 | 0.340833 | 0.962798 | 0.521323 |
| 747 | 0.701684 | 1.619727 | 0.658665 |
| 748 | 0.442992 | 1.472323 | 0.774321 |
| 749 | 0.196686 | 0.71019 | 0.441595 |
| 750 | 0.00964 | 0.038536 | 0.188239 |
| 751 | 0.360595 | 1.364262 | 0.554156 |
| 752 | 0.32576 | 1.182967 | 0.622747 |
| 753 | 0.066818 | 0.928007 | 0.240297 |
| 754 | 0.017628 | 0.16402 | 0.222692 |
| 755 | 0.237297 | 1.072629 | 0.451982 |
| 756 | 0.178168 | 1.009049 | 0.452329 |
| 757 | 0.012459 | 0.041059 | 0.194411 |
| 758 | 0.007271 | 0.030828 | 0.157203 |
| 759 | 0.031242 | 0.159577 | 0.186227 |
| 761 | 0.043353 | 0.146524 | 0.225515 |
| 762 | 0.007574 | 0.030242 | 0.208583 |
| 763 | 0.008587 | 0.032455 | 0.1986 |
| 764 | 0.008102 | 0.033408 | 0.169696 |
| 765 | 0.008951 | 0.03922 | 0.17488 |
| 766 | 0.018024 | 0.295069 | 0.205724 |
| 767 | 0.124411 | 0.768264 | 0.418591 |
| 768 | 0.008208 | 0.036795 | 0.183375 |
| 769 | 0.036346 | 0.37833 | 0.238709 |
| 770 | 0.279379 | 1.535747 | 0.723481 |
| 771 | 0.643475 | 0.520238 | 0.45387 |
| 772 | 0.014665 | 0.047355 | 0.166823 |
| 773 | 0.468419 | 2.022633 | 0.735404 |
| 774 | 0.362808 | 1.622526 | 0.436049 |
| 775 | 0.008859 | 0.038937 | 0.134732 |
| 776 | 0.311065 | 0.985297 | 0.574464 |
| 777 | 0.039862 | 0.065683 | 0.181863 |
| 779 | 0.123206 | 0.450318 | 0.697269 |
| 780 | 0.006814 | 0.029606 | 0.249389 |
| 781 | 0.009967 | 0.031473 | 0.286858 |
| 782 | 0.777497 | 1.325239 | 0.830948 |
| 783 | 0.587889 | 1.292049 | 1.019843 |
| 784 | 0.387894 | 0.821784 | 0.97539 |
| 786 | 0.120025 | 0.185762 | 0.380872 |
| 787 | 0.235698 | 0.942409 | 1.240669 |
| 788 | 0.336218 | 1.269178 | 0.957619 |
| 789 | 0.01732 | 0.096762 | 0.304029 |
| 791 | 0.617079 | 1.629033 | 1.466181 |
| 792 | 0.185997 | 0.704769 | 0.536405 |
| 793 | 0.877167 | 1.831368 | 1.454354 |
| 794 | 0.009408 | 0.076964 | 0.311169 |
| 795 | 0.099921 | 0.429592 | 0.632075 |
| 796 | 0.094809 | 0.536362 | 0.432216 |
| 797 | 0.244954 | 0.482612 | 0.621421 |
| 798 | 0.017916 | 0.084297 | 0.371982 |
| 799 | 0.012818 | 0.047289 | 0.29833 |
| 800 | 0.011675 | 0.13481 | 0.297163 |
| 801 | 0.099266 | 0.273608 | 0.403125 |
| 802 | 0.367887 | 1.18793 | 0.85394 |
| 803 | 0.006742 | 0.027036 | 0.289538 |
| 804 | 0.059456 | 0.162059 | 0.353715 |
| 805 | 0.01413 | 0.033509 | 0.294557 |
| 806 | 0.518086 | 1.610542 | 0.760268 |
| 807 | 0.022595 | 0.066194 | 0.294225 |
| 808 | 0.459064 | 1.277287 | 1.042237 |
| 810 | 0.012544 | 0.05468 | 0.274167 |
| 811 | 0.151174 | 0.538166 | 0.417778 |
| 812 | 0.006597 | 0.025521 | 0.283047 |
| 813 | 0.00961 | 0.027888 | 0.286255 |
| 814 | 0.048257 | 0.855988 | 0.357851 |
| 815 | 0.008921 | 0.03568 | 0.252635 |
| 816 | 0.39553 | 1.021138 | 0.918671 |
| 817 | 0.123764 | 0.912411 | 0.462477 |
| 818 | 0.007052 | 0.060048 | 0.259581 |
| 820 | 0.595672 | 0.572794 | 2.367059 |
| 821 | 0.027009 | 0.077125 | 0.292614 |
| 822 | 0.006996 | 0.035426 | 0.27968 |
| 823 | 0.61953 | 2.009281 | 0.808006 |
| 824 | 0.078118 | 0.029309 | 0.329722 |
| 825 | 0.038471 | 0.505871 | 0.321534 |
| 826 | 0.214307 | 1.236203 | 0.710454 |
| 827 | 0.187119 | 1.091001 | 0.678169 |
| 828 | 0.008155 | 0.032836 | 0.286114 |
| 829 | 0.043091 | 0.374192 | 0.385331 |
| 830 | 0.227057 | 0.993627 | 0.956788 |
| 831 | 0.111249 | 0.782791 | 0.514752 |
| 832 | 0.007741 | 0.034744 | 0.240929 |
| 833 | 0.148308 | 1.302523 | 0.621108 |
| 834 | 0.050544 | 0.635099 | 0.432155 |
| 835 | 0.107654 | 0.475431 | 0.419748 |
| 836 | 0.332776 | 1.197718 | 0.712195 |
| 837 | 0.007024 | 0.02723 | 0.249139 |
| 839 | 0.541139 | 1.487877 | 1.280705 |
| 840 | 0.434719 | 1.514761 | 1.27396 |
| 841 | 0.268407 | 1.048218 | 0.711256 |
| 842 | 0.258458 | 1.028083 | 0.818548 |
| 843 | 0.211266 | 0.691019 | 1.864166 |
| 846 | 0.14662 | 0.821729 | 1.1122 |
| 847 | 0.386867 | 1.568454 | 0.669131 |
| 848 | 0.080316 | 0.56734 | 0.850772 |
| 849 | 0.25383 | 1.721732 | 0.602704 |
| 850 | 0.526909 | 1.78363 | 0.891613 |
| 851 | 0.116222 | 0.76078 | 0.77039 |
| 852 | 0.206702 | 0.560921 | 1.415325 |
| 853 | 0.238304 | 1.081284 | 0.677935 |
| 854 | 0.053709 | 0.430447 | 0.580549 |
| 855 | 0.218825 | 0.941552 | 0.664315 |
| 856 | 0.101452 | 0.224533 | 0.577448 |
| 857 | 0.417144 | 0.902022 | 1.306233 |
| 858 | 0.03876 | 0.729869 | 0.32705 |
| 859 | 0.007745 | 0.034045 | 0.25266 |
| 860 | 0.008348 | 0.045165 | 0.274574 |
| 861 | 0.594983 | 1.639781 | 1.271579 |
| 862 | 0.900769 | 1.57937 | 1.004981 |
| 863 | 0.537996 | 1.331377 | 1.261956 |
| 864 | 0.388698 | 0.891772 | 1.285634 |
| 865 | 0.264661 | 1.079879 | 0.864063 |
| 866 | 0.06028 | 0.22964 | 0.478783 |
| 867 | 0.239258 | 0.716616 | 0.710261 |
| 868 | 0.008279 | 0.030116 | 0.264729 |
| 870 | 0.345182 | 0.941026 | 1.084312 |
| 871 | 0.381332 | 0.702232 | 1.235897 |
| 872 | 0.007184 | 0.0288 | 0.280018 |
| 873 | 0.011191 | 0.037242 | 0.285839 |
| 874 | 0.149494 | 0.617071 | 1.476994 |
| 875 | 0.172408 | 0.907391 | 0.867952 |
| 876 | 0.462175 | 1.088865 | 1.306636 |
| 878 | 0.010338 | 0.034189 | 0.216719 |
| 879 | 0.004925 | 0.019286 | 0.108567 |
| 881 | 0.005183 | 0.020939 | 0.088123 |
| 882 | 0.005094 | 0.020658 | 0.090945 |
| 883 | 0.005435 | 0.022801 | 0.085715 |
| 884 | 0.150855 | 0.669518 | 0.216276 |
| 885 | 0.352227 | 0.729722 | 0.522431 |
| 886 | 0.00519 | 0.04764 | 0.094334 |
| 887 | 0.006618 | 0.067628 | 0.098385 |
| 888 | 0.689507 | 1.833727 | 0.663895 |
| 889 | 0.192102 | 1.196074 | 0.344485 |
| 890 | 0.348046 | 1.61085 | 0.692815 |
| 891 | 0.080898 | 0.580847 | 0.200646 |
| 892 | 0.044425 | 0.718329 | 0.121203 |
| 893 | 0.382721 | 0.843293 | 0.376432 |
| 894 | 0.068781 | 0.640743 | 0.21479 |
| 896 | 0.014415 | 0.055218 | 0.107079 |
| 897 | 0.00687 | 0.027706 | 0.094585 |
| 898 | 0.286212 | 1.357183 | 0.357932 |
| 899 | 0.297653 | 1.1528 | 0.302755 |
| 900 | 0.327981 | 0.932419 | 0.386499 |
| 901 | 0.010727 | 0.05943 | 0.088041 |
| 902 | 0.350484 | 1.180504 | 0.40489 |
| 903 | 0.374566 | 1.622565 | 0.396166 |
| 904 | 0.166397 | 1.049689 | 0.320325 |
| 905 | 0.136541 | 0.817688 | 0.362347 |
| 906 | 0.291429 | 1.325833 | 0.396889 |
| 907 | 0.347797 | 1.267447 | 0.541789 |
| 908 | 0.034779 | 0.467747 | 0.163031 |
| 909 | 0.164487 | 0.350343 | 0.141732 |
| 910 | 0.265078 | 0.886219 | 0.407203 |
| 911 | 0.220201 | 0.717038 | 0.423402 |
| 912 | 0.186388 | 0.85741 | 0.362314 |
| 913 | 0.518467 | 1.762848 | 0.547938 |
| 914 | 0.40602 | 1.766605 | 0.454544 |
| 915 | 0.163459 | 1.042566 | 0.26138 |
| 916 | 0.296433 | 1.092387 | 0.371475 |
| 917 | 0.635553 | 1.261914 | 0.549559 |
| 918 | 0.291057 | 1.006901 | 0.474071 |
| 919 | 0.413799 | 1.246473 | 0.564896 |
| 920 | 0.179531 | 1.451147 | 0.495419 |
| 921 | 0.178932 | 1.285129 | 0.41161 |
| 923 | 0.317288 | 1.146979 | 0.387911 |
| 924 | 0.273164 | 0.914613 | 0.414757 |
| 925 | 0.19808 | 0.725391 | 0.296935 |
| 926 | 0.009777 | 0.035042 | 0.100935 |
| 927 | 0.436574 | 1.262457 | 0.683576 |
| 928 | 0.183262 | 0.813709 | 0.402288 |
| 929 | 0.094365 | 0.787482 | 0.213812 |
| 930 | 0.009025 | 0.063975 | 0.099171 |
| 931 | 0.032034 | 0.095047 | 0.131713 |
| 932 | 0.429418 | 1.050149 | 0.621605 |
| 933 | 0.0172 | 0.052524 | 0.099638 |
| 934 | 0.632772 | 1.169765 | 0.781487 |
| 935 | 0.253132 | 1.3481 | 0.278776 |
| 936 | 0.170298 | 1.000176 | 0.277753 |
| 937 | 0.15824 | 0.84717 | 0.442072 |
| 938 | 0.20538 | 0.88334 | 0.432407 |
| 939 | 0.224863 | 0.999881 | 0.380371 |
| 940 | 0.006178 | 0.021918 | 0.089462 |
| 941 | 0.011284 | 0.066173 | 0.115573 |
| 942 | 0.173491 | 0.708929 | 0.733394 |
| 943 | 0.189128 | 1.089849 | 0.316464 |
| 944 | 0.090245 | 0.422225 | 0.480858 |
| 946 | 0.230236 | 0.894889 | 0.396333 |
| 947 | 0.257151 | 0.909063 | 0.325964 |
| 948 | 0.170075 | 0.588195 | 0.260671 |
| 949 | 0.187726 | 0.806307 | 0.331384 |
| 950 | 0.22905 | 0.942413 | 0.603096 |
| 951 | 0.397644 | 0.841753 | 0.3522 |
| 952 | 0.049028 | 0.367599 | 0.253907 |
| 953 | 0.147509 | 0.791804 | 0.804695 |
| 954 | 0.16991 | 0.798194 | 0.475492 |
| 955 | 0.264691 | 0.591625 | 0.406549 |
| 957 | 0.148218 | 0.602345 | 0.46558 |
| 958 | 0.204506 | 0.863187 | 0.592641 |
| 959 | 0.255224 | 1.064249 | 0.774381 |
| 961 | 0.156063 | 1.110527 | 0.516403 |
| 962 | 0.212997 | 1.217959 | 0.365859 |
| 963 | 0.0211 | 0.144681 | 0.150198 |
| 964 | 0.489565 | 1.57383 | 0.615012 |
| 965 | 0.251985 | 0.770085 | 0.522089 |
| 966 | 0.55303 | 0.923252 | 0.527881 |
| 967 | 0.374958 | 1.224169 | 0.526617 |
| 968 | 0.07674 | 0.128785 | 0.431369 |
| 969 | 0.186199 | 0.698537 | 0.472067 |
| 970 | 0.161868 | 0.595542 | 0.889933 |
| 971 | 0.057774 | 0.497863 | 0.206401 |
| 972 | 0.089708 | 0.555687 | 0.328706 |
| 974 | 0.4611 | 1.588992 | 0.988689 |
| 975 | 0.501721 | 1.70434 | 0.729741 |
| 976 | 0.468553 | 1.572864 | 0.520521 |
| 977 | 0.465145 | 1.349452 | 0.80622 |
| 978 | 0.060567 | 1.227042 | 0.179786 |
| 980 | 0.649997 | 2.424418 | 0.991253 |
| 981 | 0.675473 | 1.395536 | 0.799773 |
| 982 | 0.493201 | 1.634458 | 0.836638 |
| 983 | 0.6355 | 4.406334 | 0.657997 |
| 984 | 0.622337 | 2.861176 | 0.393731 |
| 985 | 0.247394 | 1.921413 | 0.406224 |
| 986 | 0.098809 | 1.089629 | 0.184354 |
| 987 | 0.47511 | 2.42364 | 0.361921 |
| 988 | 0.364262 | 1.773289 | 0.713466 |
| 989 | 0.751797 | 1.903482 | 0.467399 |
| 992 | 0.251144 | 1.61049 | 0.379502 |
| 993 | 0.209284 | 1.691842 | 0.44776 |
| 994 | 0.34175 | 2.039731 | 0.798924 |
| 995 | 0.560565 | 3.12071 | 0.388763 |
| 996 | 0.407642 | 3.358356 | 0.353555 |
| 997 | 0.930576 | 2.730102 | 0.497813 |
| 998 | 0.325541 | 2.234049 | 0.512623 |
| 999 | 0.37115 | 2.362841 | 0.625508 |
| 1000 | 0.200748 | 2.565779 | 0.285251 |
| 1001 | 0.101767 | 1.532869 | 0.325446 |
| 1002 | 0.334714 | 3.270477 | 0.575591 |
| 1003 | 0.294501 | 2.785205 | 0.192242 |
| 1004 | 0.42759 | 3.329744 | 0.366353 |
| 1005 | 0.658112 | 2.554948 | 0.265405 |
| 1006 | 0.657566 | 1.865741 | 1.037788 |
| 1007 | 0.428267 | 2.664938 | 0.294918 |
| 1008 | 0.123986 | 1.595956 | 0.302035 |
| 1009 | 0.274442 | 2.817702 | 0.287299 |
| 1010 | 0.238204 | 3.007669 | 0.358667 |
| 1011 | 0.329633 | 2.440677 | 0.33232 |
| 1012 | 0.374152 | 3.023523 | 0.243111 |
| 1013 | 0.040086 | 0.407359 | 0.097212 |
| 1014 | 0.650383 | 2.577328 | 0.702306 |
| 1015 | 0.556326 | 3.822954 | 0.220832 |
| 1016 | 0.286549 | 2.359215 | 0.398523 |
| 1017 | 0.391716 | 5.493401 | 0.257803 |
| 1018 | 0.232929 | 2.135935 | 0.649378 |
| 1019 | 0.28219 | 2.371224 | 0.266729 |
| 1020 | 0.51863 | 2.875937 | 0.340747 |
| 1021 | 0.330813 | 1.726956 | 0.254804 |
| 1022 | 0.017793 | 0.063328 | 0.09479 |
| 1023 | 0.632422 | 5.001505 | 0.355245 |
| 1024 | 0.18462 | 1.771516 | 0.207356 |
| 1025 | 0.252709 | 2.019318 | 0.193805 |
| 1026 | 0.266125 | 3.425025 | 0.244887 |
| 1027 | 0.333355 | 2.88353 | 0.287246 |
| 1028 | 0.279444 | 1.656027 | 0.326932 |
| 1029 | 0.757301 | 2.168554 | 0.177607 |
| 1030 | 0.787768 | 3.103594 | 0.962656 |
| 1031 | 0.485323 | 3.727265 | 0.678268 |
| 1032 | 0.152334 | 1.921508 | 0.428204 |
| 1033 | 0.10525 | 1.592774 | 0.153351 |
| 1034 | 0.017448 | 0.092714 | 0.088247 |
| 1035 | 0.32027 | 2.717977 | 0.197946 |
| 1036 | 0.315469 | 1.59956 | 0.232083 |
| 1037 | 0.583145 | 2.318094 | 0.166805 |
| 1039 | 0.347433 | 2.874902 | 0.471893 |
| 1040 | 0.142964 | 1.920848 | 0.351992 |
| 1042 | 0.202209 | 2.100867 | 0.315035 |
| 1044 | 0.349521 | 2.320673 | 0.253838 |
| 1045 | 0.210983 | 0.761205 | 0.187876 |
| 1046 | 0.090748 | 0.371038 | 0.186849 |
| 1048 | 0.066928 | 0.667905 | 0.236017 |
| 1049 | 0.019242 | 0.114164 | 0.097972 |
| 1051 | 0.317465 | 2.158948 | 0.221567 |
| 1053 | 0.034762 | 0.16757 | 0.098127 |
| 1054 | 1.115094 | 3.572908 | 0.107919 |
| 1055 | 0.426255 | 2.279363 | 0.875474 |
| 1056 | 0.35721 | 2.140493 | 0.659378 |
| 1058 | 0.55246 | 3.14052 | 0.533825 |
| 1059 | 0.282424 | 1.535033 | 0.458698 |
| 1060 | 0.508811 | 3.071866 | 0.445119 |
| 1061 | 0.525733 | 2.601345 | 0.545443 |
| 1062 | 0.723702 | 1.828112 | 0.521941 |
| 1063 | 0.699279 | 2.002368 | 1.090698 |
| 1064 | 0.488057 | 1.746524 | 0.694956 |
| 1065 | 0.525503 | 2.352257 | 0.927797 |
| 1066 | 0.718979 | 3.256654 | 0.939838 |
| 1067 | 0.491483 | 1.809573 | 0.745394 |
| 1068 | 1.179541 | 3.74017 | 0.467877 |
| 1069 | 0.680638 | 2.4638 | 0.562974 |
| 1071 | 0.209584 | 0.500858 | 0.031699 |
| 1072 | 0.427886 | 1.498126 | 0.045503 |
| 1074 | 0.225285 | 0.934492 | 0.092819 |
| 1075 | 0.137715 | 0.599395 | 0.037514 |
| 1076 | 0.218044 | 1.024494 | 0.018691 |
| 1077 | 0.357504 | 1.710835 | 0.077848 |
| 1078 | 0.446448 | 1.518153 | 0.329426 |
| 1079 | 0.068825 | 0.57375 | 0.014851 |
| 1080 | 0.003884 | 0.019354 | 0.011699 |
| 1081 | 0.132094 | 0.892676 | 0.083692 |
| 1082 | 0.11434 | 0.923226 | 0.056705 |
| 1083 | 0.048631 | 0.398633 | 0.030346 |
| 1084 | 0.09557 | 0.924719 | 0.027728 |
| 1085 | 0.319794 | 0.776496 | 0.0123 |
| 1086 | 0.841477 | 2.348773 | 0.384012 |
| 1087 | 0.52158 | 1.199952 | 0.055537 |
| 1088 | 0.078823 | 0.411586 | 0.028465 |
| 1089 | 0.00343 | 0.019524 | 0.010609 |
| 1090 | 0.003436 | 0.019498 | 0.011946 |
| 1091 | 0.102675 | 0.821406 | 0.058983 |
| 1092 | 0.106604 | 0.815445 | 0.072592 |
| 1093 | 0.058575 | 0.476647 | 0.055827 |
| 1094 | 0.582942 | 1.352039 | 0.521226 |
| 1095 | 0.274994 | 0.998033 | 0.05091 |
| 1096 | 0.135482 | 0.659134 | 0.082443 |
| 1097 | 0.092301 | 0.934711 | 0.104868 |
| 1098 | 0.128824 | 1.226146 | 0.0726 |
| 1099 | 0.053711 | 0.584595 | 0.057494 |
| 1100 | 0.06731 | 0.735897 | 0.070774 |
| 1101 | 0.112476 | 0.815231 | 0.062219 |
| 1102 | 0.415663 | 1.212428 | 0.079545 |
| 1103 | 0.412005 | 1.754218 | 0.07277 |
| 1104 | 0.094334 | 0.470474 | 0.097149 |
| 1105 | 0.028017 | 0.537236 | 0.024877 |
| 1106 | 0.053871 | 0.742137 | 0.06444 |
| 1107 | 0.095169 | 1.103475 | 0.065829 |
| 1108 | 0.093046 | 0.820538 | 0.035385 |
| 1109 | 0.057641 | 0.482332 | 0.044518 |
| 1110 | 0.455043 | 1.55682 | 0.197962 |
| 1111 | 0.383534 | 1.350223 | 0.034935 |
| 1112 | 0.069077 | 0.719701 | 0.057509 |
| 1113 | 0.039422 | 0.485263 | 0.043295 |
| 1114 | 0.067072 | 0.91085 | 0.025613 |
| 1115 | 0.039005 | 0.503229 | 0.02457 |
| 1116 | 0.033876 | 0.323061 | 0.033704 |
| 1117 | 0.064028 | 0.56885 | 0.033787 |
| 1118 | 0.250182 | 0.508475 | 0.021224 |
| 1119 | 0.37371 | 0.826558 | 0.089181 |
| 1120 | 0.090101 | 0.592721 | 0.06047 |
| 1121 | 0.059672 | 1.02895 | 0.070457 |
| 1122 | 0.02492 | 0.538694 | 0.02872 |
| 1125 | 0.122305 | 0.680083 | 0.045805 |
| 1126 | 0.463398 | 1.267668 | 0.085815 |
| 1127 | 0.238281 | 1.080024 | 0.095938 |
| 1128 | 0.073365 | 0.521087 | 0.063778 |
| 1129 | 0.031089 | 0.393886 | 0.022686 |
| 1130 | 0.093374 | 0.767258 | 0.115614 |
| 1131 | 0.079149 | 0.574318 | 0.048331 |
| 1132 | 0.074191 | 0.643954 | 0.023463 |
| 1133 | 0.062971 | 0.480284 | 0.031931 |
| 1134 | 0.216714 | 2.20506 | 0.132402 |
| 1135 | 0.256515 | 0.844706 | 0.057365 |
| 1136 | 0.10945 | 0.887249 | 0.110266 |
| 1137 | 0.029429 | 0.352312 | 0.033672 |
| 1138 | 0.100706 | 0.864622 | 0.084684 |
| 1139 | 0.068952 | 0.846332 | 0.073941 |
| 1140 | 0.088214 | 0.797631 | 0.063666 |
| 1141 | 0.060094 | 0.359254 | 0.051047 |
| 1142 | 0.449206 | 1.015907 | 0.520133 |
| 1143 | 0.015059 | 0.08374 | 0.013579 |
| 1144 | 0.021431 | 0.415068 | 0.029096 |
| 1145 | 0.065197 | 0.376581 | 0.059013 |
| 1146 | 0.091757 | 0.625511 | 0.054384 |
| 1147 | 0.069289 | 0.534903 | 0.093464 |
| 1148 | 0.09357 | 0.984551 | 0.073067 |
| 1149 | 0.087768 | 0.722494 | 0.041795 |
| 1150 | 0.371622 | 1.089698 | 0.054021 |
| 1151 | 0.2795 | 0.947429 | 0.047765 |
| 1152 | 0.107195 | 0.384755 | 0.042152 |
| 1153 | 0.170766 | 0.881601 | 0.079923 |
| 1154 | 0.165804 | 1.199739 | 0.082085 |
| 1155 | 0.133725 | 0.619659 | 0.096667 |
| 1156 | 0.083408 | 0.615919 | 0.018728 |
| 1157 | 0.005065 | 0.022682 | 0.011868 |
| 1158 | 0.279768 | 0.567474 | 0.470594 |
| 1159 | 0.366023 | 1.092993 | 0.087006 |
| 1160 | 0.27576 | 0.987157 | 0.055226 |
| 1161 | 0.00888 | 0.211542 | 0.013514 |
| 1162 | 0.321948 | 1.123212 | 0.077234 |
| 1163 | 0.238473 | 0.676024 | 0.108033 |
| 1164 | 0.174887 | 0.553471 | 0.031922 |
| 1165 | 0.362907 | 1.060364 | 0.105512 |
| 1167 | 0.440301 | 3.41734 | |
| 1168 | 2.269595 | 6.148748 | |
| 1169 | 1.81238 | 4.676323 | |
| 1170 | 0.205013 | 0.821177 | |
| 1171 | 1.757897 | 3.916135 | |
| 1172 | 1.485171 | 1.939494 | |
| 1173 | 0.294994 | 0.522214 | |
| 1174 | 0.375652 | 1.011377 | |
| 1175 | 0.751857 | 4.08474 | |
| 1176 | 0.543517 | 3.338898 | |
| 1177 | 1.544519 | 7.245177 | |
| 1178 | 0.736878 | 2.629057 | |
| 1179 | 0.686547 | 2.072089 | |
| 1180 | 0.237255 | 0.98724 | |
| 1182 | 0.654624 | 1.237891 | |
| 1183 | 0.909645 | 4.061809 | |
| 1184 | 0.544952 | 2.024292 | |
| 1185 | 0.147863 | 1.25923 | |
| 1186 | 0.434429 | 1.954991 | |
| 1187 | 0.505786 | 3.505564 | |
| 1188 | 0.406861 | 2.548182 | |
| 1189 | 0.4624 | 2.051662 | |
| 1190 | 0.071895 | 0.226536 | |
| 1191 | 0.02375 | 0.087245 | |
| 1192 | 1.717893 | 7.465639 | |
| 1193 | 0.542623 | 4.373519 | |
| 1194 | 0.354838 | 3.577394 | |
| 1195 | 0.259933 | 3.12244 | |
| 1196 | 0.215423 | 2.052223 | |
| 1197 | 0.526893 | 2.109184 | |
| 1198 | 0.822275 | 1.940819 | |
| 1199 | 2.037406 | 9.409115 | |
| 1200 | 1.095359 | 5.130504 | |
| 1201 | 0.157644 | 0.731059 | |
| 1202 | 0.230264 | 1.923086 | |
| 1204 | 0.044579 | 0.913551 | |
| 1206 | 0.511955 | 1.209704 | |
| 1207 | 0.046192 | 0.162052 | |
| 1208 | 0.026908 | 0.124359 | |
| 1209 | 0.281822 | 3.216097 | |
| 1210 | 0.220147 | 2.427366 | |
| 1211 | 0.111229 | 1.298379 | |
| 1213 | 0.141412 | 0.865279 | |
| 1214 | 0.15488 | 0.459765 | |
| 1215 | 0.997818 | 3.321803 | |
| 1216 | 1.025901 | 4.406269 | |
| 1217 | 0.260845 | 2.930463 | |
| 1218 | 0.345315 | 3.143776 | |
| 1219 | 0.305255 | 1.957145 | |
| 1220 | 0.172212 | 1.168102 | |
| 1221 | 0.248967 | 0.814305 | |
| 1222 | 0.03732 | 0.119114 | |
| 1223 | 1.247387 | 3.024953 | |
| 1224 | 0.024175 | 0.081463 | |
| 1225 | 0.057454 | 0.455597 | |
| 1226 | 0.361586 | 4.237747 | |
| 1227 | 0.15804 | 1.518132 | |
| 1228 | 0.015375 | 0.056146 | |
| 1229 | 0.444241 | 1.249649 | |
| 1230 | 0.649691 | 1.15827 | |
| 1232 | 0.378509 | 0.925671 | |
| 1233 | 0.325411 | 2.625939 | |
| 1234 | 0.206621 | 2.051787 | |
| 1235 | 0.019165 | 0.09314 | |
| 1236 | 0.118642 | 1.658952 | |
| 1237 | 0.017709 | 0.057603 | |
| 1238 | 0.015895 | 0.043364 | |
| 1239 | 0.025104 | 0.079453 | |
| 1240 | 0.361175 | 2.493372 | |
| 1242 | 0.325351 | 1.821619 | |
| 1243 | 0.411323 | 2.267424 | |
| 1244 | 0.262681 | 1.368943 | |
| 1245 | 0.209877 | 1.009418 | |
| 1246 | 0.689115 | 0.935799 | |
| 1247 | 1.206727 | 3.45224 | |
| 1248 | 0.997846 | 3.186952 | |
| 1249 | 1.03331 | 4.151541 | |
| 1250 | 0.526962 | 1.830667 | |
| 1251 | 0.038789 | 0.160427 | |
| 1252 | 0.529876 | 1.476753 | |
| 1253 | 0.148526 | 0.512689 | |
| 1254 | 0.171619 | 0.496272 | |
| 1255 | 1.440028 | 4.650389 | |
| 1256 | 1.246323 | 3.526473 | |
| 1257 | 1.630471 | 3.27436 | |
| 1258 | 1.175351 | 3.563138 | |
| 1259 | 0.846546 | 1.714691 | |
| 1260 | 1.043862 | 0.869917 | |
| 1261 | 0.290872 | 0.44244 | |
| 1263 | 0.493679 | 0.657699 | 1.716926 |
| 1264 | 0.298742 | 0.443995 | 1.012966 |
| 1265 | 0.378744 | 0.471388 | 1.244712 |
| 1266 | 0.211218 | 0.327944 | 0.97188 |
| 1267 | 0.17315 | 0.41676 | 1.57404 |
| 1268 | 0.213092 | 0.396399 | 1.097609 |
| 1269 | 0.227781 | 0.372048 | 1.433456 |
| 1270 | 0.004499 | 0.018835 | 1.068802 |
| 1271 | 0.180553 | 0.407587 | 1.83541 |
| 1272 | 0.394666 | 0.599394 | 1.66783 |
| 1273 | 0.281898 | 0.489728 | 1.50982 |
| 1274 | 0.243913 | 0.319871 | 0.788908 |
| 1275 | 0.262209 | 0.4805 | 3.95034 |
| 1276 | 0.378342 | 0.610004 | 1.467933 |
| 1277 | 0.273883 | 0.469937 | 1.070136 |
| 1278 | 0.315846 | 0.734033 | 0.89974 |
| 1279 | 0.189246 | 0.354251 | 6.159851 |
| 1280 | 0.388472 | 0.494888 | 1.410746 |
| 1281 | 0.00514 | 0.020652 | 0.591781 |
| 1282 | 0.289013 | 0.482967 | 2.197797 |
| 1283 | 0.053841 | 0.067338 | 0.927451 |
| 1284 | 0.570301 | 0.633162 | 2.538618 |
| 1285 | 0.255977 | 0.464247 | 1.400939 |
| 1286 | 0.003738 | 0.01781 | 0.498459 |
| 1287 | 0.422493 | 0.771168 | 1.722777 |
| 1288 | 0.373076 | 0.512993 | 1.52444 |
| 1289 | 0.003707 | 0.017964 | 0.668949 |
| 1290 | 0.02527 | 0.048054 | 0.658627 |
| 1291 | 0.010359 | 0.025134 | 0.65155 |
| 1292 | 0.018398 | 0.043801 | 0.757339 |
| 1293 | 0.01987 | 0.051117 | 0.725236 |
| 1294 | 0.010602 | 0.029974 | 0.799556 |
| 1295 | 0.008196 | 0.027605 | 0.669465 |
| 1296 | 0.062396 | 0.233757 | 1.952551 |
| 1298 | 0.003269 | 0.017718 | 0.60053 |
| 1302 | 0.003654 | 0.017971 | 0.669614 |
| 1453 | 0.029035 | 0.074756 | 1.361452 |
| 1456 | 0.070888 | 0.141499 | 1.733833 |
| 1457 | 0.005302 | 0.02091 | 0.86533 |
| 1458 | 0.022487 | 0.056128 | 0.69949 |
| 1459 | 0.041481 | 0.10652 | 1.298416 |
| 1460 | 0.178585 | 0.283471 | 1.592463 |
| 1461 | 0.003819 | 0.018816 | 0.634444 |
| 1462 | 0.089803 | 0.219634 | 2.496717 |
| 1463 | 0.367361 | 0.489496 | 3.718475 |
| 1465 | 0.05509 | 0.079253 | 0.882252 |
| 1466 | 0.125624 | 0.195771 | 1.647541 |
| 1467 | 0.104653 | 0.186069 | 1.135532 |
| 1468 | 0.036721 | 0.09977 | 0.954748 |
| 1469 | 0.12058 | 0.220731 | 1.105286 |
| 1470 | 0.107829 | 0.199233 | 0.937104 |
| 1471 | 0.112351 | 0.216795 | 1.247919 |
| 1472 | 0.229734 | 0.29791 | 1.053188 |
| 1473 | 0.005236 | 0.020279 | 0.786991 |
| 1474 | 0.094218 | 0.183605 | 2.872396 |
| 1475 | 0.103852 | 0.178429 | 2.934125 |
| 1476 | 0.032997 | 0.071639 | 1.468191 |
| 1477 | 0.004763 | 0.019988 | 0.744601 |
| 1479 | 0.004862 | 0.02006 | 0.646639 |
| 1480 | 0.062493 | 0.120887 | 1.421179 |
| 1482 | 0.063512 | 0.117236 | 1.02612 |
| 1483 | 0.003687 | 0.018638 | 0.806893 |
| 1485 | 0.002923 | 0.016326 | 0.810278 |
| 1486 | 0.003046 | 0.016492 | 0.639067 |
| 1487 | 0.002997 | 0.016251 | 0.874065 |
| 1488 | 0.002931 | 0.015913 | 0.718561 |
| 1489 | 0.00278 | 0.016262 | 0.945829 |
| 1490 | 0.003396 | 0.017309 | 0.839493 |
| 1491 | 0.002835 | 0.016415 | 0.616515 |
| 1492 | 0.00337 | 0.017996 | 0.87573 |
| 1493 | 0.002838 | 0.016276 | 0.706791 |
| 1494 | 0.002936 | 0.016453 | 0.886075 |
| 1496 | 0.003021 | 0.016335 | 0.634456 |
| 1497 | 0.002921 | 0.016072 | 0.841508 |
| 1498 | 0.002932 | 0.016361 | 0.582778 |
| 1499 | 0.002819 | 0.017478 | 0.948983 |
| 1500 | 0.003006 | 0.017306 | 0.604048 |
| 1501 | 0.002807 | 0.016489 | 0.785628 |
| 1502 | 0.002769 | 0.015804 | 0.755524 |
| 1503 | 0.002882 | 0.016466 | 0.819839 |
| 1504 | 0.003412 | 0.016569 | 0.709579 |
| 1505 | 0.003997 | 0.017625 | 0.888899 |
| 1506 | 0.00289 | 0.017248 | 0.894677 |
| 1507 | 0.002795 | 0.01699 | 0.79213 |
| 1508 | 0.002911 | 0.016103 | 0.775025 |
| 1509 | 0.002935 | 0.016148 | 0.746427 |
| 1510 | 0.002847 | 0.016713 | 0.598686 |
| 1511 | 0.002895 | 0.016502 | 0.768356 |
| 1512 | 0.003954 | 0.017185 | 0.677016 |
| 1514 | 0.002815 | 0.027933 | 0.931244 |
| 1515 | 0.002933 | 0.027695 | 0.651567 |
| 1516 | 0.002785 | 0.026655 | 0.652685 |
| 1517 | 0.002783 | 0.027738 | 0.565322 |
| 1518 | 0.002828 | 0.026694 | 0.631511 |
| 1519 | 0.002834 | 0.027337 | 0.66479 |
| 1520 | 0.003453 | 0.028188 | 0.710203 |
| 1521 | 0.002992 | 0.026775 | 0.61482 |
| 1522 | 0.003072 | 0.028592 | 0.83538 |
| 1523 | 0.003473 | 0.028775 | 0.571612 |
| 1524 | 0.002805 | 0.027075 | 0.704035 |
| 1525 | 0.003615 | 0.030549 | 0.735642 |
| 1526 | 0.002812 | 0.027292 | 0.770641 |
| 1527 | 0.00283 | 0.026705 | 0.696095 |
| 1528 | 0.002794 | 0.026616 | 0.600694 |
| 1529 | 0.002883 | 0.026458 | 0.557503 |
| 1530 | 0.002978 | 0.028069 | 0.812791 |
| 1532 | 0.002984 | 0.027308 | 0.532545 |
| 1533 | 0.00285 | 0.02682 | 0.563657 |
| 1534 | 0.002846 | 0.02764 | 0.746323 |
| 1536 | 0.002799 | 0.027063 | 0.751124 |
| 1537 | 0.002812 | 0.02665 | 0.629611 |
| 1538 | 0.002753 | 0.026783 | 0.503323 |
| 1539 | 0.002909 | 0.027333 | 0.504615 |
| 1540 | 0.002819 | 0.027702 | 0.694792 |
| 1541 | 0.002759 | 0.02709 | 0.560466 |
| 1542 | 0.002733 | 0.027285 | 0.651773 |
| 1543 | 0.002765 | 0.026253 | 0.573015 |
| 1544 | 0.002706 | 0.027092 | 0.654941 |
| 1545 | 0.002874 | 0.026632 | 0.714128 |
| 1546 | 0.00294 | 0.027778 | 0.636466 |
| 1548 | 0.00279 | 0.028079 | 0.706656 |
| 1549 | 0.002731 | 0.027168 | 0.522207 |
| 1550 | 0.002677 | 0.027476 | 0.696415 |
| 1551 | 0.002816 | 0.027408 | 0.60935 |
| 1552 | 0.002864 | 0.027019 | 0.564324 |
| 1553 | 0.00289 | 0.027219 | 0.656982 |
| 1554 | 0.002904 | 0.027245 | 0.709589 |
| 1555 | 0.002857 | 0.027357 | 0.770251 |
| 1556 | 0.002779 | 0.027449 | 0.600841 |
| 1557 | 0.002804 | 0.027851 | 0.819866 |
| 1558 | 0.002822 | 0.027061 | 0.698614 |
| 1559 | 0.002789 | 0.026908 | 0.526565 |
| 1560 | 0.002867 | 0.02696 | 0.567773 |
| 1561 | 0.002954 | 0.026183 | 0.535325 |
| 1562 | 0.002832 | 0.028297 | 0.591001 |
| 1563 | 0.002851 | 0.026715 | 0.518507 |
| 1564 | 0.002773 | 0.027867 | 0.574878 |
| 1565 | 0.002829 | 0.027062 | 0.707218 |
| 1566 | 0.002787 | 0.027944 | 0.60274 |
| 1567 | 0.002789 | 0.026836 | 0.681669 |
| 1568 | 0.002819 | 0.026247 | 0.679288 |
| 1569 | 0.00288 | 0.026881 | 0.755689 |
| 1570 | 0.002853 | 0.026701 | 0.743775 |
| 1571 | 0.002811 | 0.027011 | 0.525869 |
| 1572 | 0.00285 | 0.027158 | 0.513429 |
| 1573 | 0.002801 | 0.027285 | 0.801479 |
| 1574 | 0.00283 | 0.026694 | 0.625502 |
| 1575 | 0.002879 | 0.026776 | 0.59054 |
| 1576 | 0.002797 | 0.026677 | 0.838621 |
| 1577 | 0.003048 | 0.027552 | 0.622979 |
| 1578 | 0.002889 | 0.027386 | 0.598139 |
| 1579 | 0.002955 | 0.027358 | 0.491017 |
| 1580 | 0.002857 | 0.026945 | 0.435188 |
| 1581 | 0.002782 | 0.02785 | 0.477584 |
| 1582 | 0.00277 | 0.026769 | 0.585209 |
| 1583 | 0.002882 | 0.027091 | 0.705566 |
| 1584 | 0.002823 | 0.026051 | 0.588066 |
| 1585 | 0.003011 | 0.02627 | 0.645734 |
| 1586 | 0.002783 | 0.027931 | 0.509146 |
| 1587 | 0.002834 | 0.027194 | 0.594226 |
| 1588 | 0.002788 | 0.027098 | 0.522658 |
| 1589 | 0.002909 | 0.027134 | 0.76665 |
| 1590 | 0.002772 | 0.026947 | 0.590476 |
| 1592 | 0.002841 | 0.026809 | 0.671333 |
| 1593 | 0.002895 | 0.026378 | 0.470406 |
| 1594 | 0.00308 | 0.026761 | 0.571625 |
| 1595 | 0.00292 | 0.026874 | 0.592748 |
| 1596 | 0.002734 | 0.02666 | 0.615701 |
| 1597 | 0.00288 | 0.026918 | 0.694078 |
| 1598 | 0.002796 | 0.028141 | 0.728341 |
| 1599 | 0.003183 | 0.027135 | 0.584021 |
| 1600 | 0.003303 | 0.02835 | 0.463076 |
| 1601 | 0.003179 | 0.02638 | 0.376498 |
| 1602 | 0.004066 | 0.027302 | 0.787392 |
| 1603 | 0.003293 | 0.027454 | 0.565816 |
| 1604 | 0.002846 | 0.02701 | 0.748421 |
| 1605 | 0.005887 | 0.032685 | 0.622649 |
| 1606 | 0.002889 | 0.02704 | 0.56754 |
| 1607 | 0.002831 | 0.026806 | 0.743947 |
| 1608 | 0.002965 | 0.027359 | 0.760013 |
| 1609 | 0.00396 | 0.027561 | 0.674454 |
| 1611 | 0.008586 | 0.075287 | 0.257982 |
| 1612 | 0.009539 | 0.076797 | 0.197109 |
| 1613 | 0.008018 | 0.072467 | 0.231769 |
| 1614 | 0.012023 | 0.075871 | 0.172221 |
| 1615 | 0.008328 | 0.071072 | 0.220705 |
| 1616 | 0.012023 | 0.075453 | 0.25357 |
| 1617 | 0.012384 | 0.075749 | 0.189438 |
| 1618 | 0.009907 | 0.074134 | 0.228244 |
| 1621 | 0.007789 | 0.070227 | 0.245667 |
| 1622 | 0.008908 | 0.072407 | 0.245921 |
| 1623 | 0.011175 | 0.077951 | 0.188074 |
| 1624 | 0.008036 | 0.069872 | 0.246323 |
| 1625 | 0.011073 | 0.074178 | 0.233123 |
| 1626 | 0.012397 | 0.076047 | 0.205037 |
| 1627 | 0.01196 | 0.082003 | 0.236073 |
| 1628 | 0.008087 | 0.073661 | 0.162851 |
| 1629 | 0.009228 | 0.071361 | 0.1983 |
| 1630 | 0.00787 | 0.068021 | 0.252184 |
| 1632 | 0.008463 | 0.070379 | 0.220109 |
| 1633 | 0.008069 | 0.070751 | 0.186138 |
| 1634 | 0.010343 | 0.072986 | 0.210934 |
| 1635 | 0.009638 | 0.077485 | 0.263883 |
| 1636 | 0.008719 | 0.074615 | 0.259029 |
| 1637 | 0.008512 | 0.073437 | 0.167086 |
| 1638 | 0.007929 | 0.072165 | 0.163977 |
| 1639 | 0.007868 | 0.07025 | 0.216269 |
| 1640 | 0.010217 | 0.075129 | 0.212716 |
| 1641 | 0.009846 | 0.072375 | 0.229234 |
| 1642 | 0.008044 | 0.072899 | 0.146821 |
| 1643 | 0.007903 | 0.073916 | 0.202451 |
| 1644 | 0.007997 | 0.072045 | 0.2269 |
| 1645 | 0.008005 | 0.071968 | 0.225724 |
| 1646 | 0.007868 | 0.072947 | 0.218694 |
| 1647 | 0.007874 | 0.07009 | 0.204347 |
| 1648 | 0.008126 | 0.072838 | 0.231684 |
| 1649 | 0.007985 | 0.07098 | 0.217341 |
| 1650 | 0.00805 | 0.073491 | 0.157452 |
| 1651 | 0.008583 | 0.074894 | 0.221222 |
| 1652 | 0.00782 | 0.073647 | 0.23366 |
| 1653 | 0.007727 | 0.072533 | 0.274822 |
| 1654 | 0.007898 | 0.072049 | 0.19207 |
| 1655 | 0.007809 | 0.072421 | 0.239521 |
| 1656 | 0.00814 | 0.070844 | 0.233632 |
| 1657 | 0.008044 | 0.069952 | 0.173161 |
| 1658 | 0.008147 | 0.070865 | 0.114916 |
| 1659 | 0.008054 | 0.070011 | 0.234503 |
| 1660 | 0.008051 | 0.073257 | 0.209313 |
| 1661 | 0.008006 | 0.073666 | 0.220585 |
| 1662 | 0.007882 | 0.072722 | 0.194041 |
| 1663 | 0.0079 | 0.07183 | 0.209789 |
| 1664 | 0.008074 | 0.069676 | 0.185531 |
| 1665 | 0.00878 | 0.071074 | 0.21086 |
| 1666 | 0.007895 | 0.071838 | 0.244376 |
| 1668 | 0.008053 | 0.072861 | 0.253493 |
| 1669 | 0.007873 | 0.073223 | 0.198109 |
| 1670 | 0.007816 | 0.068945 | 0.206857 |
| 1671 | 0.007989 | 0.071814 | 0.303432 |
| 1672 | 0.008207 | 0.073024 | 0.222844 |
| 1673 | 0.008259 | 0.0722 | 0.255081 |
| 1674 | 0.008145 | 0.071765 | 0.197578 |
| 1675 | 0.008243 | 0.07316 | 0.202955 |
| 1676 | 0.008121 | 0.07247 | 0.197388 |
| 1677 | 0.008023 | 0.071901 | 0.24222 |
| 1678 | 0.008907 | 0.074766 | 0.187839 |
| 1679 | 0.007883 | 0.072372 | 0.198258 |
| 1680 | 0.008303 | 0.07202 | 0.20641 |
| 1681 | 0.008051 | 0.068996 | 0.172375 |
| 1682 | 0.008184 | 0.073282 | 0.285672 |
| 1684 | 0.008361 | 0.072729 | 0.170928 |
| 1685 | 0.008716 | 0.074393 | 0.222029 |
| 1686 | 0.008059 | 0.071129 | 0.196348 |
| 1687 | 0.007953 | 0.070337 | 0.21236 |
| 1688 | 0.008643 | 0.070881 | 0.227238 |
| 1689 | 0.007905 | 0.069917 | 0.19241 |
| 1690 | 0.008127 | 0.072187 | 0.219756 |
| 1691 | 0.007958 | 0.073297 | 0.230226 |
| 1692 | 0.00806 | 0.069949 | 0.25326 |
| 1693 | 0.008331 | 0.073454 | 0.232442 |
| 1694 | 0.00995 | 0.07389 | 0.245006 |
| 1695 | 0.00813 | 0.070796 | 0.208166 |
| 1696 | 0.00828 | 0.070973 | 0.196401 |
| 1697 | 0.008427 | 0.070372 | 0.211389 |
| 1698 | 0.010244 | 0.071351 | 0.23418 |
| 1699 | 0.008127 | 0.071392 | 0.186818 |
| 1700 | 0.011627 | 0.078038 | 0.216352 |
| 1701 | 0.008158 | 0.071674 | 0.235836 |
| 1702 | 0.008405 | 0.072728 | 0.214028 |
| 1703 | 0.00931 | 0.072866 | 0.24933 |
| 1704 | 0.00834 | 0.06923 | 0.178878 |
| 1705 | 0.00998 | 0.07348 | 0.262106 |
| 1707 | 0.004095 | 0.007786 | 0.905391 |
| 1708 | 0.00319 | 0.007636 | 0.918093 |
| 1710 | 0.003179 | 0.007381 | 0.810737 |
| 1711 | 0.003206 | 0.007316 | 0.948158 |
| 1712 | 0.003223 | 0.007633 | 0.992454 |
| 1713 | 0.003147 | 0.007825 | 1.018484 |
| 1714 | 0.003156 | 0.007799 | 1.011062 |
| 1715 | 0.003144 | 0.007846 | 1.03755 |
| 1716 | 0.003126 | 0.007534 | 0.995065 |
| 1717 | 0.003303 | 0.008123 | 0.95218 |
| 1718 | 0.003174 | 0.007598 | 0.739364 |
| 1720 | 0.003107 | 0.007531 | 0.963791 |
| 1721 | 0.003184 | 0.007393 | 0.642433 |
| 1722 | 0.003234 | 0.007679 | 1.087014 |
| 1723 | 0.003183 | 0.007625 | 0.746413 |
| 1725 | 0.003166 | 0.00732 | 0.983384 |
| 1726 | 0.003192 | 0.007532 | 0.92262 |
| 1727 | 0.003216 | 0.007484 | 0.718343 |
| 1728 | 0.003213 | 0.00725 | 0.952505 |
| 1729 | 0.003225 | 0.007421 | 0.911589 |
| 1730 | 0.003281 | 0.007498 | 0.995307 |
| 1731 | 0.003053 | 0.007481 | 0.950875 |
| 1732 | 0.00316 | 0.007479 | 0.757397 |
| 1733 | 0.003214 | 0.007451 | 0.940672 |
| 1734 | 0.003219 | 0.007427 | 0.893661 |
| 1735 | 0.003254 | 0.007528 | 0.836399 |
| 1737 | 0.003227 | 0.007374 | 0.911326 |
| 1738 | 0.003214 | 0.007477 | 1.002511 |
| 1739 | 0.00327 | 0.008719 | 0.956423 |
| 1740 | 0.003147 | 0.007789 | 1.00538 |
| 1741 | 0.003279 | 0.007904 | 0.975752 |
| 1742 | 0.003162 | 0.007423 | 1.22881 |
| 1743 | 0.003139 | 0.007692 | 0.743436 |
| 1744 | 0.003205 | 0.007379 | 0.772479 |
| 1745 | 0.003182 | 0.007429 | 1.079506 |
| 1747 | 0.003253 | 0.0075 | 0.816336 |
| 1748 | 0.003362 | 0.008459 | 0.998276 |
| 1749 | 0.003015 | 0.007458 | 0.936332 |
| 1750 | 0.003212 | 0.008153 | 0.859119 |
| 1752 | 0.003259 | 0.007776 | 0.978627 |
| 1753 | 0.00325 | 0.007387 | 0.786866 |
| 1754 | 0.003162 | 0.006997 | 1.003224 |
| 1755 | 0.003259 | 0.007394 | 0.925965 |
| 1756 | 0.00318 | 0.007571 | 1.096225 |
| 1758 | 0.003337 | 0.007882 | 0.985142 |
| 1759 | 0.003418 | 0.008082 | 0.953122 |
| 1760 | 0.003232 | 0.007565 | 0.769634 |
| 1761 | 0.003209 | 0.007716 | 0.826567 |
| 1762 | 0.003197 | 0.007352 | 0.743692 |
| 1763 | 0.003236 | 0.007511 | 1.040475 |
| 1764 | 0.003251 | 0.007572 | 1.383275 |
| 1765 | 0.003257 | 0.013774 | 0.819945 |
| 1766 | 0.003138 | 0.007452 | 0.976752 |
| 1767 | 0.003206 | 0.007674 | 0.936511 |
| 1768 | 0.003234 | 0.008193 | 0.717088 |
| 1769 | 0.003178 | 0.007449 | 0.913192 |
| 1771 | 0.003187 | 0.007352 | 0.941054 |
| 1772 | 0.005576 | 0.019795 | 0.767377 |
| 1773 | 0.003294 | 0.012787 | 0.583382 |
| 1774 | 0.003183 | 0.007692 | 0.809862 |
| 1775 | 0.003131 | 0.007429 | 1.000089 |
| 1776 | 0.003174 | 0.007465 | 0.908376 |
| 1777 | 0.003238 | 0.00771 | 1.13952 |
| 1778 | 0.003232 | 0.007417 | 0.854898 |
| 1779 | 0.003218 | 0.007322 | 0.736095 |
| 1780 | 0.003511 | 0.008457 | 0.949085 |
| 1781 | 0.003302 | 0.009751 | 0.834468 |
| 1782 | 0.003093 | 0.007604 | 0.813662 |
| 1783 | 0.003061 | 0.007604 | 0.894994 |
| 1784 | 0.003161 | 0.007326 | 0.70474 |
| 1785 | 0.003225 | 0.007357 | 0.699541 |
| 1786 | 0.003164 | 0.007261 | 0.794668 |
| 1787 | 0.00315 | 0.007418 | 0.964931 |
| 1788 | 0.003283 | 0.007843 | 0.946281 |
| 1789 | 0.003291 | 0.007593 | 0.936091 |
| 1790 | 0.003761 | 0.00877 | 0.886762 |
| 1791 | 0.003112 | 0.007642 | 0.918008 |
| 1792 | 0.003268 | 0.007666 | 0.703354 |
| 1793 | 0.003133 | 0.007455 | 0.842638 |
| 1794 | 0.003159 | 0.007349 | 0.728775 |
| 1795 | 0.003246 | 0.007273 | 0.745148 |
| 1796 | 0.003613 | 0.007904 | 0.628593 |
| 1797 | 0.00427 | 0.008685 | 0.659605 |
| 1798 | 0.003091 | 0.007893 | 0.885414 |
| 1799 | 0.003119 | 0.007443 | 1.016389 |
| 1801 | 0.005041 | 0.009766 | 0.788892 |
| 1802 | 0.003799 | 0.009741 | 0.970487 |
| 1803 | 0.003191 | 0.007455 | 0.811591 |
| 1804 | 0.003256 | 0.007526 | 0.980185 |
| 1806 | 0.007832 | 0.015298 | 0.668837 |
| 1808 | 0.002099 | 0.00239 | 0.713927 |
| 1809 | 0.003792 | 0.004621 | 0.798598 |
| 1810 | 0.002017 | 0.002054 | 0.778629 |
| 1811 | 0.001935 | 0.002012 | 0.827105 |
| 1812 | 0.001955 | 0.002041 | 0.652207 |
| 1813 | 0.002017 | 0.002107 | 1.07398 |
| 1814 | 0.001992 | 0.00212 | 0.938161 |
| 1815 | 0.002057 | 0.002093 | 0.672235 |
| 1816 | 0.002067 | 0.002143 | 0.813551 |
| 1817 | 0.001993 | 0.00201 | 0.666663 |
| 1818 | 0.001943 | 0.002032 | 1.177111 |
| 1819 | 0.002001 | 0.002046 | 0.840791 |
| 1820 | 0.00202 | 0.002025 | 0.821089 |
| 1821 | 0.010528 | 0.014897 | 1.05278 |
| 1822 | 0.001978 | 0.002002 | 0.847594 |
| 1823 | 0.002033 | 0.002129 | 0.923411 |
| 1824 | 0.001995 | 0.002089 | 0.931098 |
| 1825 | 0.001951 | 0.002044 | 0.72614 |
| 1826 | 0.001901 | 0.002026 | 0.969977 |
| 1827 | 0.002017 | 0.002057 | 1.124311 |
| 1828 | 0.002003 | 0.002006 | 0.621247 |
| 1829 | 0.002024 | 0.002243 | 0.826881 |
| 1830 | 0.001924 | 0.001957 | 0.830188 |
| 1831 | 0.002058 | 0.002061 | 1.08971 |
| 1832 | 0.002021 | 0.002227 | 0.99019 |
| 1833 | 0.001961 | 0.002 | 1.043679 |
| 1834 | 0.001997 | 0.002049 | 1.079505 |
| 1835 | 0.002924 | 0.036425 | 0.9315 |
| 1836 | 0.002051 | 0.002049 | 0.764385 |
| 1837 | 0.001987 | 0.002013 | 0.939205 |
| 1838 | 0.001986 | 0.002074 | 0.945167 |
| 1839 | 0.00206 | 0.002081 | 0.757964 |
| 1840 | 0.001961 | 0.002069 | 0.963668 |
| 1841 | 0.001918 | 0.001952 | 0.824621 |
| 1842 | 0.001947 | 0.00206 | 0.828898 |
| 1844 | 0.002009 | 0.002099 | 0.812678 |
| 1845 | 0.001913 | 0.002007 | 0.924997 |
| 1846 | 0.002008 | 0.002012 | 1.067461 |
| 1847 | 0.002012 | 0.002021 | 0.910096 |
| 1848 | 0.002014 | 0.002092 | 1.070281 |
| 1849 | 0.00198 | 0.002053 | 1.115724 |
| 1850 | 0.00196 | 0.002017 | 0.780307 |
| 1851 | 0.001999 | 0.002057 | 0.88249 |
| 1852 | 0.001974 | 0.002022 | 0.630003 |
| 1853 | 0.00197 | 0.001976 | 0.893397 |
| 1854 | 0.002051 | 0.002022 | 0.767922 |
| 1855 | 0.002001 | 0.002064 | 1.128736 |
| 1856 | 0.002104 | 0.002101 | 1.08652 |
| 1857 | 0.001954 | 0.002061 | 0.814235 |
| 1858 | 0.001944 | 0.002018 | 0.855267 |
| 1859 | 0.001923 | 0.002007 | 1.245303 |
| 1860 | 0.001933 | 0.002022 | 0.820898 |
| 1861 | 0.001984 | 0.001993 | 0.92614 |
| 1862 | 0.002019 | 0.002032 | 1.0456 |
| 1863 | 0.002124 | 0.002046 | 0.904399 |
| 1864 | 0.002036 | 0.002068 | 0.957025 |
| 1865 | 0.001969 | 0.002058 | 0.878785 |
| 1866 | 0.001941 | 0.002003 | 0.88721 |
| 1867 | 0.001968 | 0.002036 | 0.765442 |
| 1868 | 0.002326 | 0.002549 | 0.633458 |
| 1869 | 0.002028 | 0.002049 | 0.630945 |
| 1870 | 0.002011 | 0.002052 | 1.044067 |
| 1871 | 0.002039 | 0.002032 | 0.858321 |
| 1872 | 0.002073 | 0.002103 | 0.894575 |
| 1874 | 0.00194 | 0.002077 | 0.741909 |
| 1876 | 0.002012 | 0.002203 | 0.77563 |
| 1877 | 0.002166 | 0.00293 | 0.909265 |
| 1878 | 0.002203 | 0.003175 | 0.764486 |
| 1879 | 0.002076 | 0.002159 | 0.870865 |
| 1880 | 0.002123 | 0.00211 | 0.974287 |
| 1882 | 0.001971 | 0.00206 | 1.194054 |
| 1883 | 0.001965 | 0.00198 | 0.850391 |
| 1884 | 0.001983 | 0.00208 | 0.739432 |
| 1885 | 0.004432 | 0.006831 | 0.921387 |
| 1886 | 0.001964 | 0.002047 | 0.905673 |
| 1887 | 0.002128 | 0.002131 | 0.970315 |
| 1888 | 0.00216 | 0.002141 | 0.900712 |
| 1889 | 0.001985 | 0.00209 | 0.904929 |
| 1890 | 0.002027 | 0.002135 | 0.942252 |
| 1891 | 0.001943 | 0.002032 | 1.031348 |
| 1892 | 0.001968 | 0.002051 | 0.673121 |
| 1894 | 0.002064 | 0.002078 | 1.215602 |
| 1895 | 0.002657 | 0.002895 | 0.952559 |
| 1897 | 0.004208 | 0.004197 | 0.877243 |
| 1898 | 0.001943 | 0.002098 | 0.720743 |
| 1899 | 0.001911 | 0.002064 | 0.771716 |
| 1900 | 0.001992 | 0.002012 | 1.042259 |
| 1902 | 0.002111 | 0.002087 | 0.877153 |
| 1903 | 0.002066 | 0.002106 | 1.055068 |
| 1904 | 0.003184 | 0.003144 | 1.09739 |
| 1909 | 0.002055 | 0.003948 | 0.847157 |
| 1912 | 0.00224 | 0.004186 | 0.742941 |
| 1914 | 0.002728 | 0.006378 | 1.015755 |
| 1915 | 0.002104 | 0.003971 | 1.11464 |
| 1916 | 0.002013 | 0.00378 | 0.838864 |
| 1917 | 0.002152 | 0.003877 | 0.908892 |
| 1919 | 0.002163 | 0.003718 | 0.800267 |
| 1921 | 0.002207 | 0.003959 | 0.605339 |
| 1922 | 0.002089 | 0.004028 | 0.664389 |
| 1923 | 0.002035 | 0.003926 | 0.807267 |
| 1924 | 0.002045 | 0.003803 | 0.75616 |
| 1925 | 0.002024 | 0.003787 | 0.78207 |
| 1926 | 0.002081 | 0.004003 | 0.919381 |
| 1927 | 0.002087 | 0.0039 | 0.87094 |
| 1928 | 0.002169 | 0.003842 | 0.85592 |
| 1929 | 0.002196 | 0.003892 | 1.04674 |
| 1930 | 0.002059 | 0.004072 | 0.758699 |
| 1931 | 0.002018 | 0.003893 | 0.935624 |
| 1932 | 0.00212 | 0.003782 | 0.741426 |
| 1935 | 0.002149 | 0.003827 | 0.781431 |
| 1936 | 0.002114 | 0.003987 | 0.983047 |
| 1939 | 0.002105 | 0.003927 | 1.012539 |
| 1940 | 0.002102 | 0.003894 | 0.972949 |
| 1943 | 0.002208 | 0.003969 | 0.819485 |
| 1944 | 0.002129 | 0.003932 | 0.90291 |
| 1949 | 0.002939 | 0.028633 | 0.702177 |
| 1951 | 0.00213 | 0.003953 | 0.756432 |
| 1954 | 0.002084 | 0.003994 | 0.716999 |
| 1955 | 0.002082 | 0.003928 | 0.924112 |
| 1956 | 0.002151 | 0.004369 | 0.83182 |
| 1959 | 0.002066 | 0.003906 | 0.943132 |
| 1960 | 0.002082 | 0.003897 | 0.845987 |
| 1962 | 0.002068 | 0.004065 | 0.677381 |
| 1964 | 0.002309 | 0.005092 | 0.691221 |
| 1965 | 0.002145 | 0.004599 | 1.02379 |
| 1966 | 0.002096 | 0.003928 | 0.821807 |
| 1967 | 0.002135 | 0.004049 | 0.784332 |
| 1969 | 0.00258 | 0.004963 | 0.869906 |
| 1970 | 0.002402 | 0.005499 | 0.802557 |
| 1971 | 0.003555 | 0.00803 | 0.915366 |
| 1972 | 0.002123 | 0.004341 | 1.002436 |
| 1973 | 0.002093 | 0.004195 | 0.739287 |
| 1974 | 0.002264 | 0.004213 | 1.090771 |
| 1975 | 0.00213 | 0.004172 | 0.890328 |
| 1976 | 0.002854 | 0.00629 | 1.03609 |
| 1977 | 0.0022 | 0.003857 | 0.750837 |
| 1978 | 0.002184 | 0.006424 | 0.789674 |
| 1979 | 0.00218 | 0.004072 | 1.041609 |
| 1980 | 0.002089 | 0.003918 | 0.742203 |
| 1981 | 0.002022 | 0.00393 | 0.802623 |
| 1983 | 0.00211 | 0.00387 | 0.823111 |
| 1985 | 0.00238 | 0.005063 | 0.920921 |
| 1987 | 0.002096 | 0.003989 | 0.820149 |
| 1988 | 0.002196 | 0.004207 | 0.733845 |
| 1993 | 0.002629 | 0.004548 | 0.923992 |
| 1994 | 0.003546 | 0.013836 | 0.780026 |
| 1996 | 0.00246 | 0.004831 | 0.793669 |
| 1998 | 0.005897 | 0.010175 | 0.864774 |
| 1999 | 0.002493 | 0.004889 | 0.91103 |
| 2001 | 0.003035 | 0.009213 | 0.760895 |
| 2004 | 0.009008 | 0.051959 | 0.315777 |
| 2006 | 0.007683 | 0.047495 | 0.479879 |
| 2007 | 0.00815 | 0.046714 | 0.350549 |
| 2009 | 0.007773 | 0.047424 | 0.356192 |
| 2010 | 0.008014 | 0.048727 | 0.376383 |
| 2011 | 0.007678 | 0.050682 | 0.388038 |
| 2012 | 0.007658 | 0.048585 | 0.40471 |
| 2013 | 0.00776 | 0.046273 | 0.269896 |
| 2014 | 0.007967 | 0.048251 | 0.353403 |
| 2015 | 0.008137 | 0.046658 | 0.338498 |
| 2016 | 0.007733 | 0.04596 | 0.356733 |
| 2017 | 0.007571 | 0.045682 | 0.396185 |
| 2018 | 0.007836 | 0.047143 | 0.396857 |
| 2019 | 0.008556 | 0.049704 | 0.356688 |
| 2020 | 0.007647 | 0.047487 | 0.406455 |
| 2021 | 0.007659 | 0.046888 | 0.36344 |
| 2022 | 0.007575 | 0.046464 | 0.411014 |
| 2023 | 0.008 | 0.046656 | 0.392491 |
| 2024 | 0.007671 | 0.046704 | 0.343154 |
| 2026 | 0.008452 | 0.049376 | 0.408859 |
| 2027 | 0.007698 | 0.046912 | 0.328525 |
| 2028 | 0.007683 | 0.046616 | 0.339399 |
| 2029 | 0.007666 | 0.046757 | 0.297973 |
| 2030 | 0.007675 | 0.046508 | 0.435685 |
| 2031 | 0.008134 | 0.04519 | 0.411958 |
| 2032 | 0.007675 | 0.045703 | 0.307964 |
| 2033 | 0.007603 | 0.046911 | 0.368773 |
| 2034 | 0.007487 | 0.046125 | 0.42095 |
| 2035 | 0.007824 | 0.048172 | 0.297846 |
| 2036 | 0.007336 | 0.048153 | 0.42074 |
| 2037 | 0.008092 | 0.047712 | 0.309579 |
| 2038 | 0.007771 | 0.046713 | 0.372379 |
| 2039 | 0.008147 | 0.047807 | 0.46323 |
| 2041 | 0.007752 | 0.046575 | 0.519016 |
| 2042 | 0.007808 | 0.047418 | 0.427933 |
| 2043 | 0.007841 | 0.048971 | 0.487233 |
| 2044 | 0.007751 | 0.04791 | 0.502666 |
| 2045 | 0.007997 | 0.04765 | 0.425789 |
| 2046 | 0.007681 | 0.047159 | 0.387429 |
| 2047 | 0.008297 | 0.04738 | 0.434821 |
| 2048 | 0.00876 | 0.04945 | 0.444633 |
| 2049 | 0.007392 | 0.046997 | 0.359452 |
| 2050 | 0.008459 | 0.051214 | 0.257893 |
| 2051 | 0.007739 | 0.048823 | 0.379033 |
| 2052 | 0.007651 | 0.047708 | 0.301475 |
| 2055 | 0.008096 | 0.046365 | 0.286331 |
| 2056 | 0.007633 | 0.045501 | 0.321644 |
| 2057 | 0.007723 | 0.04781 | 0.286926 |
| 2058 | 0.007596 | 0.047326 | 0.35697 |
| 2059 | 0.007819 | 0.048191 | 0.328469 |
| 2060 | 0.007522 | 0.049484 | 0.346836 |
| 2062 | 0.007728 | 0.04874 | 0.437359 |
| 2064 | 0.007614 | 0.047857 | 0.346887 |
| 2065 | 0.007718 | 0.04734 | 0.320753 |
| 2066 | 0.007861 | 0.048273 | 0.33439 |
| 2067 | 0.007787 | 0.048374 | 0.360579 |
| 2068 | 0.007899 | 0.047923 | 0.438593 |
| 2069 | 0.007997 | 0.047566 | 0.294398 |
| 2070 | 0.007618 | 0.047015 | 0.368413 |
| 2071 | 0.008211 | 0.047051 | 0.398477 |
| 2072 | 0.007816 | 0.045952 | 0.291645 |
| 2073 | 0.00744 | 0.047558 | 0.416445 |
| 2074 | 0.007748 | 0.047678 | 0.31422 |
| 2075 | 0.007821 | 0.049202 | 0.410995 |
| 2076 | 0.007579 | 0.048504 | 0.35862 |
| 2077 | 0.007606 | 0.048341 | 0.336701 |
| 2078 | 0.007833 | 0.047621 | 0.430521 |
| 2079 | 0.008881 | 0.04708 | 0.367176 |
| 2080 | 0.007632 | 0.046431 | 0.401737 |
| 2081 | 0.007585 | 0.047886 | 0.328978 |
| 2082 | 0.00782 | 0.048005 | 0.42346 |
| 2084 | 0.007872 | 0.048572 | 0.374299 |
| 2085 | 0.007508 | 0.048884 | 0.363426 |
| 2086 | 0.007641 | 0.04778 | 0.455748 |
| 2087 | 0.007576 | 0.046705 | 0.394438 |
| 2089 | 0.007588 | 0.050455 | 0.512216 |
| 2091 | 0.007914 | 0.049272 | 0.348157 |
| 2092 | 0.008757 | 0.085812 | 0.387008 |
| 2093 | 0.007033 | 0.04869 | 0.543809 |
| 2094 | 0.007412 | 0.048193 | 0.462981 |
| 2095 | 0.007785 | 0.048394 | 0.378497 |
| 2096 | 0.00808 | 0.04793 | 0.422319 |
| 2097 | 0.007585 | 0.052485 | 0.339995 |
| 2098 | 0.007722 | 0.077927 | 0.360082 |
| 2101 | 0.003196 | 0.02074 | 0.711343 |
| 2102 | 0.003171 | 0.019613 | 0.932187 |
| 2103 | 0.003015 | 0.019345 | 0.66012 |
| 2105 | 0.003183 | 0.019557 | 0.922989 |
| 2106 | 0.00304 | 0.019249 | 0.610898 |
| 2107 | 0.003086 | 0.020481 | 0.726218 |
| 2108 | 0.003083 | 0.01979 | 0.699435 |
| 2109 | 0.003083 | 0.019528 | 0.595743 |
| 2110 | 0.003043 | 0.01985 | 0.811218 |
| 2111 | 0.003105 | 0.019319 | 0.486517 |
| 2112 | 0.003041 | 0.018937 | 0.51889 |
| 2113 | 0.00304 | 0.019069 | 0.468082 |
| 2114 | 0.003108 | 0.018998 | 0.482694 |
| 2115 | 0.00313 | 0.019507 | 0.554585 |
| 2116 | 0.003166 | 0.020002 | 0.7362 |
| 2118 | 0.003188 | 0.01935 | 0.596176 |
| 2119 | 0.003134 | 0.019993 | 0.637627 |
| 2120 | 0.003081 | 0.019437 | 0.678214 |
| 2121 | 0.003146 | 0.019336 | 0.60839 |
| 2122 | 0.003065 | 0.019235 | 0.499429 |
| 2124 | 0.003203 | 0.019847 | 0.557828 |
| 2125 | 0.003239 | 0.02001 | 0.552858 |
| 2126 | 0.003195 | 0.019259 | 0.656 |
| 2127 | 0.003154 | 0.019186 | 0.483088 |
| 2129 | 0.003119 | 0.019051 | 0.620213 |
| 2130 | 0.003123 | 0.019615 | 0.424395 |
| 2134 | 0.003217 | 0.019331 | 0.536501 |
| 2135 | 0.003065 | 0.019226 | 0.52152 |
| 2137 | 0.003178 | 0.018652 | 0.698231 |
| 2138 | 0.003168 | 0.019197 | 0.587975 |
| 2140 | 0.003216 | 0.019528 | 0.625389 |
| 2141 | 0.00316 | 0.019709 | 0.682383 |
| 2142 | 0.003241 | 0.019746 | 0.516585 |
| 2143 | 0.00322 | 0.019625 | 0.613552 |
| 2144 | 0.003175 | 0.018746 | 0.700146 |
| 2145 | 0.003151 | 0.019352 | 0.390091 |
| 2146 | 0.003246 | 0.019676 | 0.504855 |
| 2147 | 0.00315 | 0.018806 | 0.691577 |
| 2148 | 0.00327 | 0.020065 | 0.647184 |
| 2149 | 0.003318 | 0.019742 | 0.593045 |
| 2150 | 0.003295 | 0.019112 | 0.545147 |
| 2151 | 0.003222 | 0.019324 | 0.623487 |
| 2153 | 0.003163 | 0.019031 | 0.622529 |
| 2154 | 0.003097 | 0.019212 | 0.412396 |
| 2155 | 0.003183 | 0.018864 | 0.628595 |
| 2157 | 0.003208 | 0.019445 | 0.512846 |
| 2158 | 0.00328 | 0.020175 | 0.608198 |
| 2159 | 0.00605 | 0.027206 | 0.523008 |
| 2160 | 0.003294 | 0.019204 | 0.60676 |
| 2161 | 0.003175 | 0.019186 | 0.58493 |
| 2162 | 0.003073 | 0.018774 | 0.676172 |
| 2163 | 0.003213 | 0.026017 | 0.717037 |
| 2164 | 0.003146 | 0.019228 | 0.629069 |
| 2165 | 0.003177 | 0.019712 | 0.651398 |
| 2166 | 0.015226 | 0.067595 | 0.77104 |
| 2168 | 0.003259 | 0.019199 | 0.709717 |
| 2169 | 0.003096 | 0.019088 | 0.552215 |
| 2170 | 0.003193 | 0.019073 | 0.843088 |
| 2171 | 0.003203 | 0.018715 | 0.663203 |
| 2173 | 0.003078 | 0.018872 | 0.596725 |
| 2174 | 0.003215 | 0.019295 | 0.586757 |
| 2175 | 0.003355 | 0.020379 | 0.591717 |
| 2176 | 0.00331 | 0.020075 | 0.621581 |
| 2178 | 0.003288 | 0.019762 | 0.563754 |
| 2179 | 0.023311 | 0.108889 | 0.634632 |
| 2180 | 0.003154 | 0.018821 | 0.582331 |
| 2181 | 0.003174 | 0.019114 | 0.467664 |
| 2182 | 0.003295 | 0.019446 | 0.780908 |
| 2183 | 0.003253 | 0.01977 | 0.567795 |
| 2184 | 0.003242 | 0.020002 | 0.791142 |
| 2185 | 0.003168 | 0.019575 | 0.775637 |
| 2186 | 0.003096 | 0.018948 | 0.568767 |
| 2187 | 0.003259 | 0.019195 | 0.523207 |
| 2188 | 0.003153 | 0.019022 | 0.565014 |
| 2189 | 0.003154 | 0.019989 | 0.535538 |
| 2190 | 0.003524 | 0.019646 | 0.64781 |
| 2191 | 0.004391 | 0.020707 | 0.675903 |
| 2192 | 0.00296 | 0.020679 | 0.695385 |
| 2193 | 0.00312 | 0.019868 | 0.56865 |
| 2194 | 0.003186 | 0.020148 | 0.67523 |
| 2195 | 0.003131 | 0.019043 | 0.529032 |
| 2196 | 0.003166 | 0.020125 | 0.702299 |
| 2197 | 0.003391 | 0.019802 | 0.716997 |
| 2198 | 0.007135 | 0.025543 | 0.647545 |
| 2200 | 0.006172 | 0.047972 | 0.218144 |
| 2201 | 0.006242 | 0.04465 | 0.132477 |
| 2202 | 0.00613 | 0.045688 | 0.181752 |
| 2203 | 0.006068 | 0.046964 | 0.152828 |
| 2204 | 0.005921 | 0.046084 | 0.14141 |
| 2205 | 0.006157 | 0.046238 | 0.191263 |
| 2206 | 0.006136 | 0.046016 | 0.190921 |
| 2207 | 0.005964 | 0.047186 | 0.153246 |
| 2208 | 0.006177 | 0.047117 | 0.155879 |
| 2210 | 0.006352 | 0.043635 | 0.146858 |
| 2211 | 0.006108 | 0.044772 | 0.155641 |
| 2212 | 0.006024 | 0.045543 | 0.142517 |
| 2213 | 0.005939 | 0.046344 | 0.143164 |
| 2214 | 0.006222 | 0.04614 | 0.192484 |
| 2215 | 0.006083 | 0.047678 | 0.16743 |
| 2216 | 0.006163 | 0.053998 | 0.13437 |
| 2217 | 0.006135 | 0.045467 | 0.137485 |
| 2218 | 0.006112 | 0.046402 | 0.156384 |
| 2219 | 0.006181 | 0.046612 | 0.162334 |
| 2220 | 0.006096 | 0.050543 | 0.162733 |
| 2221 | 0.006186 | 0.047334 | 0.152158 |
| 2222 | 0.006075 | 0.047502 | 0.194765 |
| 2223 | 0.006029 | 0.046467 | 0.137691 |
| 2224 | 0.006314 | 0.055065 | 0.20807 |
| 2226 | 0.006294 | 0.045913 | 0.209723 |
| 2227 | 0.006684 | 0.046979 | 0.190792 |
| 2228 | 0.006095 | 0.04607 | 0.165137 |
| 2229 | 0.006403 | 0.052747 | 0.16783 |
| 2231 | 0.006318 | 0.047325 | 0.120074 |
| 2232 | 0.006136 | 0.047645 | 0.154048 |
| 2233 | 0.008079 | 0.057783 | 0.168608 |
| 2234 | 0.006343 | 0.048289 | 0.130913 |
| 2238 | 0.006235 | 0.046307 | 0.168547 |
| 2239 | 0.006246 | 0.046488 | 0.140553 |
| 2241 | 0.006379 | 0.054148 | 0.24124 |
| 2242 | 0.006455 | 0.047961 | 0.131922 |
| 2243 | 0.006337 | 0.046456 | 0.186051 |
| 2244 | 0.006203 | 0.045602 | 0.125512 |
| 2245 | 0.006499 | 0.057369 | 0.154019 |
| 2246 | 0.006248 | 0.056398 | 0.149261 |
| 2247 | 0.006307 | 0.046397 | 0.228139 |
| 2248 | 0.006168 | 0.047874 | 0.112137 |
| 2249 | 0.006196 | 0.046805 | 0.155686 |
| 2250 | 0.00895 | 0.054401 | 0.183022 |
| 2251 | 0.00639 | 0.045554 | 0.169424 |
| 2252 | 0.006125 | 0.046755 | 0.150411 |
| 2253 | 0.00622 | 0.053633 | 0.191924 |
| 2254 | 0.006108 | 0.046631 | 0.13209 |
| 2255 | 0.00633 | 0.04723 | 0.135853 |
| 2256 | 0.006144 | 0.061456 | 0.112837 |
| 2257 | 0.006404 | 0.047664 | 0.179404 |
| 2258 | 0.00629 | 0.04559 | 0.115119 |
| 2259 | 0.006517 | 0.047495 | 0.139756 |
| 2260 | 0.006178 | 0.046241 | 0.166521 |
| 2261 | 0.006256 | 0.047309 | 0.21795 |
| 2262 | 0.006307 | 0.046961 | 0.155011 |
| 2263 | 0.006309 | 0.046877 | 0.215311 |
| 2264 | 0.00632 | 0.047891 | 0.153035 |
| 2265 | 0.006283 | 0.058641 | 0.211202 |
| 2266 | 0.006381 | 0.047328 | 0.134896 |
| 2267 | 0.006567 | 0.045783 | 0.135634 |
| 2269 | 0.006447 | 0.046908 | 0.133405 |
| 2270 | 0.006417 | 0.04824 | 0.139725 |
| 2271 | 0.00618 | 0.046553 | 0.166047 |
| 2272 | 0.006225 | 0.047393 | 0.160067 |
| 2273 | 0.006276 | 0.047685 | 0.170297 |
| 2274 | 0.00624 | 0.04688 | 0.198238 |
| 2275 | 0.006534 | 0.046315 | 0.157348 |
| 2276 | 0.007069 | 0.047997 | 0.152782 |
| 2277 | 0.009026 | 0.05061 | 0.196609 |
| 2278 | 0.014832 | 0.067865 | 0.14616 |
| 2279 | 0.006428 | 0.046196 | 0.131052 |
| 2280 | 0.006224 | 0.046989 | 0.145311 |
| 2281 | 0.006154 | 0.047328 | 0.14968 |
| 2282 | 0.006248 | 0.046031 | 0.150055 |
| 2283 | 0.006174 | 0.047343 | 0.163964 |
| 2284 | 0.008235 | 0.4302 | 0.20482 |
| 2285 | 1.795726 | 2.705619 | 0.273225 |
| 2286 | 0.008775 | 0.050342 | 0.1587 |
| 2287 | 0.00631 | 0.047599 | 0.134257 |
| 2288 | 0.006544 | 0.046959 | 0.161388 |
| 2289 | 0.008183 | 0.050593 | 0.141202 |
| 2290 | 0.006064 | 0.048815 | 0.175503 |
| 2291 | 0.00618 | 0.046271 | 0.152712 |
| 2292 | 0.007016 | 0.048265 | 0.181027 |
| 2293 | 0.008176 | 0.049316 | 0.164933 |
| 2294 | 0.006486 | 0.048746 | 0.152462 |
| 2295 | 0.006359 | 0.047944 | 0.131901 |
| 2296 | 0.00722 | 0.04902 | 0.134938 |
| 2299 | 0.001841 | 0.021836 | 0.688111 |
| 2300 | 0.086641 | 0.166328 | 0.690494 |
| 2301 | 0.001849 | 0.020911 | 0.564046 |
| 2302 | 0.001837 | 0.020036 | 0.674931 |
| 2303 | 0.001843 | 0.020641 | 0.808588 |
| 2304 | 0.001836 | 0.020295 | 0.58194 |
| 2305 | 0.001822 | 0.020215 | 0.654307 |
| 2306 | 0.002438 | 0.022581 | 0.736907 |
| 2307 | 0.00178 | 0.021066 | 0.620358 |
| 2308 | 0.001832 | 0.020095 | 0.668554 |
| 2309 | 0.00178 | 0.019898 | 0.763666 |
| 2310 | 0.003472 | 0.020626 | 0.667713 |
| 2311 | 0.001796 | 0.019725 | 0.588065 |
| 2312 | 0.001799 | 0.020161 | 0.680887 |
| 2313 | 0.001785 | 0.020109 | 0.751756 |
| 2314 | 0.001785 | 0.020767 | 0.734117 |
| 2315 | 0.001731 | 0.021027 | 0.575685 |
| 2316 | 0.001777 | 0.020545 | 0.621465 |
| 2317 | 0.001726 | 0.020462 | 0.635235 |
| 2319 | 0.001783 | 0.019558 | 0.623992 |
| 2320 | 0.001783 | 0.019848 | 0.456169 |
| 2321 | 0.001819 | 0.019947 | 0.557319 |
| 2322 | 0.001816 | 0.020314 | 0.849308 |
| 2323 | 0.001812 | 0.021185 | 0.5437 |
| 2324 | 0.002117 | 0.021167 | 0.623834 |
| 2325 | 0.001774 | 0.020086 | 0.705615 |
| 2326 | 0.001762 | 0.020397 | 0.609166 |
| 2327 | 0.001838 | 0.019555 | 0.516895 |
| 2328 | 0.001819 | 0.019407 | 0.566088 |
| 2329 | 0.001846 | 0.020255 | 0.675583 |
| 2330 | 0.001822 | 0.020372 | 0.658319 |
| 2331 | 0.00183 | 0.020907 | 0.712729 |
| 2332 | 0.001716 | 0.020645 | 0.633101 |
| 2333 | 0.001761 | 0.020053 | 0.496843 |
| 2334 | 0.001795 | 0.020116 | 0.470328 |
| 2335 | 0.001973 | 0.019994 | 0.69908 |
| 2336 | 0.002355 | 0.021316 | 0.639826 |
| 2337 | 0.002071 | 0.019995 | 0.717695 |
| 2338 | 0.003361 | 0.022952 | 0.608106 |
| 2339 | 0.002512 | 0.022295 | 0.934816 |
| 2340 | 0.001872 | 0.02124 | 0.653365 |
| 2341 | 0.001758 | 0.020188 | 0.628362 |
| 2342 | 0.00179 | 0.020031 | 0.430364 |
| 2343 | 0.00225 | 0.021727 | 0.620708 |
| 2344 | 0.487092 | 1.242389 | 0.705218 |
| 2346 | 0.62511 | 0.991799 | 0.755326 |
| 2347 | 0.007601 | 0.031311 | 0.516649 |
| 2348 | 0.003801 | 0.024391 | 0.44802 |
| 2349 | 0.001763 | 0.020418 | 0.710152 |
| 2352 | 0.001967 | 0.020354 | 0.674644 |
| 2353 | 0.002343 | 0.020885 | 0.451139 |
| 2354 | 0.005892 | 0.03064 | 0.7194 |
| 2355 | 0.002628 | 0.021243 | 0.487594 |
| 2356 | 0.002016 | 0.021037 | 0.615679 |
| 2357 | 0.002143 | 0.021701 | 0.386956 |
| 2358 | 0.00212 | 0.021198 | 0.829166 |
| 2359 | 0.001791 | 0.020172 | 0.544619 |
| 2360 | 0.001856 | 0.020163 | 0.486583 |
| 2361 | 0.001901 | 0.019958 | 0.530139 |
| 2362 | 0.001879 | 0.020308 | 0.653006 |
| 2363 | 0.001922 | 0.020067 | 0.590144 |
| 2364 | 0.001837 | 0.02092 | 0.592571 |
| 2365 | 0.001792 | 0.020929 | 0.551517 |
| 2366 | 0.001791 | 0.020276 | 0.562391 |
| 2367 | 0.001762 | 0.020237 | 0.490932 |
| 2368 | 0.001774 | 0.019958 | 0.581639 |
| 2369 | 0.002441 | 0.023886 | 0.442913 |
| 2370 | 0.001851 | 0.019744 | 0.597586 |
| 2371 | 0.001833 | 0.019874 | 0.780994 |
| 2372 | 0.001836 | 0.020828 | 0.624654 |
| 2373 | 0.002203 | 0.0221 | 0.648313 |
| 2374 | 0.001781 | 0.02029 | 0.477161 |
| 2375 | 0.001758 | 0.019773 | 0.487119 |
| 2376 | 0.001766 | 0.019771 | 0.526721 |
| 2377 | 0.001848 | 0.019724 | 0.617253 |
| 2379 | 0.001845 | 0.020022 | 0.490031 |
| 2380 | 0.001881 | 0.020903 | 0.584369 |
| 2381 | 0.329765 | 0.386006 | 0.504277 |
| 2382 | 0.002171 | 0.020794 | 0.601362 |
| 2383 | 0.001822 | 0.020056 | 0.529306 |
| 2384 | 0.001781 | 0.019899 | 0.518998 |
| 2385 | 0.002162 | 0.020271 | 0.525008 |
| 2386 | 0.001834 | 0.019886 | 0.548855 |
| 2387 | 0.002131 | 0.020496 | 0.494099 |
| 2388 | 0.002937 | 0.022063 | 0.622276 |
| 2390 | 0.001843 | 0.021049 | 0.592485 |
| 2392 | 0.001773 | 0.020597 | 0.495091 |
| 2394 | 0.001773 | 0.020237 | 0.601764 |
| 2395 | 0.001806 | 0.020086 | 0.558798 |
| 2396 | 0.001807 | 0.02021 | 0.456341 |
| 2397 | 0.002983 | 0.022137 | 0.664263 |
| 2399 | 0.002032 | 0.028561 | 0.419347 |
| 2400 | 0.001953 | 0.02732 | 0.539873 |
| 2401 | 0.001912 | 0.027274 | 0.638418 |
| 2402 | 0.001914 | 0.026898 | 0.523509 |
| 2403 | 0.001954 | 0.027389 | 0.678695 |
| 2404 | 0.001977 | 0.027124 | 0.765805 |
| 2405 | 0.00211 | 0.030541 | 0.701647 |
| 2406 | 0.00247 | 0.029078 | 0.813564 |
| 2407 | 0.002076 | 0.027414 | 0.698683 |
| 2408 | 0.001925 | 0.028973 | 0.656613 |
| 2409 | 0.002188 | 0.027465 | 0.541032 |
| 2410 | 0.001926 | 0.025909 | 0.545951 |
| 2411 | 0.00194 | 0.026781 | 0.754864 |
| 2412 | 0.00382 | 0.039591 | 0.762652 |
| 2413 | 0.002162 | 0.027084 | 0.685745 |
| 2414 | 0.002494 | 0.029168 | 0.594618 |
| 2415 | 0.002268 | 0.029022 | 0.768169 |
| 2416 | 0.001922 | 0.026555 | 0.470209 |
| 2417 | 0.002127 | 0.027122 | 0.636734 |
| 2418 | 0.001951 | 0.026994 | 0.650385 |
| 2419 | 0.001945 | 0.027143 | 0.883213 |
| 2420 | 0.002209 | 0.02794 | 0.572425 |
| 2421 | 0.003578 | 0.031521 | 0.65348 |
| 2422 | 0.4597 | 1.118984 | 0.742345 |
| 2423 | 0.002036 | 0.027481 | 0.594989 |
| 2424 | 0.001912 | 0.026795 | 0.566853 |
| 2425 | 0.002128 | 0.027336 | 0.616199 |
| 2426 | 0.004274 | 0.035029 | 0.701308 |
| 2427 | 0.002039 | 0.026637 | 0.688343 |
| 2428 | 0.002025 | 0.026834 | 0.482521 |
| 2430 | 0.002201 | 0.027234 | 0.454862 |
| 2431 | 0.002645 | 0.028863 | 0.606143 |
| 2432 | 0.002137 | 0.027883 | 0.73667 |
| 2433 | 0.001911 | 0.026777 | 0.764379 |
| 2434 | 0.002656 | 0.031144 | 0.654025 |
| 2435 | 0.357958 | 1.054187 | 0.789014 |
| 2436 | 0.002408 | 0.027834 | 0.652141 |
| 2437 | 0.002128 | 0.029482 | 0.589591 |
| 2438 | 0.002046 | 0.027328 | 0.6305 |
| 2439 | 0.002126 | 0.027527 | 0.702897 |
| 2441 | 0.001931 | 0.027353 | 0.554509 |
| 2442 | 0.00194 | 0.026835 | 0.748374 |
| 2443 | 0.00206 | 0.027504 | 0.580563 |
| 2444 | 0.002454 | 0.030028 | 0.562538 |
| 2445 | 0.002479 | 0.027979 | 0.691218 |
| 2446 | 0.002005 | 0.026464 | 0.592756 |
| 2447 | 0.00209 | 0.02736 | 0.67768 |
| 2448 | 0.00215 | 0.027489 | 0.746934 |
| 2449 | 0.001919 | 0.027314 | 0.63539 |
| 2450 | 0.001947 | 0.026788 | 0.971937 |
| 2451 | 0.002047 | 0.027081 | 0.714018 |
| 2452 | 0.00199 | 0.026765 | 0.687724 |
| 2453 | 0.002001 | 0.026884 | 0.675106 |
| 2454 | 0.002043 | 0.026814 | 0.578459 |
| 2455 | 0.002485 | 0.027898 | 0.62214 |
| 2456 | 0.003114 | 0.03194 | 0.536157 |
| 2457 | 0.002044 | 0.028064 | 0.672813 |
| 2458 | 0.015881 | 0.100316 | 0.627601 |
| 2460 | 0.00195 | 0.026811 | 0.61264 |
| 2461 | 0.001936 | 0.027321 | 0.614411 |
| 2462 | 0.001952 | 0.026879 | 0.570422 |
| 2463 | 0.001996 | 0.026846 | 0.724248 |
| 2464 | 0.003014 | 0.029551 | 0.681079 |
| 2465 | 0.851106 | 1.519622 | 0.556387 |
| 2466 | 0.001875 | 0.027585 | 0.573732 |
| 2467 | 0.001914 | 0.026865 | 0.584638 |
| 2468 | 0.001951 | 0.026667 | 0.76513 |
| 2469 | 0.001935 | 0.026646 | 0.483364 |
| 2470 | 0.001927 | 0.027128 | 0.708523 |
| 2471 | 0.002115 | 0.027369 | 0.645251 |
| 2472 | 0.002277 | 0.02739 | 0.83229 |
| 2473 | 0.003074 | 0.029112 | 0.868278 |
| 2474 | 0.001898 | 0.031517 | 0.628315 |
| 2475 | 0.001888 | 0.025737 | 0.488711 |
| 2476 | 0.001895 | 0.026321 | 0.539154 |
| 2477 | 0.001942 | 0.02957 | 0.540224 |
| 2478 | 0.001972 | 0.026698 | 0.560129 |
| 2479 | 0.002055 | 0.026361 | 0.588692 |
| 2480 | 0.002449 | 0.029257 | 0.564031 |
| 2481 | 0.002188 | 0.027339 | 0.617131 |
| 2482 | 0.001929 | 0.027532 | 0.647844 |
| 2483 | 0.001901 | 0.026611 | 0.505461 |
| 2484 | 0.001911 | 0.026331 | 0.632902 |
| 2485 | 0.001935 | 0.026733 | 0.781338 |
| 2486 | 0.00232 | 0.028127 | 0.762296 |
| 2487 | 0.002045 | 0.029716 | 0.555858 |
| 2488 | 0.002322 | 0.027239 | 0.655834 |
| 2489 | 0.003042 | 0.02839 | 0.619313 |
| 2490 | 0.001901 | 0.027794 | 0.675581 |
| 2491 | 0.001867 | 0.026896 | 0.63697 |
| 2492 | 0.001957 | 0.027113 | 0.720652 |
| 2493 | 0.00211 | 0.02692 | 0.928346 |
| 2494 | 0.001976 | 0.02681 | 0.505157 |
| 2496 | 0.005512 | 0.03457 | 0.661025 |
| 2498 | 0.001855 | 0.021094 | 1.26703 |
| 2499 | 0.001794 | 0.019382 | 1.205979 |
| 2500 | 0.001798 | 0.019209 | 1.194211 |
| 2501 | 0.001855 | 0.019647 | 1.175705 |
| 2502 | 0.001805 | 0.01951 | 1.05585 |
| 2503 | 0.001854 | 0.01969 | 0.740211 |
| 2504 | 0.001802 | 0.019108 | 1.169167 |
| 2505 | 0.001803 | 0.020364 | 1.044078 |
| 2507 | 0.001816 | 0.019238 | 0.826173 |
| 2508 | 0.0018 | 0.019457 | 0.747832 |
| 2509 | 0.001814 | 0.018725 | 0.764182 |
| 2510 | 0.001788 | 0.018705 | 0.961773 |
| 2511 | 0.001811 | 0.019187 | 1.002978 |
| 2512 | 0.00184 | 0.019337 | 0.951505 |
| 2513 | 0.001795 | 0.0198 | 0.784969 |
| 2514 | 0.001806 | 0.019423 | 1.155331 |
| 2515 | 0.001819 | 0.019277 | 0.899568 |
| 2516 | 0.001783 | 0.018727 | 0.906725 |
| 2517 | 0.001767 | 0.018491 | 1.156806 |
| 2518 | 0.001826 | 0.018843 | 0.984126 |
| 2519 | 0.001827 | 0.018971 | 1.106655 |
| 2520 | 0.001856 | 0.019129 | 0.981249 |
| 2521 | 0.001863 | 0.019361 | 0.815735 |
| 2522 | 0.001753 | 0.019788 | 0.683346 |
| 2523 | 0.00179 | 0.018958 | 0.763397 |
| 2524 | 0.001774 | 0.019189 | 0.99147 |
| 2525 | 0.001796 | 0.019005 | 1.173316 |
| 2526 | 0.00239 | 0.022053 | 0.703461 |
| 2527 | 0.001839 | 0.018912 | 0.926152 |
| 2528 | 0.002235 | 0.020166 | 0.849943 |
| 2529 | 0.001833 | 0.019542 | 1.169762 |
| 2531 | 0.001757 | 0.019516 | 0.804991 |
| 2532 | 0.001791 | 0.019332 | 0.97138 |
| 2533 | 0.00183 | 0.018744 | 0.932083 |
| 2534 | 0.001829 | 0.018966 | 0.603137 |
| 2535 | 0.001825 | 0.019067 | 0.775401 |
| 2536 | 0.001839 | 0.019239 | 1.005791 |
| 2537 | 0.001837 | 0.019027 | 0.742716 |
| 2538 | 0.00184 | 0.019119 | 1.025351 |
| 2539 | 0.001786 | 0.019252 | 1.038877 |
| 2540 | 0.001818 | 0.019031 | 1.121716 |
| 2541 | 0.001778 | 0.018762 | 0.803414 |
| 2542 | 0.00183 | 0.01897 | 0.935541 |
| 2543 | 0.001856 | 0.018641 | 0.779233 |
| 2544 | 0.001832 | 0.018997 | 0.936523 |
| 2545 | 0.001818 | 0.019351 | 0.785605 |
| 2546 | 0.001855 | 0.019618 | 1.078452 |
| 2547 | 0.001753 | 0.019425 | 0.952274 |
| 2548 | 0.001801 | 0.019016 | 0.883621 |
| 2549 | 0.001932 | 0.019884 | 0.963362 |
| 2550 | 0.001852 | 0.019493 | 0.756811 |
| 2551 | 0.001811 | 0.018994 | 0.735339 |
| 2552 | 0.001829 | 0.018641 | 0.751335 |
| 2553 | 0.001842 | 0.019264 | 0.734602 |
| 2555 | 0.001803 | 0.019524 | 0.791215 |
| 2556 | 0.001808 | 0.019326 | 1.234156 |
| 2557 | 0.001817 | 0.019034 | 0.844118 |
| 2559 | 0.0018 | 0.019361 | 0.832718 |
| 2560 | 0.001849 | 0.018958 | 1.108257 |
| 2561 | 0.001875 | 0.019191 | 0.924327 |
| 2562 | 0.00183 | 0.019757 | 0.913942 |
| 2563 | 0.001766 | 0.019449 | 1.039711 |
| 2564 | 0.001761 | 0.019642 | 0.975257 |
| 2565 | 0.001822 | 0.018907 | 0.875283 |
| 2566 | 0.001827 | 0.018953 | 0.804406 |
| 2567 | 0.00182 | 0.01881 | 0.84509 |
| 2568 | 0.001815 | 0.018919 | 0.949194 |
| 2569 | 0.00187 | 0.018963 | 0.839079 |
| 2570 | 0.001859 | 0.019606 | 0.843373 |
| 2571 | 0.001771 | 0.019425 | 0.664874 |
| 2572 | 0.001861 | 0.019316 | 0.807564 |
| 2573 | 0.001825 | 0.018896 | 1.142032 |
| 2574 | 0.001799 | 0.018916 | 0.733867 |
| 2575 | 0.001848 | 0.018948 | 0.764302 |
| 2576 | 0.001862 | 0.0189 | 0.934422 |
| 2578 | 0.001938 | 0.019715 | 0.942217 |
| 2579 | 0.001762 | 0.019242 | 0.986229 |
| 2580 | 0.001771 | 0.01972 | 0.75995 |
| 2581 | 0.001846 | 0.019138 | 0.813534 |
| 2582 | 0.001812 | 0.018893 | 1.03767 |
| 2583 | 0.001829 | 0.019116 | 0.974132 |
| 2584 | 0.001881 | 0.019667 | 0.850391 |
| 2585 | 0.002575 | 0.020133 | 1.050868 |
| 2586 | 0.002919 | 0.020784 | 0.982573 |
| 2587 | 0.001816 | 0.019662 | 0.675518 |
| 2588 | 0.001816 | 0.019437 | 0.754413 |
| 2589 | 0.001844 | 0.01968 | 0.725135 |
| 2590 | 0.00185 | 0.020018 | 0.754455 |
| 2591 | 0.001831 | 0.019558 | 0.900126 |
| 2593 | 0.001894 | 0.019772 | 0.853028 |
| 2594 | 0.003467 | 0.021701 | 0.877 |

### Example 94

Expression of CD19-41BBζ, CD19-CD28ζ, HER2-41BBζ or HER2-CD28C chimeric antigen Receptors (CARs) Following In Vitro Administration of Circular RNAs Encoding Said CARs

[1699] Human T cells from three unique T cells donors were activated with anti-CD3 or CD28 for three days and set to rest for 24 hours. Engineered circular RNA (oRNA) encoding CD19-41BBζ, CD19-CD28ζ, HER2-41BBζ, or HER2-CD28ζ chimeric antigen receptors (CARs) were electroporated into the human T cells. 24 hours post transfection CAR expression for each of the CARs were measured using fluorescence-activated cell sorting (FACS).

[1700] As seen in FIGS. 102A and 102B, the circular RNA constructs were able to express CAR for each of the different CAR constructs.

### Example 95

### Lysis of Tumor Cells Following In Vitro Transfection of CD19-41BBζ and CD19-CD28ζ Chimeric Antigen Receptors (CARs) and Cytokine Production

[1701] Human T cells were activated with anti-CD3 or CD28 for three days and rested for 24 hours. The cells were then transfected with circular RNAs encoding for mOX40L (positive control), CD19-41BBζ, CD19-CD28ζ, HER2-41BBζ, orHER2-CD28ζ chimeric antigen receptors (CARs) via electroporation. 24 hours post-electroporation, said T cells were cocultured with Nalm6 tumor cells at a 1:1 effector to target (E:T) ratio. Nalm6 killing was measured 24 hours following coculturing of the human T cells with the Nalm6 tumor cells. Coculture supernatants were collect and analyzed using Meso Scale Discovery (MSD) (Agilent Technologies, Santa Clara, CA) for IFN-g and IL-2 expression.

[1702] As seen in FIG. 103A, CD19-41BBζ and CD19-CD28ζ encoding circular RNAs surpassed tumor cell killing to the positive control, mOX40L circular RNAs, and even surpassed HER2-41BBζ and HER2-CD28ζ. The circRNAs encoding CD19-BBζ and CD19-28ζ also surpassed the IFN-g and IL-2 cytokine compared to the circRNAs encoding HER2-41BBζ, HER2-CD28ζ, or mOX40L (FIG. 103B and FIG. 103C). Antigen specific killing was observed at 1:3 effector to target (E:T) ratio following transfection of the circRNAs.

### Example 96

mOx40L Expression in Blood and Splenic Human T Cells of Humanized Mice Following Intravenous Administration of LNP-circRNA Encoding mOX40L

[1703] NOG mice (1E7 Mouse Hybridoma) were engrafted with human peripheral blood mononuclear cells (hPBMC). 3 weeks later the mice were treated with a single intravenous dose of LNP encapsulating circular RNAs encoding mOx40L at 2 mg/kg. LNP were formulated with ionizable lipid 10b-15 (Table 10b, Lipid 15), 10a-27 (Table 10a, Lipid 27), or 10a-26 (Table 10a, Lipid 26). 24 hours following intravenous administration, splenocytes and peripheral blood cells were isolated and analyzed for T cell expression of mOX40L.

[1704] As seen in FIGS. 104A and 104B, mOX40L was detected in the human T cells of the humanized mice's spleen and peripheral blood for each of the LNP constructs. Expression was higher for all three constructs in the spleen.

### Example 97

### B Cell Aplasia in the Spleen of Humanized Mice Following Intravenous Administration of LNP-circRNA Construct Encoding for an Anti-CD19 CAR

[1705] NOG mice (1E7 Mouse Hybridoma) were engrafted with human peripheral blood mononuclear cells (hPBMC) at 50-60% human engraftment in total. 3 weeks after engraftment, the mice were treated with a single dose of LNPs encapsulating circular RNA encoding anti-CD19 CAR or IXPBS (negative control) at 2 mg/kg. Six days post dosing, splenocytes were isolated and analyzed for the presence of B cells via CD19 expression.

[1706] As seen in FIG. 105, B cell aplasia was present in the humanized mice when comparing the splenocytes of the mice receiving LNP-circRNA constructs (the left of FIG. 105) compared to the splenocytes of the mice receiving the negative control (the right of FIG. 105).

### Example 98

### Nalm6 Killing Following In Vitro Administration of Circular RNA Constructs Encoding Different CARs

[1707] T cells were activated with anti-CD3 or anti-CD28 for three days and rested for 24 hours. The cells were then treated with LNP-circRNAs encoding mOX40L (positive control), CD19-41BBζ, CD19-CD28ζ, HER2-41BBζ, or HER2-CD28ζ chimeric antigen receptors (CARs). LNPs were formulated using ionizable lipid 10b-15 (Table 10b, Lipid 15). Expression of the CARs was measured by fluorescence-activated cell sorting (FACS) to measure the mean fluorescence activity (MFI). T cells were then cocultured with Nalm6 tumor cells. Nalm6 killing was measured the following day.

[1708] 48 hours after co-culturing the T cells with the Nalm6 cells, the effector to target (E:T) ratio was 1:5. As seen in FIG. 106A, percent killing of the Nalm6 tumor cells post administration of the LNP-circRNA constructs was significantly greater for the constructs encoding CD19-CD28ζ or CD19-41BBζ compared to the constructs encoding HER2-41BBζ, HER2-CD28ζ, or mOX40L (the positive control). FIG. 106B illustrates that circRNAs encoding CD19-28ζ CARs has a greater killing of Nalm6 cells than circRNAs encoding CD19-BBζ CARs.

### Example 99

[1709] 1E6 (Nalm6-Luc) cells were engrafted into NSG mice. 3 days later, CD3/CD28 treated hPBMCs were engrafted ex vivo. 24 hours post engraftment, the mice were dosed via in vivo administration with LNP encapsulating circular RNA constructs (circular RNAs encoded either CD19-41BBζ CARs, CD19-CD28ζ CARs, HER2-41BBζ CARs, HER2-CD28ζ CARs or mOX40L (positive control)) or PBS (negative control 1) or PBMC (negative control 2)) at 2 mg/kg. All of the LNPs were formulated with ionizable lipid 10b-15 (Table 10b, Lipid 15). The mice were dosed every other day for a total of 5 doses. Nalm6 tumor burden over time was quantified using IVIS imaging.

[1710] As seen in FIG. 107, LNPs formulated with CD19-CD28(CARs are more effective in tumor regression than the other CAR or controls (positive or negative).

### Example 100

[1711] Roughly 3,000 potential internal ribosome entry site (IRES) sequence candidates were computationally identified from viral untranslated regions in partial and complete viral sequences available in the art (e.g., Genbank). Each DNA template was cloned to include an IRES sequence selected from SEQ ID NOs: SEQ ID NOs: 1-2983 and 3282-3287 or a fragment thereof. Exemplary constructs included a 5′ enhanced intron element, a 5′ enhanced exon element, a putative IRES, a coding element encoding Gaussia Luciferase, a 3′ enhanced exon element, and a 3′ enhanced intron element. Engineered circular RNA (oRNA) was generated from the DNA template by in vitro transcription (IVT); and oRNA was subsequently purified from non-circular RNA components of the IVT reaction.

[1712] Purified oRNA was nanoprecipitated with lipids to form LNP-oRNA constructs. LNPs were formulated first by creating empty lipid nanoparticles using a Precision Nanosystems Ignite instrument with a “NextGen” mixing chamber. Ethanol phase contained Lipid 39 from Table 10b, DSPC, cholesterol, and DMG-PEG 2000 (Avanti Polar Lipids, Inc., Alabaster, AL) at a molar ratio of 45:9:44:2 was combined with 50 mM sodium acetate buffer at pH 4.5. A 3:1 aqueous to ethanol mixing ratio was used. The empty LNPs were then dialyzed in 1 L of 1×PBS and exchanged 2 times over 18 hours. Dialyzed empty LNPs were then mixed with a final circular RNA concentration of 40 μg/mL in 50 mM sodium acetate buffer at pH 4.5. A 3:1 aqueous to empty lipid nanoparticle mixing ratio was used. The LNPs final ionizable lipid to RNA phosphate ratio was at 6.0.

[1713] Primary human skeletal myotubes (MYOs), primary human hepatocytes (PHHs), and activated primary human T cells (TCLs) were treated with formulated LNP-oRNA in triplicate. Protein expression in supernatant was assessed by luminescence measurements 48 hours following transfection.

[1714] Total luminescent signal was normalized across replicate plates to control for plate-wide differences between replicates due to flash assay readout timing. Plates with positive controls having <2× signal over background were excluded from analysis. Background was subtracted based on empty wells. Each test well replicate was normalized to its respective plate control and then the replicates were averaged.

[1715] Table 28 provides the protein expression and stability measurements for the screening. Measured numbers are normalized to a control (caprine kobuvirus IRES, SEQ ID NO: 3282) and represented as a fold change.

[1716] The protein expression data (Table 28) may be further analyzed to identify, e.g., IRESs suitable for protein expression with desired expression levels in certain cell types. For example, IRES sequences were assigned to genus or species in accordance with NCBI's taxonomy database. Some sequences remained unclassified at variable levels of hierarchy. The following analyses were performed:
[1717] Mean expression by taxonomic grouping was assessed to determine taxonomic groupings wherein significant expression can be expected (>10% of the control). The following table summarizes the identified virus genus and the number of IREs within the genus that meet the selection criteria.

| MYO | | PPH | | TCL | |
|---|---|---|---|---|---|
| | No. of | | No. of | | No. of |
| Genus | IRESs | Genus | IRESs | Genus | IRESs |
| Bopivirus | 3 | Enterovirus | 690 | Passerivirus | 3 |
| Oscivirus | 4 | Bopivirus | 3 | Bopivirus | 3 |
| Hunnivirus | 6 | Mischivirus | 4 | Hunnivirus | 6 |
| Passerivirus | 3 | Gallivirus | 2 | Mischivirus | 4 |
| Mischivirus | 4 | Oscivirus | 4 | Enterovirus | 690 |
| Kobuvirus | 130 | Cardiovirus | 35 | Kobuvirus | 130 |
| Enterovirus | 690 | Kobuvirus | 130 | Rabovirus | 2 |
| Cardiovirus | 35 | Rabovirus | 2 | Tottorivirus | 1 |
| Salivirus | 14 | Salivirus | 14 | Salivirus | 14 |
| Rabovirus | 2 | Unclassified | 3 | Cardiovirus | 35 |
| | | Caliciviridae | | | |
| Unclassified | 3 | Parechovirus | 76 | Parechovirus | 76 |
| Caliciviridae | | | | | |
| Parechovirus | 76 | Hunnivirus | 6 | Unclassified | 9 |
| | | | | vectors | |
| Gallivirus | 2 | Tottorivirus | 1 | Megrivirus | 17 |
| Sicinivirus | 10 | unclassified | 23 | Allexivirus | 1 |
| | | Passerivirus | 3 | unclassified | 23 |
| | | Cosavirus | 10 | Oscivirus | 4 |
| | | Sicinivirus | 10 | Shanbavirus | 4 |
| | | Unclassified | 9 | | |
| | | vectors | | | |

[1718] Mean expression within the 90^{th} percentile of a taxonomic grouping was assessed to determine taxonomic groupings that contain the highest activity IRES elements on average. The following table summarizes the identified virus genus and the number of IREs within the genus that meet the selection criteria.

| MYO | | PPH | | TCL | |
|---|---|---|---|---|---|
| | No. of | | No. of | | No. of |
| Genus | IRESs | Genus | IRESs | Genus | IRESs |
| Hunnivirus | 6 | Enterovirus | 690 | Passerivirus | 3 |
| Passerivirus | 3 | Mischivirus | 4 | Hunnivirus | 6 |
| Kobuvirus | 130 | Kobuvirus | 130 | Mischivirus | 4 |
| Bopivirus | 3 | Bopivirus | 3 | Enterovirus | 690 |
| Enterovirus | 690 | Gallivirus | 2 | Kobuvirus | 130 |

[1719] Species-level taxonomic analyses were conducted for genera with more than 30 species represented in the screen and mean expression >10% of positive control: Enterovirus, Kobuvirus, Parechovirus, Cardiovirus. Mean expression within the 90th percentile was assessed. The following table summarizes the identified virus species and the number of IREs within the species that meet the selection criteria.

| | | | | | | | |
|---|---|---|---|---|---|---|---|
| Enterovirus | No. of | Kobuvirus | No. of | Parechovirus | No. of | Cardiovirus | No. of |
| Species | IRESs | Species | IRESs | Species | IRESs | Species | IRESs |

MYO

| | | | | | | | |
|---|---|---|---|---|---|---|---|
| Enterovirus I | 1 | Aichivirus B | 8 | Parechovirus A | 48 | Cardiovirus F | 1 |
| Enterovirus F | 5 | Unclassified | 32 | Unclassified | 19 | Unclassified | 4 |
| Enterovirus E | 1 | Kobuvirus | | Parechovirus | | Cardiovirus | |
| Enterovirus J | 5 | | | | | Cardiovirus B | 18 |
| Enterovirus C | 137 | | | | | Cardiovirus E | 1 |
| Enterovirus A | 117 | | | | | | |
| Enterovirus B | 154 | | | | | | |

PPH

| | | | | | | | |
|---|---|---|---|---|---|---|---|
| Enterovirus B | 154 | Aichivirus B | 8 | Parechovirus A | 48 | Cardiovirus F | 1 |
| Enterovirus A | 117 | Unclassified | 32 | Unclassified | 19 | Cardiovirus E | 1 |
| Enterovirus D | 11 | Kobuvirus | | Parechovirus | | Unclassified | 4 |
| Enterovirus J | 5 | Aichivirus A | 32 | | | Cardiovirus | |
| Enterovirus C | 137 | | | | | Cardiovirus B | 18 |
| Rhinovirus B | 21 | | | | | | |
| Enterovirus H | 1 | | | | | | |
| Enterovirus I | 1 | | | | | | |
| Unclassified | 149 | | | | | | |
| Enterovirus | | | | | | | |
| Enterovirus E | 1 | | | | | | |
| Enterovirus F | 5 | | | | | | |

TCL

| | | | | | | | |
|---|---|---|---|---|---|---|---|
| Enterovirus I | 1 | Unclassified | 32 | Parechovirus A | 48 | Unclassified | 4 |
| Enterovirus D | 11 | Kobuvirus | | | | Cardiovirus | |
| Enterovirus C | 137 | Aichivirus B | 8 | | | Cardiovirus B | 18 |
| Enterovirus A | 117 | | | | | | |
| Enterovirus J | 5 | | | | | | |
| Unclassified | 149 | | | | | | |
| Enterovirus | | | | | | | |
| Enterovirus H | 1 | | | | | | |

[1720] Top sequences in each cell type across all tested sequences were assessed. Top ˜30 sequences were selected by expression relative to positive control in each individual cell type: closely related sequences that performed similarly were replaced with diverse sequences that had slightly lower performance.
   [1721] Top IRES sequences include SEQ ID NOs: 75, 77, 137, 532, 566, 582, 648, 680, 693, 752, 785, 787, 791, 793, 820, 823, 839, 840, 843, 852, 857, 861, 862, 863, 864, 871, 874, 876, 922, 959, 983, 984, 1015, 1017, 1023, 1026, 1031, 1041, 1047, 1059, 1068, 1134, 1168, 1169, 1171, 1177, 1178, 1179, 1180, 1189, 1192, 1193, 1198, 1216, 1218, 1230, 1263, 1276, 1280, 1282, 1284, 1287, 1346, 1354, 1364, 1367, 1370, 1432, 1438, 1440, 2285, 2465, 2601, 2615, 2616, 2617, 2618, 2627, 2667, 2681, 2742, 2746, 2758, 2777, 2778, 3282, 3283, 3286, and 3287.
   [1722] Top IRES sequences for protein expression in MYO include SEQ ID NOs: 137, 580, 785, 791, 820, 922, 1041, 1047, 1068, 1168, 1169, 1171, 1177, 1178, 1179, 1180, 1189, 1192, 1263, 1276, 1280, 1282, 1284, 1287, 1354, 1356, 1432, 1436, 1439, 1440, 2285, 2667, 2746, 2777, 2778, 3283, and 3284.
   [1723] Top IRES sequences for protein expression in PPH include SEQ ID NOs: 137, 580, 648, 693, 752, 785, 791, 793, 820, 823, 839, 840, 861, 862, 863, 876, 922, 959, 983, 984, 1015, 1017, 1023, 1026, 1031, 1041, 1047, 1059, 1068, 1134, 1168, 1169, 1171, 1177, 1178, 1179, 1180, 1189, 1192, 1193, 1198, 1216, 1263, 1276, 1280, 1282, 1284, 1287, 1346, 1354, 1356, 1432, 1436, 1438, 1439, 1440, 2285, 2777, 2778, 3283, and 3284.
   [1724] Top IRES sequences for protein expression in TCL include SEQ ID NOs: 77, 787, 793, 820, 839, 840, 843, 852, 857, 861, 862, 863, 864, 871, 874, 876, 959, 1193, 1216, 1284, 1287, 1346, 1356, 1364, 1432, 1438, 1440, 2667, 2681, 2742, 2746, 2758, 3283, and 3284.

[1725] Overall, hundreds of new IRES elements highly active in oRNA were identified, many of which are much stronger than the ubiquitous EMCV-type IRESs and/or CVB3-type IRESs (FIGS. 111A-111C). It was also observed that there could be significant differences even between IRESs from highly similar viruses. Few IRESs are strong in all cell types. As depicted in FIG. 110A and FIG. 110B, myotube and hepatocyte IRES activities often correlate, while T cell IRES activity often does not correlate with activity in myotubes and hepatocytes

TABLE 28
Expression and functional stability screening of IRES

| | MYO AVG | MYO STDEV | PHH AVG | PHH STDEV | TCL AVG | TCL STDEV | | MYO AVG | MYO STDEV | PHH AVG | PHH STDEV | TCL AVG | TCL STDEV |
|---|---|---|---|---|---|---|---|---|---|---|---|---|---|
| | [Fold | [Fold | [Fold | [Fold | [Fold | [Fold | | [Fold | [Fold | [Fold | [Fold | [Fold | [Fold |
| SEQ ID NO | Change] | Change] | Change] | Change] | Change] | Change] | SEQ ID NO | Change] | Change] | Change] | Change] | Change] | Change] |
| 3282 | 1 | 0 | 1 | 0 | 1 | 0 | 1506 | 0 | 0 | 0 | 0 | 0.0214472 | 0.0113230 |
| 2 | 0 | 0 | 0 | 0 | 0 | 0 | 1507 | 0 | 0 | 0 | 0 | 0.0151743 | 0.0218812 |
| 3 | 0.0007257 | 0.0006312 | 0.0016067 | 0.0003508 | 0 | 0 | 1508 | 0 | 0 | 0 | 0 | 0.0082973 | 0.0123163 |
| 4 | 0 | 0 | 0 | 0 | 0.0117764 | 0.0121685 | 1509 | 0 | 0 | 0 | 0 | 0.0081531 | 0.0123913 |
| 5 | 0 | 0 | 0 | 0 | 0.0347900 | 0.0324761 | 1510 | 0 | 0 | 0 | 0 | 0 | 0 |
| 6 | 0 | 0 | 0 | 0 | 0.0238213 | 0.0412598 | 1511 | 0 | 0 | 0 | 0 | 0.0073978 | 0.0093885 |
| 7 | 0 | 0 | 0.0002392 | 0.0002873 | 0.0243770 | 0.0218275 | 1512 | 0.0006905 | 0.0001037 | 0.0003128 | 0.0003378 | 0.0105988 | 0.0183577 |
| 8 | 0 | 0 | 0 | 0 | 0.0055608 | 0.0096316 | 1513 | 0 | 0 | 0 | 0 | 0 | 0 |
| 9 | 0.0050209 | 0.0050966 | 0.0098061 | 0.0022326 | 0.0163004 | 0.0159090 | 1514 | 0 | 0 | 0.0007412 | 0.0006638 | 0.0276949 | 0.0149782 |
| 10 | 0 | 0 | 0.0003045 | 0.0004177 | 0.0683266 | 0.0380156 | 1515 | 0.0000200 | 0.0000215 | 0.0004574 | 0.0002314 | 0.0026166 | 0.0045322 |
| 11 | 0.0007727 | 0.0008018 | 0.0074580 | 0.0004470 | 0.0002548 | 0.0004414 | 1516 | 0 | 0 | 0.0001842 | 0.0003190 | 0.0013687 | 0.0022164 |
| 13 | 0 | 0 | 0.0015653 | 0.0002912 | 0.0258959 | 0.0234567 | 1517 | 0 | 0 | 0.0006197 | 0.0005449 | 0.0076199 | 0.0131981 |
| 15 | 0.0194108 | 0.0070272 | 0.0589347 | 0.0084655 | 0.0510777 | 0.0439756 | 1518 | 0 | 0 | 0.0002437 | 0.0004222 | 0.0019248 | 0.0033339 |
| 17 | 0 | 0 | 0 | 0 | 0.0141218 | 0.0136848 | 1519 | 0 | 0 | 0.0001733 | 0.0001535 | 0.0027708 | 0.0047992 |
| 18 | 0 | 0 | 0.0015323 | 0.0003545 | 0.0314972 | 0.0203211 | 1520 | 0.0004964 | 0.0000165 | 0.0016507 | 0.0007970 | 0.0100196 | 0.0089848 |
| 19 | 0 | 0 | 0.0007075 | 0.0003451 | 0 | 0 | 1521 | 0.0000418 | 0.0000414 | 0.0000751 | 0.0000668 | 0.0072923 | 0.0126307 |
| 20 | 0 | 0 | 0 | 0 | 0.0096814 | 0.0097625 | 1522 | 0.0001229 | 0.0000702 | 0.0013256 | 0.0008175 | 0.0208572 | 0.0219754 |
| 21 | 0.0212586 | 0.0030008 | 0.1362660 | 0.0099125 | 0.0747982 | 0.0245418 | 1523 | 0.0005071 | 0.0000569 | 0.0023354 | 0.0011011 | 0.0064428 | 0.0111592 |
| 22 | 0.0091365 | 0.0034231 | 0.0925952 | 0.0067153 | 0.0309040 | 0.0284601 | 1524 | 0 | 0 | 0.0004331 | 0.0005532 | 0.0050150 | 0.0058351 |
| 23 | 0 | 0 | 0.0008387 | 0.0004640 | 0.0024170 | 0.0041863 | 1525 | 0.0007472 | 0.0000638 | 0.0034506 | 0.0006977 | 0.0107460 | 0.0058710 |
| 24 | 0 | 0 | 0.0000246 | 0.0000427 | 0.0031111 | 0.0053885 | 1526 | 0.0000052 | 0.0000090 | 0.0002429 | 0.0002183 | 0.0167959 | 0.0198498 |
| 25 | 0.0737983 | 0.0053055 | 0.1558598 | 0.0162108 | 0.4519536 | 0.1337645 | 1527 | 0 | 0 | 0.0000853 | 0.0001477 | 0.0107912 | 0.0138687 |
| 26 | 0.0027586 | 0.0007225 | 0.0125235 | 0.0005036 | 0 | 0 | 1528 | 0 | 0 | 0.0001664 | 0.0002251 | 0.0029835 | 0.0051675 |
| 27 | 0.0186635 | 0.0040436 | 0.0989179 | 0.0085851 | 0.0244226 | 0.0253392 | 1529 | 0.0000397 | 0.0000687 | 0 | 0 | 0 | 0 |
| 28 | 0.0176418 | 0.0025557 | 0.1220648 | 0.0135955 | 0.1126415 | 0.0207651 | 1530 | 0.0000744 | 0.0001067 | 0.0009300 | 0.0008577 | 0.0142545 | 0.0149820 |
| 29 | 0 | 0 | 0.0082741 | 0.0009236 | 0.0109582 | 0.0120151 | 1532 | 0.0000333 | 0.0000289 | 0.0004763 | 0.0002133 | 0 | 0 |
| 30 | 0.1967132 | 0.0482465 | 0.3984421 | 0.0443954 | 0.3729583 | 0.0512158 | 1533 | 0 | 0 | 0.0002489 | 0.0002519 | 0.0061249 | 0.0106087 |
| 31 | 0.5881394 | 0.1231212 | 0.6943366 | 0.0609169 | 0.4862626 | 0.0380244 | 1534 | 0 | 0 | 0.0004789 | 0.0004669 | 0.0102236 | 0.0140407 |
| 32 | 0.2163073 | 0.0786069 | 0.3275750 | 0.0149576 | 0.0297402 | 0.0211648 | 1535 | 0.0004070 | 0.0002482 | 0.0000169 | 0.0000293 | 0.0031651 | 0.0030277 |
| 33 | 0.3574334 | 0.1134934 | 0.4409356 | 0.0619212 | 0.2087538 | 0.1393970 | 1536 | 0 | 0 | 0.0000278 | 0.0000482 | 0.0105381 | 0.0092746 |
| 34 | 0.2168290 | 0.0372754 | 0.4643626 | 0.0428027 | 0.2638304 | 0.0199095 | 1537 | 0 | 0 | 0.0001787 | 0.0003096 | 0.0019766 | 0.0032946 |
| 35 | 0 | 0 | 0.0053785 | 0.0003841 | 0.0041330 | 0.0071586 | 1538 | 0 | 0 | 0.0000469 | 0.0000813 | 0 | 0 |
| 36 | 0 | 0 | 0 | 0 | 0.0009344 | 0.0016184 | 1539 | 0.0000080 | 0.0000138 | 0.0005273 | 0.0000987 | 0 | 0 |
| 37 | 0.0385876 | 0.0102730 | 0.2564175 | 0.0318420 | 0.0237011 | 0.0410515 | 1540 | 0 | 0 | 0.0004805 | 0.0004641 | 0.0061239 | 0.0051189 |
| 38 | 0.0783841 | 0.0081066 | 0.2208610 | 0.0161877 | 0.0218646 | 0.0195008 | 1541 | 0 | 0 | 0.0004565 | 0.0004266 | 0.0019858 | 0.0034394 |
| 39 | 0.0002919 | 0.0005055 | 0.0039006 | 0.0003663 | 0.0032560 | 0.0056396 | 1542 | 0 | 0 | 0.0001653 | 0.0001464 | 0.0044504 | 0.0039191 |
| 40 | 0.1990175 | 0.0602854 | 0.2390836 | 0.0064826 | 0.0510807 | 0.0668843 | 1543 | 0.0000060 | 0.0000105 | 0.0001109 | 0.0001921 | 0.0011654 | 0.0020185 |
| 41 | 0.0004126 | 0.0003911 | 0.0103342 | 0.0014990 | 0.0275243 | 0.0212627 | 1544 | 0 | 0 | 0.0001949 | 0.0003376 | 0.0056140 | 0.0097237 |
| 42 | 0.0719844 | 0.0178546 | 0.3424716 | 0.0127386 | 0.0932231 | 0.0251858 | 1545 | 0 | 0 | 0.0001339 | 0.0001699 | 0.0127388 | 0.0217735 |
| 43 | 0.1099597 | 0.0229409 | 0.4559891 | 0.0857666 | 0.2865923 | 0.0149024 | 1546 | 0.0000324 | 0.0000483 | 0.0011222 | 0.0004400 | 0.0054897 | 0.0065997 |
| 44 | 0 | 0 | 0.0160162 | 0.0023394 | 0.0142148 | 0.0146243 | 1548 | 0 | 0 | 0.0008301 | 0.0006891 | 0.0130482 | 0.0116042 |
| 46 | 0.2248916 | 0.0386050 | 0.5030167 | 0.0391307 | 0.2471603 | 0.0200305 | 1549 | 0 | 0 | 0.0003654 | 0.0003780 | 0.0109065 | 0.0188906 |
| 47 | 0.0024602 | 0.0015882 | 0.0894217 | 0.0068490 | 0.0225889 | 0.0391252 | 1550 | 0 | 0 | 0.0004262 | 0.0003949 | 0.0064043 | 0.0073966 |
| 48 | 0.1302672 | 0.0415369 | 0.4246611 | 0.0722898 | 0.0028031 | 0.0048551 | 1551 | 0 | 0 | 0.0002645 | 0.0004582 | 0 | 0 |
| 49 | 0.1952196 | 0.0634240 | 0.6215006 | 0.0699875 | 0.0725234 | 0.0384119 | 1552 | 0 | 0 | 0.0002943 | 0.0005097 | 0 | 0 |
| 50 | 0.2776097 | 0.1012361 | 0.8012082 | 0.0392090 | 0.2099342 | 0.0885092 | 1553 | 0 | 0 | 0.0001401 | 0.0001466 | 0.0040492 | 0.0066442 |
| 51 | 0.0916662 | 0.0254500 | 0.6244846 | 0.0767046 | 0.0896825 | 0.0175443 | 1554 | 0.0000294 | 0.0000347 | 0.0008094 | 0.0012840 | 0.0074537 | 0.0108322 |
| 52 | 0.0401935 | 0.0061400 | 0.1618844 | 0.0066904 | 0.0792739 | 0.0186896 | 1555 | 0 | 0 | 0.0007101 | 0.0004906 | 0.0133649 | 0.0124682 |
| 53 | 0.0798819 | 0.0091055 | 0.5740121 | 0.0677347 | 0.0872744 | 0.0545906 | 1556 | 0 | 0 | 0.0004873 | 0.0004740 | 0 | 0 |
| 54 | 0.0324016 | 0.0096527 | 0.4088882 | 0.0452690 | 0.0424563 | 0.0590408 | 1557 | 0 | 0 | 0.0005740 | 0.0005099 | 0.0173760 | 0.0199652 |
| 55 | 0.0872815 | 0.0289797 | 0.6137779 | 0.0345733 | 0.0161925 | 0.0114987 | 1558 | 0 | 0 | 0.0004837 | 0.0004195 | 0.0080935 | 0.0080551 |
| 56 | 0.2027666 | 0.0715003 | 0.5259393 | 0.0334114 | 0.0430137 | 0.0745018 | 1559 | 0 | 0 | 0.0002943 | 0.0005097 | 0 | 0 |
| 57 | 0.0551177 | 0.0150097 | 0.0529392 | 0.0080507 | 0.0023628 | 0.0033778 | 1560 | 0 | 0 | 0.0002489 | 0.0003232 | 0 | 0 |
| 60 | 0.0004209 | 0.0005173 | 0.0059558 | 0.0012320 | 0.0160415 | 0.0205989 | 1561 | 0.0000245 | 0.0000214 | 0.0002600 | 0.0004503 | 0.0047187 | 0.0081730 |
| 61 | 0.0003711 | 0.0003214 | 0.0120956 | 0.0013357 | 0.0573225 | 0.0391070 | 1562 | 0 | 0 | 0.0011000 | 0.0014289 | 0.0126741 | 0.0219522 |
| 62 | 0.1869718 | 0.0273751 | 0.8055271 | 0.0438858 | 0.0756394 | 0.0150066 | 1563 | 0 | 0 | 0.0003629 | 0.0006286 | 0.0049302 | 0.0085393 |
| 63 | 0.1211071 | 0.0398989 | 0.5329137 | 0.1684756 | 0.1943937 | 0.0137275 | 1564 | 0 | 0 | 0.0006810 | 0.0006196 | 0.0009712 | 0.0016821 |
| 66 | 0.0014413 | 0.0021840 | 0.0120186 | 0.0004905 | 0.0142627 | 0.0247038 | 1565 | 0 | 0 | 0.0005362 | 0.0009288 | 0.0076843 | 0.0071498 |
| 67 | 0.6782079 | 0.2787539 | 0.4995717 | 0.0781897 | 0.0431586 | 0.0270043 | 1566 | 0 | 0 | 0.0006864 | 0.0004407 | 0 | 0 |
| 68 | 0.0570387 | 0.0148521 | 0.2466370 | 0.0267851 | 0.0662418 | 0.0340702 | 1567 | 0 | 0 | 0.0002303 | 0.0003989 | 0.0077153 | 0.0124248 |
| 69 | 0.0090531 | 0.0005709 | 0.5600881 | 0.0631328 | 0.0000849 | 0.0001471 | 1568 | 0 | 0 | 0 | 0 | 0.0067468 | 0.0108688 |
| 70 | 0.6929018 | 0.0427263 | 0.7111662 | 0.0426930 | 0.1314525 | 0.0531588 | 1569 | 0 | 0 | 0.0001877 | 0.0003250 | 0.0102320 | 0.0022420 |
| 71 | 0 | 0 | 0.0028198 | 0.0002416 | 0.0018636 | 0.0032279 | 1570 | 0 | 0 | 0.0001950 | 0.0003377 | 0.0215169 | 0.0259005 |
| 72 | 0.1911527 | 0.0667602 | 0.3083742 | 0.0173782 | 0.0922957 | 0.0330755 | 1571 | 0 | 0 | 0.0006122 | 0.0005478 | 0.0015842 | 0.0027439 |
| 74 | 0.4385857 | 0.1433729 | 0.6156285 | 0.0770318 | 0.0278455 | 0.0278326 | 1572 | 0 | 0 | 0.0003479 | 0.0002998 | 0 | 0 |
| 76 | 0.6382066 | 0.1223888 | 0.6946743 | 0.0462455 | 0.1553771 | 0.0625390 | 1573 | 0.0000030 | 0.0000052 | 0.0006190 | 0.0005306 | 0.0132096 | 0.0114422 |
| 77 | 0.7032592 | 0.4446845 | 0.7768201 | 0.2615780 | 1.3834075 | 0.0480207 | 1574 | 0 | 0 | 0.0001749 | 0.0003029 | 0.0047961 | 0.0083071 |
| 79 | 0.2960022 | 0.0569176 | 0.5767077 | 0.0234579 | 0.1828386 | 0.0237461 | 1575 | 0 | 0 | 0 | 0 | 0 | 0 |
| 80 | 0.4478252 | 0.1402655 | 0.5727297 | 0.0096986 | 0 | 0 | 1576 | 0.0000030 | 0.0000052 | 0.0002541 | 0.0002438 | 0.0203078 | 0.0212871 |
| 81 | 0.0178928 | 0.0036404 | 0.0221887 | 0.0023027 | 0.1186251 | 0.0459029 | 1577 | 0.0000919 | 0.0000853 | 0.0007964 | 0.0001953 | 0.0041446 | 0.0071787 |
| 82 | 0.4297767 | 0.2245829 | 0.5078949 | 0.1393677 | 0.9130118 | 0.0629758 | 1578 | 0.0000765 | 0.0000680 | 0.0008097 | 0.0007678 | 0.0081730 | 0.0141560 |
| 83 | 0.0149078 | 0.0040463 | 0.1738232 | 0.0327499 | 0.0089636 | 0.0079776 | 1579 | 0.0000445 | 0.0000387 | 0.0007256 | 0.0006741 | 0.0062280 | 0.0107872 |
| 84 | 0.1945619 | 0.0806958 | 0.4080238 | 0.0171027 | 0.0889561 | 0.0769459 | 1580 | 0 | 0 | 0.0003041 | 0.0004831 | 0.0004596 | 0.0007961 |
| 85 | 0.4527750 | 0.1963657 | 0.3842792 | 0.0094416 | 0.0035469 | 0.0061434 | 1581 | 0 | 0 | 0.0005678 | 0.0005932 | 0 | 0 |
| 86 | 0.0017080 | 0.0012651 | 0.0079952 | 0.0011154 | 0 | 0 | 1582 | 0 | 0 | 0.0000810 | 0.0001404 | 0.0004984 | 0.0008633 |
| 88 | 0.3707798 | 0.1031602 | 0.5799964 | 0.0841860 | 0.0134757 | 0.0170499 | 1583 | 0.0000073 | 0.0000127 | 0.0001485 | 0.0002572 | 0.0053623 | 0.0071408 |
| 89 | 0.0006089 | 0.0010225 | 0.0019466 | 0.0005328 | 0.0183244 | 0.0292280 | 1584 | 0 | 0 | 0.0000810 | 0.0001404 | 0.0020399 | 0.0035332 |
| 90 | 0.4897043 | 0.1389473 | 0.6459191 | 0.0390811 | 0.0061620 | 0.0106729 | 1585 | 0.0000849 | 0.0000782 | 0 | 0 | 0.0008564 | 0.0014834 |
| 92 | 0.2764537 | 0.1240604 | 0.5475590 | 0.0234751 | 0.0183546 | 0.0139946 | 1586 | 0 | 0 | 0.0006962 | 0.0003161 | 0.0047472 | 0.0082223 |
| 93 | 0.4499083 | 0.2129886 | 0.4760142 | 0.0076992 | 0 | 0 | 1587 | 0 | 0 | 0.0004315 | 0.0003855 | 0.0011286 | 0.0019549 |
| 94 | 0.1740216 | 0.0519610 | 0.4323126 | 0.0982759 | 0.0023896 | 0.0041390 | 1588 | 0 | 0 | 0.0002826 | 0.0000940 | 0 | 0 |
| 95 | 0.4375171 | 0.1728297 | 0.5837429 | 0.0251473 | 0.0289199 | 0.0110706 | 1589 | 0.0000151 | 0.0000261 | 0.0004532 | 0.0003980 | 0.0153938 | 0.0146403 |
| 96 | 0 | 0 | 0 | 0 | 0 | 0 | 1590 | 0 | 0 | 0.0002283 | 0.0003677 | 0.0085810 | 0.0148628 |
| 97 | 0.2170292 | 0.0344728 | 0.3452326 | 0.0317161 | 0.3951922 | ND | 1591 | 0.0005291 | 0.0000867 | 0.0010207 | 0.0009550 | 0.0006937 | 0.0012014 |
| 98 | 0.2685941 | 0.0765690 | 0.6952049 | 0.0772868 | 0 | ND | 1592 | 0 | 0 | 0 | 0 | 0.0053427 | 0.0055973 |
| 99 | 0.1342300 | 0.0383110 | 0.2687326 | 0.0334611 | 0.3030330 | ND | 1593 | 0 | 0 | 0.0001137 | 0.0001970 | 0 | 0 |
| 100 | 0.5828736 | 0.0294970 | 0.8229197 | 0.0846635 | 0.4461679 | 0.0818919 | 1594 | 0.0001257 | 0.0001193 | 0.0000627 | 0.0000753 | 0.0008751 | 0.0015156 |
| 101 | 0.5188459 | 0.1148813 | 0.8968855 | 0.1350424 | 1.1794009 | ND | 1595 | 0.0000309 | 0.0000536 | 0.0001407 | 0.0002438 | 0.0027933 | 0.0048381 |
| 102 | 0.0046130 | 0.0031718 | 0.0069334 | 0.0023042 | 0.0651029 | ND | 1596 | 0 | 0 | 0 | 0 | 0 | 0 |
| 103 | 0.0051833 | 0.0014146 | 0.0161795 | 0.0021885 | 0 | ND | 1597 | 0 | 0 | 0.0001471 | 0.0001162 | 0.0056398 | 0.0093831 |
| 104 | 0.0339436 | 0.0044657 | 0.1522868 | 0.0190001 | 0 | ND | 1598 | 0 | 0 | 0.0009122 | 0.0003350 | 0.0159323 | 0.0193802 |
| 105 | 0.2251646 | 0.0732739 | 0.3323910 | 0.0721383 | 0.3910922 | ND | 1599 | 0.0002334 | 0.0000374 | 0.0003108 | 0.0003461 | 0.0020343 | 0.0035234 |
| 106 | 0.3069493 | 0.0957163 | 0.6961634 | 0.2030217 | 0 | ND | 1600 | 0.0004490 | 0.0000883 | 0.0011799 | 0.0001840 | 0.0002981 | 0.0005164 |
| 107 | 0.2814393 | 0.1399702 | 0.9673365 | 0.0490462 | 0.3905573 | ND | 1601 | 0.0002284 | 0.0000617 | 0.0000554 | 0.0000960 | 0.0061032 | 0.0105711 |
| 108 | 0.6981985 | 0.2590590 | 0.9752755 | 0.0608064 | 0.2536976 | 0.0430809 | 1602 | 0.0011178 | 0.0000431 | 0.0004065 | 0.0005336 | 0.0152107 | 0.0133324 |
| 109 | 0.2429038 | 0.1400384 | 0.6494309 | 0.0946196 | 0.3739178 | ND | 1603 | 0.0003257 | 0.0001322 | 0.0009224 | 0.0009789 | 0.0029302 | 0.0050753 |
| 110 | 0.2064715 | 0.0673403 | 0.4988407 | 0.0924237 | 0.0253530 | ND | 1604 | 0 | 0 | 0.0000139 | 0.0000241 | 0.0142232 | 0.0142299 |
| 111 | 0.1987318 | 0.0798635 | 0.4829672 | 0.1066300 | 0 | ND | 1605 | 0.0030934 | 0.0003819 | 0.0056302 | 0.0019678 | 0.0079829 | 0.0138268 |
| 112 | 0.3379470 | 0.0825198 | 0.6270075 | 0.0951682 | 0 | ND | 1606 | 0 | 0 | 0.0000603 | 0.0001045 | 0.0009815 | 0.0017001 |
| 113 | 0.2801268 | 0.0925221 | 0.4251382 | 0.0091592 | 0.1162967 | ND | 1607 | 0 | 0 | 0.0002729 | 0.0004728 | 0.0177913 | 0.0257054 |
| 114 | 0.0203083 | 0.0089203 | 0.0457710 | 0.0061140 | 0 | ND | 1608 | 0.0000172 | 0.0000299 | 0.0002584 | 0.0003174 | 0.0175660 | 0.0165238 |
| 115 | 0.0131362 | 0.0046594 | 0.0201751 | 0.0006238 | 0 | ND | 1609 | 0.0010173 | 0.0000620 | 0.0010659 | 0.0010435 | 0.0032036 | 0.0038620 |
| 116 | 0.0000021 | 0.0000037 | 0.0029992 | 0.0002743 | 0 | ND | 1610 | 0 | 0 | 0 | 0 | 0.0069605 | 0.0120559 |
| 117 | 0.0031185 | 0.0013549 | 0.0191040 | 0.0007534 | 0 | ND | 1611 | 0.0003588 | 0.0000853 | 0.0026388 | 0.0027004 | 0.0564205 | 0.0520091 |
| 118 | 0.1241871 | 0.0480745 | 0.4590174 | 0.0233074 | 0 | ND | 1612 | 0.0012827 | 0.0001979 | 0.0036456 | 0.0037675 | 0.0004511 | 0.0007814 |
| 119 | 0.1749396 | 0.0778002 | 1.0310895 | 0.1670904 | 0 | ND | 1613 | 0 | 0 | 0.0001635 | 0.0002833 | 0.0505646 | 0.0875805 |
| 120 | 0.2575445 | 0.1059152 | 0.7236329 | 0.0529854 | 0 | ND | 1614 | 0.0036948 | 0.0006211 | 0.0049334 | 0.0010346 | 0.0111173 | 0.0192557 |
| 121 | 0.6494572 | 0.2831596 | 1.0346703 | 0.1667450 | 0.1392316 | ND | 1615 | 0.0000859 | 0.0001487 | 0 | 0 | 0.0221051 | 0.0234419 |
| 122 | 0.3417563 | 0.1512691 | 0.8871036 | 0.0103979 | 0 | ND | 1616 | 0.0037435 | 0.0005235 | 0.0027122 | 0.0007835 | 0.0543729 | 0.0507003 |
| 123 | 0.0001161 | 0.0001579 | 0.0023300 | 0.0009030 | 0 | ND | 1617 | 0.0040865 | 0.0005649 | 0.0041983 | 0.0007918 | 0 | 0 |
| 124 | 0.9006923 | 0.3197386 | 1.5905103 | 0.0905090 | 0.1451584 | 0.0165966 | 1618 | 0.0016710 | 0.0002546 | 0.0028054 | 0.0014955 | 0.0170919 | 0.0148803 |
| 125 | 0.3924469 | 0.2068017 | 0.6282859 | 0.0330176 | 0.1353970 | ND | 1621 | 0 | 0 | 0.0001627 | 0.0002818 | 0.0434570 | 0.0392746 |
| 126 | 0.0187588 | 0.0054806 | 0.0434370 | 0.0036734 | 0.1566415 | ND | 1622 | 0.0006654 | 0.0000395 | 0.0006737 | 0.0006445 | 0.0671413 | 0.0848171 |
| 127 | 0.2963362 | 0.1464111 | 0.6974915 | 0.0352878 | 0 | ND | 1623 | 0.0028626 | 0.0005510 | 0.0072559 | 0.0023049 | 0 | 0 |
| 128 | 0.4537441 | 0.1188701 | 0.5690407 | 0.0299702 | 0.3175412 | ND | 1624 | 0 | 0 | 0 | 0 | 0.0613542 | 0.0638549 |
| 129 | 0.0154092 | 0.0070195 | 0.0631405 | 0.0072633 | 0 | ND | 1625 | 0.0027722 | 0.0004154 | 0.0013995 | 0.0011101 | 0.0225306 | 0.0141810 |
| 130 | 0.0015048 | 0.0021189 | 0.0337146 | 0.0069058 | 0 | ND | 1626 | 0.0045476 | 0.0008276 | 0.0032398 | 0.0015958 | 0.0172414 | 0.0270984 |
| 131 | 0.0001991 | 0.0003448 | 0.0056489 | 0.0006963 | 0 | ND | 1627 | 0.0040491 | 0.0006149 | 0.0095197 | 0.0025161 | 0.0398837 | 0.0346928 |
| 132 | 0.0005971 | 0.0008253 | 0.0034234 | 0.0010446 | 0 | ND | 1628 | 0 | 0 | 0.0008855 | 0.0007885 | 0.0194668 | 0.0337175 |
| 133 | 0 | 0 | 0.0022669 | 0.0004595 | 0.2491430 | ND | 1629 | 0.0009121 | 0.0005022 | 0.0008843 | 0.0009616 | 0 | 0 |
| 134 | 0.0070991 | 0.0022130 | 0.0273380 | 0.0099178 | 0 | ND | 1630 | 0 | 0 | 0 | 0 | 0.0451013 | 0.0310727 |
| 135 | 0.0094051 | 0.0055160 | 0.0221044 | 0.0011844 | 0.0032483 | 0.0056262 | 1631 | 0.0000350 | 0.0000607 | 0.0010128 | 0.0009295 | 0.0005251 | 0.0009094 |
| 136 | 0.0068106 | 0.0018391 | 0.0147612 | 0.0021237 | 0 | ND | 1632 | 0.0002405 | 0.0001650 | 0 | 0 | 0.0192644 | 0.0182091 |
| 137 | 1.2986966 | 0.4830765 | 1.0333533 | 0.0925197 | 0.2430558 | 0.0095921 | 1633 | 0 | 0 | 0 | 0 | 0.0126335 | 0.0218819 |
| 138 | 0.3778265 | 0.1899576 | 0.6246971 | 0.1091093 | 0 | ND | 1634 | 0.0020441 | 0.0003740 | 0.0005269 | 0.0008139 | 0.0151077 | 0.0261673 |
| 139 | 0.0222471 | 0.0088329 | 0.0768459 | 0.0178366 | 0 | ND | 1635 | 0.0013437 | 0.0003184 | 0.0047410 | 0.0027827 | 0.0590905 | 0.0308344 |
| 140 | 0.1258643 | 0.0194531 | 0.3957942 | 0.0279953 | 0 | ND | 1636 | 0.0004840 | 0.0002911 | 0.0016268 | 0.0015116 | 0.0619350 | 0.0598219 |
| 141 | 0.0003538 | 0.0006127 | 0.0034971 | 0.0005907 | 0 | ND | 1637 | 0.0002732 | 0.0002328 | 0.0005634 | 0.0004481 | 0.0167014 | 0.0289276 |
| 142 | 0 | 0 | 0 | 0 | 0 | ND | 1638 | 0 | 0 | 0.0000258 | 0.0000448 | 0 | 0 |
| 143 | 0 | 0 | 0.0049397 | 0.0005123 | 0 | ND | 1639 | 0 | 0 | 0 | 0 | 0.0414879 | 0.0718591 |
| 145 | 0.0002624 | 0.0004544 | 0 | 0 | 0 | ND | 1640 | 0.0019115 | 0.0007195 | 0.0024157 | 0.0006908 | 0.0122781 | 0.0212529 |
| 146 | 0.0041248 | 0.0027535 | 0.0067767 | 0.0027159 | 0 | ND | 1641 | 0.0015849 | 0.0004598 | 0.0023121 | 0.0022390 | 0.0336987 | 0.0349883 |
| 147 | 0.0044277 | 0.0042768 | 0.0089219 | 0.0024342 | 0 | ND | 1642 | 0.0000613 | 0.0001061 | 0.0000775 | 0.0001343 | 0 | 0 |
| 148 | 0.0000541 | 0.0000936 | 0.0011627 | 0.0007072 | 0 | ND | 1643 | 0 | 0 | 0.0011622 | 0.0013597 | 0.0028816 | 0.0027030 |
| 149 | 0.0002663 | 0.0004613 | 0.0010294 | 0.0008036 | 0 | ND | 1644 | 0 | 0 | 0.0008076 | 0.0008135 | 0.0350211 | 0.0425576 |
| 150 | 0 | 0 | 0 | 0 | 0 | ND | 1645 | 0 | 0 | 0 | 0 | 0.0138206 | 0.0145315 |
| 151 | 0 | 0 | 0.0000822 | 0.0001424 | 0 | ND | 1646 | 0 | 0 | 0.0005036 | 0.0007428 | 0.0208713 | 0.0225055 |
| 152 | 0 | 0 | 0 | 0 | 0 | ND | 1647 | 0 | 0 | 0.0000257 | 0.0000445 | 0.0143153 | 0.0247947 |
| 153 | 0 | 0 | 0 | 0 | 0 | ND | 1648 | 0.0000094 | 0.0000163 | 0.0002842 | 0.0004923 | 0.0263279 | 0.0228713 |
| 154 | 0.0012122 | 0.0018781 | 0.0024662 | 0.0013982 | 0.1262727 | ND | 1649 | 0 | 0 | 0 | 0 | 0.0109320 | 0.0107906 |
| 155 | 0 | 0 | 0 | 0 | 0 | ND | 1650 | 0 | 0 | 0.0016003 | 0.0020244 | 0 | 0 |
| 156 | 0 | 0 | 0 | 0 | 0 | ND | 1651 | 0.0003239 | 0.0001108 | 0.0020799 | 0.0014340 | 0.0407642 | 0.0561672 |
| 157 | 0.0000392 | 0.0000679 | 0 | 0 | 0.1972687 | ND | 1652 | 0 | 0 | 0.0007924 | 0.0001139 | 0.0375056 | 0.0556149 |
| 158 | 0 | 0 | 0.0000417 | 0.0000722 | 0.4104664 | ND | 1653 | 0 | 0 | 0.0002874 | 0.0002958 | 0.0735939 | 0.0526186 |
| 159 | 0 | 0 | 0 | 0 | 0 | ND | 1654 | 0 | 0 | 0.0005814 | 0.0010070 | 0.0119523 | 0.0207020 |
| 160 | 0.0000629 | 0.0001090 | 0 | 0 | 0 | ND | 1655 | 0 | 0 | 0.0003295 | 0.0004736 | 0.0492772 | 0.0562500 |
| 161 | 0 | 0 | 0 | 0 | 0 | ND | 1656 | 0.0000137 | 0.0000238 | 0.0003778 | 0.0006078 | 0.0406504 | 0.0352461 |
| 162 | 0 | 0 | 0.0002741 | 0.0004747 | 0 | ND | 1657 | 0.0000083 | 0.0000145 | 0 | 0 | 0.0116280 | 0.0201404 |
| 163 | 0 | 0 | 0 | 0 | 0 | ND | 1658 | 0 | 0 | 0 | 0 | 0.0059445 | 0.0102962 |
| 164 | 0 | 0 | 0 | 0 | 0 | ND | 1659 | 0 | 0 | 0.0000685 | 0.0001187 | 0.0367034 | 0.0369291 |
| 165 | 0 | 0 | 0 | 0 | 0 | ND | 1660 | 0 | 0 | 0.0005815 | 0.0010072 | 0.0047955 | 0.0068049 |
| 166 | 0 | 0 | 0 | 0 | 0 | ND | 1661 | 0 | 0 | 0.0007791 | 0.0011760 | 0.0388151 | 0.0600015 |
| 167 | 0 | 0 | 0 | 0 | 0 | ND | 1662 | 0 | 0 | 0.0003489 | 0.0006042 | 0.0168155 | 0.0248809 |
| 168 | 0.0000684 | 0.0001185 | 0 | 0 | 0.0087777 | ND | 1663 | 0 | 0 | 0 | 0 | 0.0247370 | 0.0233538 |
| 169 | 0.0000619 | 0.0001072 | 0.0000179 | 0.0000309 | 0 | ND | 1664 | 0 | 0 | 0.0000343 | 0.0000593 | 0.0042459 | 0.0073541 |
| 170 | 0 | 0 | 0.0002535 | 0.0004391 | 0 | ND | 1665 | 0.0005162 | 0.0001559 | 0.0005230 | 0.0004747 | 0.0167812 | 0.0253681 |
| 171 | 0 | 0 | 0.0000069 | 0.0000119 | 0 | ND | 1666 | 0.0000391 | 0.0000677 | 0 | 0 | 0.0436754 | 0.0446937 |
| 172 | 0 | 0 | 0 | 0 | 0 | ND | 1668 | 0 | 0 | 0.0001199 | 0.0002076 | 0.0604003 | 0.0403215 |
| 173 | 0 | 0 | 0 | 0 | 0 | ND | 1669 | 0 | 0 | 0.0004167 | 0.0004073 | 0.0267734 | 0.0463729 |
| 174 | 0 | 0 | 0 | 0 | 0 | ND | 1670 | 0 | 0 | 0 | 0 | 0.0127607 | 0.0221022 |
| 175 | 0 | 0 | 0 | 0 | 0 | ND | 1671 | 0 | 0 | 0.0000771 | 0.0001335 | 0.0978058 | 0.0777299 |
| 176 | 0.0027756 | 0.0045054 | 0 | 0 | 0 | 0 | 1672 | 0.0000310 | 0.0000537 | 0.0005685 | 0.0009847 | 0.0252635 | 0.0220030 |
| 177 | 0 | 0 | 0 | 0 | 0 | ND | 1673 | 0.0000491 | 0.0000429 | 0.0000257 | 0.0000445 | 0.0518293 | 0.0177900 |
| 178 | 0 | 0 | 0 | 0 | 0.1678586 | ND | 1674 | 0 | 0 | 0 | 0 | 0.0067869 | 0.0117553 |
| 179 | 0 | 0 | 0 | 0 | 0 | ND | 1675 | 0.0000190 | 0.0000329 | 0.0003497 | 0.0003035 | 0.0450701 | 0.0639803 |
| 180 | 0.0003667 | 0.0006352 | 0.0011302 | 0.0008598 | 0 | ND | 1676 | 0 | 0 | 0 | 0 | 0.0226017 | 0.0391472 |
| 181 | 0 | 0 | 0 | 0 | 0.1736276 | ND | 1677 | 0 | 0 | 0 | 0 | 0.0380110 | 0.0192158 |
| 182 | 0 | 0 | 0 | 0 | 0 | ND | 1678 | 0.0006376 | 0.0003776 | 0.0020524 | 0.0003638 | 0.0406537 | 0.0704142 |
| 183 | 0 | 0 | 0 | 0 | 0.0786524 | ND | 1679 | 0 | 0 | 0.0001378 | 0.0002168 | 0.0273142 | 0.0473095 |
| 184 | 0.0038077 | 0.0008918 | 0.0035129 | 0.0016791 | 0 | ND | 1680 | 0.0000806 | 0.0000867 | 0 | 0 | 0.0033508 | 0.0058037 |
| 185 | 0.0001813 | 0.0003140 | 0 | 0 | 0 | ND | 1681 | 0.0000036 | 0.0000062 | 0 | 0 | 0 | 0 |
| 186 | 0.0001267 | 0.0002195 | 0 | 0 | 0 | ND | 1682 | 0.0000021 | 0.0000037 | 0.0004264 | 0.0001044 | 0.0848976 | 0.0516951 |
| 187 | 0 | 0 | 0 | 0 | 0 | ND | 1684 | 0.0001634 | 0.0001573 | 0.0004539 | 0.0007861 | 0.0325964 | 0.0564587 |
| 188 | 0 | 0 | 0 | 0 | 0 | ND | 1685 | 0.0004586 | 0.0002100 | 0.0015522 | 0.0004772 | 0.0712171 | 0.1021588 |
| 189 | 0 | 0 | 0 | 0 | 0 | ND | 1686 | 0 | 0 | 0 | 0 | 0.0311091 | 0.0538826 |
| 190 | 0 | 0 | 0 | 0 | 0 | ND | 1687 | 0 | 0 | 0 | 0 | 0.0037537 | 0.0050434 |
| 191 | 0 | 0 | 0 | 0 | 0 | ND | 1688 | 0.0003773 | 0.0001399 | 0 | 0 | 0.0305146 | 0.0449695 |
| 192 | 0.0002562 | 0.0004438 | 0 | 0 | 0 | ND | 1689 | 0 | 0 | 0 | 0 | 0.0241801 | 0.0418812 |
| 193 | 0.0026405 | 0.0042372 | 0 | 0 | 0 | 0 | 1690 | 0.0000740 | 0.0001281 | 0.0004005 | 0.0006937 | 0.0520529 | 0.0678950 |
| 194 | 0.0004935 | 0.0008353 | 0.0003503 | 0.0002392 | 0.1663075 | 0.1281269 | 1691 | 0 | 0 | 0.0007474 | 0.0011953 | 0.0270826 | 0.0273611 |
| 195 | 0.0000793 | 0.0001374 | 0.0002305 | 0.0002639 | 0.0573155 | 0.0521670 | 1692 | 0 | 0 | 0.0002181 | 0.0003777 | 0.0604226 | 0.0428062 |
| 196 | 0.0001466 | 0.0002540 | 0.0002864 | 0.0002399 | 0.1553605 | 0.1359665 | 1693 | 0.0001200 | 0.0001039 | 0.0011464 | 0.0009943 | 0.0309146 | 0.0208542 |
| 197 | 0 | 0 | 0.0002247 | 0.0002589 | 0.0351676 | 0.0609121 | 1694 | 0.0016614 | 0.0004415 | 0.0018681 | 0.0026545 | 0.0540495 | 0.0630073 |
| 198 | 0 | 0 | 0.0001920 | 0.0003325 | 0.0974514 | 0.1687908 | 1695 | 0 | 0 | 0 | 0 | 0.0075350 | 0.0065379 |
| 199 | 0 | 0 | 0.0001454 | 0.0001701 | 0.0121421 | 0.0113885 | 1696 | 0.0001209 | 0.0001092 | 0 | 0 | 0.0198601 | 0.0343987 |
| 200 | 0 | 0 | 0.0002660 | 0.0001737 | 0.0556123 | 0.0963233 | 1697 | 0.0001969 | 0.0000570 | 0 | 0 | 0.0325121 | 0.0563127 |
| 201 | 0.0001719 | 0.0002978 | 0.0001715 | 0.0002499 | 0.0541251 | 0.0937474 | 1698 | 0.0020375 | 0.0001380 | 0.0009472 | 0.0013617 | 0.0263970 | 0.0233097 |
| 202 | 0.0002820 | 0.0004885 | 0.0002541 | 0.0000908 | 0.0696660 | 0.1206650 | 1699 | 0.0000116 | 0.0000201 | 0.0011636 | 0.0010976 | 0.0132900 | 0.0230189 |
| 203 | 0 | 0 | 0.0001760 | 0.0002921 | 0.0928222 | 0.1509802 | 1700 | 0.0037455 | 0.0006815 | 0.0055439 | 0.0005267 | 0.0440983 | 0.0660264 |
| 204 | 0 | 0 | 0.0003727 | 0.0002687 | 0.0658697 | 0.1092254 | 1701 | 0.0000454 | 0.0000787 | 0 | 0 | 0.0561907 | 0.0909423 |
| 205 | 0 | 0 | 0.0002445 | 0.0003594 | 0.5541883 | 0.3020828 | 1702 | 0.0001531 | 0.0002204 | 0.0003359 | 0.0005818 | 0.0107985 | 0.0114638 |
| 206 | 0 | 0 | 0.0001952 | 0.0002121 | 0.0279955 | 0.0484897 | 1703 | 0.0010795 | 0.0001478 | 0.0001202 | 0.0001071 | 0.0555085 | 0.0662571 |
| 207 | 0 | 0 | 0.0002311 | 0.0002060 | 0.0889643 | 0.1251821 | 1704 | 0.0000959 | 0.0001010 | 0 | 0 | 0.0185704 | 0.0321649 |
| 208 | 0 | 0 | 0.0000934 | 0.0001617 | 0.1024051 | 0.1773708 | 1705 | 0.0017416 | 0.0001628 | 0.0006921 | 0.0005899 | 0.0684873 | 0.0711576 |
| 209 | 0 | 0 | 0.0002796 | 0.0002433 | 0.0624011 | 0.1080819 | 1706 | 0 | 0 | 0 | 0 | 0.0079206 | 0.0137189 |
| 210 | 0.0001183 | 0.0002048 | 0.0003223 | 0.0002550 | 0.2411962 | 0.2419626 | 1707 | 0.0016830 | 0.0029151 | 0.0001967 | 0.0003291 | 0.0122062 | 0.0113083 |
| 211 | 0.0000904 | 0.0001566 | 0.0004762 | 0.0002281 | 0.9259241 | ND | 1708 | 0 | 0 | 0.0000912 | 0.0001299 | 0.0152926 | 0.0217236 |
| 212 | 0.0001219 | 0.0002111 | 0.0001937 | 0.0003356 | 0.2178775 | 0.2596663 | 1710 | 0 | 0 | 0 | 0 | 0.0147887 | 0.0154947 |
| 213 | 0 | 0 | 0.0003266 | 0.0003126 | 0.2505550 | 0.2169901 | 1711 | 0 | 0 | 0 | 0 | 0.0178860 | 0.0158903 |
| 214 | 0 | 0 | 0.0002160 | 0.0002317 | 0.0476767 | 0.0703246 | 1712 | 0.0000088 | 0.0000152 | 0.0000492 | 0.0000428 | 0.0129941 | 0.0121886 |
| 216 | 0 | 0 | 0.0001824 | 0.0003159 | 0.2306831 | 0.1516152 | 1713 | 0.0000022 | 0.0000038 | 0.0001185 | 0.0001027 | 0.0160293 | 0.0111027 |
| 217 | 0 | 0 | 0.0001684 | 0.0002917 | 0.0254489 | 0.0440788 | 1714 | 0 | 0 | 0.0001689 | 0.0001462 | 0.0095627 | 0.0040442 |
| 218 | 0 | 0 | 0.0001405 | 0.0002434 | 0.1385204 | 0.1113068 | 1715 | 0 | 0 | 0.0002438 | 0.0003330 | 0.0370091 | 0.0611141 |
| 219 | 0.0001603 | 0.0002776 | 0.0003878 | 0.0001724 | 0.1112562 | 0.1727830 | 1716 | 0 | 0 | 0.0000655 | 0.0001135 | 0.0178636 | 0.0158345 |
| 220 | 0 | 0 | 0.0002112 | 0.0002665 | 0.1090107 | 0.1607722 | 1717 | 0 | 0 | 0.0003726 | 0.0003254 | 0.0186544 | 0.0170116 |
| 221 | 0 | 0 | 0.0001841 | 0.0003189 | 0.0945364 | 0.1045403 | 1718 | 0 | 0 | 0.0000356 | 0.0000616 | 0.0075529 | 0.0130819 |
| 222 | 0 | 0 | 0.0002096 | 0.0003249 | 0.1037849 | 0.1044641 | 1719 | 0.0003748 | 0.0004300 | 0 | 0 | 0 | 0 |
| 223 | 0 | 0 | 0.0001836 | 0.0002731 | 0.1575390 | 0.2728656 | 1720 | 0 | 0 | 0.0000359 | 0.0000460 | 0.0267932 | 0.0464072 |
| 224 | 0 | 0 | 0.0001039 | 0.0001799 | 0.0937493 | 0.0847543 | 1721 | 0 | 0 | 0.0000777 | 0.0001345 | 0 | 0 |
| 225 | 0 | 0 | 0.0001257 | 0.0002177 | 0.0528530 | 0.0459885 | 1722 | 0 | 0 | 0.0001026 | 0.0001107 | 0.0283874 | 0.0255912 |
| 226 | 0 | 0 | 0.0002171 | 0.0003068 | 0.1520711 | 0.1941579 | 1723 | 0 | 0 | 0.0001290 | 0.0001895 | 0.0035056 | 0.0060719 |
| 227 | 0.0001168 | 0.0002023 | 0.0004347 | 0.0001091 | 0.0885370 | 0.1028400 | 1725 | 0 | 0 | 0.0000056 | 0.0000097 | 0.0140501 | 0.0154694 |
| 228 | 0.0001174 | 0.0002033 | 0.0004113 | 0.0001798 | 0.2434061 | 0.1912923 | 1726 | 0 | 0 | 0.0000236 | 0.0000409 | 0.0124075 | 0.0205463 |
| 229 | 0 | 0 | 0.0002248 | 0.0002806 | 0.1213316 | 0.0639225 | 1727 | 0 | 0 | 0 | 0 | 0 | 0 |
| 230 | 0 | 0 | 0.0002042 | 0.0003537 | 0.1616325 | 0.1664502 | 1728 | 0 | 0 | 0 | 0 | 0.0154741 | 0.0240479 |
| 231 | 0.0000524 | 0.0000908 | 0.0001910 | 0.0002274 | 0.2030905 | 0.2794821 | 1729 | 0 | 0 | 0 | 0 | 0.0068112 | 0.0117974 |
| 232 | 0 | 0 | 0.0001614 | 0.0002796 | 0.2628485 | 0.1188171 | 1730 | 0.0000225 | 0.0000389 | 0.0000257 | 0.0000229 | 0.0127153 | 0.0165742 |
| 233 | 0 | 0 | 0.0001335 | 0.0002313 | 0.1439482 | 0.2145109 | 1731 | 0 | 0 | 0.0001055 | 0.0001828 | 0.0134973 | 0.0119059 |
| 234 | 0.0035238 | 0.0056624 | 0 | 0 | 0.0057047 | 0.0051800 | 1732 | 0 | 0 | 0.0000322 | 0.0000558 | 0.0013163 | 0.0022799 |
| 235 | 0 | 0 | 0.0004097 | 0.0001409 | 0.0790734 | 0.0687344 | 1733 | 0 | 0 | 0 | 0 | 0.0075383 | 0.0130567 |
| 236 | 0 | 0 | 0.0001901 | 0.0002941 | 0.1651978 | 0.1544132 | 1734 | 0 | 0 | 0.0000068 | 0.0000117 | 0.0084227 | 0.0095082 |
| 237 | 0 | 0 | 0.0002173 | 0.0001838 | 0 | 0 | 1735 | 0 | 0 | 0.0000484 | 0.0000838 | 0 | 0 |
| 238 | 0 | 0 | 0.0018711 | 0.0004076 | 0.3043567 | 0.0864281 | 1737 | 0 | 0 | 0.0000267 | 0.0000462 | 0.0188671 | 0.0176621 |
| 239 | 0 | 0 | 0.0002117 | 0.0003406 | 0.1072086 | 0.1834130 | 1738 | 0 | 0 | 0.0000259 | 0.0000448 | 0.0091395 | 0.0033803 |
| 241 | 0 | 0 | 0.0001527 | 0.0002645 | 0 | 0 | 1739 | 0 | 0 | 0.0000322 | 0.0000558 | 0.0065600 | 0.0070334 |
| 242 | 0 | 0 | 0.0001414 | 0.0002449 | 0.0778986 | 0.1078134 | 1740 | 0 | 0 | 0.0002473 | 0.0003063 | 0.0171570 | 0.0152061 |
| 243 | 0 | 0 | 0.0001566 | 0.0001438 | 0.1482527 | 0.1369307 | 1741 | 0.0000033 | 0.0000056 | 0.0002644 | 0.0002555 | 0.0192584 | 0.0290658 |
| 244 | 0.0001625 | 0.0002814 | 0.0004468 | 0.0001530 | 0.1266311 | 0.1287875 | 1742 | 0 | 0 | 0.0000180 | 0.0000312 | 0.0439135 | 0.0433778 |
| 245 | 0 | 0 | 0.0002515 | 0.0003740 | 0.1989956 | 0.2226582 | 1743 | 0 | 0 | 0.0000887 | 0.0001107 | 0 | 0 |
| 246 | 0 | 0 | 0.0003804 | 0.0002498 | 0.1770053 | 0.2935734 | 1744 | 0 | 0 | 0 | 0 | 0.0119747 | 0.0207409 |
| 247 | 0 | 0 | 0.0002222 | 0.0003789 | 0.1800851 | 0.2582025 | 1745 | 0 | 0 | 0.0000034 | 0.0000058 | 0.0273053 | 0.0412685 |
| 248 | 0.0000098 | 0.0000170 | 0.0001553 | 0.0002691 | 0.0353126 | 0.0493908 | 1747 | 0 | 0 | 0.0000360 | 0.0000595 | 0.0063976 | 0.0057177 |
| 249 | 0.0000176 | 0.0000306 | 0.0001763 | 0.0003053 | 0 | 0 | 1748 | 0.0000375 | 0.0000650 | 0.0001178 | 0.0001317 | 0.0118692 | 0.0157493 |
| 250 | 0 | 0 | 0.0001161 | 0.0002010 | 0.1029454 | 0.1739991 | 1749 | 0 | 0 | 0.0000744 | 0.0001289 | 0.0074124 | 0.0128387 |
| 251 | 0.0033165 | 0.0049488 | 0.0001106 | 0.0001916 | 0 | 0 | 1750 | 0 | 0 | 0.0003657 | 0.0003167 | 0.0039927 | 0.0036256 |
| 252 | 0 | 0 | 0.0007996 | 0.0003882 | 0.0745070 | 0.1290500 | 1752 | 0 | 0 | 0.0001609 | 0.0001416 | 0.0126236 | 0.0151477 |
| 253 | 0 | 0 | 0.0003296 | 0.0003299 | 0.2686670 | 0.0804923 | 1753 | 0 | 0 | 0 | 0 | 0.0021029 | 0.0022601 |
| 254 | 0 | 0 | 0.0002042 | 0.0003537 | 0.1899439 | 0.2124320 | 1754 | 0 | 0 | 0 | 0 | 0.0131520 | 0.0227799 |
| 255 | 0 | 0 | 0.0002184 | 0.0003575 | 0.0034144 | 0.0059138 | 1755 | 0 | 0 | 0 | 0 | 0.0097072 | 0.0168134 |
| 256 | 0 | 0 | 0.0002042 | 0.0003537 | 0.0838484 | 0.1452297 | 1756 | 0 | 0 | 0.0000661 | 0.0000615 | 0.0267302 | 0.0338692 |
| 257 | 0 | 0 | 0.0001039 | 0.0001799 | 0.0839686 | 0.1298450 | 1758 | 0.0000084 | 0.0000145 | 0.0002344 | 0.0002301 | 0.0103705 | 0.0179622 |
| 258 | 0 | 0 | 0.0001248 | 0.0002162 | 0.1888471 | 0.2735434 | 1759 | 0.0000527 | 0.0000576 | 0.0003688 | 0.0003233 | 0.0151013 | 0.0261562 |
| 259 | 0 | 0 | 0.0000681 | 0.0001179 | 0.2776387 | 0.2419839 | 1760 | 0 | 0 | 0.0001283 | 0.0002223 | 0.0188332 | 0.0326200 |
| 260 | 0.0000400 | 0.0000693 | 0.0003602 | 0.0001341 | 0 | 0 | 1761 | 0 | 0 | 0.0001661 | 0.0002026 | 0.0043237 | 0.0074889 |
| 261 | 0.0000517 | 0.0000895 | 0.0003867 | 0.0002324 | 0.1734046 | 0.2803180 | 1762 | 0 | 0 | 0 | 0 | 0.0094781 | 0.0164166 |
| 262 | 0 | 0 | 0.0002803 | 0.0003715 | 0.0397171 | 0.0510967 | 1763 | 0 | 0 | 0.0000349 | 0.0000604 | 0.0208861 | 0.0120056 |
| 263 | 0 | 0 | 0.0002330 | 0.0004036 | 0.2285464 | 0.2633905 | 1764 | 0 | 0 | 0.0000675 | 0.0001028 | 0.0512953 | 0.0239016 |
| 264 | 0 | 0 | 0.0002210 | 0.0003777 | 0.2403762 | 0.3506751 | 1765 | 0.0000013 | 0.0000023 | 0.0137994 | 0.0239013 | 0.0001624 | 0.0002812 |
| 265 | 0 | 0 | 0.0001152 | 0.0001254 | 0.0524731 | 0.0908861 | 1766 | 0 | 0 | 0.0000544 | 0.0000943 | 0.0154655 | 0.0213978 |
| 266 | 0 | 0 | 0.0001169 | 0.0002025 | 0.2624837 | 0.2743648 | 1767 | 0 | 0 | 0.0001610 | 0.0001395 | 0.0074150 | 0.0128431 |
| 267 | 0 | 0 | 0.0001248 | 0.0002162 | 0.1632179 | 0.1438061 | 1768 | 0 | 0 | 0.0003769 | 0.0003267 | 0.0023826 | 0.0041267 |
| 268 | 0 | 0 | 0.0003386 | 0.0001235 | 0.1252031 | 0.1716708 | 1769 | 0 | 0 | 0.0000045 | 0.0000078 | 0.0070643 | 0.0095901 |
| 269 | 0 | 0 | 0.0002360 | 0.0002793 | 0.1913163 | 0.2022738 | 1770 | 0.0006057 | 0.0004484 | 0.0012029 | 0.0011053 | 0 | 0 |
| 270 | 0 | 0 | 0.0001744 | 0.0002500 | 0.1320488 | 0.1956990 | 1771 | 0 | 0 | 0 | 0 | 0.0122468 | 0.0157363 |
| 271 | 0 | 0 | 0.0001466 | 0.0002539 | 0.0456216 | 0.0510024 | 1772 | 0.0024043 | 0.0003829 | 0.0105410 | 0.0009809 | 0.0003997 | 0.0006923 |
| 272 | 0 | 0 | 0.0001151 | 0.0001731 | 0.0751907 | 0.0676338 | 1773 | 0 | 0 | 0.0104014 | 0.0175647 | 0.0002776 | 0.0004808 |
| 273 | 0.0027525 | 0.0040149 | 0.0008314 | 0.0005339 | 0.0023992 | 0.0041555 | 1774 | 0 | 0 | 0.0001766 | 0.0001562 | 0.0025285 | 0.0043795 |
| 274 | 0 | 0 | 0.0002696 | 0.0002822 | 0.1639162 | 0.1523657 | 1775 | 0 | 0 | 0 | 0 | 0.0188449 | 0.0326403 |
| 276 | 0 | 0 | 0.0001913 | 0.0002546 | 0.0596345 | 0.1032900 | 1776 | 0 | 0 | 0 | 0 | 0.0092422 | 0.0160080 |
| 277 | 0.0023108 | 0.0032926 | 0.0002527 | 0.0004377 | 0.0009210 | 0.0015952 | 1777 | 0 | 0 | 0.0001069 | 0.0001312 | 0.0274981 | 0.0287748 |
| 278 | 0.0000975 | 0.0001689 | 0.0001417 | 0.0002424 | 0.2604306 | 0.2815006 | 1778 | 0 | 0 | 0.0000144 | 0.0000250 | 0.0063446 | 0.0109892 |
| 279 | 0 | 0 | 0.0002933 | 0.0002237 | 0.1404197 | 0.2432141 | 1779 | 0 | 0 | 0 | 0 | 0.0079898 | 0.0138387 |
| 280 | 0.0015479 | 0.0026810 | 0 | 0 | 0.0008869 | 0.0015362 | 1780 | 0.0001648 | 0.0000506 | 0.0002581 | 0.0002276 | 0.0078000 | 0.0135101 |
| 281 | 0 | 0 | 0.0000986 | 0.0001708 | 0.2248532 | 0.1002155 | 1781 | 0.0000167 | 0.0000290 | 0.0021716 | 0.0036565 | 0.0105981 | 0.0183565 |
| 282 | 0 | 0 | 0.0001361 | 0.0002358 | 0.4552935 | 0.3968338 | 1782 | 0 | 0 | 0.0000911 | 0.0001578 | 0.0067511 | 0.0116933 |
| 283 | 0.0001646 | 0.0002851 | 0.0003215 | 0.0003518 | 0.0095278 | 0.0165027 | 1783 | 0 | 0 | 0.0000981 | 0.0001057 | 0.0137379 | 0.0218991 |
| 284 | 0.0009583 | 0.0004915 | 0.0015010 | 0.0002832 | 0.1139894 | 0.1085088 | 1784 | 0 | 0 | 0 | 0 | 0 | 0 |
| 285 | 0 | 0 | 0.0001266 | 0.0001461 | 0 | 0 | 1785 | 0 | 0 | 0 | 0 | 0 | 0 |
| 286 | 0.0000213 | 0.0000369 | 0.0002556 | 0.0001460 | 0.1816939 | 0.2169121 | 1786 | 0 | 0 | 0 | 0 | 0.0012937 | 0.0022408 |
| 287 | 0.0000346 | 0.0000599 | 0.0001307 | 0.0001939 | 0.1178958 | 0.1185231 | 1787 | 0 | 0 | 0 | 0 | 0.0319719 | 0.0553769 |
| 288 | 0 | 0 | 0.0001886 | 0.0001656 | 0.1268540 | 0.1148801 | 1788 | 0 | 0 | 0.0000360 | 0.0000624 | 0.0165138 | 0.0186481 |
| 289 | 0 | 0 | 0.0001300 | 0.0002252 | 0.2441179 | 0.2488018 | 1789 | 0.0000317 | 0.0000549 | 0.0000044 | 0.0000077 | 0.0063460 | 0.0109917 |
| 290 | 0 | 0 | 0.0002042 | 0.0001531 | 0.1036243 | 0.0482206 | 1790 | 0.0004186 | 0.0001008 | 0.0007771 | 0.0007305 | 0.0156994 | 0.0197029 |
| 291 | 0.0018605 | 0.0004508 | 0.0029326 | 0.0002167 | 0.0292909 | 0.0414620 | 1791 | 0 | 0 | 0.0000791 | 0.0000897 | 0.0081615 | 0.0141362 |
| 292 | 0 | 0 | 0 | 0 | 0.0081855 | 0.0081005 | 1792 | 0.0000009 | 0.0000015 | 0.0000844 | 0.0001462 | 0.0089677 | 0.0155324 |
| 293 | 0.0000146 | 0.0000252 | 0.0000437 | 0.0000448 | 0.0097715 | 0.0138190 | 1793 | 0 | 0 | 0 | 0 | 0.0094808 | 0.0164212 |
| 294 | 0 | 0 | 0 | 0 | 0.0142945 | 0.0202155 | 1794 | 0 | 0 | 0 | 0 | 0.0081237 | 0.0140706 |
| 295 | 0 | 0 | 0 | 0 | 0.0095600 | 0.0135198 | 1795 | 0 | 0 | 0 | 0 | 0.0210156 | 0.0364001 |
| 297 | 0 | 0 | 0 | 0 | 0.1297971 | 0.1835609 | 1796 | 0.0002540 | 0.0001240 | 0.0002508 | 0.0002291 | 0.0005432 | 0.0009408 |
| 298 | 0 | 0 | 0.0000568 | 0.0000984 | 0.0274672 | 0.0388445 | 1797 | 0.0009434 | 0.0001380 | 0.0007316 | 0.0006356 | 0.0067990 | 0.0117761 |
| 299 | 0 | 0 | 0 | 0 | 0.0043545 | 0.0061582 | 1798 | 0 | 0 | 0.0001602 | 0.0002377 | 0.0054017 | 0.0093560 |
| 300 | 0 | 0 | 0 | 0 | 0.0202304 | 0.0286101 | 1799 | 0 | 0 | 0.0000244 | 0.0000423 | 0.0207254 | 0.0217099 |
| 301 | 0 | 0 | 0.0006115 | 0.0000568 | 0 | 0 | 1801 | 0.0017777 | 0.0001484 | 0.0028304 | 0.0024512 | 0.0051982 | 0.0090036 |
| 302 | 0 | 0 | 0.0000138 | 0.0000239 | 0.0110935 | 0.0156885 | 1802 | 0.0005602 | 0.0001312 | 0.0011721 | 0.0010526 | 0.0105815 | 0.0183278 |
| 303 | 0 | 0 | 0 | 0 | 0 | 0 | 1803 | 0 | 0 | 0.0000135 | 0.0000234 | 0.0212268 | 0.0367658 |
| 304 | 0 | 0 | 0 | 0 | 0.0944802 | 0.1336152 | 1804 | 0 | 0 | 0.0000301 | 0.0000300 | 0.0142541 | 0.0165957 |
| 305 | 0.0001560 | 0.0002702 | 0.0003102 | 0.0000874 | 0 | 0 | 1806 | 0.0045964 | 0.0002945 | 0.0051493 | 0.0031891 | 0 | 0 |
| 306 | 0 | 0 | 0 | 0 | 0 | 0 | 1807 | 0 | 0 | 0 | 0 | 0.0136169 | 0.0235851 |
| 307 | 0 | 0 | 0 | 0 | 0.1780230 | 0.2517625 | 1808 | 0.0000718 | 0.0000639 | 0.0003240 | 0.0000446 | 0 | 0 |
| 308 | 0.0001318 | 0.0002283 | 0 | 0 | 0.0957482 | 0.1354084 | 1809 | 0.0017569 | 0.0000684 | 0.0026801 | 0.0004138 | 0 | 0 |
| 309 | 0.0000467 | 0.0000383 | 0.0000026 | 0.0000046 | 0 | 0 | 1810 | 0 | 0 | 0.0000018 | 0.0000032 | 0 | 0 |
| 310 | 0 | 0 | 0 | 0 | 0 | 0 | 1811 | 0 | 0 | 0 | 0 | 0 | 0 |
| 311 | 0 | 0 | 0.0000276 | 0.0000479 | 0 | 0 | 1812 | 0.0000211 | 0.0000365 | 0.0000032 | 0.0000055 | 0 | 0 |
| 312 | 0 | 0 | 0 | 0 | 0.0315036 | 0.0445528 | 1813 | 0 | 0 | 0.0000498 | 0.0000448 | 0.0076994 | 0.0112195 |
| 313 | 0.0000104 | 0.0000181 | 0 | 0 | 0 | 0 | 1814 | 0 | 0 | 0.0000916 | 0.0001215 | 0.0019233 | 0.0033313 |
| 314 | 0 | 0 | 0.0001007 | 0.0000865 | 0.0484529 | 0.0685228 | 1815 | 0 | 0 | 0.0000346 | 0.0000185 | 0 | 0 |
| 315 | 0 | 0 | 0 | 0 | 0.0010711 | 0.0015148 | 1816 | 0.0000003 | 0.0000006 | 0.0000958 | 0.0000533 | 0 | 0 |
| 316 | 0.0000577 | 0.0000500 | 0.0010144 | 0.0002734 | 0 | 0 | 1817 | 0 | 0 | 0.0000114 | 0.0000197 | 0 | 0 |
| 317 | 0 | 0 | 0 | 0 | 0.0274907 | 0.0388778 | 1818 | 0 | 0 | 0.0000123 | 0.0000213 | 0.0175020 | 0.0155229 |
| 318 | 0 | 0 | 0.0000399 | 0.0000691 | 0 | 0 | 1819 | 0 | 0 | 0.0000156 | 0.0000269 | 0 | 0 |
| 319 | 0 | 0 | 0.0017707 | 0.0003739 | 0.0229566 | 0.0324656 | 1820 | 0 | 0 | 0 | 0 | 0 | 0 |
| 320 | 0 | 0 | 0.0001892 | 0.0001633 | 0 | 0 | 1821 | 0.0083650 | 0.0004110 | 0.0132174 | 0.0014703 | 0.0302489 | 0.0523927 |
| 321 | 0 | 0 | 0.0007360 | 0.0002644 | 0.0699828 | 0.0989707 | 1822 | 0 | 0 | 0 | 0 | 0.0011690 | 0.0020248 |
| 322 | 0.0023674 | 0.0002528 | 0.0252286 | 0.0005503 | 0 | 0 | 1823 | 0 | 0 | 0.0000643 | 0.0000291 | 0 | 0 |
| 323 | 0 | 0 | 0 | 0 | 0 | 0 | 1824 | 0 | 0 | 0.0000274 | 0.0000348 | 0.0121330 | 0.0210149 |
| 324 | 0 | 0 | 0 | 0 | 0.0558163 | 0.0789362 | 1825 | 0 | 0 | 0.0000133 | 0.0000230 | 0.0024672 | 0.0042733 |
| 325 | 0.0000204 | 0.0000353 | 0.0000107 | 0.0000186 | 0.0677692 | 0.0958401 | 1826 | 0 | 0 | 0 | 0 | 0.0084396 | 0.0146177 |
| 326 | 0.0022911 | 0.0028562 | 0.0011234 | 0.0005254 | 0.0020915 | 0.0036225 | 1827 | 0.0000010 | 0.0000018 | 0.0000575 | 0.0000501 | 0.0128808 | 0.0223102 |
| 327 | 0.0042601 | 0.0042526 | 0.0034321 | 0.0012976 | 0 | 0 | 1828 | 0 | 0 | 0.0000110 | 0.0000190 | 0 | 0 |
| 328 | 0.0000015 | 0.0000026 | 0 | 0 | 0.0998208 | 0.0138982 | 1829 | 0 | 0 | 0.0001693 | 0.0000718 | 0.0134032 | 0.0232151 |
| 329 | 0 | 0 | 0 | 0 | 0.0183890 | 0.0260060 | 1830 | 0 | 0 | 0.0000046 | 0.0000079 | 0.0107508 | 0.0186209 |
| 330 | 0 | 0 | 0 | 0 | 0.0539333 | 0.0762732 | 1831 | 0.0000020 | 0.0000035 | 0.0000027 | 0.0000027 | 0.0086795 | 0.0039288 |
| 331 | 0 | 0 | 0 | 0 | 0 | 0 | 1832 | 0 | 0 | 0.0001619 | 0.0000518 | 0.0047950 | 0.0051503 |
| 332 | 0.0000508 | 0.0000879 | 0 | 0 | 0.1510237 | 0.0002060 | 1833 | 0 | 0 | 0 | 0 | 0.0083094 | 0.0080082 |
| 333 | 0.0000565 | 0.0000978 | 0 | 0 | 0 | 0 | 1834 | 0 | 0 | 0.0000068 | 0.0000118 | 0.0147250 | 0.0128702 |
| 334 | 0 | 0 | 0 | 0 | 0.0809992 | 0.1145501 | 1835 | 0.0009736 | 0.0004992 | 0.0360275 | 0.0068131 | 0.0102126 | 0.0176888 |
| 335 | 0 | 0 | 0 | 0 | 0 | 0 | 1836 | 0.0000092 | 0.0000159 | 0.0000005 | 0.0000008 | 0.0015277 | 0.0026461 |
| 336 | 0 | 0 | 0.0000066 | 0.0000114 | 0 | 0 | 1837 | 0 | 0 | 0 | 0 | 0.0005918 | 0.0010251 |
| 337 | 0 | 0 | 0 | 0 | 0 | 0 | 1838 | 0 | 0 | 0.0000192 | 0.0000224 | 0.0148857 | 0.0257828 |
| 338 | 0 | 0 | 0 | 0 | 0 | 0 | 1839 | 0.0000020 | 0.0000035 | 0.0000215 | 0.0000373 | 0 | 0 |
| 339 | 0 | 0 | 0 | 0 | 0 | 0 | 1840 | 0 | 0 | 0.0000105 | 0.0000182 | 0.0091860 | 0.0159107 |
| 340 | 0 | 0 | 0 | 0 | 0 | 0 | 1841 | 0 | 0 | 0.0000005 | 0.0000008 | 0.0080680 | 0.0139742 |
| 341 | 0 | 0 | 0 | 0 | 0.1293092 | 0.1828709 | 1842 | 0 | 0 | 0.0000146 | 0.0000133 | 0 | 0 |
| 342 | 0 | 0 | 0.0000092 | 0.0000160 | 0 | 0 | 1844 | 0 | 0 | 0.0000338 | 0.0000387 | 0.0042791 | 0.0074117 |
| 343 | 0 | 0 | 0.0000230 | 0.0000399 | 0.0119520 | 0.0169027 | 1845 | 0 | 0 | 0.0000178 | 0.0000309 | 0.0001023 | 0.0001772 |
| 344 | 0 | 0 | 0.0000077 | 0.0000133 | 0.0458083 | 0.0647828 | 1846 | 0 | 0 | 0 | 0 | 0.0075919 | 0.0131496 |
| 345 | 0 | 0 | 0 | 0 | 0 | 0 | 1847 | 0 | 0 | 0 | 0 | 0 | 0 |
| 346 | 0 | 0 | 0 | 0 | 0 | 0 | 1848 | 0.0000105 | 0.0000182 | 0.0000384 | 0.0000666 | 0.0040739 | 0.0070563 |
| 347 | 0.0000111 | 0.0000192 | 0 | 0 | 0 | 0 | 1849 | 0 | 0 | 0.0000128 | 0.0000222 | 0.0114668 | 0.0058062 |
| 348 | 0 | 0 | 0 | 0 | 0.1319993 | 0.1866752 | 1850 | 0 | 0 | 0.0000096 | 0.0000166 | 0 | 0 |
| 349 | 0.0000087 | 0.0000150 | 0 | 0 | 0 | 0 | 1851 | 0 | 0 | 0.0000123 | 0.0000117 | 0 | 0 |
| 350 | 0 | 0 | 0 | 0 | 0.2108575 | 0.2981976 | 1852 | 0 | 0 | 0 | 0 | 0 | 0 |
| 351 | 0 | 0 | 0 | 0 | 0.0259249 | 0.0366634 | 1853 | 0.0000139 | 0.0000241 | 0 | 0 | 0.0005582 | 0.0009669 |
| 352 | 0 | 0 | 0.0001074 | 0.0001861 | 0 | 0 | 1854 | 0 | 0 | 0 | 0 | 0 | 0 |
| 353 | 0 | 0 | 0 | 0 | 0 | 0 | 1855 | 0.0000306 | 0.0000529 | 0.0000178 | 0.0000308 | 0.0148567 | 0.0135019 |
| 354 | 0.0000101 | 0.0000174 | 0.0000962 | 0.0001036 | 0.0911843 | 0.1289541 | 1856 | 0.0000346 | 0.0000600 | 0.0000421 | 0.0000592 | 0.0113143 | 0.0132170 |
| 355 | 0 | 0 | 0.0000200 | 0.0000346 | 0 | 0 | 1857 | 0 | 0 | 0.0000114 | 0.0000133 | 0 | 0 |
| 356 | 0.0000097 | 0.0000167 | 0 | 0 | 0 | 0 | 1858 | 0 | 0 | 0 | 0 | 0.0042652 | 0.0073875 |
| 357 | 0.0000258 | 0.0000447 | 0 | 0 | 0 | 0 | 1859 | 0 | 0 | 0 | 0 | 0.0299173 | 0.0168661 |
| 358 | 0 | 0 | 0 | 0 | 0 | 0 | 1860 | 0.0000282 | 0.0000488 | 0.0000023 | 0.0000040 | 0.0024516 | 0.0042463 |
| 359 | 0 | 0 | 0 | 0 | 0 | 0 | 1861 | 0.0000360 | 0.0000623 | 0 | 0 | 0.0172309 | 0.0298448 |
| 360 | 0 | 0 | 0.0000077 | 0.0000133 | 0 | 0 | 1862 | 0 | 0 | 0 | 0 | 0.0017440 | 0.0030208 |
| 361 | 0.0000087 | 0.0000150 | 0.0006598 | 0.0001819 | 0 | 0 | 1863 | 0.0000469 | 0.0000812 | 0.0000059 | 0.0000103 | 0.0020384 | 0.0035307 |
| 362 | 0.0000879 | 0.0001523 | 0.0009182 | 0.0002469 | 0.1284541 | 0.0827066 | 1864 | 0.0000360 | 0.0000623 | 0.0000114 | 0.0000101 | 0.0162806 | 0.0281988 |
| 363 | 0 | 0 | 0 | 0 | 0.0027693 | 0.0039164 | 1865 | 0 | 0 | 0.0000424 | 0.0000479 | 0.0010023 | 0.0017361 |
| 364 | 0 | 0 | 0 | 0 | 0.0536420 | 0.0758612 | 1866 | 0 | 0 | 0 | 0 | 0.0051799 | 0.0089719 |
| 365 | 0.0000954 | 0.0000844 | 0.0026423 | 0.0003263 | 0 | 0 | 1867 | 0 | 0 | 0.0000077 | 0.0000134 | 0 | 0 |
| 366 | 0 | 0 | 0 | 0 | 0.0369029 | 0.0521885 | 1868 | 0.0002339 | 0.0000725 | 0.0005274 | 0.0001154 | 0 | 0 |
| 367 | 0 | 0 | 0 | 0 | 0.1848965 | 0.2614832 | 1869 | 0 | 0 | 0.0000452 | 0.0000453 | 0 | 0 |
| 368 | 0 | 0 | 0 | 0 | 0 | 0 | 1870 | 0 | 0 | 0.0000036 | 0.0000063 | 0.0092814 | 0.0153974 |
| 369 | 0 | 0 | 0.0000153 | 0.0000266 | 0 | 0 | 1871 | 0 | 0 | 0.0000494 | 0.0000856 | 0.0085164 | 0.0147508 |
| 370 | 0 | 0 | 0.0008919 | 0.0004515 | 0.1026751 | 0.1452046 | 1872 | 0 | 0 | 0.0000407 | 0.0000398 | 0.0072465 | 0.0125513 |
| 371 | 0.0000499 | 0.0000864 | 0 | 0 | 0 | 0 | 1874 | 0 | 0 | 0.0000269 | 0.0000371 | 0.0049480 | 0.0085702 |
| 372 | 0.0000400 | 0.0000692 | 0.0009810 | 0.0001949 | 0 | 0 | 1875 | 0.0002580 | 0.0003055 | 0.0000994 | 0.0001721 | 0.0020868 | 0.0019339 |
| 373 | 0 | 0 | 0 | 0 | 0.0242182 | 0.0148237 | 1876 | 0 | 0 | 0.0001737 | 0.0000539 | 0.0050869 | 0.0088108 |
| 374 | 0 | 0 | 0 | 0 | 0 | 0 | 1877 | 0.0001113 | 0.0001221 | 0.0008772 | 0.0001347 | 0 | 0 |
| 375 | 0 | 0 | 0.0000169 | 0.0000292 | 0 | 0 | 1878 | 0.0001154 | 0.0000506 | 0.0011702 | 0.0001141 | 0 | 0 |
| 376 | 0 | 0 | 0 | 0 | 0.1248432 | 0.1765550 | 1879 | 0.0000155 | 0.0000269 | 0.0000940 | 0.0000430 | 0.0057669 | 0.0099885 |
| 377 | 0.0000201 | 0.0000348 | 0 | 0 | 0.0200501 | 0.0283551 | 1880 | 0.0000304 | 0.0000229 | 0.0000593 | 0.0000521 | 0.0071421 | 0.0123704 |
| 378 | 0 | 0 | 0.0000553 | 0.0000957 | 0 | 0 | 1881 | 0.0000050 | 0.0000087 | 0.0000107 | 0.0000186 | 0.0001094 | 0.0001895 |
| 379 | 0.0005807 | 0.0007015 | 0.0000092 | 0.0000160 | 0.1613972 | 0.2282501 | 1882 | 0 | 0 | 0.0000050 | 0.0000087 | 0.0248666 | 0.0234986 |
| 381 | 0.0013667 | 0.0001470 | 0.0014716 | 0.0000999 | 0.0114746 | 0.0162275 | 1883 | 0 | 0 | 0 | 0 | 0.0111844 | 0.0193719 |
| 382 | 0.0002088 | 0.0003617 | 0 | 0 | 0.0002319 | 0.0003280 | 1884 | 0 | 0 | 0.0000251 | 0.0000422 | 0 | 0 |
| 383 | 0.0001155 | 0.0002001 | 0.0000629 | 0.0001090 | 0 | 0 | 1885 | 0.0022979 | 0.0003269 | 0.0049182 | 0.0005270 | 0 | 0 |
| 384 | 0 | 0 | 0 | 0 | 0 | 0 | 1886 | 0 | 0 | 0.0000037 | 0.0000063 | 0.0016826 | 0.0029143 |
| 385 | 0 | 0 | 0 | 0 | 0 | 0 | 1887 | 0.0000295 | 0.0000306 | 0.0000694 | 0.0000128 | 0.0080531 | 0.0139484 |
| 386 | 0 | 0 | 0 | 0 | 0.3210464 | 0.3088334 | 1888 | 0.0000587 | 0.0000323 | 0.0001130 | 0.0000537 | 0 | 0 |
| 387 | 0 | 0 | 0.0006004 | 0.0002863 | 0 | 0 | 1889 | 0 | 0 | 0.0000315 | 0.0000103 | 0.0137533 | 0.0238213 |
| 388 | 0.0011051 | 0.0001338 | 0.0010431 | 0.0002487 | 0.0591409 | 0.0836378 | 1890 | 0 | 0 | 0.0000676 | 0.0000507 | 0.0102193 | 0.0177003 |
| 389 | 0 | 0 | 0 | 0 | 0.0040722 | 0.0070533 | 1891 | 0 | 0 | 0.0000009 | 0.0000016 | 0.0000227 | 0.0000394 |
| 390 | 0.0022027 | 0.0035927 | 0 | 0 | 0.0039956 | 0.0069206 | 1892 | 0 | 0 | 0.0000009 | 0.0000016 | 0 | 0 |
| 391 | 0 | 0 | 0 | 0 | 0.0089299 | 0.0154670 | 1893 | 0.0000322 | 0.0000558 | 0.0000258 | 0.0000447 | 0.0009566 | 0.0016569 |
| 392 | 0 | 0 | 0.0001089 | 0.0001886 | 0.0003318 | 0.0005747 | 1894 | 0.0000073 | 0.0000126 | 0.0000265 | 0.0000300 | 0.0212104 | 0.0276191 |
| 393 | 0.0008596 | 0.0003355 | 0.0080292 | 0.0019091 | 0.0614979 | 0.0975487 | 1895 | 0.0005634 | 0.0000145 | 0.0008358 | 0.0000757 | 0.0184332 | 0.0319273 |
| 394 | 0.0029859 | 0.0041202 | 0 | 0 | 0 | 0 | 1897 | 0.0021314 | 0.0001263 | 0.0021966 | 0.0001813 | 0.0016675 | 0.0028883 |
| 395 | 0 | 0 | 0 | 0 | 0.0140083 | 0.0242630 | 1898 | 0 | 0 | 0.0000406 | 0.0000188 | 0 | 0 |
| 396 | 0 | 0 | 0 | 0 | 0.0167457 | 0.0153954 | 1899 | 0 | 0 | 0.0000205 | 0.0000237 | 0.0016205 | 0.0028068 |
| 397 | 0 | 0 | 0 | 0 | 0.0284898 | 0.0474175 | 1900 | 0 | 0 | 0 | 0 | 0.0075360 | 0.0123301 |
| 398 | 0.0028360 | 0.0045240 | 0.0006378 | 0.0003034 | 0 | 0 | 1902 | 0.0000152 | 0.0000143 | 0.0000355 | 0.0000346 | 0.0050183 | 0.0086919 |
| 399 | 0 | 0 | 0.0000568 | 0.0000718 | 0.0082304 | 0.0071426 | 1903 | 0.0000003 | 0.0000006 | 0.0000452 | 0.0000328 | 0.0067434 | 0.0116799 |
| 400 | 0.0000450 | 0.0000779 | 0.0002070 | 0.0002536 | 0 | 0 | 1904 | 0.0010793 | 0.0000564 | 0.0011245 | 0.0000969 | 0.0252836 | 0.0339733 |
| 401 | 0 | 0 | 0.0000258 | 0.0000447 | 0.0070531 | 0.0122164 | 1905 | 0 | 0 | 0 | 0 | 0 | 0 |
| 402 | 0 | 0 | 0 | 0 | 0.0371334 | 0.0643169 | 1906 | 0.0001117 | 0.0001107 | 0.0017138 | 0.0002746 | 0.0019296 | 0.0033421 |
| 403 | 0.0002571 | 0.0002081 | 0.0027514 | 0.0012125 | 0.0174262 | 0.0164329 | 1907 | 0.0002741 | 0.0001943 | 0 | 0 | 0.0034466 | 0.0031875 |
| 404 | 0 | 0 | 0.0002177 | 0.0003771 | 0.0025530 | 0.0044219 | 1909 | 0 | 0 | 0.0000010 | 0.0000016 | 0.0005361 | 0.0009285 |
| 405 | 0 | 0 | 0 | 0 | 0.0169812 | 0.0294123 | 1910 | 0.0001503 | 0.0001316 | 0.0003375 | 0.0004181 | 0 | 0 |
| 406 | 0.0000285 | 0.0000494 | 0.0000458 | 0.0000794 | 0.0532935 | 0.0414884 | 1911 | 0.0004073 | 0.0003775 | 0.0001500 | 0.0002599 | 0 | 0 |
| 407 | 0.0000291 | 0.0000504 | 0.0003463 | 0.0003503 | 0.0026261 | 0.0045485 | 1912 | 0 | 0 | 0.0001209 | 0.0001064 | 0 | 0 |
| 408 | 0.0006237 | 0.0003539 | 0.0063730 | 0.0009548 | 0 | 0 | 1913 | 0 | 0 | 0 | 0 | 0.0039704 | 0.0068769 |
| 409 | 0 | 0 | 0.0000372 | 0.0000645 | 0.0052833 | 0.0091510 | 1914 | 0.0003964 | 0.0000292 | 0.0021142 | 0.0002783 | 0.0151591 | 0.0220914 |
| 410 | 0 | 0 | 0.0001633 | 0.0002828 | 0.0191228 | 0.0285728 | 1915 | 0 | 0 | 0 | 0 | 0.0277240 | 0.0067179 |
| 411 | 0.0000128 | 0.0000222 | 0 | 0 | 0.0117165 | 0.0202936 | 1916 | 0 | 0 | 0 | 0 | 0.0047909 | 0.0056743 |
| 412 | 0.0001142 | 0.0001109 | 0 | 0 | 0 | 0 | 1917 | 0 | 0 | 0 | 0 | 0.0123623 | 0.0214122 |
| 413 | 0 | 0 | 0.0001518 | 0.0002630 | 0.0090798 | 0.0157267 | 1918 | 0 | 0 | 0 | 0 | 0.0003748 | 0.0006493 |
| 414 | 0 | 0 | 0 | 0 | 0.0067766 | 0.0117374 | 1919 | 0 | 0 | 0 | 0 | 0.0126659 | 0.0219380 |
| 415 | 0.0000047 | 0.0000081 | 0 | 0 | 0.0001946 | 0.0003370 | 1920 | 0 | 0 | 0 | 0 | 0.0003537 | 0.0006127 |
| 416 | 0 | 0 | 0.0000641 | 0.0000645 | 0 | 0 | 1921 | 0 | 0 | 0.0000153 | 0.0000264 | 0 | 0 |
| 417 | 0 | 0 | 0 | 0 | 0.0062524 | 0.0108295 | 1922 | 0 | 0 | 0.0000513 | 0.0000889 | 0 | 0 |
| 418 | 0 | 0 | 0 | 0 | 0 | 0 | 1923 | 0 | 0 | 0.0000114 | 0.0000198 | 0.0113313 | 0.0196265 |
| 419 | 0 | 0 | 0 | 0 | 0.0245045 | 0.0424431 | 1924 | 0 | 0 | 0 | 0 | 0.0009456 | 0.0016379 |
| 420 | 0 | 0 | 0 | 0 | 0.0011285 | 0.0019547 | 1925 | 0 | 0 | 0 | 0 | 0 | 0 |
| 422 | 0.0000402 | 0.0000475 | 0 | 0 | 0.0030752 | 0.0048773 | 1926 | 0 | 0 | 0.0000067 | 0.0000116 | 0.0078075 | 0.0112603 |
| 423 | 0 | 0 | 0.0000948 | 0.0001641 | 0.0239613 | 0.0214125 | 1927 | 0 | 0 | 0 | 0 | 0.0073881 | 0.0120105 |
| 424 | 0 | 0 | 0 | 0 | 0 | 0 | 1928 | 0 | 0 | 0 | 0 | 0.0084953 | 0.0147143 |
| 425 | 0 | 0 | 0 | 0 | 0.0053725 | 0.0093055 | 1929 | 0 | 0 | 0 | 0 | 0.0218048 | 0.0147009 |
| 426 | 0 | 0 | 0 | 0 | 0.0068393 | 0.0118460 | 1930 | 0 | 0 | 0.0000657 | 0.0000590 | 0 | 0 |
| 427 | 0 | 0 | 0.0001232 | 0.0002134 | 0.0001871 | 0.0003241 | 1931 | 0 | 0 | 0 | 0 | 0.0054930 | 0.0084786 |
| 428 | 0 | 0 | 0 | 0 | 0 | 0 | 1932 | 0 | 0 | 0 | 0 | 0 | 0 |
| 429 | 0 | 0 | 0 | 0 | 0 | 0 | 1933 | 0 | 0 | 0 | 0 | 0 | 0 |
| 430 | 0 | 0 | 0.0001098 | 0.0001902 | 0.0030937 | 0.0053585 | 1934 | 0.0001190 | 0.0001150 | 0.0002452 | 0.0003100 | 0.0088779 | 0.0125807 |
| 431 | 0 | 0 | 0.0001175 | 0.0002034 | 0.0118859 | 0.0142173 | 1935 | 0 | 0 | 0 | 0 | 0.0141015 | 0.0244245 |
| 432 | 0.0019526 | 0.0033820 | 0 | 0 | 0 | 0 | 1936 | 0 | 0 | 0.0000448 | 0.0000776 | 0.0118234 | 0.0102434 |
| 433 | 0.0002604 | 0.0001779 | 0.0013245 | 0.0004278 | 0.0002759 | 0.0004779 | 1937 | 0.0000064 | 0.0000110 | 0 | 0 | 0.0024313 | 0.0024025 |
| 434 | 0 | 0 | 0.0001375 | 0.0002382 | 0.0096024 | 0.0166318 | 1938 | 0.0000754 | 0.0001306 | 0 | 0 | 0.0005738 | 0.0009938 |
| 435 | 0.0000488 | 0.0000501 | 0.0002664 | 0.0004615 | 0.0028452 | 0.0030135 | 1939 | 0 | 0 | 0.0000038 | 0.0000066 | 0.0127554 | 0.0178290 |
| 436 | 0 | 0 | 0 | 0 | 0 | 0 | 1940 | 0 | 0 | 0 | 0 | 0.0175073 | 0.0291343 |
| 437 | 0 | 0 | 0 | 0 | 0 | 0 | 1941 | 0.0002190 | 0.0001364 | 0.0000317 | 0.0000548 | 0.0010889 | 0.0018860 |
| 438 | 0 | 0 | 0.0002326 | 0.0003591 | 0 | 0 | 1942 | 0.0000827 | 0.0001432 | 0.0000643 | 0.0001114 | 0.0051542 | 0.0008972 |
| 439 | 0.0004142 | 0.0001317 | 0.0004875 | 0.0002289 | 0.0041754 | 0.0064649 | 1943 | 0 | 0 | 0.0000315 | 0.0000545 | 0.0107602 | 0.0186372 |
| 440 | 0.0004794 | 0.0003959 | 0.0021674 | 0.0012392 | 0 | 0 | 1944 | 0 | 0 | 0 | 0 | 0.0184315 | 0.0268293 |
| 441 | 0.0000111 | 0.0000192 | 0 | 0 | 0 | 0 | 1945 | 0 | 0 | 0.0001789 | 0.0000622 | 0.0020212 | 0.0035008 |
| 442 | 0.0000919 | 0.0001592 | 0.0014010 | 0.0011475 | 0 | 0 | 1946 | 0.0004391 | 0.0005527 | 0 | 0 | 0.0016392 | 0.0015230 |
| 443 | 0 | 0 | 0 | 0 | 0.0093467 | 0.0073972 | 1947 | 0.0004006 | 0.0001555 | 0.0002307 | 0.0002362 | 0.0005364 | 0.0009291 |
| 444 | 0 | 0 | 0 | 0 | 0 | 0 | 1948 | 0 | 0 | 0 | 0 | 0 | 0 |
| 445 | 0 | 0 | 0 | 0 | 0.0177145 | 0.0230742 | 1949 | 0.0004954 | 0.0001098 | 0.0239673 | 0.0022134 | 0 | 0 |
| 446 | 0.0013179 | 0.0002259 | 0.0000430 | 0.0000744 | 0.0035495 | 0.0061479 | 1950 | 0 | 0 | 0 | 0 | 0.0005017 | 0.0008690 |
| 447 | 0 | 0 | 0.0000296 | 0.0000512 | 0 | 0 | 1951 | 0 | 0 | 0.0000247 | 0.0000428 | 0 | 0 |
| 448 | 0 | 0 | 0 | 0 | 0 | 0 | 1952 | 0 | 0 | 0 | 0 | 0 | 0 |
| 449 | 0 | 0 | 0.0000143 | 0.0000248 | 0 | 0 | 1954 | 0 | 0 | 0.0000134 | 0.0000231 | 0.0016683 | 0.0028896 |
| 450 | 0 | 0 | 0.0000602 | 0.0001042 | 0 | 0 | 1955 | 0 | 0 | 0 | 0 | 0.0228263 | 0.0395363 |
| 451 | 0 | 0 | 0 | 0 | 0.0075457 | 0.0130695 | 1956 | 0 | 0 | 0.0002428 | 0.0002139 | 0.0014964 | 0.0025918 |
| 452 | 0.0007210 | 0.0006495 | 0.0005844 | 0.0010122 | 0 | 0 | 1957 | 0.0010197 | 0.0009460 | 0.0007188 | 0.0001341 | 0 | 0 |
| 453 | 0.0028202 | 0.0006981 | 0.0006720 | 0.0005823 | 0.0178773 | 0.0309643 | 1958 | 0.0002568 | 0.0004447 | 0 | 0 | 0.0012506 | 0.0021660 |
| 454 | 0 | 0 | 0.0001436 | 0.0002487 | 0 | 0 | 1959 | 0 | 0 | 0 | 0 | 0.0170408 | 0.0260386 |
| 455 | 0.0060793 | 0.0013687 | 0.0127466 | 0.0050718 | 0.0023831 | 0.0041276 | 1960 | 0 | 0 | 0 | 0 | 0.0069377 | 0.0120165 |
| 456 | 0.0025241 | 0.0013519 | 0.0020921 | 0.0016110 | 0.0176881 | 0.0306367 | 1961 | 0.0004598 | 0.0003520 | 0.0000307 | 0.0000532 | 0.0021004 | 0.0036379 |
| 457 | 0 | 0 | 0.0000328 | 0.0000568 | 0 | 0 | 1962 | 0 | 0 | 0.0000238 | 0.0000412 | 0.0003160 | 0.0005473 |
| 458 | 0 | 0 | 0 | 0 | 0.0068230 | 0.0118179 | 1963 | 0.0000765 | 0.0000912 | 0.0000731 | 0.0001266 | 0.0008304 | 0.0007859 |
| 459 | 0 | 0 | 0 | 0 | 0 | 0 | 1964 | 0.0000900 | 0.0001119 | 0.0007399 | 0.0006510 | 0 | 0 |
| 460 | 0 | 0 | 0 | 0 | 0 | 0 | 1965 | 0 | 0 | 0.0003923 | 0.0003447 | 0.0185523 | 0.0116015 |
| 461 | 0 | 0 | 0.0000143 | 0.0000248 | 0 | 0 | 1966 | 0 | 0 | 0 | 0 | 0.0083072 | 0.0143885 |
| 462 | 0 | 0 | 0.0001816 | 0.0003145 | 0.0064170 | 0.0111145 | 1967 | 0 | 0 | 0.0000124 | 0.0000129 | 0 | 0 |
| 463 | 0 | 0 | 0.0001677 | 0.0002904 | 0.0011828 | 0.0020486 | 1969 | 0.0002384 | 0.0001230 | 0.0006388 | 0.0005545 | 0.0082832 | 0.0143469 |
| 464 | 0 | 0 | 0.0002078 | 0.0001866 | 0.0142368 | 0.0066098 | 1970 | 0.0000663 | 0.0000611 | 0.0020880 | 0.0030883 | 0 | 0 |
| 465 | 0 | 0 | 0 | 0 | 0.0052292 | 0.0090573 | 1971 | 0.0011896 | 0.0001929 | 0.0035645 | 0.0008630 | 0.0057613 | 0.0099789 |
| 466 | 0 | 0 | 0 | 0 | 0.0280453 | 0.0246908 | 1972 | 0 | 0 | 0.0002084 | 0.0001990 | 0.0262043 | 0.0314184 |
| 467 | 0.0008463 | 0.0004359 | 0.0000831 | 0.0001439 | 0 | 0 | 1973 | 0 | 0 | 0.0001438 | 0.0001275 | 0.0079431 | 0.0137579 |
| 468 | 0.0024443 | 0.0027341 | 0.0008780 | 0.0009669 | 0 | 0 | 1974 | 0 | 0 | 0.0001428 | 0.0001237 | 0.0220420 | 0.0169078 |
| 469 | 0.0000448 | 0.0000777 | 0 | 0 | 0.0086170 | 0.0149252 | 1975 | 0 | 0 | 0.0001105 | 0.0001268 | 0.0044758 | 0.0067951 |
| 470 | 0.0000115 | 0.0000199 | 0.0000799 | 0.0000979 | 0.0157570 | 0.0272918 | 1976 | 0.0004931 | 0.0001581 | 0.0019200 | 0.0006573 | 0.0259703 | 0.0339102 |
| 471 | 0.0000982 | 0.0000341 | 0.0017704 | 0.0003230 | 0.0041258 | 0.0071462 | 1977 | 0 | 0 | 0 | 0 | 0 | 0 |
| 473 | 0.0008051 | 0.0000803 | 0.0016706 | 0.0004760 | 0 | 0 | 1978 | 0.0000112 | 0.0000193 | 0.0041953 | 0.0072665 | 0 | 0 |
| 474 | 0.0006335 | 0.0004250 | 0.0003782 | 0.0006550 | 0.0101572 | 0.0175928 | 1979 | 0 | 0 | 0.0000352 | 0.0000609 | 0.0408739 | 0.0501130 |
| 475 | 0 | 0 | 0 | 0 | 0.0044220 | 0.0076592 | 1980 | 0 | 0 | 0 | 0 | 0.0011917 | 0.0020641 |
| 476 | 0.0001338 | 0.0001223 | 0 | 0 | 0.0007470 | 0.0012938 | 1981 | 0 | 0 | 0 | 0 | 0.0096925 | 0.0167878 |
| 477 | 0.0011092 | 0.0001524 | 0.0003750 | 0.0005845 | 0.0203991 | 0.0279806 | 1982 | 0.0442426 | 0.0100134 | 0.0831665 | 0.0159561 | 0.1307232 | 0.0080173 |
| 478 | 0.0009810 | 0.0001108 | 0.0023819 | 0.0009795 | 0.0010946 | 0.0009823 | 1983 | 0 | 0 | 0 | 0 | 0.0078427 | 0.0135840 |
| 479 | 0.0003131 | 0.0001678 | 0.0009852 | 0.0001189 | 0.0024695 | 0.0042773 | 1984 | 0 | 0 | 0.0001859 | 0.0002286 | 0 | 0 |
| 480 | 0.0001096 | 0.0000953 | 0.0005497 | 0.0004981 | 0 | 0 | 1985 | 0.0000530 | 0.0000047 | 0.0007428 | 0.0004534 | 0.0168361 | 0.0291610 |
| 481 | 0 | 0 | 0.0001426 | 0.0001672 | 0.0361284 | 0.0625763 | 1986 | 0 | 0 | 0 | 0 | 0.0027372 | 0.0026339 |
| 482 | 0 | 0 | 0.0000875 | 0.0001515 | 0.0355187 | 0.0581144 | 1987 | 0 | 0 | 0 | 0 | 0.0038043 | 0.0065892 |
| 483 | 0 | 0 | 0 | 0 | 0.0027122 | 0.0046976 | 1988 | 0 | 0 | 0.0001151 | 0.0001216 | 0.0013096 | 0.0022682 |
| 484 | 0.0009362 | 0.0001973 | 0.0004820 | 0.0006298 | 0.0011667 | 0.0020208 | 1990 | 0.0002144 | 0.0001677 | 0.0005097 | 0.0004414 | 0 | 0 |
| 485 | 0 | 0 | 0 | 0 | 0.0107619 | 0.0186402 | 1991 | 0.0001612 | 0.0001477 | 0.0000608 | 0.0001052 | 0.0004618 | 0.0007999 |
| 486 | 0.0001584 | 0.0001714 | 0.0047770 | 0.0071923 | 0 | 0 | 1992 | 0.0001179 | 0.0002041 | 0.0001520 | 0.0002632 | 0 | 0 |
| 487 | 0 | 0 | 0.0011701 | 0.0017163 | 0.0577037 | 0.0816053 | 1993 | 0.0003737 | 0.0000364 | 0.0003810 | 0.0003404 | 0.0153320 | 0.0265558 |
| 488 | 0.0008551 | 0.0005615 | 0.0071277 | 0.0064041 | 0.0194711 | 0.0275363 | 1994 | 0.0012234 | 0.0001061 | 0.0162634 | 0.0256335 | 0 | 0 |
| 489 | 0 | 0 | 0.0017111 | 0.0010507 | 0.0553528 | 0.0656917 | 1995 | 0.0001248 | 0.0002162 | 0.0001318 | 0.0001511 | 0.0012595 | 0.0021815 |
| 490 | 0 | 0 | 0.0015341 | 0.0026571 | 0.0813540 | 0.1150519 | 1996 | 0.0002096 | 0.0000581 | 0.0006092 | 0.0001619 | 0 | 0 |
| 491 | 0 | 0 | 0.0022019 | 0.0038138 | 0 | 0 | 1998 | 0.0036606 | 0.0001738 | 0.0059853 | 0.0001614 | 0.0200462 | 0.0347210 |
| 492 | 0 | 0 | 0.0024726 | 0.0042827 | 0.3544001 | 0.4708680 | 1999 | 0.0001640 | 0.0000210 | 0.0005837 | 0.0005055 | 0.0087106 | 0.0150873 |
| 493 | 0 | 0 | 0.0026138 | 0.0044421 | 0.0337543 | 0.0477358 | 2000 | 0 | 0 | 0 | 0 | 0.0021484 | 0.0037211 |
| 494 | 0.0011744 | 0.0002771 | 0.0042498 | 0.0065519 | 0.2220542 | 0.0768709 | 2001 | 0.0008152 | 0.0001555 | 0.0068939 | 0.0072719 | 0 | 0 |
| 495 | 0 | 0 | 0.0015161 | 0.0026259 | 0 | 0 | 2002 | 0.0012724 | 0.0009324 | 0.0045422 | 0.0010058 | 0.0122816 | 0.0068439 |
| 496 | 0 | 0 | 0 | 0 | 0 | 0 | 2003 | 0 | 0 | 0 | 0 | 0.0060517 | 0.0104819 |
| 497 | 0.0030250 | 0.0036693 | 0.0013428 | 0.0007280 | 0 | 0 | 2004 | 0.0009046 | 0.0001134 | 0.0042284 | 0.0040644 | 0.0085020 | 0.0120236 |
| 499 | 0.0059714 | 0.0006314 | 0.0062704 | 0.0022048 | 0.0439156 | 0.0621061 | 2005 | 0 | 0 | 0 | 0 | 0.0043831 | 0.0039849 |
| 500 | 0.0000076 | 0.0000107 | 0.0015341 | 0.0026571 | 0.0256014 | 0.0362058 | 2006 | 0 | 0 | 0.0001371 | 0.0002375 | 0.1922461 | 0.1362097 |
| 501 | 0 | 0 | 0.0021070 | 0.0032931 | 0.2397874 | 0.3391106 | 2007 | 0 | 0 | 0.0002588 | 0.0004483 | 0 | 0 |
| 502 | 0 | 0 | 0.0041832 | 0.0065127 | 0.0349729 | 0.0077338 | 2008 | 0.0004336 | 0.0003923 | 0.0004835 | 0.0001491 | 0.0016545 | 0.0019491 |
| 503 | 0.0001550 | 0.0001976 | 0.0047002 | 0.0017924 | 0 | 0 | 2009 | 0 | 0 | 0 | 0 | 0 | 0 |
| 504 | 0.0004959 | 0.0001751 | 0.0013717 | 0.0023758 | 0 | 0 | 2010 | 0 | 0 | 0.0006833 | 0.0011835 | 0 | 0 |
| 505 | 0.0008008 | 0.0011325 | 0.0108682 | 0.0010517 | 0.1105144 | 0.1562910 | 2011 | 0 | 0 | 0.0016787 | 0.0016054 | 0.0911541 | 0.1289114 |
| 506 | 0 | 0 | 0 | 0 | 0.0121560 | 0.0171912 | 2012 | 0 | 0 | 0.0014183 | 0.0024566 | 0.0066758 | 0.0094410 |
| 507 | 0.0000126 | 0.0000179 | 0.0204962 | 0.0073157 | 0.1145952 | 0.1620621 | 2013 | 0 | 0 | 0 | 0 | 0.1048419 | 0.1482688 |
| 508 | 0 | 0 | 0.0011912 | 0.0020632 | 0.0820306 | 0.0931532 | 2014 | 0.0000534 | 0.0000924 | 0.0000207 | 0.0000359 | 0.0099386 | 0.0140553 |
| 509 | 0.0028841 | 0.0045362 | 0.0088002 | 0.0008325 | 0.0029381 | 0.0044990 | 2015 | 0.0000980 | 0.0001697 | 0 | 0 | 0 | 0 |
| 510 | 0 | 0 | 0.0011912 | 0.0020632 | 0 | 0 | 2016 | 0 | 0 | 0 | 0 | 0.0898737 | 0.1271007 |
| 511 | 0 | 0 | 0 | 0 | 0 | 0 | 2017 | 0 | 0 | 0 | 0 | 0.0604597 | 0.0855029 |
| 512 | 0 | 0 | 0.0013356 | 0.0023133 | 0 | 0 | 2018 | 0 | 0 | 0 | 0 | 0.1284475 | 0.1816522 |
| 513 | 0.0021493 | 0.0021047 | 0.0012044 | 0.0010650 | 0 | 0 | 2019 | 0.0003515 | 0.0004189 | 0.0020167 | 0.0020671 | 0.2491949 | 0.3524148 |
| 514 | 0.0134345 | 0.0075081 | 0.1441073 | 0.0283935 | 0.2012040 | 0.2845454 | 2020 | 0 | 0 | 0.0013976 | 0.0024207 | 0.0671879 | 0.0450215 |
| 515 | 0 | 0 | 0.0013491 | 0.0015357 | 0 | 0 | 2021 | 0 | 0 | 0 | 0 | 0.1189628 | 0.1682388 |
| 516 | 0.0001448 | 0.0002048 | 0.0000722 | 0.0001250 | 0 | 0 | 2022 | 0 | 0 | 0 | 0 | 0.0712751 | 0.0680535 |
| 517 | 0.0009345 | 0.0001736 | 0.0171363 | 0.0066906 | 0.0455101 | 0.0643610 | 2023 | 0.0000096 | 0.0000167 | 0 | 0 | 0.0342628 | 0.0484550 |
| 518 | 0 | 0 | 0.0010468 | 0.0018131 | 0.3281560 | 0.4094182 | 2024 | 0 | 0 | 0.0000104 | 0.0000179 | 0.0267469 | 0.0378259 |
| 519 | 0.0019670 | 0.0004477 | 0.0048552 | 0.0033015 | 0 | 0 | 2026 | 0.0003522 | 0.0001109 | 0.0007312 | 0.0012665 | 0.1002219 | 0.0862131 |
| 520 | 0.0183402 | 0.0042332 | 0.0247996 | 0.0151599 | 0.2240576 | 0.3168653 | 2027 | 0 | 0 | 0.0002485 | 0.0004303 | 0 | 0 |
| 521 | 0 | 0 | 0.0009224 | 0.0010451 | 0.4049867 | 0.3588577 | 2028 | 0 | 0 | 0.0011181 | 0.0019366 | 0 | 0 |
| 522 | 0 | 0 | 0.0002707 | 0.0004689 | 0 | 0 | 2029 | 0 | 0 | 0.0002588 | 0.0004483 | 0.0979835 | 0.1385695 |
| 523 | 0 | 0 | 0.0000180 | 0.0000313 | 0 | 0 | 2030 | 0 | 0 | 0 | 0 | 0.1092567 | 0.1545123 |
| 524 | 0 | 0 | 0 | 0 | 0.0195272 | 0.0276157 | 2031 | 0 | 0 | 0 | 0 | 0.0966145 | 0.1366336 |
| 525 | 0 | 0 | 0.0018951 | 0.0032824 | 0.1522168 | 0.2152670 | 2032 | 0 | 0 | 0.0000932 | 0.0001614 | 0.1423584 | 0.2013252 |
| 526 | 0.0173253 | 0.0078852 | 0.0161182 | 0.0032487 | 0.3149922 | 0.4419840 | 2033 | 0 | 0 | 0 | 0 | 0.0306717 | 0.0433764 |
| 527 | 0 | 0 | 0.0014980 | 0.0025946 | 0.2749817 | 0.3888829 | 2034 | 0 | 0 | 0 | 0 | 0.0761281 | 0.0617506 |
| 528 | 0 | 0 | 0.0006497 | 0.0011254 | 0.2090782 | 0.0727220 | 2035 | 0 | 0 | 0.0004337 | 0.0004071 | 0 | 0 |
| 529 | 0 | 0 | 0.0099382 | 0.0017643 | 0.1321446 | 0.1868806 | 2036 | 0 | 0 | 0.0015736 | 0.0027255 | 0.0258107 | 0.0365019 |
| 530 | 0.0154973 | 0.0079196 | 0.0154592 | 0.0025101 | 0 | 0 | 2037 | 0 | 0 | 0 | 0 | 0.0526642 | 0.0744784 |
| 531 | 0.0007502 | 0.0010610 | 0.0010222 | 0.0009372 | 0 | 0 | 2038 | 0 | 0 | 0 | 0 | 0.0381529 | 0.0247143 |
| 532 | 0.0042802 | 0.0033971 | 0.0017336 | 0.0017340 | 0.1176025 | 0.1663151 | 2039 | 0.0000564 | 0.0000977 | 0 | 0 | 0.0834173 | 0.1179699 |
| 533 | 0.0001768 | 0.0002501 | 0 | 0 | 0 | 0 | 2040 | 0.0004153 | 0.0003074 | 0.0002022 | 0.0002194 | 0.0013795 | 0.0012516 |
| 534 | 0 | 0 | 0.0011699 | 0.0019416 | 0 | 0 | 2041 | 0 | 0 | 0 | 0 | 0.2634754 | 0.0539818 |
| 535 | 0.6621585 | 0.2068253 | 0.6752830 | 0.0567695 | 0.5970549 | 0.0249870 | 2042 | 0 | 0 | 0.0001139 | 0.0001972 | 0.0635657 | 0.0898955 |
| 536 | 0.7356028 | 0.3277019 | 1.1265240 | 0.0845791 | 0.0761190 | 0.0021644 | 2043 | 0 | 0 | 0.0006833 | 0.0011835 | 0.1122891 | 0.1320289 |
| 537 | 0 | 0 | 0.0000215 | 0.0000372 | 0.1588903 | 0.2247049 | 2044 | 0 | 0 | 0.0014287 | 0.0024745 | 0.1665846 | 0.0710030 |
| 538 | 0.0035886 | 0.0050468 | 0.0019018 | 0.0008668 | 0 | 0 | 2045 | 0 | 0 | 0.0003185 | 0.0005049 | 0 | 0 |
| 539 | 0 | 0 | 0.0003790 | 0.0006565 | 0 | 0 | 2046 | 0 | 0 | 0 | 0 | 0.0518732 | 0.0564630 |
| 540 | 0 | 0 | 0.0005089 | 0.0008815 | 0 | 0 | 2047 | 0.0000990 | 0.0001114 | 0 | 0 | 0.0310319 | 0.0042641 |
| 541 | 0.0100268 | 0.0035773 | 0.0301097 | 0.0021593 | 0.1849819 | 0.0154651 | 2048 | 0.0006590 | 0.0001217 | 0.0019114 | 0.0017871 | 0.1545240 | 0.0526515 |
| 542 | 0 | 0 | 0.0003335 | 0.0003030 | 0 | 0 | 2049 | 0 | 0 | 0 | 0 | 0.0235208 | 0.0332635 |
| 543 | 0 | 0 | 0.0025526 | 0.0017751 | 0 | 0 | 2050 | 0.0003551 | 0.0000901 | 0.0017881 | 0.0019166 | 0 | 0 |
| 544 | 0.0185741 | 0.0051595 | 0.0413098 | 0.0095212 | 0 | 0 | 2051 | 0 | 0 | 0.0002742 | 0.0004749 | 0 | 0 |
| 545 | 0.0009737 | 0.0000624 | 0.0112934 | 0.0037279 | 0.0307543 | 0.0434932 | 2052 | 0 | 0 | 0.0006522 | 0.0011297 | 0 | 0 |
| 546 | 0 | 0 | 0 | 0 | 0.4325578 | 0.2946660 | 2053 | 0.0001442 | 0.0002497 | 0.0000536 | 0.0000928 | 0.0025167 | 0.0043591 |
| 547 | 0 | 0 | 0.0001505 | 0.0002607 | 0.1526386 | 0.2158636 | 2054 | 0.0004280 | 0.0004284 | 0.0004071 | 0.0002616 | 0.0008606 | 0.0014907 |
| 548 | 0 | 0 | 0 | 0 | 0.0895339 | 0.1266201 | 2055 | 0 | 0 | 0 | 0 | 0.0025240 | 0.0035694 |
| 549 | 0 | 0 | 0 | 0 | 0 | 0 | 2056 | 0 | 0 | 0 | 0 | 0.0855433 | 0.1209765 |
| 550 | 0 | 0 | 0.0007056 | 0.0006569 | 0.0496101 | 0.0701593 | 2057 | 0 | 0 | 0.0002278 | 0.0003945 | 0 | 0 |
| 551 | 0 | 0 | 0.0000361 | 0.0000625 | 0.1232288 | 0.1701687 | 2058 | 0.0000413 | 0.0000716 | 0 | 0 | 0 | 0 |
| 553 | 0.0000930 | 0.0001316 | 0.0029785 | 0.0024899 | 0.0061697 | 0.0087253 | 2059 | 0 | 0 | 0.0001968 | 0.0002414 | 0 | 0 |
| 554 | 0.0118316 | 0.0009724 | 0.0707090 | 0.0090478 | 0 | 0 | 2060 | 0 | 0 | 0.0011906 | 0.0020621 | 0 | 0 |
| 555 | 0.0024143 | 0.0037752 | 0.0007919 | 0.0006264 | 0 | 0 | 2061 | 0 | 0 | 0.0000093 | 0.0000160 | 0 | 0 |
| 556 | 0 | 0 | 0 | 0 | 0.0778577 | 0.1101074 | 2062 | 0 | 0 | 0.0005383 | 0.0009324 | 0.0858825 | 0.0199812 |
| 557 | 0.0047496 | 0.0010828 | 0.0164986 | 0.0025296 | 0.0229640 | 0.0324760 | 2063 | 0 | 0 | 0.0001866 | 0.0003232 | 0.0011683 | 0.0016953 |
| 558 | 0.0087937 | 0.0049353 | 0.0673630 | 0.0126938 | 0.0204685 | 0.0289468 | 2064 | 0 | 0 | 0 | 0 | 0.1221224 | 0.1727071 |
| 559 | 0.2326154 | 0.1193410 | 0.9689222 | 0.0786511 | 1.1885137 | ND | 2065 | 0 | 0 | 0 | 0 | 0.0866102 | 0.1224854 |
| 560 | 0.0107380 | 0.0014844 | 0.1212741 | 0.0102078 | 0 | 0 | 2066 | 0 | 0 | 0.0002381 | 0.0004124 | 0 | 0 |
| 561 | 0 | 0 | 0 | 0 | 0.0872141 | 0.1233393 | 2067 | 0 | 0 | 0.0002692 | 0.0004662 | 0.0943316 | 0.1334051 |
| 562 | 0.0088337 | 0.0004751 | 0.0437183 | 0.0139538 | 0.0913277 | 0.1291569 | 2068 | 0 | 0 | 0.0007764 | 0.0013448 | 0.0568502 | 0.0166281 |
| 563 | 0.0145291 | 0.0008656 | 0.2372340 | 0.0807174 | 0.0324977 | 0.0459587 | 2069 | 0 | 0 | 0.0003416 | 0.0005917 | 0.0448845 | 0.0634763 |
| 564 | 0 | 0 | 0 | 0 | 0.0271862 | 0.0384471 | 2070 | 0 | 0 | 0.0000207 | 0.0000359 | 0.0403760 | 0.0571003 |
| 565 | 0.0022078 | 0.0031223 | 0.0002707 | 0.0004689 | 0.0499019 | 0.0303406 | 2071 | 0.0000436 | 0.0000756 | 0 | 0 | 0.1525765 | 0.2157757 |
| 566 | 0.0040990 | 0.0039217 | 0.0085094 | 0.0004472 | 0.0039786 | 0.0050082 | 2072 | 0 | 0 | 0 | 0 | 0 | 0 |
| 567 | 0.0397148 | 0.0043366 | 0.2303590 | 0.0636931 | 0.1173639 | 0.1659776 | 2073 | 0 | 0 | 0 | 0 | 0.0185166 | 0.0261864 |
| 568 | 0.0000286 | 0.0000405 | 0.0001762 | 0.0002253 | 0 | 0 | 2074 | 0 | 0 | 0.0001035 | 0.0001793 | 0 | 0 |
| 569 | 0 | 0 | 0.0000361 | 0.0000625 | 0.3679245 | 0.5203239 | 2075 | 0 | 0 | 0.0004689 | 0.0006748 | 0.0363986 | 0.0514754 |
| 570 | 0 | 0 | 0.0006317 | 0.0010941 | 0.1107303 | 0.0394040 | 2076 | 0 | 0 | 0.0007868 | 0.0013628 | 0 | 0 |
| 571 | 0 | 0 | 0.0000717 | 0.0001242 | 0.0382681 | 0.0541192 | 2077 | 0 | 0 | 0.0002899 | 0.0005021 | 0 | 0 |
| 572 | 0.0002808 | 0.0000827 | 0.0128160 | 0.0046128 | 0.0997423 | 0.1410569 | 2078 | 0 | 0 | 0.0002174 | 0.0003766 | 0.0750311 | 0.1061100 |
| 573 | 0.0056618 | 0.0080070 | 0.0001577 | 0.0002731 | 0.0609264 | 0.0861630 | 2079 | 0.0007799 | 0.0001193 | 0 | 0 | 0.0266513 | 0.0376906 |
| 574 | 0.1602101 | 0.0424718 | 0.6254741 | 0.0731480 | 0.3282258 | 0.0846053 | 2080 | 0 | 0 | 0 | 0 | 0.0246273 | 0.0348282 |
| 575 | 0.0030194 | 0.0033011 | 0.0010655 | 0.0009872 | 0 | 0 | 2081 | 0 | 0 | 0 | 0 | 0.0401367 | 0.0567619 |
| 576 | 0.0024359 | 0.0001109 | 0.0038509 | 0.0003668 | 0.1681999 | 0.0083336 | 2082 | 0 | 0 | 0.0002285 | 0.0003958 | 0.0927083 | 0.0735886 |
| 577 | 0.0161146 | 0.0027839 | 0.0463201 | 0.0013412 | 0.1666811 | 0.2357227 | 2084 | 0 | 0 | 0 | 0 | 0 | 0 |
| 578 | 0.0091999 | 0.0011480 | 0.0283967 | 0.0073489 | 0.0701238 | 0.0991700 | 2085 | 0 | 0 | 0.0003830 | 0.0006635 | 0 | 0 |
| 579 | 0.0411625 | 0.0111830 | 0.2836451 | 0.0166118 | 0.0366176 | 0.0517851 | 2086 | 0 | 0 | 0 | 0 | 0.0640736 | 0.0906138 |
| 580 | 1.3003354 | 0.2074056 | 1.8650980 | 0.2575640 | 0.6667881 | 0.0711716 | 2087 | 0 | 0 | 0 | 0 | 0.0542890 | 0.0767763 |
| 581 | 0.3758708 | 0.0404870 | 0.7000608 | 0.1249055 | 0.7808206 | 0.2085546 | 2088 | 0.0004344 | 0.0003764 | 0.0015427 | 0.0001013 | 0 | 0 |
| 582 | 0.0135340 | 0.0067790 | 0.0232339 | 0.0034976 | 0.1319441 | 0.1865972 | 2089 | 0 | 0 | 0 | 0 | 0.2164268 | 0.0692852 |
| 583 | 0.4141506 | 0.0368368 | 0.6638750 | 0.1081149 | 0.5786855 | 0.0685822 | 2090 | 0 | 0 | 0.0001152 | 0.0001996 | 0 | 0 |
| 584 | 0 | 0 | 0 | 0 | 0.0061761 | 0.0106973 | 2091 | 0 | 0 | 0.0015630 | 0.0027071 | 0.0492355 | 0.0696295 |
| 585 | 0.0000636 | 0.0001102 | 0 | 0 | 0.0837522 | 0.0728986 | 2092 | 0.0006821 | 0.0002090 | 0.1025803 | ND | 0 | 0 |
| 586 | 0.1592580 | 0.0244719 | 0.0601360 | 0.0061350 | 0.1474880 | 0.0359687 | 2093 | 0 | 0 | 0.0023086 | 0.0039987 | 0.3082770 | 0.2158565 |
| 587 | 0.0000293 | 0.0000507 | 0.0020322 | 0.0003955 | 0.0381730 | 0.0661176 | 2094 | 0 | 0 | 0.0003002 | 0.0005200 | 0.1124594 | 0.1590415 |
| 588 | 0.0160828 | 0.0007692 | 0.0415401 | 0.0074104 | 0.1489352 | 0.0209061 | 2095 | 0 | 0 | 0.0010075 | 0.0009659 | 0.0405898 | 0.0574026 |
| 589 | 0.0381167 | 0.0036384 | 0.3214640 | 0.0089083 | 0.0277869 | 0.0440434 | 2096 | 0.0000297 | 0.0000515 | 0 | 0 | 0.1443389 | 0.0522986 |
| 590 | 0.0845032 | 0.0069491 | 0.2677176 | 0.0084728 | 0.1110154 | 0.1922843 | 2097 | 0 | 0 | 0.0002381 | 0.0004124 | 0 | 0 |
| 591 | 0.0214413 | 0.0021399 | 0.0609662 | 0.0079985 | 0.1389971 | 0.1667447 | 2098 | 0 | 0 | 0.1621645 | ND | 0.0452286 | 0.0639629 |
| 592 | 0 | 0 | 0 | 0 | 0.0829422 | 0.1060403 | 2099 | 0.0001984 | 0.0001907 | 0.0004419 | 0.0003924 | 0.0032546 | 0.0031593 |
| 593 | 0.0031289 | 0.0006476 | 0.0267903 | 0.0029745 | 0.0364772 | 0.0631803 | 2100 | 0 | 0 | 0 | 0 | 0.0200395 | 0.0347094 |
| 594 | 0.0088021 | 0.0005509 | 0.0242818 | 0.0017612 | 0.0580496 | 0.1005449 | 2101 | 0 | 0 | 0.0006874 | 0.0009872 | 0.0118845 | 0.0109374 |
| 595 | 0 | 0 | 0 | 0 | 0.0022701 | 0.0039320 | 2102 | 0 | 0 | 0 | 0 | 0.0272397 | 0.0206183 |
| 596 | 0.0384593 | 0.0045682 | 0.2344708 | 0.0269804 | 0.0459080 | 0.0795150 | 2103 | 0 | 0 | 0.0000120 | 0.0000209 | 0.0170472 | 0.0295266 |
| 597 | 0.7432446 | 0.1902757 | 0.9783760 | 0.0114977 | 0.7349576 | 0.2313648 | 2104 | 0.0000428 | 0.0000742 | 0.0002645 | 0.0002438 | 0.0040049 | 0.0038985 |
| 598 | 0.0201631 | 0.0051852 | 0.1027519 | 0.0331148 | 0.0328313 | 0.0328998 | 2105 | 0 | 0 | 0 | 0 | 0.0290708 | 0.0266937 |
| 599 | 0 | 0 | 0 | 0 | 0.0007946 | 0.0013763 | 2106 | 0 | 0 | 0 | 0 | 0.0060548 | 0.0104872 |
| 600 | 0 | 0 | 0 | 0 | 0.0688403 | 0.1192350 | 2107 | 0 | 0 | 0.0005612 | 0.0004957 | 0.0186059 | 0.0199866 |
| 601 | 0 | 0 | 0 | 0 | 0.0940446 | 0.1628900 | 2108 | 0 | 0 | 0.0001142 | 0.0000999 | 0.0078967 | 0.0086912 |
| 602 | 0 | 0 | 0 | 0 | 0 | 0 | 2109 | 0 | 0 | 0.0002300 | 0.0003984 | 0.0024284 | 0.0042062 |
| 603 | 0 | 0 | 0 | 0 | 0.0019920 | 0.0034502 | 2110 | 0 | 0 | 0.0001285 | 0.0002225 | 0.0187104 | 0.0162810 |
| 604 | 0.0022913 | 0.0004444 | 0.0124885 | 0.0027042 | 0.0919310 | 0.0885054 | 2111 | 0 | 0 | 0 | 0 | 0 | 0 |
| 605 | 0.0001186 | 0.0000992 | 0 | 0 | 0.0270108 | 0.0261662 | 2112 | 0 | 0 | 0 | 0 | 0 | 0 |
| 606 | 0 | 0 | 0 | 0 | 0.0592145 | 0.1025625 | 2113 | 0 | 0 | 0 | 0 | 0.0026195 | 0.0045370 |
| 607 | 0.0013009 | 0.0005977 | 0.0000152 | 0.0000263 | 0.0022895 | 0.0039655 | 2114 | 0 | 0 | 0 | 0 | 0.0059354 | 0.0102804 |
| 608 | 0 | 0 | 0 | 0 | 0.0624941 | 0.1082430 | 2115 | 0 | 0 | 0 | 0 | 0 | 0 |
| 609 | 0.2356069 | 0.0155190 | 0.4919241 | 0.0303794 | 0.5041053 | 0.0615217 | 2116 | 0 | 0 | 0.0003412 | 0.0000270 | 0.0092473 | 0.0125703 |
| 610 | 0 | 0 | 0 | 0 | 0 | 0 | 2117 | 0.0000893 | 0.0001029 | 0.0001193 | 0.0002067 | 0.0028183 | 0.0048814 |
| 611 | 0 | 0 | 0 | 0 | 0 | 0 | 2118 | 0 | 0 | 0 | 0 | 0.0093237 | 0.0161492 |
| 612 | 0 | 0 | 0 | 0 | 0.1156300 | 0.1011944 | 2119 | 0 | 0 | 0.0009965 | 0.0017260 | 0.0099822 | 0.0172896 |
| 613 | 0 | 0 | 0 | 0 | 0.0383296 | 0.0438455 | 2120 | 0 | 0 | 0.0000201 | 0.0000348 | 0.0027994 | 0.0045833 |
| 614 | 0 | 0 | 0 | 0 | 0.0545764 | 0.0497348 | 2121 | 0 | 0 | 0 | 0 | 0.0101789 | 0.0176304 |
| 615 | 0 | 0 | 0 | 0 | 0.0243988 | 0.0422599 | 2122 | 0 | 0 | 0 | 0 | 0.0013220 | 0.0022898 |
| 616 | 0 | 0 | 0 | 0 | 0.1579185 | 0.2735229 | 2123 | 0.0000429 | 0.0000646 | 0 | 0 | 0.0016066 | 0.0027828 |
| 617 | 0.0300048 | 0.0035560 | 0.0743844 | 0.0070447 | 0.0742433 | 0.1285932 | 2124 | 0 | 0 | 0.0003553 | 0.0005378 | 0 | 0 |
| 618 | 0.0213302 | 0.0082498 | 0.0056795 | 0.0010178 | 0.0277037 | 0.0479843 | 2125 | 0 | 0 | 0.0002088 | 0.0003616 | 0.0080846 | 0.0140030 |
| 619 | 0 | 0 | 0 | 0 | 0.0125299 | 0.0217024 | 2126 | 0 | 0 | 0.0000192 | 0.0000332 | 0.0105848 | 0.0183335 |
| 620 | 0 | 0 | 0 | 0 | 0.0116829 | 0.0202353 | 2127 | 0 | 0 | 0 | 0 | 0.0009814 | 0.0016998 |
| 621 | 0 | 0 | 0 | 0 | 0.0306138 | 0.0453435 | 2128 | 0.0000839 | 0.0001454 | 0 | 0 | 0.0025185 | 0.0023294 |
| 622 | 0.0834761 | 0.0392916 | 0.2628144 | 0.0228614 | 0.1682080 | 0.2621826 | 2129 | 0 | 0 | 0 | 0 | 0.0011981 | 0.0020752 |
| 623 | 0 | 0 | 0 | 0 | 0.0193816 | 0.0176850 | 2130 | 0 | 0 | 0.0004230 | 0.0006546 | 0 | 0 |
| 624 | 0.1253418 | 0.0121630 | 0.3970176 | 0.0815496 | 0.2323187 | 0.0798540 | 2131 | 0 | 0 | 0.0000127 | 0.0000219 | 0.0036058 | 0.0043573 |
| 625 | 0 | 0 | 0 | 0 | 0.0050759 | 0.0076675 | 2132 | 0.0000759 | 0.0001314 | 0 | 0 | 0.0003537 | 0.0006127 |
| 626 | 0.0479579 | 0.0170337 | 0.0108262 | 0.0003398 | 0.0684951 | 0.0646467 | 2133 | 0.0002135 | 0.0003698 | 0.0005998 | 0.0002739 | 0.0008253 | 0.0009459 |
| 627 | 0.0911609 | 0.0215735 | 0.2614610 | 0.0158727 | 0.1389814 | 0.1611575 | 2134 | 0 | 0 | 0.0000040 | 0.0000070 | 0.0067670 | 0.0117208 |
| 628 | 0.0000640 | 0.0001109 | 0.0003442 | 0.0001424 | 0.1232906 | 0.2135457 | 2135 | 0 | 0 | 0 | 0 | 0 | 0 |
| 629 | 0.0318363 | 0.0193388 | 0.3843110 | 0.0361490 | 0.2486736 | 0.0847963 | 2136 | 0.0001763 | 0.0001828 | 0.0005019 | 0.0002886 | 0.0027355 | 0.0047381 |
| 630 | 0.0072468 | 0.0071456 | 0.0060059 | 0.0004022 | 0.0241750 | 0.0418723 | 2137 | 0 | 0 | 0 | 0 | 0.0048975 | 0.0042916 |
| 631 | 0 | 0 | 0 | 0 | 0.0385420 | 0.0334185 | 2138 | 0 | 0 | 0 | 0 | 0.0027821 | 0.0048188 |
| 632 | 0.0302294 | 0.0039273 | 0.0062286 | 0.0016876 | 0.1335242 | 0.1156467 | 2140 | 0 | 0 | 0.0001308 | 0.0002265 | 0.0040178 | 0.0047581 |
| 633 | 0 | 0 | 0 | 0 | 0.2273360 | 0.2811847 | 2141 | 0 | 0 | 0.0002570 | 0.0004452 | 0.0069219 | 0.0020122 |
| 634 | 0.0035011 | 0.0006077 | 0.0092609 | 0.0013154 | 0.0140921 | 0.0244082 | 2142 | 0 | 0 | 0.0000201 | 0.0000348 | 0.0011472 | 0.0019870 |
| 635 | 0.0083789 | 0.0073264 | 0.0276192 | 0.0024357 | 0.0093290 | 0.0118055 | 2143 | 0 | 0 | 0 | 0 | 0.0061751 | 0.0106956 |
| 636 | 0.3308273 | 0.1861993 | 1.2387705 | 0.1755532 | 0.5459785 | 0.2164344 | 2144 | 0 | 0 | 0 | 0 | 0.0061649 | 0.0092240 |
| 637 | 0.0290785 | 0.0157753 | 0.3520201 | 0.0669087 | 0.0951546 | 0.1248032 | 2145 | 0 | 0 | 0 | 0 | 0 | 0 |
| 638 | 0 | 0 | 0.0001447 | 0.0000655 | 0.0276871 | 0.0409042 | 2146 | 0 | 0 | 0.0001553 | 0.0001397 | 0.0010592 | 0.0018346 |
| 639 | 0.0132983 | 0.0044059 | 0.1333098 | 0.0080701 | 0.0128664 | 0.0222852 | 2147 | 0 | 0 | 0 | 0 | 0.0142104 | 0.0246131 |
| 640 | 0.0123506 | 0.0010871 | 0.1112332 | 0.0027455 | 0.0321647 | 0.0195755 | 2148 | 0 | 0 | 0.0002288 | 0.0003963 | 0.0048553 | 0.0084097 |
| 641 | 0.0233920 | 0.0084414 | 0.0060716 | 0.0004087 | 0.2893865 | 0.2843866 | 2149 | 0.0000043 | 0.0000075 | 0.0000482 | 0.0000834 | 0.0026521 | 0.0023377 |
| 642 | 0.0614917 | 0.0015276 | 0.2636393 | 0.0265713 | 0.1115925 | 0.0313271 | 2150 | 0.0000131 | 0.0000227 | 0 | 0 | 0.0053796 | 0.0093177 |
| 643 | 0.1167920 | 0.0331307 | 0.5413619 | 0.0698157 | 0.2614197 | 0.1624274 | 2151 | 0 | 0 | 0.0000077 | 0.0000133 | 0.0022097 | 0.0022289 |
| 644 | 0.0004333 | 0.0006427 | 0.0030430 | 0.0002196 | 0.0406213 | 0.0703582 | 2153 | 0 | 0 | 0 | 0 | 0.0078163 | 0.0128586 |
| 645 | 0.1512085 | 0.1121081 | 0.7220659 | 0.0789405 | 0.3529426 | 0.1218391 | 2154 | 0 | 0 | 0.0000090 | 0.0000156 | 0 | 0 |
| 646 | 0.0261425 | 0.0145379 | 0.3164378 | 0.0769564 | 0.1752195 | 0.1311875 | 2155 | 0 | 0 | 0 | 0 | 0.0081617 | 0.0141365 |
| 647 | 0.0179885 | 0.0043089 | 0.1202282 | 0.0096419 | 0.0877726 | 0.1183733 | 2157 | 0 | 0 | 0.0000038 | 0.0000066 | 0.0013888 | 0.0024054 |
| 648 | 0.8364384 | 0.0736869 | 2.0988091 | 0.2613982 | 0.4212376 | 0.0398057 | 2158 | 0.0000109 | 0.0000190 | 0.0005616 | 0.0001997 | 0.0063426 | 0.0102548 |
| 649 | 0.1982021 | 0.0753191 | 0.5374597 | 0.0366612 | 0.1539274 | 0.0049375 | 2159 | 0.0024673 | 0.0011222 | 0.0072974 | 0.0020057 | 0.0017740 | 0.0030727 |
| 650 | 0.0037990 | 0.0008731 | 0.0100971 | 0.0008916 | 0.0302768 | 0.0524409 | 2160 | 0 | 0 | 0 | 0 | 0.0028303 | 0.0049022 |
| 651 | 0.0022190 | 0.0020933 | 0.0074158 | 0.0001783 | 0.0480244 | 0.0831807 | 2161 | 0 | 0 | 0 | 0 | 0.0003369 | 0.0005834 |
| 652 | 0.1500641 | 0.0330903 | 0.5974245 | 0.1264769 | 0.2413558 | 0.0850356 | 2162 | 0 | 0 | 0 | 0 | 0.0037509 | 0.0035748 |
| 653 | 0.1254132 | 0.0618922 | 0.6824948 | 0.0571202 | 0.2129784 | 0.1238575 | 2163 | 0.0000159 | 0.0000275 | 0.0064831 | 0.0000671 | 0.0086937 | 0.0075492 |
| 654 | 0.1054210 | 0.0372556 | 0.6502155 | 0.0308408 | 0.2014638 | 0.1347303 | 2164 | 0 | 0 | 0.0001037 | 0.0001796 | 0.0030490 | 0.0028294 |
| 656 | 0.0002770 | 0.0001150 | 0.0018846 | 0.0003930 | 0.0284026 | 0.0491948 | 2165 | 0 | 0 | 0.0000920 | 0.0001593 | 0.0062175 | 0.0099219 |
| 657 | 0.3042831 | 0.0058213 | 1.2171704 | 0.0998021 | 0.4380874 | 0.1403344 | 2166 | 0.0115915 | 0.0015349 | 0.0479652 | 0.0103204 | 0.0149510 | 0.0164174 |
| 658 | 0.1393847 | 0.0102848 | 0.4472882 | 0.0256927 | 0.1996647 | 0.0493551 | 2167 | 0.0004244 | 0.0003765 | 0.0003010 | 0.0002649 | 0.0003710 | 0.0006425 |
| 659 | 0.2206369 | 0.0147343 | 0.4941708 | 0.0721036 | 0.5388732 | 0.3283799 | 2168 | 0.0000022 | 0.0000038 | 0 | 0 | 0.0111107 | 0.0077775 |
| 660 | 0.1081203 | 0.0181684 | 0.4051920 | 0.0676577 | 0.3541962 | 0.1374233 | 2169 | 0 | 0 | 0 | 0 | 0.0079468 | 0.0137643 |
| 661 | 0.1741534 | 0.0274978 | 0.4223568 | 0.0205547 | 0.3463964 | 0.2854087 | 2170 | 0 | 0 | 0 | 0 | 0.0195354 | 0.0187784 |
| 662 | 0.0046460 | 0.0011337 | 0.0410290 | 0.0024061 | 0.0347073 | 0.0411821 | 2171 | 0 | 0 | 0 | 0 | 0.0072405 | 0.0119869 |
| 663 | 0.1489672 | 0.0320348 | 0.4274451 | 0.0349014 | 0.4609515 | 0.0437903 | 2172 | 0.0007139 | 0.0004380 | 0.0002769 | 0.0002652 | 0.0009806 | 0.0016984 |
| 664 | 0.0961319 | 0.0156278 | 0.3402746 | 0.0167305 | 0.2866836 | 0.1214791 | 2173 | 0 | 0 | 0 | 0 | 0.0013012 | 0.0022538 |
| 665 | 0.4843036 | 0.0579456 | 0.8366756 | 0.1169991 | 0.6310413 | 0.2244086 | 2174 | 0 | 0 | 0 | 0 | 0.0007422 | 0.0012855 |
| 666 | 0.4375607 | 0.0484287 | 0.5944213 | 0.0339241 | 0.8172975 | 0.1586150 | 2175 | 0.0000222 | 0.0000272 | 0.0003918 | 0.0005337 | 0.0118724 | 0.0190089 |
| 667 | 0.0395275 | 0.0047122 | 0.1917166 | 0.0391059 | 0.0472552 | 0.0727157 | 2176 | 0 | 0 | 0.0001526 | 0.0002642 | 0.0051133 | 0.0088565 |
| 668 | 0.0867209 | 0.0022841 | 0.4503778 | 0.0454082 | 0.1703639 | 0.1343864 | 2178 | 0.0000492 | 0.0000647 | 0.0002785 | 0.0003439 | 0.0125777 | 0.0217851 |
| 669 | 0.0206424 | 0.0010229 | 0.1709944 | 0.0087666 | 0.1028417 | 0.1016411 | 2179 | 0.0194765 | 0.0025404 | 0.0906490 | 0.0207822 | 0.0085047 | 0.0081664 |
| 670 | 0.0972733 | 0.0035545 | 0.5561272 | 0.0330177 | 0.1521158 | 0.0516329 | 2180 | 0 | 0 | 0 | 0 | 0.0031645 | 0.0054811 |
| 671 | 0.0451419 | 0.0028420 | 0.2733999 | 0.0363351 | 0.0352812 | 0.0142832 | 2181 | 0 | 0 | 0.0000090 | 0.0000156 | 0 | 0 |
| 672 | 0.0844126 | 0.0059330 | 0.4517005 | 0.0152299 | 0.6612089 | 0.2460925 | 2182 | 0 | 0 | 0.0000947 | 0.0001640 | 0.0124198 | 0.0071542 |
| 673 | 0.0446246 | 0.0034984 | 0.2135571 | 0.0173957 | 0.0621160 | 0.1061497 | 2183 | 0 | 0 | 0.0001389 | 0.0001908 | 0.0013081 | 0.0022658 |
| 674 | 0.2397069 | 0.0118600 | 0.3868312 | 0.1416002 | 0.6442280 | 0.2444108 | 2184 | 0 | 0 | 0.0002831 | 0.0002205 | 0.0200212 | 0.0193989 |
| 675 | 0.0151392 | 0.0011353 | 0.0792808 | 0.0083289 | 0.0056780 | 0.0098346 | 2185 | 0 | 0 | 0.0000120 | 0.0000209 | 0.0134063 | 0.0128967 |
| 676 | 0.1486876 | 0.0324978 | 0.5790247 | 0.0527920 | 0.4216003 | 0.2267397 | 2186 | 0 | 0 | 0 | 0 | 0.0039149 | 0.0067809 |
| 677 | 0.0716011 | 0.0124607 | 0.2121102 | 0.0247843 | 0.1790751 | 0.0152490 | 2187 | 0 | 0 | 0 | 0 | 0.0026102 | 0.0045209 |
| 678 | 0.0001818 | 0.0002241 | 0.0044975 | 0.0001447 | 0.0419456 | 0.0457590 | 2188 | 0 | 0 | 0 | 0 | 0.0058269 | 0.0100925 |
| 679 | 0.0059955 | 0.0007569 | 0.2128796 | 0.0522719 | 0.0164285 | 0.0284550 | 2189 | 0 | 0 | 0.0002449 | 0.0004242 | 0 | 0 |
| 680 | 1.0901519 | 0.0587442 | 1.0962492 | 0.0717250 | 0.7111044 | 0.2752649 | 2190 | 0.0001918 | 0.0000483 | 0.0001849 | 0.0002329 | 0.0034126 | 0.0059109 |
| 681 | 0 | 0 | 0.0006994 | 0.0012113 | 0.0183730 | 0.0174017 | 2191 | 0.0010404 | 0.0000503 | 0.0011608 | 0.0004135 | 0.0061414 | 0.0057187 |
| 682 | 0.1119864 | 0.0338127 | 0.4821107 | 0.1719061 | 0.2789759 | 0.1647577 | 2192 | 0 | 0 | 0.0006728 | 0.0005703 | 0.0079317 | 0.0076491 |
| 683 | 0.0868051 | 0.0313509 | 0.3640109 | 0.0298972 | 0.2092970 | 0.1153486 | 2193 | 0 | 0 | 0.0000790 | 0.0000783 | 0.0001464 | 0.0002536 |
| 684 | 0.2686023 | 0.0684330 | 0.9800626 | 0.3349554 | 0.2702055 | 0.1520438 | 2194 | 0 | 0 | 0.0003113 | 0.0003046 | 0.0052936 | 0.0046832 |
| 685 | 0.0629586 | 0.0144293 | 0.3917626 | 0.1128741 | 0.0611415 | 0.0446839 | 2195 | 0 | 0 | 0 | 0 | 0.0012200 | 0.0021131 |
| 686 | 0.1220330 | 0.0371486 | 0.6113336 | 0.1357637 | 0.2913168 | 0.2432904 | 2196 | 0 | 0 | 0.0002077 | 0.0003019 | 0.0100204 | 0.0088851 |
| 687 | 0.1060137 | 0.0129652 | 0.4334764 | 0.0469308 | 0.2034702 | 0.1525438 | 2197 | 0.0000430 | 0.0000556 | 0.0001632 | 0.0001732 | 0.0060281 | 0.0060578 |
| 688 | 0.1392359 | 0.0350612 | 0.5423728 | 0.1771555 | 0.2616572 | 0.1639092 | 2198 | 0.0037041 | 0.0004542 | 0.0056999 | 0.0009170 | 0.0111501 | 0.0182080 |
| 689 | 0.0222335 | 0.0047470 | 0.1944258 | 0.0425351 | 0.0888623 | 0.0483262 | 2199 | 0 | 0 | 0 | 0 | 0.0327417 | 0.0305114 |
| 690 | 0.7931133 | 0.2930577 | 1.2459515 | 0.2345576 | 0.6401840 | 0.1987117 | 2200 | 0 | 0 | 0 | 0 | 0.0667119 | 0.0810807 |
| 691 | 0.2475513 | 0.0561736 | 0.8054016 | 0.1744951 | 0.5013921 | 0.2282519 | 2201 | 0 | 0 | 0 | 0 | 0.0045152 | 0.0078206 |
| 692 | 0.2383455 | 0.0726239 | 1.1036980 | 0.2731438 | 0.3522065 | 0.1732830 | 2202 | 0 | 0 | 0.0001235 | 0.0002139 | 0.0170505 | 0.0295323 |
| 693 | 0.2721665 | 0.0577994 | 2.1264090 | 0.5442050 | 0.6041771 | 0.3020684 | 2203 | 0 | 0 | 0.0005204 | 0.0009014 | 0.0013835 | 0.0023964 |
| 694 | 0.0480062 | 0.0078544 | 0.5797554 | 0.2160935 | 0.0845687 | 0.0536574 | 2204 | 0 | 0 | 0 | 0 | 0 | 0 |
| 695 | 0.3469131 | 0.0556283 | 1.0514313 | 0.3264593 | 0.6843641 | 0.3298497 | 2205 | 0 | 0 | 0.0007057 | 0.0012223 | 0.0373535 | 0.0332175 |
| 696 | 0.0984323 | 0.0141036 | 0.5374821 | 0.0394291 | 0.0747431 | 0.0901088 | 2206 | 0 | 0 | 0.0003176 | 0.0005500 | 0.0521761 | 0.0452140 |
| 697 | 0.3864897 | 0.0696349 | 0.9393823 | 0.1722059 | 0.6778312 | 0.1618193 | 2207 | 0 | 0 | 0.0004851 | 0.0008403 | 0.0243986 | 0.0422596 |
| 698 | 0.0193405 | 0.0063414 | 0.1942349 | 0.0611259 | 0.0892323 | 0.0575994 | 2208 | 0 | 0 | 0 | 0 | 0.0319372 | 0.0553169 |
| 699 | 0.5356713 | 0.1473690 | 1.4675700 | 0.4282454 | 0.4827006 | 0.2091308 | 2210 | 0 | 0 | 0 | 0 | 0.0035388 | 0.0034490 |
| 700 | 0.3122287 | 0.1026598 | 0.9034739 | 0.1972549 | 0.4116976 | 0.2491096 | 2211 | 0 | 0 | 0 | 0 | 0.0077374 | 0.0127433 |
| 701 | 0.4548248 | 0.0675463 | 1.0033845 | 0.2061377 | 0.8805021 | 0.1580498 | 2212 | 0 | 0 | 0 | 0 | 0.0137244 | 0.0237714 |
| 702 | 0.0413658 | 0.0027628 | 0.4366542 | 0.1405365 | 0.0480032 | 0.0535676 | 2213 | 0 | 0 | 0 | 0 | 0.0102647 | 0.0177790 |
| 703 | 0.1149407 | 0.0106235 | 0.8057825 | 0.2019983 | 0.1405841 | 0.0818401 | 2214 | 0 | 0 | 0 | 0 | 0.0593284 | 0.0732090 |
| 704 | 0.1498939 | 0.0249229 | 0.8903458 | 0.1528732 | 0.1258626 | 0.1040091 | 2215 | 0 | 0 | 0.0002382 | 0.0004125 | 0.0016737 | 0.0028989 |
| 705 | 0.2280163 | 0.0349173 | 0.8376578 | 0.1491411 | 0.2899377 | 0.1547673 | 2216 | 0 | 0 | 0.0042046 | 0.0049972 | 0 | 0 |
| 706 | 0.0013390 | 0.0006324 | 0.0049167 | 0.0016474 | 0.0290738 | 0.0376417 | 2217 | 0 | 0 | 0 | 0 | 0.0106779 | 0.0184947 |
| 707 | 0.4163436 | 0.0935874 | 1.0139513 | 0.3230595 | 0.7626945 | 0.3096327 | 2218 | 0 | 0 | 0.0006086 | 0.0010542 | 0.0162006 | 0.0280603 |
| 708 | 0.1961212 | 0.0431953 | 1.0161493 | 0.3315227 | 0.3747202 | 0.1922637 | 2219 | 0 | 0 | 0.0001500 | 0.0002597 | 0.0115679 | 0.0124232 |
| 709 | 0.1009269 | 0.0060413 | 0.5634515 | 0.1502164 | 0.0621927 | 0.0367464 | 2220 | 0 | 0 | 0.0037634 | 0.0065184 | 0 | 0 |
| 710 | 0.0956237 | 0.0390889 | 0.6841375 | 0.2290324 | 0.1023302 | 0.0801116 | 2221 | 0 | 0 | 0 | 0 | 0.0303853 | 0.0526289 |
| 711 | 0.3578531 | 0.0536221 | 1.1082864 | 0.2379130 | 0.2644487 | 0.2146901 | 2222 | 0 | 0 | 0.0007851 | 0.0013598 | 0.0448904 | 0.0292536 |
| 712 | 0.1108911 | 0.0256759 | 0.4998773 | 0.0848033 | 0.1516285 | 0.0862815 | 2223 | 0 | 0 | 0 | 0 | 0.0082750 | 0.0143327 |
| 713 | 0.1198411 | 0.0233395 | 0.6649111 | 0.1134277 | 0.2408170 | 0.1605661 | 2224 | 0 | 0 | 0.0083079 | 0.0127315 | 0.0591977 | 0.0163055 |
| 714 | 0.2014690 | 0.0563517 | 0.7942609 | 0.2557375 | 0.4629323 | 0.2266353 | 2226 | 0.0000032 | 0.0000056 | 0 | 0 | 0.0596172 | 0.0528397 |
| 715 | 0.0086990 | 0.0022139 | 0.0264723 | 0.0068804 | 0.0382718 | 0.0338926 | 2227 | 0.0001515 | 0.0001871 | 0.0002999 | 0.0005195 | 0.0391595 | 0.0366191 |
| 716 | 0.0138899 | 0.0014323 | 0.5003837 | 0.1668733 | 0.0491607 | 0.0203149 | 2228 | 0 | 0 | 0 | 0 | 0.0209039 | 0.0276948 |
| 717 | 0.0337254 | 0.0043447 | 0.2096656 | 0.0522941 | 0.0459750 | 0.0477513 | 2229 | 0 | 0 | 0.0050674 | 0.0087770 | 0.0133461 | 0.0204704 |
| 718 | 0.3456002 | 0.0948500 | 1.0297494 | 0.2855522 | 0.3617828 | 0.1738824 | 2231 | 0 | 0 | 0.0003793 | 0.0006570 | 0 | 0 |
| 719 | 0.0280048 | 0.0057205 | 0.2843953 | 0.0786139 | 0.0651033 | 0.0474553 | 2232 | 0 | 0 | 0.0000991 | 0.0001716 | 0 | 0 |
| 720 | 0.1541197 | 0.0237351 | 0.7664988 | 0.1254280 | 0.1829716 | 0.0916703 | 2233 | 0.0014487 | 0.0000689 | 0.0105644 | 0.0110054 | 0.0116086 | 0.0183142 |
| 721 | 0.3658019 | 0.0557647 | 0.9642200 | 0.2739219 | 0.3577866 | 0.2019418 | 2234 | 0.0000214 | 0.0000370 | 0.0004391 | 0.0005913 | 0.0030737 | 0.0053238 |
| 722 | 0.2362119 | 0.0596088 | 0.8975635 | 0.2361855 | 0.2299753 | 0.1118675 | 2236 | 0.0002699 | 0.0003007 | 0.0018603 | 0.0016308 | 0.0004638 | 0.0008033 |
| 723 | 0.0015887 | 0.0002229 | 0.0077992 | 0.0028998 | 0.0321983 | 0.0311211 | 2237 | 0 | 0 | 0.0001009 | 0.0001430 | 0.0028326 | 0.0049061 |
| 724 | 0.3010883 | 0.0134666 | 1.2970200 | 0.4475172 | 0.3972778 | 0.1159046 | 2238 | 0 | 0 | 0.0005557 | 0.0009625 | 0.0197883 | 0.0274397 |
| 725 | 0.0462770 | 0.0068714 | 0.3899908 | 0.1376810 | 0.1312767 | 0.0868442 | 2239 | 0 | 0 | 0 | 0 | 0.0022884 | 0.0039636 |
| 726 | 0.0790916 | 0.0132180 | 0.4405365 | 0.0946351 | 0.1511455 | 0.0692922 | 2240 | 0.0000920 | 0.0001264 | 0.0004675 | 0.0008097 | 0.0278697 | 0.0261368 |
| 727 | 0.0369060 | 0.0071946 | 0.2364510 | 0.0931115 | 0.0886757 | 0.0404180 | 2241 | 0 | 0 | 0 | 0 | 0.0008516 | 0.0014751 |
| 728 | 0.3564860 | 0.0532429 | 1.5647283 | 0.3442435 | 0.3471954 | 0.1584193 | 2242 | 0 | 0 | 0.0000970 | 0.0001681 | 0.0001286 | 0.0002227 |
| 729 | 0.3658040 | 0.0609981 | 1.0195790 | 0.2686638 | 0.4780796 | 0.2496219 | 2243 | 0 | 0 | 0 | 0 | 0.0432445 | 0.0456817 |
| 730 | 0.0958256 | 0.0177670 | 0.4741013 | 0.0687694 | 0.1952694 | 0.1019891 | 2244 | 0 | 0 | 0 | 0 | 0 | 0 |
| 731 | 0.0697025 | 0.0059738 | 0.4283847 | 0.1219803 | 0.1374708 | 0.0662875 | 2245 | 0.0000768 | 0.0000665 | 0.0129115 | 0.0212504 | 0 | 0 |
| 732 | 0.0081515 | 0.0006427 | 0.0311620 | 0.0082739 | 0.0174979 | 0.0169640 | 2246 | 0 | 0 | 0.0115469 | 0.0199998 | 0.0034055 | 0.0058986 |
| 733 | 0.4624917 | 0.0473925 | 1.4144889 | 0.3743635 | 0.5800617 | 0.2975561 | 2247 | 0 | 0 | 0 | 0 | 0.0772833 | 0.0676742 |
| 734 | 0.3489421 | 0.0790977 | 1.6674031 | 0.4820783 | 0.2906061 | 0.1377851 | 2248 | 0 | 0 | 0.0005822 | 0.0010084 | 0 | 0 |
| 735 | 0.0056606 | 0.0013757 | 0.0220137 | 0.0047842 | 0.0187125 | 0.0239292 | 2249 | 0.0000089 | 0.0000154 | 0 | 0 | 0.0083046 | 0.0143840 |
| 736 | 0.0099623 | 0.0026249 | 0.0344463 | 0.0074713 | 0.0114069 | 0.0101781 | 2250 | 0.0023325 | 0.0004812 | 0.0047917 | 0.0041532 | 0.0378654 | 0.0456834 |
| 737 | 0.0024436 | 0.0035630 | 0.0048658 | 0.0002429 | 0.0000850 | 0.0001472 | 2251 | 0.0000464 | 0.0000803 | 0 | 0 | 0.0467970 | 0.0810548 |
| 738 | 0.5126487 | 0.1212549 | 1.6191663 | 0.1732762 | 0.6965441 | 0.2058485 | 2252 | 0 | 0 | 0 | 0 | 0.0105195 | 0.0182203 |
| 739 | 0.5906328 | 0.1336401 | 1.3528364 | 0.2591570 | 0.7386854 | 0.3698840 | 2253 | 0 | 0 | 0.0032229 | 0.0055822 | 0.0326849 | 0.0386575 |
| 740 | 0.0230807 | 0.0038993 | 0.0217202 | 0.0061335 | 0.0442842 | 0.0369662 | 2254 | 0 | 0 | 0 | 0 | 0 | 0 |
| 741 | 0.3396374 | 0.0418120 | 1.3246633 | 0.3998377 | 0.4144375 | 0.1738005 | 2255 | 0 | 0 | 0.0000794 | 0.0001375 | 0.0115088 | 0.0199339 |
| 742 | 0.0421225 | 0.0075935 | 0.4532118 | 0.1177707 | 0.0642745 | 0.0477136 | 2256 | 0 | 0 | 0.0541603 | ND | 0.0054251 | 0.0093966 |
| 743 | 0.4778789 | 0.0630132 | 0.9196188 | 0.2628757 | 0.5449919 | 0.1232365 | 2257 | 0 | 0 | 0.0000617 | 0.0001069 | 0.0295153 | 0.0265674 |
| 744 | 0.2664740 | 0.0361598 | 0.8968104 | 0.1538481 | 0.3873526 | 0.1718089 | 2258 | 0 | 0 | 0 | 0 | 0 | 0 |
| 745 | 0.0087991 | 0.0017846 | 0.0305534 | 0.0007925 | 0.0401244 | 0.0183698 | 2259 | 0 | 0 | 0.0002831 | 0.0002666 | 0.0096293 | 0.0166784 |
| 746 | 0.3563631 | 0.0380841 | 0.9006697 | 0.2216913 | 0.4688996 | 0.2832184 | 2260 | 0 | 0 | 0 | 0 | 0.0362850 | 0.0541543 |
| 747 | 0.7224644 | 0.1281956 | 1.5967749 | 0.3808133 | 0.5983972 | 0.2547259 | 2261 | 0 | 0 | 0.0001067 | 0.0001848 | 0.0707987 | 0.0317646 |
| 748 | 0.4628174 | 0.0639871 | 1.4877148 | 0.4151679 | 0.7749983 | 0.4105918 | 2262 | 0 | 0 | 0.0003705 | 0.0006417 | 0.0213562 | 0.0369900 |
| 749 | 0.2016296 | 0.0178909 | 0.7680248 | 0.4061214 | 0.3319342 | 0.1719244 | 2263 | 0 | 0 | 0 | 0 | 0.0506259 | 0.0751998 |
| 750 | 0.0025650 | 0.0005598 | 0.0093414 | 0.0022463 | 0.0254844 | 0.0307480 | 2264 | 0 | 0 | 0.0005557 | 0.0009625 | 0.0060578 | 0.0104925 |
| 751 | 0.3833717 | 0.0628420 | 1.3554707 | 0.1976652 | 0.4633426 | 0.2367725 | 2265 | 0.0000556 | 0.0000964 | 0.0143576 | 0.0248681 | 0.0627392 | 0.0879766 |
| 752 | 0.3432048 | 0.0433617 | 1.1515246 | 0.2686385 | 0.5531098 | 0.2507335 | 2266 | 0 | 0 | 0.0004410 | 0.0007639 | 0.0583999 | 0.1011516 |
| 753 | 0.0617437 | 0.0116139 | 0.9373098 | 0.1603001 | 0.1068908 | 0.0730321 | 2267 | 0 | 0 | 0 | 0 | 0 | 0 |
| 754 | 0.0106909 | 0.0007846 | 0.1339423 | 0.0340525 | 0.0490958 | 0.0135928 | 2269 | 0 | 0 | 0.0005204 | 0.0009014 | 0.0140097 | 0.0242656 |
| 755 | 0.2490235 | 0.0622153 | 1.0286894 | 0.1919862 | 0.3437454 | 0.1893448 | 2270 | 0 | 0 | 0.0005645 | 0.0009778 | 0 | 0 |
| 756 | 0.1717305 | 0.0004516 | 1.0127763 | 0.2729028 | 0.3465940 | 0.1107786 | 2271 | 0 | 0 | 0 | 0 | 0.0310014 | 0.0536960 |
| 757 | 0.0054900 | 0.0007439 | 0.0116315 | 0.0038131 | 0.0328869 | 0.0284953 | 2272 | 0 | 0 | 0.0000610 | 0.0001056 | 0.0262610 | 0.0454853 |
| 758 | 0.0002204 | 0.0003818 | 0.0015720 | 0.0004312 | 0.0165435 | 0.0286542 | 2273 | 0 | 0 | 0.0000794 | 0.0001375 | 0.0269416 | 0.0466643 |
| 759 | 0.0251391 | 0.0028856 | 0.1255371 | 0.0126569 | 0.0372960 | 0.0542426 | 2274 | 0 | 0 | 0.0002558 | 0.0004431 | 0.0520665 | 0.0547939 |
| 760 | 0.6792006 | 0.2996080 | 0.6492615 | 0.0287358 | 0.1000361 | 0.0040645 | 2275 | 0 | 0 | 0 | 0 | 0.0046661 | 0.0080819 |
| 761 | 0.0368116 | 0.0041520 | 0.1128563 | 0.0163097 | 0.0859247 | 0.0618694 | 2276 | 0.0004025 | 0.0000458 | 0.0001411 | 0.0002445 | 0.0150993 | 0.0261528 |
| 762 | 0.0003047 | 0.0003530 | 0.0015116 | 0.0005253 | 0.0347454 | 0.0117534 | 2277 | 0.0023787 | 0.0001464 | 0.0026182 | 0.0022875 | 0.0599825 | 0.0588070 |
| 763 | 0.0014499 | 0.0005461 | 0.0044637 | 0.0020502 | 0.0347449 | 0.0300997 | 2278 | 0.0080662 | 0.0012344 | 0.0233840 | 0.0100507 | 0.0045786 | 0.0039946 |
| 764 | 0.0008618 | 0.0001195 | 0.0050802 | 0.0012711 | 0.0173741 | 0.0284035 | 2279 | 0 | 0 | 0 | 0 | 0.0070734 | 0.0122515 |
| 765 | 0.0018299 | 0.0004046 | 0.0106240 | 0.0017637 | 0.0084315 | 0.0129675 | 2280 | 0 | 0 | 0 | 0 | 0.0023473 | 0.0040656 |
| 766 | 0.0115525 | 0.0016566 | 0.2526626 | 0.0513034 | 0.0445147 | 0.0385098 | 2281 | 0 | 0 | 0.0000991 | 0.0001716 | 0.0171030 | 0.0296232 |
| 767 | 0.1216636 | 0.0147762 | 0.7300450 | 0.1468574 | 0.3052640 | 0.1545072 | 2282 | 0 | 0 | 0 | 0 | 0.0084860 | 0.0146982 |
| 768 | 0.0009894 | 0.0002376 | 0.0075444 | 0.0002232 | 0.0131936 | 0.0114407 | 2283 | 0 | 0 | 0.0000176 | 0.0000306 | 0.0051826 | 0.0025694 |
| 769 | 0.0309757 | 0.0023603 | 0.3646575 | 0.0529937 | 0.0682454 | 0.0263133 | 2284 | 0.0017445 | 0.0001292 | 0.0012274 | 0.0013661 | 0.0481651 | 0.0523332 |
| 770 | 0.2908393 | 0.0355357 | 0.5088522 | 0.1155363 | 0.3528536 | 0.0441255 | 2285 | 1.8127979 | 0.0879777 | 2.8124011 | 1.1744627 | 0.1815338 | 0.1698569 |
| 771 | 0.6652379 | 0.1205940 | 1.4879278 | 0.2996936 | 0.9737556 | 0.4081553 | 2286 | 0.0023087 | 0.0001907 | 0.0023593 | 0.0031837 | 0.0042364 | 0.0073377 |
| 772 | 0.0076543 | 0.0012777 | 0.0180755 | 0.0043473 | 0.0257300 | 0.0304441 | 2287 | 0.0000452 | 0.0000782 | 0.0001588 | 0.0002750 | 0 | 0 |
| 773 | 0.5011577 | 0.0910847 | 1.9656274 | 0.6675773 | 0.6206645 | 0.2564350 | 2288 | 0.0000255 | 0.0000263 | 0 | 0 | 0.0242122 | 0.0419367 |
| 774 | 0.3855430 | 0.0608567 | 1.6777277 | 0.5084799 | 0.2989244 | 0.1241777 | 2289 | 0.0017108 | 0.0002418 | 0.0026339 | 0.0011858 | 0.0366055 | 0.0634026 |
| 775 | 0.0015681 | 0.0005398 | 0.0104731 | 0.0028526 | 0.0057233 | 0.0099130 | 2290 | 0 | 0 | 0.0010627 | 0.0010518 | 0.0296431 | 0.0258497 |
| 776 | 0.3229560 | 0.0275012 | 0.9955637 | 0.0837407 | 0.6810275 | 0.1826995 | 2291 | 0 | 0 | 0.0002210 | 0.0003828 | 0.0508869 | 0.0881387 |
| 777 | 0.0336307 | 0.0073409 | 0.0327952 | 0.0060883 | 0.0457330 | 0.0410626 | 2292 | 0.0003600 | 0.0000461 | 0.0000610 | 0.0001056 | 0.0321322 | 0.0395285 |
| 778 | 0 | 0 | 0.0013937 | 0.0023164 | 0.0009345 | 0.0016185 | 2293 | 0.0016885 | 0.0000920 | 0.0023755 | 0.0023301 | 0.0115515 | 0.0103145 |
| 779 | 0.1243461 | 0.0419125 | 0.4510455 | 0.2003006 | 0.6509206 | 0.1913214 | 2294 | 0.0000406 | 0.0000494 | 0.0010762 | 0.0014504 | 0.0110351 | 0.0101208 |
| 780 | 0.0000430 | 0.0000744 | 0.0045356 | 0.0027496 | 0 | 0 | 2295 | 0 | 0 | 0.0009615 | 0.0016653 | 0.0102259 | 0.0177118 |
| 781 | 0.0028688 | 0.0004613 | 0.0067288 | 0.0040415 | 0.0319141 | 0.0188219 | 2296 | 0.0007282 | 0.0001068 | 0.0011327 | 0.0016006 | 0.0405555 | 0.0702442 |
| 782 | 0.7468512 | 0.0883888 | 1.4305099 | 0.7007234 | 1.1097899 | 0.4425158 | 2298 | 0 | 0 | 0 | 0 | 0.0106077 | 0.0183731 |
| 783 | 0.6141437 | 0.1717315 | 1.3594319 | 0.6194480 | 1.1763946 | 0.3299439 | 2299 | 0 | 0 | 0.0009746 | 0.0007006 | 0.0315963 | 0.0519836 |
| 784 | 0.3690822 | 0.0708474 | 0.8485793 | 0.3801638 | 1.1051783 | 0.3112519 | 2300 | 0.0847727 | 0.0075940 | 0.1484284 | 0.0020310 | 0.0095545 | 0.0053480 |
| 785 | 1.2441359 | 0.5166303 | 1.8317439 | 0.0584043 | 0.0870500 | 0.0177789 | 2301 | 0 | 0 | 0.0003289 | 0.0005697 | 0.0037793 | 0.0036847 |
| 786 | 0.1066808 | 0.0272660 | 0.1631694 | 0.0365012 | 0.1748128 | 0.0181701 | 2302 | 0 | 0 | 0.0000429 | 0.0000743 | 0.0079526 | 0.0094909 |
| 787 | 0.2220721 | 0.0093622 | 0.9318827 | 0.2545935 | 1.4874460 | 0.4209787 | 2303 | 0 | 0 | 0 | 0 | 0.0417736 | 0.0478693 |
| 788 | 0.3356167 | 0.0493813 | 1.2764768 | 0.5059650 | 1.0064085 | 0.1709161 | 2304 | 0 | 0 | 0 | 0 | 0.0180552 | 0.0312725 |
| 789 | 0.0106526 | 0.0016368 | 0.0786709 | 0.0398256 | 0.0658624 | 0.0559150 | 2305 | 0 | 0 | 0.0001841 | 0.0003188 | 0.0139593 | 0.0130074 |
| 790 | 0.0036843 | 0.0045125 | 0.0060851 | 0.0014246 | 0 | 0 | 2306 | 0.0002813 | 0.0001537 | 0.0013227 | 0.0007991 | 0.0271910 | 0.0235516 |
| 791 | 1.2096602 | 0.1849961 | 1.6156370 | 0.1805862 | 0.6496945 | 0.0152531 | 2307 | 0 | 0 | 0.0001935 | 0.0002717 | 0.0090578 | 0.0113238 |
| 792 | 0.1761966 | 0.0188661 | 0.6884410 | 0.3354732 | 0.4410120 | 0.1841573 | 2308 | 0 | 0 | 0 | 0 | 0.0111129 | 0.0145113 |
| 793 | 0.8948030 | 0.1649499 | 1.8343207 | 0.6708429 | 1.8467718 | 0.4794745 | 2309 | 0 | 0 | 0 | 0 | 0.0171349 | 0.0042142 |
| 794 | 0.0023317 | 0.0003388 | 0.0561765 | 0.0278199 | 0.0760967 | 0.0514085 | 2310 | 0.0013644 | 0.0003521 | 0 | 0 | 0.0073605 | 0.0127488 |
| 795 | 0.0901874 | 0.0088615 | 0.4112345 | 0.1146114 | 0.5241135 | 0.0398496 | 2311 | 0 | 0 | 0 | 0 | 0.0005445 | 0.0005596 |
| 796 | 0.0864917 | 0.0068195 | 0.5390815 | 0.2307694 | 0.2588730 | 0.1007498 | 2312 | 0 | 0 | 0 | 0 | 0.0174440 | 0.0201104 |
| 797 | 0.2400677 | 0.0265441 | 0.4526116 | 0.1652983 | 0.5534929 | 0.1159519 | 2313 | 0 | 0 | 0 | 0 | 0.0219674 | 0.0217124 |
| 798 | 0.0108918 | 0.0013984 | 0.0592385 | 0.0262722 | 0.1628976 | 0.0726163 | 2314 | 0 | 0 | 0 | 0 | 0.0259544 | 0.0361162 |
| 799 | 0.0057797 | 0.0012942 | 0.0203581 | 0.0073666 | 0.0614595 | 0.0900022 | 2315 | 0 | 0 | 0.0000107 | 0.0000186 | 0.0035230 | 0.0044304 |
| 800 | 0.0048193 | 0.0007023 | 0.1177966 | 0.0556011 | 0.0481708 | 0.0123361 | 2316 | 0 | 0 | 0 | 0 | 0.0080537 | 0.0115824 |
| 801 | 0.0910098 | 0.0104249 | 0.2511696 | 0.1054970 | 0.2176410 | 0.1079909 | 2317 | 0 | 0 | 0 | 0 | 0.0102008 | 0.0098209 |
| 802 | 0.3733436 | 0.0783738 | 1.1933716 | 0.4741272 | 0.9145904 | 0.2532303 | 2319 | 0 | 0 | 0 | 0 | 0.0040370 | 0.0028084 |
| 803 | 0.0000150 | 0.0000259 | 0.0001360 | 0.0002355 | 0.0427385 | 0.0438892 | 2320 | 0 | 0 | 0 | 0 | 0 | 0 |
| 804 | 0.0514066 | 0.0018827 | 0.1466807 | 0.0683188 | 0.1338908 | 0.0237104 | 2321 | 0 | 0 | 0 | 0 | 0.0106598 | 0.0184633 |
| 805 | 0.0074535 | 0.0014995 | 0.0085464 | 0.0046152 | 0.0484296 | 0.0522748 | 2322 | 0 | 0 | 0 | 0 | 0.0297283 | 0.0269999 |
| 806 | 0.5128886 | 0.0180725 | 1.5281681 | 0.5367373 | 0.7563714 | 0.2289824 | 2323 | 0 | 0 | 0.0001802 | 0.0003120 | 0.0235482 | 0.0407868 |
| 807 | 0.0163740 | 0.0039293 | 0.0418284 | 0.0174684 | 0.0462168 | 0.0088282 | 2324 | 0.0000454 | 0.0000786 | 0.0002971 | 0.0004591 | 0.0069457 | 0.0060162 |
| 808 | 0.4643184 | 0.0696582 | 1.3076795 | 0.5307546 | 1.1862337 | 0.1944240 | 2325 | 0 | 0 | 0 | 0 | 0.0252427 | 0.0231164 |
| 810 | 0.0057540 | 0.0002689 | 0.0266162 | 0.0127661 | 0.0254950 | 0.0367606 | 2326 | 0 | 0 | 0 | 0 | 0.0074135 | 0.0111016 |
| 811 | 0.1462955 | 0.0187936 | 0.5000987 | 0.1978054 | 0.2354513 | 0.0568923 | 2327 | 0 | 0 | 0 | 0 | 0.0009710 | 0.0016819 |
| 812 | 0 | 0 | 0 | 0 | 0.0271394 | 0.0235807 | 2328 | 0 | 0 | 0 | 0 | 0.0018516 | 0.0016079 |
| 813 | 0.0030996 | 0.0016384 | 0.0029468 | 0.0022170 | 0.0375059 | 0.0489379 | 2329 | 0 | 0 | 0 | 0 | 0.0088919 | 0.0125761 |
| 814 | 0.0404907 | 0.0039199 | 0.8414862 | 0.3836713 | 0.1422321 | 0.0447855 | 2330 | 0 | 0 | 0 | 0 | 0.0145286 | 0.0165470 |
| 815 | 0.0020609 | 0.0005994 | 0.0110446 | 0.0056575 | 0.0023115 | 0.0040036 | 2331 | 0 | 0 | 0.0003182 | 0.0005511 | 0.0216802 | 0.0187757 |
| 816 | 0.4186203 | 0.1399217 | 1.0638654 | 0.4701762 | 0.9989026 | 0.2456221 | 2332 | 0 | 0 | 0.0000679 | 0.0001177 | 0.0271825 | 0.0470815 |
| 817 | 0.1234082 | 0.0328284 | 0.8742523 | 0.3178681 | 0.3212447 | 0.1265584 | 2333 | 0 | 0 | 0 | 0 | 0.0143589 | 0.0248704 |
| 818 | 0.0002183 | 0.0002979 | 0.0320476 | 0.0104378 | 0.0099074 | 0.0154985 | 2334 | 0 | 0 | 0 | 0 | 0.0015809 | 0.0027382 |
| 819 | 0.4482214 | 0.1802843 | 1.3255871 | 0.1500400 | 0.2240464 | 0.0237996 | 2335 | 0 | 0 | 0 | 0 | 0.0195271 | 0.0224236 |
| 820 | 1.1766075 | 0.0599776 | 1.4377744 | 0.1541220 | 4.2590882 | 1.1975232 | 2336 | 0.0002364 | 0.0002784 | 0.0003417 | 0.0003033 | 0.0270165 | 0.0382663 |
| 821 | 0.0190923 | 0.0045851 | 0.0519580 | 0.0257468 | 0.0388592 | 0.0302686 | 2337 | 0.0000080 | 0.0000139 | 0 | 0 | 0.0185840 | 0.0224577 |
| 822 | 0.0002209 | 0.0003093 | 0.0108164 | 0.0054359 | 0.0235889 | 0.0121649 | 2338 | 0.0012443 | 0.0002553 | 0.0016566 | 0.0010474 | 0.0125410 | 0.0131594 |
| 823 | 0.6303426 | 0.0990415 | 2.0981536 | 0.9207057 | 0.9074077 | 0.4606725 | 2339 | 0.0003557 | 0.0001513 | 0.0011294 | 0.0003862 | 0.0479725 | 0.0238676 |
| 824 | 0.0766174 | 0.0252503 | 0.0028887 | 0.0018879 | 0.1321434 | 0.1041817 | 2340 | 0 | 0 | 0.0004199 | 0.0005095 | 0.0090874 | 0.0130295 |
| 825 | 0.0326170 | 0.0059370 | 0.4896559 | 0.1415877 | 0.0921156 | 0.0574376 | 2341 | 0 | 0 | 0 | 0 | 0.0106711 | 0.0094067 |
| 826 | 0.2132570 | 0.0340306 | 1.2647511 | 0.5324821 | 0.6759137 | 0.2634486 | 2342 | 0 | 0 | 0 | 0 | 0 | 0 |
| 827 | 0.1815407 | 0.0200487 | 1.0538685 | 0.4168982 | 0.6652945 | 0.2553687 | 2343 | 0.0001447 | 0.0002036 | 0.0005361 | 0.0004444 | 0.0073590 | 0.0091605 |
| 828 | 0.0011388 | 0.0003272 | 0.0054974 | 0.0017042 | 0.0291928 | 0.0290069 | 2344 | 0.5091978 | 0.2485159 | 1.2800271 | 0.0474194 | 0.0181810 | 0.0144579 |
| 829 | 0.0366749 | 0.0048739 | 0.3529989 | 0.1579602 | 0.1872286 | 0.0678367 | 2345 | 0 | 0 | 0 | 0 | 0.0021893 | 0.0019104 |
| 830 | 0.2168890 | 0.0189036 | 0.9913468 | 0.3866638 | 1.0606919 | 0.2122776 | 2346 | 0.6383388 | 0.1508114 | 0.9772492 | 0.1852853 | 0.0257944 | 0.0225915 |
| 831 | 0.1096451 | 0.0278374 | 0.7662902 | 0.3746027 | 0.3887289 | 0.0967025 | 2347 | 0.0053815 | 0.0009261 | 0.0104333 | 0.0003402 | 0.0022083 | 0.0038248 |
| 832 | 0.0009791 | 0.0009128 | 0.0100638 | 0.0050787 | 0 | 0 | 2348 | 0.0016485 | 0.0001876 | 0.0031408 | 0.0010653 | 0 | 0 |
| 833 | 0.1517613 | 0.0480407 | 1.3844949 | 0.6619613 | 0.5627038 | 0.1335200 | 2349 | 0 | 0 | 0 | 0 | 0.0162311 | 0.0047470 |
| 834 | 0.0445537 | 0.0056964 | 0.6267001 | 0.2523216 | 0.2596575 | 0.0657143 | 2351 | 0.0006036 | 0.0003641 | 0.0000662 | 0.0001147 | 0.0007926 | 0.0013729 |
| 835 | 0.1028041 | 0.0074166 | 0.4574859 | 0.1351078 | 0.2831502 | 0.1670968 | 2352 | 0 | 0 | 0 | 0 | 0.0092008 | 0.0096851 |
| 836 | 0.3281256 | 0.0340064 | 1.1960177 | 0.1975451 | 0.7180878 | 0.2725227 | 2353 | 0.0002201 | 0.0002517 | 0 | 0 | 0 | 0 |
| 837 | 0.0001568 | 0.0001580 | 0.0026819 | 0.0023226 | 0.0084414 | 0.0146209 | 2354 | 0.0039566 | 0.0023360 | 0.0102351 | 0.0017062 | 0.0113331 | 0.0123829 |
| 838 | 0.0171068 | 0.0079444 | 0.0122888 | 0.0012806 | 0 | 0 | 2355 | 0.0005076 | 0.0002484 | 0.0005484 | 0.0007019 | 0.0044227 | 0.0076603 |
| 839 | 0.5388195 | 0.0611288 | 1.4823523 | 0.7283869 | 1.4326699 | 0.1784227 | 2356 | 0 | 0 | 0.0000770 | 0.0000985 | 0.0120054 | 0.0207939 |
| 840 | 0.4139326 | 0.0292893 | 1.4889660 | 0.5965066 | 1.5087552 | 0.5718780 | 2357 | 0.0000561 | 0.0000972 | 0.0007696 | 0.0005118 | 0 | 0 |
| 841 | 0.2785886 | 0.0812528 | 1.1062311 | 0.5251016 | 0.6824268 | 0.1280151 | 2358 | 0.0000150 | 0.0000260 | 0.0002712 | 0.0002356 | 0.0191794 | 0.0163041 |
| 842 | 0.2615451 | 0.0535742 | 1.0736436 | 0.4938042 | 0.8530606 | 0.2221382 | 2359 | 0 | 0 | 0 | 0 | 0.0009852 | 0.0017064 |
| 843 | 0.1923153 | 0.0299787 | 0.6690661 | 0.2641047 | 2.4965771 | 0.7483032 | 2360 | 0 | 0 | 0 | 0 | 0.0038994 | 0.0067540 |
| 844 | 0.4865939 | 0.1488644 | 1.4608203 | 0.0465369 | 0.3831173 | 0.0713714 | 2361 | 0 | 0 | 0 | 0 | 0.0020503 | 0.0035512 |
| 845 | 0.1454574 | 0.0066106 | 0.5957453 | 0.0027632 | 0.1624975 | 0.0087683 | 2362 | 0 | 0 | 0 | 0 | 0.0115990 | 0.0099906 |
| 846 | 0.1369823 | 0.0121922 | 1.1401785 | 0.2636452 | 1.2587981 | 0.5495608 | 2363 | 0 | 0 | 0 | 0 | 0.0203488 | 0.0342996 |
| 847 | 0.3835961 | 0.0062622 | 2.0188154 | 0.3318678 | 0.6842160 | 0.3414744 | 2364 | 0 | 0 | 0.0000393 | 0.0000681 | 0.0081235 | 0.0083337 |
| 848 | 0.0754755 | 0.0117404 | 0.5744557 | 0.2562899 | 0.8392391 | 0.1093640 | 2365 | 0 | 0 | 0.0002610 | 0.0004521 | 0.0013944 | 0.0024152 |
| 849 | 0.2583264 | 0.0566976 | 1.8602784 | 0.9217313 | 0.5203092 | 0.1660751 | 2366 | 0 | 0 | 0 | 0 | 0.0085170 | 0.0147518 |
| 850 | 0.5562698 | 0.1683688 | 1.7526928 | 0.6640152 | 0.9804276 | 0.3347994 | 2367 | 0 | 0 | 0 | 0 | 0 | 0 |
| 851 | 0.1145687 | 0.0261641 | 0.7334243 | 0.2753407 | 0.7771992 | 0.1684661 | 2368 | 0 | 0 | 0 | 0 | 0.0080336 | 0.0139146 |
| 852 | 0.1954675 | 0.0106259 | 0.5081842 | 0.1809175 | 1.7760225 | 0.5179178 | 2369 | 0.0003107 | 0.0001700 | 0.0026580 | 0.0008874 | 0.0167948 | 0.0290894 |
| 853 | 0.2386231 | 0.0269957 | 1.0768910 | 0.1860235 | 0.6773812 | 0.2859134 | 2370 | 0 | 0 | 0 | 0 | 0.0127210 | 0.0220334 |
| 854 | 0.0478617 | 0.0031631 | 0.4460447 | 0.2243769 | 0.5240844 | 0.2256005 | 2371 | 0 | 0 | 0 | 0 | 0.0302694 | 0.0311873 |
| 855 | 0.2128024 | 0.0168563 | 0.9932703 | 0.4755309 | 0.6348777 | 0.1698348 | 2372 | 0 | 0 | 0.0000548 | 0.0000950 | 0.0118533 | 0.0202033 |
| 856 | 0.0909237 | 0.0128629 | 0.2013447 | 0.0925931 | 0.4931850 | 0.1521315 | 2373 | 0.0000951 | 0.0001647 | 0.0011155 | 0.0002143 | 0.0111133 | 0.0117153 |
| 857 | 0.4260379 | 0.0882727 | 0.9166772 | 0.3883544 | 1.5934035 | 0.4201176 | 2374 | 0 | 0 | 0 | 0 | 0 | 0 |
| 858 | 0.0296376 | 0.0060975 | 0.7407408 | 0.3109973 | 0.1006344 | 0.0493297 | 2375 | 0 | 0 | 0 | 0 | 0 | 0 |
| 859 | 0.0007436 | 0.0004736 | 0.0073459 | 0.0032222 | 0.0035883 | 0.0062151 | 2376 | 0 | 0 | 0 | 0 | 0.0029699 | 0.0051440 |
| 860 | 0.0015482 | 0.0000274 | 0.0185965 | 0.0075140 | 0.0129381 | 0.0184519 | 2377 | 0 | 0 | 0 | 0 | 0.0319489 | 0.0509850 |
| 861 | 0.5937918 | 0.0320351 | 1.6520001 | 0.1341928 | 1.5382917 | 0.2762123 | 2379 | 0 | 0 | 0 | 0 | 0.0061992 | 0.0107374 |
| 862 | 0.8626269 | 0.1503672 | 1.5953983 | 0.6417049 | 1.6649476 | 0.4457799 | 2380 | 0 | 0 | 0.0000393 | 0.0000681 | 0.0034298 | 0.0059406 |
| 863 | 0.5214500 | 0.0466549 | 1.3671389 | 0.5882597 | 1.5105618 | 0.4952573 | 2381 | 0.3286092 | 0.0177007 | 0.3752226 | 0.0280312 | 0.0003458 | 0.0005989 |
| 864 | 0.3870868 | 0.0219952 | 0.8923021 | 0.3560355 | 1.5467879 | 0.4798770 | 2382 | 0.0000595 | 0.0001031 | 0.0000107 | 0.0000186 | 0.0100648 | 0.0136983 |
| 865 | 0.2535143 | 0.0141704 | 1.0680685 | 0.5372128 | 0.9219688 | 0.2493120 | 2383 | 0 | 0 | 0 | 0 | 0.0000032 | 0.0000055 |
| 866 | 0.0517522 | 0.0038918 | 0.2064443 | 0.0918785 | 0.3268171 | 0.0772961 | 2384 | 0 | 0 | 0 | 0 | 0.0052014 | 0.0090090 |
| 867 | 0.2375035 | 0.0303309 | 0.7223557 | 0.3081785 | 0.6375810 | 0.0562019 | 2385 | 0.0000574 | 0.0000994 | 0 | 0 | 0.0220818 | 0.0382469 |
| 868 | 0.0012539 | 0.0002122 | 0.0035092 | 0.0018678 | 0.0106886 | 0.0185132 | 2386 | 0 | 0 | 0 | 0 | 0.0148311 | 0.0256883 |
| 869 | 1.0019056 | 0.1426194 | 1.8376386 | 0.1323780 | 0.8473526 | 0.1274444 | 2387 | 0.0000595 | 0.0001031 | 0 | 0 | 0.0002673 | 0.0004630 |
| 870 | 0.3297324 | 0.0361669 | 0.9119081 | 0.3515428 | 1.1969889 | 0.4533518 | 2388 | 0.0007850 | 0.0001904 | 0.0008801 | 0.0004476 | 0.0104309 | 0.0090436 |
| 871 | 0.3621068 | 0.0378441 | 0.7068048 | 0.2991754 | 1.4409424 | 0.3503940 | 2390 | 0 | 0 | 0.0000501 | 0.0000867 | 0.0102370 | 0.0175917 |
| 872 | 0.0002420 | 0.0001625 | 0.0037638 | 0.0022829 | 0.0235938 | 0.0104199 | 2392 | 0 | 0 | 0 | 0 | 0 | 0 |
| 873 | 0.0045288 | 0.0005922 | 0.0127769 | 0.0065310 | 0.0369895 | 0.0383683 | 2394 | 0 | 0 | 0 | 0 | 0.0042129 | 0.0041454 |
| 874 | 0.1400322 | 0.0167777 | 0.5571608 | 0.1841735 | 1.8520352 | 0.3607469 | 2395 | 0 | 0 | 0 | 0 | 0.0077521 | 0.0068924 |
| 875 | 0.1678987 | 0.0163764 | 0.8957383 | 0.3186484 | 0.9367534 | 0.3091561 | 2396 | 0 | 0 | 0 | 0 | 0 | 0 |
| 876 | 0.4692483 | 0.0585856 | 1.1178576 | 0.4780424 | 1.5735405 | 0.4963713 | 2397 | 0.0008292 | 0.0001293 | 0.0010311 | 0.0001553 | 0.0075677 | 0.0067101 |
| 877 | 0 | 0 | 0 | 0 | 0.0127151 | 0.0205143 | 2398 | 0 | 0 | 0.0035956 | 0.0062277 | 0.0085629 | 0.0148314 |
| 878 | 0.0042651 | 0.0008248 | 0.0144572 | 0.0099741 | 0.1791199 | 0.0720935 | 2399 | 0.0000572 | 0.0000991 | 0.0018057 | 0.0022448 | 0.0057621 | 0.0099803 |
| 879 | 0 | 0 | 0 | 0 | 0.0100200 | 0.0127834 | 2400 | 0.0000233 | 0.0000404 | 0.0004150 | 0.0004990 | 0.0048968 | 0.0084815 |
| 880 | 0.0043227 | 0.0027305 | 0.0042971 | 0.0002024 | 0 | 0 | 2401 | 0.0000030 | 0.0000052 | 0.0003588 | 0.0006215 | 0.0148389 | 0.0134274 |
| 881 | 0 | 0 | 0 | 0 | 0 | 0 | 2402 | 0.0000038 | 0.0000065 | 0 | 0 | 0.0068783 | 0.0115706 |
| 882 | 0 | 0 | 0 | 0 | 0.0038666 | 0.0054682 | 2403 | 0.0000192 | 0.0000333 | 0.0000617 | 0.0000982 | 0.0171240 | 0.0266267 |
| 883 | 0 | 0 | 0.0006653 | 0.0007318 | 0.0081053 | 0.0114626 | 2404 | 0.0000290 | 0.0000502 | 0 | 0 | 0.0115276 | 0.0126975 |
| 884 | 0.1471682 | 0.0265647 | 0.8447619 | 0.5041407 | 0.1743315 | 0.0855773 | 2405 | 0.0000808 | 0.0001062 | 0.0005378 | 0.0004179 | 0.0230528 | 0.0300230 |
| 885 | 0.3405239 | 0.0299151 | 0.7719486 | 0.1378584 | 0.8731001 | 0.5486238 | 2406 | 0.0004150 | 0.0002084 | 0.0019011 | 0.0010834 | 0.0286834 | 0.0200736 |
| 886 | 0 | 0 | 0.0297735 | 0.0188636 | 0.0172826 | 0.0244413 | 2407 | 0.0000633 | 0.0000795 | 0.0002401 | 0.0003982 | 0.0156599 | 0.0271237 |
| 887 | 0.0005097 | 0.0001121 | 0.0525930 | 0.0028278 | 0.0245058 | 0.0101067 | 2408 | 0.0000008 | 0.0000013 | 0.0000308 | 0.0000533 | 0.0154035 | 0.0187811 |
| 888 | 0.6701495 | 0.0515567 | 1.9449049 | 0.2521632 | 0.9352117 | 0.5374151 | 2409 | 0.0001470 | 0.0001444 | 0.0001521 | 0.0002124 | 0.0043633 | 0.0075575 |
| 889 | 0.1810806 | 0.0314987 | 1.5172920 | 0.8654131 | 0.3970724 | 0.1851990 | 2410 | 0.0000418 | 0.0000724 | 0 | 0 | 0.0062371 | 0.0108029 |
| 890 | 0.3447856 | 0.0505007 | 1.8853924 | 0.8906931 | 0.7494377 | 0.3206252 | 2411 | 0.0000079 | 0.0000137 | 0.0000702 | 0.0001216 | 0.0231969 | 0.0181655 |
| 891 | 0.0724515 | 0.0126193 | 0.6700226 | 0.1397345 | 0.1446928 | 0.0570936 | 2412 | 0.0018637 | 0.0008886 | 0.0077165 | 0.0072801 | 0.0198271 | 0.0250936 |
| 892 | 0.0379877 | 0.0036213 | 0.8171244 | 0.0765814 | 0.0325425 | 0.0328970 | 2413 | 0.0001176 | 0.0001359 | 0.0000570 | 0.0000988 | 0.0190535 | 0.0169496 |
| 893 | 0.3692303 | 0.0514058 | 0.9796081 | 0.4186800 | 0.4391435 | 0.2079283 | 2414 | 0.0004522 | 0.0002097 | 0.0017917 | 0.0009329 | 0.0089378 | 0.0154807 |
| 894 | 0.0603598 | 0.0117061 | 0.7392029 | 0.3535570 | 0.1763967 | 0.0082283 | 2415 | 0.0002131 | 0.0001698 | 0.0017803 | 0.0008653 | 0.0286410 | 0.0376777 |
| 896 | 0.0083643 | 0.0012224 | 0.0391071 | 0.0218916 | 0.0193974 | 0.0072531 | 2416 | 0.0000151 | 0.0000261 | 0 | 0 | 0.0082792 | 0.0090876 |
| 897 | 0.0006869 | 0.0003309 | 0.0063547 | 0.0029412 | 0.0067844 | 0.0095946 | 2417 | 0.0000851 | 0.0001000 | 0.0000219 | 0.0000380 | 0.0078826 | 0.0120449 |
| 898 | 0.2772595 | 0.0219299 | 1.5919484 | 0.8611955 | 0.4166101 | 0.2671627 | 2418 | 0.0000343 | 0.0000593 | 0 | 0 | 0.0189176 | 0.0324836 |
| 899 | 0.2913919 | 0.0373450 | 1.3019666 | 0.5970651 | 0.4185023 | 0.2447737 | 2419 | 0.0000211 | 0.0000365 | 0.0001623 | 0.0002811 | 0.0330007 | 0.0356849 |
| 900 | 0.3165235 | 0.0365368 | 0.9789776 | 0.1366711 | 0.4185444 | 0.1359086 | 2420 | 0.0001786 | 0.0001258 | 0.0005457 | 0.0000992 | 0.0068405 | 0.0118481 |
| 901 | 0.0046324 | 0.0006306 | 0.0431558 | 0.0058195 | 0 | 0 | 2421 | 0.0015820 | 0.0004557 | 0.0042165 | 0.0010059 | 0.0293700 | 0.0508703 |
| 902 | 0.3415284 | 0.0345199 | 1.4948809 | 0.8405054 | 0.4503790 | 0.0824256 | 2422 | 0.4629697 | 0.0532369 | 1.2102562 | 0.5085150 | 0.0178661 | 0.0219615 |
| 903 | 0.3581634 | 0.0661577 | 1.9131594 | 0.8306942 | 0.4517932 | 0.1822115 | 2423 | 0.0000474 | 0.0000822 | 0.0001736 | 0.0001749 | 0.0096052 | 0.0085921 |
| 904 | 0.1597305 | 0.0065779 | 1.2358426 | 0.6820194 | 0.2956965 | 0.1569389 | 2424 | 0.0000154 | 0.0000267 | 0 | 0 | 0.0110877 | 0.0192045 |
| 905 | 0.1273941 | 0.0116015 | 0.9930522 | 0.4942538 | 0.3821762 | 0.1059796 | 2425 | 0.0000972 | 0.0000864 | 0.0001715 | 0.0002518 | 0.0099207 | 0.0130670 |
| 906 | 0.2842960 | 0.0135621 | 1.6776734 | 0.9384457 | 0.3983205 | 0.0665316 | 2426 | 0.0024164 | 0.0020012 | 0.0077438 | 0.0011343 | 0.0073407 | 0.0059171 |
| 907 | 0.3310415 | 0.0649510 | 1.4555994 | 0.4935093 | 0.6619310 | 0.1675899 | 2427 | 0.0000527 | 0.0000913 | 0 | 0 | 0.0181782 | 0.0298907 |
| 908 | 0.0274063 | 0.0047282 | 0.5301644 | 0.2053931 | 0.0913604 | 0.0415588 | 2428 | 0.0000610 | 0.0001056 | 0 | 0 | 0 | 0 |
| 909 | 0.1535525 | 0.0134974 | 0.3888339 | 0.1828495 | 0.0714316 | 0.0087958 | 2430 | 0.0001578 | 0.0001588 | 0.0000513 | 0.0000889 | 0.0016807 | 0.0029111 |
| 910 | 0.2630031 | 0.0483506 | 0.9817207 | 0.2667945 | 0.4508670 | 0.1025349 | 2431 | 0.0006029 | 0.0002171 | 0.0016966 | 0.0010656 | 0.0079158 | 0.0121720 |
| 911 | 0.2099171 | 0.0153248 | 0.8311129 | 0.2458102 | 0.4376597 | 0.0856623 | 2432 | 0.0000907 | 0.0000998 | 0.0009379 | 0.0013748 | 0.0264585 | 0.0439809 |
| 912 | 0.1707705 | 0.0226077 | 1.0383092 | 0.5006838 | 0.4164817 | 0.0000013 | 2433 | 0.0000053 | 0.0000091 | 0 | 0 | 0.0249975 | 0.0330890 |
| 913 | 0.4818175 | 0.0763338 | 2.0425324 | 0.7069156 | 0.5174682 | 0.0203474 | 2434 | 0.0006593 | 0.0004652 | 0.0011697 | 0.0007883 | 0.0106568 | 0.0167051 |
| 914 | 0.3925773 | 0.0368836 | 2.1973784 | 1.1167067 | 0.4285404 | 0.0027365 | 2435 | 0.4716492 | 0.2748773 | 0.9743552 | 0.1308426 | 0.0159458 | 0.0059171 |
| 915 | 0.1580614 | 0.0219703 | 1.2239193 | 0.4368052 | 0.2181235 | 0.0572156 | 2436 | 0.0003907 | 0.0002509 | 0.0004956 | 0.0008585 | 0.0044278 | 0.0062842 |
| 916 | 0.2819465 | 0.0181551 | 1.2790595 | 0.4065963 | 0.3671746 | 0.1168482 | 2437 | 0.0001059 | 0.0001010 | 0.0000513 | 0.0000889 | 0.0017583 | 0.0030454 |
| 917 | 0.6300580 | 0.0761798 | 1.4802635 | 0.5112224 | 0.6386307 | 0.1719433 | 2438 | 0.0000392 | 0.0000678 | 0.0002532 | 0.0002251 | 0.0187189 | 0.0311728 |
| 918 | 0.2784590 | 0.0315574 | 1.1952363 | 0.4718813 | 0.4702428 | 0.0413233 | 2439 | 0.0001011 | 0.0001517 | 0.0002585 | 0.0002856 | 0.0197622 | 0.0189525 |
| 919 | 0.4074454 | 0.0518436 | 1.4496065 | 0.2281196 | 0.6517923 | 0.2094878 | 2441 | 0 | 0 | 0.0001435 | 0.0002486 | 0.0176274 | 0.0305315 |
| 920 | 0.1690367 | 0.0144909 | 1.6888264 | 0.7808953 | 0.4628982 | 0.0006877 | 2442 | 0.0000181 | 0.0000313 | 0 | 0 | 0.0195369 | 0.0203316 |
| 921 | 0.1818878 | 0.0454716 | 1.5778334 | 0.7750634 | 0.4272560 | 0.1057797 | 2443 | 0.0000588 | 0.0000612 | 0.0002585 | 0.0002856 | 0.0124670 | 0.0123245 |
| 922 | 3.4140434 | 1.3723771 | 1.8529707 | 0.1527104 | 0.2157329 | 0.0223705 | 2444 | 0.0004441 | 0.0003325 | 0.0005748 | 0.0005030 | 0.0070469 | 0.0122056 |
| 923 | 0.3010908 | 0.0348821 | 1.4421522 | 0.7909056 | 0.3973307 | 0.1886032 | 2445 | 0.0004625 | 0.0002609 | 0.0006074 | 0.0005756 | 0.0153236 | 0.0132830 |
| 924 | 0.2748877 | 0.0585666 | 1.2109233 | 0.8169687 | 0.3842675 | 0.2276269 | 2446 | 0.0000309 | 0.0000535 | 0 | 0 | 0.0094318 | 0.0163364 |
| 925 | 0.1864681 | 0.0101874 | 0.7570132 | 0.1091631 | 0.2901999 | 0.0538680 | 2447 | 0.0000828 | 0.0001435 | 0.0002332 | 0.0004039 | 0.0049785 | 0.0086231 |
| 926 | 0.0037685 | 0.0008215 | 0.0150461 | 0.0064566 | 0.0233662 | 0.0135724 | 2448 | 0.0001095 | 0.0001550 | 0.0001214 | 0.0001600 | 0.0153819 | 0.0118478 |
| 927 | 0.4318845 | 0.0615468 | 1.4340856 | 0.4518837 | 0.9367170 | 0.3614953 | 2449 | 0 | 0 | 0.0001166 | 0.0002020 | 0.0164362 | 0.0284683 |
| 928 | 0.1824124 | 0.0401845 | 1.2008483 | 0.4579460 | 0.4094542 | 0.0489591 | 2450 | 0.0000109 | 0.0000189 | 0.0000044 | 0.0000076 | 0.0403978 | 0.0301711 |
| 929 | 0.0824791 | 0.0123042 | 0.8983709 | 0.4006846 | 0.1593716 | 0.0610960 | 2451 | 0.0000380 | 0.0000659 | 0.0002281 | 0.0003951 | 0.0188403 | 0.0190268 |
| 930 | 0.0027554 | 0.0002163 | 0.0492230 | 0.0256099 | 0.0105156 | 0.0033703 | 2452 | 0.0000309 | 0.0000535 | 0 | 0 | 0.0170814 | 0.0184129 |
| 931 | 0.0258376 | 0.0026976 | 0.0859250 | 0.0181125 | 0.0419612 | 0.0240098 | 2453 | 0.0000264 | 0.0000456 | 0 | 0 | 0.0155130 | 0.0181149 |
| 932 | 0.4261512 | 0.0597224 | 1.2344997 | 0.2533501 | 0.8443599 | 0.4198049 | 2454 | 0.0000309 | 0.0000535 | 0 | 0 | 0.0081001 | 0.0089751 |
| 933 | 0.0110432 | 0.0012226 | 0.0283163 | 0.0015801 | 0.0091021 | 0.0017826 | 2455 | 0.0004458 | 0.0001741 | 0.0004292 | 0.0005577 | 0.0137039 | 0.0129794 |
| 934 | 0.6356982 | 0.1052789 | 1.2943090 | 0.3262727 | 0.9370015 | 0.3367836 | 2456 | 0.0010893 | 0.0002542 | 0.0019674 | 0.0004871 | 0.0063063 | 0.0097580 |
| 935 | 0.2498322 | 0.0386567 | 1.4300480 | 0.2125065 | 0.2385670 | 0.1018381 | 2457 | 0.0000546 | 0.0000946 | 0.0009667 | 0.0010910 | 0.0175801 | 0.0218962 |
| 936 | 0.1589528 | 0.0204370 | 1.1575313 | 0.6229310 | 0.2395571 | 0.0500690 | 2458 | 0.0140069 | 0.0014663 | 0.0702549 | 0.0088082 | 0.0030657 | 0.0053099 |
| 937 | 0.1441376 | 0.0142619 | 0.9786933 | 0.4331392 | 0.4321309 | 0.0716816 | 2460 | 0.0000226 | 0.0000391 | 0.0002018 | 0.0003495 | 0.0228606 | 0.0395957 |
| 938 | 0.2031241 | 0.0360895 | 1.0244028 | 0.4257385 | 0.4847764 | 0.1396722 | 2461 | 0.0000196 | 0.0000339 | 0.0004079 | 0.0007065 | 0.0121956 | 0.0150149 |
| 939 | 0.2112971 | 0.0255222 | 1.1829352 | 0.3675039 | 0.4285740 | 0.1526786 | 2462 | 0.0000331 | 0.0000574 | 0 | 0 | 0.0181868 | 0.0315005 |
| 940 | 0.0000765 | 0.0000688 | 0.0002997 | 0.0005191 | 0 | 0 | 2463 | 0.0000463 | 0.0000802 | 0.0000395 | 0.0000684 | 0.0180510 | 0.0227591 |
| 941 | 0.0050931 | 0.0005404 | 0.0500171 | 0.0193957 | 0.0169418 | 0.0131972 | 2464 | 0.0010061 | 0.0003695 | 0.0020544 | 0.0005009 | 0.0139817 | 0.0187103 |
| 942 | 0.1707588 | 0.0347992 | 0.7577469 | 0.1661540 | 0.9911682 | 0.3958148 | 2465 | 0.8671411 | 0.1827097 | 1.4054673 | 0.4605879 | 0.0046702 | 0.0080891 |
| 943 | 0.1762501 | 0.0206980 | 1.1534182 | 0.1675703 | 0.2594093 | 0.0331581 | 2466 | 0.0000128 | 0.0000222 | 0.0004448 | 0.0004015 | 0.0094850 | 0.0164285 |
| 944 | 0.0797240 | 0.0115462 | 0.4673871 | 0.0286095 | 0.5673771 | 0.1827626 | 2467 | 0.0000015 | 0.0000026 | 0 | 0 | 0.0080401 | 0.0125165 |
| 945 | 0.5814933 | 0.2277992 | 1.4071678 | 0.0587717 | 0.1158668 | 0.0319320 | 2468 | 0.0000124 | 0.0000215 | 0 | 0 | 0.0248461 | 0.0227765 |
| 946 | 0.2207690 | 0.0228089 | 1.1220992 | 0.6406516 | 0.3933063 | 0.0971148 | 2469 | 0.0000267 | 0.0000463 | 0 | 0 | 0.0088776 | 0.0153764 |
| 947 | 0.2532843 | 0.0359496 | 1.1421549 | 0.6383162 | 0.3378375 | 0.1000830 | 2470 | 0.0000090 | 0.0000157 | 0.0002325 | 0.0004027 | 0.0166755 | 0.0239491 |
| 948 | 0.1589921 | 0.0295189 | 0.6746642 | 0.3623457 | 0.2354148 | 0.0496478 | 2471 | 0.0001008 | 0.0000876 | 0.0002057 | 0.0003129 | 0.0294545 | 0.0270056 |
| 949 | 0.1821871 | 0.0042268 | 0.8203615 | 0.0512430 | 0.3032757 | 0.1342002 | 2472 | 0.0002369 | 0.0001597 | 0.0001930 | 0.0003343 | 0.0344328 | 0.0236281 |
| 950 | 0.2247875 | 0.0328869 | 1.0892295 | 0.5388531 | 0.7602569 | 0.2431375 | 2473 | 0.0010394 | 0.0002925 | 0.0015950 | 0.0011146 | 0.0297150 | 0.0158162 |
| 951 | 0.3842484 | 0.0502364 | 0.9465582 | 0.2979981 | 0.3750030 | 0.0951033 | 2474 | 0.0000023 | 0.0000039 | 0.0012767 | 0.0011881 | 0.0027011 | 0.0023437 |
| 952 | 0.0426259 | 0.0052491 | 0.3810325 | 0.0950710 | 0.2005218 | 0.0317585 | 2475 | 0.0000090 | 0.0000157 | 0 | 0 | 0.0130615 | 0.0226231 |
| 953 | 0.1372913 | 0.0134926 | 0.9704767 | 0.4087998 | 0.9839774 | 0.3303922 | 2476 | 0 | 0 | 0.0000746 | 0.0001292 | 0.0164469 | 0.0284869 |
| 954 | 0.1628276 | 0.0082633 | 0.9397548 | 0.3598247 | 0.5743305 | 0.0731047 | 2477 | 0.0000215 | 0.0000372 | 0.0002258 | 0.0003910 | 0.0091878 | 0.0159138 |
| 955 | 0.2563646 | 0.0260857 | 0.7605425 | 0.4871772 | 0.4585377 | 0.1027742 | 2478 | 0.0000395 | 0.0000685 | 0.0000307 | 0.0000532 | 0.0049887 | 0.0086407 |
| 956 | 0.2391771 | 0.0297105 | 0.9831789 | 0.0349722 | 0.0722747 | 0.0026507 | 2479 | 0.0000712 | 0.0001233 | 0 | 0 | 0.0011877 | 0.0020571 |
| 957 | 0.1397804 | 0.0116432 | 0.6869359 | 0.3153661 | 0.5133568 | 0.2382439 | 2480 | 0.0004132 | 0.0002028 | 0.0000650 | 0.0001126 | 0.0088872 | 0.0096885 |
| 958 | 0.1947139 | 0.0169748 | 0.9808479 | 0.4604095 | 0.7694269 | 0.2929716 | 2481 | 0.0001443 | 0.0001764 | 0.0002855 | 0.0003294 | 0.0097355 | 0.0107007 |
| 959 | 0.7510216 | 0.0472336 | 1.8921317 | 0.4948369 | 3.3708277 | 0.7470173 | 2482 | 0.0000060 | 0.0000104 | 0.0004219 | 0.0005245 | 0.0155246 | 0.0151434 |
| 960 | 0.7075363 | 0.2570171 | 1.2355977 | 0.0791769 | 0.4463361 | 0.0599540 | 2483 | 0.0000060 | 0.0000104 | 0.0001345 | 0.0002330 | 0.0126157 | 0.0218510 |
| 961 | 0.1433127 | 0.0156736 | 1.2961013 | 0.6559879 | 0.6034332 | 0.1666298 | 2484 | 0.0000181 | 0.0000313 | 0.0000044 | 0.0000076 | 0.0050183 | 0.0086919 |
| 962 | 0.1982254 | 0.0237106 | 1.5728354 | 0.9510842 | 0.3597792 | 0.1431926 | 2485 | 0.0000203 | 0.0000352 | 0 | 0 | 0.0200409 | 0.0151332 |
| 963 | 0.0141388 | 0.0020483 | 0.1580591 | 0.0941857 | 0.0683269 | 0.0374093 | 2486 | 0.0002769 | 0.0002262 | 0.0008917 | 0.0006494 | 0.0138142 | 0.0038071 |
| 964 | 0.4837021 | 0.0541549 | 1.8192377 | 0.6267415 | 0.8082392 | 0.0450020 | 2487 | 0.0000727 | 0.0001259 | 0.0001060 | 0.0001837 | 0.0036610 | 0.0063410 |
| 965 | 0.2387303 | 0.0121959 | 0.8356915 | 0.1956378 | 0.5967066 | 0.1931533 | 2488 | 0.0002756 | 0.0001763 | 0.0001929 | 0.0003340 | 0.0136485 | 0.0157927 |
| 966 | 0.5428558 | 0.0390375 | 1.0942961 | 0.4029519 | 0.5553491 | 0.1000158 | 2489 | 0.0009930 | 0.0001160 | 0.0008863 | 0.0003444 | 0.0081293 | 0.0074553 |
| 967 | 0.3790396 | 0.0812215 | 1.4938162 | 0.7163500 | 0.5532541 | 0.2473251 | 2490 | 0 | 0 | 0.0005370 | 0.0004653 | 0.0175117 | 0.0222877 |
| 968 | 0.0706122 | 0.0088025 | 0.3400911 | ND | 0.5158618 | 0.0821811 | 2491 | 0 | 0 | 0.0002198 | 0.0003806 | 0.0187575 | 0.0324890 |
| 969 | 0.1768472 | 0.0210385 | 1.2345580 | 0.7968995 | 0.5353495 | 0.1503010 | 2492 | 0.0000147 | 0.0000254 | 0.0000090 | 0.0000155 | 0.0199752 | 0.0286311 |
| 970 | 0.1561197 | 0.0018095 | 0.7236427 | 0.3813770 | 1.1850391 | 0.3323564 | 2493 | 0.0000757 | 0.0000923 | 0.0001228 | 0.0002127 | 0.0373233 | 0.0394017 |
| 971 | 0.0495618 | 0.0099058 | 0.7923464 | 0.4444232 | 0.1766061 | 0.0256643 | 2494 | 0.0000282 | 0.0000489 | 0.0002153 | 0.0003729 | 0.0092665 | 0.0160500 |
| 972 | 0.0801790 | 0.0046517 | 0.7126026 | 0.4626978 | 0.3463313 | 0.1135727 | 2495 | 0.0001204 | 0.0002086 | 0.0000214 | 0.0000371 | 0.0021804 | 0.0037766 |
| 973 | 0 | 0 | 0 | 0 | 0.0050507 | 0.0087481 | 2496 | 0.0034616 | 0.0003094 | 0.0042888 | 0.0015338 | 0.0110503 | 0.0108850 |
| 974 | 0.4648077 | 0.0617351 | 1.6023297 | 0.3822333 | 0.9636032 | 0.0952493 | 2497 | 0.0004800 | 0.0008314 | 0.0043656 | 0.0011573 | 0.0241278 | 0.0417905 |
| 975 | 0.5022281 | 0.0418114 | 1.6143303 | 0.4246182 | 0.7073563 | 0.1249687 | 2498 | 0.0000023 | 0.0000039 | 0.0016814 | 0.0015527 | 0.0454715 | 0.0232620 |
| 976 | 0.4745932 | 0.0666697 | 1.6014528 | 0.4425514 | 0.4964049 | 0.1480459 | 2499 | 0 | 0 | 0.0001516 | 0.0002450 | 0.0463109 | 0.0372785 |
| 977 | 0.4443138 | 0.0610076 | 1.2318357 | 0.3640334 | 0.8575415 | 0.4154052 | 2500 | 0 | 0 | 0.0001708 | 0.0001718 | 0.0347270 | 0.0427746 |
| 978 | 0.0482658 | 0.0044037 | 1.2285972 | 0.2759839 | 0.0986519 | 0.0264638 | 2501 | 0.0000027 | 0.0000047 | 0.0003106 | 0.0002823 | 0.0393132 | 0.0314475 |
| 979 | 0.3766846 | 0.0650270 | 1.0975079 | 0.0573909 | 0.2938823 | 0.0088981 | 2502 | 0 | 0 | 0.0005681 | 0.0004984 | 0.0401929 | 0.0479934 |
| 980 | 0.6512222 | 0.0399235 | 2.3660137 | 0.5200565 | 0.9380213 | 0.1274103 | 2503 | 0.0000022 | 0.0000038 | 0.0007638 | 0.0006476 | 0.0065783 | 0.0099198 |
| 981 | 0.6832500 | 0.0677885 | 1.2626195 | 0.1789951 | 0.8534637 | 0.3821545 | 2504 | 0 | 0 | 0.0001767 | 0.0003061 | 0.0481277 | 0.0498081 |
| 982 | 0.4686204 | 0.0797793 | 1.6613887 | 0.3272631 | 0.8240170 | 0.0851889 | 2505 | 0 | 0 | 0.0010517 | 0.0001619 | 0.0257277 | 0.0229711 |
| 983 | 0.6444064 | 0.0615861 | 4.7136366 | 1.8858685 | 0.6204121 | 0.0881507 | 2507 | 0 | 0 | 0 | 0 | 0.0181483 | 0.0314338 |
| 984 | 0.6035169 | 0.0456524 | 2.8609727 | 0.7759316 | 0.3347954 | 0.0225893 | 2508 | 0 | 0 | 0.0006058 | 0.0005249 | 0.0028098 | 0.0048667 |
| 985 | 0.2298669 | 0.0250994 | 1.8351535 | 0.7207521 | 0.3028478 | 0.1390108 | 2509 | 0 | 0 | 0.0000430 | 0.0000745 | 0.0244693 | 0.0394982 |
| 986 | 0.0885746 | 0.0111582 | 1.1222052 | 0.2922987 | 0.1102654 | 0.0201112 | 2510 | 0 | 0 | 0.0000939 | 0.0001626 | 0.0151162 | 0.0103352 |
| 987 | 0.4448471 | 0.0961480 | 2.4052220 | 0.7897207 | 0.3001425 | 0.0149617 | 2511 | 0 | 0 | 0.0003077 | 0.0002683 | 0.0268137 | 0.0241370 |
| 988 | 0.3620793 | 0.0306518 | 1.7950797 | 0.3963892 | 0.6838352 | 0.0851278 | 2512 | 0 | 0 | 0.0003471 | 0.0003303 | 0.0099326 | 0.0100944 |
| 989 | 0.7336602 | 0.0656895 | 1.8895962 | 0.5801506 | 0.4433509 | 0.1542402 | 2513 | 0 | 0 | 0.0007528 | 0.0002937 | 0.0005421 | 0.0009389 |
| 990 | 0.2206460 | 0.0207349 | 1.1269792 | 0.1234185 | 0.3064968 | 0.0280448 | 2514 | 0 | 0 | 0.0004705 | 0.0004653 | 0.0346187 | 0.0159088 |
| 991 | 0.7321813 | 0.2261107 | 1.1197010 | 0.1415824 | 0.3816279 | 0.0455450 | 2515 | 0 | 0 | 0 | 0 | 0.0125791 | 0.0173599 |
| 992 | 0.2468605 | 0.0318213 | 1.6098180 | 0.4560422 | 0.2976428 | 0.0702950 | 2516 | 0 | 0 | 0.0000367 | 0.0000635 | 0.0111075 | 0.0096380 |
| 993 | 0.1930123 | 0.0250841 | 1.6355141 | 0.4455041 | 0.4239337 | 0.1633884 | 2517 | 0 | 0 | 0 | 0 | 0.0398867 | 0.0189180 |
| 994 | 0.3227000 | 0.0448070 | 1.9845746 | 0.5742763 | 0.7638368 | 0.1029197 | 2518 | 0 | 0 | 0.0001452 | 0.0002017 | 0.0180508 | 0.0255881 |
| 995 | 0.5439462 | 0.0350653 | 3.2587217 | 1.1629884 | 0.3397365 | 0.0826466 | 2519 | 0 | 0 | 0.0001958 | 0.0001937 | 0.0327121 | 0.0256413 |
| 996 | 0.4012845 | 0.0094747 | 3.4555925 | 1.0405762 | 0.2797507 | 0.0800871 | 2520 | 0.0000036 | 0.0000062 | 0.0000497 | 0.0000259 | 0.0148701 | 0.0078434 |
| 997 | 0.9199176 | 0.0245175 | 2.7504221 | 0.8898482 | 0.4264102 | 0.0885026 | 2521 | 0.0000054 | 0.0000094 | 0.0004766 | 0.0004235 | 0.0281383 | 0.0369604 |
| 998 | 0.3115842 | 0.0225580 | 2.0882653 | 0.2692482 | 0.4404398 | 0.0421094 | 2522 | 0 | 0 | 0.0004265 | 0.0003973 | 0.0050323 | 0.0087162 |
| 999 | 0.3461858 | 0.0750906 | 2.3725175 | 0.7501325 | 0.5564268 | 0.1780061 | 2523 | 0 | 0 | 0.0001252 | 0.0002168 | 0.0141808 | 0.0245619 |
| 1000 | 0.1916241 | 0.0130987 | 2.5632311 | 0.9965968 | 0.1741114 | 0.1562101 | 2524 | 0 | 0 | 0.0003002 | 0.0003473 | 0.0156035 | 0.0247350 |
| 1001 | 0.0913438 | 0.0114911 | 1.5925617 | 0.5180450 | 0.2490311 | 0.0131636 | 2525 | 0 | 0 | 0.0000446 | 0.0000471 | 0.0377274 | 0.0267513 |
| 1002 | 0.3320653 | 0.0282104 | 3.2287735 | 1.0691863 | 0.5219928 | 0.0856587 | 2526 | 0.0005188 | 0.0002145 | 0.0042874 | 0.0047851 | 0 | 0 |
| 1003 | 0.2937735 | 0.0465016 | 2.8841946 | 0.9888222 | 0.1100175 | 0.0358807 | 2527 | 0 | 0 | 0.0003169 | 0.0003427 | 0.0065381 | 0.0080477 |
| 1004 | 0.4284362 | 0.0485965 | 3.2928069 | 1.0842744 | 0.2933541 | 0.0909486 | 2528 | 0.0003581 | 0.0001168 | 0.0012516 | 0.0005524 | 0.0140771 | 0.0243823 |
| 1005 | 0.6654203 | 0.0529148 | 2.6638717 | 0.4743255 | 0.2145549 | 0.0914813 | 2529 | 0 | 0 | 0.0005605 | 0.0003408 | 0.0438649 | 0.0455055 |
| 1006 | 0.6183605 | 0.1545205 | 1.7937229 | 0.4412440 | 1.0379123 | 0.1212749 | 2531 | 0 | 0 | 0.0006495 | 0.0007104 | 0.0098125 | 0.0169958 |
| 1007 | 0.4016958 | 0.0833568 | 2.7946628 | 1.0382498 | 0.2372135 | 0.0427654 | 2532 | 0 | 0 | 0.0003705 | 0.0004166 | 0.0248696 | 0.0228739 |
| 1008 | 0.1124653 | 0.0022288 | 1.5666353 | 0.4977335 | 0.2293820 | 0.0266877 | 2533 | 0.0000102 | 0.0000177 | 0.0000821 | 0.0001423 | 0.0134888 | 0.0168423 |
| 1009 | 0.2553805 | 0.0346376 | 2.8272442 | 0.8509960 | 0.2016688 | 0.0636371 | 2534 | 0 | 0 | 0.0001430 | 0.0002222 | 0.0091564 | 0.0158594 |
| 1010 | 0.2321996 | 0.0193690 | 3.0148998 | 1.1917316 | 0.2884946 | 0.0549803 | 2535 | 0 | 0 | 0.0001412 | 0.0002246 | 0.0064919 | 0.0112443 |
| 1011 | 0.3105702 | 0.0401141 | 2.4126682 | 0.9863188 | 0.2749424 | 0.0583164 | 2536 | 0.0000102 | 0.0000177 | 0.0002234 | 0.0003870 | 0.0346411 | 0.0385875 |
| 1012 | 0.3576421 | 0.0273906 | 3.2592381 | 1.1636162 | 0.1675611 | 0.0259508 | 2537 | 0 | 0 | 0.0003247 | 0.0005623 | 0.0089016 | 0.0154180 |
| 1013 | 0.0282793 | 0.0053718 | 0.3860625 | 0.0667090 | 0.0093589 | 0.0083046 | 2538 | 0 | 0 | 0.0001598 | 0.0002682 | 0.0231920 | 0.0115526 |
| 1014 | 0.6154703 | 0.1335214 | 2.5793819 | 0.7025958 | 0.6823378 | 0.1148810 | 2539 | 0 | 0 | 0.0006327 | 0.0006718 | 0.0225253 | 0.0225918 |
| 1015 | 0.5805739 | 0.1421629 | 3.9821937 | 1.1180395 | 0.1200136 | 0.1099847 | 2540 | 0 | 0 | 0.0001525 | 0.0001728 | 0.0320515 | 0.0105721 |
| 1016 | 0.2655796 | 0.0480711 | 2.3666670 | 0.7354405 | 0.3094432 | 0.0770517 | 2541 | 0 | 0 | 0.0003364 | 0.0005826 | 0.0128677 | 0.0151238 |
| 1017 | 0.3975912 | 0.0780187 | 5.5430680 | 2.3981839 | 0.1777474 | 0.0317408 | 2542 | 0.0000049 | 0.0000085 | 0.0001425 | 0.0001566 | 0.0173082 | 0.0156016 |
| 1018 | 0.2133119 | 0.0344361 | 2.1373706 | 0.8353797 | 0.6015538 | 0.0852876 | 2543 | 0 | 0 | 0.0001173 | 0.0002032 | 0.0190309 | 0.0329625 |
| 1019 | 0.2816383 | 0.0431206 | 2.3643366 | 0.7133617 | 0.2010870 | 0.0151854 | 2544 | 0 | 0 | 0.0002866 | 0.0004537 | 0.0236824 | 0.0343698 |
| 1020 | 0.5005328 | 0.0392953 | 2.7635348 | 0.8702750 | 0.2587552 | 0.0398398 | 2545 | 0 | 0 | 0.0002933 | 0.0001212 | 0.0115179 | 0.0199497 |
| 1021 | 0.3227466 | 0.0045727 | 1.7403751 | 0.3968804 | 0.1741921 | 0.0387886 | 2546 | 0.0000014 | 0.0000023 | 0.0002681 | 0.0002010 | 0.0233264 | 0.0202530 |
| 1022 | 0.0044029 | 0.0007796 | 0.0203444 | 0.0048221 | 0.0125449 | 0.0058818 | 2547 | 0 | 0 | 0.0006390 | 0.0007514 | 0.0134342 | 0.0199401 |
| 1023 | 0.6146241 | 0.0586666 | 5.2370269 | 1.8410277 | 0.2792734 | 0.0447332 | 2548 | 0.0000182 | 0.0000315 | 0.0000500 | 0.0000866 | 0.0133481 | 0.0231195 |
| 1024 | 0.1829192 | 0.0464650 | 1.7342673 | 0.7808295 | 0.1334512 | 0.0244825 | 2549 | 0.0000568 | 0.0000482 | 0.0009403 | 0.0005551 | 0.0153229 | 0.0165661 |
| 1025 | 0.2513094 | 0.0438291 | 2.1660512 | 0.8058713 | 0.1561293 | 0.1527949 | 2550 | 0.0000111 | 0.0000192 | 0.0004650 | 0.0002759 | 0.0364059 | 0.0630569 |
| 1026 | 0.2663048 | 0.0462276 | 3.5640821 | 1.0804324 | 0.1694833 | 0.0162749 | 2551 | 0 | 0 | 0.0001220 | 0.0001059 | 0.0107678 | 0.0186504 |
| 1027 | 0.3381513 | 0.0660641 | 3.0599222 | 1.0994546 | 0.2056052 | 0.0789369 | 2552 | 0.0000084 | 0.0000146 | 0 | 0 | 0.0022227 | 0.0038499 |
| 1028 | 0.2591176 | 0.0413577 | 1.6370353 | 0.6875387 | 0.2565559 | 0.0270655 | 2553 | 0 | 0 | 0.0002681 | 0.0003064 | 0.0001355 | 0.0002347 |
| 1029 | 0.7604396 | 0.0360374 | 2.3016668 | 0.9417868 | 0.0945734 | 0.0211611 | 2555 | 0 | 0 | 0.0007981 | 0.0006928 | 0.0234921 | 0.0406895 |
| 1030 | 0.7663837 | 0.0871229 | 2.9962144 | 0.6942432 | 0.8881196 | 0.0898256 | 2556 | 0 | 0 | 0.0003915 | 0.0003873 | 0.0373854 | 0.0411042 |
| 1031 | 0.4968801 | 0.0908441 | 3.8776909 | 1.2322863 | 0.5966595 | 0.1211817 | 2557 | 0 | 0 | 0.0002811 | 0.0004782 | 0.0154708 | 0.0267962 |
| 1032 | 0.1405369 | 0.0014311 | 1.9161251 | 0.7256935 | 0.3953427 | 0.1289551 | 2559 | 0 | 0 | 0.0000856 | 0.0001483 | 0.0115534 | 0.0117564 |
| 1033 | 0.0914987 | 0.0040993 | 1.5537728 | 0.6238801 | 0.0762093 | 0.0134750 | 2560 | 0.0000191 | 0.0000331 | 0.0000430 | 0.0000745 | 0.0240630 | 0.0186623 |
| 1034 | 0.0035287 | 0.0001655 | 0.0505029 | 0.0126350 | 0.0153523 | 0.0146533 | 2561 | 0.0000258 | 0.0000446 | 0.0004733 | 0.0008198 | 0.0206600 | 0.0204580 |
| 1035 | 0.3244569 | 0.0594476 | 2.6895159 | 0.9260824 | 0.1177796 | 0.0175839 | 2562 | 0 | 0 | 0.0008339 | 0.0005460 | 0.0204554 | 0.0216603 |
| 1036 | 0.2983793 | 0.0259069 | 1.6274596 | 0.3110478 | 0.1470460 | 0.0716671 | 2563 | 0 | 0 | 0.0001560 | 0.0001956 | 0.0252178 | 0.0218529 |
| 1037 | 0.5884341 | 0.0515044 | 2.4573769 | 0.9836418 | 0.0905974 | 0.0208873 | 2564 | 0 | 0 | 0.0004135 | 0.0007162 | 0.0215119 | 0.0238817 |
| 1038 | 1.1373624 | 0.4467507 | 1.2873383 | 0.1354214 | 0.1716609 | 0.0316672 | 2565 | 0.0000120 | 0.0000208 | 0 | 0 | 0.0101229 | 0.0124966 |
| 1039 | 0.3515206 | 0.0650118 | 2.9813130 | 0.7982888 | 0.4451893 | 0.1415361 | 2566 | 0 | 0 | 0.0002711 | 0.0002822 | 0.0073824 | 0.0127867 |
| 1040 | 0.1287296 | 0.0079571 | 1.9994204 | 0.7389460 | 0.2935465 | 0.0483662 | 2567 | 0 | 0 | 0 | 0 | 0.0049444 | 0.0045555 |
| 1041 | 1.2766183 | 0.4934301 | 1.4137173 | 0.1398801 | 0.0542331 | 0.0215154 | 2568 | 0 | 0 | 0.0000634 | 0.0001097 | 0.0354964 | 0.0610771 |
| 1042 | 0.1842608 | 0.0257511 | 2.0851383 | 0.8852422 | 0.2528157 | 0.0098179 | 2569 | 0.0000032 | 0.0000055 | 0.0000067 | 0.0000116 | 0.0087506 | 0.0125512 |
| 1044 | 0.3376695 | 0.0049125 | 2.3488475 | 0.5329835 | 0.1777707 | 0.0337140 | 2570 | 0 | 0 | 0.0006210 | 0.0004918 | 0.0065163 | 0.0112866 |
| 1045 | 0.1967731 | 0.0103747 | 0.7796736 | 0.3218209 | 0.1180794 | 0.0352058 | 2571 | 0 | 0 | 0.0004114 | 0.0002791 | 0.0068344 | 0.0118375 |
| 1046 | 0.0806043 | 0.0130122 | 0.3433658 | 0.1101220 | 0.1141458 | 0.0251075 | 2572 | 0.0000050 | 0.0000086 | 0.0003154 | 0.0002745 | 0.0045069 | 0.0040430 |
| 1047 | 1.5430334 | 0.5303947 | 2.0682140 | 0.1815461 | 0.4316179 | 0.0491058 | 2573 | 0 | 0 | 0 | 0 | 0.0382140 | 0.0331336 |
| 1048 | 0.0548027 | 0.0049219 | 0.6561182 | 0.2234613 | 0.1710983 | 0.0520207 | 2574 | 0 | 0 | 0.0000834 | 0.0001444 | 0.0015880 | 0.0027504 |
| 1049 | 0.0058536 | 0.0010429 | 0.0733477 | 0.0122953 | 0.0099518 | 0.0099451 | 2575 | 0.0000103 | 0.0000089 | 0.0001574 | 0.0001790 | 0.0116185 | 0.0201238 |
| 1051 | 0.2962024 | 0.0463655 | 2.1849029 | 0.5003702 | 0.1487739 | 0.0225584 | 2576 | 0.0000120 | 0.0000208 | 0.0002699 | 0.0004675 | 0.0143724 | 0.0248938 |
| 1053 | 0.0210922 | 0.0012715 | 0.1259172 | 0.0364452 | 0.0147066 | 0.0071216 | 2577 | 0 | 0 | 0.0001397 | 0.0001255 | 0.0046645 | 0.0080791 |
| 1054 | 1.0677698 | 0.1883711 | 3.5132858 | 0.9939637 | 0.0248735 | 0.0073520 | 2578 | 0.0000620 | 0.0000368 | 0.0007228 | 0.0003438 | 0.0175303 | 0.0158141 |
| 1055 | 0.4103479 | 0.0359980 | 2.3072606 | 0.5490504 | 0.8694600 | 0.0588763 | 2579 | 0 | 0 | 0.0003260 | 0.0004185 | 0.0246746 | 0.0325384 |
| 1056 | 0.3529162 | 0.0272824 | 2.1814617 | 0.6125236 | 0.6403482 | 0.1261943 | 2580 | 0 | 0 | 0.0003483 | 0.0004251 | 0.0110237 | 0.0190937 |
| 1057 | 0.3563346 | 0.0697054 | 1.5304946 | 0.0426846 | 0.1743806 | 0.0497241 | 2581 | 0 | 0 | 0.0002195 | 0.0003296 | 0.0070632 | 0.0122338 |
| 1058 | 0.5287895 | 0.0800595 | 3.2394743 | 1.0096479 | 0.7051688 | 0.2628245 | 2582 | 0 | 0 | 0.0002973 | 0.0005149 | 0.0311739 | 0.0303028 |
| 1059 | 0.2663074 | 0.0231763 | 1.5745259 | 0.4681559 | 0.4041289 | 0.0296362 | 2583 | 0 | 0 | 0.0001254 | 0.0001092 | 0.0210916 | 0.0130529 |
| 1060 | 0.4884822 | 0.0492452 | 3.1217433 | 0.7007232 | 0.4095314 | 0.1216496 | 2584 | 0.0000231 | 0.0000344 | 0.0003411 | 0.0000921 | 0.0144259 | 0.0249865 |
| 1061 | 0.5097986 | 0.0428906 | 2.6414709 | 0.6348626 | 0.5016146 | 0.0082216 | 2585 | 0.0007028 | 0.0001851 | 0.0012642 | 0.0009117 | 0.0308472 | 0.0287888 |
| 1062 | 0.7218343 | 0.0094383 | 1.8548848 | 0.1899919 | 0.4784562 | 0.0154915 | 2586 | 0.0010451 | 0.0000264 | 0.0019772 | 0.0012066 | 0.0146253 | 0.0094708 |
| 1063 | 0.6792214 | 0.0784664 | 1.9981087 | 0.5561860 | 1.1114104 | 0.2227874 | 2587 | 0 | 0 | 0.0007038 | 0.0004407 | 0.0135103 | 0.0234005 |
| 1064 | 0.4716220 | 0.0315095 | 1.8091633 | 0.5392496 | 0.6277769 | 0.0484979 | 2588 | 0 | 0 | 0.0004708 | 0.0004182 | 0 | 0 |
| 1065 | 0.5190791 | 0.0152362 | 2.2389796 | 0.5643734 | 0.9103826 | 0.1166170 | 2589 | 0.0000014 | 0.0000023 | 0.0003971 | 0.0005200 | 0 | 0 |
| 1066 | 0.7328844 | 0.0917938 | 3.4038959 | 1.2178188 | 0.8252291 | 0.4163924 | 2590 | 0 | 0 | 0.0007002 | 0.0001258 | 0.0045971 | 0.0079623 |
| 1067 | 0.4861320 | 0.0103844 | 1.8172401 | 0.4185287 | 0.7537927 | 0.2270304 | 2591 | 0 | 0 | 0.0005629 | 0.0004881 | 0.0116796 | 0.0104426 |
| 1068 | 1.2136380 | 0.1474860 | 3.8029137 | 0.9379813 | 0.3972197 | 0.1270576 | 2593 | 0.0000234 | 0.0000297 | 0.0009035 | 0.0007948 | 0.0058142 | 0.0100706 |
| 1069 | 0.6712734 | 0.0106924 | 2.5117429 | 0.4657026 | 0.5124918 | 0.0575214 | 2594 | 0.0015942 | 0.0000782 | 0.0028400 | 0.0006569 | 0.0251294 | 0.0428861 |
| 1071 | 0.2332450 | 0.0664013 | 0.5065804 | 0.2156580 | 0.0239843 | 0.0119804 | 2595 | 0 | 0 | 0 | 0 | 0.0175935 | 0.0170420 |
| 1072 | 0.4602381 | 0.0998443 | 2.1366071 | 0.9452021 | 0.0361318 | 0.0040122 | 2596 | 0 | 0 | 0 | 0 | 0.0025337 | 0.0041921 |
| 1073 | 0.2367053 | 0.0361671 | 1.3984621 | 0.1532048 | 0.0769001 | 0.0230866 | 2597 | 0 | 0 | 0.0001098 | 0.0000987 | 0.0057131 | 0.0087353 |
| 1074 | 0.2505167 | 0.0394853 | 0.9329074 | 0.5327273 | 0.0860104 | 0.0239809 | 2598 | 0 | 0 | 0 | 0 | 0.0050057 | 0.0086701 |
| 1075 | 0.1464969 | 0.0532259 | 0.5718603 | 0.2991711 | 0.0255836 | 0.0102989 | 2599 | 0 | 0 | 0.0003276 | 0.0000625 | 0.0077367 | 0.0071424 |
| 1076 | 0.2381584 | 0.0964421 | 1.3498742 | 0.1974487 | 0.0079303 | 0.0025485 | 2600 | 0.0001352 | 0.0001593 | 0.0009200 | 0.0001938 | 0.0069598 | 0.0081842 |
| 1077 | 0.3650991 | 0.0289447 | 2.3568464 | 0.5832021 | 0.0598765 | 0.0483398 | 2602 | 0.0420024 | 0.0047368 | 0.0141224 | 0.0031934 | 0.0181510 | 0.0305593 |
| 1078 | 0.4739526 | 0.0851436 | 2.3021807 | 0.1648605 | 0.3016751 | 0.1201662 | 2603 | 0 | 0 | 0.0011677 | 0.0010887 | 0.0338156 | 0.0140073 |
| 1079 | 0.0737339 | 0.0092085 | 0.7643982 | 0.1975171 | 0.0049602 | 0.0021768 | 2604 | 0.0008487 | 0.0014700 | 0.0056725 | 0.0027729 | 0 | 0 |
| 1080 | 0.0004228 | 0.0001287 | 0.0015784 | 0.0009063 | 0.0012439 | 0.0003908 | 2606 | 0 | 0 | 0.0041077 | 0.0011847 | 0 | 0 |
| 1081 | 0.1419910 | 0.0617773 | 1.1706235 | 0.3785978 | 0.0696784 | 0.0184900 | 2607 | 0.0185436 | 0.0051999 | 0.0179025 | 0.0036802 | 0.0193906 | 0.0335856 |
| 1082 | 0.1250348 | 0.0711454 | 1.1947762 | 0.2722390 | 0.0470069 | 0.0014830 | 2608 | 0.0321172 | 0.0090934 | 0.0315612 | 0.0032121 | 0 | 0 |
| 1083 | 0.0792234 | 0.0410988 | 0.3995426 | 0.1145864 | 0.0194228 | 0.0042705 | 2609 | 0.0493652 | 0.0067623 | 0.0349944 | 0.0075196 | 0.0030883 | 0.0045519 |
| 1084 | 0.1030447 | 0.0557946 | 0.9612913 | 0.4728517 | 0.0169074 | 0.0036704 | 2610 | 0.0731214 | 0.0039255 | 0.0292627 | 0.0017863 | 0.0161748 | 0.0195467 |
| 1085 | 0.3587657 | 0.0847274 | 1.0786486 | 0.2725183 | 0.0022883 | 0.0013032 | 2611 | 0.0108013 | 0.0015541 | 0.0048574 | 0.0022394 | 0.0009606 | 0.0016638 |
| 1086 | 0.8821218 | 0.1276812 | 2.4761072 | 1.0135596 | 0.3449221 | 0.1901316 | 2612 | 0 | 0 | 0.0048153 | 0.0032582 | 0.0138259 | 0.0131928 |
| 1087 | 0.5405897 | 0.0598493 | 1.2404524 | 0.5355882 | 0.0436812 | 0.0039380 | 2613 | 0 | 0 | 0.0045243 | 0.0016542 | 0.0152500 | 0.0264138 |
| 1088 | 0.0835644 | 0.0332168 | 0.4115370 | 0.0979466 | 0.0182978 | 0.0008369 | 2614 | 0.0176889 | 0.0094255 | 0.0181332 | 0.0013429 | 0.0033516 | 0.0058051 |
| 1089 | 0.0000234 | 0.0000205 | 0.0017046 | 0.0006431 | 0.0004050 | 0.0003562 | 2616 | 0.0012779 | 0.0007500 | 0.0009925 | 0.0001936 | 0.0003930 | 0.0004526 |
| 1090 | 0.0000814 | 0.0001409 | 0.0017213 | 0.0007442 | 0.0013691 | 0.0010658 | 2619 | 0.0290566 | 0.0033657 | 0.0358374 | 0.0056448 | 0 | 0 |
| 1091 | 0.2943027 | ND | 0.8384121 | 0.2200198 | 0.0471924 | 0.0108141 | 2620 | 0.0000366 | 0.0000634 | 0.0002312 | 0.0000574 | 0.0007182 | 0.0006376 |
| 1092 | 0.1791732 | 0.0948466 | 0.8331410 | 0.2602041 | 0.0647833 | 0.0167119 | 2621 | 0.0005124 | 0.0005171 | 0.0006859 | 0.0001170 | 0.0011170 | 0.0009871 |
| 1093 | 0.0612047 | 0.0226275 | 0.4827328 | 0.2135814 | 0.0439839 | 0.0109119 | 2623 | 0.1072357 | 0.0054470 | 0.0831531 | 0.0043949 | 0.0022460 | 0.0038901 |
| 1094 | 0.6269533 | 0.1309995 | 1.3712113 | 0.4412255 | 0.4878138 | 0.0685991 | 2624 | 0.0335296 | 0.0039730 | 0.0283266 | 0.0041255 | 0.0118197 | 0.0204723 |
| 1095 | 0.3130229 | 0.0816077 | 1.0299869 | 0.4262696 | 0.0382892 | 0.0070869 | 2625 | 0.0247570 | 0.0040521 | 0.0272062 | 0.0029899 | 0.0092279 | 0.0159831 |
| 1096 | 0.1882183 | 0.0564479 | 0.6704150 | 0.1840953 | 0.0693389 | 0.0201685 | 2626 | 0.0311016 | 0.0055987 | 0.0332621 | 0.0081734 | 0.0000447 | 0.0000775 |
| 1097 | 0.1669607 | 0.1117034 | 0.9535914 | 0.4158897 | 0.0913767 | 0.0248360 | 2627 | 0 | 0 | 0 | 0 | 0 | 0 |
| 1098 | 0.3852625 | ND | 1.2258158 | 0.5609164 | 0.0598789 | 0.0172955 | 2628 | 0.0142034 | 0.0070646 | 0.0235747 | 0.0016690 | 0 | 0 |
| 1099 | 0.0925880 | 0.0655053 | 0.8166312 | 0.3442155 | 0.0490324 | 0.0134340 | 2629 | 0 | 0 | 0.0097822 | 0.0028955 | 0.0277986 | 0.0293370 |
| 1100 | 0.1241641 | 0.0943909 | 0.7517385 | 0.3130413 | 0.0628980 | 0.0174685 | 2630 | 0 | 0 | 0.0012353 | 0.0011775 | 0.0071395 | 0.0123660 |
| 1101 | 0.1556274 | 0.0660177 | 0.8235760 | 0.3444120 | 0.0491846 | 0.0071429 | 2631 | 0 | 0 | 0.0005671 | 0.0009822 | 0 | 0 |
| 1102 | 0.4362714 | 0.0661334 | 1.2195064 | 0.3276037 | 0.0689386 | 0.0067410 | 2632 | 0.0487179 | 0.0083709 | 0.0670660 | 0.0017735 | 0.0126260 | 0.0218688 |
| 1103 | 0.4317385 | 0.0747841 | 2.3535079 | 0.7467771 | 0.0629950 | 0.0060512 | 2633 | 0 | 0 | 0.0014265 | 0.0024708 | 0.0019983 | 0.0034612 |
| 1104 | 0.1123405 | 0.0617127 | 0.4765773 | 0.1914310 | 0.0806613 | 0.0228221 | 2634 | 0 | 0 | 0.0026020 | 0.0024778 | 0.0229953 | 0.0381603 |
| 1105 | 0.0276277 | 0.0166117 | 0.5384218 | 0.2274651 | 0.0146718 | 0.0025445 | 2635 | 0.0060753 | 0.0048750 | 0.0103052 | 0.0027541 | 0.0083694 | 0.0144962 |
| 1106 | 0.1703682 | ND | 0.7360701 | 0.3546248 | 0.0491697 | 0.0086915 | 2636 | 0 | 0 | 0.0018318 | 0.0027891 | 0.0030973 | 0.0053646 |
| 1107 | 0.2672307 | ND | 1.5928959 | 0.7683523 | 0.0518831 | 0.0098244 | 2637 | 0.0097700 | 0.0018185 | 0.0170616 | 0.0005630 | 0.0134876 | 0.0116987 |
| 1108 | 0.1694413 | 0.1229691 | 0.8901071 | 0.5229014 | 0.0251090 | 0.0019355 | 2638 | 0.0420603 | 0.0065508 | 0.0331794 | 0.0062425 | 0.0003125 | 0.0005412 |
| 1109 | 0.0686587 | 0.0420839 | 0.4794951 | 0.2364589 | 0.0324950 | 0.0041901 | 2639 | 0.0126794 | 0.0048752 | 0.0189073 | 0.0027303 | 0.0130567 | 0.0209970 |
| 1110 | 0.5147644 | 0.1357169 | 1.6446541 | 0.6717652 | 0.1818070 | 0.0449734 | 2640 | 0 | 0 | 0 | 0 | 0.0023282 | 0.0040326 |
| 1111 | 0.4124980 | 0.0917555 | 1.4548802 | 0.8076491 | 0.0266181 | 0.0098752 | 2641 | 0 | 0 | 0 | 0 | 0 | 0 |
| 1112 | 0.0760038 | 0.0239417 | 0.7360354 | 0.2881188 | 0.0464518 | 0.0066012 | 2642 | 0 | 0 | 0 | 0 | 0.0142443 | 0.0246719 |
| 1113 | 0.0968292 | ND | 0.6166679 | 0.1359130 | 0.0353914 | 0.0139153 | 2643 | 0.0105217 | 0.0027528 | 0.0069201 | 0.0061847 | 0 | 0 |
| 1114 | 0.1988192 | ND | 0.8673357 | 0.3799399 | 0.0152684 | 0.0023197 | 2644 | 0 | 0 | 0.0006058 | 0.0010492 | 0 | 0 |
| 1115 | 0.1380449 | ND | 0.5125193 | 0.2152441 | 0.0141545 | 0.0018299 | 2645 | 0.0935195 | 0.0094782 | 0.0278726 | 0.0012464 | 0.0042371 | 0.0073388 |
| 1116 | 0.0897876 | ND | 0.3074418 | 0.1718864 | 0.0237183 | 0.0020612 | 2646 | 0 | 0 | 0 | 0 | 0.0208262 | 0.0197490 |
| 1117 | 0.1016422 | 0.0606531 | 0.5782336 | 0.2495434 | 0.0247573 | 0.0074265 | 2647 | 0 | 0 | 0 | 0 | 0.0021597 | 0.0021238 |
| 1118 | 0.2794530 | 0.0842109 | 0.5107495 | 0.1842288 | 0.0096210 | 0.0027158 | 2648 | 0 | 0 | 0 | 0 | 0.0186099 | 0.0322333 |
| 1119 | 0.4151610 | 0.0120146 | 0.8454944 | 0.3501959 | 0.0758745 | 0.0109556 | 2649 | 0 | 0 | 0 | 0 | 0 | 0 |
| 1120 | 0.0963502 | 0.0366860 | 0.6011621 | 0.2511884 | 0.0479681 | 0.0026718 | 2650 | 0 | 0 | 0 | 0 | 0.0141030 | 0.0210769 |
| 1121 | 0.1671212 | ND | 1.3481831 | 0.3762183 | 0.0601159 | 0.0032732 | 2651 | 0 | 0 | 0 | 0 | 0.0133185 | 0.0230683 |
| 1122 | 0.0742113 | ND | 0.5634087 | 0.2943273 | 0.0183224 | 0.0021906 | 2652 | 0.0072514 | 0.0003474 | 0.0063519 | 0.0034296 | 0.0124516 | 0.0190326 |
| 1123 | 0.8085738 | 0.0665540 | 1.5855967 | 0.0346007 | 0.5297481 | 0.0179199 | 2653 | 0 | 0 | 0 | 0 | 0.0148424 | 0.0193172 |
| 1124 | 0.0514056 | 0.0056035 | 0.6116618 | 0.0368377 | 0.0135726 | 0.0019182 | 2654 | 0 | 0 | 0 | 0 | 0.0016615 | 0.0028779 |
| 1125 | 0.2216648 | 0.1591561 | 0.6881011 | 0.2364860 | 0.0330649 | 0.0050691 | 2655 | 0 | 0 | 0 | 0 | 0 | 0 |
| 1126 | 0.5120381 | 0.1802037 | 1.2238033 | 0.4602425 | 0.0766221 | 0.0025950 | 2656 | 0 | 0 | 0 | 0 | 0.0062189 | 0.0058976 |
| 1127 | 0.2649451 | 0.0177920 | 1.0470926 | 0.5391124 | 0.0830581 | 0.0075218 | 2657 | 0 | 0 | 0 | 0 | 0 | 0 |
| 1128 | 0.0787524 | 0.0404432 | 0.5229301 | 0.2293408 | 0.0533725 | 0.0032347 | 2658 | 0 | 0 | 0 | 0 | 0.0069584 | 0.0120523 |
| 1129 | 0.0361171 | 0.0260755 | 0.3954795 | 0.1589478 | 0.0122786 | 0.0010144 | 2659 | 0 | 0 | 0 | 0 | 0 | 0 |
| 1130 | 0.3636822 | ND | 1.0570642 | 0.3793714 | 0.1012619 | 0.0120290 | 2660 | 0 | 0 | 0 | 0 | 0.0015637 | 0.0027083 |
| 1131 | 0.2885988 | ND | 0.7729791 | 0.1805158 | 0.0381979 | 0.0010987 | 2661 | 0.0000683 | 0.0001089 | 0.0007126 | 0.0001880 | 0.0023660 | 0.0030689 |
| 1132 | 0.2345301 | ND | 0.6144258 | 0.2258738 | 0.0123130 | 0.0023481 | 2663 | 0 | 0 | 0.0001543 | 0.0002673 | 0 | 0 |
| 1133 | 0.0760969 | 0.0485811 | 0.4760562 | 0.2348433 | 0.0219318 | 0.0012299 | 2664 | 0 | 0 | 0.0001852 | 0.0003208 | 0.0866828 | 0.1225880 |
| 1134 | 0.2265714 | 0.0439254 | 2.9102138 | 0.5001506 | 0.1225020 | 0.0044885 | 2665 | 0 | 0 | 0 | 0 | 0 | 0 |
| 1135 | 0.2866766 | 0.0272333 | 0.8597123 | 0.4590056 | 0.0493844 | 0.0155375 | 2666 | 0.0023249 | 0.0005354 | 0.0013063 | 0.0008540 | 0 | 0 |
| 1136 | 0.1306596 | 0.0624340 | 0.9040054 | 0.3952496 | 0.1014245 | 0.0055358 | 2667 | 1.0853721 | 0.0873419 | 0.5575123 | 0.0965338 | 4.5306839 | 1.7981195 |
| 1137 | 0.0420295 | 0.0261351 | 0.3458167 | 0.1036139 | 0.0227689 | 0.0045348 | 2668 | 0.0009808 | 0.0004153 | 0.0006670 | 0.0006051 | 0 | 0 |
| 1138 | 0.3438254 | ND | 0.8581561 | 0.3887268 | 0.0736909 | 0.0082105 | 2669 | 0.0146272 | 0.0034870 | 0.0039984 | 0.0009032 | 0 | 0 |
| 1139 | 0.1919333 | ND | 1.1487815 | 0.3688324 | 0.0622272 | 0.0081191 | 2670 | 0.0001469 | 0.0001294 | 0.0005957 | 0.0005165 | 0.0346825 | 0.0490485 |
| 1140 | 0.2501499 | ND | 1.0460207 | 0.2361026 | 0.0519228 | 0.0108107 | 2671 | 0.0033004 | 0.0009246 | 0.0028019 | 0.0012134 | 0 | 0 |
| 1141 | 0.0969184 | 0.0577687 | 0.4497478 | 0.0608421 | 0.0398615 | 0.0044861 | 2672 | 0.0009570 | 0.0003018 | 0.0064549 | 0.0019507 | 0 | 0 |
| 1142 | 0.5036460 | 0.0913841 | 1.0136553 | 0.1846192 | 0.4939718 | 0.0788646 | 2673 | 0.0000227 | 0.0000392 | 0.0005063 | 0.0006374 | 0 | 0 |
| 1143 | 0.0116181 | 0.0021955 | 0.0670341 | 0.0346867 | 0.0035190 | 0.0014459 | 2674 | 0.0003332 | 0.0002098 | 0.0016014 | 0.0007677 | 0 | 0 |
| 1144 | 0.0201831 | 0.0072128 | 0.4122003 | 0.1294802 | 0.0183006 | 0.0020324 | 2675 | 0.0010196 | 0.0001627 | 0.0010972 | 0.0009035 | 0 | 0 |
| 1145 | 0.0743522 | 0.0371551 | 0.3759509 | 0.1318436 | 0.0463247 | 0.0119715 | 2676 | 0.0026907 | 0.0003639 | 0.0128282 | 0.0025402 | 0 | 0 |
| 1146 | 0.1084657 | 0.0580738 | 0.8046660 | 0.2488724 | 0.0459004 | 0.0118768 | 2677 | 0.0085128 | 0.0010584 | 0.0271956 | 0.0086543 | 0 | 0 |
| 1147 | 0.1084380 | 0.0512947 | 0.7065368 | 0.2586812 | 0.0788045 | 0.0106139 | 2678 | 0 | 0 | 0.0034481 | 0.0053950 | 0 | 0 |
| 1148 | 0.1566662 | 0.0959344 | 0.9746857 | 0.4524714 | 0.0628677 | 0.0103038 | 2679 | 0.0008978 | 0.0002117 | 0.0043477 | 0.0011635 | 0 | 0 |
| 1149 | 0.1048621 | 0.0592150 | 0.7597760 | 0.3462064 | 0.0329161 | 0.0071128 | 2680 | 0.1820525 | 0.0342164 | 0.4002018 | 0.0954815 | 0 | 0 |
| 1150 | 0.3797881 | 0.0711396 | 1.0936059 | 0.2574388 | 0.0450961 | 0.0070879 | 2681 | 0.1457200 | 0.0101467 | 0.4271401 | 0.0938622 | 1.7026573 | 0.1675441 |
| 1151 | 0.2911843 | 0.0557368 | 0.8812281 | 0.4207093 | 0.0345095 | 0.0058360 | 2682 | 0.2167480 | 0.0195829 | 0.4638010 | 0.1063586 | 0 | 0 |
| 1152 | 0.1163108 | 0.0380032 | 0.5037347 | 0.0884885 | 0.0321948 | 0.0016892 | 2683 | 0.1031531 | 0.0028236 | 0.2656679 | 0.0492430 | 0 | 0 |
| 1153 | 0.1868271 | 0.0675799 | 0.8986402 | 0.3534719 | 0.0662195 | 0.0117779 | 2684 | 0.0002379 | 0.0002139 | 0.0010983 | 0.0006289 | 0 | 0 |
| 1154 | 0.2300224 | 0.0840233 | 1.1751245 | 0.4564500 | 0.0696813 | 0.0161612 | 2685 | 0.0231807 | 0.0027729 | 0.0727609 | 0.0256892 | 0 | 0 |
| 1155 | 0.1455570 | 0.0436652 | 0.8631569 | 0.3220320 | 0.0844142 | 0.0086707 | 2686 | 0.0154364 | 0.0004472 | 0.0574878 | 0.0154412 | 0.1048409 | 0.1482674 |
| 1156 | 0.0888814 | 0.0429756 | 0.6219737 | 0.2701220 | 0.0081509 | 0.0014810 | 2687 | 0.0005898 | 0.0002690 | 0.0056099 | 0.0014996 | 0.2115615 | 0.2991932 |
| 1157 | 0.0017240 | 0.0004874 | 0.0048734 | 0.0016639 | 0.0013491 | 0.0006549 | 2688 | 0.0000964 | 0.0001670 | 0.0012683 | 0.0005676 | 0 | 0 |
| 1158 | 0.2903569 | 0.0390723 | 0.5608915 | 0.1175145 | 0.4288556 | 0.0515607 | 2689 | 0.0032968 | 0.0006772 | 0.2867299 | 0.0760406 | 0 | 0 |
| 1159 | 0.3896795 | 0.0749076 | 1.0764970 | 0.4309517 | 0.0769358 | 0.0030032 | 2690 | 0.0001262 | 0.0001370 | 0.0018803 | 0.0009839 | 0 | 0 |
| 1160 | 0.3100941 | 0.0594830 | 1.0667459 | 0.5860937 | 0.0433537 | 0.0067694 | 2691 | 0.0003782 | 0.0003320 | 0.0020025 | 0.0010145 | 0.1044719 | 0.1477456 |
| 1161 | 0.0059822 | 0.0006954 | 0.2070586 | 0.1021889 | 0.0033699 | 0.0010588 | 2692 | 0.2304727 | 0.0587462 | 0.6892924 | 0.1415679 | 0 | 0 |
| 1162 | 0.3610518 | 0.1095783 | 1.1508184 | 0.4886021 | 0.0666468 | 0.0098455 | 2693 | 0.1652848 | 0.0291517 | 0.3748073 | 0.0933022 | 0.4055023 | 0.2508843 |
| 1163 | 0.2557901 | 0.0583031 | 0.8837384 | 0.3226970 | 0.1042838 | 0.0369438 | 2694 | 0 | 0 | 0.0110067 | 0.0172569 | 0 | 0 |
| 1164 | 0.1981150 | 0.0615554 | 0.7318466 | 0.1175606 | 0.0204963 | 0.0071605 | 2695 | 0.0030981 | 0.0001805 | 0.0160311 | 0.0028899 | 0.0575045 | 0.0813236 |
| 1165 | 0.3827675 | 0.0640872 | 1.1513971 | 0.5227878 | 0.0950783 | 0.0068556 | 2696 | 0 | 0 | 0.0002803 | 0.0004856 | 0 | 0 |
| 1166 | 0 | 0 | 0 | 0 | 0.0038006 | 0.0065828 | 2697 | 0.0053121 | 0.0017241 | 0.0085906 | 0.0033930 | 0 | 0 |
| 1167 | 0.3119335 | 0.0522865 | 0.9903744 | 0.1081761 | 0.0841313 | 0.0301040 | 2698 | 0.0845069 | 0.0121048 | 0.4893000 | 0.1298927 | 0.1040271 | 0.1471165 |
| 1168 | 2.4633188 | 0.7943201 | 1.5691436 | 0.1075746 | 0.2402286 | 0.0329893 | 2699 | 0.0753938 | 0.0352866 | 0.0619207 | 0.0185980 | 0.0910905 | 0.1288214 |
| 1169 | 1.8655293 | 0.7752488 | 1.7578967 | 0.1675373 | 0.1620726 | 0.0178057 | 2700 | 0.2916307 | 0.0450738 | 0.7602933 | 0.1382344 | 0 | 0 |
| 1170 | 0.1290219 | 0.0677454 | 0.4658475 | 0.0459918 | 0.0131989 | 0.0084443 | 2701 | 0.1479164 | 0.0364809 | 0.3642534 | 0.0765800 | 0.4487362 | 0.0194284 |
| 1171 | 1.5494493 | 0.7111238 | 1.9958733 | 0.1703133 | 0.7437129 | 0.0330120 | 2702 | 0.1216543 | 0.0277500 | 0.4038528 | 0.1086548 | 0 | 0 |
| 1172 | 1.0694404 | 0.2662648 | 1.8114277 | 0.1422699 | 0.3144082 | 0.0815102 | 2704 | 0.1532171 | 0.0249032 | 0.7247436 | 0.1693331 | 0.1010622 | 0.1429235 |
| 1173 | 0.2984324 | 0.1099944 | 1.0655430 | 0.0384042 | 0.2228978 | 0.0357802 | 2705 | 0.0001112 | 0.0000985 | 0.0025023 | 0.0011042 | 0 | 0 |
| 1174 | 0.6083240 | 0.0770829 | 1.5605954 | 0.0704052 | 0.2232449 | 0.0197295 | 2706 | 0 | 0 | 0.0023730 | 0.0009445 | 0 | 0 |
| 1175 | 0.5734585 | 0.1382026 | 1.4411784 | 0.0825248 | 0.2360367 | 0.0111059 | 2707 | 0.0108661 | 0.0004854 | 0.0580481 | 0.0136686 | 0.0634794 | 0.0897735 |
| 1176 | 0.8873619 | 0.3893661 | 0.9110620 | 0.0704087 | 0.0456395 | 0.0203224 | 2708 | 0 | 0 | 0.0007100 | 0.0008603 | 0 | 0 |
| 1177 | 3.7555353 | 1.4876334 | 2.6851983 | 0.1527552 | 0.1384087 | 0.0143806 | 2709 | 0.0005783 | 0.0002344 | 0.0016060 | 0.0011207 | 0 | 0 |
| 1178 | 1.3831086 | 0.5760013 | 1.7048669 | 0.1250479 | 0.5214335 | 0.0368118 | 2710 | 0.0003732 | 0.0000763 | 0.0015915 | 0.0009324 | 0 | 0 |
| 1179 | 1.5628717 | 0.5847612 | 1.4636000 | 0.2094204 | 0.3454931 | 0.0182838 | 2712 | 0.0061249 | 0.0012332 | 0.2237743 | 0.0580537 | 0 | 0 |
| 1180 | 1.5944137 | 0.4333146 | 2.0950961 | 0.0849234 | 0.3047105 | 0.0448261 | 2713 | 0 | 0 | 0.0009552 | 0.0015252 | 0 | 0 |
| 1182 | 0.8967171 | 0.2213373 | 1.7434756 | 0.0977428 | 0.3428484 | 0.0030703 | 2714 | 0.0000860 | 0.0000683 | 0.0015153 | 0.0006611 | 0.0857034 | 0.1212029 |
| 1183 | 0.6679703 | 0.0285639 | 1.4968843 | 0.0834464 | 0.2768983 | 0.0609484 | 2715 | 0.2779286 | 0.0529047 | 0.8607484 | 0.2016844 | 0 | 0 |
| 1184 | 0.4734001 | 0.0447403 | 1.2348826 | 0.0606420 | 0.4290597 | 0.0252410 | 2716 | 0 | 0 | 0.0010774 | 0.0006451 | 0 | 0 |
| 1185 | 0.1810723 | 0.0529123 | 0.7076171 | 0.0589146 | 0.0731918 | 0.0087094 | 2717 | 0.0107988 | 0.0014540 | 0.0216533 | 0.0039822 | 0.0288289 | 0.0407702 |
| 1186 | 1.1183215 | 0.4039136 | 1.2756049 | 0.1308429 | 0.1961926 | 0.0100168 | 2718 | 0.2174130 | 0.0278343 | 0.5715289 | 0.1653022 | 0.0002376 | 0.0003361 |
| 1187 | 0.8372767 | 0.3394280 | 1.1050937 | 0.0854532 | 0.1334922 | 0.0162271 | 2719 | 0.3103731 | 0.1159341 | 0.3859389 | 0.0237674 | 0.2508352 | 0.3547346 |
| 1188 | 0.9652713 | 0.3930699 | 1.5009054 | 0.1184105 | 0.0329343 | 0.0158458 | 2720 | 0.0695201 | 0.0197505 | 0.0291771 | 0.0092169 | 0 | 0 |
| 1189 | 1.2040928 | 0.4695679 | 1.5507602 | 0.0839758 | 0.3793624 | 0.0268494 | 2721 | 0.0019660 | 0.0001773 | 0.0088981 | 0.0096245 | 0.0403250 | 0.0570282 |
| 1190 | 0.1391295 | 0.0687015 | 0.1876103 | 0.0126008 | 0.0281054 | 0.0129511 | 2722 | 0.0013237 | 0.0002134 | 0.0018162 | 0.0009592 | 0 | 0 |
| 1191 | 0.0053721 | 0.0002779 | 0.0066841 | 0.0007473 | 0.0032213 | 0.0027934 | 2723 | 0 | 0 | 0.0008673 | 0.0010361 | 0 | 0 |
| 1192 | 2.1057505 | 0.9587129 | 1.9515534 | 0.1198302 | 0.8610332 | 0.0350537 | 2724 | 0.0004095 | 0.0002719 | 0.0130262 | 0.0028553 | 0 | 0 |
| 1193 | 0.4766151 | 0.1521229 | 1.2475651 | 0.1748335 | 1.5674450 | 0.4205181 | 2725 | 0.0044568 | 0.0007171 | 0.0048865 | 0.0016501 | 0.0092097 | 0.0130245 |
| 1194 | 0.4051197 | 0.1137845 | 0.9283841 | 0.1080510 | 0.5871469 | 0.0689246 | 2726 | 0.0288144 | 0.0133353 | 0.0396190 | 0.0122832 | 0 | 0 |
| 1195 | 0.1459566 | 0.0181992 | 1.2533441 | 0.0779828 | 0.1446953 | 0.0127394 | 2727 | 0.0062273 | 0.0025165 | 0.0041190 | 0.0008770 | 0.1204097 | 0.1702851 |
| 1196 | 0.1681048 | 0.0617434 | 1.0424138 | 0.1109162 | 0.3054916 | 0.0357990 | 2728 | 0.0482656 | 0.0103639 | 0.0181917 | 0.0059168 | 0 | 0 |
| 1197 | 0.5398339 | 0.1183024 | 1.4066722 | 0.0758479 | 0.5945030 | 0.1173408 | 2729 | 0.0020396 | 0.0004522 | 0.0025405 | 0.0002951 | 0.0044579 | 0.0052941 |
| 1198 | 0.3436872 | 0.0723323 | 1.8066242 | 0.2189182 | 0.2965184 | 0.0602256 | 2730 | 0.6904974 | 0.1289602 | 1.2249305 | 0.3230847 | 0 | 0 |
| 1199 | 0.4789225 | 0.1842709 | 1.5989430 | 0.1247662 | 0.3623343 | 0.0601604 | 2732 | 0.0042354 | 0.0012400 | 0.0081807 | 0.0023336 | 0 | 0 |
| 1200 | 0.9620068 | 0.3109432 | 1.3706066 | 0.1540522 | 1.1971715 | 0.1961661 | 2733 | 0.0017122 | 0.0001635 | 0.0204978 | 0.0049352 | 0 | 0 |
| 1201 | 0.1935093 | 0.0669073 | 0.3627785 | 0.0654961 | 0.0691112 | 0.0205595 | 2734 | 0.0010196 | 0.0002390 | 0.0119931 | 0.0022214 | 0.0307699 | 0.0435152 |
| 1204 | 0.0219993 | 0.0060854 | 0.4364780 | 0.0743474 | 0.0588621 | 0.0077899 | 2735 | 0.0117959 | 0.0031918 | 0.0543222 | 0.0105582 | 0 | 0 |
| 1206 | 0.4335058 | 0.0734847 | 1.2261299 | 0.0582375 | 0.7759921 | 0.0472870 | 2736 | 0.4963339 | 0.1360251 | 0.6945223 | 0.1417478 | 0 | 0 |
| 1207 | 0.0359578 | 0.0098144 | 0.0607404 | 0.0112944 | 0.1399066 | 0.0344076 | 2737 | 0.0069681 | 0.0021963 | 0.0209525 | 0.0037016 | 0 | 0 |
| 1208 | 0.0143312 | 0.0014050 | 0.0234552 | 0.0045930 | 0.0215231 | 0.0028902 | 2738 | 0.0204676 | 0.0042377 | 0.1134923 | ND | 0.0207891 | 0.0294002 |
| 1209 | 0.2205029 | 0.0417990 | 0.9353868 | 0.1883490 | 0.1931904 | 0.0371547 | 2739 | 0.0178850 | 0.0026589 | 0.0577531 | 0.0137593 | 0 | 0 |
| 1210 | 0.2557936 | 0.0298984 | 1.0523969 | 0.0916011 | 0.2348168 | 0.0245218 | 2740 | 0.8277393 | 0.1280371 | 1.4619677 | 0.3404284 | 0.1334856 | 0.1887771 |
| 1211 | 0.1297780 | 0.0278113 | 0.7374849 | 0.0833006 | 0.1178956 | 0.0195613 | 2741 | 0.0040438 | 0.0006805 | 0.0070266 | 0.0023479 | 0 | 0 |
| 1213 | 0.2604329 | 0.0848281 | 1.1404601 | 0.0856993 | 0.2773412 | 0.0591266 | 2742 | 0.3071911 | 0.0639586 | 0.7612579 | 0.1431412 | 2.2270529 | 0.1682949 |
| 1214 | 0.2120619 | 0.0790978 | 0.8162453 | 0.0883758 | 0.3707603 | 0.0218310 | 2743 | 0.0214032 | 0.0048630 | 0.0629804 | 0.0158579 | 0 | 0 |
| 1215 | 0.3129934 | 0.1746589 | 0.8763818 | 0.0456025 | 0.2118813 | 0.0361485 | 2744 | 0.0447765 | 0.0092554 | 0.0850149 | 0.0160396 | 0 | 0 |
| 1216 | 0.9636281 | 0.2371210 | 1.7579578 | 0.1591878 | 1.2701033 | 0.3692034 | 2745 | 0.0672693 | 0.0030230 | 0.0764654 | 0.0142122 | 0 | 0 |
| 1217 | 0.2168235 | 0.0519862 | 1.0165968 | 0.1753568 | 0.3777556 | 0.1041948 | 2746 | 1.1283296 | 0.0759363 | 0.9538445 | 0.2536897 | 1.4912321 | 0.2593340 |
| 1218 | 0.6310646 | 0.1420519 | 1.2286012 | 0.0727298 | 0.5055149 | 0.1098828 | 2748 | 0.1153089 | 0.0300730 | 0.1654565 | 0.0241948 | 0 | 0 |
| 1219 | 0.4386586 | 0.0939697 | 1.4339660 | 0.1344276 | 0.5382437 | 0.1466329 | 2749 | 0.0638319 | 0.0190445 | 0.1776748 | 0.0334217 | 0 | 0 |
| 1220 | 0.1523643 | 0.0273930 | 0.8537226 | 0.0611595 | 0.2184304 | 0.0371711 | 2750 | 0.1488771 | 0.0288261 | 0.3271651 | 0.0788638 | 0.5609430 | 0.1552925 |
| 1221 | 0.2301061 | 0.0374130 | 0.9918388 | 0.0440000 | 0.2654722 | 0.0293899 | 2751 | 0.0249735 | 0.0048320 | 0.1001664 | 0.0251445 | 0.1324371 | 0.1872943 |
| 1222 | 0.0217970 | 0.0037566 | 0.0698794 | 0.0124486 | 0.0535022 | 0.0058150 | 2752 | 0.5218987 | 0.1198026 | 0.7484955 | 0.1617572 | 0.7868380 | ND |
| 1223 | 0.6594858 | 0.2463318 | 0.9973389 | 0.0085594 | 0.3029725 | 0.0651777 | 2753 | 0.0472995 | 0.0063887 | 0.0612808 | 0.0095361 | 0 | 0 |
| 1224 | 0.0035725 | 0.0008584 | 0.1805596 | ND | 0.0196975 | 0.0035956 | 2754 | 1.1350483 | 0.2421055 | 1.1075736 | 0.1548066 | 0 | 0 |
| 1225 | 0.0696259 | 0.0082309 | 0.2693783 | 0.0412772 | 0.1505698 | 0.0325436 | 2755 | 0.0909082 | 0.0119904 | 0.3048483 | 0.0792410 | 0.0590743 | 0.0835437 |
| 1226 | 0.2213469 | 0.0746809 | 1.3561499 | 0.1995129 | 0.4088452 | 0.0739722 | 2756 | 0.1668204 | 0.0141235 | 0.1633100 | 0.0425010 | 0 | 0 |
| 1227 | 0.3497365 | 0.0454738 | 0.7508123 | 0.1531697 | 0.1227546 | 0.0297098 | 2757 | 0.7953489 | 0.1317878 | 0.9700522 | 0.2643227 | 0.6462692 | 0.1868224 |
| 1228 | 0.0005461 | 0.0004642 | 0.0022109 | 0.0019177 | 0 | 0 | 2758 | 0.4184153 | 0.0522908 | 0.5399081 | 0.1221224 | 2.0122685 | 0.1291835 |
| 1229 | 0.3080300 | 0.0886003 | 1.1183683 | 0.1575908 | 0.0985957 | 0.0083771 | 2759 | 0.0034428 | 0.0003274 | 0.0414005 | 0.0100414 | 0 | 0 |
| 1230 | 0.7020614 | 0.1348461 | 0.9056254 | 0.1815543 | 0.5405192 | 0.0729734 | 2760 | 0.7113551 | 0.1696731 | 0.8330051 | 0.2563652 | 1.2257474 | 0.1469474 |
| 1232 | 0.1916642 | 0.0580763 | 0.2945368 | 0.0235500 | 0.1822774 | 0.0323763 | 2761 | 0.7982985 | 0.2300338 | 0.9109760 | 0.1187384 | 0.3047428 | 0.4309715 |
| 1233 | 0.4091627 | 0.0690788 | 1.0350563 | 0.0946519 | 0.6349194 | 0.0444706 | 2762 | 0.0652079 | 0.0426121 | 0.1326388 | 0.0069429 | 0.1365821 | 0.0840582 |
| 1234 | 0.3353644 | 0.0290614 | 0.8211801 | 0.0710247 | 0.2121475 | 0.0429193 | 2763 | 0.2256631 | 0.0774941 | 0.0895803 | 0.0162537 | 0.1356018 | 0.0400500 |
| 1235 | 0.0015049 | 0.0006258 | 0.0139757 | 0.0044904 | 0.0043806 | 0.0033347 | 2764 | 0.7338392 | 0.4064907 | 1.4109467 | 0.0460486 | 0.1283034 | 0.0523790 |
| 1237 | 0.0009914 | 0.0002303 | 0.0020339 | 0.0018878 | 0.0008859 | 0.0011819 | 2765 | 0.4247636 | 0.0826082 | 0.8691629 | 0.0427524 | 0.1745902 | 0.1169676 |
| 1238 | 0.0003608 | 0.0003238 | 0.0009208 | 0.0008065 | 0.0006070 | 0.0010514 | 2766 | 0.6837472 | 0.1095688 | 0.9772066 | 0.0331672 | 0.4243782 | 0.1145891 |
| 1239 | 0.0008711 | 0.0003841 | 0.0032398 | 0.0028840 | 0.0025782 | 0.0013626 | 2767 | 0.5729303 | 0.0877027 | 1.1864223 | 0.0678733 | 0.1634338 | 0.0427302 |
| 1240 | 0.0910227 | 0.0357426 | 0.6557665 | 0.0811881 | 0.0927445 | 0.0129069 | 2768 | 0.4773763 | 0.0681418 | 1.3387269 | 0.0280259 | 0.2855688 | 0.0881331 |
| 1242 | 0.4686251 | 0.1866674 | 0.6267645 | 0.0868502 | 0.4867462 | 0.1024667 | 2769 | 1.1050831 | 0.3299793 | 1.4019612 | 0.0810408 | 0.6143991 | 0.1693745 |
| 1243 | 0.6921983 | 0.2163936 | 0.7447914 | 0.0267081 | 0.2945229 | 0.0633444 | 2770 | 0.3413598 | 0.0426292 | 0.5275183 | 0.0340033 | 1.1045972 | 0.2792074 |
| 1244 | 0.3527984 | 0.0524722 | 0.9700004 | 0.0890134 | 0.3675971 | 0.0542591 | 2771 | 0.7884229 | 0.2584628 | 0.9992497 | 0.1083988 | 0.8718817 | 0.2596336 |
| 1245 | 0.4613715 | 0.1227159 | 0.8857726 | 0.0777460 | 0.5113529 | 0.1637468 | 2772 | 0.3961448 | 0.1853959 | 0.7838245 | 0.0547372 | 0.4131228 | 0.1037773 |
| 1246 | 0.5302945 | 0.1222693 | 0.8532535 | 0.0951164 | 0.9124836 | 0.1734707 | 2773 | 0.3974197 | 0.0535887 | 0.8574359 | 0.0169394 | 0.1383868 | 0.0471738 |
| 1247 | 0.2327653 | 0.0608599 | 0.9164731 | 0.0782950 | 0.0271434 | 0.0043729 | 2774 | 0.2376444 | 0.0616967 | 0.8346856 | 0.0319449 | 0.1188548 | 0.0418083 |
| 1248 | 0.2738736 | 0.0505742 | 0.9151920 | 0.1138642 | 0.3448462 | 0.0200927 | 2775 | 0.1989131 | 0.0537649 | 0.8970938 | 0.0141046 | 0.0785012 | 0.0703693 |
| 1249 | 0.2490793 | 0.0343829 | 0.9787047 | 0.1078943 | 0.2789739 | 0.0417402 | 2776 | 0.0036064 | 0.0006830 | 0.0067760 | 0.0004333 | 0.0175627 | 0.0152100 |
| 1250 | 0.2297202 | 0.0696410 | 0.9377150 | 0.1601530 | 0.4456330 | 0.1128964 | 2777 | 1.4853952 | 0.1486686 | 2.5862095 | 0.1065336 | 0.1010278 | 0.0335748 |
| 1251 | 0.0132861 | 0.0012446 | 0.0363165 | 0.0081488 | 0.0322195 | 0.0017010 | 2778 | 1.1925919 | 0.2577906 | 1.2753079 | 0.0372231 | 0.4231847 | 0.1126026 |
| 1252 | 0.3019562 | 0.0602156 | 0.9639003 | 0.1211916 | 0.6293079 | 0.1084439 | 2779 | 0.0022693 | 0.0007860 | 0.0025802 | 0.0014116 | 0.0479333 | 0.0638838 |
| 1253 | 0.4690491 | 0.0649640 | 1.1569324 | 0.2053466 | 0.5709083 | 0.1304882 | 2780 | 0.7223614 | 0.2657272 | 1.3615913 | 0.0879321 | 0.1118176 | 0.0398186 |
| 1254 | 0.0735535 | 0.0231272 | 0.7343050 | 0.0541821 | 0.1179300 | 0.0134498 | 2781 | 0.0563155 | 0.0160584 | 0.2312937 | 0.0157148 | 0.0705637 | 0.0202225 |
| 1255 | 0.3339112 | 0.0730129 | 0.9794097 | 0.0887568 | 0.0569950 | 0.0213859 | 2782 | 0.0011193 | 0.0004796 | 0.0018944 | 0.0016465 | 0.0261291 | 0.0278103 |
| 1256 | 0.1908013 | 0.0368656 | 0.8677577 | 0.0422517 | 0.2275978 | 0.0388976 | 2783 | 0.0009911 | 0.0003367 | 0.0022644 | 0.0005763 | 0.0521206 | 0.0037009 |
| 1257 | 0.6986532 | 0.1279601 | 1.4475014 | 0.0919387 | 0.2680397 | 0.0464991 | 2784 | 0.2727146 | 0.0942746 | 0.6404607 | 0.0437021 | 0.0913395 | 0.0753197 |
| 1258 | 0.4854470 | 0.0623502 | 0.9581816 | 0.0981546 | 0.3459021 | 0.0829003 | 2785 | 0.2902922 | 0.0815494 | 0.4422081 | 0.0089387 | 0.0689866 | 0.0366877 |
| 1259 | 0.1279360 | 0.0505638 | 0.8994353 | 0.0860567 | 0.1522274 | 0.0187886 | 2786 | 0.0102765 | 0.0021944 | 0.0317259 | 0.0018401 | 0.0576260 | 0.0256811 |
| 1260 | 0.2773840 | 0.0702062 | 1.2149380 | 0.2295286 | 0.1291206 | 0.0251867 | 2787 | 0.0005167 | 0.0002172 | 0.0006032 | 0.0001896 | 0.0239282 | 0.0320570 |
| 1261 | 0.2689262 | 0.0491586 | 1.0361276 | 0.2963970 | 0.2425903 | 0.0174934 | 2788 | 0.0084965 | 0.0024968 | 0.0309092 | 0.0019084 | 0.0175027 | 0.0204110 |
| 1263 | 1.6813621 | 0.2002248 | 1.5301710 | 0.1421954 | 0.8012835 | 0.1052066 | 2789 | 0.0020551 | 0.0007875 | 0.0145503 | 0.0010512 | 0.0266584 | 0.0131078 |
| 1264 | 1.1284344 | 0.1673180 | 1.3374074 | 0.2139047 | 0.4073746 | 0.1285638 | 2790 | 0.0008354 | 0.0003982 | 0.0081196 | 0.0005133 | 0.0242859 | 0.0084150 |
| 1265 | 1.0774006 | 0.0311617 | 1.3704068 | 0.1747245 | 0.8351148 | 0.0526897 | 2791 | 0.0153318 | 0.0062985 | 0.0519370 | 0.0028458 | 0.0206824 | 0.0226480 |
| 1266 | 0.6472289 | 0.1212618 | 1.0154930 | 0.0801530 | 0.2479528 | 0.0851674 | 2792 | 0.0018924 | 0.0005598 | 0.0093246 | 0.0005805 | 0.0083729 | 0.0091187 |
| 1267 | 0.8237634 | 0.0137230 | 1.1063144 | 0.1637277 | 0.2939595 | 0.0249543 | 2793 | 0.0622854 | 0.0049861 | 0.1598164 | 0.0069726 | 0.0134876 | 0.0118923 |
| 1268 | 1.1859069 | 0.4890879 | 1.2200596 | 0.1845114 | 0.4011215 | 0.0105365 | 2794 | 0.0003993 | 0.0000467 | 0.0007983 | 0.0002251 | 0.0622806 | 0.0739598 |
| 1269 | 0.9818997 | 0.0757329 | 1.0045327 | 0.0422672 | 0.3058009 | 0.1212207 | 2795 | 0.0001486 | 0.0001478 | 0.0002150 | 0.0001962 | 0.0396071 | 0.0211574 |
| 1270 | 0.0030725 | 0.0009809 | 0.0044144 | 0.0010515 | 0.0029900 | 0.0029935 | 2796 | 0.0091736 | 0.0034706 | 0.0341944 | 0.0012355 | 0.0163491 | 0.0134426 |
| 1271 | 0.7558651 | 0.0490171 | 1.1061463 | 0.1581899 | 0.2746318 | 0.0716880 | 2797 | 0.0247881 | 0.0067025 | 0.0895860 | 0.0098787 | 0.0381065 | 0.0415483 |
| 1272 | 1.0920861 | 0.2150265 | 1.2729755 | 0.0349856 | 0.6159431 | 0.0177389 | 2798 | 0.0361618 | 0.0085936 | 0.1055090 | 0.0045071 | 0.0381794 | 0.0281542 |
| 1273 | 0.9113064 | 0.1513511 | 1.5905292 | 0.4382561 | 0.5210036 | 0.0180676 | 2799 | 0.0004905 | 0.0002565 | 0.0011158 | 0.0001334 | 0.0212048 | 0.0367278 |
| 1274 | 0.2380005 | 0.0310105 | 0.2886341 | 0.0374245 | 0.0095443 | 0.0050202 | 2800 | 0.0273560 | 0.0088108 | 0.0982409 | 0.0038992 | 0.0307879 | 0.0278978 |
| 1275 | 1.1344299 | 0.2724862 | 1.6390852 | 0.3655726 | 0.5376252 | 0.0401170 | 2801 | 0.0083010 | 0.0036977 | 0.0183209 | 0.0003659 | 0.0252680 | 0.0215168 |
| 1276 | 1.7303963 | 0.5014084 | 1.4020154 | 0.3291621 | 0.4785626 | 0.0505968 | 2802 | 0.0162374 | 0.0030448 | 0.0293537 | 0.0024489 | 0.0298099 | 0.0276037 |
| 1277 | 0.7495934 | 0.2098795 | 1.1918446 | 0.2324057 | 0.3683256 | 0.1136936 | 2803 | 0.0440369 | 0.0154128 | 0.1030566 | 0.0077580 | 0.0420513 | 0.0380221 |
| 1278 | 0.3161862 | 0.0138529 | 0.7264440 | 0.0970267 | 0.0187110 | 0.0163873 | 2804 | 0.0244463 | 0.0127126 | 0.0520222 | 0.0033943 | 0.0324592 | 0.0175922 |
| 1279 | 1.1696888 | 0.1113640 | 1.2516243 | 0.0864314 | 0.5964155 | 0.0717308 | 2805 | 0.0303138 | 0.0117616 | 0.1223927 | 0.0082463 | 0.0073262 | 0.0050003 |
| 1280 | 1.3462004 | 0.0274986 | 1.2628030 | 0.2810302 | 0.3131896 | 0.1769070 | 2806 | 0.0076871 | 0.0011724 | 0.0459285 | 0.0025637 | 0.0210299 | 0.0249968 |
| 1281 | 0.0019210 | 0.0004594 | 0.0034258 | 0.0003599 | 0 | 0 | 2807 | 0.2729202 | 0.0517422 | 0.6334141 | 0.0458533 | 0.0341030 | 0.0147647 |
| 1282 | 1.5098277 | 0.0866514 | 1.0597856 | 0.0778626 | 0.4425695 | 0.1743101 | 2808 | 0.0027622 | 0.0007208 | 0.0208271 | 0.0019960 | 0.0320653 | 0.0232420 |
| 1283 | 0.0483272 | 0.0154577 | 0.0486979 | 0.0139332 | 0.0259629 | 0.0087324 | 2809 | 0.0129311 | 0.0052668 | 0.0660361 | 0.0039470 | 0.0147676 | 0.0228853 |
| 1284 | 2.1335979 | 0.1669664 | 1.4815744 | 0.0363295 | 2.2456508 | 0.4022539 | 2810 | 0.0069708 | 0.0011722 | 0.0234546 | 0.0016672 | 0.0470054 | 0.0377010 |
| 1285 | 1.1396597 | 0.2580735 | 1.0764110 | 0.1202094 | 0.3726864 | 0.1046480 | 2811 | 0.4891717 | 0.1829334 | 0.5162991 | 0.0338210 | 0.0945000 | 0.0957038 |
| 1286 | 0.0005165 | 0.0001016 | 0.0005559 | 0.0003850 | 0 | 0 | 2812 | 0.3009263 | 0.1217957 | 0.5256594 | 0.0516179 | 0.0771653 | 0.0644539 |
| 1287 | 1.6089809 | 0.1720835 | 1.4827555 | 0.1607609 | 1.5978148 | 0.1554314 | 2813 | 0.0954734 | 0.0165561 | 0.2373430 | 0.0055281 | 0.0342743 | 0.0475356 |
| 1288 | 1.0927866 | 0.0064862 | 1.0970189 | 0.1721322 | 0.7231318 | 0.0727100 | 2814 | 0.2249062 | 0.0057142 | 0.5272675 | 0.0361928 | 0.0723234 | 0.0174392 |
| 1289 | 0.0004838 | 0.0001151 | 0.0008563 | 0.0004087 | 0.0175143 | 0.0303356 | 2815 | 0.0563550 | 0.0243243 | 0.2122466 | 0.0236290 | 0.0246953 | 0.0218257 |
| 1290 | 0.0215225 | 0.0048381 | 0.0298926 | 0.0071225 | 0.0117155 | 0.0202918 | 2816 | 0.0001912 | 0.0002050 | 0.0001396 | 0.0001221 | 0.0138966 | 0.0157374 |
| 1291 | 0.0070971 | 0.0019151 | 0.0081147 | 0.0019868 | 0.0000952 | 0.0001649 | 2817 | 0.0001006 | 0.0000944 | 0.0001982 | 0.0003433 | 0.0206071 | 0.0183115 |
| 1292 | 0.0149443 | 0.0025736 | 0.0256855 | 0.0060285 | 0.0078180 | 0.0067746 | 2818 | 0.0000587 | 0.0001016 | 0.0001294 | 0.0001687 | 0.0290242 | 0.0251154 |
| 1293 | 0.0163560 | 0.0020938 | 0.0326657 | 0.0052793 | 0.0047805 | 0.0082521 | 2819 | 0.0006653 | 0.0003733 | 0.0006486 | 0.0006671 | 0.0259133 | 0.0137982 |
| 1294 | 0.0076571 | 0.0002756 | 0.0118605 | 0.0010365 | 0.0102691 | 0.0075453 | 2820 | 0.0011258 | 0.0004985 | 0.0015400 | 0.0002695 | 0.0295470 | 0.0050635 |
| 1295 | 0.0047064 | 0.0002610 | 0.0097779 | 0.0022998 | 0 | 0 | 2821 | 0.0002878 | 0.0002575 | 0.0006298 | 0.0002823 | 0.0380064 | 0.0335411 |
| 1296 | 0.2815976 | 0.0712960 | 0.5378056 | 0.0119175 | 0.1829700 | 0.0216104 | 2822 | 0.0002404 | 0.0002132 | 0.0002841 | 0.0004612 | 0.0510858 | 0.0444087 |
| 1297 | 0.0006716 | 0.0006499 | 0.0027176 | 0.0023604 | 0.0040475 | 0.0035818 | 2823 | 0.0001026 | 0.0001389 | 0.0002041 | 0.0003534 | 0.0281929 | 0.0256184 |
| 1299 | 0.0030081 | 0.0002307 | 0.0112426 | 0.0035445 | 0.0006228 | 0.0010787 | 2824 | 0.0000828 | 0.0001416 | 0 | 0 | 0.0389431 | 0.0632744 |
| 1301 | 0.0001650 | 0.0001069 | 0.0012804 | 0.0011257 | 0.0002933 | 0.0005079 | 2825 | 0.0000509 | 0.0000881 | 0 | 0 | 0.0166461 | 0.0162737 |
| 1303 | 0.8264989 | 0.0348683 | 0.9289628 | 0.1844047 | 1.1634049 | 0.3099239 | 2826 | 0.0001805 | 0.0001249 | 0.0002328 | 0.0002220 | 0.0116399 | 0.0167412 |
| 1304 | 0.6847869 | 0.0751556 | 0.7263518 | 0.2016533 | 0.4878505 | 0.1987877 | 2827 | 0.0000265 | 0.0000458 | 0 | 0 | 0.0167043 | 0.0020318 |
| 1305 | 0.4568009 | 0.0766729 | 0.5868726 | 0.1028414 | 0.2586080 | 0.2599843 | 2828 | 0.0000630 | 0.0000690 | 0 | 0 | 0.0395113 | 0.0397022 |
| 1306 | 0.6310500 | 0.0226348 | 0.5931585 | 0.1343155 | 0.2482448 | 0.1974931 | 2829 | 0 | 0 | 0.0001625 | 0.0002814 | 0.0180231 | 0.0210823 |
| 1307 | 0.4040803 | 0.0442675 | 0.4606855 | 0.1052730 | 0.4301077 | 0.0503830 | 2830 | 0.0000345 | 0.0000598 | 0 | 0 | 0.0349953 | 0.0288701 |
| 1308 | 0.4996627 | 0.0600419 | 0.4248040 | 0.0780572 | 0.2472899 | 0.1946193 | 2831 | 0.0000227 | 0.0000392 | 0 | 0 | 0.0186741 | 0.0161778 |
| 1309 | 0.5211774 | 0.1030705 | 0.4898545 | 0.1057105 | 0.3240493 | 0.0335340 | 2832 | 0.0000178 | 0.0000309 | 0 | 0 | 0.0231429 | 0.0218715 |
| 1310 | 0.5429047 | 0.0393296 | 0.4979120 | 0.1249797 | 0.2335368 | 0.0761849 | 2833 | 0.0000498 | 0.0000501 | 0 | 0 | 0.0080709 | 0.0139791 |
| 1311 | 0.5066738 | 0.0214243 | 0.4153233 | 0.0597882 | 0.6541400 | 0.3256544 | 2834 | 0 | 0 | 0.0002425 | 0.0002437 | 0.0251031 | 0.0401342 |
| 1312 | 0.4764878 | 0.0592875 | 0.5815473 | 0.0709748 | 0.4710723 | 0.0278366 | 2835 | 0.0000231 | 0.0000260 | 0 | 0 | 0.0458037 | 0.0503060 |
| 1313 | 0.7017158 | 0.0241836 | 0.8152373 | 0.1870629 | 0.5445278 | 0.1911815 | 2836 | 0 | 0 | 0 | 0 | 0.0125791 | 0.0147558 |
| 1314 | 0.3932338 | 0.0488905 | 0.5168607 | 0.0724310 | 0.1152818 | 0.0573888 | 2837 | 0.0000167 | 0.0000289 | 0 | 0 | 0.0459958 | 0.0483104 |
| 1315 | 0.3612068 | 0.0251576 | 0.2131064 | 0.0297224 | 1.0146173 | 0.3336144 | 2838 | 0 | 0 | 0 | 0 | 0.0438270 | 0.0499550 |
| 1316 | 0.4100450 | 0.0317937 | 0.4698933 | 0.1080257 | 0.3563561 | 0.1643632 | 2839 | 0 | 0 | 0 | 0 | 0.0285740 | 0.0081960 |
| 1317 | 0.7188392 | 0.0916055 | 0.7000382 | 0.1172436 | 0.3648277 | 0.1855358 | 2840 | 0 | 0 | 0 | 0 | 0.0334819 | 0.0319670 |
| 1318 | 0.0573389 | 0.0086607 | 0.2031193 | 0.0354502 | 0.0885365 | 0.0945570 | 2841 | 0.0000174 | 0.0000206 | 0 | 0 | 0.0218098 | 0.0190279 |
| 1320 | 0.4079631 | 0.0383210 | 0.5231893 | 0.0947225 | 0.4844457 | 0.2199551 | 2842 | 0.0000563 | 0.0000584 | 0 | 0 | 0.0454356 | 0.0457183 |
| 1321 | 0.0042267 | 0.0001551 | 0.0069387 | 0.0016026 | 0.0017954 | 0.0031097 | 2843 | 0 | 0 | 0 | 0 | 0.0081572 | 0.0141287 |
| 1327 | 0 | 0 | 0.0002018 | 0.0003495 | 0.0119341 | 0.0150909 | 2844 | 0.0000198 | 0.0000342 | 0 | 0 | 0.0477362 | 0.0167686 |
| 1330 | 0.6050875 | 0.0793211 | 0.6646954 | 0.1651502 | 0.3522013 | 0.0797373 | 2845 | 0 | 0 | 0 | 0 | 0.0573050 | 0.0310995 |
| 1333 | 0.6928471 | 0.0504455 | 0.5944484 | 0.1777732 | 0.1756106 | 0.0755686 | 2846 | 0 | 0 | 0 | 0 | 0.0102282 | 0.0049094 |
| 1334 | 0.1181383 | 0.0119854 | 0.3310020 | 0.0114490 | 0.1580894 | 0.0704209 | 2847 | 0.0000067 | 0.0000116 | 0 | 0 | 0.0074923 | 0.0120475 |
| 1335 | 0.1932326 | 0.0184962 | 0.3723622 | 0.0240655 | 0.2022450 | 0.1335212 | 2848 | 0 | 0 | 0.0000213 | 0.0000370 | 0.0455491 | 0.0046805 |
| 1336 | 0.0045540 | 0.0003984 | 0.0016805 | 0.0015099 | 0.0384825 | 0.0338409 | 2849 | 0.0000019 | 0.0000032 | 0 | 0 | 0.0083024 | 0.0072116 |
| 1337 | 0.1746442 | 0.0282145 | 0.3700011 | 0.0525269 | 0.2697839 | 0.0632154 | 2850 | 0 | 0 | 0.0000265 | 0.0000458 | 0.0036939 | 0.0041278 |
| 1338 | 0.0746130 | 0.0010281 | 0.2118025 | 0.0219761 | 0.0372844 | 0.0645784 | 2851 | 0 | 0 | 0 | 0 | 0.0349438 | 0.0203174 |
| 1341 | 0.5972927 | 0.0711713 | 0.7208856 | 0.1292490 | 0.6915037 | 0.1836990 | 2852 | 0 | 0 | 0 | 0 | 0.0342592 | 0.0079451 |
| 1342 | 0.7460815 | 0.0959989 | 0.8945715 | 0.1062130 | 0.2895301 | 0.0719730 | 2853 | 0.0000402 | 0.0000696 | 0.0001189 | 0.0002060 | 0.0480202 | 0.0176360 |
| 1343 | 0.4256132 | 0.0201074 | 0.7126413 | 0.0700161 | 0.8056843 | ND | 2854 | 0 | 0 | 0 | 0 | 0.0129994 | 0.0129078 |
| 1344 | 0.5057468 | 0.0579023 | 0.6910458 | 0.1199498 | 0.2908224 | 0.1402402 | 2855 | 0 | 0 | 0 | 0 | 0.0252535 | 0.0221383 |
| 1345 | 0.0864121 | 0.0152045 | 0.2679277 | 0.0333688 | 0.0847612 | 0.0229798 | 2856 | 0.0000077 | 0.0000133 | 0 | 0 | 0.0190804 | 0.0159003 |
| 1346 | 0.8558083 | 0.0984042 | 1.2298640 | 0.2181585 | 1.4460087 | 0.3049144 | 2857 | 0 | 0 | 0 | 0 | 0 | 0 |
| 1347 | 0.2896990 | 0.0304426 | 0.7673532 | 0.1334959 | 0.4212443 | 0.1023431 | 2858 | 0 | 0 | 0 | 0 | 0.0244538 | 0.0244036 |
| 1350 | 0.0022577 | 0.0002827 | 0.0060852 | 0.0025951 | 0.0043857 | 0.0075962 | 2859 | 0 | 0 | 0.0002888 | 0.0005002 | 0.0080749 | 0.0017306 |
| 1351 | 0.2476978 | 0.0080758 | 0.5235681 | 0.0745269 | 0.1913771 | 0.1964248 | 2860 | 0 | 0 | 0.0002681 | 0.0002633 | 0.0021884 | 0.0035478 |
| 1352 | 0.0993521 | 0.0111684 | 0.3239891 | 0.0374916 | 0.0540040 | 0.0509742 | 2861 | 0 | 0 | 0.0002669 | 0.0002748 | 0.0016847 | 0.0024030 |
| 1353 | 1.1914409 | 0.1837432 | 1.1771487 | 0.1476558 | 0.2722678 | 0.1255312 | 2862 | 0 | 0 | 0.0001602 | 0.0002775 | 0.0049344 | 0.0052493 |
| 1354 | 1.2633572 | 0.0829061 | 1.2314698 | 0.1182702 | 0.2824483 | 0.1448161 | 2863 | 0 | 0 | 0.0000474 | 0.0000822 | 0.0005569 | 0.0009646 |
| 1355 | 0.0231168 | 0.0004706 | 0.0794225 | 0.0063597 | 0.0367779 | 0.0400407 | 2864 | 0 | 0 | 0.0001212 | 0.0002100 | 0.0011866 | 0.0018390 |
| 1356 | 1.5424990 | 0.0688198 | 1.7660105 | 0.2269430 | 1.9861043 | 0.8293464 | 2865 | 0 | 0 | 0 | 0 | 0.0010718 | 0.0013574 |
| 1357 | 0.6168456 | 0.0299278 | 0.7997678 | 0.1350488 | 0.1900108 | 0.0369200 | 2866 | 0.0000058 | 0.0000100 | 0.0006303 | 0.0006643 | 0.0019419 | 0.0031087 |
| 1358 | 0.0007803 | 0.0004728 | 0.0026484 | 0.0022387 | 0.0102781 | 0.0178022 | 2867 | 0 | 0 | 0.0003540 | 0.0003066 | 0.0033883 | 0.0017748 |
| 1359 | 0.0044414 | 0.0005595 | 0.0103715 | 0.0036088 | 0.0154930 | 0.0134659 | 2868 | 0 | 0 | 0.0001863 | 0.0001773 | 0.0016577 | 0.0028525 |
| 1360 | 0.3969584 | 0.0889986 | 0.6451576 | 0.0482130 | 0.1323221 | 0.0533468 | 2869 | 0.0020518 | 0.0009065 | 0.2081323 | 0.0054836 | 0.0037159 | 0.0020826 |
| 1361 | 0.0461805 | 0.0016185 | 0.0814758 | 0.0101497 | 0.0374431 | 0.0564026 | 2870 | 0 | 0 | 0.0003318 | 0.0005747 | 0.0021541 | 0.0031407 |
| 1362 | 0.0544560 | 0.0117960 | 0.0854991 | 0.0106106 | 0.0075080 | 0.0130042 | 2871 | 0 | 0 | 0 | 0 | 0.0023578 | 0.0025982 |
| 1363 | 0.0569595 | 0.0040718 | 0.0725855 | 0.0090996 | 0.0377465 | 0.0313624 | 2872 | 0 | 0 | 0 | 0 | 0.0012825 | 0.0022213 |
| 1364 | 0.7234808 | 0.1034622 | 0.9833722 | 0.1413703 | 1.6573755 | 0.3939349 | 2873 | 0 | 0 | 0.0002074 | 0.0002360 | 0.0014732 | 0.0013584 |
| 1367 | 0.0828664 | 0.0073093 | 0.1621287 | 0.0192502 | 0.0196954 | 0.0217797 | 2874 | 0 | 0 | 0.0002899 | 0.0005021 | 0.0009984 | 0.0017178 |
| 1368 | 0.0014108 | 0.0004584 | 0.0039616 | 0.0034724 | 0.0082138 | 0.0142268 | 2875 | 0 | 0 | 0.0002781 | 0.0004817 | 0.0055298 | 0.0046041 |
| 1370 | 0.5783562 | 0.0106526 | 0.7707529 | 0.0911993 | 0.2861393 | 0.2271587 | 2876 | 0 | 0 | 0.0003166 | 0.0005483 | 0.0008854 | 0.0012248 |
| 1371 | 0.6613490 | 0.0701623 | 0.6793242 | 0.0526661 | 0.1103684 | 0.0531069 | 2877 | 0 | 0 | 0.0025274 | 0.0007185 | 0.0022142 | 0.0038351 |
| 1372 | 0.0003712 | 0.0002397 | 0.0024521 | 0.0023680 | 0.0041898 | 0.0072570 | 2878 | 0 | 0 | 0.0002978 | 0.0000825 | 0.0018848 | 0.0032645 |
| 1373 | 0.1994114 | 0.0234843 | 0.3074554 | 0.0577236 | 0.0629073 | 0.0232780 | 2879 | 0 | 0 | 0 | 0 | 0.0002481 | 0.0004297 |
| 1374 | 0.0092679 | 0.0014701 | 0.0055439 | 0.0029954 | 0.0023322 | 0.0040395 | 2880 | 0.0005315 | 0.0003093 | 0.0124327 | 0.0008392 | 0.0010522 | 0.0018225 |
| 1375 | 0.0108961 | 0.0025129 | 0.0143257 | 0.0059740 | 0.0999217 | 0.0912612 | 2881 | 0 | 0 | 0.0000474 | 0.0000822 | 0.0026997 | 0.0028421 |
| 1376 | 0.0023645 | 0.0004094 | 0.0065445 | 0.0017498 | 0.0481522 | 0.0311374 | 2882 | 0.0037903 | 0.0009412 | 0.0323119 | 0.0020039 | 0.0059147 | 0.0051983 |
| 1379 | 0.0065776 | 0.0012042 | 0.0106892 | 0.0002382 | 0.0192539 | 0.0204961 | 2883 | 0 | 0 | 0.0000537 | 0.0000833 | 0.0043697 | 0.0023327 |
| 1380 | 0.0059850 | 0.0008174 | 0.0107511 | 0.0045623 | 0.0307652 | 0.0290461 | 2884 | 0 | 0 | 0.0000570 | 0.0000896 | 0.0022006 | 0.0038116 |
| 1383 | 0.0021749 | 0.0010568 | 0.0025897 | 0.0022843 | 0.0122125 | 0.0211527 | 2885 | 0 | 0 | 0.0002330 | 0.0002191 | 0.0040164 | 0.0009911 |
| 1384 | 0.0201986 | 0.0036671 | 0.0045267 | 0.0044221 | 0.0495302 | 0.0534342 | 2886 | 0 | 0 | 0.0001602 | 0.0002775 | 0.0011637 | 0.0016119 |
| 1385 | 0.0034163 | 0.0012737 | 0.0030351 | 0.0036663 | 0.0297239 | 0.0432839 | 2887 | 0 | 0 | 0.0000267 | 0.0000462 | 0.0023179 | 0.0010353 |
| 1386 | 0.0062740 | 0.0007991 | 0.0019742 | 0.0023204 | 0.0180666 | 0.0216462 | 2888 | 0 | 0 | 0.0001182 | 0.0002048 | 0.0008501 | 0.0014725 |
| 1387 | 0.0001134 | 0.0001965 | 0.0045099 | 0.0030160 | 0.0807376 | 0.0141489 | 2889 | 0 | 0 | 0 | 0 | 0.0010199 | 0.0010147 |
| 1388 | 0.0030133 | 0.0007562 | 0.0063548 | 0.0047191 | 0.0211779 | 0.0202776 | 2890 | 0 | 0 | 0.0003415 | 0.0002961 | 0.0035395 | 0.0057551 |
| 1390 | 0.0130558 | 0.0045170 | 0.0094776 | 0.0035698 | 0.0046785 | 0.0072464 | 2891 | 0 | 0 | 0.0002496 | 0.0004323 | 0.0039934 | 0.0034689 |
| 1392 | 0.0068165 | 0.0025737 | 0.0070911 | 0.0012062 | 0.0512180 | 0.0451026 | 2892 | 0.0000529 | 0.0000917 | 0.0030757 | 0.0019897 | 0.0020351 | 0.0020654 |
| 1397 | 0.0016937 | 0.0005556 | 0.0019289 | 0.0019074 | 0.0183168 | 0.0233753 | 2893 | 0.0011150 | 0.0001869 | 0.0019492 | 0.0001388 | 0.0033770 | 0.0047579 |
| 1398 | 0.0055518 | 0.0007522 | 0.0021866 | 0.0014906 | 0.0028878 | 0.0050019 | 2894 | 0.0027127 | 0.0011710 | 0.0167373 | 0.0017385 | 0.0007790 | 0.0013493 |
| 1399 | 0.0119630 | 0.0018470 | 0.0031473 | 0.0016425 | 0.0507477 | 0.0158791 | 2895 | 0 | 0 | 0.0001182 | 0.0002048 | 0.0040675 | 0.0020663 |
| 1400 | 0.0022620 | 0.0001417 | 0.0080035 | 0.0017042 | 0.0152494 | 0.0211637 | 2896 | 0 | 0 | 0.0001182 | 0.0002048 | 0.0036510 | 0.0053729 |
| 1401 | 0.0063997 | 0.0019762 | 0.0065663 | 0.0025193 | 0.0437719 | 0.0379167 | 2897 | 0 | 0 | 0.0002948 | 0.0005106 | 0.0011115 | 0.0019252 |
| 1402 | 0.0132838 | 0.0023278 | 0.0149266 | 0.0064195 | 0.0028729 | 0.0049760 | 2898 | 0 | 0 | 0.0000381 | 0.0000661 | 0.0007082 | 0.0006634 |
| 1403 | 0.0088257 | 0.0001919 | 0.0028231 | 0.0026780 | 0.0287620 | 0.0185891 | 2899 | 0 | 0 | 0.0001831 | 0.0003171 | 0.0006016 | 0.0010420 |
| 1405 | 0.0042158 | 0.0006493 | 0.0051506 | 0.0014644 | 0.0183286 | 0.0317461 | 2900 | 0 | 0 | 0.0003209 | 0.0005558 | 0.0039228 | 0.0007570 |
| 1406 | 0.8243231 | 0.0943831 | 0.8681499 | 0.1434499 | 0.8834522 | 0.1469432 | 2901 | 0 | 0 | 0.0000576 | 0.0000998 | 0.0054072 | 0.0071568 |
| 1407 | 0.0143251 | 0.0016704 | 0.0073434 | 0.0027828 | 0.0158826 | 0.0178846 | 2902 | 0 | 0 | 0.0000305 | 0.0000529 | 0.0001442 | 0.0002498 |
| 1409 | 0.0055424 | 0.0013159 | 0.0031955 | 0.0031380 | 0.0124528 | 0.0215689 | 2903 | 0 | 0 | 0.0001593 | 0.0002758 | 0.0011581 | 0.0020058 |
| 1410 | 0.0002303 | 0.0003312 | 0.0024258 | 0.0027272 | 0.0686847 | 0.0177516 | 2904 | 0 | 0 | 0 | 0 | 0.0003311 | 0.0005735 |
| 1411 | 0.0062471 | 0.0012585 | 0.0122205 | 0.0023064 | 0.0278328 | 0.0294955 | 2905 | 0 | 0 | 0.0001564 | 0.0002709 | 0.0037226 | 0.0032390 |
| 1412 | 0.0066120 | 0.0002031 | 0.0094052 | 0.0019897 | 0.0687211 | 0.0604874 | 2906 | 0 | 0 | 0 | 0 | 0.0005633 | 0.0008715 |
| 1413 | 0.0052056 | 0.0004820 | 0.0097013 | 0.0044177 | 0.0203035 | 0.0179129 | 2908 | 0 | 0 | 0.0001842 | 0.0002249 | 0.0024658 | 0.0021603 |
| 1414 | 0.0000936 | 0.0001622 | 0.0005115 | 0.0008859 | 0.0477650 | 0.0585549 | 2909 | 0 | 0 | 0.0001259 | 0.0002180 | 0.0040101 | 0.0038924 |
| 1415 | 0.0041746 | 0.0004173 | 0.0054165 | 0.0051233 | 0.0308880 | 0.0315368 | 2910 | 0.0034462 | 0.0011661 | 0.0797412 | 0.0062000 | 0.0010729 | 0.0009440 |
| 1416 | 0.0010539 | 0.0003276 | 0.0023147 | 0.0033939 | 0.0436969 | 0.0756853 | 2911 | 0 | 0 | 0.0004225 | 0.0007143 | 0.0017709 | 0.0029193 |
| 1417 | 0.0077768 | 0.0008684 | 0.0018469 | 0.0014845 | 0.0281775 | 0.0307048 | 2912 | 0 | 0 | 0.0003242 | 0.0005615 | 0.0038792 | 0.0056539 |
| 1418 | 0.0049297 | 0.0004853 | 0.0094587 | 0.0021356 | 0.0171044 | 0.0180243 | 2913 | 0 | 0 | 0.0001513 | 0.0001678 | 0.0022592 | 0.0018677 |
| 1420 | 0.0256923 | 0.0078409 | 0.0123588 | 0.0015035 | 0.0228676 | 0.0088404 | 2914 | 0 | 0 | 0.0002174 | 0.0003766 | 0.0012510 | 0.0021667 |
| 1421 | 0.0129485 | 0.0012551 | 0.0084313 | 0.0016184 | 0.0137454 | 0.0223733 | 2915 | 0 | 0 | 0.0001067 | 0.0001470 | 0.0054819 | 0.0066289 |
| 1422 | 0.0078802 | 0.0018910 | 0.0060468 | 0.0021233 | 0.0813556 | 0.0681405 | 2916 | 0 | 0 | 0 | 0 | 0.0041247 | 0.0036105 |
| 1423 | 0.0070940 | 0.0007981 | 0.0053212 | 0.0014374 | 0.0705585 | 0.0728304 | 2917 | 0 | 0 | 0.0002746 | 0.0004757 | 0.0000855 | 0.0001482 |
| 1424 | 0.0008130 | 0.0004527 | 0.0016318 | 0.0028264 | 0.0670937 | 0.0406387 | 2918 | 0 | 0 | 0.0000068 | 0.0000117 | 0.0017541 | 0.0030381 |
| 1425 | 0.0110881 | 0.0015407 | 0.0048686 | 0.0025159 | 0.0500578 | 0.0523645 | 2919 | 0 | 0 | 0.0002970 | 0.0002581 | 0.0040739 | 0.0035841 |
| 1426 | 0.0068704 | 0.0017598 | 0.0146260 | 0.0013185 | 0.1600268 | 0.0733184 | 2920 | 0 | 0 | 0.0001177 | 0.0002038 | 0.0014027 | 0.0024295 |
| 1429 | 0.0081553 | 0.0002773 | 0.0096982 | 0.0051245 | 0.1565784 | 0.0591747 | 2921 | 0 | 0 | 0.0000153 | 0.0000264 | 0.0005847 | 0.0005410 |
| 1430 | 0.0176537 | 0.0036880 | 0.0113208 | 0.0086165 | 0.1293613 | 0.1228146 | 2922 | 0 | 0 | 0.0011449 | 0.0010408 | 0.0014810 | 0.0021917 |
| 1431 | 0.0009808 | 0.0002353 | 0.0018923 | 0.0007905 | 0.0455805 | 0.0786438 | 2923 | 0 | 0 | 0.0000339 | 0.0000587 | 0.0009080 | 0.0008282 |
| 1432 | 1.6769521 | 0.1358782 | 1.1975277 | 0.1253814 | 2.7859320 | 0.9500725 | 2924 | 0 | 0 | 0.0001273 | 0.0001704 | 0.0059730 | 0.0021195 |
| 1434 | 0.0092783 | 0.0006747 | 0.0039659 | 0.0006545 | 0.0676869 | 0.0736203 | 2925 | 0 | 0 | 0 | 0 | 0.0038295 | 0.0022180 |
| 1435 | 0.0082659 | 0.0014217 | 0.0013992 | 0.0004648 | 0.0525379 | 0.0047490 | 2927 | 0 | 0 | 0 | 0 | 0.0046161 | 0.0041805 |
| 1436 | 1.2706683 | 0.0386444 | 1.4614020 | 0.1126878 | 0.4778224 | 0.2027137 | 2928 | 0 | 0 | 0 | 0 | 0.0073779 | 0.0026917 |
| 1437 | 1.0759630 | 0.1887580 | 1.2882017 | 0.0692693 | 0.6910859 | 0.1672701 | 2929 | 0 | 0 | 0 | 0 | 0.0034361 | 0.0047670 |
| 1438 | 0.8194347 | 0.1330127 | 1.0527987 | 0.2154229 | 1.6659825 | 0.3815178 | 2930 | 0 | 0 | 0.0000474 | 0.0000822 | 0.0013358 | 0.0023136 |
| 1439 | 1.7342303 | 0.3179971 | 1.6107447 | 0.4184550 | 0.8260412 | 0.2035492 | 2931 | 0.0000534 | 0.0000925 | 0 | 0 | 0.0026675 | 0.0042280 |
| 1440 | 1.8026610 | 0.0431962 | 1.6989601 | 0.3216126 | 1.7501626 | 0.7554963 | 2932 | 0 | 0 | 0.0000267 | 0.0000462 | 0.0028965 | 0.0035536 |
| 1441 | 1.1464581 | 0.0708931 | 1.0058035 | 0.0682755 | 0.8334941 | 0.3697624 | 2933 | 0 | 0 | 0.0001890 | 0.0003273 | 0.0026844 | 0.0029192 |
| 1442 | 0.0362756 | 0.0077594 | 0.0340583 | 0.0056199 | 0.0750984 | 0.0658393 | 2934 | 0 | 0 | 0 | 0 | 0.0039800 | 0.0044691 |
| 1443 | 0.0123365 | 0.0020441 | 0.0100571 | 0.0043855 | 0.0858145 | 0.0394117 | 2935 | 0 | 0 | 0 | 0 | 0.0034927 | 0.0026749 |
| 1445 | 0.0164562 | 0.0033337 | 0.0105157 | 0.0020924 | 0.0136607 | 0.0060145 | 2936 | 0 | 0 | 0 | 0 | 0.0062780 | 0.0054382 |
| 1446 | 0.0096392 | 0.0009152 | 0.0065398 | 0.0018722 | 0.0770297 | 0.0268303 | 2937 | 0 | 0 | 0.0001526 | 0.0002643 | 0.0007357 | 0.0004362 |
| 1447 | 0.0244236 | 0.0021775 | 0.0291058 | 0.0051112 | 0.0802453 | 0.0521987 | 2938 | 0 | 0 | 0.0000992 | 0.0001718 | 0.0001571 | 0.0002721 |
| 1448 | 0.0217292 | 0.0035931 | 0.0201936 | 0.0066141 | 0.0637462 | 0.0648064 | 2939 | 0 | 0 | 0.0000576 | 0.0000998 | 0.0028504 | 0.0007973 |
| 1449 | 0.3703416 | 0.0561277 | 0.4315851 | 0.0711029 | 0.3525834 | 0.1473920 | 2940 | 0.0000181 | 0.0000314 | 0.0000636 | 0.0000692 | 0.0035870 | 0.0045199 |
| 1450 | 0.0067031 | 0.0002325 | 0.0197868 | 0.0010769 | 0.0079066 | 0.0118427 | 2941 | 0 | 0 | 0.0003521 | 0.0003943 | 0.0053909 | 0.0027417 |
| 1451 | 0.0155757 | 0.0030173 | 0.0223585 | 0.0020872 | 0.1926125 | 0.0752902 | 2942 | 0 | 0 | 0.0003013 | 0.0005219 | 0.0033073 | 0.0028649 |
| 1452 | 0.8230353 | 0.0853763 | 0.8026486 | 0.0863983 | 0.1507741 | 0.0394820 | 2943 | 0 | 0 | 0.0002389 | 0.0004137 | 0.0033973 | 0.0029948 |
| 1453 | 0.1318978 | 0.0224653 | 0.2025793 | 0.0162863 | 0.1062978 | 0.0079086 | 2944 | 0.0021967 | 0.0005349 | 0.0071147 | 0.0008935 | 0.0039586 | 0.0006191 |
| 1454 | 0.0000171 | 0.0000296 | 0.0003218 | 0.0003808 | 0 | 0 | 2945 | 0 | 0 | 0.0005185 | 0.0003487 | 0.0028645 | 0.0018528 |
| 1455 | 0.0401872 | 0.0119029 | 0.3701966 | 0.0465404 | 0.1888732 | 0.0226406 | 2946 | 0 | 0 | 0 | 0 | 0.0008874 | 0.0015370 |
| 1456 | 0.2449640 | 0.0433679 | 0.3304413 | 0.0233954 | 0.3596319 | 0.1684708 | 2947 | 0 | 0 | 0.0002103 | 0.0003643 | 0.0013668 | 0.0017579 |
| 1459 | 0.2391696 | 0.0179026 | 0.2162631 | 0.0238057 | 0.1345462 | 0.0156782 | 2948 | 0.0008787 | 0.0001085 | 0.0011029 | 0.0003238 | 0.0056271 | 0.0075298 |
| 1460 | 0.5431378 | 0.0747152 | 0.6709769 | 0.0180195 | 0.4960652 | 0.0387229 | 2949 | 0 | 0 | 0.0002449 | 0.0003644 | 0.0088685 | 0.0027423 |
| 1462 | 0.5486038 | 0.0395963 | 0.5959308 | 0.0865567 | 0.3753196 | 0.0222590 | 2950 | 0 | 0 | 0 | 0 | 0.0041176 | 0.0042734 |
| 1463 | 1.1745388 | 0.1384558 | 1.1169411 | 0.0293916 | 0.3646308 | 0.1622491 | 2951 | 0 | 0 | 0.0000648 | 0.0001123 | 0.0051045 | 0.0011025 |
| 1465 | 0.0505800 | 0.0095949 | 0.0618641 | 0.0143722 | 0.0203385 | 0.0069790 | 2952 | 0 | 0 | 0.0002780 | 0.0003366 | 0.0044292 | 0.0040755 |
| 1466 | 0.5597672 | 0.1120257 | 0.3788373 | 0.0657574 | 0.3404441 | 0.1540589 | 2953 | 0 | 0 | 0.0000458 | 0.0000793 | 0.0040634 | 0.0026033 |
| 1467 | 0.5179472 | 0.0305329 | 0.4425254 | 0.0094478 | 0.3304933 | 0.0285065 | 2954 | 0 | 0 | 0.0003967 | 0.0006871 | 0.0032936 | 0.0038747 |
| 1468 | 0.2442021 | 0.0606409 | 0.2205584 | 0.0286144 | 0.2542248 | 0.0201375 | 2955 | 0.0005453 | 0.0000850 | 0.0008395 | 0.0003224 | 0.0019053 | 0.0014105 |
| 1469 | 0.6598824 | 0.0711910 | 0.5973092 | 0.0814783 | 0.5347927 | 0.0877895 | 2956 | 0.0003284 | 0.0003326 | 0.0002793 | 0.0004837 | 0.0211403 | 0.0366160 |
| 1470 | 0.5154500 | 0.0401134 | 0.4196503 | 0.0758474 | 0.2334831 | 0.0605385 | 2957 | 0 | 0 | 0 | 0 | 0.0535077 | 0.0515463 |
| 1471 | 0.4421111 | 0.0297634 | 0.3776197 | 0.0669732 | 0.1355433 | 0.1187545 | 2958 | 0 | 0 | 0 | 0 | 0.0534843 | 0.0464883 |
| 1474 | 0.4187362 | 0.0370402 | 0.3662703 | 0.0514368 | 0.2939030 | 0.0189036 | 2959 | 0 | 0 | 0 | 0 | 0.0405418 | 0.0081317 |
| 1475 | 0.4351635 | 0.0271134 | 0.4775194 | 0.1070030 | 0.5611848 | 0.0826185 | 2960 | 0 | 0 | 0 | 0 | 0.0268907 | 0.0465761 |
| 1476 | 0.1234005 | 0.0116981 | 0.2945880 | 0.0267399 | 0.2212851 | 0.0153789 | 2961 | 0 | 0 | 0 | 0 | 0.0132501 | 0.0229498 |
| 1480 | 0.1188290 | 0.0326226 | 0.1996171 | 0.0496048 | 0.3612866 | 0.0237007 | 2962 | 0.0029148 | 0.0011618 | 0.0081817 | 0.0013680 | 0.0190160 | 0.0329367 |
| 1481 | 0.0002826 | 0.0003823 | 0.0006922 | 0.0007397 | 0.0002372 | 0.0004109 | 2963 | 0.0000368 | 0.0000638 | 0 | 0 | 0 | 0 |
| 1482 | 0.1552174 | 0.0266779 | 0.2351971 | 0.0214493 | 0.2468712 | 0.0239869 | 2964 | 0.0000233 | 0.0000237 | 0.0000750 | 0.0000671 | 0.0345806 | 0.0335201 |
| 1483 | 0.0004804 | 0.0001445 | 0.0007594 | 0.0001764 | 0.0108597 | 0.0120584 | 2965 | 0 | 0 | 0 | 0 | 0.0147787 | 0.0255975 |
| 1485 | 0 | 0 | 0 | 0 | 0.0092575 | 0.0088783 | 2966 | 0 | 0 | 0 | 0 | 0.0109951 | 0.0172768 |
| 1486 | 0 | 0 | 0 | 0 | 0.0028543 | 0.0049437 | 2967 | 0.0001165 | 0.0002017 | 0.0009887 | 0.0002295 | 0.0744903 | 0.0845345 |
| 1487 | 0 | 0 | 0 | 0 | 0.0156314 | 0.0138608 | 2968 | 0 | 0 | 0 | 0 | 0.0259785 | 0.0449960 |
| 1488 | 0 | 0 | 0 | 0 | 0.0116046 | 0.0200998 | 2969 | 0 | 0 | 0 | 0 | 0.0295550 | 0.0073847 |
| 1489 | 0 | 0 | 0 | 0 | 0.0240920 | 0.0219922 | 2970 | 0 | 0 | 0 | 0 | 0.0038118 | 0.0066022 |
| 1490 | 0.0001971 | 0.0001366 | 0.0004311 | 0.0005511 | 0.0128171 | 0.0120923 | 2971 | 0 | 0 | 0 | 0 | 0.0034879 | 0.0060413 |
| 1491 | 0 | 0 | 0 | 0 | 0 | 0 | 2972 | 0 | 0 | 0.0000318 | 0.0000551 | 0 | 0 |
| 1492 | 0.0001602 | 0.0001126 | 0.0002620 | 0.0003662 | 0.0208177 | 0.0183588 | 2973 | 0 | 0 | 0 | 0 | 0.0539533 | 0.0421255 |
| 1493 | 0 | 0 | 0 | 0 | 0.0075576 | 0.0130902 | 2974 | 0 | 0 | 0 | 0 | 0.0047027 | 0.0081453 |
| 1494 | 0 | 0 | 0 | 0 | 0.0201115 | 0.0175185 | 2975 | 0.5060688 | 0.1143204 | 0.7881679 | 0.0500019 | 0.3087274 | 0.0547200 |
| 1495 | 0.0009526 | 0.0004679 | 0.0019682 | 0.0017312 | 0.0018253 | 0.0019164 | 2976 | 0 | 0 | 0.0004428 | 0.0003835 | 0.0299059 | 0.0259000 |
| 1496 | 0 | 0 | 0 | 0 | 0.0062954 | 0.0109039 | 2977 | 0 | 0 | 0 | 0 | 0.0059492 | 0.0103043 |
| 1497 | 0 | 0 | 0 | 0 | 0.0125662 | 0.0109712 | 2978 | 0 | 0 | 0.0000772 | 0.0001337 | 0.0163306 | 0.0282854 |
| 1498 | 0 | 0 | 0 | 0 | 0 | 0 | 2979 | 0.0008297 | 0.0006033 | 0.0003828 | 0.0002474 | 0.0167764 | 0.0235896 |
| 1499 | 0 | 0 | 0 | 0 | 0.0232621 | 0.0179497 | 2980 | 0 | 0 | 0.0005189 | 0.0003060 | 0.0306022 | 0.0398638 |
| 1500 | 0 | 0 | 0 | 0 | 0.0063550 | 0.0110071 | 2981 | 0 | 0 | 0 | 0 | 0.0605622 | 0.0638594 |
| 1501 | 0 | 0 | 0 | 0 | 0.0104711 | 0.0102432 | 2982 | 0 | 0 | 0.0000294 | 0.0000509 | 0.1130838 | 0.0589247 |
| 1502 | 0 | 0 | 0 | 0 | 0.0057084 | 0.0098872 | 2983 | 0 | 0 | 0.0006916 | 0.0003873 | 0.0505178 | 0.0531373 |
| 1503 | 0 | 0 | 0 | 0 | 0.0137267 | 0.0120369 | | 1.6864822 | 0.2023517 | 1.8296691 | 0.2622726 | 1.3533184 | 0.3489609 |
| 1504 | 0.0001844 | 0.0000326 | 0 | 0 | 0.0022244 | 0.0030548 | | 1.2152631 | 0.0715746 | 1.9253447 | 0.2295974 | 1.4055953 | 0.5005810 |
| 1505 | 0.0007358 | 0.0001360 | 0.0005113 | 0.0004625 | 0.0178155 | 0.0111417 | | 0.4541910 | 0.0455837 | 0.7196244 | 0.2152985 | 0.3611981 | 0.1391544 |

ND: not detected

### INCORPORATION BY REFERENCE

[1726] All publications, patents, and patent applications mentioned in this specification are herein incorporated by reference to the same extent as if each individual publication, patent, or patent application was specifically and individually indicated as being incorporated by reference herein.

The invention claimed is:

1-222. (canceled)

223. A circular RNA polynucleotide comprising a translation initiation element (TIE), wherein the TIE comprises a sequence having at least 85% sequence identity to a sequence selected from SEQ ID NOs: 1-2983 and 3282-3287, or a fragment thereof.

224. The circular RNA polynucleotide of claim 223, wherein the TIE comprises at least one internal ribosome entry site (IRES), or a fragment thereof.

225. The circular RNA polynucleotide of claim 224, wherein the IRES or fragment thereof comprises a sequence having at least 85% sequence identity to a sequence selected from SEQ ID NOs: 75, 77, 137, 532, 566, 582, 648, 680, 693, 752, 785, 787, 791, 793, 820, 823, 839, 840, 843, 852, 857, 861, 862, 863, 864, 871, 874, 876, 922, 959, 983, 984, 1015, 1017, 1023, 1026, 1031, 1041, 1047, 1059, 1068, 1134, 1168, 1169, 1171, 1177, 1178, 1179, 1180, 1189, 1192, 1193, 1198, 1210, 1216, 1218, 1230, 1263, 1276, 1280, 1282, 1284, 1287, 1346, 1354, 1364, 1367, 1370, 1432, 1438, 1440, 2278, 2285, 2465, 2601, 2615, 2616, 2617, 2618, 2627, 2667, 2681, 2742, 2746, 2758, 2777, 2778, 3282, 3283, 3286, and 3287, or a fragment thereof.

226. The circular RNA polynucleotide of claim 224, wherein the TIE comprises a sequence having at least 85% sequence identity to a sequence selected from SEQ ID NOs: 650, 799, 1284, 2278; or SEQ ID NOs: 917, 1065, 1068, 1078, 1131, 1136, 1141, 1163, 1180, 1181, 1212; or SEQ ID NOs: 842, 849, 1164, 1210, 1215, 1216, 2779; or a fragment thereof.

227. The circular RNA polynucleotide of claim 224, wherein the TIE comprises a sequence selected from:
a. GGGTGAAGGATGCCCAGAAGGTACCCGTAGGTAACCTTAAGAGACTA TGGATCTGATCTGGGG of SEQ ID NO: 2278,
b. TTAAAACAGCTCTGGGGTTGTTCCCACCCCAGAGGCCCACGCGGCGGC CAGTACACCGGTATCACGGTACCCTTGTACGCCTGTTTTATACTCCCTT CCCCGTAACTTAGAAG of SEQ ID NO: 1180 or a sequence having no more than 4 mismatches thereto, or
c. CGATGAGTCTGGACGATCCTCACTGGCGACAGTGGTCCAGGCTGCGTT GGCGGCCTACCTATGGCCCAAAGCCATAGGACGCTAGTTGTGAACAA GGTGTGAAGAGCCTATTGAGCTAC of SEQ ID NO: 1210 or a sequence having no more than 5 mismatches thereto.

228. The circular RNA polynucleotide of claim 223, wherein the TIE comprises at least one natural or synthetic aptamer sequence or fragment thereof.

229. The circular RNA polynucleotide of claim 228, wherein the aptamer or a fragment thereof comprises a sequence having at least 95% sequence identity to a sequence selected from SEQ ID NOs: 3266-3268.

230. The circular RNA polynucleotide of claim 223, wherein the TIE comprises at least one natural or synthetic UTR sequence.

231. The circular RNA polynucleotide of claim 223, comprising a binding domain to an IRES transacting factor (ITAF), optionally wherein the binding domain is selected from a polyA region, a polyC region, a poly AC region, a polyprimidine tract, or a combination or variant thereof, and optionally wherein the ITAF is selected from a poly(rC)-binding protein 1 (PCBP1), PCBP2, PCBP3, PCBP4, poly(A)-binding protein 1 (PABP1), polyprimidine-tract binding protein (PTB), Argonaute protein family member, HNRNPK (heterogeneous nuclear ribonucleoprotein K protein), or La protein, or a fragment or combination thereof.

232. The circular RNA polynucleotide of claim 223, further comprising a sequence encoding for a therapeutic protein, optionally selected from a chimeric antigen receptor (CAR), T-cell receptor (TCR), B-cell receptor (BCR), immune cell activation or inhibitory receptor, recombinant fusion protein, chimeric mutant protein, or fusion protein, an antibody, nanobody, non-antibody protein, immune modulatory ligand, receptor, structural protein, growth factor ligand or receptor, hormone or hormone receptor, transcription factor, checkpoint inhibitor or agonist, Fc fusion protein, anticoagulant, blood clotting factor, chaperone protein, antimicrobial protein, structural protein, biochemical enzyme, tight junction protein, mitochondrial stress response, cytoskeletal protein, metal-binding protein, or small molecule.

233. The circular RNA polynucleotide of claim 223, comprising at least one noncoding element.

234. The circular RNA polynucleotide of claim 223, further comprising a post-splicing fragment of a self-splicing intron, optionally derived from a bacterial phage, viral vector, organelle genome, nuclear rDNA gene, an anabaena bacterium, T4 phage virus, twort bacteriophage, tetrahymena, or azoarcus bacterium, wherein the fragment is optionally an exon fragment.

235. The circular RNA polynucleotide of claim 223, comprising at least one modified nucleotide, optionally selected from 5-methylcytidine, 5-methoxyuridine, 1-methyl-pseudouridine, N6-methyladenosine, and/or pseudouridine.

236. The circular RNA polynucleotide of claim 223, having: (a) an in vivo duration of therapeutic effect in humans of at least 20 hours; (b) a functional half-life of at least 6 hours; (c) a duration of therapeutic effect in a human cell greater than or equal to that of an equivalent linear RNA polynucleotide comprising the same expression sequence; and/or (d) an in vivo duration of therapeutic effect in human greater than that of an equivalent linear RNA polynucleotide having the same expression sequence.

237. A pharmaceutical composition comprising the circular RNA polynucleotide of claim 223, a pharmaceutically acceptable salt, buffer, diluent, or combination, and optionally a transfer vehicle, wherein the transfer vehicle optionally comprises a nanoparticle, and wherein the nanoparticle optionally comprises one or more cationic lipids, non-cationic lipids, ionizable lipids, poly β-amino esters, a lipid nanoparticle, a core-shell nanoparticle, a biodegradable nanoparticle, a biodegradable lipid nanoparticle, a polymer nanoparticle, a polyplex, or a biodegradable polymer nanoparticle.

238. A method for expressing a therapeutic protein in a cell, comprising contacting the cell with the circular RNA polynucleotide of claim 223 or a pharmaceutical composition thereof, optionally wherein the cell is selected from an immune cell, a hepatocyte, or a myocyte.

239. A method of treating a subject in need thereof comprising administering a therapeutically effective amount of the circular RNA polynucleotide of claim 223 or a pharmaceutical composition thereof.

240. The method of claim 239, wherein the subject has
a. a cancer selected from the group consisting of: acute myeloid leukemia (AML); alveolar rhabdomyosarcoma; B cell malignancies; bladder cancer (e.g., bladder carcinoma); bone cancer; brain cancer (e.g., medulloblastoma and glioblastoma multiforme); breast cancer; cancer of the anus, anal canal, or anorectum; cancer of the eye; cancer of the intrahepatic bile duct; cancer of the joints; cancer of the neck; gallbladder cancer; cancer of the pleura; cancer of the nose, nasal cavity, or middle ear; cancer of the oral cavity; cancer of the vulva; chronic lymphocytic leukemia; chronic myeloid cancer; colon cancer; esophageal cancer, cervical cancer; fibrosarcoma; gastrointestinal carcinoid tumor; head and neck cancer (e.g., head and neck squamous cell carcinoma); Hodgkin lymphoma; hypopharynx cancer; kidney cancer; larynx cancer; leukemia; liquid tumors; lipoma; liver cancer; lung cancer (e.g., non-small cell lung carcinoma, lung adenocarcinoma, and small cell lung carcinoma); lymphoma; mesothelioma; mastocytoma; melanoma; multiple myeloma; nasopharynx cancer; non-Hodgkin lymphoma; B-chronic lymphocytic leukemia; hairy cell leukemia; Burkitt's lymphoma; ovarian cancer; pancreatic cancer; cancer of the peritoneum; cancer of the omentum; mesentery cancer; pharynx cancer; prostate cancer; rectal cancer; renal cancer; skin cancer; small intestine cancer; soft tissue cancer; solid tumors; synovial sarcoma; gastric cancer; teratoma; testicular cancer; thyroid cancer; and ureter cancer, or
b. an autoimmune disorder selected from scleroderma, Grave's disease, Crohn's disease, Sjogren's disease, multiple sclerosis, Hashimoto's disease, psoriasis, myasthenia gravis, autoimmune polyendocrinopathy syndromes, Type I diabetes mellitus (TIDM), autoimmune gastritis, autoimmune uveoretinitis, polymyositis, colitis, thyroiditis, and the generalized autoimmune diseases typified by human Lupus.

241. A method of purifying the circular RNA polynucleotide of claim 223, comprising:
a. (i) contacting a composition comprising linear RNA and circular RNA with a binding agent that preferentially binds to the linear RNA over the circular RNA; and (ii) separating RNA bound to the binding agent from RNA that is not bound to the binding agent; or
b. hybridizing an oligonucleotide conjugated to a solid surface with an affinity sequence present in a precursor RNA polynucleotide.

242. A method of making the circular RNA polynucleotide of claim 223, comprising circularizing a precursor RNA polynucleotide formed by transcribing a vector or DNA comprising a PCR product, a linearized plasmid, non-linearized plasmid, linearized minicircle, a non-linearized minicircle, viral vector, cosmid, ceDNA, or an artificial chromosome.

243. The precursor RNA polynucleotide for use in the method of claim 242, wherein the precursor RNA polynucleotide comprises:
a. a 5′ enhanced intron element,
b. a 5′ enhanced exon element,
c. a core functional element,
d. a 3′ enhanced exon element, and
e. a 3′ enhanced intron element,
wherein the core functional element comprises:
i. a translation initiation element (TIE) comprising a sequence having at least 85% sequence identity to a sequence selected from SEQ ID NOs: 1-2983 and 3282-3287, or a fragment thereof,
ii. a coding or noncoding element, and
iii. optionally, a stop codon or a stop cassette.

244. A method of making a translation initiation element (TIE) comprising:
a. obtaining a viral untranslated region (UTR);
b. determining the functional unit of the UTR capable of binding to an initiation factor and/or initiating translation by progressively deleting sequence;
c. removing non-functional units of the UTR; and
d. optionally, modifying the ends of the UTR.

The application's sequence listing, which the Patent Office published only in electronic form, follows.

SEQUENCE LISTING (3287 sequences)

SEQ ID NO: 1 - DNA, 367 bp, Unknown
  Description of Unknown: Human parechovirus 4 strain R12644/1999/HUN 5' UTR; and polyprotein1 sequence
tgaggtgtctgatgaggtgtgggaacttattggaagtgattacttgctgcaaagcatcctattgccagcggatcaacacctggtgacaggtgcccctggggccaaaagccaaggtttaacagaccctctaggattggtttaaacctgagtagtcatggaaaatacttagtacctgccaatttggtaacagtgcaaacactagttgtaaggcccacgaaggatgcccagaaggtacccgtaggtaacaagtgacactgtggatctgatctggggccatctacctctatcttggtgaggtggttaaaaaacgtctagtgggccaaacccaggggggatccctggtttcctttatcataccactatcatt

SEQ ID NO: 2 - DNA, 368 bp, Parechovirus A
tgagacgtctgatgacgtgtgggaacttattggaagtaacaatttgctgcaaagcatcctattgccagcgggtgaacacctggtaacaggtgcctctggggccaaaagccaaggtttaacagaccctctaggattggttaaaacctgaattgttatggaaaatatttagtacctgccaatttggtagtattgcaaacactagttgtacggcccacgaaggatgcccagaaggtacccgaagttaacaagtgacactatggatctgatctggggccaactacctctatcttggtgagttggttaaaaaacgtctagtgggccaaacctgggggggatccccagtttccttttattttatcattgccact

SEQ ID NO: 3 - DNA, 373 bp, Unknown
  Description of Unknown: unclassified Parechovirus sequence
tttgtaagacgtctggtgacgtgtgggaacttattggaaataacatattgctgcaaagcatcctattgccagcggaacaacacctggtaacaggtgcctctggggccaaaagccaaggtttaacagaccctctaggattggtttaaaacctgatatgttgtggaagatacttagtacctgttgatctggtagtagtgcaggcactagttgtaaggcccacgaaggatgcccagaaggtacccgtaggtaacaagtgccactatggatctgatctggggccaggtacctctatcttggtgacctggttaaaaaacgtctagtgggccaaacccgggggggatccccggtttctttttattttattaatagcatt

SEQ ID NO: 4 - DNA, 389 bp, Pegivirus B
ggcatgggtccactggcgcgctgacgaaggtgcgcgtgctttgtaggcacggtccacaggtgtgcccactaccggtgtgaataagtgggggtctggagcgtcagaccttaaacctagtggtgcctgggatcgcaacgtggctcacgtacgccaacgccgcttaaaaccttcgggacagctatgcgggttgacaatggcagtgaggcgcggcaccgaccgtggatccggaatcggtgtgcgagttccccagtcgctagcccgtaagggcaagcatgggtccccccagctggcgcagcgctacatgcggcaagaggaagaaccttcgggtgacctcggggggaatgtccgttctcaatgagctgaggagcatcgcacggctcgtcgccaag

SEQ ID NO: 5 - DNA, 398 bp, Parechovirus D
ctacctatcctacttcttgtatatcattctttgctattaagtagggatcccctgctatttgcaggtgtgcttgcagtggagctacacaactgtggccgaggcacggctcgcccccgtgtattaggactcttttgtgccactgttaagcggacgtatgtcagttgagtgatatctcagtgataaaccatgagtacatggtaatcctggcgtggactcattgggacggtatttcctatcccgtagactccttgtagccaggtgggcatgcccaatcacaatggtagcacctctcatgggagtgagggggcctgagttagtactcagtcacacagcctgatagggtagcggctctgctactgaccagcgtctttaaataactgagagctgtttattaacct

SEQ ID NO: 6 - DNA, 419 bp, Pegivirus B
gtggtaaatcccggctacggtggatccatgaatagcgtagggtgtgccaccactgctgggtgggacgacgcaggatcaaaggggacggcacggtccacaggtgagccaaccggtgtgaatatggcacgtctttgggcatgacgttaaactgagacgccctgcaggatgacaacatggctgagggttgcggaacgccgcttaaaaccattcgtggacagcgatgcgggttgacaatccgtcctcaggcgtggcggccatattggttggtcgtgtcagttcccttcagggtgcgcttcggcgaagcatggccccccccagctggcgcaggcccacatgcggcaagacgaaaaatccttcgggtgacgtcgggggggattttccctttacctacatgcatgttgttccgtttcggcgcaacc

SEQ ID NO: 7 - DNA, 421 bp, Parechovirus A
tctattagtgagataccacgcttgtggaccttatgctcacacagccatcctctagttagttggtgaggtgtctggtgacgtgtgggaacttaccggaagcattattttgctgtaaggcatccattagccagcggaacaacacctggtaacaggtgcccctggggccaaaagccaaggtttaacagaccctaatggattggttcaaacctggaataatgtggaaggtacttagtacctgccgaactggtagcaatgccaacactagttgtaaggcccacgaaggatgcccagaaggtacccgtaggtaacaagagacactatggatctgatctggggccaactacctctatcttggtgagttggttaaaaaacgtctagtgggccaaacccaggggggatccctggtttcctaatttttact

SEQ ID NO: 8 - DNA, 426 bp, Unknown
  Description of Unknown: unclassified Pestivirus sequence
gtataagggatgggatccttgtacatttcatacctctaccgaacagtatttgggagttctttttacctgccgtacagtattgggatttaaacaactaaatgtttacaaatcacgtgtgtggtggcggggatagaccgtgccagcggttgtgtaccagcaatcacaaacaacacgtggactgcaatccaggagagcacctaggtctgttaagttgtgagtacacgacattcgtcaatgagtcagctggtaaggatcacccacctggatactcatgtggacgagggagtttcccaaacagtaacctactctgggggaggggtcccccagagacaatttgtctcaaatatgggataagttggggtgtgctgcctgacagggtctcggctgatagcctggaaagcagtataatatcagttgaattggcat

SEQ ID NO: 9 - DNA, 436 bp, Unknown
  Description of Unknown: unclassified Parechovirus sequence
ataattctatcagtgggataccacgcttgtggatcttatgcccacacagccatcctctagtaagtttgtaagacgtctgatgacgtgtgggaacttattggaagtgacattttgctgcaaagcatcctattgccagcggaataacacctggtaacaggtgcctctggggccaaaagccaaggtttaacagaccctttaggattggtgttaacctgaagtgttatggaaaatatttagtacctgctgatttggtagtaatgcaaacactagttgtaaggcccacgaaggatgcccagaaggtacccgtaggtaacaagagacactatggatctgatttggggccaactacctctattaaggtgagttggttaaaaaacgtctagtgggccaaacccaggggggatccctggtttccttttattttactacattcaac

SEQ ID NO: 10 - DNA, 439 bp, Parechovirus A
tgccataactctattagtgagataccatgcttgtggaacttatgctcacacagccatcctctagtaagtttgtaagacgtctggtgacgtgtgggaacttgtgggaatcaatgccttgctgtaaagcatccattagccagcggacaaacacctggtaacaggtgcctctggggccgaaagccaaggtttaacagaccctaatggattggttcaaacctgagacattgtggaacacacttagtacctgctaatctggtagtaatgcaaacactagttgtaaggcccacgaaggatgcccagaaggtacctgtaggtaacaagtgacactatggatctgatctggggccagttacctctatcttggtgaactggttaaaaaacgtctagtgggccaaacccaggggggatccctggtttcctttttattttactagtcatt

SEQ ID NO: 11 - DNA, 441 bp, Parechovirus A
cataactctattagtgagataccatgcttgtggaccttatgctcacacagccatcctctagtgagtttgcaagacgtctgatgacgtgtgggaacttaatggaaacaatatcttgctataaagcatcttactgccagcggaacaacacctggtgacaggtgcctctggggccaaaagccaaggtttaacagaccctttaagattggttcaaacctgaggtattgtggaaattatttagtacctgccgatttggtagtagtgcaaacactagttgtaaggcccacgaaggatgcccagaaggtacccgtaggtaacatgtgacactatggatctgatctggggccaactacctctatcaaggtgagttggttaaaaaacgtctagtgggccaaacccaggggggatccctggtttcctttatcttatcacacaattatcatt

SEQ ID NO: 12 - DNA, 471 bp, Unknown
  Description of Unknown: Kobuvirus cattle/Kagoshima-1-22-KoV/2014/JPN genomic RNA, nearly1 sequence
catccccaatatgttcggtgaggaatgctaccacgtaactattagtgaacccattgactgttctgccctggcaaggctatagagtacagtgttccgctgtggatgccgtcctggtaacaggatccccagtgtgtgtagctgtatgttcaacttcggttgttcacagtccttggtctagcttttagtgaaatggtgtgcgccatatccctacatttgggtgccacctctcaacccctaggaatgctaggaaggtaccccaccctccggtgggatctgatcctaggctaattgtctatggggttgtttccttttcttttcaccactcattactggctcacagattgtttgttgtgttccctgctctctctagctcccaacacggcacacagtctcagccacaccgcctttgcaaacgactaccagatttgtttctttgactcctctgattctcacatcttcactgaaccagac

SEQ ID NO: 13 - DNA, 481 bp, Unknown
  Description of Unknown: unclassified Avihepatovirus sequence
gttgggtttacgtaagtattacccaaccctcctttcaacgtctggcccacgatacgggccaccctttcctatctcctctctttccaagtaagatattttattggttaactgacctctgtgcggcacgacaatgatgtggacaagtgttttacttaggtggtttagccagccatttcctcggcaatagcttctaggagaggagaaatggtaggtgcaacctggtaatggttctcctgaaatcgtccagtagggaggatcctcttccagataattgtactgactaggtgaagtagactggactagctgtgaggtccggggccagcattgctataccccctctaatccggcgtggatttccggccattggatagagcttacagctagcagggtattggggtaaccctgttgatccagactcctgataaggggaactgcctgtttcacgacccacctagtataaaatacaggctgtatttatgaa

SEQ ID NO: 14 - DNA, 488 bp, Unknown
  Description of Unknown: Eel picornavirus 1 strain F15/05, complete genome.1 sequence
cacatggaaagcttttcgcttccatgtttacgcacacactctctttgacaccctgttgtatggtgttaaactacaacatttgtctgtctataatcgtttattttgtttaccctatatgtacccaagtatttgattgcttgactcacataagcatcggtaacccatactgttttatgagctactacctctgctgtctacatacattttatatgaatggtttgagctctgcctcaggatcaaacatggtaacatgttcctttggtcagttagaatcttattgtataatctaaggtgtctattagtacgtagaaagttgtaacacatatggggcctgatagccgctatctctgatggatgtaaggtaaccttctttaggtctgatacattctgcacaggatccaattttcggtgccctgtacgagtgcactcttatgcacgaggacgagatatgctacaacccactgcaaatttaaacccaaactttaaca

SEQ ID NO: 15 - DNA, 509 bp, Unknown
  Description of Unknown: unclassified Picornaviridae sequence
ctccccccccttccccttcccgagtaggagattggcatgtatgctctacatgcccgattctctcttgctcactctcttaaatcctggtggcggtctcggattaaacatttatgtcgtatctgggatcgtcttacttggtggtaattcctctgttgcctagggacctccggactgccggattaaaggtctcaacagagggcaatgtacaaggaagtcattatacgctaattaagtatttgatgaatgactagtgtgacagggctgaggaactccccccgggtaaccggtgcctcagcgtccgaaagacacgtggataggatccaccctgttatacccagcacgatgtaatagtcaaatacctctgatttgtgtaggatgtataaattgtgcattgtaaattttgggcgtagagatgctccgaaggtaccccgttttacgggatctgatcggaggctaattacccaatgcgccctaaataacttcatataatttctttttctttattcaaa

SEQ ID NO: 16 - DNA, 519 bp, Unknown
  Description of Unknown: Goose megrivirus isolate W18, complete genome.1 sequence
ttcgggacactggatgggcgacttggtggggctgccactctatcttgacctttcgttactgactttcggatctctgactcctccttgtctcttgcgtttggtccacggacggactaattggaatgtttactggctaagcctcgttctgaaataccctagccaatgggttgtagtaggatcctggtgtttccattaaacctcttccgaccatagtagctagagttatggctgtgtaggatgtgggtaagaccgctttttgcgtatctcccacaagacaccggattatggatgtgtccgctggataaggctcgaaacctcccaactgaaggtggtgctgaaatattgcaagcctaggttgtgtagaggcaagtagatgcctgccgcgacattcgtcttccgcccttttgggttagtagtgtacctacatggacgtggggctgggaatccccaccttgcataacactggttgatagacctgcggctggtcaagttactatggtataaccagttgaaatggct

SEQ ID NO: 17 - DNA, 519 bp, Unknown
  Description of Unknown: unclassified Kobuvirus sequence
accctcttttccggcggcgcaagttcgcgtcgtcgtaagcctggactcccatggtgtacatcggtttccgggcaaatacaagaaccccagttttcctggtaattccttgactgggtcaaagaaataaggaaccagcccctctaacgccagacgagcggctttaaacttgaacttctggcacaatttcttccactaccctttccccaaactcggactgactcactggattttgaccttccccctttgtctgaccactcttttggatctccctccaatatgccggtggtgcctggcggaaaaagcacaagttgtgtgagcaacacccccacaggtctcacggaacggtctgtgcccgcagatctagtacgtgcggatccctggttgcttccactgctcgcctgtgagtagagtaggtgctgggtgtgatgtgtcttcggacacctcgggcatagcattgctcccccgagaatcaagccatcgagatttctctggcctctgaagtcacgcctggacgcgtag

SEQ ID NO: 18 - DNA, 528 bp, Unknown
  Description of Unknown: unclassified Pegivirus sequence
gtcaggtggaaggcctgaaaccgatcctacaattggagagtaaccaacatgctcattaacacctcgggctggctcgaaagccggtgttgggcagatggcagggttcttagggtaaatcccggtctgtctggatccggtatagagctggcactggaggtccactgttggcttgctgaagtgctcagaagattgatggacacggtacacaggtttggatgcaccggtgtgaatagcgtcccgtcaggagcgtctgacgttaaactgagtccccctcaacgatcgcaacatgggattgcgtacggacacgccgccaaaacccttcggggacagctatgcgggttgacaagtccagcagtcgcgtggggcctatattgtttaggcctgcgagttccggtttgggggagccgaaaggcagccatgggggtaccaaggcggcgtcgcgctacaggcggcaaggggaaaaatccttcgggtgacccctggtaccatttttccttattgggtgttatgggtgtcggaaacgccacc

SEQ ID NO: 19 - DNA, 528 bp, Parechovirus A
ttgtgtcaaatttgtagtgtttacagtagttgtagcttgcacgacatccttgttctccggttgggctgtggttgcaaaactatttggtcctagtaaattagaagcatcatctgcaactttggttattatttccccgccaacttcattgccagaaataatattattagcttcagtttctacattagacaaggagagagtatccatagcaccagtagcaacattaactaaatccttgatagactccataatggctgtttaaaattaaaagaaaaccagggatcccccttgggattggtttaaacctgaactactatggaagacatttagtacctgccaatttggtagtagtgcaaacactagttgtaaggcccacgaaggatgcccagaaggtacccgtaggtaacaagagacactatggatctgatctggggccaactacctctatcttggtgagttggttagaaaacgtctagtgggccaaacccgggggggatccccggtttcctttatttaataattagattcatt

SEQ ID NO: 20 - DNA, 531 bp, Unknown
  Description of Unknown: unclassified Pegivirus sequence
gccgggtggaaggcccggaaccgccccaccacctcaactaggtggtaagggtacgtctatcggtccggctggcccgaaaggcggtggatcctgtgtgttagggttcgtaggtggtaaatcccagcacaggtggtaatcgctatagggcaggcttatcccggtgaccgcttccctggatcctggagcgggtcgtggcggcacggtccacaggagtggggcctccggtgtgaataagccctcgtctggagcatcagacgttaaactgagacgtcccgaagagatcggaacgacgccccacgtatggcaacgccgcttaaaacccttcggggacagctatgcgggttgacaatgccagtggggggccgggcccactattgttgtgggctccgagttcctctagggatggccgaaaggcagccatggggccacccaggcggcgccgtgctacaggcggcaaggggaaaaatccttcgggtgaccccgggtggcattccctcccttagcagcatgagtgtggtggtagctgcaacc

SEQ ID NO: 21 - DNA, 537 bp, Parechovirus A
gatatcatcttgcaataagaagagtggggttaagacgcttaaagcatagagacaattttcttttctaacccacatttatgtggggtggcagatggcgtgccatgactctattagtgagataccacgcttgtggaccttatgctcacacagccatcctctagtaagtttgtgagatgtctgatgacgtgtgggaacttattggaagcaacattttgctgtaaagcatcctattgccagcggaacaacacctggtaacaggtgcctctggggccaaaagccaaggtttaacagaccctttaggattggttcaaacctgaaatgctgtggaaaatatttagtacctgccaatttggtagtaatgcaaacactagttgtaaggcccacgaaggatgcccagaaggtacccgtaggtaacaagtgacactatggatctgatctggggccaaatacctctatcttggtgatttggttaaaaaacgtctagtgggccaaacccaggggggatccctggtttccttttattttataatcgctatt

SEQ ID NO: 22 - DNA, 544 bp, Unknown
  Description of Unknown: unclassified Aphthovirus sequence
tggcacaccttacctcgaaacaagctcgtccttttgctgtgcaacacagtctgtcctgttacacttgtgacggctcgcgacactgtttgcatagtgaaatcgaccaagacagcaattccaaatggtgaacctcgaacacccaagctggatccgtagctggacatgttagggtaaggaattcctccctggtaacagggaccttactggccaaaagccctgctctttgagcctagcatgttgttgaccccgaactgtccagtttggttagtacagggaattcatttgttgtggttgttcagaactcgacttctagtgagacagcctaaggatgccctccaggtaccctggggtaacaagtgacacccaggatctgaggaggggatcaccctgcgtgatttaaaaaacttctaagctgtcacggtgaccagaggctggcacctttcacttttaccacttctcaattgatcacaaacaaaggaattacgtaattgcagacccacaaactagttacacgagtactgttcttacttttaatacttgttat

SEQ ID NO: 23 - DNA, 546 bp, Unknown
  Description of Unknown: unclassified Hepacivirus sequence
tgccatagagtggaacgtgtctacattgcgaaaatcaggtgtgaaaggcattgttggagcagaagggtgctgagtcaagttagttgtgttgacagttgttgtagcttgtacgacatccttgttttcaggtgttgaagtcgttgcaaaacaatttggtcccagaacattcgatgcatcatcagccactttggttaacatgtcaccaccagctgcattactggggtttgtgatggtctcattaacagtgttgacagtagagtcaattgtcttagtgattccagtagccatatctgcaacacccttgattgtctccatagctgtgaataaaaataaaaggaaaccagggtcccccctggatttggtaaccgtgcttatactagttgtaaggcccacgaaggatgcccagaaggtacccgtaggtaacaagtgacactatggatctgatctggggccaactacctctatcttggtgagttggttaaaaaacgtctagtgggccaaacccaggggggatccctggtttccttttattttatcataatcact

SEQ ID NO: 24 - DNA, 560 bp, Unknown
  Description of Unknown: unclassified Riboviria sequence
gccgggtggaaggcccggaaccgaccctagggtggaacctggatgagggtgtggaagagactcccccatcggtccgaaagctggtggatggcgtgcggcagggttccgcaggtgggtaaatcccggcacgcttggatccggtataggataggtgggagccgaccggtcgaccccggtctggaccaccacggaagcacctgagcccggcggaagccccgtgggcacggtacacaggttgggcctaccggtgtgaataaggccccgtctcgagcggagacgttaaactgagaggtcctggtggatgggaacccggccctgcgtgttggaacgtcgctaaaacccttaggggacaatttccgaccgcgagttggcaaacctagcaggggcgggggcagtaggatggatctccgatctgctcccagttcccaccagggtcgccgtaaggcaagcatggggcccccaagctggcgcggcgctacacgcggcaagaggaagaaccttcgggtgacctctgggggcatgttggcttttcatgatgatgtgtggttgcagctgcaatc

SEQ ID NO: 25 - DNA, 563 bp, Unknown
  Description of Unknown: unclassified Rabovirus sequence
cctcttttcttggcaaataagatggtggaccaaggtcgtctgtagttgtttggaacatttctttctaatgacttatgtcagcggtgaactcacaccgtaactcttctaccctatccccacacttgtggaactaggaggggatgagtgattcaagtaagtactgtcagaatggtgaaaatgatctgattctgaaacatcatggatccatcgtaagatggggctacacgcctgcggaacaacacatggtaacatgtgccccaggggccaaaagccacggtgataggatcacccgtgtagtttgagatcatatcaatgttcatggtctagtaagatgatttgaaatctaactgagctgatggctaactgcttgtcttattgcggcctaaggatgccctgcaggtacctttagataaccttaagagactattgatctgagcaggggccaaggtggtctttcccagccttggttaaaaagcgtctaagccgtggcagggggcgggaggccccctttcctcccaaactttaatattgattgtatggtgacaactgaaagacatagcaca

SEQ ID NO: 26 - DNA, 570 bp, Unknown
  Description of Unknown: unclassified Parechovirus sequence
ctattaactatagccttgtgcctggtccccactagtcgaaggcatcttgcaataagataagtggaataaggacgcttaaagcacaatgaaagttaacttttctaacccacactatggtgtggggtggcagatggcgtgccataactctattagtgagataccacgcttgtggaccttatgctcacacagccatcctctagtaagtttgtaagacgtctggtgacgtgtgggaacttgtgggaatcaatattttgccgtaaggcatccattagccagcggataaaacacctggtaacaggtgcctctggggccaaaagccaaggtttaacagaccctaatggattggttttgaaacctgaaatattgtggaacacacttagtacctgctgatctggtagttatgcaaacactagttgtagggcccacgaaggatgcccagaaggtacccgtaggtaacaagagaaactatggatctgatctggggctgactactcctatctttgtgagtcagttaaaaaacgtctagtgggccaaacccaggggggatccctggtttcctttaattctatc

SEQ ID NO: 27 - DNA, 589 bp, Bovine rhinitis B virus
cgggtttgctgctttcacatagtaaagcagatagaggttttgtaatggcgcactttacctcgaaacaagctcgttgttttgctgtgtaacacggtctgtcctgtcacacttgtggcggctcgtgacactgtgcgcatagtgaaatcgaccaagacagcaacttcaaatgatgaacctcgaacacccaagctggatccgtagctggacatgttagggtaaggaattcctccctggtaacagggaccttactggccaaaagccctgctctttgagcctagcatgttgttgaccccgaactgtccagtttggttagtacagggaatttatctgttgtggttgttcagaactcgatttctagtgagacagcctaaggatgccctccaggtaccctggggtaacaagcgacacccaggatctgaggaggggatcaccttgcgtgatttaaaaaacttctaagctgtcacggtgaccagaggctggcacctttcacttttatcacttttaaactgaccacaagcaaaggaattacgtgactacaggctctcaaactagttacacgagtactgtttttacttttgacatttgttgt

SEQ ID NO: 28 - DNA, 591 bp, Unknown
  Description of Unknown: unclassified Parechovirus sequence
caacaaacatctaagacaattacatacaaccttgtacctggtccccaccagtcgaaggcatctagcaataagatgggtggaacaaggatgcttaaagcacaaagacaattaacttttctaacccacaatttattgtggggtggtagatggcgtaccataactctattagtgagataccatgcttgtggatcttatgctcacacagccatcctctagtaagtttgtaaggtgtctgatgatgtgtgggaacttattggaaacaacattctaccgtaaggtatccattagccagcggaacaacacctggtgacaggtgcctctggggccaaaagccaaggtttaacagaccctaatggattggttcaaacctgggatgttgtggaaaatatttagtacctgctgatttggtagcagtgcaaacactagttgtaaggcccacgaaggatgcccagaaggtacccgtaggtaacaagagacactatggatctgatctggggtcaactacctctatcttggtgagttgattaaaaaacgtctagtgggccaaacccaggggggatccctggtttccttttacttatcaaaatgatc

SEQ ID NO: 29 - DNA, 592 bp, Unknown
  Description of Unknown: unclassified Parechovirus sequence
aatgtaactaacatctaagacaactattttacaaccttgtacctggtctccactggtcgaaggcaacttgcaataagataagtggaatgaagacgcttaaagtacaatgtaagtaatcttttctaatccacaattctgtggagtggcagatggcgtgccataactctaatagtgagataccatacttgtggacctcatgctcacacagccatcctctagtaagtttgtaagacgtctggtgacgtgtgggaacttatgggaatcaatgttttgctgcaaggcatctattagccagcggataaacacctggtaacaggtgcctctggggccaaaagccaaggtttaacagaccctaatagattggtttatacctgaaacattgtggaacatattcagtacctgccgatctggtagtaatgcaaacactagttgtaaggcccacgaaggatgcccagaaggtacccgtaggttacaagggacactatggatctggtctggggctgagtacctctatcttggtgactcagttaaaaagcgtctagtgggccaaacccgggggggatccctggtttcttttattttaatggtcact

SEQ ID NO: 30 - DNA, 592 bp, Parechovirus A
cgtaacaaacatctaagattatcatattaaccccatgcctggtctccattagttgaaggcaacttgcaataaaataagtggaaataagacgcttaaagcatggtgtaagttttcttttctaactcacatcttgtgtggggtggcagatggcgtgccataactctattagtgagataccacacttgtggaccttatgctcacacagccatcctctagtaagcttgtaagacgtctggtgacgtgtgggaacttattggaaacatcattttgctgcaaagcatcctattgccagcggaacaacacctggtaacaggtgcccctggggccaaaagccaaggtttaacagaccctttaggattggttctaaacctgaaatgttgtggaagatatttagtacctaccaatctggtagtattgcaagcactagttgtacggcccacgaaggatgcccagaaggtacccgtaggtaacaagtgacactatggatctgatctggggtcaactacctctatctaggtgagttggttaaaaaacgtctagtgggccaaacccaggggggatccctggtttccttttatcttaaatagtgact

SEQ ID NO: 31 - DNA, 592 bp, Parechovirus A
taacaaacatctaagacaaacaattacgaccttatgcctggtccccaccagtcgaaggcatctagcaataagataggtggaacaaggacgcttaaagcataaagacaataatcttttctaactcacacattggtgtgaggtggcagatggcgtgccataactctaatagtgagataccacgcttgtggaccttatgctcacacagccatcctctagtaagtttgtgaggtgtctgatgacgtgtgggaacttgttggaaatgacagcttgctgcaaagcatcccattgccagcggactaacacctggtaacaggtgcctctggggccaaaagccaaggtttaacagaccctttgggattggttcaaacctgagctgtcatggaagacacttagtacctgctgatttggtagcaatacaaacactagttgtaaggcccacgaaggatgcccagaaggtacccgtaggtaacaagtgacactatagatctgatctggggccggctacctctatcttggtgagtcggttaaaaaacgtctagtgggccaaacccaggggggatccctggtttccttttattttactaatgcaact

SEQ ID NO: 32 - DNA, 593 bp, Unknown
  Description of Unknown: unclassified Parechovirus sequence
tgtaataatcttagatgtttgttacattaaccccatgcctggtctccactagttgaaggcagcttgcaataaaatgagtggaagcaagacgcttaaagcatggtgtaaattagcttttccagcccacaccttgtgtggggtggcagatggcgtgccataactctattagtgagataccatgcttatggaccttatgctcacacagccatcctctagtaagtttgtgagacgtctggtgacgtgtgggaacttattggaagcaacattttgctgtaaagcatcctattgccagcggaacaacacctggtaacaggtgcctctggggccaaaagccaaggtttagcagaccctttaggattggtttaaaacctgaaatgttgtggaagatacttagtacctaccgatctggtagtagtgcaaacactagttgtaaggcccacgaaggatgcccagaaggtacccgtaggtaacaagagacactatggatctgatctggggccgggtacctctatcttggtgacctggtttaaaaacgtctagtgggccaaacccgggggggatccccggtttccttttattttatcaatgccact

SEQ ID NO: 33 - DNA, 594 bp, Unknown
  Description of Unknown: unclassified Parechovirus sequence
actgtaactaacatctaagacaactattatacaaccttgtacctggtccccactagtcgaaggctacttgcaataagataagtggactaaggacgcttaaagtacaatgtaaacaatcttttctaatccacaattttgtggagtggcagatggcgtgccataaccctattagtgagataccacgcttgtggaccttatgctcacacagccatcctctagtaagtttgtgagatgtctggtgatgtgtgggaacttatgggaagtaatgtcttgctgtaaagcatccattagccagcgggtaaacacctggtaacaggtgcctctggggccaaaagccaaggtttaacagaccctaatggattggttcaaacctgggacattgtggaacatacttagtacctgctgatctggtagttatgcaaacactagttgtaaggcccacgaaggatgcccagaaggtacccgtaggtaacaagagacactatggatctgatctggggctgagtacttctatcttagtgactcagttaaaaaacgtctagtgggccaaacccgggggggatccccggtttcctttattttacaactaccatc

SEQ ID NO: 34 - DNA, 595 bp, Unknown
  Description of Unknown: unclassified Parechovirus sequence
gcacacacgaaaaggaatgcctgttgcattaaccccatgcctggtctccactagttgaaggcaacttgcaataaaatgagtggaaacaagacgcttaaagcatggtgtaaattaacttttctaacccacaccttgtgtggggtggcagatggcgtgccataactctattagtgagataccacgcttgtggaacttatgctcacacagccatcctctagtaagtttgtgagatgtctggtgacgtgtgggaacttattggaaacaacattttgctgtaaagcatcctattgccagcggaactacacctggtaacaggtgcctctggggccaaaagccaaggtttaacagaccctttaggattggtttaaaacctgaaatgttgtggaagatacttagtacctaccgatctggtagtattgcagacactagttgtaaggcccacgaaggatgcccagaaggtacccgtaggtaacaagagacactatggatctgatctggggccaggtacctctatcttggtgacctggttaaaaaacgtctagtgggccaaacccgggggggatccccggtttcattttgttttaccaatgccact

SEQ ID NO: 35 - DNA, 595 bp, Unknown
  Description of Unknown: unclassified Parechovirus sequence
actgtaacaaacatctaagattattgcatgctttaagcgtcttgtttccactagttgaaggcaacttgcaataaaataagtggaaacaagacgcttaaagcatggtgtaagttaacttttctaacccacatctcatgtggggtggcagatggcgtgccataactctattagtgagataccacgcttgtggaccttatgctcacacagccatcctctagtaagtttgtgagacgtctggtgacgtgtgggaacttattggaaacagcattttgctgtaaagcatcctactgccagcggaacaacacctggtaacaggtgcctctggggccaaaagccaaggtttaacagaccctttaggattggtttaaaacctgaaatgttgtggaagatactcagtacctaccgatctggtagtattgcaaacactagttgtagggcccacaaaggatgcccagaaggtacccgtaggttacaagagacactatggatctggtctggggccaggtacctctatctcggtgacctggttaaaaaacgtctagtgggccaaacccgggggggatccccggtttccttttgttttactaatgccatt

SEQ ID NO: 36 - DNA, 596 bp, Unknown
  Description of Unknown: unclassified Parechovirus sequence
actgtaactaacacctaagcttacatcacagataccctatgcctggtccccaccagtcgaaggcatctagcaataagatgggtggagcaaggacgcttaaagcatagtgttattatgcatttctaactcgtgttcaacacgaggtggcagatggcgtgccataactctattagtgagataccacgcttgtggatcttatgctcacacagccatcctctagtaagcttgcaaggcgtctgatgacgtgtgggaacttattggaaataacagtttgctgcaaagcatcctattgccagcggatcaacacctggtaacaggtgcctctggggccaaaagccaaggtttgacagaccctctaggattggttcatacctgaactgttatggaagatacttagtacctaccaatttggtagttaggcaagcactagttgtaaggcccacgaaggatgcccagaaggtacccgtaggtaacaagtggcactatggatctgatctggggccaactacctctatcctggtgagttggttaaggcatccttcgtgggccaaacccaggggggatccctggtttcctttaaatttaatacaatcaat

SEQ ID NO: 37 - DNA, 597 bp, Unknown
  Description of Unknown: unclassified Parechovirus sequence
actgtaactaacatctaagctgatattccagccacctcaaggctggtccccactcgtcgaaggcatctagcaataagataagtggaagaaggatgcttaaagcatagtgttaatatgcatttctaacctgtgattatcacggggtggcagatggcgtgccataactctattagtgagataccacgcttgtggaccttatgctcacacagccatcctctagtaagtttgcaaggcatctgatgacgtgtgggaacttattggaaacaacagtttgctgcaaagcatcctactgccagcggaacaacacctggtaacaggtgcctctggggccaaaagccaaggtttaacagaccctttaggattggttcacacctgaactgttgtgaaagatatttagtacctactgacttggtagttaggcaaacactagttgtaaggcccacgaaggatgcccagaaggtacccgtaggtaacaagagacactatggatctgatctggggccaactaccactatcatggtgagttggttaaaaaacgtcttagtgggccaaacccaggggggatccctggtttccttttactttaatacaatcatt

SEQ ID NO: 38 - DNA, 603 bp, Bovine rhinitis B virus
tatcattcgaagatgtgcggttttgctgctttcacagagtaaagcagatagaggttctggactggcaaactttacctcgaaacacgcccgttttcctgctgtgttttacagactgtcctgccacacttgtggcggcttgtgacactgtgaacatagtgagaccgaccaagagaacagttccaagtgatgaacaccgaacacctagactggatccgtagctggacatgttagggcaaggatttcccccctggtaacaggagccttgctggccaaaagccccgctctttgagcctagcatgttgtcgaccccggactgtccagtctagttagtacatgggattcacttgtcatggttcttctaaactcggtctctagtgcggcagcctaaggatgccctccaggtaccccggggtaacaagcgacacccgggatctgaggaggggactactttacgtagtttaaaaaacgtctaagctgttacggtgaccagaggctggcacctttcattttttaaaacaaactactgattacaattgaagtgataacggttttacagactttcaaactagtagcacaagtactgttttccaacgcacacatttt

SEQ ID NO: 39 - DNA, 604 bp, Unknown
  Description of Unknown: unclassified Parechovirus sequence
atcataaccaatacgatttctcattccatctcgaccgcttctaccacctctaccgccacgtcctccacgagcatcaagaaattcacgaaattcatcgagaatgcttaaagcatagtgttagtatgcattcttgatgctcgtggaggacgtggcggtagatggcgtgccataactctatcagggtgataccacgcttgtggatcttatgctcacacagccatcctctagtaagcttgcaaggcgtctgatgacgtgtgggaacttattggaaataacagtttgctgcaaagcatcctattgccagcggatcgacacctggtaacaggtgcctctggggccaaaagccaaggtttaacagaccctctaggattggttcacacctgaactgttatggaaaatacttagtacctaccgatttggtagttgtgcaagcactagttgtagggcccatgaaggatgcccagaaggtacccgtaggtaacaagtgacactatggatctgatctggggccaactacctctatcctggtgagttggttaaaaaacgtctaatgggccaaacccaggggggatccctggtttcctttaaatttactacaaccaat

SEQ ID NO: 40 - DNA, 604 bp, Unknown
  Description of Unknown: unclassified Aphthovirus sequence
ctgcagatatcaagatgtgcgggtttgctgctttcacagagtaaagcagatagagattttgtattggcacacttaatctcgaaacgcgctcgttctgctgtgtagttcagtctgtcctgtcacacttgtgacggctcgcgacactgtacacatagtgaaaccgaccaagacaaaagcttcaaataatgaacctcgaaatcccaaactggatccgtagctggacatgttagggtaaggaacacccccctggtaacagggaccttactggccaaaagccccgctctttgagcctagcatgttgttgatcccgaactgttcagtttggttagtacagggaatttctttgctgtctttgttcagaactcggtttctagtgagacagcctaaggatgccctccaggtaccccggggtaacaagcgacacccgggatctgaggaggggaccgccccgcgcggtttaaaaaacttctaagctgttgtggtgaccagaggctggcacctttcactttaaaacacttattaactggtcacaaacaaaagaattccgttttacagactttcaaactagttacacaagtactgtttcacttacaacaattgttat

SEQ ID NO: 41 - DNA, 606 bp, Cyprivirus A
aaataccctttcccccggagcctcaccggggaccgcctcatggtgacctgctcggtcactactgtggtggtgaacaaatgtctaggacctttcactccaaatccctttcccctttttctacttcttagtacgcctcggctcgctcatccgttgtgtgctcaaactccccttctcctacacccctttcccccccctcccgagtgactcgcacttagtcgtaggtttggtgtctttcaccatttctgtgcctatctatgtgtcctttggatccgccctcgaatgccctctagggtcttctgcgaaagcttgcaaagccgcgccccccctccactgttcttggggaccgtgcgcagccggaacttttgacatttgactgaacagtacagcaatgtagcatgtctcttgtctttgccggttagccctcgtggtcaaactttgtaagttagtacacttaagcactctcctgtggtttctcttgggaccttccaattgtaggaatccttggtatgccttcgaatagggacggacgctctaaatgccccgttcgcgaagtcgacgcctgaatgaccaaggtttttccacctttcctcaaaacccctcttttta

SEQ ID NO: 42 - DNA, 608 bp, Rhinovirus A
ttaaaactggatccagattgttcccatctggatttcccacgtggagttgtacactattattccggtaattttgtacgccagttttatgtacccccccctgtaacttagaagttttgaacaaggaccaataggcagtaaccacccaggttgctaaaggtcaagcacttctgtttccccggtcaaagttgatatgctccaacagggcaaaaacaactgagatcgttacccgcaaggtgcctacgcaaagcctagtaaccccttgaacgatgtgtggttggtcgttcggctgtaccccacagtagacctggcagatgaggctagatgttccccactggcgacagtgttctagcctgcgtggctgcctgcgcactctctgagtgcgaagccatacatttgacaaggtgtgaagagccccgtgtgctcaccttgagtcctccggcccctgaatgtggctaaccttaaccctgcagctagtacatgcaatccagcatgcagctagtcgtaacgagcaattgcgggacgggaccaactactttgggtgtccgtgtttcactttttccttttatatttgcttatggtgacaatatatagatttatatattgtcacc

SEQ ID NO: 43 - DNA, 608 bp, Rhinovirus A
ttaaaactggatccaggttgtccccacctggatctcccacagggagtggtactctgttattacggtaactttgtatgccagttttatcctccccacccctatgtaacttagaagttttacataaagaccaataggtagtaatcatccagattacttaaggtcaagcacttctgtttccccggttgatgttgatatgctccaacagggcaaaaacaacagaaatcgttacccgcaaagtgcctacgcaaagcctagtagcactttagaagttgtctggctggtcgctccgccatttcccctggtagacctggcagatgaggctagaaataccccactggcgacagtgttctagcctgcgtggctgcctgcacaccctatgggtgtgaagccatacaatggacaaggtgtgaagagccccgtgtgctcactttgagtcctccggcccctgaatgtggctaaccttaaccctgcagctagggcacacaatccagtgtgtatctagtcgtaatgagcaattgcgggacgggaccaactactttgggtgtccgtgtttctcttttatccttatgtttgcttatggtgacaatatatgaatatatattgacacc

SEQ ID NO: 44 - DNA, 609 bp, Unknown
  Description of Unknown: unclassified sequence
ttgaaagcgaatgtatggccgcatttccacactagtaactagtagtggtatgcggctgtgcattcgctttccccccctctttataggggcggtctttgtatctttactaatttcctacttttctatcatctctttttaaggtagggactaaggtctcctagcccttccccccctgggctttccaggatcaagggggttctaaagctaggccatgtttcctgagcctcatttagtacggagagttagtagtcataaaacatgccagtaaccttctagtgcccaagggtgacagagtggtaacactctccttggggcccgaaaggctagtgggcatagttgttaccaaggaaggggtccccaccccaacctgaactaacagctagaagctcaccttagaagaagtgctggatcccaacatgtcttataatgaaagctcaatggaaaggtgaggagatggaagcatgggggttcactgagtagatgccctgaaggagaaatctgatcaggggcccgtgactatacattaggtaaaccgggtataaaaaccatgaaaggtgacccacaaattttcctttatttttatgttttgttggtgtgaattcaggcaag

SEQ ID NO: 45 - DNA, 610 bp, Unknown
  Description of Unknown: Livupivirus A1 strain newt/II-5-Pilis/2014/HUN, complete genome.1 sequence
tatctacatggggatccaggctgtatggaatgtctgtcttaacaagcactataccagaaagatccacccaaagtggtgggactgggactgtgaggtgagaaatcccgaaaccagccttctcaagcgtcggacgatctttctgttttagtgaacaccttgccttttaaatggatgacaacaccccttcagcaaatcgcaatctgaaatcccaaaagactgtttagccgaactctggtaatcactccggagaagtaggatacgcagcccctgtggactcttgatttcaggactcaaggtagctagagctggaacttcatggaatgacaaaggaatatatgcacattgtgcgctttcctggccttgtagcccgtcgtgaggatatgtcgttgggaatcgacatcttagtccagtactgcttgatagagtgtcggctggcacagttacctgagaataagtcagttgtacttaacatgaacaaaaaaaataactaccacaactaccacaatctaccaatacttgaattatgctgaatctcgtacagtaaaaacgttccgtggaaggacaagtattgaagtgcggttacatcatccgatacgcgctggatccctca

SEQ ID NO: 46 - DNA, 610 bp, Parechovirus A
gtcaataaaagcctcaaacgtaacaaacatctaagataactaaacaaaccctatgcctggtctccactattcgaaggcaacttgcaataagaagagtgggcacaagacgcttaaagcatagagagagtttccttttctaacccacgttcgcgtggggtggcagatggcgtgccataactctaatagtgagataccatgcttgtggatcttatgctcacacagccatcctctagtaagtttgtaaggcgtctggtgacgtgtgggaatttattagaagcaacatcgtgctgtaaagcatcctattgccagcggaataacacctggtaacaggtgcctctggggccaaaagccaaggtttaacagaccctctaggattggttttgaacctgcgatgttgtggaaaatatttagtacctgccaatctggtagtcatgcaaacactagttgtaaggcccacgaaggatgcccagaaggtacccgtaggtaacaagagacactatggatctgatctggggccaactacctctatcttggtgagttggttaaaaaacgtctagtgggccaaacccaggggggatccctggtttccttttattttatcaatttcatt

SEQ ID NO: 47 - DNA, 610 bp, Rhinovirus A
ttaaaactggatccgggttgttcccacccggatctcccacgtggagttgtacactattattacggtaattttgtacgccagttttatatcccttaccccaagtaacttagaagataaacacacagaccaataggaggtggtcatccagatcactaagggtcaagcacttctgtttccccggtcaaggttgatatgctccaacagggcaaaaacagctgagatcattatccgcaaagtgcctacgcaaagcctagtaactacctcgaaagtacttgactggtcgctccgccataccccatggtagacctggcagatgaggctagaaatcccccactggtgacagtgttctagcctgcgtggctgcctgcacaccctttgggtgtgaagccaagtaatggacagggtgtgaagagtcgagtgtgctcactttgagtcctccggcccctgaatgtggctaaccctaaccctgcagctagggcacacaatccagtgtgtatctagtcgtaatgagcaattgcgggatgggaccaactactttgggtgtccgtgtttcttgtttttcatttataattgcttatggtgacaatatatagtattatatattggcgtc

SEQ ID NO: 48 - DNA, 610 bp, Rhinovirus A
ttaaaactggatccaggttgttcccacctggatttcccacagggagtggtactctgttattacggtaactttgtacgccagttttatctcccttcccccatgtaacttagaagtttttcacaaagaccaatagccggtaatcagccagattactgaaggtcaagcacttctgtttccccggtcaatgttgatatgctccaacagggcaaaaacaactgcgatcgttaaccgcaaagcgcctacgcaaagcttagtagcatctttgaaatcgtttggctggtcgatccgccatttcccctggtagacctggcagatgaggctagaaataccccactggcgacagtgttctagcctgcgtggctgcctgcacaccctatgggtgtgaagccaaacaatggacaaggtgtgaagagccccgtgtgctcgctttgagtcctccggcccctgaatgtggctaaccttaaccctgcagctagagcacgtaacccaatgtgtatctagtcgtaatgagcaattgcgggatgggaccaactactttgggtgtccgtgtttcactttttcctttatatttgcttatggtgacaatatatacaatatatatattggcacc

SEQ ID NO: 49 - DNA, 612 bp, Rhinovirus A
ttaaaactggatccaggttgttcccacctggatctcccatagggagtggtactctgctattacggtagccttgtatgccagttttatctcccctcccccatgtaacttagaagttttacacaaggaccaatagtcggtaatcagccagattactaaaggtcaagcacttctgtttccccggtcaatgctgatatgctccaacagggcaaaaacagcagcgatcgttatccgcaaagcgcctacgcaaagcttagtagcatctccgaaattgtctggttggtcgttccgccattttccccttggtagacctggcagatgaggctagaaataccccactggcgacagtgttctagcctgcgtggctgcctgcacaccctatgggtgtgaagccaaacaatggacaaggtgtgaagagccccgtgtgctcgctttgactcctccggcccctgaatgtggctaaccttaaccctgcagctagagcacgcaaaccagcgtgtttctagtcgtaatgagcaattgcgggatgggaccaactactttgggtgtccgtgtttcactttttctttttatattgcttatggtgacaatatatacatcatatatattgacacc

SEQ ID NO: 50 - DNA, 613 bp, Rhinovirus A
ttaaaactggatccaggttgttcccacttggatcccccaagaggggtagtactctattattacggtaattttgtacgccagttttatctcccttaccccctttgtaacttagaagatttaaacacagaccaataggcgacgatcatccagatcgtttaaggtcaagcacttctgtttccccggtcaatgctgatatgctctaccagggcaaaaacagtagagatcgttatccgcaaggtgcctacacaaagcttagtaacattttgaagagcatttggttggtcgctcagctattaccccatagtagacctggcagatgaggctagaagttccccactggcgacagtgttcttgcctgcgtggctgcctgcgcactctcatgagtgcgaagccatatgtttgacaaggtgtgaagagccccgtgtgctcaccttgagtcctccggcccctgaatgtggctaaccttaaccctgcagctagtgcatgaaatccatcatgtaactagtcgtaatgagcaattgcgggatgggaccaactactttgggtgtccgtgtttcactttttccttttatatttgcttatggtgacaatatatatagcatatattgacacc

SEQ ID NO: 51 - DNA, 613 bp, Rhinovirus A
ataaaactggatccaggttgttcccacctggatctcctacgtggagttgtactctattattccggtaatcttgtacgccagttttatatcccctacccctttgtaacttagaagttaaacacacagaccaataggcggtggctatccaagtcactaatggtcaagcacttctgtttccccggtcaagattgatacgctccaacagggcgaaaacagtcaagatcgttaaccgcaaagtgactacgcaaagcttagtaatgccttgaagagtctatggctggtcgttccgctataaccccctagtagacctggcagatgaggctagaaacaccccactggcaacagtgttctagcctgcgtggctgcctgcacaccctttcgggtgtgaagccatatatttgacaaggtgtgaagagccccgtgtgctcactttgagtcctccggcccctgaatgtggctaaccttaaccctgcagctagcgtatgtaatccaacatattgctagtcgtaatgagcaattgcgggatgggaccaactactttgggtgtccgtgtttcacttttttccttttatttgcttatggtgacaatatatatagtatatatattggcatc

SEQ ID NO: 52 - DNA, 614 bp, Parechovirus A
ggctggttaataaaagcctcaactgtaacaaacatcttaagcaactatagcaaccccatgcctggtctccactagttgaaggcacctagcaataaaatgagtggaaataagacgcttaaagcatggagtaaattttcttttctatcccatattttgtatggggtggcagatggcgtgccataattctattagtgggataccatacttgtggatcttatgcccacacagccatcctctagtaagtttgtaagacgtctggcgatgtgtgggaacttattggaagcaacattttgctgcaaagcatcctactgccagtggaacaacacctggtaacaggtgcccctggggccaaaagccaaggtttaacagaccctttaggattggtattaacctgaaatgttgtggagaatagttagtacctgctgacctggtagtaatgcaaacactagttgtaaggcccacgaaggatgcccagaaggtacccgtaggtaacaagagacactatggatctgatttggggccaactacctctattaaggtgagttggttaaaaaacgtctagtgggccaaacccaggggggatccctggtttcttttattttaccatatctaac

SEQ ID NO: 53 - DNA, 614 bp, Rhinovirus A
taaaactggatccaggttgttcccacctggatctcctattgggagttgtactctattattccggtaattttgtacgccagttttatcttccccctccccaattgtaacttagaaggttatcaatacgaccaataggtggtagttagccaaactaccaaaggtcaagcacttctgtttccccggtcaaagttgatatgctccaacagggcaaaaacaactgagatcgttatccgcaaagtgcctacgcaaagcctagtaacacctttgaagatttatggttggtcgttccgctatttcccatagtagacctggcagatgaggctagaaatcccccactggcgacagtgctctagcctgcgtggctgcctgcgcaccccttgggtgcgaagccatacattggacaaggtgtgaagagccccgtgtgctcactttgagtcctccggcccctgaatgtggctaaccttaaccctgcagctagtgcatgtaatccaacatgttgctagtcgtaatgagtaattgcgggacgggaccaactactttgggtgtccgtgtttcactttttccttttaatattgcttatggtgacaatatatatagctatatatattgacacc

SEQ ID NO: 54 - DNA, 614 bp, Rhinovirus A
ttaaaactggatccaggttgttcccacctggatttcctacatggagttgtactctgttattccggtaaccttgtacgccagttttatatcccttcccccttgcaacttagaagttaagcacgcagaccaataggtggtgattatccaaatcactaacggtcaagcacttctgtttccccggtttaaactgatacgctccaacagggcgaaaacagtgcaaatcgttatccgcaaggtgcctacacaaagcttagtagcgctttggagaatgtgtggttggtcgctcagctataccccctagtagacctggcagatgaggctagaagcaccccactggcgacagtgttctagcctgcgtggctgcctgcacacccttatgggtgtgaagccatacatttgacaaggtgtgaagagccccgtgtgctcactttgagtcctccggcccctgaatgtggctaaccttaaccctgcagctggtgcatgtaatccaacatgttgctagtcgtaatgagcaattgcgggatgggaccaactactttgggtgtccgtgtttcactttttaccttttaatttgcttatggtgacaatatatatacaacatatatattggcatc

SEQ ID NO: 55 - DNA, 614 bp, Rhinovirus A
ttaaaactggatccaggttgttcccacctggatctcctacgggagttgtactctgttatttcggtaaccttgtacgccagttttatctcccctcccccaattgtaacttagaagcaatacacaaggaccaataggcagtgattaaccagatcacttaaggtcaagcacttctgtttccccggtctgagttgatatgctctaacagggcaaaaacaagtcagatcgttatccgcaaagtgcctacgcaaagcctagtatcatctttgaaaatgtatggttggtcattccgctgaaccccacagtagacctggcagatgaggctagaaaccccccactggcgacagtgttctagcctgcgtggctgcctgcacacccttatgggtgtgaagccatatatttgacaaggtgtgaagagccccgtgtgctcactttgagtcctccggcccctgaatgtggctaaccctaaccctgcagctagtgcatacaagccagtatgttgctagtcgtaacgagcaattgcgggatgggaccaactactttgggtgtccgtgtttcactttttacctttatactgcttatggtgacaatatatatatagcatatatattgacacc

SEQ ID NO: 56 - DNA, 614 bp, Rhinovirus A
ttaaaactggatccaggttgttcccacctggatctcccaagtggagtggtacactattatcccggtaattttgtacgccagttttataacccctcccccccttgtaacttagaagatgtaaacacagaccaataggtggtaactaaccaagttactaaaggtcaagcacttctgtttccccggctgatattgatatgctccaccagggcaaaaacaatagaagtcgttatccgcaaagtgcctacgcaaagcctagtagcactttagattgtgtatggttggtcgctcagctattccccctagtagacctggcagatgaggctagaaataccccactggtaacagtgttctagcctgcgtggctgcctgcgcaccctttcgggtgcgaagccatatacatgacaaggtgtgaagagccccgtgtgctcactttgagtcctccggctcctgaatgtggctaaccttaaacctgcagccagtgcacataagccaatgtgtagctggtcgtaatgagtaattgcgggatgggaccaactactttggatgtccgtgtttcttgtttttcctttaattttgcttatggtgacaatatatagataatatatattggcatc

SEQ ID NO: 57 - DNA, 617 bp, Unknown
  Description of Unknown: unclassified Picornaviridae sequence
gggccccctttccgtccaagtcgcggacgttaaatgcggcacggcagtgcctcggtgctgtcctgctgctagtggcggcaaccctctcccttactgtatgaatgagtttgtgtgaatgaaatccgtgtggatccccagcttttgggtctcaaacagaacacacggtggcggcccatgttccaccatagaggctaccttagtagctttaagtggaatctttgagtgagcaggtatcgcagccgttaaagactggtattcccggtgtagaggcgagcgcaggtaactgcggtctacattgtgtgtgagccagtacccgcaaggggtagctcaaagtggaaacttaaggtgaaccggtaagcgctattgtgacgcatgttggtcccaaggtgcgatgatagacatgttgcgcaggtaccccttaaatgggatctgagcgtaagctaattagtcactgtcgtcgcgctgaccttttctctttgtcttaattattgttaacacaatatcattgtttgttgtgtgtttttgctcgcaaggtcactagcagtcttacttaaaacactcaagacggactttttgtataattcaattagtgcttatttcaattctaccttctacag

SEQ ID NO: 58 - DNA, 618 bp, Unknown
  Description of Unknown: Human parechovirus 1 isolate 121Chzj091, complete genome.1 sequence
cacgagttagaaatacatactaacactatgctttaagcgtccttgctccactcatcttattgcctggtccccactagtcgaaggtatctagcaataagatgagtggagcaaggacgcttaaagcatagtgttagtatgtatttctaactcgtgttcaacgcgaggtggcagatggcgtgccataactctattagtgagataccacgcttgtggatcttatgctcacacagccatcctctagtaagcttgcaaggcgtctgatgacgtgtgggaacttattggaaataacagtttgctgcaaagcatcctattgccagcggatcaacacctggtaacaggtgcctctggggccaaaagccaaggtttaacagaccctctaggattggttcacacctgaactattatggaagatatttagtacctaccgatttggtagttaggcaagcactagttgtagggcccacgaaggatgcccagaaggtacccgtaggtaacaagtgacactatggatctgatctggggccaactacctctatcctggtgagttggttaaaaaacgtctagtgggccaaacccaggggggatccctggtttccctttaaatttaatacaaccaat

SEQ ID NO: 59 - DNA, 618 bp, Unknown
  Description of Unknown: Human rhinovirus 11, complete genome.1 sequence
ttcaaactggatccaggttgttcccacctggatctcccacgtggagttgtactctattattccggtaattttgtatgccagttttatctccccttcccttttgtaacttagaagatgaactcaccgaccaataggtggcatttatccagaatgtcaaaggtcaagcaccttctgtttccccggtcaaagttgatatgctccaacagggcaaaaacatctgcgatcgttatccgcaaagcaactacgcaaagcctagtatcacttttgagagtatgtggttggtcgctccactataaacccaatagtagacctggcagatgaggctagaagtcccccactggtaacagtgttctagcctgcgtggctgcctgcgtgcctctggtaggcacgaagccatatatttgacaaggtgtgaagagccccgtgtgcttgctttgagtcctccggcccctgaatgtggctaaccttaaccctgcagctagtgtgcataatccaatgcatggctagtcgtaatgagcaattgcgggatgggaccaactactttgggtgtccgtgtttctcatttttccttttatttgcttatggtgacaatatatataatacatatatattggcatc

SEQ ID NO: 60 - DNA, 620 bp, Megrivirus B
aaacgggaggatcggctttggcttatcctcttaatagtctacaaaactgggctgactggtgggggagctactagatccgggagaggactagttaccccgcgtaacttccctttttgtcactccctccacctaccccttccctgtcccttagactcttaagtaggtgtgcaggcctggccccccggaaatgggcaaatcggacgtttgcgtgtagggtcgttctgaaaggtggggcccactccaccgtagtaggatcttcctgtttcacgtttaaacctctccgggcaggtatcgctagacactaggctgtataggatggcacgcacttaggtttcgcaccttcctagtgcgccaagatcccgcttttgagctcaagtacatggttctttgtaagatgtctaaccagaggaggtggtgctgaaatattgcaagccactctggcgaacgtccactgcattgcctggaacaggctctctagcgccctccactggtagcgcggtggtgggttagtaggatacctatatggacaggggatgcgggaatacccctcactagctagtgactggttgatcgactggcggcggatccagtgatacttgcataatccgcagacttgggag

SEQ ID NO: 61 - DNA, 620 bp, Parechovirus A
gggtcggctggtcaataaaagcctcacatataactaacatctaagacaataatgtacaaccttgtgcctggtccccaccggtcgaaggcatctagcagtaagataggtggaacaaggacgcttaaagcacaaagacaacctatttttctaacccgcaaattattgtggggtggtagatggcgtaccataattctactagtgagataccatgcttgtggatcttatgctcacacagccatcctctagtaagtttgcaaggcgtctggtgacgtgtgggaacttattggaaataacatcttgctgcaaggcatccattagccagcggaataacacctggtaacaggtgcctctggggccaaaagccaaggtttagcagaccctaatggattggttcaaacctgggatgttgtggaagatacttagtacctaccgatctggtagcaatgcaaacactagttgtaaggcccacgaaggatgcccagaaggtacccgtaggtaacaagagacactatggatctgatttggggccaactacctctatcctggtgagttggttaaaaaacgtctagtgggccaaacccaggggggatccctggtttcttttacttatcactgtcatt

SEQ ID NO: 62 - DNA, 621 bp, Rhinovirus B
ttaaaacagcggatgggtatcccaccatccggcccactgggcgtagtacactggtattctgtacctttgtacgcctgtttgccgcccctcccccttttattaccacatttgtggtcgctgcaacgttagaagattttaaagtagtgcaataggaagcatcacaaccagtggtgttatgcacaaacacttctgtttccccggagcgaggtatagacggtccccactgtcaaaagcctttaaccgttatccgccaaccaactacgagacagctagtaatgccctgttctcctgcaaggcgttcgatcagacagatttcccctctgttagtctggtcgatgaggctagaagtaccccacaggtaactgtgttctagcctgcgtggcggccagcccagcttctgctgggacgcctttcaagagacatggtgtgaagactcaattgtgcttggttgtgagtcctccggcccctgaatgcggctaaccttaaacccggatccatgctatgcaaaccagcatagttatggtcgtaatgggcaactctgggatgggaccgactactttgggtgtccgtgtttccatttttactttttgtgtcatttatggttacaattaagttgtaacc

SEQ ID NO: 63 - DNA, 621 bp, Rhinovirus A
ttaaaactggatccaggttgctcccacctggatctcctacatggagttgtactctattattccggtaattttgtacgccagttttatctccccctacccccttacgtaacttagaagttttacacacaccgaccaataggtggtatttacccaaaataccaaaggtcaagcacttctgttaccccggtcaaaattgatatgctccaccagggcaaaaacaattgcgatcgttatccgcaaagcaactacgcaaagcctagtaccatttttgatgatgtgtggttggtcgttccactatgaacccgatagtagacctggcagatgaggctagaaattccccactggcaacagtgttctagcctgcgtggctgcctgcgtaccccctgtgggtacgaagccatacatttgacaaggtgtgaagagccccgtgtgcttgctttgagtcctccggcccctgaatgtggctaaccttaaccctgcagctagtgtgtacaatccagtacatagctagtcgtaatgagcaattgcgggatgggaccaactactttgggtgtccgtgtttcttgtttttctttcatatttgcttatggtgacaatatatataacacatatattggcacc

SEQ ID NO: 64 - DNA, 625 bp, Unknown
  Description of Unknown: Bovine rhinitis B virus isolate TCH8 polyprotein gene, complete1 sequence
gtccagctacggatccagtttagacgttcgaagatgtacggttttgctgctttcacagagtaaagcagatagaggttctggactggcaaactttacctcgaaacacgcccgtttttctgctgtgttttacagactgtcctgccacacttgtggcggcttgtgacactgtgaacatagtgagactgaccaagacaacagtttcaagtggtgaacatcgaacgtctaaactggatccgtagctggacatgttagggcaagggtctcccccctggtaacaggagccttgctggccaaaagccccgctctctgagcctagcatgttgtcgaccccggactgttcagtttagttagtacatgggattcacttgtcatggttcctctgaactcggtctctagtgcggcagcctaaggatgccctccaggtaccccgaggtaacaagcgacactcgggatctgaggaggggactactttacgtggtttaaaaaacgtctaagctgccacggtgaccagaggctggcacctttcactttttaaacacactactgactacaattgaagtgataacggttttacagactttcaaactagttacacaagtactgtttttccaacacacacaatttt

SEQ ID NO: 65 - DNA, 630 bp, Unknown
  Description of Unknown: Human rhinovirus 37, complete genome.1 sequence
tttaaacagcggatgggtatcccaccatccgacccactgggtgtagtactctggtattttgtacctttgtacgcctgttgttcctaatgtacccaccctaaaacttcctacccaagtaacgttagaagtttcatcaacaagtacaataggaagcatcacatccagtggtgttttgtacaagcacttctgtttccccggagcgaggtataggctgtacccactgccgaaagcctttaaccgttatccgccaaccaactacgtaaaagctagtatcatcatgttttaaaataggcgttcgatcaggtggatcccccctccactagtttggtcgatgaggctaggaactccccacgggtgaccgtgtcctagcctgcgtggcggccaacccagcttctgctgggacgcctttttatggacatggtgtgaagactcgcatgtgcttggttgtgactcctccggcccctgaatgcggctaaccttaaccccggagccctgtgttgcaatccagtaacattagggtcgtaatgagcaatttcgggacgggaccgactactttgggtgtccgtgtttctcatttttcttattattgtcttatggtcacagcatatatataacgtatatactgtgatc

SEQ ID NO: 66 - DNA, 635 bp, Unknown
  Description of Unknown: unclassified RNA viruses ShiM-2016 sequence
cccctaggatccactggatgttagtacactggtatcgcggtacctttgtacgcctgttttatatccccttccccgcaactttagaagtatcaaaagtaccgctcaatagccgccacgctcccagtgtggtttcgagcaagcacttctgttttcccggttgcgtcccatatgctgtgcaaacggcaaaaagggacaatatcgttacccgcttgtatactacgggaaacctagtaccgccattgattgtattgagggttgcgctcatcacctttcccggtgtagctcaggctgatgaggctcagaatcccccacaggtaactgtgtctgagcctgcgttggcggcctgccctcgccttatggcgtgggacgctcactacatgacatggtgcgaagagtctactgtgctatacaagagtcctccggcccctgaatgtggataatcctaaccactgatcccacgtacgcaaaccagcgtgtagtgggtcgtaacgcgcaagtcggtggcggaaccgactactttgggtgaccgtgtttcctttattacctattgaatgtttatggtgacaattgtttgattcagttgttaccatttgctacattcaataacctagtgtcaaaccgattgaattgctaca

SEQ ID NO: 67 - DNA, 636 bp, Oscivirus A
cctcggtccctctttccgtcgccgcccacgacgttaaatgcggtgttgtggtgcttaggtgccacaccactgctatttgggtccccctttcccctatatatgtttgtttgtttatttcaatttcttgaggattggcacctccttatgccaaatctaaatcgtggaggatcccaggctttctggtctttaacagaactccacgtccaggtcatagaaactggttggtaggctgcctgagtagtccatttgctagtagtcccttgtgaacagggtggctcccgtttactgctggtattcccggtgtaggtcgccatggtggtaacaccatcctgcattgtgtgtgaaccagtaccgcaaggatagcaaggtatgaacacttgtggacgaaatggtaagtgatcaattcactttcatggccggaaggtcacgtggcaatcatgccacccaggtaccctcctctgggaggatctgagggtgggctaagcagaccctgccatgtggctgaacttttcccttattgttttactttgtaacatttatagttgtgttagtgatttgtgtgttgtgcccttgtgagctatatccagtataagttcgcagctagaagttaatccttcgacatcggctgtattggaa

SEQ ID NO: 68 - DNA, 636 bp, Parechovirus A
ccctttcccagccctgagacggctggctaataaaagtctcacctgtaactaacatctaagacaatcatgtataaccttgtgcctggtccccaccagtcgaaagtatcttgcaataagataggtggatcaaggatgcttaaagcacaaagacaattaacttttctaacccacaagttgttgtggggtggtagatggcgtaccataactctactagtgagataccacgcttgtggaccttatgctcacacagccatcctctagtaagtttacaaggcgtctggtgatgtgtgggaacttattggaagcaatattttgccgaaaggcatccattagccagcggaataacacctggtaacaggtgcctctggggccaaaagccaaggtttagcagaccctaatggattggttcaaacctggaatattgtggaaaatatttagtacctacggatctggtagcagtgtaaacactagttgtaaggcccacgaaggatgcccagaaggtacccgtaggtaacaagagacactatggatctgatctggggccagctacctctatcttggtgagttggttaaaaaacgtctagtgggccaaacccaggggggatccctggtttcctttacttaaccgggatcact

SEQ ID NO: 69 - DNA, 636 bp, Enterovirus C
cccctaggatccactggatgtcagtacactggtatcgtggtacctttgtacgcctgttttatacccccttccccgcaactttagaagcatcaaaagcaccgctcaatagtcaccacacccccagtgtggtttcgagcaagcacttctgttttcccggttgcgtcccatatgctgtgcaaacggcaaaaagggacaatatcgttacccgcttgtatactacgggaaacctagtaccaccattgattgtgttgagagttgcgctcatcacctttccccggtgtagctcaggccgatgaggctcagaatcccccacaggtgactgtgtctgagcctgcgttggcggcctgccctcgccttatggcgtgggacgcttgatacatgacatggtgcgaagagtctactgtgctatgcaagagtcctccggcccctgaatgtggctaatcctaaccactgatcccacgcacgcaaaccagtgtgtagtgggtcgtaacgcgcaagtcggtggcggaaccaactactttgggtgaccgtgtttcctttattacttattgaatgtttatggtgacaattgtttgattcagttgttgccattctctacattcatttacccagcatcaaaccaattgaactgttaca

SEQ ID NO: 70 - DNA, 637 bp, Oscivirus A
cctcggtccctctttccgtcgccgcccacgacgttaaatgcggtgctgtggtgcttaggtgccacaccactgcggtttgggttcccctttcccctatatatgtttgtctgtttatttcaaattcttgaggattggcacctccttatgccaaatctaaatcgtggaggatcccaggctttctggtctcaaacagaactccacgtccaggtcataggaactggttagtaggctatttgagtagtccgtttgttagtaatgccttgtgaacagggtggctcccgtttactgctggtattcccggtgcaggttgccgtggtggtgacaccatcctgcattgtgtgtgaaccagtaccgcaaggatagcaaggtatgaacacttatgggtgaaataataagtgactaatccactttcatggccggaaggtcatgtggcaatcatgccacccaggtaccctcttaggaggatctgagggtgggctaagcagaccctgccatgtggctgaaattttctattattttattccataacatttatagctatataggtgttttgtgtgttgtgctctccttttccgagttatttccagtactagttcgcagctagaagtttaactcttcgatatcggctacattggaa

SEQ ID NO: 71 - DNA, 637 bp, Enterovirus C
ttcccacccctaggatccactggatgttagtacactggtatcacggtacctttgtatgcctgttttataacccctcccctgcaactttagaagtatcaaagacactgctcaatagccgccacacctccagtgtggtttcgagcaagcacttctgttctcccggttgcgtcccatatgctgtgcaaacggcaaaaaggggcaatatcgttacccgcttgtatactacgggaaacctagtaccatcattgattgtgttgagggttgcgctcatcacccttccccggtgtagctcaggtcgatgaggctcagaatcccccacaggtgactgtgtctgagcctgcgctggcggcctgccctcgcctcacggcgtgggacgctcaatacatgacatggtgcgaagagtctactgtgctatacaagagtcctccggcccctgaatgtgtcctaaccactgatcccacgtacgcaaaccagtgtatagtgggtcgtaacgcgcaagtcggtggcggaaccaactactttgggtgaccgtgattcccttattacttattgaatgtttatggtgacaattgtttgattcagttgttaccatttaccacattcatcaacctagtgtcaaaccgattaaactgctaca

SEQ ID NO: 72 - DNA, 638 bp, Parechovirus A
tctaggagagtccctttcccagccagaggtggctggttaaacaatacctaatgtaacaaaacatctaagactttgtaacccatacctggtctccacccgttgaaggcaactagcaataaaataggtgggcttagacgcttaaagtatggtgtaaacaatcttttctagcctgtgcctagcatagggtggcagatggcgtgccataactctattagtgagataccacacttgtggaccttatgctcacacagccatcctctagtaagtttgtgaggcgtctgatgacgtgtgggaacttattggaaataacagtttgctgaaaagcatctcattgccagcggatcaacacctggtaacaggtgcctctggggccaaaagccaaggtttaacagaccctttgagattggttcaaacctgaattgttatggaaaatatttagtacctgctgatttggtagcaatacaaacactagttgtaaggcccacgaaggatgcccagaaggtacccgtaggtaacaagtgacactatggatctgatttggggccaactacctctatcttggtgagttggttaaaaaacgtctagtgggccaaacccaggggggatccctggttttcttttattgtatcactatcact

SEQ ID NO: 73 - DNA, 644 bp, Unknown
  Description of Unknown: Human parechovirus 4 clone V2A polyprotein gene, partial cds.1 sequence
ggatagatagtccctttcccagccttgaggcggctggtcaataaaagcctcaaacgtaactaacatctaagaagatttgtaaaccctatgcctggtctccactattcgaaggcaacttgcaataagaagagtggaattaagacgcttaaagcatagtgatagttttcttttctaacccacattcgtgtggggtggcagatggcgtgccataactctaatagtgagataccacacttgtggaccttatgctcacacagccatcctctagtaagtttatgagacgtctggtgacgtgtgggaacttattggaaacaacattttgctgcaaagcatcctattgccagcggaacaacacctggtaacaggtgcctctggggccaaaagccaaggtttgacagaccctttaggattggttctaaacctgaaatgttgtggaaaatatttagtacctgctgatctggtagtaatgtaaacactagttgtaaggcccacgaaggatgcccagaaggtacccgtaggtaacaagtgacactatggatctgatctggggctgactacctctatcttggtgagttggttaaaaaacgtctagtgggccaaacccaggggggatccctggtttcttttattttaacacagctaat

SEQ ID NO: 74 - DNA, 647 bp, Unknown
  Description of Unknown: unclassified Parechovirus sequence
cttaggagagtccctttcccagccttgaggcggctggccaataaaagcctcaaatgtaacaaacatctaagaagattgtgtggaaccctatgcctggtctccactattcgaaggcagcttgcaataagaagagtggaattaagacgctcaaagcatagagacaattttcttttctaacccatacttgtatggggtggcagatggcgtgccataactctaatagtgagataccatgcttgtggaccttatgctcacacagccatcctctagtaagtttgtgagacgtctggtgacgtgtgggaacttattggaaacaacattttgctgcaaagcatcctattgccagcggaacaacacctggtaacaggtgcctctggggccaaaagccaaggtttaacagaccctttaggattggttctaaacctgaaatgttgtggaagacacttagtacctgccgatctggtagtaatacaaacactagttgtaaggcccacgaaggatgcccagaaggtacccgtaggtaacaagtgacactatggatctgatctggggccaactacctctatcttggtgagttggttaaaaaacgtctagtgggccaaacccaggggggatccctggtttccttttattttatcattactaat

SEQ ID NO: 75 - DNA, 648 bp, Unknown
  Description of Unknown: Human parechovirus 14 clone V10C polyprotein gene, partial cds.1 sequence
ggaggatagagtccctttcccagccttgaggcggctggtcaataaatgcctcaaatgtaactaacatctaagattaacttagacaaccctatgcctggtctccgctagtcgaaggcgccttgcaataagacgagtggaacaaagacgcttaaagcatagtgaaaatatacatttctaacctgtggcctccacagggtggcagatggcgtgccataactctattagtgagataccacacttgtggaccttatgctcacacagccatcctctagtaagtttgtaagacgtctgatgacgtgtgggaagttattggaagtaacaatttgccgtaaggcatcctagagccagtggattaacacctggtaacaggtgcccctggggccaaaagccaaggtttaacagaccctttaggattggttcaaacctgggttgttatggaagatatttagtacctgctgatttggtagtaatacaaacactagttgtaaggcccacgaaggatgcccagaaggtacccgtaggtaacaagtgacactatggatctgatttggggttgactacctctgtcctggtgagtcaattaaaaaacgtctagtgggccaaacccaggggggatccctggtttccttttattttattacaaccatt

SEQ ID NO: 76 - DNA, 649 bp, Parechovirus A
ctctaggagagtccctttcccagccctgaggcggctggtcaataaaagcctcaatcgtaactaacatctaagaatattatttcaaccccatgcctggtctccactagttgaaggcaacttgcaataaaatgagtggaaacaagacgcttaaagcatggtgtaaattaccttttctaacctacactttgtgtggggtggcagatggcgtgccataattctattagtgagataccacgcttgtggaccttatgctcacacagccatcctctagtaagtttgcaagatgtctggtgacgtgtgggaacttattggaaacaacattttgctgcaaagcatcctactgccagcggaataacacctggtgacaggtgcctctggggccaaaagccaaggtttaacagaccctttaggattggttttaaaacctgaaatgttgtggaagatacttagtacctgccgatctggtagtagtgcaaacactagttgtaaggcccacgaaggatgcccagaaggtacccgtaggtaacaagtgacactatggatctgatctggggccaagtacctctatcttggtgacttggttaaaaaacgtctagtgggccaaacccgggggggatccctggtttccttttattttaccaatgccact

SEQ ID NO: 77 - DNA, 651 bp, Parechovirus A
ctggaggatagagtccctttcccagccttgaggcggctggtcaataagagcctcaaatgcaacaaacatctaagactattgagaacaaccctgtacctggtccccactagtcgaaggcatctagcaataagatgagtggaatatgggcgcttaaagtacagagtcaatgatcttttctagcctacgcttatgcgtggggtggcagatggcgtgccataaccctattagtgagataccacacttgtggaccttatgctcacacagccatcctccagttagtttgtaagatgtctggtgatgtgtgggaacttgttggaaataacattttgctgtaaggcattcattagccagcggataaaacacctggtaacaggtgcctctggggccaaaagccaaggtttaacagaccctaatgaattggttcaaacctggaatgttatggaagatacttagtacctgctgatctggtagtaatgcaaacactggttgtaaggcccacgaaggatgcccagaaggtacccgcaggtaacaagagacactgtggatctgatctggggctagttgcctctttaaggtgaactagttaaaaaacgtctagtgggccaaacccaggggggatccctggtttcctttattatttgaatgttcatc

SEQ ID NO: 78 - DNA, 653 bp, Unknown
  Description of Unknown: Human parechovirus 5 strain CH-ZJ1, complete genome.1 sequence
atttgctgagtttctctaggagagtccctttcccagccttgaggtggctggttaataaaacctcaagcgtaactaacatctaagacaaatttatcaaccccatgcctggtccccactagtcgaaagcaacttgcaataagatgagtggaacaaggatgcttaaagcatggtgcaaataaacttttctaacccatttacttggggtggcagatggcgtgccataactctattagtgagataccacgcttgtggaccttatgctcacacagccatcctctagtaagtttgtaagacgtctgatgacgtgtgggaacttattggaatctacaatttgccgaaaggcatcctactgccagcggaacaacacctggtaacaggtgcccctggggccaaaagccaaggtttaacagaccctttaggattggtgaaaacctgaattgtagtggaaaatatttagtacctgctaatttggtagtagtgcaaacactagttgtaaggcccacgaaggatgcccagaaggtacccgtaggtaacaagtgacactatggatctgatctggggctggctacctctatcttggtgagtcggttaaaaaacgtctagtgggccaaacccaggggggatccctggtttccctttatatcattatagct

SEQ ID NO: 79 - DNA, 654 bp, Unknown
  Description of Unknown: unclassified Parechovirus sequence
ttgttacagttgaggcttccctttcccagccctgaggcggctggtcaataaaagcctcaactgtaacaaacacctaagattattacaataaccccatgcctggtctccactagttgaaggcaacttgcaataaaataagtggaaacaagacgcttaaagcatggtgtgaattaacctttctaacctgcactttgtgtggggtggcagatggcgtgccataattctattagtgagataccacgcttgtggaccttatgctcacacagccatcctctagtaagtttgtgagacgtccggtgacgtgtgggaacttattggaaacaacattttgctgcaaagcatcctattgccagcggaataacgcttggtaacaagcgcctctggggccaaaagccaaggtttaacagaccctttaggattggttcggaacctggaatgttgtggaagatacttagtacctgctgatctggtagtaatgcaaacactagttgtaaggcccacgaaggatgcccagaaggtacccgtaggtaacaagtgacactatggatctgatctggggccaggcacctctatcttggtggcctggttaaaaaacgtctagtgggccaaacccgggggggatccccggtttccttttatttgttcaaagtcact

SEQ ID NO: 80 - DNA, 663 bp, Parechovirus A
gtacattagatgcgtcatctgcaactttagtcaataaattacctccaatgtcattaccaacattccctaccttttcactaacacctaagacaacaagtacctatgcctggtctccactattcgaaggcaacttgcaataagaagagtggaattaagacgcttaaagcatagagctagttatcttttctaacccacaaagttttgtggggtggcagatggcgtgccataactctattagtgagataccatgcttgtggatcttatgctcacacagccatcctctagtaagttgataaggtgtctggtgatatgtgggaactcacatgaaccattaatttaccgtaaggtatcctatagccagcggaatcacatctggtgacagatgcctctggggccgaaagccaaggtttaacagaccctataggattggtttcaaaacctgaattgatgtggattgtgtatagtacctgttgatctggtaacagtgtcaacactagttgtaaggcccacgaaggatgcccagaaggtacccgtaggtaacaagtgacactatggatctgatctggggccagctacctctatcatggtgagttggttaaaaaacgtctagtgggccaaacccaggggggatccctggtttccttttacctaatcaaagccact

SEQ ID NO: 81 - DNA, 664 bp, Parechovirus A
ccgcattgctgagcttctctaggagagtccctttcccagccttgaggcggctggtcaataaaagcctcaattgtaacaaacacctaagcttatcatacaagccccatgcctggtctccactagtcgaaggcaacttgcaataagatgagtggaaacaagacgcttaaagcatggtgtaaattagcttttctaacccacatattgtgtggggtggcagatggcgtgccataattctattagtgagataccacgcttgtggaccttatgctcacacagccatcctctagtaagtttgtgagacgtctggtgacgtgtgggaacttatcggaaacagtattttgctgcaaagcatcctattgccagcgggacaacacctggtaacaggtgcctctggggccaaaagccaaggtttaacagaccctttaggattggtttaaaacctgaaatattgtggaagatacttagtacctactaatctggtagtagtgcaaacactagttgtaaggcccacgaaggatgcccagaaggtacccgtaggtaacaagtgacactatggatctgatctggggccaggtacctctatcttggtgacctggttaaaaaacgtctagtgggccaagcccgggggggatccccggtttccttttattttatcaatgccact

SEQ ID NO: 82 - DNA, 667 bp, Parechovirus A
gtaataatcttagatgtttgttacagttgaggcttttattgaccagccgcctcagggctgggaaagggactcaactgtaacaaacatctaagattattacattaaccccatgcctggtctccactagttgaaggcaacttgcaataaaatgagtggaaacaagacgcttaaagcatggtgtaaattaattttctaacccacattaagtgtggggtggcagatggcgtgccataactctactagtgagataccatgcttgtggaccttatgctcacacagccatcctctagtaagtttgtgagacgtctggtgacgtgtgggaacttattggaaacaacaccttgctgtaaagcatcctattgccagcggaacaacacctggtaacaggtgcctctggggccaaaagccaaggtttaacagaccctttaggattggttctgaacctgagatgttgcggaagatatttagtacctgccgatctggtagtaatgcaaacactagttgtaaggcccacgaaggatgcccagaaggtacccgtaggtaacaagagacactatggatctgatctggggtcaggtacctctatcttggtgacctggttaaaaaacgtctagtgggccaaacccgggggggatccccggtttccttttactttatcaatgccact

SEQ ID NO: 83 - DNA, 668 bp, Parechovirus A
taccccgacttgctgagctcctctaggagagcccctttcccagccttggggcggctggtcaataaaagcctcaaatgtaactaacatctaagatagattataaccaccctatgcctggtccccactagtcgaaagcacctggcaataagacgagtggaataaggacgcttaaagcatagtgttagcatacacttctaacttgtgattttcacaaggtggcagatggcgtgccataactctatcagtgagataccacgcttgtggaccttatgctcacacagccatcctctaataagtttgtaagacgtctgatgacgtgtgggaacttattggaaacaacaatttgctgcaaagcatcctactgccagtggactaacacctggtaacaggtgcccctggggccaaaagccaaggtttaacagaccctttaggattggtatatacctgagttgttgtggaaaatacttagtacctactgatttggtagccggacaaacactagctgtaaggcccacgaaggatgcccagaaggtacccgtaggtaacaagtgacactatggatctgatctggggtcgaccacccctatccaggtgggtcgattaaaaaacgtctagtgggccaaacccaggggggatccctggtttccttttattttatcacagtcact

SEQ ID NO: 84 - DNA, 669 bp, Parechovirus A
taccccgacttgctgagcttctctaggagagcccctttcccagccctgaggcggctggtcaataaaagcctcacacgtaactaacatctaagacaatcttatacaaccttgtgcctggtccccaccagtcgaaggcatctagcaataagataggtggaacaaggacgcttaaagcacaaagacaattaacttttctaactcacaatttgttgtggggtggtagatggcgtaccataattctattagtgagataccacgcttgtggaccttatgctcatacagccatcctctagtaagtttgtaaggtgtctggtgatgtgtgggaacttattggaaacaacattttgccgcaaggcatccattagccagcggaataacacctggtaacaggtgcctctggggccaaaagccaaggtttaacagaccctaatggattgatttaaatctggaatgttgtggaatatatttagtacctgctgatctggtagcaatacaaacactagttgtaaggcccacgaaggatgcccagaaggtacccgtaggtaacaagtgacactatggatctgatctggggctggatacctctatcttggtgatccagttaaaaaacgtctagtgggccaaacccaggggggatccctggtttccttttattttattactgccatt

SEQ ID NO: 85 - DNA, 672 bp, Parechovirus A
cgtcgggccttataccccgacttgctgagcttctctaggagagtccctttcccagccagaggtggctggtcaaataatacctactgtaactaaacatctaagaaataacaaccacacacctggtctccaccagccgaaagcaactagcaataaggtgggtggatatagacgcttaaagtgtgttgtgcattttcttttctagcctgtgttttacacagggtggcagatggcgtgccataactctaatagtgagataccacgcttgtggaccttatgctcacacagccatcctctagtaagtttgtaagacgtctgatgacgtgtgggaacttgttggaaatagcagtttgctgcaaagcatcccattgccagcggatcaacatctggtgacagatgcctctggggccaaaagccaaggtttaacagaccccttgggattggttcaaacctgaactgctatggaaagcacttagtacctgctgatttggtagtaatgcaaacactagttgtaaggcccacgaaggatgcccagaaggtacccgtaggtaacaagtgacactatggatctgatctggggccaactacttctatctaagtgagttggttaaaaaacgtctagtgggccaaacccaggggggatccctggtttcctctcaattttaaacagtcact

SEQ ID NO: 86 - DNA, 673 bp, Unknown
  Description of Unknown: unclassified Avisivirus sequence
gagctaatggggtccctatcttcatagccaagatccatagtggctcaggaaatagaggggggttcccagggtggattttccgaatcttagatttcggatatccgccttgggacaccccctttccccagccatgggttaaatggcccttcaccaggttaggtgctgtctaggcttccagtaaagaagtcactcgagctacgaacaaatcctaagagggaatggtggttagccccgtccactgggtgtctttcacccactttcagtggatcaatccaccccaactcccccctctatttcctgagccactatggatcttggctatgaagatagggaccccattagctccagtgccaagggatctcccccctcgtaagaggtgcccttgggcccaaaaggctagttggcaaggtgaagtgaaggaagctgctaacgtggtgaccttaagcggatcctgaagctgaccttggagtgaaaccctattggatggctgcgtgaagttgtggaggtggaaatggagaaagttggccgcttgtgagtagatgcccagaaggcataaggctgatctggggccagtgactataccgttccggtaaacctggtataaaaaccatgaaagcaaacgggttaaatttctctatttttattttctcttactgcagtgactacaggcaaa

SEQ ID NO: 87 - DNA, 674 bp, Unknown
  Description of Unknown: Human parechovirus 1 isolate SH401, complete genome.1 sequence
ggccttataccccgacttgccgagtttctctaggagagtccctttcccagccgtgaggtggctggtcaataaaaacctcaaatgtaactaacatcaaagaaaaatcactcaaccccatgcctggcccccgctagtcgaaagcaacttgcaataagatgagtggaccaagggcgcttaaagcatggtgtcagcaatcttttctaacccatgtttcacatggggtggcagatggcgtgccataactctattagtgggataccacccttgtggaccttatgcccacacagccatcctctagtaagtttgtatgacgtccgatgacgtgtgggaacttattggaagcaacaatttgccgaaaggcatcctattgccagcggattaacacctggtaacaggtgcccctggggccaaaagccaaggtttaacagaccctttaggattggtttaaacctgaattgttgtggaagatatttagtacctgctgatttggtagtaatgcaaacactagttgtaaggcccacgaaggatgcccagaaggtacccgtaggtaacaagtgacactatggatctgatctggggctgactaccactatcctggtgagtcagttaaaaaacgtctagtgggccaaacccaggggggatccctggtttctttttattttataactgtcaat

SEQ ID NO: 88 - DNA, 677 bp, Parechovirus A
ggccgtcgggccttataccccgatttgctgagcttctctaggagagcccttttcccagccagaggtggctggttaaacaatacctattgtaacaaaacatctaagacataacaaccgtacacctggtctccactggccgaaggcaactagcaataaggtaggtgggttcagacgcttaaagtgtgttgtatatattcttttctaacctgtgttttacacagggtggcagatggcgtgccataaccctaatagtgagataccacgcttgtggaccttatgctcacacagccatcctctagtaagtttgtaagacgtctgatgacgtgtgggaacttgttggagataacattttgctgcaaagcatcccattgccagcggatccacatctggtaacagatgcctctggggccaaaagccaaggtttaacagaccctttgggattggttcaaacctgaattgttatggaagacatttagtacctgctgatttggtagtagtgcaaacactagttgtaaggcccacgaaggatgcccagaaggtacccgtaggtaacaagtgacactatggatctgatctggggccaactacctctatctaggtgagttggttaaaaaacgtctagtgggccaaacccaggggggatccctggtttccttttttaaatttgaataatcact

SEQ ID NO: 89 - DNA, 679 bp, Unknown
  Description of Unknown: unclassified Sapelovirus sequence
gggaaatacggggggggattacccccctcccgtatttccccctgttgcccgggggtagtgaacgatggatctacggatcctttgttcacagggccaaggttcaagcccacttttgtgagaagcatgctttactaggctatgggttgagtggcccataggcaaccctatgaagaggctacactcactacatccgccaacaggcccaggcgtatgtgggcctataagaaatgtacgttcgtccgcttatggtgcctaatccataggcatctaggacaagtacttctgtttccccggtcacgaggaatatgctgtacccacggcagaagccagacatgatcgttacccgactccgaactgtgcgaaacctagtaccttcaagtgaaacagagatcattgatccggggtgaccctgaccccagaaactcatgatgggtgtcgccgttccgacaggggagaccctgggcgtcgccgcgctggcatgagggcccattagggcatgatcaatgcggaccttgaggcgaagagtctagtgcgcttcggtttattcctccaggcccctgaatgcggctaatcctaaccccggagcgtatcacaccaatccaggtgctggtgcgtcgtaatgcgtaagtctgggatggaaccgactactttgggtgtcctgtgtttctaatttctcttg

SEQ ID NO: 90 - DNA, 680 bp, Parechovirus A
cgtcgggccttacaccccgacttgctggacttctctaggagagtccctttcccagccctgaggcggctggtcaataaaagcctcaattgtaacaaacatctaagcttattacaataaccccatgcctggtctccactagttgaaggcaacttgcaataaaatgagtggaaatgagacgcttaaagcatggtgtaaactaacttttctagcccacactttgtgtggggtggcagatggcgtgccataattctaatagtgggataccacgcttgtggaccttatgctcacacagccatcctctagtaagtttgtgtgacgtctggtgacgtgtgggaacttattggaaacaacattttgctgtaaagcatcctattgccagcggaacaacgcctggtaacaggtgcctctggggccaaaagccaaggtttagcagaccctctaggattggtttaaaacctgaaatgttgtggaagatacttagtacctaccgatctggtagtaatgcagacactagttgtaaggcccacgaaggatgcccagaaggtacctgtaggtaacaagcgacactatggatctgatctggggccaggtacctctatcttggtgacctggttaaaaaacgtctagtgggccaaacccgggggggatccccggtttccttttattttatcaatgccact

SEQ ID NO: 91 - DNA, 680 bp, Unknown
  Description of Unknown: Parechovirus A strain NIG13194, complete genome.1 sequence
cgtcgggccttataccccgacttgctgagcttctcgaggagagtcccttttccagccctgaggcggctggtcaataagagcctcaatcgtaacgaacatctaagactgtcaaatcaaccctatgcctggtctccactattcgaaggcaactagcaataagaagagtggatcaatagacgcttaaagcatagtgtacgtaaacctttctaacttgtgttatacacaaggtggcagatggcgtgccataattctattagtgagataccacgcttgtggaccttatgctcacacagccatcctctagtaagtttgtaaggtgtctgatgacgtgtgggaacttattggaaataatagtttgctgcaaagcatcctactgccagcggattaacatctggtaacaggtgcctctggggccaaaagccaaggtttaacagaccctttaggattggttcaaacctgaactattatggaagatacttagtacctgctgatttggtaacagtgcaaacactagttgtaaggcccacgaaggatgcccagaaggtacccgtaggtaacaagtgacactatggatctgatctggggctgactacctctatcttggtgagtcagtcaaaaaacgtctagtgggccaaacccaggggggatccctggttttcttttattttatctcttgcaat

SEQ ID NO: 92 - DNA, 681 bp, Parechovirus A
cgtcgggccttataccccgacttgctgagcttctccaggagagcccctttcccagccctgaggcggctggtcaataaaagcctcatctgtaacaaacatctaagattatgacattaaccccatgcctggtctccactagttgaaggcaacttgcaataaaatgagtgggaacaagacgcttaaagcatggtgtaaatttgcttttctaacccacactttgtgtggggtggcagatggcgtgccataattctattagtgagataccacgcttgtggaccttatgctcacacagccatcctctagtaagttcgtgagatgtctggtgacgtgtgggaacttattggaaacaacattttgctgaaaagcatcctatcgccagcggaacaacacctggtaacaggtgcctctggggccaaaagccaaggtttaacagaccctttaggattggtttaaaacctggaatgttgttgaagatacttagtacctgccgatctggtaatagcacaagcactagttgtaaggcccacgaaggatgcccagaaggtacccgtaggtaacaagtgacactatggacctgatctggggctaggtacctctatcttggtgacctggttaaaaaacgtctagtgggccaaacccgggggggatccccggtttccttttaatttcatcaatgccatt

SEQ ID NO: 93 - DNA, 683 bp, Parechovirus A
tggccgtcgggccttataccccgacttgctgagtttctctaggagagtccctttcccagccttgaggtggctggtcaataaaaacctcaactgtaactaacatctaagctgattttatagataccccatgcctggtccccactagtcgaaagcacctggcaataagatgagtggaaaagggcgcttaaagcatggtgttagtatacatttctaacctgtgactatcacggggtggcagatggcgtgccataactctattagtgagataccacgcttgtggaccttatgctcacgcagccatcctctagtaagcttgcaaggcgtctgatgacgtgtgggaactaattggaaatgacagtttgctgctaagcatcctattgccagcggatcaacacctggtaacaggtgcctctggggccaaaagccaaggtttaacagaccctttaggattggttcaaacctgaactgttgtggaagattctcagtacctgctaatttggtagttaggcaagcactagttgtaaggcccacgaaggatgcccagaaggtacccgtaggtaacaagtgacactatggatctgatctggggccagctacctctttcatggtgagttggtcaaaaaacgtctagtgggccaaacccaggggggatccctggtttcctttattttatcatagtcatt

SEQ ID NO: 94 - DNA, 692 bp, Parechovirus A
agagcttggccgtcgggccttataccccgacttgctgagcttctctaggagagtccctttcccagccctgaggcggctggtcaataaaagcctcaattgtaacgaacacctaagacgataatgataaccctatgcctggtctccactattcgaaggcaccttgcaataagaagagtgggctcaagacgcttgaagcatagagtgcgttttcttttctaatccacacccatgtggagtggcagatggcgtgccataactctattagtgagataccatgcttgtggaccttatgctcacacagccatcctctagtaagtttgtaagacgtctggtgacgtgtgggaacttattggaaacaacattttgctgtaaagcatcctactgccagcggaacaacacctggtaacaggtgcctctggggccaaaagccaaggtttaatagaccctttaggattggtttaaaacctgaaatgttgtggaaaatatttagtacctgccaatctggtagtaatgcaaacactagttgtaaggcccacgaaggatgcccagaaggtacccgtaggtaacaagagacactatggatctgatctggggccagctacctctatcttggtgagttggttaaaaaacatctagtgggccaaacccaggggggatccctggtttccttttattttacctcaaatactatc

SEQ ID NO: 95 - DNA, 695 bp, Unknown
  Description of Unknown: unclassified Parechovirus sequence
tctcctagagagcttggccgtcgggccttataccccgacttgctgagtttctctaggagagtccctttcccagccttgaggcggctggtcaataaaagcctcaaatataacgaacatctaagacaattaaacataccctatgcctggtctccactattcgaaggcaacttgcaataaggagagtggaattaagacgcttaaagcatggagacagtttccttttctaacccacattagtgtggggtggcagatggcgtgccataactctaatagtgagataccacgcttgtggaccttatgctcacacagccatcctctagtaagtttgcaagacgtctggtgacgtgtgggaacttattggaaacaacattctgctgtaaagcatcctaatgccagcggaacaacacctggtaacaggtgcctctggggccaaaagccaaggtttaacagaccctttgggattggttcaaacctggaatgttgtggaaaatacttagtacctgccgatctggtagtagtgcaaacactagttgtaaggcccacgaaggatgcccagaaggtacccgtaggtaacaagtgacactatggatctgatctggggctggatacctctatcttggtgattcagttaaaaaacgtctagtgggccaaacccaggggggatccctggtttctttttattttataatgtcact

SEQ ID NO: 96 - DNA, 696 bp, Parechovirus A
gaaccattctacaacttctttagcggctttccgtgtttggtttgcaaccttagttgcaaaacatttgaaaacacttggccttgggtcaataaaagcctcaactgtaacaaacatctaagattattacattaaccccatgcctggtctccactagttgaaggcaacttgcaataaaatgagtggaaacaagacgcttaaagcatggtgtaaattaacttttctaacccacattttgtgtggggtggcagatggcgtgccataattctactagtgagataccacgcttgtggaccttatgctcacacagccatcctctagtaagtttgtgagatgtctggtgacgtgtgggaacttattggaaacaacattttgctgtaaagcatcctatcgccagcggaacaacacctggcaacaggtgcctctggggccaaaagccaaggtttaacagaccctttaggattggttttaaaacctgaaatgttgtggaagatacttagtacctgccgatctggtagtaatgcaaacactagttgtaaggcccacgaaggatgtccagaaggtacccgtaggtaacaagtgacactatggatctgatctggagctaggtacctctatcttggtgacctggttaaaaaacgtctagtgggccaaacccgggggggatccccggtttccttttattttatcaatgccaat

SEQ ID NO: 97 - DNA, 696 bp, Parechovirus A
tcctagagagcttggccgtcgggccttatacccgacttgctgagtttctctaggagagtccctttcccagccctgaggcggctggtcaataaaagcctcaaatgtaactaacatctaagacatttatgattcaaccccatgcctggtccccactagtcgaaagcatctagccataagatgagtggactaaggacgcttaaagcatggagccaacaaccatttctaacccatgttttgcatggggtggcagatggcgtgccataactctactagtgggataccacgcttgtggaccttatgcccacacagccatcctctagtaagtttgtaagacgtctgatgacgtgtgggaaaacactagaaatattaacttgctgtaaagcatcctactgccagcggaatcacatctggtaacagatgcctctggggccaaaagccaaggtttagcagaccctttaggattggttcaatacctgagttaatatggaaagtgcttagtacctgctgacttggtagtagtgcaaacactagttgtatggcccgcgaaggatgcccagaaggtacccgtaggtaacaagtgacactatggatctgatctggggctggatacctctatcttggtgatccagttaaaaaacgtctagcgggccaagcccaggggggatccctggtttccctatttttattattatcact

SEQ ID NO: 98 - DNA, 697 bp, Unknown
  Description of Unknown: unclassified Parechovirus sequence
tctcctagagagcttggccgtcgggccttataccccgacttgctgagcttctctaggagagcccctttcccagccttgaggcggctggtcaataaaagcctcaaacgtaactaacacctaagataaatctcataaccctatgcctggtccccactagtcgaaagcacctagcaataagatgagtggaccatggacgcttaaagcatagtgccaatatacatttctaacctgtggattcccatggggtggcagatggcgtgccataattctattagtgggataccacgcttgtggatcttatgcccacacagccatcctctagtaagtttgtaaggcgtctgatgacgtgtgggaacttatcggaaacaacaatttgctgcaaagcatcctattgccagcggacaaacacctggtaacaggtgcctctggggccaaaagccaaggtttaacagaccctttaggattggttcttacctggattgttgtggaaggtacttagtacctgctgatttggtagttggacaaacactagttgtaaggcccacgaaggatgcccagaaggtacccgtaggtaacaagggacactatggatctgatttggggtcacctacctctatcttggtgaggtgattaaaaagcgtctagtgggccaaacccaggggggatccctggtttccttttattttacacagacact

SEQ ID NO: 99 - DNA, 701 bp, Parechovirus A
ttttgaaaggggtctcctagagagcttggccgtcgggccttataccccgatttgctgagcttctctaggagagcccctttcccagccagaggtggctggcaaaataatacctactgtaacaaaacatctaagatgcaataaccacacacctggtttccactggccgaaggcaactagcaataaggcaggtgggttcagacgcttaaagtgtgttgtaaatattcttttctaacctgtgttctacacagggtggcagatggcgtgccataactctaatagtgagataccacgcttgtggaccttatgctcacacagccatcctctagtaagtttgtaagacgtctgatgacgtgtgggaacttgttggaaataacagtttgctgcaaagcatcccactgccagtggattcacatctggtaacagatgcctctggggccaaaagccaaggtttaacagaccctttgggattggttcaaacctgaactgttatggaagacacttagtacctgctgatttggtagtaatgcaaacactagttgtaaggcccacgaaggatgcccagaaggtacccgtaggtaacaagtgacactatggatctgatctggggccggctacctctatctaggtgagttggttaaaaaacgtctagtgggccaaacccaggggggatccctggtttctttttactttgagtagtcatt

SEQ ID NO: 100 - DNA, 702 bp, Parechovirus A
tttgaaaggggtctcctagagagcttggccgtcgggccttacaccccgacttgctgagtttctctaggagagtccctttcccagccagaggtggctggtcaaacaataccaaacgtaactaaacatctaagataacatagccctatgcctggtctccaccagttgaaggcatcttgcaataaaatgggtggattaagacgcttaaagcatggagtcaattatcttttctaactagtgatcttcactgggtggcagatggcgtgccataactctattagtgggataccacgctcgtggatcttatgcccacacagccatcctctagtaagtttgcaaggtgtctgatgaggcgtgggaacttattggaaataattacttgctgcgaagcatcctactgccagcggatcaacacctggtaacaggtgcccctggggccaaaagccacggtttaacagaccctttaggattggttaaaacctgagtaattatggaagatacttagtacctaccaacttggtaacagtgcaaacactagttgtaaggcccacgaaggatgcccagaaggtacccgcaggtaacaagagacactgtggatctgatctggggccacctacctctatcctggtgaggtggttaaaaaacgtctagtgggccaaacccaggggggatccctggtttccttattttagtgtaaatgtcatt

SEQ ID NO: 101 - DNA, 705 bp, Parechovirus A
gaaaggggtctcctagagagcttggccgtcgggccttataccccgacttgctgagtttctctaggagagtccctttcccagccctgaggcggctggataataaaggcctcacatgtaacaaacatctaagacaaaataatttgccttgcacctggtccccactagttgaaggcatctagcaataagatgagtggaacaaggacgcttaaagtgcaatgatagttatcttttctaacccactatttatagtggggtggtggatggcgcaccataattctaatagtgagataccacgcttgtggaccttatgctcacacagccatcctctagtaagtttgtgagacgtctggtgacgtgtgggaacttactggaaacaatgctttgccgtaaggctttcattagccagcggaccaccacctggtaacaggtgcctctggggccaaaagccaaggtttaatagaccctaatggaatggttcaaacctggagcattgtggaaagtacttagtacctgctgatctggtagtaatgcaaacactagttgtacggcccacgaaggatgcccagaaggtacccgtaggtaacaagtgacactatggatctgatctggggccaactacctctatcttggtgagttggttaaaaaacgtctagtgggccaaacccaggggggatccctggtttccttttattttactttgtcaat

SEQ ID NO: 102 - DNA, 706 bp, Unknown
  Description of Unknown: unclassified Potamipivirus sequence
cttattttataagtttcttgcagttggcctttttcaacgtcgtggctgacgttaaaaagccacaattccacttaccttttaccttttatgtttaatgtttgttagttttgtgatctttaacaaatagatctaaataatttgttggtaaccaatctcggatgtttcggctgcattgtagtttatttatttcattttagttgtaggtggccactacgtcctggaatcatacatggtaacatgtacctcggcggttatccactattacgctaatctaagaatatttaaatgaaaatgtaagtgttacggctgactttgggcctgatagttaaatgctcgcactgacagatagtaccctcctttaggatcgattctgttacatgggatccattttggtgccccactgattcaacctctttgttgaaaaagagttagcatactacaaattttccaaacaaaaaccctttttaatgactacaacttatgattttatgaattttactgctcttgaaaaagatattttgacattgatcgctgtactgtttcagacattcattgcatccatttttgttggctactcctcacaaactcaaaacttttccacacgagaaaccttgtttattgaattttgcctttatattttggaacttgttgttggatttattgtttgcttaattattgacctcacacctgttttaaacactacaat

SEQ ID NO: 103 - DNA, 707 bp, Unknown
  Description of Unknown: unclassified Hepatovirus sequence
ggtctctggagagttccggagtccctcttggaggtccatggtgaggggacctgatacctcaccgccgtttgcctaggctataggctatttttccctttcccttttccctgttttgtgtaaatattaattcctgcaggctcagggttctttaatctgtttctctataagaacactcattttcacgctttctgtctgctttcttccagggctctccccttgccctaggctctggccgttgcgcccggcggggtcaactccatgattagcatggagctgtaggagtctaaattggggacgcagatgtttgggacgtcaccttgcagtgttaacttggctctcatgaagctctttgatcttccacaagaggtaggctacgggtgaaacctcttaagctaatacttctatgaagagatgctttggatagggtaacagcggcggatattggtgagttgttaagacaaaaacctttcaacgccggaggactggctctcatccagtggatgcattgagtggattgtttgtcagggctgtctctaggcttaatctcagacctctctgcgcttagggcaaacattacttggccttaaatgggattctgtgagaggggatccctccattgactgctggacttttctttggggccttaggtagtgtttgcctctgaggtactcaggggcatttaggtttttcctcactctcaaataatt

SEQ ID NO: 104 - DNA, 707 bp, Parechovirus A
tttgaaaggggtctcctagagagcttggccgtcgggccttataccccgacttgctgagtctctctaggagagtccctttcccagccttgaggcggctggacaataaaagcctcaactgtaacaaacacctaagattattatattaaccccatgcctggtctccactggttgaaggcaacttgcaataaaatgagtggaaattagacgcttaaagtgtgttgtacatattcttttctaacctgtgttctacacagggtggcagatggcgtgccataactctaatagtgagataccacgcttgtggaccttatgctcacacagccatcctctagtaagtttgtaagacgtctgatgacgtgtgggaacttgttggaaataacagtttgctgcaaggcatcccactgccagcgggttcacatctggtaacagatgcctctggggccaaaagccaaggtttaatagaccctttgggattggttcaaacctgaactgttatggaagacatttagtacctgctgatttggtagtaatgcaaatactagttgtaaggcccacgaaggatgcccagaaggtacccgtaggtaacaagtgacactatggatctgatctggggccggctacctctatctaggtgagttggttaaaaaacgtctagtgggccaaacccaggggggatccctggtttctttttaatttgagtagtcact

SEQ ID NO: 105 - DNA, 708 bp, Parechovirus A
tttgaaaggggtctcctagagagcttggccgtcgggccttataccccgacttgctgagtttctctaggagagcccttttcccagccctgaggcggctggtcaataaaagcctcaaacgtaactaacacctaagaagatcatgtaaaccctatgcctggtctccactattcgaaggcaacttgcaataagaagagtgggatcaagacgcttaaagcatagagacagttttcttttctaacccacatttgtgtggggtggcagatggcgtgccataactctaatagtgagataccacgcttgtggaccttatgctcacacagccatcctctagtaagtttgtgagacgtctggtgacgtgtgggaacttattggaaacaacattttgctgcaaagcatcctactgccagcggaaaaacacctggtaacaggtgcctctggggccaaaagccaaggtttaacagaccctttaggattggttctaaacctgagatgttgtggaagatatttagtacctgctgatctggtagttatgcaaacactagttgtaaggcccatgaaggatgcccagaaggtacccgtaggtaacaagtgacactatggatctgatttggggccagatacctctatcttggtgatctggttaaaaaacatctaatgggccaaacccgggggggatccccggtttcctcttattctatcaatgccact

SEQ ID NO: 106 - DNA, 708 bp, Parechovirus A
tttgaaaggggtctcctagagagcttggccgtcgggccttataccccgacttgctgagcttctctaggagagtccctttcccagccctgaggcggctggttaataatagcctcaagcgtaactaatatctaagaagattgtgcaaaccctatgcctggtctccactattcgaaggcaacttgcaataagaagagtggaatcaagacgcttaaagcatagagacagtattcttttctaacccacattactgtggggtggcagatggcgtgccataattctaatagtgagataccacgcttgtggaccttatgctcacacagccatcctctagtaagtttgtgagacgtctggtgacgtgtgggaacttattggaaacaacattttgctgcaaagcatcctactgccagcggaacaacacctggtaacaggtgcctctggggccaaaagccaaggtttaatagaccctttaggattggttctaaacctgagatgttgtggaaaatatttagtacctgctgacctggtagtaatacaaacactagttgtaaggcccacgaaggatgcccagaaggtacccgtaggtaacaagtgacactatggatctgatctggggccaaccacctctatcttggtgggttggttaaaaaacgtctagtgggccaaacccaggggggatccctggtttccttttattttatcatatttaat

SEQ ID NO: 107 - DNA, 708 bp, Parechovirus A
tttgaaaggggtctcctagagagcttggccgtcgggccttataccccgacttgccgagtttctctaagagagtccctttcccagccttgaggcggctggtcaataaatgccttaaatgtaactaacacctaagattgctttaacaaccctatgcctggtctccactagttgaaggcatctagcaataaaatgagtggaatcaagacgcttaaagcatagtgccagcatgcatttctaacctgcagtttttgcagggtggcagatggcgtgccataattctattagtgagatactacgcttgtagatcttatgctcacacagccatcctctagtaagtttgtaagatgtctgatgacgtgtgggaacttattggaaataacaccttgctgtaaagcatcttattgccagcggaacaacacctggtaacaggtgcctctggggccaaaagccaaggtttaacagaccctttaagattggttcaaacctgaggtgttatggaaaatattcagtacctgctgatttggtagtaatgcaaacactagttgtaaggcccacgaaggatgcccagaaggtacccgtaggtaacaagtgacactatggatctgatctggggccaactacctctatcttggtgagttggttaaaaaacgtctagtgggccacacccaggggggatccctggttttcttttattacacaattgtcatt

SEQ ID NO: 108 - DNA, 709 bp, Parechovirus A
tttgaaaggggtctcctagagagcttggccgtcgggccttataccccgacttgctgagctcctctaggagagtccctttcccagccttgaggcggctggtcaataaaagcctcaattgtaacaaacatctaagattattatattaaccccatgcctggtctccgttagttgaaggcaacttgcaataaaatgagcggaaacaagacgcttaaagcatggtgtaaattaacttttctaacccacatcttgtgtggggtggcagatggcgtgccataactctattagtgagataccacgcttgtggaccttatgctcacacagccatcctctagtaagtttgtgagacgtctggtgacgtgtgggaacttattggaaacaacattttgctgtaaagcatcctattgccagcggaacaacacctggtaacaggtgcctctggggccaaaagccaaggtttaacaaaccctttaggattggttctaaacctgagatgttgtggaagatacttagtacctaccgatccggtagtagtgcaaacactagttgtaaggcccacgaaggatgcccagaaggtacccgtaggtaacaagcgacactatggatctgatctggggccaggtacctctatcttggtgatctggttaaaaaacgtctagtgggccaaatccgggggggatccccggtttccttttattttatcaatgccact

SEQ ID NO: 109 - DNA, 709 bp, Parechovirus A
tttgaaaggggtctcctagagagcttggccgtcgggccttataccccgacttgctgagtctctctaggagagtccctttcccagccttgaggcggctggacaataaaagcctcaactgtaacaaacacctaagattattatattaaccccatgcctggtctccactggttgaaggcaacttgcaataaaatgagtggaaataagacgcttgaagcatggtgcaaatctacttttctaacccacactttgtgtggggtggcagatggcgtgccataattctattagtgagataccacgcttgtggaccttatgctcacacagccatcctctagtaagtttgtgaggcgtctggtgacgtgtgggaacttattggaagcaacattttgctgtaaagcatcctatcgccagcggaacaacgcctggtaacaggtgcctctggggccaaaagccaaggtttaacagaccctttaggattggtttaaaacctgaaatgttgtggaaaatacttagtacctaccgacctggtagtaatgcaaacactagttgtaaggcccacgaaggatgcccagaaggtacccgtaggtaacaagtgacactatggatctgatctggggccaggtacttctatcctagtgacctggttaaaaaacgtctagtgggccaaacccgggggggatccccggtttccttttattttactaatgctatt

SEQ ID NO: 110 - DNA, 709 bp, Parechovirus A
tttgaaaggggctctcctagagagcttggccgtcgggccttacaccccgacttgctgagcttctctaggagagcccctttcccagccttgaggcggctggtcaataaaagcctcacatataaataacatctaagaatagcttcataaccctacacctggtccccactagtcgaagacaacttgtaataagatgagtggaacaaggacgcttaaagtgtagtgaaaatattcctttctaacccatgcacctcatggggtggcagatggcgtgccataactctaatagtgagataccatgcttgtggaccttatgctcacacagccatcctctagtaagtttgtgagatgtccgatgacgtgtgggaacttattggaaacaacaatttgccgtaaggcatcctaatgccagcggattcacacctggtaacaggtgcccctggggccaaaagccaaggtttaacagacccgttaggattggtttaaacctgaattgttgtgaaagatactcagtacctgctgatttggtagtaatacaaacactagttgtaaggcccacgaaggatgcccagaaggtacccgtaggtaacaagtgacactatggatctgatctggggccaactacctctatcttggtgagttggttaaaaaacgtctagtgggccaaacccgagggggatcctcggtttctatttattttatatttgctaac

SEQ ID NO: 111 - DNA, 709 bp, Parechovirus A
tttgaaaggggtctcctagaaagcttggccgtcgggccttataccccgacttgccgagtttctctaggagagtccctttcccagccctgaggcggctggtcaataaaagcctcaaacgtaactaacatctaagattgatttaataacaccatgcctgatccccaccagtcgaagacaactagtaataagacgggtggaataaggatgcttaaagcatggcgtaaatattcttttctaacccatgatttcatggggtggcagatggcgtgccataactctattagtgagataccacgcttgtggaacttatgctcacacagccatcctctagtaagtttgtgagatgtctaatgacgtgtgggaacttattggaagcaacaatttgccgtacggcatcctactgccagcggattcacacctggtaacaggtgcccctggggccaaaagccaaggtttaacagaccctttaggattggttaaaacctgaattgttgtggaagatactcagtacctgctgatttggtagtaatgcaaacactagttgtaaggcccacgaaggatgcccagaaggtacccgtaggtaacaagtgacactatggatctgatctggggccaactacttctatcatggtgagttggttaaaaaacgtctagtgggccagacccaggggggatccctggtttccttttttatttcactacagccaat

SEQ ID NO: 112 - DNA, 709 bp, Parechovirus A
tttgaaaggggtctcctagagagcttgcctagggccttataacccgacttgctgagcttctataggaaaaaaccctttcccagccttggggtggctggtcaataaaaacccccatagtaaccaacacctaagacaatttgatcaaccctatgcctggtccccactattcgaaggcaacttgcaataagaagagtggaacaaggatgcttaaagcatagtgtaaatgatcttttctaacctgtattatgtacagggtggcagatggcgtgccataaatctattagtgggataccacgcttgtggaccttatgcccacacagccatcctctagtaagtttgtaaaatgtctggtgagatgtgggaacttattggaaacaacaatttgcttaatagcatcctagtgccagcggaacaacatctggtaacagatgcctctggggccaaaagccaaggtttgacagacccattaggattggtttcaaaacctgaattgttgtggaagatattcagtacctatcaatctggtagtggtgcaaacactagttgtaaggcccacgaaggatgcccagaaggtacccgcaggtaacaagagacactgtggatctgatctggggccaactacctctatcaggtgagttagttaaaaaacgtctagtgggccaaacccaggggggatccctggtttccttttattgttaatattgacatt

SEQ ID NO: 113 - DNA, 712 bp, Parechovirus A
cacatgagttatctgatgtcctctagcccatgttggtgtccactcatgtgtttccaatctaaccagtctaggagagtccctttcccagccttgaggcggctggtcaataaaaacctcaattgtaacaaacatctaagattattacattaaccccatgcctggtctccactagttgaaggcaacttgcaataaaatgagtgggaacaagacgcttaaagcatggtgtgaattaattttctaacccacatcgagtgtggggtggcagatggcgtgccataactctactagtgagataccatgcttatggaccttatgctcacacagccatcctctagtaagtttgtgaggcgtctggtgacgtgtgggaacttattggaaacaacaccttgctgtaaagcatcctattgccagcggaacaacacctggtaacaggtgcctctggggccaaaagccaaggtttaacagaccctttaggattggttttgaacctgagatgttgcggaagatatttagtacctgccgatctggtagtaatgcaaacactagttgtaaggcccacgaaggatgcccagaaggtacccataggtaacaagtgacactatggatctgatctggggccaggtacctctatcttggtgacctggttaaaaaacgtctagtgggccaaacccgggggggatccccggtttccttttactttattaatgccact

SEQ ID NO: 114 - DNA, 713 bp, Unknown
  Description of Unknown: unclassified Rosavirus sequence
ggaccggcgctcacccgtttcgacgagtgaccgcctaggattctctctgcccttgctttggacgcccgccacggcgttaaactggcacttcccctcacccctaccctgtaactaagtttgcacctcgcccagacaggctgctaagacgcttgttgctacagtatgtctggatccgcgagttctccttaagaaatcttttccacctccgccggtgcctatgccggtcgagacgggttaggaccccgttggctcaggccagagacaatcggtagtagtctttctactctcgcccatgccggttgtcacaccctcactagtcttaccaaggttgtaaattgtctgtgaaagctttacatgaactctgctgtgttgtagcgatggatgtgttgtgagcggatttccccacgtggtaacacgtgcctctcagaccaaaagtcacggtgttaacagcacccgcacatctggctgccttcccccgcagcccacagctttgtgattgtttagttagtaacggaacatttggcaatcctgaactaaggttagtgcaacggctaaggatgccctgaaggtacccgcaggtaacgttaagacactgtggatctgatcaggggccctcggtgcgcgtgctttacacgcgtagccagggttaaaaaacgtctatgccgtttcccccccgggagggggggttccttacccccatcacaattggcatt

SEQ ID NO: 115 - DNA, 717 bp, Megrivirus E
gtttgggggggcgttcccccaggggctcctttccggtgtgaggcttggcaacctcatatcgttactctgccgaccagtctgggtcgtgtggccacacaatgggattcgttctgttgtgtagagtcacatggcattactgggctgatcggtggggatccgttgccacccctaaacccttacatttactggactgcttttcttggccccggaatgattcgctcacccgcgatgaggactgttgttcttattatggcaggattacgcgtctggtccgcgtaaggactaattcctatgtttatacgttactaccttgttctgaacggtgggcgccaccccgcctagtaggatcctggcttatcgtgtagacctctagggaccacattagctagagtgtaggctgctatggatggagtagtgacccctttttgggtatcactctctaagactccggaatgtgtcatagtacgctggaaatccttacttgtttttccatgagggggaggtggtgctgaaatattgcaagccacccctcggttaaaacagtttggtgccgcttatgccatattaccgccccttgtagttgggctgtttttgcagctccgggttagtagagtaccatagtggacgcggtgttgggaatcaccgccttggctgcacactgcttgatagagctgcggctggtcaagctaattgtggtataaccagttgatttggcat

SEQ ID NO: 116 - DNA, 736 bp, Unknown
  Description of Unknown: unclassified Hepatovirus sequence
ttcaagaggggtctccggggatttccggagtccctcttggaagtccatggtgaggggacttgatacctcaccgccgtttgcctaggctataggctaaattttccctttccccttccccttccttgttttgattgtaaatatcaattcctgcaggttcagggttcttaaattggcattaaatttgtttctctataagaacactcaattttcacgctttctgtcttctttcttccagggctctccccttgccctaggctctggccgttgcgcccggcggggtcaactccatgattagcatggagctgtaggagtctaaattggggacacagatgtttggaacgtcaccttgcagtgttaacttggctttcatgaatctctttgatcttccacaagaggtaggctacgggtgaaacctcttaggctaatacttctatgaagagatgctttggatagggtaacagcggcggatattggtgagttgttaagacaaaaaccattcaacgccggaggactgactctcatccagtggatgcattgagtggattgactgtcagggctgtctctaggcttaattccagacctctctgtgcttggggcaaacatcatttggccttaaaaggggttctgtgagaggggatccctccattaacagctggactgttctttggggccttatgtggtgtttgccgctgaggtactcaggggcatttaggtttttcctcattctcaaataata

SEQ ID NO: 117 - DNA, 737 bp, Unknown
  Description of Unknown: unclassified Hepatovirus sequence
cttcaagaggggtctccggaggtttccggagcccctcttggaagtccatggtgaggggacttgatacctcaccgccgtttgcctaggctataggctaaatttccctttccctgtccttcccttatttccctttgttttgcttgtaaatattgattcctgcaggttcagggttctttaatcatgtttccctataagaacactcaattttcacgctttctgtcttctttcttccagggctctccccttgccctaggctctggccgttgcgcccggcggggtcaactccatgattagcatggagctgtaggagtctaaattggggacgcagatgtttgggacgtcaccttgcagtgttaacttggctctcatgaacctctttgatcttccacaaggggtaggctacgggtgaaacctcttaggctaatacttctatgaagagatgctttggatagggtaacagcggcggatattggtgagttgttaagacaaaaaccattcaacgccggaggactggctctcatccagtggatgcattgagtggattgattgtcagggctgtctctaggtttaatctcaagacctctctgtgcttagggcaaacaccatttggccttaaatgggatcctgtgagagggggtcccctccattgacagctggactgttctttggggccttatgtggtgtttgcctctgaggtactcaggggcatttaggtttttcctcattcttaaacaata

SEQ ID NO: 118 - DNA, 742 bp, Unknown
  Description of Unknown: unclassified Enterovirus sequence
ttaaaacagctctggggttgcacccaccccagaggcccacgtggcggctagtactccggtaccacggtacccttgtacgcctgttttatactcccttcctccgcaatttagaagctcatgatcaagttcaataggagggggtacaaaccagtaccaccacgaacaagcacttctgtttccccggtgatgttgtatagactgctcgcgcggttaaaagcgacggatccgttatccgctcatgtacttcgagaagcctagtattacctcgggatcttcgacgcgttgcgctcagcactcaaccccagagtgtagcttaggtcgatgagtctggacattcctcaccggcgacggtggtccaggctgcgttggcggcctatctatggctaacgccataggacgctagttgtgaacaaggtgtgaagagcctattgagctacatgagagtcctccggcccctgaatgcggctaatcccaacctcggagcaggcgatcacaagccagtgattggcctgtcgtaatgcgtaagtccgagacggaaccgactactttgggtgtccgtgtttccttttatttttatcatggctgcttatggtgacaatcagtgattgttgtcatagagcgaattggattggccatccggtgaaaacaaagtcaattactttctcacttgttggacctacacccgatacgctttacccccaagctaattaaaattattagaagttaggactacggtgtcaca

SEQ ID NO: 119 - DNA, 743 bp, Enterovirus C
ttaaaacagcctgtgggttgttcccaccccagaggcccacgtggcggctagtacaccggtatcacggtacccttgtacgcctgttttatactccctaccccgtaacttagaagcaataatccaagttcaatagtaggggtacaaaccagtaccaccacgaacaagcacttctgtttccccggtgatatcgtatagactgtacccacggtcgaaaatggtggatccgttatccgcttttgtacttcgagaagcccagtaccatcttggaatcttcgatgcgttgcgctcagcactcgaacccggagtgtagcttaggccgatgagtctggacaatccccaccggcgacggtggtccaggctgcgttggcggcctacctgtggcccaaagccacaggacgctagttgtgaacaaggtgcgaagagcctattgagctacaaaagagtcctccggcccctgaatgcggctaatcccaaccatggagcaggtgatcacaaaccagtggtaagcctgtcgtaacgcgcaagtccgtggcggaaccgactactttgggtgtccgtgtttccttttatttttgtatggctgcttatggtgacaatcaaagattgttatcataaagcgaattggattggccatccagtgagagtaaagcacattatttacttgcttgttgggtttgcccctttgatttgtaacactctttatctaccttatattgtacttttggttagacaacagtatcacg

SEQ ID NO: 120 - DNA, 743 bp, Enterovirus C
ttaaaacagctctggggttgcacccaccccagaggcccacgtggcggctagtactccggtattgcggtacccttgtacgcctgttttatactcccttcccgtaacttagacgcacgacaccaagttcaatagaagggggtgcaaaccagtaccaccacgaacaagcacttctgtttccccggtgatgttgtatagactgcttgcgtggtcgaaagcgacggatccgttacccgcttatgtacttcgagaagcccagtaccacctcggaatcttcgacgcgttgcgctcagcactcaaccccagagtgtagcttaggctgatgagtctggacgtcccccaccggtgacggtggtccaggctgcgttggcggcctacctatggcttacgccatgggacgctagttgtgaacaaggtgtgaagagcctattgagctacataagaatcctccggcccctgaatgcggctaatcccaacctcggagcaggtggtcacaaaccagtgattggcctgtcgtaacgcgcaagtccgtggcggaaccgactactttgggtgtccgtgtttccttttattttattatggctgcttatggtgacaatcacagattgttatcataaagcgaattggattagccatccggtgaaagtgagactcattatctacctgttcgctggattcgctccattgagtgtgtttactctaagtacaatttcaacagttatttttaatcagacaattgtaccata

SEQ ID NO: 121 - DNA, 744 bp, Enterovirus C
ttaaaacaagtctggggttgttcccaccccagaggcccacgtggcggccagtacaccggtatcacggtacccttgtacgcctgttttatactccctaccccgtaacttagaagcaacaatccaagttcaatagtaggggtacaaaccagtaccaccacgaacaagcacttctgtttccccggtgataccatatagactgtacccacggtcaaaaatggtggatccgttacccgcttttgtacttcgagaagcccagtatcatcttggaatcttcgatgcgttgcgttcagcactcgaacccggagtgtagcttaggtcgatgagtctggacaatcctcaccggcgacggtggtccaggctgcgttggcggcctacctgtggcccaaagccacaggacgctagttgtgaacaaggtgtgaagagcctattgagctacaaaagagtcctccggcccctgaatgcggctaatcccaaccatggagcaggtggtcacaaaccagtgactagcctgtcgtaacgcgcaagtccgtggcggaaccgactactttgggtgtccgtgtttccttttattttatgtatggctgcttatggtgacaatcaaagattgttatcataaagcaaattggattggccatccagtgagagtaaaacacattatctacttatttgttggatttgtccctttaattcatcacactcttcatctaatttacattgtggttctaattagacagcagtatcaca

SEQ ID NO: 122 - DNA, 744 bp, Enterovirus C
ttaaaacagctctggggttgtacccaccccagaggcccacgtggcggctagtactccggtattacggtacccttgtacgcctgttttatactccctccctcgtaacttagaagcacaaaaccaagttcaatagaagggggtgcaaaccagtaccaccacgaacaagcatttctgtttccccggtgatgttgtatagactgcccgcgcggttgaaagcaacggatccgttacccgctcaagtacttcgagaagcctagtattaccttggaatcttcgatgcgttgcgttcagcactcgaccctggagtgtagcttaggctgatgagtctggacgtccctcaccggtgacggtggtccaggctgcgttggcggcctacctatggctaacgccataggacgctagttgtgaacaaggtgtgaagagcctattgagctacttgagagtcctccggcccctgaatgcggctaatcctaaccatggagcaggcggtcacagaccagtgactagcttgtcgtaatgcgcaagtctatggcggaaccgactactttgggtgtccgtgtttccttttatttttattatggctgcttatggtgacaatcattgattgttatcataaagcgaattggattggccatccggtgaaagcgagacttactatttacttacttgttggacttaccacacttaatacatttattctaggtgtcacttgtatagcaattagaatcaaacagttgcatcata

SEQ ID NO: 123 - DNA, 744 bp, Enterovirus C
ttaaaacagctctggggttgttcccaccccagaggcccacgtggcggctagtacactggtatcacggtacctttgtacgcctgttttatactccctcccccgcaacttagaagcatacaattcaagttcaataggagggggtgcaagccagcgcctccgtgggcaagcactactgtttccccggtgaggccgcatagactgttcccacggttgaaagtgtccgatccgttatccgaccatgtacttcgagaagcctagtaccgctctggaatcttcgacgcgttgcgctcagcactcaaccccggagtgtagcttgggccgatgagtctggacagtccccactggcgacagtggctccagctgcgctggcggccgcgacctgtggcccaaagccacgggacgctagttgtgaacagggtgtgaagagcctattgagctacatgaagagcctccggcccctgaatgcggctaattctaaccatggagcaggcagctgcaacccagcagccagcctgtcgtaacgcgcaagtccgtggcggaaccgactactttgggtgtccgtgtttccttttattcttgaatggctgcttatggtgacaatcatagattgttatcataaagcgagttggattggccatccagtgtgaatcagattaattactcccttgtttgttggatccactcccgaaacgttttactccttaacttattgaaattgtttgaagacaggatttcagtgtcaca

SEQ ID NO: 124 - DNA, 746 bp, Enterovirus C
ttaaaacagcctgtgggttgtacccaccccagaggcccacgtggcggccagtacaccggtattacggtacccttgtacgcctgttttatactccctaccccgtaacttagaagcaataacttaagttcaatagtagggggtacaaaccagtaccaccacgaacaagcacttctgtttccccggtgacattgtatagactgtgcccacggttgaaaacgatggatccgttatccgctcttgtacttcgagaagcctagtaatactttggaatcttcgatgcgttgcgctcagcactcatccccagagtgtagcttaggccgatgagtctggacattcctcaccggcgacggtggtccaggctgcgttggcggcctacctgtggcccaaagccacaggacgctagttgtgaacaaggtgtgaagagcctattgagctacaagagagtcctccggcccctgaatgcggctaatcccaaccatggagcaggtgatcgcaaaccagcggttagcctgtcgtaacgcgcaagtctgtggcggaaccgactactttgggagtccgtgtttctctttatttttacttatggctgcttatggtgacaatcatagattgttatcataacgcgaattggattggccatccggtgatatacaaacacattgtttacctatttattgggtttacacctttaagttctttcactctacaccttactcgtgttgtgttattaaccagacagtggtgccaac

SEQ ID NO: 125 - DNA, 748 bp, Unknown
  Description of Unknown: unclassified Rabovirus sequence
ggagttttagtggtgttccaacactatgcgccatgatgtgttctacggaacatgttatgacgtatctttcatctaccccaacccttgtgtcaaccgatacgcctacacaggtgggtaaagcaccggcccactgaatggaacaaaatgctaggtgcaaagtcaggcccataggccatcggtcgaagcccgcttgggaataagactgatggattaccctattctggcgcctgaccacttgtttcttttctgaatcacacacctgtgtgaacggtggacctgcaccgtaactcttctagcctactaccacacttgtggaactataggggcacaggaacttcaaccaagtgctgttggaatggagaaaataatccaatcctgaaacgtcatggatccacactctgtgtggggctactagcctgcggaacaacacatggtaacatgtgccccaggggccgaaagccacggtgataagatcaccctagtagtttgagattgtatcaatgttcatgtcttagtaaggggaggtgaaatctatctgtgacaccggattactggttgtcgtatagcggctgaaggatgtcctgctggtacctttagggaaccttaagagactattgatcgaagcaggagcctggttggtctctcccactccaggttaaaaaacgtctaggccgtggaaccgggcgggaggcccggttttcctcccaaaattataatattgtgtatggtgacaactgaaggcttaaca

SEQ ID NO: 126 - DNA, 751 bp, Aichivirus E
ttgaaagaaactccgggtattaaccatacccggagttttggcagggtgttccaacctgtcctggccatgcatttatctacggatatttgcatgacccgctttctatcgccccaacaatcccctttgtaaccacaagctttactcaggctagcagcccgactagctgtttggaagaaaaggctagggcacacaccaacaacaccgaccccactggtcgaaggccgcttggcaataagactggtggaacagggtcgcctgtagttgtttggaacattctttctaatgactttgtcagcggtgctactcacaccgtaactcttctaccctatccccacgcttgtggaactaggaggggatgagtgattcaagtaagtactgtcagaatggtgaaaatgatctgattctgaaacgctatggatccatcgaaagatggggctacacgcctgcggaacaacacatggtaacatgtgccccaggggccgaaagccacggtgataggatcacccgtgtagtttgagatcatatcaatgttcatagtctagtaagatgatttgaaatctaactgagctgatggctaactgcttgtcttattgcggcctaaggatgtcctgcaggtacctttagataaccttaagagactattgatctgagcaggagccaaagtggtctttcccagctttggttaaaaaacgtctaagccgcggcagggggcgggaggccccctttcctcccaaaacttaatattgattgt

SEQ ID NO: 127 - DNA, 751 bp, Enterovirus C
gaaattaaaacagctctggggttgttcccaccccagaggcccacgtggcggctagtacactggtattacggtacccttgtacgcctgttttacacccctttcccccgtaacttagaagcttttaaattcaagttcaacagtgagtggtacaacccagtactactatgaacaagcacttctgttaccccggtgagattgcataagctgtccccacggctaaaagcgattgatccgttatccgctcttgtacttcgagaagcccagtaaaaccttgggatcctcgatgcgttgcgctcaacactcaaccccagagtgtagcttgggctgatgagtctgggcattcctcaccggcgacggtggtccaggctgcgttggcggcctacctgtggcccaaagccacaggacgctagttgtgaacaaggtgtgaagagcctattgagctacaagagagtcctccggcccctgaatgcggctaatcccaaccacggagcaggtgattgcaacccagcaactagcctgtcgtaacgcgcaagtctgtggcggaaccgactactttgggtgtccgtgtttccttttattacataatggctgcttatggtgacaatcatagattgttgtcataaagcgagttggattggccatccggtgagaattaaaacaattatttacttgtttgttggatttgttcctatacacacccatacaccttgcttgattgaagtaattctgttgataagacaacactattacg

SEQ ID NO: 128 - DNA, 752 bp, Unknown
  Description of Unknown: unclassified Salivirus sequence
tttcctcctttcgaccgccttacggcaggcgggtccgcggacggcttcggcctacccgcgacaagaatgccgtcatctgtccttatcacccatattctttcccttcccccgcaaccatcacgcttactcgcgcacgtgttgagtggcacgtgcgttgtccaaacagttacactcacacccttggggcgggtttgtcccgccctcgggttcctcgcggaaccctccctcttctctctccctttctatccgccttcactttccataactacagtgctttggtaggtaagcatcctgaccccccgcggaagctgccaacgtggcaactgtggggatccaggcaggttatcaaaggcacccggtctttccgccttcaggagtatccctgccggtgaattccgacagggctctgcttggtgccaacctcccccaaatgcgcgctgcgggagtgctcttccccaactcatcttagtaacctctcatgtgtgtgcttggtcagcatatctgaggcgacgttccgctgtcccagaccagtccagcaatggacgggccagtgtgcgtagtcgctttccggtttcccggcgcatgtttggcgaaacgctgaggtaaggttggtgtgcccaatgcccgtaatttggtgacacctcaagaccacccaggaatgccagggaggtaccccacttcggtgggatctgaccctgggctaattgtctacggtggttcttcttgcttccacttctcttttttctggcatg

SEQ ID NO: 129 - DNA, 754 bp, Parechovirus C
gaaagggggccaccctgcccatagggcagggtccttcttggctgggtggctcgtatccactccatgggttgtgcctatccggtcatccccctttccccacagccggtgtgggttctaatcggctcctactaaacacctaagcatcactgcgcctctatctctcctatccacaggtctaagacgcttggaataagacatgtgggtgcaataggaagattagctagtccaatctctccttccagctacgcttctcccttcgatgagcgtagggggggcccccacctccctcatctctggatagggctcttgctacggggctttcccgtctggaccagcaggcccactggtgcgcttccattcaagtttagtgtgcattactgtctgaaatattgctttgctaggatctagtgtagcgacctgcatattgccagcggacttccccacatggtaacatgtgcctctgggcccaaaaggcatgtctttgaccgtatgcagtacaaccccagtataggtcctttctatggcagtatggatctcagtgatgagtctatacagaatatggaagtggttcggatatgtcagcccgaaggatgcccagaaggtacccgcagataaccttaagagactgtggatctgatctggggcccaccaccttcgggtgggtagaagctaaccatgccttgggttaaaaaacgtctaagggctgaccagacccgggggatccgggttttccctatcttgacctactctaatc

SEQ ID NO: 130 - DNA, 762 bp, Unknown
  Description of Unknown: unclassified Hepatovirus sequence
tttccctttcccttttttcaagaagggtctccgggaatttccggagtccctcttggaagtccatggtgaggggacttgatacctcaccgccgtttgcctaggctataggctaaattttccctttcccttttccctttcctattccctttgttttgcttgtaaatattgatttgtaaatattgattcctgcaggttcagggttcttaaatctgtttctctataagaacactcatttcacgctttctgtcttctttcttccagggctctccccttgccctaggctctggccgttgcgcccggcggggtcaactccatgattagcatggagctgtaggagtctaaattggggacacagatgtttggaacgtcaccttgcagtgttaacttggctttcatgaatctctttgatcttccacaaggggtaggctacgggtgaaacctcttaggctaatacttctatgaagagatgccttggatagggtaacagcggcggatattggtgagttgttaagacaaaaaccattcaacgccggaggactgactctcatccagtggatgcattgagtggattgactgtcggggctgtctttaggcttaattccagacctctctgtgcttggggcaaacatcatttggccttaaatgggattctgtgagaggggatccctccattgccagctggactgttctttggggccttatgtggtgtttgccgctgaggtactcaggggcatttaggtttttcctcattcttaaataata

SEQ ID NO: 131 - DNA, 788 bp, Poecivirus A
aggtcggtgctgtgacttttgtagttggattggatcctcactttgggtgaggttccactccaagtttgagtgttttgtgtgtgtgtgggcataattaattgtttattatgggaactacacaatcgcaacacgcgcaagtttgtagtttgattggcgtgcaaatgtcaaatcaagcatataacacaatttggtggctgttggtgtttgttataggaattttggttgtgttgaaattgtggatgtgtaggaaatatgcacaattacgtcagcgtcaggagttttataacctggcgcaacaccaaaatggtcttcgcgctttaacatcaccagcgaggtgtaaacaaattgaagttgaattagatcgtgtataggccagggaaccatccctcccaacgccacatcttgtggggaagttgggataatggtgggtctatatgaattggtctgtagacccacagtgaagagtgaatagtatgcttgcggttccatttgttaatggtctagcatgggtgggggcggcaaccccgtgaggggttccccactggccaaaagcccaggggttagtcatttcaaccaaggaagctggtaacctggtgacctgaacttgagtggtgagacccccttgctagagtgtgtaaaccgattgtaagcattttgtttgcttagtatctgtggtataagcagtcaattttgtataggctcaaggctgtggtagttagtagatgcccggaaggttattactgatccggggaccgtgactatacattaggtaaaccggtttaaaaacc

SEQ ID NO: 132 - DNA, 816 bp, Unknown
  Description of Unknown: unclassified Picornaviridae sequence
gttcagttgccatccccgttcgggtggtttctcacggctaggcggaagtccagcccattcaacgtgagtccgggagttgggatatccaaaaaggagtcccgttttacttacacaccctcatgtctagccacagagggactgtgcggtagccactccgcacaaacggaaaagaggccagaggggatactcccccctggaccccttttccgtttgtgcggagtggcgaccgcacaggcgttaggctgctaagtagtctgcaagtagcttgcccactctctggggacaaagttctctggattggggtaagtgaagtgcgtgggctaacttggtggctgtagcccggatctggccggcctatgaaaccacggatccgcttcttttccctataccttttcccgagtgtttgtctgcaacttgttaagtgatttcttggtttgtttgacacaatcgctttggattttgttcttattttggtattttgaccactctagtatttgtgttctacctgaaattcccttgcaaggggtgtagtagggtgttgctcgtactagttgtggactccctctgtggctagacatgagggtgtgtaagtaaaacgggactcctttttggatatcccaactcccggactcacgttgaatgggctggacttccgcctagccgtgagaaaccacccgaacggggatggcaactgaacctagtagggctcgtaggaggcttgcacatacaccagattgggaattctggtcttgctcatgactgggtgatagccttgcggcggatcaagtcacagttgtaatccgttgatttgcaccc

SEQ ID NO: 133 - DNA, 833 bp, Megrivirus D
tttgacaacctggcaaccctatctctaggtaggatgctgtctttggcccccgcctcccccatcctcccgaccatatctctattgggatgtgttcgggtcgtcacggatccgacattcctaccggggtccttctggctacggctggtctgactttggtggatgtgtgacggtgtaattactttccggatcccactttcctattataactctttcatcccaaggttagggaaagaacctggctcggtaccaccagaccctccgccacgctagtggactctccggagataacggtaccccctttgtagtcacctgtgctggtgaagaaccacctagtattgcttgggtgcgtgccgcctagcttccatttcttctggagcactgtgcaatgaggtttccccacttggtaacaagtgcctcaggtcccgcaaggatactgtggggtggtgtgaccgcagggagctgtctccacggctcctctaatgttacgccgctatccacaggccagtgcgtgtcatcgatcccggatgacagagctagtattgcgaacccccaagtaagaaaagtggctagtaacctgatagctggtgaagagggtgggtcagttgagtagatgccctagaggtacccgaaaggatctgactagggacccgtgactatacattaggtaaaccgggtataaaaaccatgaaaaactgaccacttttcttttaacctcttctttctttttatgtgtgttaagtgttttgagtttggactgtaccttgcccgcctttcttggattttctctatcgctcttcttacacctactgttatcaaggcactctttagagata

SEQ ID NO: 134 - DNA, 894 bp, Erbovirus A
ttttgtaactgaggttttgacatctcattgtttttgagccccaacgtcttggtggatgctcaaagaagattactcttgatgcttggctctcagaaagaatggcacctcaatgttttgagacccgattcttttgagtcgagaccatttccccttccctgaagattgcttttcttccaactaaacccctattgatgtgttggtcgtttgccaatcggagggcgacaggcacaggtcgctccgagttctagtagtgtgggaacttgttactactgatgaaacgaggtagtgacactcagtacctgcgaacgaggtcggggccctcccttcttccttcacccaactttcacttttcgttccactttagcaggggtcttctttctatccccctggcggcattggaactagccgtcgcgtcttaacgcgcagccctgaaggccccacaccttgtggatcttgccgtgggtatgtttctggcatgtgtttctcaagcctgcaaccgaagccgaacagccacatgaacagtttgagcgtggtagcgctgtgtgagttggcggtggatccccctcgtggtaacacgagcccccgtggccaaaagcccagtgtttacagcacctctcacatccaggacgaccccatcctggcgctcactcttagtagtatggcttagtacgcattaggtggtaagccgagctctccctcggccttgttctgaatgcacacatgtctaggggctaaggatgtcctacaggtacccgcacgtaaccttcagagagtgcggatctgagtaggagaccgtggtgcactgctttacagatgcagcccggtttaaaaagcgtctatgcccctacagggtagcggtgggccgcgccctttccttttaaaactacttgttct

SEQ ID NO: 135 - DNA, 897 bp, Unknown
  Description of Unknown: unclassified Erbovirus sequence
ttttgtaactgaggttttaacatctcattgtttttgagccccaacgtcttggtggatgctcaaagaagattactcttgatgcttggctctcagaaagaatggtacctcaacgtgttgagacccgattcttttgagtcgagaccactcccccttccccttgaaagattgcttttcttccaactaaacccctatcgatgtgttggtcgtttgccaatcggagggcgataggcacaggtcgccctacggtctagtagtgtgggaacttgccgctactgatgaaacgaggtagtgacacttagtacctgcgaacaaccctagggcaactcccttcttccttcacctacttttcctttccgttctgctttagcaggggtcttctttctatccccctggcggcattggaactagccgttgcgccttagcgcacagccctgaaggccccacaccttgtggatcttgccgtgggcatgtttctggcgtgtgtttctcaagcctgcaaccaaatgccgaacgggcacgtgaacagtttgagcgtggtagcgctgtgtgagttggcggtggatccccctcgtggcaacacgagcccccgcggccaaaagcccagtgttagcagcacctctcacatccagggaaaccccaccctggcgctcactcttagtaatgtgtcttagtacgcactaggtggtaagccgagctctccctcggtcttgtactgaatgcacacacgtctaggggctaaggatgccctacaggtacccgtacgtaaccttcagagagtatggatctgagcaggagaccgtggtgcgctgctttacagtcgtagcccggtttaaaaaacgtctatgcccctacagggtagcggtgggccgcgccctttcccttttaaaacttggtttc

SEQ ID NO: 136 - DNA, 1000 bp, Unknown
  Description of Unknown: unclassified Sicinivirus sequence
gggtgggatggatcccgttgcgtgcctgcagccgctcggtgtccatccttcctgttacccaccatgtctggtggtaccccccggtcccttccctatccccccatacagccgggacggaccacttacctccgggtctgtggcccaaccccgactcggggttgtggcggtggtcacagctccggctgtgacctcctaaccactcccttcacctactcccttatatagaaacttaagtttgactccccctatcccaaggtcttggctcatgccctttaaggctatctagcacaaacactctttgtttggcgtctggagacccactgagctaccactcatccgcgctcaatgtaacccccattagtattcgtgcaattttaatagtagttctgctccggcagcatctaagtgcccagggagcccaactggtgacagttgccctggggcccgaaaggctaggtggcaggggcccggtcaagcaaggggttcccaccctgagctgatcccgcggtcccgaagccaccctttggatggaggttccacacccgactgctatttcttttgcccggtgaacctggctggaaacatttagtttatggatttgttggtctgtggtgattagtagaccccctggaggtacccgtttggatctgaccagggacccgtgactatgccgttccggtaatccgggtttaaaaccatgaacgtcaccactcgctttcttttccttgttcttatttcttttatattgcaaactattagtgagaattcgtgttccctgacctctgcgtttggtctgcattctcagttattcagtttggctggtctggattgtttgtttagatgctcctagagcttctgctggttgttgtcacacttgttatagtcgttgcttctcccggcgagttttaccagttgcttgctatctgcacctacaacttcctgttgatctttctctggctagttggcttgattgaactttccaactatcctaccattcaac

SEQ ID NO: 137 - DNA, 1000 bp, Unknown
  Description of Unknown: unclassified Sicinivirus sequence
atacctttaccttcccccactcactgatcggtgccaaccccaactccccagtgtcagatgcttttacaaactttatgctatggcgcgctggagtggcagtccacatttccacgtcggccagccccgctatggcaggagcgctactcgtggtggcatcacccgagggctttgaggacgtgcaacagcgcccatggaatgcgcaagttagcgggctaactacaatcccatatgtacttcttaacctgtgccaatccaattcagccactgtaatcctccctccttgtacagtcactccgtttgatgatgcccgctcccatacatcttggtctgtgcgcgtgtatgtcttcacacagctaaatgtccctaccggcgttgcaaatcaaatcacaattcaattgatgtttgctccccttgcttcccggtttttgtttgcatgtgttcccataaagcaccacctgcgcacccgcatactacccggttccggggatggctattcatttaacatcccccagaaccagggcgtccctatggctcaatatcttcctgaacatgagtccgcagactacatccctgggcattttgataattttgcacggtttgctaacgcccccgggctcttgcgcactgtgcgttggctctctgagtatactcccaacacacctcttcttcggcttaatttgaattctattagtctcggtcccgatacccacacccccttatcctatgtacttagtgcttttgctcaacaacgtgggtctctctcttttgatttggtgtttgttggggcccaggtccaatctgggcgcctgctcatatctataacccccccctcgcaggcccctcctgccagtgtcgaggaagccctccgtggccattccctgacctgggacgtgactgtgtcttgctgcagctcatttcacgcccccttcttctctgcgactgcctggcgatctctagctattgatggatccgctacaaaaactctctacaattcgtgggg

SEQ ID NO: 138 - DNA, 1000 bp, Unknown
  Description of Unknown: unclassified Cardiovirus sequence
ccccacggtaaccccctttggacgcgggacctgcgatagtgccaaccccagcctttcctacacccgactcccgaccctaacccagggtcctcggaagaggatcatacatctcatcccctgaatgctgactaatcagaggaaagttagcattttccggcccaggctaagagaagtagataagttagattcaaattgatacaacatccccttgacgaattcgcaacgaaaagtcgtccctcacttgccgcttgatcacacccacgaactcacaattcggcccctcgtgacaagccccttgttgaaacgacctctttcaatgcgacgtggttggagatttgtcatcttacgactccgacgtaactaccgtcatgcctccccgattatgtgatgctatccgccctgctgggtggagcattctcgggttgagtaacctacatcctttactccttggactccggtcccccggtctaagccgcttggaatatgacagggttattttccaaacatcttctttctactcttaagtgttctatacttaagaagggtatgtgttgccccttccttcttggagaacgtgcgcggcggtctttccgtctctcgaaaagcgtgcgtgcaacatgcagagacctgtgaagaaagcagtctttgaactagccttagtgcagacaagaaactggctgtagcgacctcacactagcagcggacacccctcctggtaacaggagcccctgcggccaaaagccacgtggataggatccactggtgtgagcggtgcatccccagcaccctggtttcttggttgtactctggtgaacccagagatggcaatcttaagcaactctgtagagaagccaagaatgtccggaaggtaccccgcttcggtgggatctgatccggagactcgtccacagtgctctacactgtggctcgggtttaaaaactgtcacagcttctccaaaccaagtggtcttggttttccctttttactcattgtgtcacg

SEQ ID NO: 139 - DNA, 1000 bp, Mischivirus C
aagcttgcttcaccagaattgctaggggcgaaccgacaacaccttgttgagtttccgtcccgagacaattcatacaagttccaagactcatgaagcaattggtgcgtactgacgattggtttggctcgagcacgtgttccgtccttgggataatacacaacgctaagtatccaagaaaggccttgtgtagtccctcacgattatgtcatgtctcgatgtcactccacgtggagtacaaacctctttccatctgtctaagcttttatggagtctcccacgattatgtgctctcaatcgtggttgtcgcgcggtctagttctcagcgcgaagtttaagctaagcaccctcgggcgttcccggattatgtgatcacatcaatttgatggctggtcaccacgcaacgcctggagagatactcttacttttctcttaagatccccggtcatttgacgcttgtaggatgatagggttattttccactataaatactttcatactcttggatgttctatatccaagacgggaggacctaccccgtaccccttagaggtgagatgccaagaacaggccctttctgttctctcgacaatggcatcataggcaacaagcatcacaccaagattgctaagttttgttaagagttcttcaagctatagggtggctgtagcgaccttctgatgcctgcggatttccccacggagcgatccgtgccacaggggccaaaagccacggctaacgcccatcaggagcggcacttaccccgtgccccacccttgaaacttgaatgttcacactggcttctctcggctttctgaactgtctgcttgttggggccccgaaggatgccctggaggtaccccattttatgggatctgaccaggggacacctcagctctctaagttgctggtgtttaaaaaacgtctaagggcccccaccccttaggtggagggatccacctttcctttattttttaaaactcttttatggtcacaattgttt

SEQ ID NO: 140 - DNA, 1000 bp, Unknown
  Description of Unknown: unclassified Picornaviridae sequence
actaacaggtgaaccctgtgagtttccggcccaggatttaggatgacatgttccaagtcagatgccaacgacttggtaaggacgaatttgcccgcattatgctacagttcccgcccgggacaactgacaccccattaagctacaacatggctgaaaagggtgttgggtccccccggattgtgtctgttcatagtgtgtgtaacgtggtttaccatctccactaacattggactaagcatttcatctttcctccccgattgtgtactcacttggctaacgctgggtggtcgcggttgggtccttgatttactttttctcgtctaagcattccaactgtcctccccgattatgtgctcattcagttaactgctgggtggtcatgactaacatcgaggaatcttctgtctacgcttactttgagctccggtcgcttgacgcttgtagggcgatagggttatcttcctgacaacatctttattctacctccataggctctatctatggagacggagtgtggcacccgtcccttctttgggagcttcggtagtgacgccctttgtcactctcgccagccgaggcatgcctggtgccaggtagcaaagaaagtatatgcttaaggacttgactgatttagcgcaagagtttgtagtgatgtccatagtgtctgcggatcccccacacggcgacgtgtgccgcggaggccaaaagccacggtgttcacagcacccctatggatgcccacagaccccagtgggcactcttgttgccggactttcaggaaattaggtataggctcttctcaaactcctggcattggactaggtaagaatgccccggaggtaccccagtactccttcgggagtctgggatctgaccgggggccccacaaacatgctttacgtgtttcgtgcggtcaaaaattgtctaactagtcccaaccttgaacaagggattgttctttccttttattactgagactggcctatggtgacaacagaga

SEQ ID NO: 141 - DNA, 1000 bp, Unknown
  Description of Unknown: unclassified Picornaviridae sequence
aatagagttttgccattctctaacttgtcaagatgggcacaatgatgctttgtttaacaaggctgatttttccttttgtaatatgagtggaattgtgttccactctattcttcttttatatacatcttatgtatgagactgactgcgtgtataagagaggtaagcaactaagacttgtaaccctcggagtgggttggaatgctgagctctacgcatgtggcgtagagacgatctcgggaatctgtctaaaagttgacataccgacctgtcgagactaataactcgattccattttaaatttccttcgtgttttagtcactttgtacacctaaaggggagtggcagtgggtctggatcctcattgttctgcaatgggttgtatcgctggtttaccacgtaagtccgcaaaaataggatcccatgttagagtgggaggaaggagcagtattagggctcctggccaaccctaaacaaagtgaatacattgtaaggtatgagtcatattactcaaccctttaaaggtgtaagtgttgatcttgtttcctggtaggctacgggtgaaaccaggagcgtagggagaccgtgaataatggtctttctgcaggggagacggaaatggtgtgaggtattccagtcatcgtttagatgccgtgtctaaatcactgtgccccatctgtaatcccaacatgcgacacccaaacttttaattgaatgggtagtttgatgagtgccccaaggtgtataggtcttgtgattgataaaaatgctatgcaggtaccaaatgctttcgcatgcgatctgagcataggtgggtgatcctgacccgtaattgttccctgtcaatcacgattcctctttctagtctaagctaggtttatggcacaatgtctaactatatgagattataagatattaacttacagaaatttagcagtcttattgtattttgttgctaacatactttcatttactgtctataattaatttagttctctttaaa

SEQ ID NO: 142 - DNA, 1000 bp, Unknown
  Description of Unknown: unclassified Picornaviridae sequence
cacatcttatgatgataggtctgcacctctcataagtaagtgtgtgtgtgtataatacagggtaagcaactgagacttgtaatcctgtaggagtgagttggagtgctgggcctgttccatgtgggttcaggacgatctcgggaatctgcataacagttcgcataccgacctgccgagactaataactcggttccaattgtttgttatttttatcctttgggttttagtcgctttgtactcctagaggggagtggccgcgggtctgctccgcctttcgcctgagtgacaggcactggcgttggatgctggtttaccgcgtaagtccgcaaaaataggatcccatgttagagtgggaagaagaggaagtcttaggtcctctgcccaaccctaaacaaagcgaactacacgtaaggacagcggtagcgtggtaaccctatacacacgtaacgtttgatcttgccaaccagtaggctacgggtgaaactggttgcgactggccactgctaacgtggtgtctgggcaagggggaacggtaacgaagcaagatattccagaaccttagggtccgagtctaaattgctgtgccacggctgtaaccccggcatgcgaacgccaagtgtgtgtttgaatatcacgttatttaaatccccaagtgtagtagggattgattggtgataaaaatgctgcgaaggtaccaaggcaactaaaatggtaacccgggaggaatcttaggacgaattggctgagtcctaagtggaccgggttccaatttaggggcacctcagggtgcctgctgcgatctgatcgcaggtgagtgaacccgactcgtaattgttccctatcaccatcatctctctttctagtctaagtaggtttatggcacaataaaagctacatgaaagagatttaattgttgttgttgagttgttattactttcaaaataaccaattggcttttatttgttttctctgctgtttaatttgctgcaattagtttaca

SEQ ID NO: 143 - DNA, 1000 bp, Unknown
  Description of Unknown: unclassified Picornaviridae sequence
ggccatggtaggtctgcacctcatggttcacaaaagtatggacatacaaatttagtataacaaaattgtgtgtgtgtataattgtaggtaagcaactaagacttgtaccttcaaggagtgagttggaatgctggcaccctgtcatgtgggcaggggtcgatctcgggaatctgcataagtgtttgcataccgacctgccagatttagtagtctggttcccaccggtttgttattttcttccttcgtgttttagtcgctttgtacacctaaaggggagtggcagcgggtctgctccgcttcggcgttggatgctggtttaccgcgtaagtccgcagaaataggatcccatgctagagtgggaggaaggagaagttttaggtctcctggccaaccctaaacaaagcgaacattgtgtaagtatgtaggctgcatgctaaccctttgtatgtgtaagtagtgatcttgtcaaccagtaggctacgggtgaaactggttgcgtttggcagctgtatccacggcatgccgagcaagggaaatggtaacggtgtgaggtattccatgacttcggtccgtgtctaaatcacagtgccccggctgtattcccgacatgcgctacccaagcatgcaattgaatagtatgtagttgaaatacccaaacaacgtagagtctagtgttgaataaaaatgctgcgaaggtaccaaagcggctcccaaaaattgaagccgggaggaagctagtggcaaatctggccccacgctgctagtggatcggcttctgggagtgtgaggggaaaccctcacggctgcgatctgatcgcaggtgaacaaacccagttcgtaattattccctgttcaacctaactctctttcttgtctaggctaggtctggcacaatgaaatgctatatgaaaagagttttataagagattttgtgttttgtgcgctttgtctgattctttcaggtttttactattaaagctagttataaagtaaatttgaa

SEQ ID NO: 144 - DNA, 1000 bp, Unknown
  Description of Unknown: Picornaviridae sp. isolate ybw202pic01nc genomic sequence.1 sequence
taacatttccaagtcagaccgtgaaatccatctcagtgggatgttttaggtctatcccaaagaccaaatgcagtttaacgacttgcaggtcggaaagagggatgcacgtacagggaacatagccctgaaaacgtgcaccccgctttccgacctgcaagtcgttaaactgcatttggtctttgggatagacctaaaacatcccactgagatggatttcacggtctgacttggaaatgttaacctggacttgagtttggattgtgattccccgggaatgtggagtacccggttaggcaggacttatttttactgcctctccaccttagtttatcacctccttatgaaggatccattagtactattatgatgaaaatggatgaatgggctagcgccagttagattgcctagagactacctccctggtaacagggactctagggcccaaaaggctaggtggtcggattagcaaccaagaaagggtttatgattaacccaatctgaacttgcgtcctaagccacccgtctaacccctgaccccgaggcattcatccactagtagttgtaatgtggaaagtgttggtcttttgtaaggatagtttaagctaagaaatcttggacccgtgggagtagatgccctggaggttattactgaccaggggaccgtgactatagcgttccgctaaaccggtttaaaaaccatgaaactatgggtccaagtgcttttcttaatcttattttactttaatggattgcattgacgaagttgattgtgcacagtgtgatcaaccatcgattaccttgagagtggtattgaaagtgattcaattttttgagtgtgcttttgaatgggtgcatcacctaccaaagactccagagatagtggaagaagtcaaagaagccaattgccatcagctagagaattcagaggattgagttgggaagaaaaaccttgcacacagttgacaaccaattgttgtaagggaggtcaattgattggaaa

SEQ ID NO: 145 - DNA, 1000 bp, Unknown
  Description of Unknown: unclassified Picornaviridae sequence
agaccgttgttcactctaaaccttctaaagccacaatgcggttggacaaacatggcaatctcggtcttccgggaaaacctaaactatctggcatacaacagatcgctgtaccgccatctcgcccgaaagctggttcaattcttgatgaacttttctctaaaggtcatccaggaattgtcaccaaaccacgtcctaccgggccaaatgctgttactgcggggtcatataaccctgcgcctgcacctgagtcctatgaagacttggctgctcgggctgctcgatatgccgctagtcgtatcggatcctgggcatctactcaatcccaggtacctaccagctgggacgaagatttggctaccgacgtcaccgacccctgcacatctgggcccggtgacctatctgtcaaatcagaacaagcaaatgatggtgatacagggtcgcacgtatctgtcggatcgaaaggatcagctgatgatctgccagaggatcaagtcatcctggtatcagacccacaaaccacgtgtctggaccaggttgactcctgctaatttgtcccgcccacccttctcctaccagggagtctacggtgccttcctcgccgtggatgacaccatatgggcagggccccaaatggtgccggtaccacacaagcttgtgatgtacctccttggaatgagtcaatctccccccaaccacctgaggcttgcacaaaccatcttagcctcagttcctttaacggaacgagctggtctcacccccgaaagcttgctggaatttgcagtggcctacctaaagcacctcaaggctgttccagtaaatctacgacacgaggatgatacaattgcacgccctgataactggctagctcctgacgtcccagtacccatggcagaaggggtgggtctctgggaagggcccgactttgccaatcggcccttttcgtcatagggggacggttctctgtcccccgctcataactggcttcactcccggtttattc

SEQ ID NO: 146 - DNA, 1000 bp, Hepatitis B virus
ggtctggggcaaacattatcggtactgacaactctgttgtgctgtcgcggaaatatacatctttcccatggctgctaggttgtgctgccaactggatcctgcgcgggacgtcctttgtttacgtcccgtcggcgctgaatcccgcggacgacccttcccggggtcgattggggctctaccgcccccttctctgtctgccgttccggccgaccacggggcgcacctctctttacgcggtctccccgtctgtgccttctcatctgccggtccgtgtgcacttcgcttcacctctgcacgttgcatggagaccaccgtgaacgccccccggaacttgccaaaggtcttgcataagaggactcttggactgtcaacaatgtcaacgaccaggattgagacatacttcaaagactgtgtgttcaaagactgggaggagctaggggaggagattaggttaaaggtctttgtattaggaggctgtaggcataaattggtctgttcaccagcaccatgcaactttttcacctctgcctaatcatctcatgttcatgtcctactgttcaagcctccaagctgtgccttgggtggcttttgggcatggacattgacccttataaagaatttggagctactgtggagttactctcttttttgccttcggacttctttccgtctgtcagagatctacttgacaccgcatcagccctgtatcgggaagccctagaatcgccagaacattgttcacctaaccacacagcactcaggcaagctgttctgtgctggggtgagttaatgactctggcttcctgggtgggtaataatttggaggacccagcatctagggagttagtagttaactatgtcaataacaatatgggtctaaaaattagacaactgctgtggtttcacatttcctgtcttacttttggaagagaaacagttttagaatatttggtgtctttcggagtgtggattcgcactcctccagcttacagaccaccaa

SEQ ID NO: 147 - DNA, 301 bp, Unknown
  Description of Unknown: unclassified viruses sequence
gtcatctataaggatgtcggtggtaaccccacaacggatgaccactgcaatcagtggcacgtgtaaagtcgagataaaataaacaaataagtgaaactctgctggatcctcacccgatccactaccgtaccactttcccaaatcttcagacgaaagaaatttttgtctgttcgctctgctcatcctaatccggtgagaataaacctgctcctcctaactcggggagtactaaactcgtcataatccgacgagaactgtcacttttaaccaaagtggtcaactgaattttcgcaaattcaaa

SEQ ID NO: 148 - DNA, 308 bp, Unknown
  Description of Unknown: unclassified Solemoviridae sequence
gtaaatggttcaatgaatcatttaattctgcgcttttagatttagaccttgcttctgtacccggcgtaactaccttaagtcggtatggtaccacattaggagagatcttaggttttgacggtcaaacgttggatcctgagagagtggccatactgcgtcactatgtggtggacaggattcaggatcttttgcatgggaaacatgtagctgatcctattaaactgttcataaagcaggaacctcataaactgtcaaaaattgaagagggccgtttgcggttaatcagtgcagtatcagtagtcgatact

SEQ ID NO: 149 - DNA, 321 bp, Unknown
  Description of Unknown: unclassified RNA viruses ShiM-2016 sequence
aacaacaacaacaacaacaaccgcaacaagaaaccgcgtgcccctaggcgtggtaaccgcaacttggttgctgatcaggctatcaaggatgtccaacgtctccagggtgagttggacgcattaagggacgaaaaatcccaaaaagagcgagctcgagaacagaaggaacaggaacatgaagagctccgcgatgaaattaaagcgcgcttatctggcggctttaatattaaatgggatccacaagttcatcgtgtggaccgtagtcgtgtgtggcgagcgttagcttactgcatttgggtgcttgcaatcaccagtattgca

SEQ ID NO: 150 - DNA, 326 bp, Unknown
  Description of Unknown: unclassified ssRNA positive-strand viruses sequence
ctcaggtttagtgcttgcctccgctgcttttagcttgcttgtaggctgtttctttggacctgagtagcttatttgctaggcgatagttcgtgcttacttcttcggaagttactcttatttgatttctttcttcgcgacgagaggacggagccttgtctttcccttggaaagtttgcgtgtggtaacgcccacctgtaatcaaggacgctgctcccggctagggatccccgaccgtttaaaggttctacacattgctccgggtgtagaggtaggaagaaataaattttttcaaattaattcttgtttaagacttgaaaccggtaaaa

SEQ ID NO: 151 - DNA, 333 bp, Unknown
  Description of Unknown: unclassified dsRNA viruses sequence
gatttaaaccctggttttcttcatctttttgaaggagattttttagggttttaaatccctttctcagttgggtgttcgcactcgattgtttgagaccttcgggcggcctacgtcactacccattcgggtaggtacaggtttctgatctcttgaacttttgagtgcgttccatcaacccgagaaactggggacttgacccggatcctgatgcgtggcggtaaagaccgaagcaggattcggaccccaaggccctgagggagtggtagggaagaggtccggtgctctaaataaaaccctacgctcaacacccctcagggtgacgagcactgagcc

SEQ ID NO: 152 - DNA, 341 bp, Unknown
  Description of Unknown: unclassified RNA viruses ShiM-2016 sequence
gagatgtttgcgtgggccgttgcgctgcgggcggcccacctccctacggggaccgtgagacaccgctggggaaggcccccacccccggccaaggggatcctgccgagaggcaggagaaagaggcccagccctctggggcgcctttaggggcgcctgggagggaagtacccgagccgggcggccggtcgggtgcggctgtgcagttcgaggctaaccgtaaggaaggcctgagctgcctcggcttgtcggaaaggaagacgaaggcacttatcaaggctttcaggaagcaggagcgcaattacagcgcgcgccgtgcggcctggattaaccgcatttggccg

SEQ ID NO: 153 - DNA, 346 bp, Unknown
  Description of Unknown: unclassified Arenavirus sequence
tgttacagaactgtgtcccaaaatagataaccactatgcctaggatccccggtgcgcagccaaacacccttatttgtggattaaggtcaatgcttaacaaagtcaagtcaatgaaggtcctaaatactagaaggaagatgctcctactatttgatacatttatcctgatggctcatgtaagattcttcaaagaagagtcattgtatgcagaaacagagtggttaggttcatccttttgcagcgtcaatgataggctggtctccttagatgaaacggtgcagtctttgactaagtgggttagggccagacagagaaattactctaagaaagtgcctgagtgtgtgac

SEQ ID NO: 154 - DNA, 348 bp, Unknown
  Description of Unknown: unclassified Benyvirus sequence
agttgattgtctgtaaaacaattccagttgtttgtctgtaaaacaaacatatatgcttgatcagctttgtagatccttgactatcaattttatttctatcattgaattcgaattgtttctgttgagattctctttacgatttgtgtcgtcatttcgtatattggaagacgggcctgattccagtattaattggtcagtttgtaggtgcagaacgcttttaagtgagacctaagactgcgtcggaaccttagattcacgagccgcgtgattaattgggtttgtcactgggatccagtctatcagtaaggggtaggttttttgttgagacttatctgattagtaacattt

SEQ ID NO: 155 - DNA, 362 bp, Unknown
  Description of Unknown: unclassified RNA viruses ShiM-2016 sequence
actgtgtagttgatttctagcacagcggtattaaaatttatcattgaatatatcataactatatttcggttttcactgagtataggatcctttactaggactcggggtgtcattgacgctttcgtaggtggatcacttgatagacgtcaatataaagttatcaatacagagaatcatttatgcgctgatttgtaatcggttcatatagcaatttatttatgcatagatctgtgatcagtgtatatagcacaatagggataatttgtgtacttttctgtgattagtacgcatagcaaaatttatagtattttgtgggattttctgtgattataccacatagcaaaatagttaagtatttgaac

SEQ ID NO: 156 - DNA, 367 bp, Unknown
  Description of Unknown: unclassified Picornavirales sequence
aacatgacccgatcgcacagttgaaacaatacaatgatgtcgtccagcgcccaaacggggggagagtaaaccggatgaaaacgaatgataccctatttgaagagctttggatcctgaagaacagcatggataagggagcacgatgaggaataagatccagtgcttcatccaataacaatgtcgggaacaggggagaagtttaaactctttggtagggtagatatgtctaattggaaggtgagtctccctagactagttgattgcggagacaatctaggataacggcaacggtagaataataaatgtagcgtgtccttaaggagcgcttgtatcgtccccaaatcagaaacataaacataaaacaaac

SEQ ID NO: 157 - DNA, 370 bp, Unknown
  Description of Unknown: unclassified Riboviria sequence
gcctgaagaaaacgtcgggaaccccgacatccgtcaactatgcggatccttctaacctaaatactacggttaaggtccgtgcccgtatacagcccgttaacaaacgggatgggaagtacaatcatgttcgccaagaaattcgcgtcggtttcgaaacgaaacctcctcgcgcttgcgaacagagttgtgccacctctccagttgtgctcacccttgtttggagcgcgccggaaggtgtccaggccgatgtccctaaagcagtgttggacaaagtcctcgagcatatcgctcttggtactgctttcttggctggacctgatacacttgacgttgatacaacgctaactactaactaaatggagtaatactc

SEQ ID NO: 158 - DNA, 373 bp, Unknown
  Description of Unknown: unclassified RNA viruses ShiM-2016 sequence
aagcattgacacatatgtcattgccccggttatatgcttaagtgagtctactactcagactttaagagagaggagggcgatgcggtgtgcttgtttgagcgacagcacacatgaaatttagcttacaagtgatataacaattaaagagcaagagtgctcatcgtttgaaggtttagcgttaaaaccggatccagaagtgattggagtttcatcttttagtaatgaggcaggacaatgtgttgaagttaaggcttcggatagcttttattctgttaatcaggttgctgatttgcagtctgttaaggagtatttagctagacctaggctttttgacacttttgtgtttggtactagtcctggtgtggttacgacg

SEQ ID NO: 159 - DNA, 379 bp, Unknown
  Description of Unknown: unclassified RNA viruses ShiM-2016 sequence
ggcggtgtttgattacatcgtagcctcggcggagtttgtgagacagaagttgcagttgtcaccttatacttggtttcaactcatcctctgtttcttagtgctcctcccggcagttgccttttaccttagggtattttggtggctgttgagaacctcttggagattctcttgcggattgggacgttggttttgttacgttggatcatgcttgaaatggaatgttaagaaggtttttagggttttccggaaaactcccttacagtatgaaccggaggcctatgtcgctggatccgaatatgagcaagtgaaagaactgccagcttgtcagtttttgatcttaggaaatttggaatgcggtgacgttttgactccggttggt

SEQ ID NO: 160 - DNA, 384 bp, Unknown
  Description of Unknown: unclassified Picornavirales sequence
tcatgaacccacagctcccgtattacggagctatataagtagttttactatgcgttagaaaacgacttaatgtattagttacaggattggtaactcgaagactatgagagtttaccgattatcggatacattattaaaagttctgcttaggtgcaaactaatcagatggaactataaaacgtcagattgatagtctatatccctaatctttaacgcgagcatgggatgaatataagcgttgctgaatcaaataatttaaaaataaatcagtcggaaaccactagcgagactattggaatcgtagactttaaacaggatggagaaattcatgaagcagaaatcaagaatgagattatgttggatcctactttaggacagactatt

SEQ ID NO: 161 - DNA, 386 bp, Unknown
  Description of Unknown: unclassified RNA viruses ShiM-2016 sequence
gtttgggctcagttttccctatttagggaagtgtacacggtgaggattcactgcgtagacaggatccactgcggcctggaccaccgtagttcctgtctacgatccttgaatcggatctgatgtgcacgtacgtctcagaggttttgcctaaaacgctctgatgcgcagtctgggttagctgcgcactcgaattatgacctgctaaccaaaaaggaaagcatgatcatgcggacggcgtgagcctgtccattgatcgagggcaactaaactgtttggaggacgttctctattcctatgagaacgtggttccaaacggcaggcgaccacccaatatcgacaagttaaaagaatgtcttgtcgatctccggaccctcagggtcaacggc

SEQ ID NO: 162 - DNA, 389 bp, Unknown
  Description of Unknown: unclassified Tymovirus sequence
ttcgccaagctcatgatctgcgttgatgatggaagccttgaggacaaaaaactgtcttacttgtctgaattctcagtaggtcatctctccggcgactgcatccaagccatcttacctccatcgctcatcaagtatcagtcagcatgtcatgacttcttctgccacaattgcaccccatcccaaaaaatccttctcagcctggatcccatccctgagaacaagatccttcaactcctcctcaaagttcgttgggcttcacaggccttcttttcttaccttccccaaaaagccagagagttgctaatctctcgctccagccttccttcccttcactctgatcccaaaatctccctactagagtctgaattgcttccctttttcaattaatt

SEQ ID NO: 163 - DNA, 390 bp, Mossman narmovirus
gacaaagggggcatgactgaccagtgctagtatacttatcccctgttcacaaatatggagtcagcagaatattcttttaaagaacagatcatgcaaacatcagccatctacttccatgataaatccagataatacagtgtgtatgtgtgtaaaagaccccccaaatcctatctgtacccttcacaagatgaatataatcctttcttcagccatatattctctatgcctaatagttgatctccatgaagtacaagatttagaccgtaatgtaatactgtcctttgtcatttttgttcccacagaatcccagtaagttactctagtgttagtggtgatgactaaagaaaaacgtaggatccaggatcctaaagccaacttttggggttcaaa

SEQ ID NO: 164 - DNA, 393 bp, Unknown
  Description of Unknown: unclassified Reoviridae sequence
tttaattgcaattctagtattgcaattctctagggaaagccaatcttatttttattcattctcaaattattaagatttatgatttaattcagatttaacaatttataaaaccccagtaaccaaattttgaaagcaagatgggctttccctagagaactgtaatacctttcatttgacactaaaatcaatttttttcgacaattgatggctaccagtgatgactcttaagcactcttgactgattcacacttgttagtatggatccaaacttcgtatggatttagtaaattgagcatgtcaagactacttttcacaggatttaacactaaatagacccccccctctcttaaacaggtgcttctccaattggctgggtgggttcatgtacaaaaa

SEQ ID NO: 165 - DNA, 400 bp, Unknown
  Description of Unknown: unclassified RNA viruses ShiM-2016 sequence
tagagggtatttacatcctgcgatcttgaactttacttaacagttatacaagtttggtcgtcggatgtacggttgttgactcgctgagaactctcttttgaaatctatccagacattcttagagatcgatctcgcctctcgacaatcacatactggatcctccggaagagattccgttagaggaactggtccaaccagattttcggatctttgctggtaatcctcttcgtttcgtggagttttatcgcatactaaattttctcagtttttctttattgttattttttattttatatttagattattacgcggtctattataataccttctacttttatcattctccttatttttctcttccttattcaccttatccttatcctgtttctttcgcttgggt

SEQ ID NO: 166 - DNA, 411 bp, Unknown
  Description of Unknown: unclassified Totiviridae sequence
tgataagcatccagctaactatcgtatcgcgttagtgctagtaggttgcttatactcggagtgtgttctccgatccctttttagggaaacccggagtcaatatgacttcaaggtcgattttatcggcctattcagtgtggccgcaggaactctaaccgctacctccgcgaagcgattacgtgggaccgatgaggagcgaggacgagtcagcgttgcactagtacgaccagggagggttccgttgatctgagcttgtgctaatttcaccggatccccctgagcaaaatttcgattctcttcgttcttctgttctccctagtcgttactagtgtaacgctcgcctacggcctcactcactcagttttcatttatcgtctcggtttcccctccccctacccgatccgaccaaag

SEQ ID NO: 167 - DNA, 411 bp, Mossman narmovirus
gcagcagtaaattgtttctaatgaactcagtttataatccatgctatataagagtccataggttgaacccctgcagacttacaacacccttttggctctgtcttagagaattatctacaatcagtattgcagtggattccttaatacttgggcattatatttcctccaacacatatcatggtctgtataatgcttatcagattgtaagacacctagggtatgagaactaaaaatggtactcagtaagagaatagattaaaactactagatattaagcctcatcagtatagacttaatagtgttttaacaattatgttaatttgatatttcggtcagtagtattaactaacctcatttgttagaatattacaaaaaacttaggatccaagaggagctccgtaagctccaata

SEQ ID NO: 168 - DNA, 412 bp, Unknown
  Description of Unknown: unclassified environmental samples sequence
ggccaattgcctacttctatacattttatgtgtccccgtttcaattgaaaaattgaattgaactcaggaagactagggaccgtgcctgagttggatcctagatccatgtgcgtgaagcatacatagtaaatgtaagaaatataattaatattcttcttttttaaagattaaaaggtattttatattgtccgagcatttacgacctagtttttactaggaacgcccctttgacaacttggggcaaacccgcggcggtctgctattgcgacacgtcgaaatggtcactgttagaattgtataggtggcctgttaaccatatatggggtaactgtaaaaatagttatggccaaaatcgtcttaatagcctacagggaggcaacagggcgtgctaagtggtaatttatttacctaa

SEQ ID NO: 169 - DNA, 413 bp, Mivirus amblyommae
atttaaggggatccctggaaaacatatgtattattgaatgcggcccatatagcccttattgccgcaaactttccaggtagttatataacccattttactatgagcccagtaggaatataacctctcactgtgggcatattgtatgtttgtttgagctgtattaaaaaccatcttgggccatagagccattttgctagacagctgatccggagagaccagattccgttcatacagtgcgattgtgagttttcaccattgcgtttcttgctttgcttgtggagtttaatcaagtgtttcgtgaaatacttgacttctccaccgaagtagagacctcccgtgacatcctagtcgctatcgacctgctcgagagagcacacgaacttagtgaagacatacttgatctttacacaaca

SEQ ID NO: 170 - DNA, 414 bp, Unknown
  Description of Unknown: unclassified Riboviria sequence
aggaagaagaattctcagtagtttgattgttttttagacctgcttggcataacgggacaagaaattgtgatgactccctatacatatcgctttgccaaattaatcttaagtcccggtacagagctggtctctgaatcggatcctatatatccttatatataaaggcctaatactgctaagtactgacatttactagtttgtaagaatcaacccagggggaaatgttggacggatacagattaagtgcaaggttcttgtacttaaggatgggaatctcagggttttgcattagaatcgtctccaataagggatggattacatcagggggttggagtgttttatcaattacttaaatttaagccggatgttaattaagatgtataaattgttctgaaaaaaactaacagacgtaat

SEQ ID NO: 171 - DNA, 429 bp, Unknown
  Description of Unknown: unclassified Negevirus sequence
gaaaataaaaccaatacaatccacttttctcagttattccctgacccggaataaccccgaaaaacaaaaattccctggtaccctaacccggtatcacgaaatcgcttaccctgacccggtaagtccaaatccgctggctaacccccagttaactggtacgcgagtaattcccgtactttgctcccttcgcttaccacgaaggtaactgcccaactaacccttgggataaattctggttgacttaccctcaacttttctcgcacggctcacccccgtgttatctgttctcgctaaccccgagaaacttctcagaaccctcacccggttccaactgatccgctaaacccggaatcaattctcaggatcctaacccgatcctcttcttctacaggaccctcacccggccctctaatccacatcggattaaca

SEQ ID NO: 172 - DNA, 440 bp, Lunk mammarenavirus
cgcaccgaggatcctaggctattttgatgcgcatttttggtatctggaatggaagacattattggagagataaggcatctgtgtttaagttacatgagtcaagatgagcgtctgtccaggcaaaattaaacttcttaagtcagtcagagccgaagctgactttgatagaagggttgaagttgttatcaaggtgcatagagatagacagtgctgacaagaatggctgtgttcacaatcatgaagacaaatcagtggagaccatcttgattgaggctggtgtcatctgccccgggttacccctgattattccagatggttataaactgattgacaacaccttaatcttgttagaatgctttgtgaggagttccccggctgggtttgaggcaaaattcatagaggacactaataagctttcaagcatcaaagacgatttggca

SEQ ID NO: 173 - DNA, 464 bp, Hermit mivirus
aatccttctccaacaatctccctccctctcctcaagagtatcctattattagggatcctcattcctcttgcatgctgtaaatagttctcagtatagtagtggacccatatattcttgccatagtattttccatgcttttcatacaatattagtatagcccaatgctcttgtccatgtctgcctgtatatttgcttatgtcgtgtgctgctttaaaaaacaatcaacaacctcgagtagacccttaaaaaaagtgtcctaaacaatttagttaaaaattagaattgatcctttaattcttgctagtcttcattacccagtgaattttcgattactcagtttttgttttttgtggatcggaagattaattctctaatttgatcggaacacagagtctatcaacctgtctccctgggaaaagacagccctggttgttggtggtttgggtcttgtggcgtgttggagg

SEQ ID NO: 174 - DNA, 468 bp, Unknown
  Description of Unknown: unclassified Closterovirus sequence
acacgaagtgaccgttcggatttaattgctgcgatgagtattcgacgcgtgtggttaaaggttatagctgtaattacagtgttgtggtacggtaaggaaccttccattagtgaaggttacaatgctcttatgaacgatgactttaagtttatcgatacacacttctcaaacgtttcttatgctaagaaatgttatgatttggctaatttcgatttggactttctgcgcatcgttattattcctttgagtggtggtacggtaaacgaatcgcgtgccgatcgcactaacgtttcagagattgtcgaatcgcacatgagcgaccgagacagaatgaatatcttgttgcgtaataagcggatccagattccttcgctcttaccttgcgataactagagtctactcagtagtgcgtctactagtataacgtattaaacactttagtaaagagttttgtttaagttaaacaat

SEQ ID NO: 175 - DNA, 471 bp, Unknown
  Description of Unknown: unclassified Sinaivirus sequence
ccgttgcgcaccctctctaagattcacgtgtgttgcgccgatggatcccccaataacctcattgttgctaaggcccttagtgttctgaatctcaatccctccacacccattatcacagccttttgtcgacatatacttaatgtcgttcgttccaggttgctgaatccgcgaaatcgtaacagacttgctgctgccgttaagcgtgtcgcaccttggatggtttacatgccttttcgttacacgccttattatgctgagccatgtcctgccactcgcgccgcgtttgctgtgcgcacaggcatttcccctgccttgcagatcgagtacgagaagtacttgctttctctaacgtttgtaccatctaggtatgtcctgcttaagcgcgatgttgagctcgatggcctcagtactgtcctacttggcgacttccggtctgtcctttacgcgtagaatcaagaaatttactacgcc

SEQ ID NO: 176 - DNA, 473 bp, Unknown
  Description of Unknown: unclassified Fusariviridae sequence
tgggctctggggctggcaacatttctgcatctgcaaatcaagatcgtgcagatttggtcacaaaatgcacaaatttgatttctgccagtcttgaagctgcatcctctggtgacccttcattgttgaatgggatggaggaattagcctattttaacggcgcaactggtattgtgttgaaaatgtctaatttcctttttaaacttgtgtcagacccagttggtgaggtgtctgaaatgttcaatccaaacaatagggatccaactggtacactacgggacgtagcaaacgtgttttctatccttacaagcctggcttcaatcagtaatgattaagcattggcaaaaatcttatgatcctgaagagtctgttttacagcgaaaccgtcaaggtaggtcaacatgagtaccaaaaattcaaaagcccctagtgtggcatcgaatgagtcagctggtcaatcgttagttcgagagatc

SEQ ID NO: 177 - DNA, 475 bp, Unknown
  Description of Unknown: unclassified Hypoviridae sequence
gggggtgtgaaaacctacacctattcacaatgttttcattatgaatcgtaggttcgcttcgttgcacagggttaaaatcccgcgctattttgtccgttacagacgcatagcagtgcaagcatacttagtcttaggagtatgcatcctggaagtttgaccggccctcatgggttagtcttttaaaatctcgggagagatctttgtggatcctagcgagcatcaatcgtggtaagacaattttaaaattggtgcgtgttaagacacacttgttagaaatttcattcagaaaccgttggcagttagcgaataactgtgatttgactgaaccccattatcagaacggcaagaaagatgaatctgtggagtagtgccctagaagattcaatcctctttctcgttaatggcttgtcacccaggccctggccgctaaaccagtttatatttcatcctagtttcttttaggattattagctca

SEQ ID NO: 178 - DNA, 483 bp, Unknown
  Description of Unknown: unclassified RNA viruses ShiM-2016 sequence
ctggtgtaaactactttgctccccgggtagcttacggtcgagtcgaacggcattgaaaatgccttacgactcgatcagatgacggggagcgccccccccaggtgtttggtcgcacctggggggaatgacggtaattcacagaatagcgccgagctggaactggtgaattggtggacgtggatctaggtcttttgggttgacttaggtgtgagtgtaaagtgggtgaaaccgcagcccgaataagctcgcacgacggatccatgtatcaatactattactcgaacgcccaaaacacaggccgtgtaataggaacctgcgaaagcagtgcaattgggagaagcccaccgttgcatcaccaatcacctccaggcagttctgtggagggcccgatatgtcgacctcactcggcacgcgcgctcagcgtcaggcacgccacggtgcctgacgtttacacacacaacacacacacagcactttccttat

SEQ ID NO: 179 - DNA, 500 bp, Unknown
  Description of Unknown: unclassified Picornavirales sequence
acgtacgcactctattaactaaaaggtatgcccgaagttcctaaatattcgggggtttactctttccacaaaaagagattaacatggttgacttgctccataatgcaagcgcttgagaacaagctatagttctgatggtaataccccttgaggaatccatatttctaggatccgttcaagtccgaagaattgcgcctcattgaattgagcataatatcgcgcgtgtcgtaggtgggccaccacgcgtatgatttaagtccactgctgattcaggtaatgaattaaaacttgggaatgaaacccaaacaaaaacagaaatcgactctggtttagtaacttttgaaatcaaggaagaagagataatttcggttagtcccgaaattgtaccaagcttcccggttcaaaatccttaccagaatcaaacagcctctcagatattatctaggtggcgagcaataggttcccaatcactgggtttaacgactcagtttgggacaaaa

SEQ ID NO: 180 - DNA, 504 bp, Unknown
  Description of Unknown: unclassified Totiviridae sequence
tgaatatgagcgagagcaccccataggtacccttctcatacaccaggtagtcctgggggtgacacttcgcctagctatgcaagagctttgaaagtgttcacctgagcacgcggcctcgtcagacaaggttagcgccgaaccccactagctaagttgatgctcaatcgtagtgtgtgtgttttctagcattcacgccgaaggttactgagctctgtaagattcacgtctgcggagtagtgattcaccgttaagtcgggatagcttcctgtttggaaacactcaggatcagggctaagaccccgtagaacagtagccgagtagtacaaactcaaagttagtcttgtcgagtctttcgcgcagtacaatcagggtaagaagccattggtaattgatggtggatcctatgaagttgtagctagctgagattctcatatatcttagttctagtaacaaaatcataggcgtgctgcacgaagcagaaggttttaagtgatattatcgctg

SEQ ID NO: 181 - DNA, 508 bp, Unknown
  Description of Unknown: unclassified RNA viruses ShiM-2016 sequence
tccatttggagcgtgggtgcgctccttaaatatacgcccttttaagtggctggcaccacagacggatcctctggattgtctaaacgccctttttcattcgcgatccgcttagttttcctgttcttagttttgcgtgaatggaatcgtattaggaaatgttgtgctagtgcgagatattcggtctgatctcgtaccttattttagacctgcaagtttatcagaaacacaaactactgctgatgttcagattcagcaaacttttgcctttgacgatagtgaaaagcaatttatacaaactgtccgggagggggaggatccttcccatgattgggggtcatattcggatgttgatttagctaattggcttcagcgtcccatattggccaccacaaagatttggaacgtaggtgagggttttcctgaaatttatttcaacccttggtctgcttttttggacagccctagtgtagctcagaaattgtcaaatttttatctccttagatgcaag

SEQ ID NO: 182 - DNA, 515 bp, Unknown
  Description of Unknown: unclassified Mitovirus sequence
ctcctttacagagcatacctggctgaatcgtagtcacgacccaacctatggccttatatggctgtactcgggttcccgaaacgcgaagtaacgttcggtgtttgcaatagttctactattaataatactgaatgcgggtggagtctcaagtgagttagactaacggggtaaggtacctttacaggtaagaatccttattcctaggtctttctcatcctgagaatgtccacatatgcgtaagcataagagaattactctctggctgcagcccggggcctcattgaggatccggaaactgaagtttaaaccgctttactttgtacaacaacctattgcctcttatggtgatactaggatcagatataactagacggggttaccccctagcgacttgagtgtcgtcgtgtagtgagatgataaaacaaacagtgtttggttaccacttaaaactcgtgacctcatcgaaatctccctagtccctcccataggaaccgacaggcggatatttacctaaa

SEQ ID NO: 183 - DNA, 523 bp, Unknown
  Description of Unknown: unclassified Dicistroviridae sequence
cgatctatatttttcatacacaatttggcccacagttaagatggactctgtaacagacaaaatatcgaccgatttgcagcaatcaaatgaagcatatttcgacagaaaacatgaaccatgcggacgatatattcttaatagttatatcttacttgaacctttgagtacgttgattatggaacacacatggaactgattaggtcgatacgattttaacacaaactttttgcaagtataaagcaatgactagttttcaaaaagaaaaccggtatttacaccgtaagtaaaaaataattttttccagccttcctgaatatagtaaggaaaggtattggcgaaatggaaaattttattttatttaaacatagtttgttgaaaactattcaaaatttcattatgcgatttttaattgagacgtcttattaatagactaggtactaattaatctaacgcatagttttacaaggcagcaacaccgcatcaatggatcctaaccatagatgaaaagaagaaaaaacaaatc

SEQ ID NO: 184 - DNA, 528 bp, Unknown
  Description of Unknown: unclassified RNA viruses ShiM-2016 sequence
gtaaatcaaggcgtcgtgtatgcctattgtaaaagcacaccccgttttgccgatggggttccagagtaaagttgaacaggcatgtgtgtatatggttacatatggtgaaaatgttttatatattttgtattttcgttagaatgctttgcacataaataatatcctacagaaagggtacccgtatttacgggatgtgggattggatcccatatcaagatatgtacttctgcaggtttaatcgggcctgtagtcgcaaacaaatagattggtaattgtataaaagaattgtgttttgataataactgtaataaattagtttgtatatttggtaagagttcagcaattgttaacgctgaacctagtgctcacatttcatgtgggcgagaagaagacgctggccatcccggggccagcgcagtgcaactacgatccatagatgagatcgaggaagcacttggaattgtggagagcgatgctgacagcatatgcaccatattcgagcctcattccgggacaacggatgacaac

SEQ ID NO: 185 - DNA, 530 bp, Unknown
  Description of Unknown: unclassified Picobirnavirus sequence
tagatttacaaataaaatataggaggaagtgctatgaataacatgcattttaaagtagtttcagcgctactgaagttggcgcgacgtgttaagtacgttgtgtcgttattgctgacagccatctctgctgtaaaagagaaaattaattcatcaaaggaggttaatgatgatgaaaacaagtaacaataacaattcccagcggtcgggccgcactgcagtcaaatgtgatgtaagttttgaagagcttatagctgatttggatccaagtgacatccaatcccttgtgtctcagcctaagtgtcgcattctgtctcacgatcaactttcatcatatttgggtactttatgttctaatcattcaatggttgaaaatctcaaaattaagcaccaggaattttcttcaagaggatatcatggagtagtaactacagtcagttattacaagagatttaaatacagatatgtgtatgagcgcatatatacaattgaatatgttagtatttctgaaatggttatgggggtagaaaata

SEQ ID NO: 186 - DNA, 535 bp, Unknown
  Description of Unknown: unclassified RNA viruses ShiM-2016 sequence
tttatgcccccccttctttcgagaattcataccgtgtagatcgctaactaattttgtaagcaactaactttaggtcaatgactgtgcgacctattgtaagtatatctactgccaacttccatgagatggtttgttgtggtatgccgagctgatattacgttgtcagcttggatttagcggaaacgttacaccccttcctcctgcaacatggcgtcttgttgctttagtgtagtgtccgcgtcttagtattatgaatgacgcccttatatatattatatgttcgtaagactgaaattgtactcccgaagctatcacggagacgcatctatcacagtcggatttagatagatgtaggcaatagccccatgcaccacgggttgctatatacccctaaggcgtctaattcgtttaggcgtctcattgaacctggttaagaatctttaggtgcaacgggtgcgaaggcacccaatctgcccgtgtggatcccgtcctaacacgacgtttaggtcccgaaacggattctttgtccgtaagc

SEQ ID NO: 187 - DNA, 560 bp, Unknown
  Description of Unknown: unclassified Picornavirales sequence
ggtaggattatagatggacggaacatcttaaaaattctgttatgtcctgattatgacagcactaagtgacaataaactaatcacccaaatttaaaactttgatttgatattcaagttgacgattataggcattcttaaaggaattgatttcgatttataaatggaaatatgttaatacatcaatataggactaagcgattgaaatgaatcaggaatttatttatggcgacagatcttaattacttgaatgacatatcctgtctcttatcatgtgttctcctatggatcccggtggagaacaagcacgacatgatttatattattgtatttcggtatgcacatagcaagtagtgcgtagccttcagtgatcagttagaaatttggtatatggtgactaattgtcaagtatattaaataacgttgttctgatcaatactgattgagcgtaaccttgttctattagcgctaggagtacaattttatagaagcttgcttcagagaagtcccggaagttatttatttaattaaatatttcatataggctaattctaacgatattg

SEQ ID NO: 188 - DNA, 562 bp, Unknown
  Description of Unknown: unclassified ssRNA viruses sequence
cgttaataaattcaaggatttattagctattttatttgatagttttgcttctgttcagaagtgtgccctgcatgcaatacatgcaaataggttaggcagtagaaatacagatcgccggggaccagcattcattctttacgaatcactgggttacagctactttgactagatcatatactgtatttatcattcgcgttggttggacctgtaatagcagggttccggtcttggaaatcaaaacgagggcactcgccaagatgcgttacgtcgtaacaacctgaaaaagtgggcttgacaacctggcctatcatacactggcaagtgatatgagaggtgatcaaatataccgagtagcatgaatatcgctacacgtagtcacaatttaaaaaaaaagcattctgacactgggaaagactagaaacaatcgtgggatccaacgatggtaaaatgacgcttgggaatcaacgtgcccaataccgaatcgatcacagttagtcaccaaagaaggtgcaattaaaagaacacatagttagtatcctgaacacgactcgtacaataactc

SEQ ID NO: 189 - DNA, 569 bp, Unknown
  Description of Unknown: unclassified Riboviria sequence
ggtggggatgcgcgcatcatacgtgatgtgtgcatccacccccccttttctcccctccccctccaactaccctttccccctcgttcggatgggttcttggttaacgtgaagtttggacgacgatacggcccttacacctcacgggctattggcacgctcgtgttgtattgcaagttgctcctaagtatgtacactggaaacgcacttggcacgtgcgcggaatgtcgtaccaatgttaggatctaagcagcgaaccttcgtagctagacatactactgcgtaggatgatgatgaccagttttctgtatctgattcaaggcactccacaagatcattgtacgccggatacggttctgacactgcgccctaacctggtgctgaaatattgcaagggcactggggcgttgttgttggttcccgccgctggtgatcgagtgggccccacatttgtgagtgcagttgttctgccgggtaaatgtgcacctacgtggatccgcagttgggaatctgcggttttaagtatgactgggtgatagccttgcggctggccaagttacgattgtagccag

SEQ ID NO: 190 - DNA, 572 bp, Unknown
  Description of Unknown: unclassified dsRNA viruses sequence
gtcacacacccacccgtgtgtgttcggcttgcggggaaacttactgcttgcaggaacgaaaaacaagagcagcacaaccgaacacacacgagtgtcccgtagggaccgagtcgggtgtgttgatgcaaagaagagagaagccgacagctctctactaggctgggggatagctctagcgggatgtatccgctttgggattttctgcccagtgcccaaaatcagggccgccaattcgacttaaaagggattggatggcgcctgtgccaagggtgctaccaagcacctggagtgccgatcgactacaacgggtcataggcatggccagctcaggctgggcccagcctgctagtaggggggatagtcacctgggggatccagggtatcgccaagtcaggtatccactgttctttgcttttgccaggtgctcagccgtttaactgagcaaattgctaggtcccagccgtatctggatttattatcttcgctgttgtttgacagtgctataaccctgctactctccttactctaccctctccttttgattcccattctggattcgactggagatagac

SEQ ID NO: 191 - DNA, 572 bp, Unknown
  Description of Unknown: unclassified RNA viruses ShiM-2016 sequence
attcaatggtatcggcggcattggcacagatggtttcgtctgtgctcgacgaggggcccaggatcctcctattcctggtggtgtgggttgttgtgcgtagggtgtggcgctggtttcggccgggccccactgctggcgcgcaactggtggccgagctggatgctggcccagactgggacaccgtgggtcacaccacgcgttaccagcgggagctggcgtatcggttcaaggcggagtttggcgagttgcgctataacaaggctaaccgcattgtcgcatcggcctgggtcctcaagaccatggccgctgatgacgtgcggtacgtggaccgtgttatgctcgagccattggcagtgcagttatgcctgctgcccacacgggctgcagtcctcgccgcggcgtttgcaaagacccatgaggtcaatgcgcgccgcgacgaggctgagctcgttaaatagggatgccctgctgaggtgcctggagtaaccacgtctgtcgaccgtcgtggtgaagcatgcttgcgtgtccgggcaagtgtcggcaagggtataaggtccggtgttgaccgtaca

SEQ ID NO: 192 - DNA, 580 bp, Unknown
  Description of Unknown: unclassified Partitiviridae sequence
cgccacgtcgctcgtggattgctcgacagtggctggctcagtacgatgagtctcggcctcggatggtggcgcagcaaccttttctagggcgtgctctgcgcgccgcagcgattaagtcggcgcgttctgtggctacagtgcgtactggtgtctctactggtaaggatactttggtgacgacccttcgagccctgcattttggggtcgttaaagccgtcgagcgcgtcgactctgttccaggagcacagcttcgcaatccatcacctttcacccgaacgcgtaaattgcctctcccacagaccaaggtatgtactttcttgggaacatggccgtttaaagttggaagtcaaccagctatcgtgcgacgtacgacaaagtccctctttaagtggtggtctagtccggccggtgcaccgtaccgtgcgacatgtccggatccacgtaactattttcttgtcaacgggtcttggctgcgaatatgcatgtacttcgcgcgtttgcgacaccttctgatgcgaccgttactcgtgcggagctattacggtgtctctctttcgtacacacattgaacatccctttt

SEQ ID NO: 193 - DNA, 583 bp, Unknown
  Description of Unknown: unclassified Riboviria sequence
gaaggttaaaggagacaagttatacgcgaatggagttcgaaagaacgccaccgtggatccccctccgtatgcaggcaaatcacttcaggcggctgcacttaagggccaggtagtgaccaacagtcggcccccattctgcgctacagaaaccatactggtcaagcgccccatttctaccagtaccaagagcaaagtgtgttctgaatctgccgatgagattaaatgcgatgccacgttgtactattatctcatcgacaagtttgcttacatgccacgcgacaaccgcatcatggggttgatgcataatgccctaacccgttacctaactgattatgactgttctaattattcgattggacagatttatcggttaaagattgacgctgttagggcagcattgtttccgcccagagaggagcaggaaacacgggtgttgttgcgtgattacgatcctaaggttttggagaagcacgcccagtggactggagagggcattttaggacgtaattcttggtggcaatcttccgaaaggaggatgcctaaggttaagaagtaggggtcgctagtttcaccctctatttgc

SEQ ID NO: 194 - DNA, 595 bp, Unknown
  Description of Unknown: unclassified Picornavirales sequence
gtaacacgtcgaacctgttatggcttatcgtatgccctgctatggcgaaaatgctactatgcgatgggagactcctatgtctcaaactaggaaatccaatttcttttggattgccatttgtttgttcatttggccgctctagctccgagtgcgttgcacttgtaacttcgtgcgtaacgaagatagttgcttatttcgagaagcaacacttccgcctatatggctgaacctggattggatccctgttctggaaaaggaaagatcccctcccctctggttacccaagacactataccacgtagtgtcctatggcttaggggttgatgtgtgtccctcatggggatacccctttttaggggagacagcactgtcagtgggaccctgctttcaatcaaaaaagtgtagattgttagctgatacgtcacttactgaaaatacgaataataaaactaactcgtctgattcacatcaggcgttcgacaatgaccaatcggtaacctctactagcaacgttgtttctgctgatcataccactgacgtggtggtggttagtggacatggccacgctgatggaggtacaaccgatgattcctta

SEQ ID NO: 195 - DNA, 600 bp, Unknown
  Description of Unknown: unclassified RNA viruses ShiM-2016 sequence
tggcgtttttggcagctatgctcggtggtgaagttttgaatatggggggtagtttaattggcgcaaaagtaaattatgattataattctatgttattaaatcaacaattggcaaatgctgaaaagtttcagcaatttaatgcaaatttaatgcaacagcaaggtttaccgtatttggctaacggtggccaaggatataatcctcaaatttctaatatgtacaatgccggaacgtctaatggatttaataatattataccattaatggctggagcgtctgccggaattttcggtggacgtggttcaaactttttcggatcccaaactagaagttcctccacacaaactggacagtcgacctccaattccttttcacagacaggacagtttacttccaattcttttgcgcaaacttatgcatcagcttatgaacagccttatacaggggcagatacggacttttacatctctccgccacccctaactggtactgctgtaaatactatggcagatgcagcaactgatgcgggtgccatgatggctgcgtagtcctgatttcatcttactacgtgataggataggcgctttgtatactgtaaag

SEQ ID NO: 196 - DNA, 600 bp, Unknown
  Description of Unknown: unclassified RNA viruses ShiM-2016 sequence
ggaccatccaggcaggtgtaggctagtaccctcacctgacctgtcgcgatgtttggctttgtgaggcttgtgggaggatcccttggcccatgcattgctgctgtcatcgtgaaaaatgttgtatgctcgcacctggcgtggaggaaacggcatttgacggatgctaaggaggatttgaaggtcctcaactcccatgccttattacaagtcccctttccttcaagcttcgagcccacgtctgtgacgagcagaggtgaggttggagtcaagaggagtcctattcaagctgttcgcagcaagaaccataaaactttcattgctcaatgggcaagagcggctaaggctcggttctcgtttgcacgacagtgtgagcggagccctgtaaatgtcgcggcccttcatcggtggtttgcatcggagtttaagaaaattggcatgaacttgctccaggtttcgtacgtgatcgatgaggttgttgaacttagtttggaaccaacgtatgagcgtatggtgtccgaaactaagaagcaattccgtcatcgggcacgtatggaatactacaacgagaaaaaatgccttgaaaagatccactaggaacgc

SEQ ID NO: 197 - DNA, 608 bp, Unknown
  Description of Unknown: unclassified Nodaviridae sequence
tattatcatactgacaatggtaatatgcgagagcgatagcaagcactagaaacgagttacgcaaccacagacagcaagcccggaaggcgcgcagagactgaacacctctgtgtggctgaaggctccccactaaccctggagagaagtggcagaaccacagcctagtactagccgcaaggcttaagaaactaggtgtagctgagtcctttcccttaaacaaggattggaccacttgtaggatccgtgtattcaaacgatctggcagcactatggctcggacaggtacaaccaataaacacaagcgttttgagaaaccggcgtgattgtaccgcagttttaaaggagcttcaaaccctcccagccgaaagatcaaacgaagtcgtagttgaactaacgtagtaggggagcggcgtttgaggatgttcacgggtcagtaacgtgaatagcttcattcgtgacgtgctcaaaccaccgtataggttcgccttagtcattagcagggatggctaggttcagctgcgcatgcacaaaccacaacaataaactaaactttattcgcgtatttgtgcattcccgttgcccacccacactcctaacaaatttcaagt

SEQ ID NO: 198 - DNA, 619 bp, Unknown
  Description of Unknown: unclassified Totivirus sequence
caacaaccgacgctccccacgtccgggtcgagcgtcggttgcagggttttaaaccagttctagccggtaacggctagaatgtgattcatcacacttggggagacccgagtgtgttgttctcgtcatttctcaattggctctcggacatcaatgcaccgagttacccaactaacataaaacacgagagttgagataatgaagaactaaacaaaaagcacttcgaacactttaatacaaacctagggatatgacaatctttgcttgaggcttggttataccagccggacaacaaatgttggagtctcactacgcctacctgattatggtcggtggccaaaacgttagccctatgttgagagggtgcgggcgtgctaagtttcccgagaagggatcccaaatgccgaacgactggaacggccgcaatgtagtggggggacagtctattccgcgcaccccaagttagcgcggagtgctcaaattcagctccagggacagctcaacagacaaccagttagtatcgaaagtcgaccacagacgaaatcttattactaggtgttatacatccggatatacaaacagtctttttcaagactagggatttcagtgcataggacttgta

SEQ ID NO: 199 - DNA, 628 bp, Unknown
  Description of Unknown: unclassified RNA viruses ShiM-2016 sequence
cgtgtagcacgattattagttggatgcttatatggtatatgttgcgcaaacgctcatatgccatgtaggcactgattataagagtctacccagttttaactaaactctgcttctagttcctttagaagccacctaccgcgaggtagtttgtataatagtgtgtatatgtaagacctatttaataaaaattattcatatcttataaagaaaaaacttaggtctgtgatttgtataatatagtccatcagaaggatccctgaattactactagtcatgtagtaaggttgaaaatggaaatcctgcttgttgaatgcttagggtgcgattcactcactgtgtgttgtgatagtacttggataagtatttagtgacgcttgaatggtcactattgtcgcattcggaattgtgtgcgactgattcaagaggatatggtggaaaaagatcactggcgtaaggcaatccagtgaacactccaaagggaggagttagttcaagtttctccgtgtcaggctcaggaaagccgggtgtggacatccacctactgaaccggttttgtctatttccaataaaatagtcactcccaattcgcgcgttcctaacccgtccccgcaaaattaaagaattaatc

SEQ ID NO: 200 - DNA, 630 bp, Unknown
  Description of Unknown: unclassified Triatovirus sequence
gggaatccctatgcgcaattatttgcaactccgacgtggctgagtataaacgatcccgtatgtcctgaacatgacagcttagtcaataaaccgttcaccccaaactcatcaaatttacagtatttagatgtaactaaaatctttcactggattaacccaattaagaaagatgattagtataagttagttttaattattagtggaaatctatttcttttcccgtgtataagagagacctatttgcacgttaaatatttaaatggaatacatgatggtgtcatgttaaaaacactcttactactggcgtaagtattctcgcttttagtatcgtattaaagaaataccgtataaaagattgtgtatcgcgattgcgaaagctaagacaatgggtgtaacccaggtcgataaccattagcacgcggcatttgcagcaagcaaagcacttcccttttatattgcctcatactcgcgaggttcgactatgagtgtatggagcatgaaattgaattatctttcatgttctgtaaccttcgcttgggaaggacggatcctttctatttttattaatgacaactaaatcttttgttcagttgttatcaaagctatcaaagtttaaacaaataaattaaa

SEQ ID NO: 201 - DNA, 647 bp, Ghanaian bat henipavirus
ttgtatgtaatcagttaaaggaatctattatttctcttctccattatctgattatatcctaagaaaaacttaggaattcagggtactgcccttaatgacttgcactaatatcaaaatttcaatatacgacgaatgtgattggcttgtattatcatcataactacctccagccgtatcactgacaaaagatttataagcactggatcacggagtcagagttcaaagcttactaacgtcaacctcattatatctagttggtgttacagggttacttcgagtcatatatgtaattgcacctgataatacctctctcatctagtacattacctcaacagtatgatctcggggatccaactacacctcgacaactcataacaatcaactaaatctgcctcacaattgaccattgccattctctcagtcataaaaaggatcatcccaactgattgattatttctttaaaccctaaacgtaaattattcaatcatgtaaaataaacataatactttcagatctacagtgatagagttcttaaatttattccaatataatcctattaattagcattgagagatctcccatgacatcacttttccagtcagttaaatctcagaaatccactaactgagctaccgtcgaagtcaagc

SEQ ID NO: 202 - DNA, 655 bp, Unknown
  Description of Unknown: unclassified Riboviria sequence
gaggtgttattcaaggcgaatacaacaaaagcatcaacaactccaccaatgaatccaatcaaaagatcgctaagatgaacaatgacacctggacccttacaacagacaaaaacatccagggccagaaagacatccaaaagcatacagaggaccaattcacaaacaatggccttccatcttacatggcatatcaaaacaatgggggaaacgacaaattaccacatcagcaataccatctggggggaaacaactattatcaatctggaaactatggctcttcacagccatccatttcaaataattaccagcaatttaatcacgtgggagtcccttcaaaatttgaaaacaaaactgggaaacaaaaatttgttccgggtggaacactacaaccgaaagaacctactgccgttccgaatactatggtaaaaacaccattccctacttcaactggtactcaaaccagccgttcaggactcggatcccgtgttccttcaacttccaattttcaattttccaatatggacccaaaattttcttcaatgcttaataatcaggtttcaaaaagcaataaggccttcataccttccgataaagcaaaatttaaggatacctggactcagacaaaacaatcaagtactgccacttccatgatccc

SEQ ID NO: 203 - DNA, 660 bp, Unknown
  Description of Unknown: unclassified RNA viruses ShiM-2016 sequence
cctaaaggtaaacaaaaaccaacggcttgtcccgtaaggacgcaggaaactgcgagacaagaaaagaaaccacgagtgattaacacttgtaaacttaaggatgttcctttgtcggaactccaaattttcataaggaattatgaaaatgctaaggcgactgggattgagcctgatttaaaattcctttcaagacagaaagaaattttgacaaaacacaatcccaacagaaaagtgaagacattaggacccgacaagaatattgccaagttgttagctgataagagaactagatcagctgccttggattatgtagcgcaaacatcttcacttgacaccgatctttatggatcctatttagaagatgaggaatttccaacttatttggataactgtaaagatcgccagtatagacttaagaccgagccatgtcgatcgtcttatattgagaacttcaatgaaccttccacattggtaccacccaaagatttggttaatgaagttttcgaacagcctaaaataaaagattacactttaatagaagtggcttcatttaagtacgtccgagagaacgtcctaacagaagtatgttttaataacactattgagatcagaaatagtgttgaagattctaggttagatgttttgactaatactgatttg

SEQ ID NO: 204 - DNA, 667 bp, Unknown
  Description of Unknown: unclassified Iflavirus sequence
ataacttttaaaattgcacgtaatgtgcactgcaattttaaaagttatttttctagtaacagtacaatgcacaatctaggcaattcatgtctcttatggcatgctttgtttggatgagttagtcctctgttgtactgggaaagctttagcatcccaaggaaatttagcgaaaccccaaacctgtctcctcgacacaaaattggaaaacaaacattatcgaaagataataaggtgattccgtattaatccaagagtagactccatcacaactcttgtaaataaaattgtgaattttatctatatttgtacccgcaatagcgctgacgcctataaattgaatttataagtatgcatttgaatttctatttcctattccatacgttttggataggacacacccctctaacaccacctcagacgtggcgcattgagtgtgtaacgaatagaaactattttgcatcttgtttaggaaatttgtagaaacgaaccgcgacagtatagtaaccttactgtataaagacaaggtttatcaagtatttcacacttgagatgtctgatgtaaattccagactatgtactatagtgatctaaattgatgttttacaaggtatgtttcttccgcttcaaaggatcctaaccttagaagaaatcgaaacaaaatgaaaat

SEQ ID NO: 205 - DNA, 667 bp, Unknown
  Description of Unknown: unclassified ssRNA viruses sequence
gcgtccggttatttcacccacctcttatatctggccgaccaggatatctgaggtagcaatataatggccagaaggttgtgaaagcttatttctaacggcgcaatcgggaaagttaattcttagcccgtaagcctaggatatcaacctggacagaacgagccatagcataggcatggtgagcgagattccacagcaacatttagagaatgagagacaaaaaccccataaaaataaatataactctcttatctaggtgaccgtaaatgtattgcactttttgtttaaatcgcgggaattgcggcatatgccgtcgctcttgacagcgtcctccggagattgttcttactccgagtgcgttaatgtgtagtctcacttcggtgccactactgggcccacagacgagaagagatcactcttggtgcaaattggaagtgcgtacaactgtacgaacggtggccgaaacctagtgccacagcatcgagagtaaagatttcttgtggatccacgttgtcaatagagttgcgtaggtagtctgtgtgtgagcgcgactggttatgatcgaaagctatccattagcttccgaaactgttagttcaggattaggctgagtagcatcttgaaagaggtgtgcggggactcgggcagtggactttcataatcactactt

SEQ ID NO: 206 - DNA, 667 bp, Unknown
  Description of Unknown: unclassified RNA viruses ShiM-2016 sequence
ttcacaccctgcattaatttgtgaacactttaaagggggggtcaggaggaaatgcctgactcgagatggcgtgtgggtcatgcaaacacccgttcccaggccgggccgggacccacgcaggtgagatgggacacctgtttgaatcgacgcgcataagttgttgtcgatcgggcgccagccttgttcttcttcactctgattccggagcttcagagtggcgagcctgtgcgatacgtaccggcgtatctgaggtgaggctgacaggggatccagaaagtagcgtcctggatggtttggccacctataaactccctgcccccgagtccaccgtccctgggcacggttaaaccgtgtcaacactggtcactgcgcggcgacgcgttgttggttggttagtggatctgagggaatggttgcggtccgctaccgggggcgttatcccgggcccctattttagggaaggactggtgcaccattttggaaagccagtcgacgctagtctccgtgagttgttcagtttttcgttgcttaaagtgacctaattaaggtgttcacagaccgttacttcagcttgactttgccgccaaacgtgcggccacatacatcccaatagggaacttttgtctgcacgagactgagcccagctcaacttgtccgttaaaccgag

SEQ ID NO: 207 - DNA, 674 bp, Neofusicoccum penoulivirus
gcggtttttggccgccctcccggaatttgtggctttcctaaccgtgtgaaggtcatgtggtgttcgcgtgagtgtgtctagcggccctctaagggagcggtgggggttaaagcccgaccactagctgcacgtgtaaccatatgacatgtaacatccagccaccttccggcggtgaactggcgcgtctgagaacgctccggattctccggcccccagagggtccatcgtaaacggtgcggtaactcaaagtacgaaattgaggggtctcagccccataaaacaaaggaaatgagttataaagagggtagcgtgcggcaatcgcgcgtccataccgctaaaccggatgggttctcggcagggagtgtgtgcgacagtaacgagtagtgtcgactgcgcgggatttggccgctgtgaaatgcggtctgtaaaaagggatgttggggccttaccggtgattgagcttagtaactcttcccagtaccaggactccgtgactgtgcctcgcgcgcgacggagcttacgcaagtgtgtcttcggatcctgggaccggttcggttgacatggtggttcccattccctatcctattctcgctggcgaaacaccgcgtctccggagacgctgatgtgtataaaggcgaattgaaatttggaccaaaacaaaagaaaacgatcga

SEQ ID NO: 208 - DNA, 679 bp, Unknown
  Description of Unknown: unclassified RNA viruses ShiM-2016 sequence
gcgccaactgttcgtcgtattatccaacgtcatggattccacaagctccgcagttcaagcagcttttgtggcctgcaccatcgggaaaatcggtttaactctgtataaaaaatggatggcaccccggtgggctgctgaccgctatctggctaaagctgatgctacaacccgtgtgatcatggaagaggttgagaatggacatgactttgaagtccatcaactcacagtcgacatatcctctcagaccatggacactccggaaaatagcaccaccaaacgtcgggttcggtctaaagccccctttcgtgcttaccttgtgaggtctggcaaggctaaatttggtctcatgaagcgaacacccgccaacgtcatgtgcgttcgcaaatacttgtacgacctatgtgttgtgcatggggtgatagcacgacatatttgtgagaacgtagacattgcttcagagcttgtcttcattcccaccgctcatgagttagaaacacttgctatgcagtctagccgatatggaaaacgtcagcatacagttaagaacatcctctctgaggatgcctctgactgttgatggggccctgctaagttggagggggtagacactgatccaagcgactaccccggactcactccaacctacgctgggatcccaaaacgacgaaagtgtttgtat

SEQ ID NO: 209 - DNA, 681 bp, Unknown
  Description of Unknown: unclassified RNA viruses ShiM-2016 sequence
cagttctcaacacagaacaacgggtcatttgtcgaatgatgggatgcgacagttcccattttcccttgacactggaaatattatttcgttagataattactcatgtgtcagttgccttgccggagatccgcttagcaacactttacatcttcccctgtgccattttctggatggcctgcaaagccttacggggccgagctcgagtttcgtttatgcgttacgacaagtttacgattcaggttggaataccgccgtgatttcacgtatgccaagtgcgggtgtgcgtgccctctaagttagaggggttaagcagggatagggatgtttagtgtgtgttttgggatgtgaaggaagaaacagctgatatgtggggagctaaggagcgttttagttttattccagcgggtggatgagaagttgggagagaaatcgaccgcactggggcctgaacttgccctataccaacctcaccaaacccccctggggaaatgtccacggtgccaccttacggtggttccactcttttcatcgtgagtgcaacgacggtacttccatttaatattgccgagcggatccatgaaaccgctgagcgattgcgagtgacaaattgcgactgtgcctaacggcattggcgcgacggttaaaattgcacaacaataaagtaatccaggcctgaggcca

SEQ ID NO: 210 - DNA, 687 bp, Unknown
  Description of Unknown: unclassified Sopolycivirus sequence
aaagttgtggtcttttgctccacatcacgtctaagcgtgagcaatcaacgtgattaaataaatgaatgcatagcgttttgtgtatacgtttacggactgtaaccctgaatacacaccttaataaaggcgaaaccctaatcgtctctattattgtagtcctccttgtcacgggacaaatgcagggcgttcacgcatcaaacctacgagcgttcaagagccttactccaatattgtttgaggttaaggcagccaccccatagaggcttaattcggcatttagagtccaaggttggagcacatgaatcaagtaatgtgtaattcgaagatggcgattaagtttaatcattctgaagtcctagcaagatggaagaaagatgtggatccgtgtggccgttagctttgatgtaatgtgaattgctgtccacccgtgtgggtcggctggacagaaaggggtacgacttggtccgcgcactctacggagggcataccctgtacccattctggcgatggatacaccgtctcaaacttttaaatacaacttatgtgctattatttttgctgctttatacgctgccctcaacctgctattttatatgctacaatattgatactgctatatttgctaacaattatattgctatatttcttataagttgaaaagtaagagacgctatatcctgagataaa

SEQ ID NO: 211 - DNA, 724 bp, Unknown
  Description of Unknown: unclassified Mitovirus sequence
gggacctgatggtcctcgacggcggagaagagctttcgccctctcgccttcaacggttagttccgtgtaactcaacattacagttgaggtgcattgcgctgccttagaggggagacccccaaagccttaagtggtggataagtgttggacattatttgtttaacggctgtccgccgtaggttattaactctgtgtttaaaccttcgaagtatggaggatctgaagaacggtaatttattactgtaactttgggttagtacatacgaggaggtacatatgatttatgtccctacaatactaacgtatagcttactaaagctggctgcggcccaactgctgtaatggcggttggaaaccgaaggttagtgttcttaaattactttacaaacctatatatggacagtataccaggcactgattagttcataatcaggaaggagtaccggaaccctgtgcgaagaaaacctcgaaagaggcatgttttcacctgaaatcctcatagcagtaccttagacagtactcactagatggataggcagtcactggaaaccatgcatggtgctaacgggaaatgaccaaaaagtctagttatccgagagctacatatatagtaacccgagctgagtaacactcagaaggagggtagtgaaccatattggattggtccgtaacgttagaagtgatactaacaggatccctttgtggagctccagatattaatact

SEQ ID NO: 212 - DNA, 741 bp, Unknown
  Description of Unknown: unclassified RNA viruses ShiM-2016 sequence
atgcactagtgcataactaagtgaagtttcagtgagcttttgtggattacccgctattagctcatatagctattagactgtgattttcgaaagcgaacgaaatggatctaagttttgtgttattgtgttgcgagtttttgcccctcctcgggttaccaggaaaacaagaaaaagctacgaaggccggctaagtgccttcaatttcgttttcgttttagggcgttgtctgaagtaggttcccaatctatttcagcctagtttatggtgcaaaagttattgctgagtgattaggataaatgagcctaaacgttatccgccttgacaaccgtttggtttatgcggaaatcatggatccccgtgggtgaagtgatattccggtaattgttaacggctcaagccagggtgcggtatgcgagtcagatccgaaatccataaatattcttccggtccaatattccgatacataatgtagagcaagaggccaaaggttaattatgaatgaatgatcgtgattcataatgtccccccttttcgttcccgtaattatgtattagctactggcccatcacaggatgatgggacactagtgaaagcgtgctcttctgggaggttgagcggcgctaggcgggcgacctgaacgcatatatggcaagtttgttctaatcacaaagataacaataagcgtgctgcataattaagctagttttgggagtcagcgggctactgaagtccgcacaccca

SEQ ID NO: 213 - DNA, 743 bp, Unknown
  Description of Unknown: unclassified Mitovirus sequence
gggcgcgagcccacagtttcactaaataaccttgtgaaatggttatctttgtgacctgccttaattggcggcgcgcactggtaatttccctataggaaaattcctttaacgtggatttagtttcgtagttgttggtcataaggccgcctttcgcgagggcagcagttgacttgggtttgcaccccatttcactgtggtataaagccaacagttactttctatataaagcgttattgaagggtagttatcctgcctttctttttagtcggaaacagcgaaagatcaccgatctcgggtttgaaatagaacaccgatcacggaattgagctgcccggtagtaatactggggggtccgaggaaaagagggtaaggctaatttagccctatctgtacgatcagaaccttgaataaggcggctgcagcccgtagtgatacggaaactgaagtctttactcgatacacaataaagaactaaagcaacacaaacatataatttaaataaaatattgttcgcgactgccactaggtctttaaagtcactgtcaaagtgaagtgccgggatccaagtaaaattgggtcgcccgttgctgggtctcttattgagattcattcccgcaacgggtattaagatcgacagaggtcgggttaaggtaacgttatccttcctagcgacgtgtcataatcttttcaagtcaaatggtttaccttttttggttaaatcattgaaagcttgatctgttatt

SEQ ID NO: 214 - DNA, 748 bp, Reptilian ferlavirus
gcaggttggcgagatatccatggcagtttcggatctaggtgtcattgttagaaaagtcataatgggcaattccgagagggacgaaaacttaacagcactaatgatgaagatgcaaaaacagcttgcaatccaggagggaaagctggaaactctgcaatccactgttgggaaaatctatgctaaagttgacctgatcaaggatcatgtctcgaagtacatgatattaacaagagaaggaggtaaagacagtcaagaacatgaacctaggagattgatacagtcttacacaggcccagggaaacccgaagccgtgatcaatgagcatggccaaatcaggctcaaaggaacgaccaggagtggcaccagttggaacacgaccccacatgatttggtggatcccacaagactgacgatgtccagagatgaatcaaatgctacaaggtttatacccaagcttgatgatgcttctagggcaactctcctcagcctcctaaccatgtccggcctggacaatgacactcaaagcacacttgaaggaataattatgagtgccacaagagtagatcagctaattgaggttcatgagatactcttggaaccataacaaccccatatatgatagacccagtatatctgtgcaatgtcgactctccaacctgacatctgagccacaccgccatagaacaaattccatccagtcatcaccttattaagaaaaacctaggaacaaagttccactggttccaga

SEQ ID NO: 215 - DNA, 752 bp, Unknown
  Description of Unknown: Picornavirales sp. isolate war204pic2 genomic sequence.1 sequence
attggatatcctgacggatccagtccaaattttctttaatagaataacaaccatgagaatgcatgggcgcatactgttggatatatctagtttcgtaagatatatggtatttacagttttaacctaattgacgccatttttagataaatggtaactagtttcaaaaccctcgagattcgaaagaactcacccttccgtttgcgaaggcaaagaagttccgaaaatcccgtaacccccccaagatcggggatgaagggagaaggaaatctaatccttgtaattattattattttaagcgtctttctatatgtagttgtagagagagagtagagtagagagagagagaagaagagtaccaacagagaagtactattaacgaaagactcttaatttaatataatgaaaaggtcattacgatgaattccccagaagtgaatctaacatcaaaagttcatttcgaaggttttgaaactagttaccatttatctaaaaatggcgtcaattaggttaaaactgtaaataccatatatcttacgaaactagatatatccaacagtatgcgcccatgcattctcatggttgttattctattaaagaaaatttggactggatccgtcaggatatccaatactatttattagttaacatgttagtgacaggccttgtagccctaactatcgcatctgagtaaacagattagacaaatccaacgaatttattaggctttatcgccaatcttctacgtgtaacca

SEQ ID NO: 216 - DNA, 760 bp, Unknown
  Description of Unknown: unclassified Picornavirales sequence
ggctcgtgaggctggttactagctgagacgctagcaagcacacggcacagaagggatccctcgtcgtcacaatatcaacttgaatttctgtttggttgataaacccattccattggtcagttaaaatcgttggtcataactctcgcggtcaagatctctgggatagaaaatccatcatttataaccgccctcacttgtcggatatgtctcattcttttgattgaatcctcttccttgtaaactgacctagtcctttacattgcggaccgattcctcaaatttatgactcagatgtgaaacccccttttctcaaaaaccccacttttctttgacttggcatgaatttggattattctgactatcgattttaggtttaaggcaattttggtaaatgagtgttgtggcttgtaaaccgcagctcatatgtttgacagaaagatcttgagaaacatgatactatttagtaggacctccgaacaatagtccctcatgactactcttgagatgaagttgtttattatatcttgttatattgatttagttcggtatactgagagcattcatctaacccacatcagtcccctaagttttcggacgacaaggctgattggagtatttgtctaaggtaataaatgatggattttctatcccagagatcttgaccgcgagagttatgaccaacgattttaactgaccaatggaatgggtttatcaaccaaacagaaattcaagttgatattgtgacgacgagggatccctt

SEQ ID NO: 217 - DNA, 762 bp, Unknown
  Description of Unknown: unclassified Luteovirus sequence
tagacgtaggcaagtttaatcttgcaccaatatagaagtagttagcgctttccattgttacttataggagccaaatttggtgagtcccgatcgatggatcctgggaaacaggttcggtgaacaaaaagccggtaatctcggggagatgtcagctcccgtcgtatcactttcggttgcatatccaaagaataaccctatatttgacaactaaaaaatagatagtttccgcctctcttgtaaaccacatacaagatgcgagcttgtggagagtaccttcccttgaataaggagggttgaaagtttctggttcccaaaccattgatcaaaattggctctgcttctggtgattacactgccgctgaatcaacagcgtaaacaaattcctattggccgctccgtgaaaagagagtggctaatacgcccctttgatggcgttaaatgaaagcgtaggtcgtacgacaccccctgtcaaggacagccaaccttgcgaagtcgggagaatacccgatagactgtggtctagtattaaaatgactcgagggctcttcctcgttaaaaagggggcgacggcaggcaactgctgtcattaggcgaaagcctctttgttgttaaggtggccatcgggtccacctgccccgtaaagttgacacctttacagaagtgttcttgctagtaagagttatttccttgtgaagtaatacaagaacctcctcccggcatcttcgtatcgtgtttgaggaatctctagtgttattgttagtt

SEQ ID NO: 218 - DNA, 773 bp, Mumps orthorubulavirus
acgggaatggagcctcagctgggtccaaggagaggtccgggtctttgagtggtgcaaccctatatgctcacctatcactgccgcagcaagattccactcctgcaaatgtgggaattgccccgcaaagtgcgatcagtgcgaacgagattatggacctccttagggggatggatgctcgcctgcaacatcttgaacaaaaggtggacaaggtgcttgcacagggcagcatggtgacccaaataaagaatgaattatcaacagtaaagacaacattagcaacaattgaagggatgatggcaacagtaaagatcatggatcctggaaatccgacaggggtcccagttgatgagcttagaagaagttttagtgatcacgtgacaattgttagtggaccaggagatgtgtcgttcagctccagtgaaaaacccacactgtatttggatgagctggcgaggcccgtctccaagcctcgtcctgcaaagcagacaaaatcccaaccagtaaaggatttagcaggacagaaagtgatgattaccaaaatgatcactgattgtgtggctaatcctcaaatgaagcaggcgttcgagcaacgattggcaaaggccagcaccgaggatgctctgaacgatatcaagagagacatcatacgaagcgccatatgaattcaccaggagcaccagactcaaggaaaaatctatgaactgagagccacaatgattccctattaaataaaaaataagcacgaacacaagtcaaatccaaccatagcagaa

SEQ ID NO: 219 - DNA, 774 bp, Unknown
  Description of Unknown: unclassified RNA viruses ShiM-2016 sequence
agaacccctcgcgggtcttgcatgcaattaacgactcctctaattagaaggggtgtcacggggaagacaacgccccgtggcgagaaacgcacgactacatttctttgaccggtttacctgccgccgcccggtagtcgcacctgtagaaggacccaggtgttagcagagtgcgccgaagcgtgcacaatgctggtgcgtgccttattcttttgccgagtccgcccacggatcggtggaagcctggtggaggggacgggaccctcctgaggtgaaggcctgtggaaggggggggataggcacccctaaggattggcctcctgtacttccatgctacgagtcggcccggtccggggcttcattgtcaaccgtggcccacacgctggtaacggcggtgggttgctagccgaccttgcaaatggctacgaacccgaggtgtggcggatccacatcggcctattgctatttcgtgcgaattactgcccctgaggggaggtgacaaggctagagccagccgttggtagcttgccctctcaggcccagtaaggaatgcccgttgggacgcacgtaacagtagggtcgcctttgtacatagtgggacatgcatgccacctgatcaacgctggaagtacttccggtcccagtagttgtttcttgtccgggttacctacggtgcaaatcgtggatgccccgtatgagaaatgaccattgggaccgaaagcgcgaaaccaacgttagcaggccaaagggaatccccttgagcgaaattagcttgca

SEQ ID NO: 220 - DNA, 779 bp, Unknown
  Description of Unknown: unclassified Mitovirus sequence
ggggggggtcccccgcgcaagcggtgtgggctcttcattgagcggtagctaccaactactctccacatgatggaaggaccttggttattccagatttactctggaccctggcttggttaagactgcaaacgccactaggcagttctataaaacggacatcagtgccccctatgctgttacttggtaaggaagaagaacccttcttcatcccgtcagcatctccatggctggagtataacaaaacgggtgagtgcacgacctgggtaaggacccagtgaggctccgaaagtaaggcttcgttgattgtagcgtaggtaacggtctatcactagacaagtgccccttaactctggaatctcgctaatcagagatcaacgaaataaccaaagataatcaggaacaccggacttatacctctgtatgtcgggggggagagactccccacctagtacttggacgacttcctcggaaggagtctaaggaacggtcaagggaatctcctacggtagagctggccaagtcagtttaagattatagtgatatagtcttcagagcaagtagatccttcccttcagaaaggaaggactctcctgatgatcctcgtgagaggagtcacctcacttcagacctcgtacgtgtggtacggaaggatccccagacggggagaaatctgtatctgtcggcgacaactcccaccatgccctcttgggggggattgaaaacccttttaacccttgagagtaaggaagcccttctctgaaaccccacttaacttcgtc

SEQ ID NO: 221 - DNA, 781 bp, Unknown
  Description of Unknown: unclassified Mitovirus sequence
cttcgccaacaattacggtggcttccgatgatctgcgccagtaaggtagacgtaccccagaggatccttttaaaggcagtcatcttctccttgcacttgcagtgctggccacattgtaatggaacgtaaggaataccttaatatactactggccatagttatattccatcctgagggtaacctcttgtatatccagggtgccgccttttactaaaatatatacttcaaaactgttacctgtccgctaaaacctattggtaatctcaactacacataaagcaaggtttacgccgtctagttctattgtaccactgagaggctatctgtaacgggccccctgccgccagaggtagtacgatatgggttaaaggacccaatgttccccatcaagatataccatcgtcactggtagttcatcacactagctcacctagctctcccgaagattggtcgcttctgggtcttggggtgcctgagataggtacaggcataaatacaccacttacccgtgcagggtaccataccaaaactccccttaaatagcttccacatggttactgtccctaaactctctgagaaggaagtcgttaccagagggcatacgtgctcagtaataacaatggcgaccgaggagggtggtttactaactatagtacgtatttggagatactacgtgtgcgagatctccggccgacctaccccatggtagattgtgcccccctgctctgcagacgaaacacatgggacactgtataggaaacaaaacatatgcgaaattgtt

SEQ ID NO: 222 - DNA, 807 bp, Unknown
  Description of Unknown: unclassified Alphachrysovirus sequence
tgataaaaaacaaaaaaccgctttttgccattatcactcaatcaactactagatatgaataaattagacgattttagcgatgaaggcggtgcccccgcgctaccggggggatggcgcagaacggaggtaggcaagactataactggctacctacgtgataacaatttaggcccatggaataagttaactcacggacaaactaaccaggtcagacggatgttctcagcccttactgttagcagtttagaaagcgtgtcatcgcctggcccaccaaggaggcggttaggatacattgtactgccgcctggtcacggtaaaagctatatactgaagataccaccgcgacctgtccaattggttgaagctgatcaggtgatggattaccacctggatcccaccctggcacggttgcgtaagaacgcaaaagctagtgggtattggcaagaatacgatactaactatgctcagaggttggattcacgattgccgttcggcgattgggtaatcatgctacctagcgatgagttgggagtaacgatggggtggagtagacttgggacttatatattggctctggacgcgtgggcaaataatctcaagggacgtaaaggctcgatatctgagtatagtactgtatatagtagggctcagctgattgaaggtgttaaatgtttcggtacaaacgcagaactacaggcagctgtattaagggatgttaacaagttcctgaccgcctgaagtacctgatgagtctcccccaggggaacgaaacgctgtcgcgtcgtaccaggggcaacgcaacgaaca

SEQ ID NO: 223 - DNA, 808 bp, Unknown
  Description of Unknown: unclassified Orthorubulavirus sequence
gctcttaaagggacttgatcttcgccttcagactgtagaagggaaagtagataaaattcttgcaacttctgcaactataatcaatcttaaaaatgaaatgactagtctcaaggcgagtgttgcaactatggaaggtatgataacaacaattaaaatcatggatcccagtacaccaactaatgtccctgtagaggagatcagaaagagtttacacaatgttccagtagtaattgccggtccaactagtggaggcttcacagccgaacaggtgatattgatttcaatggatgaactagctagacctacactctcatcaacaaaaaggatcacacgaaagcctgaatccaagaaagatttaacaggcataaaactaactttgatgcagcttgcaaatgactgcatctcgcgtccagataccaagactgagttcgtgactaagattcaggcagcaaccacagaatcacagcttaacgaaattaaacggtcaataatacgctctgcaatataaaatgaggtgcagtcacacaagagacactcaacatgcatccaatcaagatccagactccatccatccaaaaacacgcccacaattgtcaacaccaagaaacaaccacagccgaaccatgctcaaccaaaagacccaaacaacacctcacatcaatagaaggctggacatgataaatttaataaaaaaagaaaagaagttaagtaaaatttaaaggacacaatagagaaaatctaggtccgaaagcttgcctctcagacagatcccaaaatcatagtccaaaccccaaacacagcagcagac

SEQ ID NO: 224 - DNA, 812 bp, Unknown
  Description of Unknown: unclassified Dicistroviridae sequence
actggcctcccttattattaggagacttcaaaatgcgtacggggttaaacccgtacgcaattttgaagtctcctaataataagggaggccagtccgtctaggtagactcgtcatatatacatttattgttacggcaattaatttatatatttgaagaggcctattccggctgcccatagtgttattgtatccctctgatagattcaccgtttctaacactccaaaccaatgcaaaactgactttgtcgacattgatcgttaagagagaaacaaagatgttcaaggtactagctatggcgtcttaggagggcgtaaaactcccgcagtgacaggcgtatctgtctaccccttgactgtaatataagttgtatgaatgagtgcgtgctcccgcaagtaataatagtgagcaaaattaattttaagttagttttaagtctttcatatatatttatttcattggcatgtcacaaatcgtgcagtttattagtacctatacgaatcactgacttatgaaaatattatttcgatatctctaagatatagttttgcccagtgggagtctatatgatttcctgcgtgcttcggctgaggcaaaatttaagatttaatatgagtagtggaatatgtgaggatcatgtgggaaaatttaccggtgctggatctttcatttttattataggtccttccgcacggacaggttaaccgaatttggcacttcggatccctggataataattgccccctttccacctcagcaaagtttttgggttaataaagcttggatttgaggatcaaaatatttttctctcatc

SEQ ID NO: 225 - DNA, 814 bp, Unknown
  Description of Unknown: unclassified Picornavirales sequence
cattgctacagcccttagagaatttactttacatggtaaaaacacgtataaatactggtattctgaattaatcaaactaaaagaagattattacgaaggatatgaatttgaatgtcttgttcaccgtgattaccacatggctctcaccgaaactcttggtggagatcatgtttggtacatgtaaagtccaaaactaaaactgtaaatatgtaaatacttttaaaatacgcccgtaatggcgttaaactattttggaaacattatatttaatggatccatgccccaaaggcaaatttgatgtgtgatcttgctcccttataggctcatcattataatctagtagtgctgcatcaaataatctcaggactttttagtcactacgcccaaactgagagttggcaatcccaatgaacaaaagttagatgaaccctgatttagtgttaattgaaactaaattgggttaaataaaccaattgctaacactaactcaaatcaaactaccactagtgttactagtggaatcctcaatattggagattcaacccccactcccgtccaaggtacacccgaggacgctcacactgaagctgctgttaatcaagtttttcagcatgctactaccaaattcatcgatgataatgataccgttaacagagatgaatccaccgtcgaacatatcaactctagttggttatcactcaacgacacacaatccactgagcaaactattattgattttctttcgaaacctatcattcttaattcaggtactttttccatttctgatacttattcttttcttaactactatact

SEQ ID NO: 226 - DNA, 827 bp, Unknown
  Description of Unknown: Fesavirus 1 polyprotein gene, complete cds.1R sequence
gttttcatcaaagttgaagctcctgaaattgacagaagtgatagaagatttcaggagcttcaactttgatgaaaacattaatacgccttttgagtgcttcaggatccgtcatacgagactggagctccgcttgttgagcatcgatgtcgaaatttgaagttagaacgacgaatggggaagagaaatacacattgcctttgcctgaacactcagcaatattgagtggatagggagactcgtctgtcatttggataagattgaatatttcattatttcgatactctggatctttcatttgaaaaacgtcgttacacactgcgaatctctgataggcgtactggtcatggtatggggtgtttgacatgactgcgtatatatcccgggatttgtcaaagtcaggctctccaaggacagcacacaagtcatgtgccaattgtggaaccatgactgtcttcccaatacctgggacgccataaatatagattgtgtaaggtttcattttaccctcacagccgacgaatgatgctaagtttccagatatgattttttcgagcttacgaacccgatcctggattggtttaacttggtcagttggaatttcgtgcttctcggactttcgcacaaactgtcttccctgagacagcagggacaaaacctggagacgagaaactcgtgatttagttagttcagccaatacattccaggatcagcaggctcaggctgttgattggtggggtttggtgcgccttctccgccttgatatcattcaaacattctcgctatctgatgctatatcgaaaattggagttaaccagcaggaggaggaa

SEQ ID NO: 227 - DNA, 834 bp, Unknown
  Description of Unknown: unclassified Marnaviridae sequence
tcaagcacgtaaacgtgacataggaaaatctgtttttgagcagaatttttcctatatcacgtttacgtgcttgacaatgtcaagtgtaatccgattgaggtgcaaggcctcatctgccgcgttagcggcgcgctaggaccgaaaaagcaaaccctatgtattctgctatttcgattcgtatacattgggcgttgtgatcgacccaaagcgcgctgcttacgcggcatagggcggtgtcgcaagacaccgcccgttgggggtgtaatccccccctttggagggttgaaccctccaccttagtcccagtaggttcccactgagcaaacccagcaatggatcccgtggaccattcggccagaccaacactctccggagttagtaattcatccgtttggacacgctacacatcgtcgactgctaatcacttcgtgcgtgctattgtgggccgtccgcgtccactctaagactttgtgctatatatttcaggggggggcccctgcctcccccactgcatatacattgacggaacccaccgtcgttaaacaagtggagaaaaacagcgagaactgaaactcgcagaaaccattgtgtcgctaaggctgccagaataggcttgcctggtgcagaaaggaacccataacctccgacctctccgttccgataaaggacgacgtcgaaggcgaaactgtaagttgatacttttgtgtatttgccaaacgagctcgtcgtaagaccctacgctcgtgtaacatttgcacaattgagatactgattggaccctctatgccctgatagctagatcgatacatttactcatcacagtaaaaggctgag

SEQ ID NO: 228 - DNA, 855 bp, Unknown
  Description of Unknown: unclassified Picornavirales sequence
ggtgcaagccctccctcccacttggtggttggaggtgcacgttcaattccaaggcgtcctgcgcagtcgtcatgctgtgcggtgtacgtggtaccggctagtagatccgagagtgtacctggtgcgcagcccgttcctgatactcactagtggcaacccctgtatgaatgagccgtcttcagggttagttagtggcttaccgaatctatttctacctttcaacgcaccgacttaggtgtatacaatcaggacgttagtggtccttctgtaagtagtggcacaacttcttttgtggcagaccccgtggctgccatccagccggtcggccggtccgaccaggttgaagagttgtttgccccgaattccgttagttctattagtgactatttagctaagccgtatcaagtatttcaaggccctttcactgttgtggatccaattggtgccattttgtattccgccgacacttttacttattacactaacttgttaaaaataaacaagcttagaggtttctatggtctgcgggcaacgctgtgcgttcgccttgatctcaatggcactccttatcacgctggtcgtttgaggttgtgttattatccttgttattctgagaatccaaggaaggggtctgcccatgttcaaaatgttatttctatttctcagttgcctggtgttgacatcgaggcaaacgagacttctgttttacttcgcatcccttatgttgctactactcacttcattgaacttactgctggccctgttgattggggtcgtgtttacgtttctgttatttctcctttgcgtacggggcctgacaaccaacagcagatcaattatagggtctggacttgg

SEQ ID NO: 229 - DNA, 859 bp, Unknown
  Description of Unknown: unclassified Bunyavirales sequence
gtttgaaataagctgtatgtgtgattgagatattgctattccgtcacatagaatttctgtgaatccactcttatctgatgtgaatgatgattcaaccactaatccactttcacatttgaaacaaccgtggcatgctgttagtttgaaatttgttattgctgccttttcaattagtgtttcaggttttttacctttgatagtgaaaatgaagtttagatcattcattacttctccaactttgtaaattttgtcagcaacatgtctgagattgtgctcagaatgcaaatttctaatcaatttgaagttatttttgcagcaagatttgaaagtgaaaaatcgatttcttgaaaagaaacaattatgtttgtaatcagcatcatcagaatcacaatcaaaatatggagtcattccgtcaacatgttgcagtgtgccaaatctatttgaaaattcagacctatcattaattgggccagaatacaaatggcctttgtaagatgcaaatatcttaccaacatcatctttggaatctccatcgaatgtgaatccatatttcttctgtgcaattagttctgttgaagatatatttctgcagaaggcttttgattgaaataatacacataattcaattgatttcttctctcctgttatcttgtagacatcagcacaatcacctaattttggttccatccagcaggttccacatgtgcaaccggtacctattgagaaacatccggatccgtcacaagaccaactacttgtatcttctgacgaaattattttgttgttcacagtttttgaaccaagtttgtctttacacttgtcacaattttctgtacaagtatcggtgctttcatatttc

SEQ ID NO: 230 - DNA, 861 bp, Unknown
  Description of Unknown: unclassified Sopolycivirus sequence
aagaccaataagagctctatggaatgaacatgtagagcaatgtccaaattgcaaatatgtttattctgttttacgcagaccatatatagttccttcagttccttatttcagcactccaaaattccaaacttcagaaacctcatttccttttcctgaattcactaaacccataagaaaagaagaaaaatcgtcttctggtgaagatactgttgatgattaagtattctttatgagttgcagtctcttactctgcactgtgtctaggtggaaactatcagcacagtaaataagtgaatgtaacaagtttggtggatacttgtcggactgacgttataattcaccctgtatgtttggcgaaaaccctatcgtcttcatatggaagttctccttgtcacagaacaaatatgggttgcccccagcattaaccactaagcgtttaagagctcatgtctctctttagagatttgatgtatgagcaactctcccggggaggagaatttaggctgactcctaccaaggttggatcttgtgatacgtagcaagtataggatgatggctaattcttttattaaattcagaaggactagcaatctggatgaatttaccggatccgtagagtcatgtgtttaatgtaatgggggttactgtatactcgtgtgggtcgactatgcagaaagggggatctcgccatagagatgtcctgtacccattcttgcggtggacacatcgtacttaaattttaaatgtatttaatgctattattttgctgctttttgctagttatttgcttattttattgctattaataaccattttgctgactaagttgctttcgttaagttatattgctattcaactacg

SEQ ID NO: 231 - DNA, 863 bp, Unknown
  Description of Unknown: unclassified Mononegavirales sequence
ggatcgatgaaggagatcctgggaattagtcttagaaaaacccgacagttactagtcaagcaatcatgaactatataacgccgacgattttggttgccgtcattgtgatcgcccatacagtggccattcggtcactgtcttacgacatgacggacagggtacctgtgatcgccctcatcaatgaccacgcttcgtggtttatgaaattgaccgtcagcccggtgactatcaatttttacgcgacgctgacctccttcttcgccaccttagccctgatgggtgtggtggtcaaaaattggcgggcgtatgtccgggacatacaacgaggggtggtgagggcggaagtgttgatgaggtcagcgtgactgcgctggtctgcttctagtttctccctgagagagttaatctgtggaacccgggatctcctgaggcggacacacgacagcattgtgcagcttacatcttgcataagatgctgtcgtgcttattttgagcgaattaaactcctcaattctgccgaagcagggggatcctagatttcaactagttattctctcagaggaatagtttggtttattttgttagtttcattgtttttttatgcatagttctatgtgtgtttgtttgttacacatattttgttttatatatatacacatgtatttttgatgttggtcatgtttgtctagcaattcggagccctatacactcatcttccctgattctaaattctctgtagaaattcacatatatgtgtatatgtatatatattttgatactgacctgctctacaaggagcttataacaaattgagaagtggcatatcttcttagaaaaacccgctagttactattcaaatcaaa

SEQ ID NO: 232 - DNA, 867 bp, Unknown
  Description of Unknown: unclassified Dicistroviridae sequence
ttaaatagaatccagatcaattcgaagctttttaagtagccgatgtgtagaattttagtattgtccattttatagggtacagatcaattcgaaactataattgtaggtggccgtcacaagagcaaacaaaggtagatttattagagtccagatcaattcgaagctaataagtcaaaattataacaagttgaataactttaaaatattcaaaatcaaatttatttaaagaatagtactctctttttcgatagaatgttttaggaaaagagctcaatattactttattgttttcaaattattatgttttaacacaaaatatatttttgatagtagtgacagtctatttctctgtctaatgtcgatttcccgttatatgtggatcctagtgtgaattactagtaaaattttattccgtgtgcattcgtataatgtacttattgtttcaggcgatttagtaatgctgtttcaataatattaagaactaagattatttctatattctaatcaaagataaaatatagactcttgttatgaggaaagttttcccctctttcaagttttaataacgaaacaaatatagcaggttatttgttgaacgatcggtagttactccgatgattcgattacttccccttgacccaactttggttgaacttttagttcaggtatatgttgcattttccacgtgtgagaagcgtgttcttaagtgaaaggtaagttaggaaagaatttagtgttgcaaataatatagtgttatgtttcctcaaaccaggtgtgttcccctcgtttgttgtatttttagggcatccgtaattaaaggattttaattaattaaataagtacaccattaatgtaaatttttgttgt

SEQ ID NO: 233 - DNA, 892 bp, Achimota pararubulavirus 1
caggagttcagcaacaagttcagaactcaagagacgccatcggagagagtttgatcttagatggactggaagaagaccccatgtcagtgaatggtgcaaccccatatgtgccccaatcactccaatcccacggagatttacatgccgctgtggagactgccctgatgtctgccccatgtgtgagggagattttaaggtacttaaaattgctggagaaccgttttaatcaaatggattggaagttggacaagctgattggacaacagagtacaataacccaaattaggaatgaacagatgggactaaaagctaatatggctatgatagaggggttgattacctctatcaaaatcatggatcctggggttggtactggagcaaacgccgcacaggccaaaaaattgttcaaagaagtgccggttgttattagtggtcctgttgtgggagagaacccattggtgacagctactgagcttgagatccaagatcttggcaaaccagcaataccatctaaagggagttcgaaaaaggctggactgactgaagcagatttggctgggtacaagatgaccctgatgacattgatcaaggattgcattcccaatgcttcgatgcaacaagagtttgagaggagagtaaatcaaatcaagaatgaagttgatttcaaggcgctcaagagagagatattaagagctgctgtctaagaagaatccaaattatgcttagtacccatactgcaaggctttcaaggaatcatgctgcttaaatagtgcacataatcaatacattccatgcaaacaaatgacatcctgattagtagatatagttaatttgcaatttaagaaaaaaccaaaagtgggcccggacccatcaagcccaggagccctcaacc

SEQ ID NO: 234 - DNA, 898 bp, Unknown
  Description of Unknown: unclassified Orthonairovirus sequence
ctcgaagatatctaacccccgagaattacaaaccattcaaccaagagaacgggaagtggcatctgcctcggggacacttccttgtgaagtttagattcagagattcaaccttagtcatctcaagggattcacctctttctcaaaccctcttacagagaagttggctcactgtagaccaagtggagagtgaccaaccgtggatcccaacttaattgctctagtcatttaccttttgagcttgatctccattacagtttatcacctgtcaggtcccaactggccaagaataactgagaaagaagaggggccaagagacatacccaggcttctacaggagaatccctgccaactagtctctttccagaagctagtcactccaggaagaagtgtctgtgtaacctcacagaaaacaaagccaggaaacaggagtccagcagaaactctgggtgaggtccaggctgatgaagctgacgaactgatctgtgtagttgaacaacaactgcaagacttgggtgccaatgctgtcgctttggtagatcagaaagcaaaaggactccaggaaagactagtaagcacgtggaactacagcgaagataacctctcaacatcgccagtgttctggctggttatacttgtgttggctggttttctggtgctccgcagttctaatccaaggtacatccctagctgtccgagctgctgtaacaagtcagcaggtgaaagaaaagtagtgtacctagagtctgtacacactcagacgggaagaccaagaaggaaaagctcgagtactcaaaccgaagcagtccctgagaggataagccggtcatctcaaacagaaggaccactgacaaatccagtgcgagaaagtctacagctgctggaaatctgaccaatcaca

SEQ ID NO: 235 - DNA, 908 bp, Unknown
  Description of Unknown: unclassified RNA viruses ShiM-2016 sequence
cgcggcaacgcgtacgtagagtctgtctcgatttggggtttaaccacccctggttcttctgatcaatatatatatgtagcaatggttttccttgtgttattttacgaatgatcacaagatttaaaacccctacatgtatgcatatcgagcagacaggttttttgagcgctagcagtcgatctactgccaccaacggattttaccaattcaatcctaacagcaattggaccgcgccccccttcgggggggcgcattcaggcactttgtgccgccgctttatgcggtttaagatgcatttgcatctggaatatcccgggattccactagaacaccgatttaacggtaccggggaccccccgcttatgcggggggtctcggcccatctgggccaaagatcttacgtcgatctcaacagcacgtaaacacgctctcccatcaacgggattgagcacttcttatacctttgaagtaaatttgggaacctttctacttccagtgatagtgaatcacaggacaatctgttcacggaacagggtacttacggatccaccgtaagcgtgaaattagtttggggagcgaaataccccatttgaccgtagttacgcactcgcgaagatgcacttacgtgcgtcttgcgaggaaaaaaatatctcgtgtggttacgcggtttgatgtaaaccacctgttgagagtctcatgatactcgtccggtacgccgggtagacaggacaggtccctgcaagccataaccttaaactggtaggttgcctcacatggtttttgaaatacatgctgtggaggctttccctattggataataaagcacgtgaccgacaattgataccaccttcgcggtggtatcaatcgtcggaaaatttcctccaagaagttttccggtgattgatatc

SEQ ID NO: 236 - DNA, 909 bp, Unknown
  Description of Unknown: unclassified RNA viruses ShiM-2016 sequence
tgcaggtttccttttataggagacctgcacgtgtttttgtcgagatgaagagtagctgctcttctcagtattattgtatgatattttcattcatattctgcgttattttggataactaagaattggtgtaatttcacagtagtactgtgatttgcacttttttcttaccaatctgcgtatgaatccctgtttgggtttacatacacattttatttgaattcgacaatgaagtttagcaacttctttctgaaaactagctagagttcgacgatctctctggctaatgacaaataaccaatcaaaaagtcaaatgttcatgtatatatatatttagtagtgacctttatttagaaaaactttagatgatttatcgtcaagttgccctttgtgaagcgatcagctttttatatcgtttcatttttgtatacgtcttaattgacgttgtaagtacgttttgcatacctcacattgaggatagtatcgtttcctgactaagaagttaaactagtctaccaatagcaaccatataggatatagctttgtttttaacaaggtttaatctgatcttatgctcttgcttacggtgttttatgtatagaaaaatttttataaaaactacataattgtcaaaagaaaaagcgttacgtactgacgcatttatgttcacagtgtgacacaaaccttctatattttgattgtaaaataggctttgcctgaccatttatcaaatacaaactgtttcaaacgcctctccgagccatattggccgacgcgaatcgacataacagggtgagtttacagctgcagttgcagccgaggatccacttatttgagagagaattactcttaacgaaattttgaagtcacttctacacagttaagtctgagtaggcgttatccaaacgtaaa

SEQ ID NO: 237 - DNA, 911 bp, Unknown
  Description of Unknown: unclassified RNA viruses ShiM-2016 sequence
aggaagctccacacaccctagccagtaacagttgttgcaatagctggaagggtaaagccaacgaaagcacaaactggacacacatttcttaatcggggttctgtccgggataatcgtaaccacccccgtcatcgcgtttgtgctatatagatttgtctaccttcctatccaggccaatatcagaggtcttgtcaacgaatatggccgtggctaggactaataggagaagacgtatgcggcgacttcgtcgcccccaaagagcgcgaccacccgttgtggtcgtagcggcgccacctggccgccggcgccggcaggcaccggctcagcgcccaggtgctagtagtatgtcccaagaaacctttgtgttttccaaggacagcctggctgggaacgcttcaggcgttctcacctttggaccgagcctcactgattgtgcagccttttcctcgggaatcctaaaggcttaccatgagtatcgtattaccatggtgcttctggagtacatcacagaagcctctagcaccgcttatgggtccatagcatacgagctggatccacattgtaagattaccagcctctcatccaccgtcaacaaattcggagtcacgaagaacggtcggaggagcttctcccggcgccaaattaatggcaccgagtggcacgatgcaacggaggaccaattccggatcctttataagggtaatggcgattcgaagatcgccgggtcttttcgtgtcacgattcgggttgagactcaaaacccgaaataggtagacgagagctcgcctcccactcccacaccagagccgactccggctccacctcaaccagaacccaccccctgcccccctgctaaacaagacagattttggggttatgagggtgtaccacaatcgaaaatttcctcgggc

SEQ ID NO: 238 - DNA, 930 bp, Unknown
  Description of Unknown: unclassified Sobemovirus sequence
ctgcttgggatccgaccgatctcctaatgctaaaaccctccgctatggtccgtatgggcctggtagacccggccagagtgttcgtgaaacaagaaccccacaccaacaagaagctgagtgaaggtcgctataggctgatctcctcggtttccatcgtggaccagatcatcgaaagattgttatttggtccacagaaccagcttgagatagctacttggtcgaccataccgtctaaacccggtatgggcctaagtttgcggtcacaagctgagttgttgtggaatgatttgaagcataagcaccgactgagtcccgcgtctgaggcagacatttctggatttgattggtcggttcaagagtgggagctttggtctgatttaagcatgagggtaaatttgtgtgatgatatgcatgagggccttaagagattaatgatcaacaggtttaggtgctttatgttttcagttttccagttatccaacggagagctactagagcagacctcacctggaattatgaaatcaggttcttattgcacgtcctcgactaactccagaatcagatgcctcatgggcgtcctcattggctctccttggattgtagctatgggtgatgattctgtggaaggttgggtgaccggagctaaagagaagtacctcgagttaggtcatgtatgtaaggagtatagaccttgtgagaccaccagagatggtgagctatccaaggttaatttctgttcgcatgaactctctgagggaagattctggctcactagttgggccaagactctctataagttcctggactcacctaatgaatctcatgttgagttggagagagagctgagttctgggcccatgtggccccgcgtaaaacgttacttgtgtcaggtaggactgatccctgacaaaacattagaggaaaggaaag

SEQ ID NO: 239 - DNA, 936 bp, Unknown
  Description of Unknown: unclassified Carlavirus sequence
gtttacaggcttgaaattgatatagtaagatacaggacaaatggccgatcaagatcaacgcaaacgcgagcaggaaatgaaagagagggcggcggaggagcaagctcgtcggaaggctcaagaaagcaagttgaaatcaccagaagcaaccggtagtggattgggtcattccatgatccaaacgcaacaacgattaactactctggaaggtctactgagggaggataggtctggcttgcaaatcacaaatgctagctttgaaaccgggagaccaccgttgcaaccaactgaagacatgagaggtgatccacaaaatatctacaacaggccatcaacagactttctgtgggaactgaaaccaaaacctgtttcaaacaatatggcaaattccgaagaaatgtcaaagatcaaagttaggctggaaggactgggtgtacccacagagtatgtatattcagtcattcttcaactggtgttcaagtgtgcaagtactagtagttcctcctatcaggatcctcaagggaccttcgaattcccaggtggtgctatcatggctgatgatgtggtgggaacagtgcaggagattgctggactccgtcgagtctgccgactctatgcgcccgtgacatggaattacatgcacctgcataataaaccaccttctgactgggcggctctgggttttcaatccagcactagatatgctgcatttgactgctttgactatgttgaaaatgaagcagctatcaaaccaagtggtggaatttcccctagacctagcagagctgaatatgtggcatacaacacgtataagcgacttgcgttggatcaagcgaataacaatgatacatatgcaaataatgattcggcaattactggtggtagaatgggtcctgaaattactaggaatttcaataatgcgaataataagaaact

SEQ ID NO: 240 - DNA, 942 bp, Unknown
  Description of Unknown: Dicistroviridae sp. isolate rfb199dic1 genomic sequence.1 sequence
ttataattatatcgtattaaaggattttcattagttgtcatggttaaatcataaatacttggctaaaatggtttcttcgacaagtatcgtgtaaagttcttaaaactaataatcgtccagatcaacggtcagtgtacaggcgtgacatcctaatctcggccttacattctccactccatacgggggaatgacgcccctctcctaagagtgccgagagcgccacatgtatgtcttaagtttcttaaactctcttcaattgtacgtagggtatgtccctacgtacaattgaagagagtttaagaaacttaagacatacatgtggcgctctcggcactcttaggagaggggcgtcattcccccgtatggagtggagaatgtaaggccgagattaggatgtcacgcctgtacactgaccgttgatctggacgattattagttttaagaactttacacgatacttgtcgaagaaaccattttagccaagtatttatgatttaaccatgacaactaatgaaaatcctttaatacgatataattataacctgacctttacttagtgatttcacaaacggatcccgggtgatttcacgcacgactaagttttataatttgataaagattatgcgagtaataggctcttttgtagcttttagtgcatgtttagaaatttatttgttagcgaccattgaaaagcgaccctcgatgattacgatcacagaggttagcctgtcaagacatttaaataacgaaccagcatgctatactaattgagcaataccctagtttatcagcgattgatatcaaaatataagattcctcggaatcaaggtagtcccggtaaattatatttgtagcgaagacccccggaactgtaagcgatacacgaatgaagacgacgattcaagacggaatcagaatgcctcgtgggcgtaaacacaaacc

SEQ ID NO: 241 - DNA, 943 bp, Mivirus dermacentoris
cgctgatagactcttagttttcgaccacatgcgcgcaacggaggttggtcgtgttctgttttaaaaacaaatcatgccggaaggcacagttttcagagatctcgttgttcgtttgcgctctattagtctccgctttgctagcctgaggcgttccgagccactgtgtacttccggtaccatcagtcaatcttgacgggcattcccctgagagattgaccagccagggggtaaccccggcagcgcgaggcgtcagccttcggcccgccgtcgcgctccaacgagatctccacgttcaccaggtcatccccatcgaccttccccccactctgacagctccccggaaagaggtgatctttccgtagaagatcggttgagcttgtcgacgacccaacgacgtcccagacctgtgttaggtgcagctggagtgtcttttgcaaaggccttgctctcaccgccccctggtcgccacgagccttgcccgccacccgctcgtcgtgtctcctcccctgagccacagccaggtccttccggctatctgagacacagcccgcgagaggttgccactccaggatccccacctgagtcaccctatctgaccccccgatcctctcctgaaccagacccggctggtctcttagccgaggaaggtcagggtgatcaggatcctgtggaagatcctgcgcttgtacagcacctcgccaggcttctcgagctaagcctagacctggagggagggatagaaggcggtgtgcaagctctgtttgcacaacaggaaggtgatcaagccgcaggaccagcccagccaccagcacccgaggccccccaagcggttgcagccccaccacctccgccgcggcccgatcgacgacagccagcggttcccgtcgcagttgcagcacctgctccaccagcccccgcagcagaaccggtcatccggccagcg

SEQ ID NO: 242 - DNA, 945 bp, Unknown
  Description of Unknown: unclassified Hypovirus sequence
tccgaattcccgggatccgcctttgagatcttcctaggaaggccacctaaggaacttgccatagcccgtgtgagtgcttttatgcattctcatcacagttttctctcttggagaactatggttaagtttaggatttcattggtgaggccagtgggtctcggtcaaggcacagtgagggcctgtgcgtggttgtctccctcctctcccgcaggggaagtaaaacatacttgcaccgggacgcgatgacgtccgttatgtggataaaccatctctttaattaaaactcatcaaccgggggttgcacccgattgcaagtcaccactagaaatgacgacgaaagtagaagggtggcagagaagatgaaaaggtcggcggctaagatggtgtcttcttagtttgctttaagcgcggcaattcaacattgtcccgtcagattggccgcaatgcctcaaccttcaatcgcttcgggtactgagctcgcggtaaaccattgtaaacggtaacgcgtaggagtatagcactcttgcgtagtccctagtcattaaggaattactgtctctttacactacaccaagtggtcgggtccgtagggcctgatctttagcctctccggctatcgctgcgtatactgcagtctgttagtaggagtcatttcgaaatggtgatcccattcatacgaccgtgacgaactgaagtcactgatgtctctaaaagctaactaaaatttagtctgcggggtcgcagtacggctccctcatcgatctttttctggatgtaaaactccgcgtctcatcgctcaagagtataaaaggaaattgaatggtgacagctggaaagacagcaccccaattcttcaagtggtcacaaacatcgagctttagtttgcaaccaccaccgtttcaagaatatcgccgtttcgcaataccgtaaattgccattttcaac

SEQ ID NO: 243 - DNA, 946 bp, Unknown
  Description of Unknown: unclassified Marnavirus sequence
gctaactgtttgccctatatagacaagtgtttagccctttaccgagaactggactgcacggagaggtagtcctagctcgttacgttggtcttccttggtataggtcatcaatggttatttgatgagagctttgatgtaattggatagagacgttttactcagataggtgatttctgtccgacacgcatgtcggtaaatatcaccaactttcgggataaccggatcctttgttatttgggattgttatattcttttgctccggagcatttgatattttataacaatttgcaggtggcgctgcatttacccgtagccatataaatagttgtaattatattgtatatatatacaactggtcgtcacttaatttgatctgtagataattttgatacacaattttgtttacaggtctttactgatcagtctctctgcctaaagaggcagaactaaccgtaattaacggacgacccctatgagtggaggatccacttggcgcgacattagttcatggtcatggcgcattatatgacccccgaagggtggctcccgaaacagccttttttgatggtcggaaatgtacatgaatttatttatgtgctgagtacggacatcgcaccctccaggagtattggattattcgagctacctgacttagtatggtcacctctttctcaatagaaattgcatacaagagggtaagggttcatgacctacattatgttttgcataatgataccgttccgataccaaggcattatttggtggcaacatcattagtgctaatgattacctgtgccacaccgtcgaacgtgtgaaattatcaggaggaatctggggggacctgctgtgacaagatagttggggcgactttcccccgactcttcttgttactgcaggtgcttcaattcgttgaagcatttgcggtaacaaccatctctattatttc

SEQ ID NO: 244 - DNA, 956 bp, Unknown
  Description of Unknown: unclassified Allexivirus sequence
gtttacagtgtggtatattgataacaatgggaaacgagaatgaacaagacacagatccaaaacttgcagggcgaaaaggcactagaactgatgtaaacagccttgtccacacagaggagcaactcagggatccaaactacggccgtagacaagtgaatgacgttaatgtctctgaacacgattcttactctgaacttatgaagaagtacgaagatagattcaacaaactcaaagaaagctgcttcagggatctttcaagcgtgtcgatttcaaacagtggttgggaaactgggaggcccaaggctgtcattgctgacaatctaaaaggcgatgctgctaatatcttcacaaggccttcgatcgatgcattgctcgttcgtaatacagtacccgagtcaaataacatggccacagctgaagaattggccagaatatcagctaaggttcaagcactgggagctcctgaagaacatttggcagaggtcttttgggacgtggctaagtattgcgcaacagctggcagctcgccagctgtcaatccccagggtactattcagcttggtgggaggacaattacaagagacatggtgttcgctgttattaaagagtattcaacactccgtagagtttgcaggagttatgcacctattacttggaacaacatgcttttaaacaaccaacctccagcgaactgggatgctaaaggtttcactgaagacaccaagtttgcagcatttgacgtttttgatgccgttactaataaagctgctattcagcctctggaaggtctaattaggcacccgactcaggctgagcggattgcatatgccacccataagaagttggctctggaaaagagcgcacaaaatagcaggtatgccaacacttcggctgaagttactgggggcttgttcggctgttcccctcgcaacaatttccgtgagagtcgatgttaa

SEQ ID NO: 245 - DNA, 959 bp, Unknown
  Description of Unknown: unclassified Hypovirus sequence
ttccaaaggatccactttgggaccccgcgttaaggtactatgattttgtacttacgtctcttggacgaccttaacatggtttatactctgtcgagttgctggtttcagtaattcagccacacattgtggttggccagcaggcggagtgtgatccagcttgggtgcaaccttcgttagctaatcgcagtagctaacctggggtgccctaaggccggaggaactcgttggttaagaataacccatttatcggtttcacaagctatgtagcctagatgatgttctcatcctacgtaaaactatgaaacgcgcagcttctcccacccctttagagagaggggaattggttgggtgcctagatcccaggagcactgagtagtgcactgtagctgatgttagacgttggtgtgaccatctgacattgtctctagccatgtccatcgaggttggcaacctaatgaggcctgggatgccttgtttcgcttctgacttcgcgatcagatcgttgactgagaacagtcgattaaacagcatgcattcttttgggtagatgtatgaaggtaaaagccgtaaagcgaccctcctcgactgatgcctttgtgccagcttgagagaactgaggacctggcgaagccagtgggtcaccttcaataggttcatggtgtgtgagttcatctcaccacaaacgttttccctctgtttagagattctggaatcgctagccgagaacggctgcccttgtattgctttggttctggtttatacgcttgagatcgtggaagttctcaaatccgaaatcaacgtgtgtagcacgaagacgtggtgtgcttgcacaagtcttcattctcaaggatagctgggttctttactagggcaaccccctagagccagccggttcggcacaagaacggtggaagatgtgggatgaaaactcctagcatcagaagtgcacttccatagat

SEQ ID NO: 246 - DNA, 993 bp, Unknown
  Description of Unknown: unclassified RNA viruses ShiM-2016 sequence
atgcagtgtgttttacacactgcatgttatgttttggagagaaagtatttacgatatacttggatcctccgcttgattgcgtcggatcctttcatggtacattcactgcgagacataatgtaccataggaaggaattcgcaacatgacgaaggaagagtcaatttcgtggaatgccaattgatattacaattattttcatacgtctgtaacacgatacgtacaacccctaacttaatcgtaggttaccaacgcctacttcactgaatttatccacaataattcagtatttgtttagagtacctcaacactctatgtgtcgaagttgagacaggtttttaagtttgctctctgtatggttatttccgacagatgagcttacaatgcgttatgaagatgctatttttcctggagtcaatagtcgatgtcatttagacgtcgtgagatttataataaaaatgttagtcgtagctgctatgtgaaggcgtacgaccgaatgtttgaacgagattatcaggtttacttgatttatctacacttttgggcaactttgttgccatagcctcattttgattgtcgaattttgagtttgatctaaagattagacattgggactgattagtaaagaaaagacaagagttgatgggaattaactcgggacacgtcatacggtggacgtgaacgagttgcagggttctcatgatgtagagatacgtcataaaagggtgtggcacctcaaccacacttcgaaagctatcccctaagtgcatgggatgatatatttaagctgtttatgtttgcgccattgccatcgcttttgagccattggtggtaattcgcacattcctctatacagtggagattatttgaacttgtacattgagaagcgttacatactgtttgttggtcacggcagatgtatactcaaactttgattgaacattggaagaattgtcgaaatttcggtgataactcatgatttttggtgcttggaa

SEQ ID NO: 247 - DNA, 1000 bp, Unknown
  Description of Unknown: unclassified viruses sequence
tttgacaaaaaaacctcaaaaagtgcagctactattgaaaatcataatatacgctcttgcagggattggcttctggatatgactcaagtgttttcaaagagccaattatgcactaaatttgacaaccgatttaggtcggcaaaggcagcgcaaacaattgtttgctttcagcacgcagtgctgtgtagatttgcgccttatatgaggtacatcgagatgaagttgaaggaatccttgccgaaaaagtattatatacattcaggcaagggcctagatgagctgaacgattgggtcatcaagaacaagtttgacggcacttgcaccgaatcagattatgaggcctttgatgcttcacaagatcagtacattgtcgccttcgaattagagctaatgaggtacctcggtttacccaacgatttgatcgctgactatgaattcatcaagctgcacttgggatccaaacttggatcattcgcaattatgagattcacaggggaagcaagcactttcctattcaacactatggcaaacatgctctttacttttttgaggtatgacattaagggcaacgagagcatatgttttgctggtgatgatatgtgttcatcaaagcggctaacagtcaaaagagaattcgaaagcttcctatctatgatcaaactgaaggctaaagtgcaacatactaaaaatcccactttttgtggttggcacttgtgtccagaagggatttacaaaaaaccgcaattggtcttcgaaaggatgtgcatagctagggaaaccaacaatttacacaattgcattgacaattatgctattgaggtttcctacgcttatcggaagggtgaactgattacagcaagaatggatgaggaggagctgggggcatattatggctgtgttcgaactataatcaaacacaagcacctcttaaaatcagatgtcaagaagttattcgaaggtgcaacgatgtgatcttaggttgtagatatttaaattgaat

SEQ ID NO: 248 - DNA, 1000 bp, Unknown
  Description of Unknown: unclassified dsRNA viruses sequence
ttttcgtttgaggtacgaaagacgatgcgagccgaaagcgtcacttagaaccttgtccgttagattgattttgataacccagaaaaaacgtgccacgggtaacaacacgctaaacaactggaatctgctttacagtcaaagcagcaaagaccagcgacctaacacctttaagaaagaccgacttgtgctggggaaccgcctactcagcttttcaccggaacccgaagccttagcgattttacgaatcgaacgcgctactgaacgatagtgctcttttccaactgcgtatgagcataatgacgcatgccccaaagcgtcaatctcgtatcgaaacaaatgactcgagacgggttatcaccaaagtgacactaccacttttgccttagatgtcccaacagagaaagatagcgtgtaaggggcggctaccaccacaggatatagcagccgcaggtgttcgtcgccgggagacgcgccttgctgaggaccgaacgacgaaataaagtaggacctgactcgtctcgcaatgactgttttcagatgccgtggacttttgacgagtctcgcgcgtatggtccgaacgcggggatcgaaaggagccacacgtatcttgcattggtcttacgcatacacgtaatactaccatctattggtcttacgcatggagatcacacgtaacaccgcatgttgccgaggcgtaactctcggtgcaaggcgtgggtgagtggccggccgaagcctcatcagtctcgctgcgctaaggcaaacgacggactggtgtgagaaagggaggagagagggatcctgagtaacgacagactacggtaggaaggaatgtaagggtggggcttaggaacgaatcgaaagcccgcggtgtggaaacttggaggaaagaataggacttaggacgaatcgaaagcccagggtgtggagttactcactacctccccgctactacaccgccaaggatgttggatcgttcctgcctcaggcaaggatcggt

SEQ ID NO: 249 - DNA, 1000 bp, Unknown
  Description of Unknown: unclassified dsRNA viruses sequence
aagaaaatgaagactgtggtcattttcttccaccaacctcactctccctacggggagtgttcaggctggtgttcaaaatcacagtacacacatgcttgaagtgtgacaagggcgggctccggtccgcggctaaactttggccgtactctgtattacagtttgcctaagtatgctgatagctcaaatcgggaagtggtttggtggaccagagcccgttattcacacaccacacgatccaggacggctctggctaaggcgatccaggatgcgtataaacccactgccaattagctgaaccgccgactaggggatccgcgacatcgtctgggcctgtagcgtaccgtcatcactcttttaaggtacgcgcctgtgtctgggccgtcaactgcggggctggagcttagcgtctagctgcggcgttagtctgttttactgtttacgttgtaggcagtactaagacacacctcctaattttacacttttccaacctactcagcttgccgctttggttgggaagttcttaaaatgagctcctattttatagagctcaagtaacttttgtgcttataatccatcaatgtctcaggctgacaataaacgcggctccggtacatcggcggcgtgtgctcccggaatcataattagccgcaaatccttcctgtttggtcattgtgaccatccattggggtaactctcttttgaggggtgtggtcaaggcgaactcggatagctgaagactgctaacgtagtgcacatcaccgacttgaagatgtgttcgaacgtgccagggcacagcagcttaggctggcttccttggtggacagactgacacccattggggacctcttcctcacggtaagcgctcacgctcaacttccttcgacctgctatgcattcacatttatgtgaaataagtctccgctaactgaacgaaaccgagatagacgaaacttatttggtaagtccgcagcaaacagtcgcacgggttttaggcccgtgg

SEQ ID NO: 250 - DNA, 1000 bp, Unknown
  Description of Unknown: unclassified dsRNA viruses sequence
ggccaaccattgatatcttctttaactcccttggctgggttacagctgggatatctaagtgctacccaccatacaagcatgccctcactgcgggagcagtgcttcagctagttggccgcctaactggagtagttacaggccctttaaggagtcgggtcaccccttatagtatacagacccgtgccaggtttaacgagcctggctactactagttgtgtgcatggacctccgcaatcaatgcattctatttcctgcggctctaatcggtgtgactaaccgttggagtataaaagtcgggtcacatagtactacatctggccgcggcgcggtatcttgccccacacttattatttaccgccgtgcttcggaattacagatcggagaggcttctgcgctcttctgtgcccctcaggagtgagatctaactatgtctcatgtgtagttaactactccgcgtactctcattttccacctctgcaagaaaactaccagcggagggagcagtgaataaattgagctgcacgtctcgaggaaagccgggacgttaaactaggcccgcgcatcgaaggcgctcaacatgaggctagcttcggcaaaggcttaaccgttgcaatcaccccgtcgcggcctgggccccgggtcgcgattcgccagctgctggttcatcatgcagttaggggccccatggaatagtctatgcgttagcatgcggagcacttagtcccggtacagttgacagtaagtcaaagggattgctcttagcatgtggctggaacgggttttatgtccgtgcgaggagtgggaggatccccacccgagtgtaacgactgcgaagtcttaactagcgtgtaggaacagtctctctcgaagtgatgactcgaggggtaggccaccgttccaatcttcagtggtgtccttgcttataggcgtcactttaatcccaaaaatttctaagcagagagtagtgttagtagcattattctcgaaaccaaatttaaaa

SEQ ID NO: 251 - DNA, 1000 bp, Unknown
  Description of Unknown: unclassified dsRNA viruses sequence
gcggtttaaggagaagtgccagactctggacgtttcctcacacgcacgacaggctcggctgttgtgcgtgcttatcaaaccgagactctggtgcaagagggcttcttgtagcaccagcgaacgctagtggtggtgaagccagttcttatttgaatggttggctgacgagatgagaccggcgtacttgaagcttggacctctggtaagaggtgataaataactactcgcagatccctggcgtcagttcagtgggcaggaaggctggaaggccttgtggggtttatcgtcacgcagagcggtttggctcgctgtggccccacactacgcactctaaggtctcaataccgcgtggcgtaggccagcttttatagcgatttatctcctgaatactccgagcttcgagtttcggaggttggagtaaatttagcgttacctccgcgggcggcacgcggtttagcaaatatgcctaaaactggacctcgcattcaatcaggtgcttgcgagtcgcctaacacgtgggttgaaccttcgggatcccctttaccgccgcgaggtggagtgtaaccctgcgccatagtgactcagagacagaccctgccccttcaccctcaaaagtgataccgcgggattctggtgagtggaacgggaggtggaatccgcaaggcccaccacgcttgtccgtgcaagggaacacgcttgcaacttggagtgccaccgcgtaggcggcagacaggaatttattctctgtcgttcggcgatatcctaatacagttgtaatgcagtttccgagtgtaacgactgcgaactccttattctgagtaactgaacagtctctgacccaggcctcaagtgggcatacagtggggagggtgctatcatggctttcctttgcggatcgtcgatttcttcggttatttattagccgtcgtacaactcagaatcgtcctctttagagacggggtagcaacctagatagctatatattttctaactcacaaaa

SEQ ID NO: 252 - DNA, 1000 bp, Unknown
  Description of Unknown: unclassified dsRNA viruses sequence
acgcttatgctggcatgtccctagtgccggtagatttctcaccagttagcatggcagattacaaacccgctagcaacctcactttcccatccctcactcgtccgagcgcagtggatacaagcgacgtcgctaggaacccgcgagtagctagctctaaacgagctcctcgcgctgcagcttctgatattttaaacaggtttaaagagtttaacgcaccaccaccacccgaacccgcgcccgcacagtatgataatgacgcgccggctgcccagctgagctacgaggctaaataccccgttgaacaggcccaggttccaggtgatttcaaatattaccaacctgtggtggcagaagaccgagtacatgtggaacctgctgcagcgcctgatgcttacgatcgcttatctaagcaacaactgaaattagcgatcgaaaacaacatgcaactcttggctaagattcaaaactcacctattctaggtgagttagatttagatgctgaacgtaaacgccaggatgagttccgtcagcttgaagccacgcgtaatgcgcgaattcaacgcaggtctagctacgtaccttttggtcctgctcgtccacgcccggtgctcagccctcgctctacgccgaacaaacctcctgtcgtgcatggcaaactctctgaaaacgaagttaaccatgcacctgtagaggttaacgatgctgctgctgaacaggttcagcgtgaagttcgatctctaggtcgaccgataccaccgcctactaccgcggatccttttgccactctcgctagtgataagcgccgcccaggcacttattatcagaagaatgaggctactctcaatttcgatgacttggtaaaggagcagctcccagcaactaactttggacatactggcgcggacgttaacgtgcaggatgggatggcaactgactcactagcgaaaaactagtgtggaacgttgcttattaccgctctgcgcgtaacgttctcgccagt

SEQ ID NO: 253 - DNA, 1000 bp, Unknown
  Description of Unknown: unclassified Hypovirus sequence
ggcgacctccttccggcacgtcgtagacggcgaccggattaatcaatacagctagtacttctcagcacgctatagcgcagagaacaccaggggacgtcagggagaacgaagcacgtcgcgacctcgcgaggtttctacctccaaggggggctgcaggctaaggccgtatgaacgttgtactcccgcattttggatagatactgatcacgtgcgtccagcgaatcacgagatccctcgtccctgtagacgttaaatggcagcgcaggcggcgacaccgccctttcggttcttactaatcaccgcatccataaaagcggagataggcatgggtgtccaattaatcagtatgagatgggcagtgccgatcgctagcggcccacgggtctgacgatagcgttccgaaaggaaaagggctgatatcagatatcagatatataggccggcccacgtccgtagttccggctgtgtgcaaaccggtggcctagcttgggacttcgatcaccccaatgacgccatgaaaacgattcatccaattcttgctgtgttaacggtttatcttgggcgatagagccaactagctaagatcgtggtgaaatggttcgccttcgtggatcctcccgacactgtggtttcgacaccacaggtgctttcgaacttgaacttttatgcaattaccggcgcgggagcgccacattttggagtcgagactaagattacatcagttctatatgacgtagccacagagagcttgcgcctctcgcgttggacagcttatgccagtgactaacgatatcagatgaagctctgcgggatcttcggtgaaccaacttctttacctgtacgaaataaagggatctgtacctcgtcttgcgtgtctgaacgggaccgaaaatcgacttctaatgtagcagtttgcgtatggaagggatggcttgatagtgcggtttggaggtggtagcgtaggttgaaagagttctagggaacaaaacctccatacaat

SEQ ID NO: 254 - DNA, 1000 bp, Unknown
  Description of Unknown: unclassified Nodaviridae sequence
taagttgggcgctggaatagcgaaatccattaaagaaacttatggtgctcctaaatgtagagcgccggttggttacgcagcagtgcaatctactgaagacggccgtatattgcacttggttaccaaagctgtgagtagtgttccagctattaaacagaggaatgcatatactaagttcacggctgccctcttgcatgcttgtgaattatctatttctaaggaaataggtgtgccgaacggaataggttgtggcttagacaaattagatgcgaatatagttcggaatatactcgctgaagttggtcacatgaggggtaaggtctttgtaatttacaataatgcttaagtcagctattgatgtagcatttaaagctgtccgtgcttcagctaaaagtgcgttgacggcttggagagtgacgcctaatccaacgatggttgttgctaaaacaaaggtcggatccttggtccaaaccgttgccttagaactaagacaaagagcaatcaggcgcgaacatctaaacttatggaagcatcgcccagttcagccggttggttatataactgccatggtgcccaggcccaccctgcttaatagatttgttgaacatgtcttaagtaagttaatgtctgctataagggttattaaaacctatacatttaggttggtagcattaacagggacgggactttactggctcttttcaaccctcattcaggggccagcagttgtagttggtggcacctgtagtagaatatggcaagcaattgtcaggttctattataggcttaaagcccgatttaaaaggagtaagattaaaggaaccaatcggttcagaaaattagcgtcgaaggctgattataggataagagcagcatatatactctatcgagttaccaaacatagagttgctgatgcagttcaattctactccaagaaactggcgcgtatggcttgggacaagcaagcatacttttggtggacagctctgggagcagaaac

SEQ ID NO: 255 - DNA, 1000 bp, Unknown
  Description of Unknown: unclassified Vitivirus sequence
gtcctgagattcttcttgtggcctgaggagttaatacaagagtacaaaacactgaaactcatgatgggttgctccatgggagatctggcaataatgcgattctctggggagttcgggacattcttcttcaacactatctgcaacatggccttcacctgcctgacatacaacatcaggagggagacccccatttgttatgcaggggatgatatgtatgcgcctggagcacttgtggttagaaaggattatgagaaggtgctgggtgaactacagttgaaggccaaagtgaatgtcagttgttcaccacttttttgcggatggcggatgagtccctacggcattgtgaaggatccgaatctcttgttggatagatggaagatagccaagttctccggaaacctcgagaactgttttgtgaattacgcggtcgaggccatctatggatacaggttaggcgagatcctctatgacatcaatatcgatatcgatgcgcagcaagaattggtgagagagattgtgctggttaaacacaagctgccagcggccatagctaagtatttctctagcgacgtcaatgaagcgcattccgacggagaggaggtagatctacatctgagccctgaaggtgaactacttgattacactgatgccagagggagaggtggcactttttctaagtgggtcaaaggaaaagggaagatcaggtgaggaaaaaataaattaaaaccgaataaaaatagaggtgtgtagaaggttacttagctacggggtaactgctgacctctttaagttaggtgtgaataaaaacctaataatatagaaaccatcttacgtgtttgtgacttgttactgtctgattacggattgaatagagagagcgtagtgaggttactctcagaagtggacgcgaaggaagcggggaaaccggctctgagtttcaagagcctgatttgcaatctttgccgtggggtatcgccttccaacctgagtttacgaacga

SEQ ID NO: 256 - DNA, 1000 bp, Unknown
  Description of Unknown: unclassified Polerovirus sequence
ctagtagatcaattggtagcccgggttctgttccaaaaccagaacaagcgagaaatcgctctttggagggcaaatccctcaaaacccggttttggcttatctacggatgagcaagtgctggagtttgtacaggctctggccgcacaagtggaagtctcaccagaagaaatgattacctcgtgggagaagtaccttgtgccaactgattgctccggctttgactggagcgttgcggaatggatgctacatgacgatatggtcgtccgcaataaactcacactggacttaaatcctacaacggagaagttacgatctgcgtggctaaaatgcatctgcaatagtgtcctgtgtttgagcgatggcactctcctcgcccaaagggtccccggcgttcagaagtctggtagctacaacacaagtagttcaaattcaaggatccgagttatggccgcctaccactgtggggctgactgggccatggcgatgggagatgatgcccttgaatcagtcaacaccaacctagaggtgtataaaagtctaggtttcaaagtcgaggtttcaggacaactggaattctgctctcacatttttagagcgcctgacctcgcccttcccgtgaatgagcgcaaaatgctgtataagctcatcttcggatacaatccgggaagtgggaatctggaagtagtcgcgaactacattgccgcctgcgtatcagttctgaatgaactgcggcatgacccagatttagttgctctccttcactcgtggctagtctctccagtgctgccacaaaataattgaagagagagccgataactagccaagcatacatcagttgcaagcgttggaaagttttagtctgattaccaacagcctgacataatagattataaatttttagcaggatttgcgtttggattcttatccgcaatcccaatttctgtagcaggcatatacctagtctaccttaagatctcagcccacgttcgcgcaatcgtta

SEQ ID NO: 257 - DNA, 1000 bp, Unknown
  Description of Unknown: unclassified Metaavulavirus sequence
ccccagattatgttggcagcacaggcaaccaaagtgcagtgaatgtccatctggatcattctggattcctgggcacagaagagaatatgcattttccacaaataatggcctcacatacctctccagctggtgtaacccagtctgttctccagtcagaacaaatccaagagtcgagcaatgcagatgcggctattgtccatcagtctgcatcctatgcagagacgattcttcatagtgattccatggtgctgggtcggcttgcgaaaattgatgaaaaattatcagagattatgaagataataggaattataccatctatcaagaatgatattaatcagctcaaagctacaactgcccttcttagcaaccaacttgcagctattcaaatattggacccagggaatgctcagtgcaaatcactgaatgagatgcgagctgcatcaaggagtgctactgttgttgtatcaggcccaggagaactatctccacagttagtgagtgataaacttatatgtaaaaatgagctgggccaaccaattcccagagaggaatatagagccagtcaaccgaccaaatcatcgcccaatatggttacagatgctgagctagagagtttacaagcactcattgagacactggtagaacctgggaaaaagagggatagactagtctcacagctcaccaaagttaagactaaagatgattggaatagacttaaacgcgcaatctacaattcataactgtgaattcacgcctgcaactggaacattataaatgcctgacttaacacattaatccctataatcaccttacgctttaagttagctagataggatccttttcttgataccatttttctctctattactctctgaccttaccaaattataaatgtctctgagttacacgcctaatctcctgtacaattaataaaaaagaataacttgggggcgaccctatccacaccggcccagagaccccacagactcccaaactcacc

SEQ ID NO: 258 - DNA, 1000 bp, Mossman narmovirus
ataatggataagctcaagatcctagatgagatcaagcatgatgtagagagcatcaggaagacagttatgaagcatagtctgtctctcgcaactctggaagggcagttgagctcggtaatgattgcagtcccttcaactgggtcccaaccacatcaagtagaggtgaatcaggaccttaggcccctgcttgggcgagacaagggaagagggatccctgaagttggaaaaatgaaagtccaaacagtttcgtttgatgagcccaatcaatcaaggagtagtcgtgctcaactgccgaagattagagttgagcttgataagaagatactccctcctccaattgactcaagcaaaactaatgcaacaggatacaaacctgctcctactctaatctcaaaggaagtgatcatagcactgattgattctcggattaaggacaaggatatgaacactagaatgaggaggctacttaatacagccaagacacagagagaactagtggagatacataaggcaatcatcagtgctttaaagaatcaaggcagctaagcaacagtcagtttccattgggtatcaggtaaatttgatacgacattgcttgatacaaaactaaaaagtcaaatttagaatattcatcttagactacattagccctataaagtcagtagctcccttaatagattattggatacactccttagggtgatatcagttcaagataagcttcaaactaactcaggggtttatagaaaaatcggctggtattgacttgaatatttaaagatttctcaacatgttttcggtaataaagtatagtcaaccagcaccacaagtatcgtacttttagaggggatgatctttacacttatcaaagaccagaatactaatattaatctagtattgcttagctaaattagaccttaagatacatgcaacttactggccgctaatagcatattacaaaaaacttaggacgcaggtccatccctttactccagcaacc

SEQ ID NO: 259 - DNA, 1000 bp, Rinderpest morbillivirus
tggtgccgccgatcccctctcaggagaggccaactgcatcagagaaacccattaaaaagggcacagacgtgaaatcgacctcatctggaacgatggccgagtcttcatcgacaggtggtgcaacccgacctgctctaaagtcacagtggggaccgtcagggccaaatgcatctgcggagaatgccctcgcgtctgcgagcaatgtatcaccgactcagggatcgaaaacagaatctggtaccacaacctcgcggatatcccagagtaacattgagcctgaggatgattacgatgatgagctgttctcggatatccaagacatcaaaacagctctagctaaattgcatgatgaccagcaaattataattaccaggttagagtcactgctttcgctcaagggagagattgattcgatcaagaagcaaatcagtaagcagaacattagcatctctaccatagaaggccatctctccagcgtcatgatcgcaatcccgggatttggcaaggatcccaacgatcccactgccgatgtcgacatcaaccctgatctgagacccataattggtcgggactccgggagagcccttgctgaagtactcaaaaagccggcctcagaaaggcaatccaaggacactggcaaattagggatcgagtccaaaggcctgttgaagaaagagttccaactgaaaccaatagaaaagaaatctagttcggctatcagattcgtcccggacggcagtgttgcatctcgcagtgtgatccgttcaatcatcaagtcaagtcatctcggggaggatcgcaaggattacctgatgagtctcttgaatgacattcagggctccaaggatcttgctcagttccatcagatgctggtcaaaattctaaagaactagactcggcacaacatagctgatctcctcgcttcccctcagcttagctacagcttgcatgctcattataaaaaacttaggagcaaagcataacgcctcgcactcccaac

SEQ ID NO: 260 - DNA, 1000 bp, Unknown
  Description of Unknown: unclassified vectors sequence
atgttcctccgcccccgaaccccagtagggccagcacttccgagacacccattaaaaagggcacagacgcgagattggcctcatttggaacggagatcgcgtctttattgacaggtggtgcaacccaatgtgctcgaaagtcaccctcggaaccatcagggccaggtgcacctgcggggaatgtccccgagtgtgtgagcaatgccgcactgatacaggagtggacacccgaatctggtaccacaatctccccgagatcccagaataatgaagaagggggagactattatgatgatgagctgttctccgatgtccaagacatcaaaacagccttggccaaaatacacgaggataatcagaagataatctccaagctagaatcattgctgttattgaagggagaagttgagtcaattaagaagcagatcaacaggcaaaatatcagcatatccaccctggaaggacacctctcaagcatcatgattgccattcctggacttgggaaggatcccaacgaccccactgcagatgtcgaactcaatcccgacctgaaacccatcataggcagagattcaggccgagcactggccgaagttctcaagaagcccgttgccagccgacaactccagggaatgactaatggacggaccagttccagaggacagctgctgaaggaatttcaactaaagccgatcgggaaaaaggtgagctcagccgtcgggtttgttcctgacaccggccctgcatcacgcagtgtaatccgctccattataaaatccagccggctagaggaggatcggaagcgttacctgatgactctccttgatgatatcaaaggagccaacgatcttgccaagttccaccagatgctgatgaagataataatgaagtagctacagctcaacttacctgccaaccccatgccagtcgacctaattagtacaacctaaatccattataaaaaacttaggagcaaagtgattgcctcctaagttccaca

SEQ ID NO: 261 - DNA, 1000 bp, Unknown
  Description of Unknown: unclassified Nidovirales sequence
tattgaaaaactctctctttttcaaccaacttaaccagttgtttgaccgcctgcacagtgggcacttgagtatatttttcatatccccaaacagtttagatccgtccaattattaaacaaacaaaacaattgaaatattttatttttattggcagagtagttaactgcttgtttgtcaattgtgtaccagcacaccaaccccttgccaacctccactcagagcccaggatatccccgaaaggggcttcctgctggtgtgagctcttggccccacccctctcaagactcgtaaaacagtctctacccagatattctgcgaaagtagaaatcactcaatctttctcccatagctacaccgagaacaggataaccccgaaaggggcatcctgcgggtagctctctgagcgtgccagtagatatcttcaccgactctgctgggcgtatcggaaccagtccgtcccaaagtccgcaaccatccaagtagctcgaacgagcgaaaggatagggagtacctccttagtaggcctcagccgaaaagggtgggaaacagcggcgaggcccttgtggcctgaccgcagaaacgacctggtagtcgcttctcaacaacagacccgactggatgtgaaaacgtccgatgtggtcagcttgtaactagctatatacttggatatccctcacaaggggactccaggggggaggaactgacccctcccctaggtatatagtaagcaaaaccaggggcgatctgcgaagacacccttcaccacacagccggagaacgctgagtgaagccaagaatcctgtccagcgtaagcacacagggacacattcttgaagaatacctcataactagcttaaggcggttatttggatccgaaagctgaccaccgtcactttcgtggaattctatctgacaccaacacagtcggaaggaattattacatttcaacccccaaaagggaaggtgcaagaacacagcacgaacaaaaattaactaact

SEQ ID NO: 262 - DNA, 1000 bp, Unknown
  Description of Unknown: unclassified Picornavirales sequence
aaatccagcatcccccctgtggccccgcgcaggaaaggggataaagcgttagaaagtccgctttgttgacacacgtggataggttgagtggagagatatagccacttgatcgaatgtgttgaaagacacgctatgtatcactgacccccctaaggaatccagccgagaaactggatatcagtacgctcttttcaaaaaagagcaagaaagagagaagaagcacagacaatttgttaatagcagacccgctaaggttttcacaaaaacaaatttgaagtccgctaactctaaatcagccccggttaccaaagatccagctgttaccgttttgaataagaaaaagaaacacaagtttgatgataaagttgtcaaaactgtggatccttttgatatacaggatgaatcagaggttcccgtgattaatcctaatgagaattatgaagaattaggtcttgaaattcccagtcgccaagaggtcgttcccgaagaggtcatagctcaagaagcatttgaaaccctagatcaaggatcttgggatattgtacaagagtataccaaaactcaagaagatcttgatgatgagaaagtttttcttgaaagtttagccacagttcctcttacacctgttgaagaagataagaattatgaacctgaaccttttgaatatcaccctaactggagtgatcagtctcctgaagaggcgccaaagaaaccaaagttttcttttgagcctgagaccgtttcagattctgaagtcaaagaagagcttttaactgttaagaaaaagtctaatcctggactcgtagcttatagaaagaaagttgaagctcagcgcaaacaggttagagatgatcgccgtgaagagagagctcgtgccactgaatcagatattcgcaaaagtcgtgataacaagtacttaggagatcgcgagaatgctgaattcaatttccgtaacctgaagacaaagaagatacggtctaggacaaagaacacgactctt

SEQ ID NO: 263 - DNA, 1000 bp, Unknown
  Description of Unknown: unclassified Picornavirales sequence
tttccagagatttgatgccctttggtctaatttgagtattgatttgtacctgcattcgcagggtgggtttatcccatgcaccccgggttcattgagttgatttatcctcattgttcccacccgtttttgttgacccgtctgattttgattagttagcattgccacccttgccagaggttttctggtatttctgcactattgtatcattcatgctagtttgatagtagtgccccctgattgaggaatgatcttattcctaccttcaggttcacaccgcctagtaataggcctattgactcactgtaaaaggaaatgtcgtacataccttgtgatattactgattaagaagctgcgttttggacacgcgagaaagtccagaattagtttttgaccattgttttgtatggggaaatgaccccctaggatccgccataataaagtgacgattattttaaaggagttgtttgaagcctcagtttaactgatagctgataatgacaccatcctgtataacttaaagaatatatagcgccccgtgaaactactcgaatggtgaatcgagaacgtaccgggggttagtattaacgccttattccttgagatgtgtcaggtagtgtttccgtctgccgcccgctataggaacgcgaggttaatcccttgcatacattgccccactactcaactcatagagtaagaaaaagacgtgagtccgtgtttttactatgtctatctaggttattcggtacttgatacgaggcaagagaggcacaggccccgagtatcaagtataaagctaaagtcctgttataccataatggatgcggcagacggctcagctgttgaccaagtagggttaccaattgagattactgaaattaacatatttgtagaagaattacattattcagtaccgtccccttcacaggagttccgatctttgtatcggcctgtgttggaagaagtgagatttgtgtctcgcttacacgtggaaagagacagc

SEQ ID NO: 264 - DNA, 1000 bp, Unknown
  Description of Unknown: unclassified Picornavirales sequence
tggtaagatcagtggaaagcacaacaccgcttcccccgattatgtgacatctggcaagtgggcggatgggagcccctcagaatccctgtctctcttgacaggttgatttttaaatttcccatgccggacgaaggcgcttgcaataagtcaggcttattttcaggattctctttcttctcattcacgcgcgtcctatgcgtagtgagcggtttcgtgaggacccgttctcaggtgaccaccagacgcttgtttggaactatggcaccacctcaggtgtagactagtgaagacagtgtatctctacaggaaacctttggaggaaaagatttgtagtgcacctcttggaatagactgtgaaaacggttgagaccaagagctctgctatgtaaagaggctgtggagcaacgtgtggtaacacacgccacagtggccaaaagccaagtgggcagaaactctcttctaatatgctgtacccacggcagaagattggagagcaacgagttcaccctttacctccgcttcggcggctgcaatcctagtaacccaattgtggaatgtaccgacgaactgcctcaagctgtctgcattggtttgtgtaggaatgctatgcaggtaccctggttacaggatctgagcataggctaattgtctaagcaaacccaaaccaatttccccttttcttttccattggtgacgaactgcggatgtcgatatggcttcccaggcaattcacggtgttttcaacctcccaatggatcccctagaaggttttcagatgattagagtcttttattcccaaaataatttaaattttgatgagtattgcgcatctgttgtgcgcacttatccagctgttttgcaagaattggctccttttgttagagaaccggatcgtttcgtactcttttgtgctctttggtggcaagccaatcacgatgagggttatgagactgatccagaacccgaaccagaacaacagagttcggatgaagaagaacca

SEQ ID NO: 265 - DNA, 1000 bp, Unknown
  Description of Unknown: unclassified Riboviria sequence
tcgcgttacagccttccagctccgccgaataacactcattataagattcctcccccggcttatcctagttctggggttgtcctattccttttgtttttccttatcactgccatcccagtggtactttacttgtgatacatcattatgtctatcctgtaggagaatttccgaaatcattcacaattggagaaactgcatatacactttttcatccatcgttgaagattacgatgtttcatcctcgtcggtttttctaagtaggagatactctcaattagatcatcatccactggtaagaatgcatatacactttcttgccttctgttggagatgaagggtttatcatcctcatgaaagtgacttttagagatgttcactggtatttgtattccgtggaagacactgattgtctttcctttctctggacaacccctagcactacttttaccggtgcggaggagttagaggttaattcgaggcgtttattattgtccgcaatgacgttaaactattaatgattcttatattaacgatttataatacttaatactgtaatacatttaacactacaaccgataactatcggtgatgggaattagagtcaacttcgatcttgaattgaagctctgttatctattccaatgccgctactctcccggcacgtaggagaaacacgggcgcatggctgcggctcggatcactattcactttggattttgatttaatacatgatttgctgttcccctgggtagttcccagtagcggagttggcaatgataacagccttagatggagcagggatgtagggaatatgttcgggtgaacctcaaaaggggaatctcatttaactaggttaaaatgacgtgtgggataacaacgtgcccactaaccattatagttatctaaataaccactatcccgtgcaattagcgcatgccctaaacgacgttttccatccgtgtatagagtggatcccttggattgagatctcaacaatctc

SEQ ID NO: 266 - DNA, 1000 bp, Unknown
  Description of Unknown: unclassified RNA viruses ShiM-2016 sequence
agttccggagaaggagcactgtcggaacattatataataccacgcttcacgtggtcttgtataccggcattgtgaataccgtaaacctcttcaaggtacctcagtgtttgaattatttagctgaggataaattttcttaaatgagttgtcactgtacataatactcttcaagtagtacatacctcacgtaatttagaaaaggtgtttgaattctttaaccttttcaccttgaatttggcttaatcaatcatgtggatcttatgagcacggatcctgatgctgaaaagtgagcctagacgtggaggaacctgcaaggcgggtgttctttaaggctgtcgtaccctagctgagacagggggggtcccaatactgtcgaagccagacttttagaacatgtgccgctatcgaagggtagcacgcgggcgcgccctcctagagcgaagttcagccagtaagtatcgattgattaatcgacggtggacatgagcacccatcagtcaataaacaccccgttgggagagagaaacgaacgaggaatggcacacctcacaataaaaagccgttgtattctctttccggcctgggagtctcaaaccttcgaaccaattggttccgctacatatattggggacaattatgtggtgctacatccctcggacctaaggtagatcgtgtttatctacttgatagaacctcctgcacctcagagtgcggtccgtagtagaggcaagagaatagtatagcggtcagaaacaaactggattcttcaaaggtacgatttctcagactgagcagactgggtaaacctgctcctaaaaagcataaggggaaacccactgcaggcgtgaggcatttttcaaatgcctttttcgctaaatgggccatcgacccaactaagtccctcctagaggagctcctcggaacgcccgtaactgaggaggaattccggactttcgagcggggtttgtggaggcggccagtgattgtgccggcgcggtgt

SEQ ID NO: 267 - DNA, 1000 bp, Unknown
  Description of Unknown: unclassified RNA viruses ShiM-2016 sequence
cgggatcccgatcccggtgtagttttattctgttatgtggcgaacgataacggatgtataaactttgactcgatatcaaaatagactagatgcctatactcgataattgtcctaacggacattgtttcacccagaagtggtgttatgcagtgtcctattaggacctgcatagagatagtatgttgtaagctccaacctctttgtcttaacgcatattgtttatgaagttcatgctaaaactcaatacgcaaaagatgccttcctttgttgggctgtaaatacgatgaaggaccattcctctttaaaaagtcaaaacgacggtatattctgtacgtttgaataacccgtgtctcacggaaatgtgaggaatgttttctggtgtgacatttaaaaagcacaccagtgcaagatgttaatgatatattgagtggtgtatcatatacttgtatagcttaaagccttcacacgatggagtagaattcgtacgtgtgtcgtataattccagtacattccatattgagcgctccgctcttatggaagtgattagattaggagaactctctacgtggtacggtgcagtactttaaagcacttaatacacggagaactgtatgttcgtgtacgatcttactataggatagtaattgtctcgaaacaaacgacatttttgttgaagattagtatgtgcagattgctttagaatggcgctgccgattggaaaagaaatctgaattgaaacttttgtatgataatgccaaattaacttttggatggctctgcaactggaaaagatgtttagacgacaacttcggttagataatgtctaattacgatctgagaacactattattttggatgcattgtgttgcgcgtttctctgagcgctaccaaagtagtaattgaaacctccttttggagggtagtagagcacggatgtcgcaatgaataacaaaccaaaactttttggtttgagttcattgcgtcaagttctgttattaac

SEQ ID NO: 268 - DNA, 1000 bp, Unknown
  Description of Unknown: unclassified RNA viruses ShiM-2016 sequence
aaagggcaacaacaatgtttatgcttatcacaaaagcaattaaggaacgtgtgttatagttcccactttatgtgacctaatgacggtgagcttccgtaagcaagtccgtacatactgaagaatactttgaaagaatctgcaacatggttctctctcgatagtatatatcaggtgacaaacacacactcaacccgattatttcgcgagttctcgataagagaccgcaccaggtcgagctggaggggtgtaccaatccccgcctaacgttgaacttataacgtctgttagtattgttgtaacaaaacaatcctagatgattttggatcctcaatgtatagattgatcacaagagtagtatggtattgattgaaattgaggctatatttaattcgaagattgtagagttcaatatgaaagcattccaagcaggggaccctgtgttagtacgttagaaattggaatcccccgttcagaggtttctgacaaataggatggttgacacatatgtgaatgttattcagttagagtagatttaattttggtacgtgagcagccaactcatgtacaaactgggtcagttaattggaaaacgcaaggagagttttcactgcaatgcagtctagctttagcaggaccaaaattaagttgtagaagactgaatatttacataggaggacgtacactgatggatttaactcgacctctgtgtcgagacggtgaggattaggaaagttccctactacttctcctaggacgccggtgcgactgtgtacgagtcgtacggaaagtgtgatctttagagagcacgaagtttaagtggggcctgacatggtaaagagtctgaaacagttcactgtaaaggtgaaccttggcaagctcgtgatcgatacgagattataaagcaagttcgatgtttccagatttcccttccccgcgccccaccccagaacactcacactttagtcttgtaaattttgaacaagactaaagattattgaaa

SEQ ID NO: 269 - DNA, 1000 bp, Unknown
  Description of Unknown: unclassified RNA viruses ShiM-2016 sequence
tttgttaccaaaatatttattcgtgtgttttatttgagcgattcgttagagtggctttcctagaacgccaccctatccggattcgtaaaacctcctagcaggtttcctcgaaccctgttagttatttgtttttacattgcatttattctcgttgatagagaactatcactttgctcgctccacagcgatacgtggatccccgcgcattacgcgcaagggaactttcacttgagtacggaaactttgtattcagatctattagattaattatgctacctatagcttgactataggtgttaaagtcccttcaagaaaactttagcagacgtgtgagactagaggacttcggtctagcgtctattagattctgtcatgaattggaaaagaactacttcttgtttttgattcccgaccccggttgtgttaagtaagatatcatctagcacccatgagtggttaaccccacatagatacagatattaaaattagccggcgaaagccttgagggtttgcacccctctctaagcctccatcaccgcttcatcgcggcgggggttactttttatttgcttctgaaagtctaacttttatttacgctctacttgaagagaaactagcgttcaaggcggtcgtcacccagactgtgactagcattgagagtgcgaatactctctcgtttattacttaccttgcttttgctttgcttattggctacattgttggcctatgggcttggcacgagagcattgtcccttcccaatctggtaaggctgagcgtaaagctcagtgggataaaaaacaaaagaacaagcgtaaggccgctgagaagcgtgccaaagcgcaacaagccaaagagaaacgtgaacttgagtctaagaagaaagtgactttcgagtcatctggacccaagtacgaatctcagtcaggcttttggtttggtgattccaaatggactaagtaccattggaccaaatttttcctgattggcacctacacgttc

SEQ ID NO: 270 - DNA, 1000 bp, Unknown
  Description of Unknown: unclassified RNA viruses ShiM-2016 sequence
ctttataatatgtttttcgtgtatacgtcgtttagatgtgcgtcggcagcgattgtcccgtcgcatttataacatgacggtgtagatttactgcaatatttctacatgcggtgtgcaggaccctggagtagtgtatgttctcctttagacctgtgactacgtgagcgtgctaggttctcccttggaattacggttgcgtggttccttgggcgtgcttagccttgtccattggaggctgtacatatcctgttgagttgtggctctcattcaaaagccccggtgttgtgtgttgtttgctcacccggaagccttttgcagaaggcacgtcttcccacagacttgtaaatagtgggcggtgcttcctgtcgtaaccaggatccccctttccttgccttgagggtatcaaggcgaattgtgttgagatccccggatgggtctcctcactcttatgctaccatccaatcccttactgccgcgaggattatgtgcggtagactgggtcctactcctcgggtggggtagttcccttttatattaccacccaaacagttattttgatcttaactccttatttatatatccatttatgatttttatcaattgtgttaatggtttgccgcaattgagttttttgtattctagtggagttttgtgataaatggctgccatcgacggacgtcgatttgaacattaatgatatagtagtgaaaaatagaagtacattgatgttcttgtgtcggacagcaatatttgaccagtatgaaaaatattgtaaataacctttctttctgattggttctgtccggctgcgatacggtgagaaaacctgttccacagcgttgacatcgtctggtgttaagtttttgccatttgactgatagccatctcaattgagatgttgccctactaaactcttttggtcttaatacctggtgtcactgtgagttctgcgagtcaattctcacttacatccccggcccaaccctcctttccatcaaaa

SEQ ID NO: 271 - DNA, 1000 bp, Sclerotimonavirus penicillii
cgctcctcacctaccgctttcttgagagtttgttgagccttgttagccgcttcaagctcaggtcgtagttccgggaactcactcagaatccatttgttcttgatcaccgcctctttaattatgcgaagcgctcccatcccgaagtcggcgagaaggaggaacatattcatgaaagataaggcggatcccatccacggccgaccgatcatctgcaccactttgcttgtcatctgagaccggacaggctgatacgataaaaaagacgcgtagaccttcttcaagactgagtcagcaaggaatacagagtcggatacaaaaatctttggttcaccaatcactgaggcaagtgctgcaccttgacgtcgttcattgaacgcagaacgattcttgtcggtaactggtttattaccggctaggtaaagaagaccaaagtaggctccaagctcatcaacatccgtatccagaagagtaagaagctcctctgcagtgacgtcctctgcatcttcgaagttcgttttgagaacagattgttcttctgcctgactcagatcatctctaccaagacctgttatgtcgataggagtagcgcttgatccagtgaagttgaccctagcgttcagtaagattgctgtggcagatgcaagcgctctaatgatgaccgctttatctttactcttcaaaatttgaagcgcaaggaaggcaagagtctcatgacctcctccgtagaccacgttgatagtcacatcaattttcggcagatccggaatttcatatctaacgcgctgatcattcagttcgacagatgagtcgtcccacatactcaattgacccggagtgggtgggatgactttaggcaagtttccagtgttagcggaagacatagttgttcttaggattgaagtagatgaataagattatcgtttctcctagtttctttaaatgtacagaacgacctattctacaggatctgtaggtcctccgtgataagcatactaccaag

SEQ ID NO: 272 - DNA, 1000 bp, Unknown
  Description of Unknown: unclassified RNA viruses ShiM-2016 sequence
acctgaatgtgccaaagaaatggtctgggcttaaatccattaaaccacatggatccccaaccactatcaagaaggggtatttgtggctggtgcgtgacgaccagccaaccctggttgcagtgaagttggggtggatgccaggcataattgcacatgatggatccactatccctggggatagtggcgcaccaatcactgatgagcatggcaacattttagccatacacaatgggtatttgcgtgacagtcaggttaatgccgcgttggcgcccccacaagtagttgttggtgggggtgttcaggacgaactggtcaatcttcgtgctacgaaccgtagaaatgaggagaagatgactgagatgttcgagcaaatgcggcagcttaagttgttgtgcgaaaagcatggtatcatgggtgaggttgaacaggaagcgcgtggtgcgagaaagcgaatggtcaatcatcagcggaagccattgcgcatatggagtgaccaagaatatgagaaattattggatgatggattcacacgagacgaacttaaggcgatagccacaaagcgccgtaaggaatatgattactatgaggatgttgagcctgagggttatgccaaagttcaggttaattcacgcgatgataaagttgacaacatgaaatccagttgtgtcagtgagacaacgactgaaaagcatgatcagaaacttgctaaagcgattacgaagtttgagcaagctgttgatggactcaagactgatgtgatagacgagacctaccctgacaaacaagttgaggtcgcgattgatctacacacggggcttgaccacaaacatgttagcgtgactaagacattgggcgatgcaggcaaacaggatttacgggaagccctggctaccattcagaactttatggttcagtggtcagctggggccaaccagcctcgagaggagatcgaactggaaacacggagagtaaaagagcactgccccctatatcaaatggg

SEQ ID NO: 273 - DNA, 1000 bp, Unknown
  Description of Unknown: unclassified Riboviria sequence
cggcaggggatgtgagggacagacagtttcgtcaacttcgtgactactctatctcgtccggtcactgggtagtccacatgagatttgaaagaatctaagtgtacgcctttgatccactctctgccattcaaggtgaattgctccgcgtttccctctggagagcccttgcgctgatgacccaatctacggtgcctgcgttcccattatagcttatttgatatgtcgaccacaacgatcccccaatccgagattgatgcggctcttgtcgtactcgccgagtccccctctgagcgccaggaagtagcacccgaaatcgccgaacttgggcttaacgcgatccgtactgcaacaagcgatattgcctggaatggtgctccgctctggatccaacccaattacgccttgtatcgcgatcacatcgcacaattcatctatggagggaagaataaggttcctatcgtgttagcgggttcaacattctgtgatgttgcctatactggggagaaattgcccattcctcttccgattctcgtcattggctgggggaagacgcgcgttgccgaagaagttgcagaacagttcaggaattctggctttaaagattcgatgatccgctccgtcccggtccttgttaaggcgaatccaaccatcgaggacgctcgtcaggctattaatgccaaagcttcccttacctccccctgctctgccgagcatatgaacgtcttcgccttccgccagctaaacacgatcctaaacttggcctcttgtttcttgaagatccaccaatatcccgctttccttgacgaagatgccgtgtccgacttttgcatggctgattggcaacaggttgatcccgatgctgacaaacacaccactcatatggacgttgatgatgagaatgttcgagataagaagacttcaggctggaaggtacctagagattagtacaatggagtttccgaaccgtgctgacctttttgtaattcgctagggattgaag

SEQ ID NO: 274 - DNA, 1000 bp, Unknown
  Description of Unknown: unclassified Riboviria sequence
ttgcaagcatgcaattcgctctcctcttaattagaaggggtgctccggggaagacaacgccccggggtgagaaactcgtgtcccataattcaatccggtctgcctgccgccgcccgtgggacgtacctgtagaaggacccaggtattggacagtttgcagcgtggtttttactgagtggcgacgtcgaaaaatgaaaactaaaaatgctccctgcggtgtgtcgtcacctcggatggggcctgtcgtcacttgggggtcgcgcatcacttataagtgcgtggctttgttcgtttgctgcagtccggcgagtgccttattcttttgcctgtccggcctgtgacaggtggaagcctggtgtgcggggacgggacccgcctgaggtgaaggccggtgtggggggggagataggcaccctaagctcgccaagctgaaccccacacactacgagtcggcccggtccggggctgccccatctgcataggggttagtcaacagtggtcacgcgctggtaacggcgtgtggttgcaagccgaccttgtgaatggttgcggagccgagtcgcagcggtactgcgatgacagtcgtctgtggtgtggtgctctcgtgctgcccgtggaggaggtgaagaggtttgagccagccgcaagtagcttgccctcttaccggtggtgcggaaatttcccccttggggccgcccccgcggatgctgtcgcctttgtacataacaggtagcatgcgtatcccatacattacgtgtacgttaatatacccaccccgctggccggattcgtgcgagctgttggccgtagtgcccttgggccgtgcctggcttgtcgtcgcggattccgccagccacggggggctttacgtcgtctctgctaggagaggcggcgtctaaagggatccccttgagtcgaattcgtcagcttacctagccgtggcgtcgccaccgctagcgtgtgtttgcgcacggttcaccgtgcgtgtggtgttcgggtg

SEQ ID NO: 275 - DNA, 1000 bp, Unknown
  Description of Unknown: unclassified RNA viruses ShiM-2016 sequence
ttgccgatgttcaagcgtgggaacgctgggctaatgacccgactatcgatgccgcgcaaaaatggcgtgagcatcagccgtggtcgcggaagtcaggatcgcacacgtgcggtggatccaacgaggtttggtttgcaaccgaccatcgagacagagtcatgactttccttcgttatgattatactgtcacttccagcgcgacagtttggattaaagaacccagacctacgctttcgcgtagtatggggcttgacctccaaggtgtcatcccagccgcttgggatttgactgcgttttcctgggcggccgattggtttgggaattgctctcaagttatcaaggctgcaaattgccttttacttgggcccgagccaatgggtggatgggttacgactgtagttcgtggtaaagttaccgtgaagaaaagtccacacccacaagataaacagacagaagtccgtcaccatgagacctttaatgttaagtggaagaagcgtaggcccctagctttttgggaccgcttcccctcgttagagtataggcctaatctcgacccgtggagggtcgttgacatggcttctcttggtataatattctctaaagggcacaaagtgccaggagttatcaaacatggataagagtgcttacaagctctataccattggtcgggacgaggtagtttatgccacgcctgaccacacagtgtcaaattcagacactctcactatgcgacgtacgtcttccaaaaaacgtacagtcaagggaggtaatgttgaacttacgccacagcgcgtaaattacaactttaccaagactattgacgggaacttgatcacgctgtccgtcacaagtacaattgtacctgggactgatacagctcaggcgaagaccttctttagtgacgcgcttaccgcgttcgcagaggaatttgccggatctgcaatctccggtgacatcactcggactccctttaactaactttttataaggaacaattttt

SEQ ID NO: 276 - DNA, 1000 bp, Unknown
  Description of Unknown: unclassified ssRNA positive-strand viruses sequence
tcatccgacatactccgggacgccaagaaccctgagccgccattctcatcctgcggcggtcgtggcgaggtctgtccctcccgtcatgatttccccggagccttgctctgtcactccgattactacctctacgacgagctctcttatgtcattcgtgggcacacttttatcatcaatcactcgtttcttgaagagaataagcacttccacaatgaagcgttcatcacgaagaaaggcgacggagtaatcatgtccacccctgacggcactgaatatcagcacccatacaacatctggaaagccgaaggttgtatcataggatccggtggtgctgccgtctatgcccgagtctatcgtgggccctcaatggatgtttactacgcctatcccgcttctggcacttatcatagtgatgatccacaccgcttaaaacgctcagaccaattcgagaatctccgccttagtagtggcaacattgccagactctctttcaaatccgtcaagattcaaaccacctccggtgacaccatcctcgattgccctcgcgatccctttgaaagagcagttgccaaatgcggtagcggtgtccgtgatctgaagttcttacccacgctatcttcatatatcatatccaaattaaccatgcacgatttagagattaataacgcacaagacatcttagaattagcaaacatcatgtgtgagcgcttcgcttttgacttctactcccactcccatcttgagtatgatcccaccaacataaacatcttcactaggtgtcgtcgtcatgctatgctgctggcccgcgctattcgccacaccctagcacgcaatataacatgttcgattattaatcgtcccatcttacggcaatttacaccttgggcatttaaaagcatcaccatgcctgcttacatcaagcaccgacgtgcacgtcacatcgacttaagacttgcgtctgacaggcctaagccctttcgtgacgggcgcccgatacttg

SEQ ID NO: 277 - DNA, 1000 bp, Unknown
  Description of Unknown: unclassified ssRNA positive-strand viruses sequence
gggcacataccgttatgagaaaacggggggcagatgttccggcgatagtgacacatcgttaggcaacgtgagcatcatgctggcgattacgagggtggtttgtgagaggctaaaaggcatacacgtcgagatagcaaacgacggagacgatcaggtactgatggttgaggaaaaccacctcaacagcctggtcgaggagctcagccccacattcatgcggtttggtttccgcgtgaaagtagaggacccggtttgggaattcgagagaatagatttttgccaaaccagaccgatcttcctgtcacccaacgcgccaattatgtgccggtacccaatgcaatctatgtctaaagatgtagcgtcgttcctcaatatagaaagatctgagggatggaaatacatgctgcgagcgataggagcttgcgggtcttctagtttctcacaagtaccagtacttgggaagttctacagagcgttaagttccacatcaaacaagtcagaacacacatggtggaaacgcactggggtagatcttggattcaaacaactcacgaccaacgtgggcccggtccaatatgacgaaataacggcacgaagctccttctataaggctttcggcatactacctgacacccaaatggccctagagagggcaatagacgaatggtacataagccccacaccaccaattgagcacgtccataagttctcgagtgagtacccagtggttgaaggttgggcctaattgtagggtagcaataggtatagctagcctgcccccccccgcttgctgggccggtgggggcagcaccgcagacaacgtggttgagtttgggaacatagatccgaacaccacgtcacgggtaggccacacccgcggagtcaggctgattgccataattggcaggtggggccacgccgtttggccaaaccacccgggtcaccggtagggagaggtctctagggatccgagtgctgccctgttgtaggggcacgctca

SEQ ID NO: 278 - DNA, 1000 bp, Unknown
  Description of Unknown: unclassified ssRNA positive-strand viruses sequence
tacacattgaagtagccaatgatggagatgaccaggtgttgatggtcgagacaaaccaactcgacaacctggtcaaggagcttagtcccacattcgcgcgatttggttttcgcgtgaaagtagaggatcctgtctgggaattcgagagaatagatttttgccaaaccagaccgatcttcctatcaccaggtgagcccataatgtgccgatacccaatgcagtctatgtccaaagacgttgcgtccttcctcaatatagaaagatcagagggatggaaatacatgctcagagctataggagcatgtgggtcttctagtttctctcaagttccagtgcttggtgagttttatagtgcgctcagctccacatcaaacaaagatgaaaccaaatggtggaggcgcacgggagttgatttggggtttaaacagcttaccaacaatgtaggcacgatcccttacgacgaggtcacggcacgaagctccttctataaggccttcggaatcctcccagacacccaagcagcactcgaaagcaaaatacgcaactggaatatgagctccgtaccacacatcgagcaagtccacaaattctcgagtgagtttcccgtggttgacggatgggcctaacttagggaatacagttaggttaagttagtcggcccctcctcttgctggctgggtgagagggggggccagcgcagactggttggataggtttgggaacatagatccgaactccaatcaacgggtaggtcgcacccgcgtagtcgagaatgattaccataattggtaggtgaggtcacgccgtatggccaagtcacccgagctttcggtagggggtctagttgttgagtgccattatgacataaccaactagacaccccacatttggagaagcggcttgcccacgctccaacattccatggatagattgaacgacgaaatgtcattgtcttgccgtcagaggcgttcccctctccaaggctagcccgacgtgcgcc

SEQ ID NO: 279 - DNA, 300 bp, Pestivirus A
gcgaaggccgaaaagaggctagccatgcccttagtaggactagcataaagaggggggtagcaacagtggtgagttcgttggatggcttaagccctagtacagggtagtcgtcagtggttcgacgccttggcataaaggtctcgagatgccacgtggacgagggcacgcccaaagcacatcttaacctgagcgggggtcgctcaggcgaaaacagtttgatcaactgctacgaatacagcataataggttaggccagaggcccactgttctgctactaaaaatctctgctgtacatggcac

SEQ ID NO: 280 - DNA, 301 bp, Unknown
  Description of Unknown: unclassified Sicinivirus sequence
tgtggtgattagtagaccccctggaggtacccgttttggatctgaccagggacccgtgactataccgttccggtaattcgggtttaaaacaatgaacgtcaccacacactttctttttccctttattttatttgtttgttcagtatgttttatgagttgctcattattgctgcccttgtcgtgattcttgtttcaccgcatgatacccagtgtcttattgtcgtctgtttggtcaattttcttgtatactttctttggacaattccagggttagaccttccattatacccagcaatacaac

SEQ ID NO: 281 - DNA, 303 bp, Unknown
  Description of Unknown: unclassified Picornaviridae sequence
tggccaccggggaaaaacggctactgtgcaccacctctgcaccccacgccgaccacgcctaaccatggcgttagtaggagtggaggaccactgcagagggtcctggtgtgcgacagtcagtggtagagtagacagtcctgactgggcaatgggaccgcgttgcgtatccctaggtggcattgagatttctctgccacccaccagcatggattcctgtggggggggccccatgggctaggtctatactgcctgatagggtcgcggctggtcgactgctgactgtataaccagttgtaacttact

SEQ ID NO: 282 - DNA, 304 bp, Enterovirus B
tagttggtagtcctccggcccctgaatgcggctaatcccaactgtggagcagatacccacgcaccagtgggcagtctgtcgtaatgggcaactctacagcggaaccgactactttgggtgtccgtgtttcttttatttattcctacgctggctacttatggtgacaattgagagactgtagttatattgccatcagattggtcatccggtggagaataaaacagttgctcacctgtttgtcagtcctgcaccgtcgtgccatagagtcttaactgcccctcaacatcgtcgtaaacacgctgga

SEQ ID NO: 283 - DNA, 305 bp, Unknown
  Description of Unknown: unclassified Picornaviridae sequence
gtggctggccaccacggaataacggcaattgtttgtatgtgggaggtcaagcctgcctagccgataacctttgaccgggtgtgtaggatagaacaggaacccactacaggcgacaggttatggtagagtggatacctagccaggggcaatgggactgcgttgcatatccctaatgagccatcgagatttctctggccattacccggtgatggttgtgtggggggggccccacacactagatccatactgcctgatagggtcgcggctggccgaccataacctgtatagtcagttgactttgaatc

SEQ ID NO: 284 - DNA, 306 bp, Enterovirus B
taactggtagtcctccggcccctgaatgcggctaatcctaactgcggagcagatacccacatgccagtgggcagtctgtcgtaacgggcaactctgcagcggaaccgactactttgggtgtccgtgtttccttttattcttatactggctgcttatggtgacagttgaaagattgttaccatatagctattggattggccatccggtgacgaacagagcaattatttacctatttgttggttttgtaccattaaatcacaaagttttaaaaacattgaaccttgttttagcatttaatacagcaaa

SEQ ID NO: 285 - DNA, 306 bp, Enterovirus B
tagtcggtagtcctccggcccctgaatgcggctaatcctaactgtggagcagatacccacgcaccagtgggcagtctgtcgtaatgggcaactccgcagcggaaccgactactttgggtgtccgtgtttcatttgttcctacactgactatttatggtgacaattgagagactgtaactatactactatcagattgaccacctggtataaaataaaacagttgttcacctgtttatcagcctcgcaccgttgtactgtaaagcctcagacaccccccaacactatcataacacgtagatcattaaa

SEQ ID NO: 286 - DNA, 306 bp, Enterovirus B
tagttggtgatcctccggcccctgaatgcggctaatcctaactgcggagcacatgctcacaaaccagtgggtggtgtgtcgtaacgggcaactctgcagcggaaccgactactttgggtgtccgtgtttctttttattcctatactggctgcttatggtgacaattgagagattgttgccatatagctattggattggccatccggtgtcgaacagagcgatcatttatctgtttgttgggtttgtacccttaaatcttagagttttcaaaactctcaacctcgtactacaactaaactcagcaaa

SEQ ID NO: 287 - DNA, 306 bp, Enterovirus B
tggttggtagtcctccggcccctgaatgcggctaatcctaactgcggagcacatgcccacaaaccagtgggtggtgtgtcgtaacgggcaactctgcagcggaaccgactactttgggtgtccgtgtttctctttatccctatactggctgcttatggtgacaattgagagattgttgccatatagctattggattggccatccggtgtcaaatagagcgattatctacctatttgttggatttatacctttgaattttgaagtatttaagaccctcaaccttatattacaactcaattcggtaaa

SEQ ID NO: 288 - DNA, 306 bp, Enterovirus B
tagttagtagtcctccggcccctgaatgcggctaatcctaactgcggagcacatgcccacaaaccagtgggtggtgtgtcgtaacgggtaactctgcagcggaaccgactactttgggtgtccgtgtttctctttattccaatactggctgcatatggtgacaattgagagattgttgccatatagctattggattggccatccggtgtcgaacagagcgatcatctacctatttgttggatttgtgcctttgaattttgaagtattcaagactctcaaccttgtactacaactcaattcggcaaa

SEQ ID NO: 289 - DNA, 307 bp, Enterovirus B
taattggtagtcctccggcccctgaatgcggctaatcctaactgcggagcagatacccacgcaccagtgggcagtctgtcgtaatgggcaactctgcagcggaaccgactactttgggtgtccgtgtttccttccgttcttatattggctgcttatggtgacaattggaagattgttaccatatcgctattggattggccatccggtgacgattagaacacttgtatacctatttgttagctttgcaccgctgaactacagagccttaagcaccctttgatcacattacaacacccaacacgtcaaa

SEQ ID NO: 290 - DNA, 307 bp, Enterovirus B
taattggtagtcctccggcccctgaatgcggctaatcctaactgcggagcagatacccacgcaccagtgggcagtctgtcgtaatgggcaactctgcagcggaaccgactactttgggtgtccgtgtttccttttattcttatactggctgcttatggtgacaattgagagattgttaccatattgctattggattgtccacccggtgacaaatagaacagttgcttacctgattattagtttcgcaccactgaactacaaaaccttaaacaccctttaatttcatcacaacgcacaatacgttaaa

SEQ ID NO: 291 - DNA, 307 bp, Enterovirus B
tagttggtagtcctccggcccctgaatgcggctaatcctaactgcggagcagatacccacgcaccagtgggcagtctgtcgtaatgggcaactctgcagcggaaccgactactttgggtgtccgtgtttccttttactctcatactggctacttatggttacaattgagagattgtgaccatattgctattggattggccatccagcgacgaatagaatagttgcttacctgtttgttaacctcgtatcactgaactacaaagccttgaataccctttaacttcatcataacgctcagtacgctaaa

SEQ ID NO: 292 - DNA, 307 bp, Enterovirus B
tagttggtagtcctccggcccctgaatgcggctaatcctaactgcggagcagatacccacgcaccagtgggcagtctgtcgtaacgggcaactctgcagcggaaccgactactttgggtgtccgtgtttccttttattcttatactggctgcttatggtgacaattgaaagattgttaccatattgctattggtttggccacccggtgacgaatagaacagttgtttacctaattgttagtttcgtaccactgaactacaaagccttaaacaccctttaatttcatcataacactcaacacgttgaa

SEQ ID NO: 293 - DNA, 308 bp, Enterovirus B
taattggtagtcctccggcccctgaatgcggctaatcctaactgcggagcagatacccacgcaccagtgggcagtctgtcgtaatgggcaactctgcagtggaaccgactactttgggtgtccgtgtttccttttgttcttatactggctgcttatggtgacaattgagagattgttaccatattgctattggattggccatccggtgacgaatagaacaattgtttaactatttgttggttttgtaccgctgaaccacaaagccttaaacaccctttaatttcatcataacgctcaatacgttagaa

SEQ ID NO: 294 - DNA, 308 bp, Enterovirus B
tagttggtagtcctccggcccctgaatgcggctaatcctaactgcggagcagatacccacgcaccagtgggcagtctgtcgtaatgggcaactctgcagcggaaccgactactttgggtgtccgtgtttccttttgttcttatactagccacttatggtgacaattgagagattgtaaccatattgctattggattggccacccggcgacgaatagaacagttacttacctgtttgctatcctcgtatcgccgaactacaaatccttaaacaccctttaatttcgtcacaacgctcaatacgttaaaa

SEQ ID NO: 295 - DNA, 308 bp, Enterovirus B
tagttggtagtcctccggcccctgaatgcggctaatcctaactgtggagcagatacccacgcaccagtgggcagtctgtcgtaatgggcaactccgcagcggaaccgactactttgggtgtccgtgtttcttttttgttcctacactggctacttatggtgacaattgagagactgtaaccatattgctaacggattggccacctggtatagaatagaacaattgcttacctgtctggcagtctcacaccgttgtaccataaagcctctgacacccctcaacaccgtcataacacttaacacgttgaa

SEQ ID NO: 296 - DNA, 308 bp, Unknown
  Description of Unknown: Human rhinovirus B strain HRV-B06_p1159_sR2067_2009 polyprotein1 sequence
gctgtgaccataagacaataatgagtaaaaagagaaacacggacacccaaagtagtcggtcccgtcccggaattgctcattacgaccttaatatcactggtttgtaatacaaggctccagggttaaggttagccgcattcaggggccggaggaatcacaaccaagcacatgcgagtcttcacaccatgtctataaaagggcgtaatgagcaattccgggacgggaccgactactttgggtgtccgtgtttctctttttactcattattgtcttatggtcacagcatatttgttaaatatactgtgatc

SEQ ID NO: 297 - DNA, 310 bp, Pestivirus B
gcagccccggacatctaagggcatggctagccatgcccttagtaggactagcaaaaggaggggactagcagtagcagtgagttcattggatggccgaatccctgagtacagggaagtcgtcaatggttcgacactccattaaccgaggagtctcgagatgccatgtggacgagggcatgcccacggcacttcttaacctatgcgggggttgcatgggtgaaagcaccattcgtggtgttatggacacagcctgatagggtgtagcagagacctgctattctgctagtaaaaactctgctgtacatggcac

SEQ ID NO: 298 - DNA, 310 bp, Unknown
  Description of Unknown: unclassified Enterovirus sequence
atgctgtgaccataagacaataataagtaaaataagaaacacggacacccaaagtagtcggtcccgtcccggaattgctcattacgcccttttatagacatggtgtgaagactcgcatgtgcttggttgtgattcctccggcccctgaatgcggctaaccttaaccctggagccttgtattacaaaccagtaatattaaggtcgtaatgagcaattccgggacgggaccgactactttgggtgtccgtgtttcttattttacttattattgtcttatggtcacagcatatttgttaaatatactgtgatc

SEQ ID NO: 299 - DNA, 315 bp, Unknown
  Description of Unknown: unclassified Picornaviridae sequence
ttctgcttgctctacgtgcggcgcacgttaaaacgtcccggtggtgtctgtgagcatcatcgttactcttaggagaaacaattatcacaacatgttagtgcggcgcacttcaaacgtcccggggacattcgtgaatgtcatcgtaactccatggagaaatcaaaatcacgatagaagtactgattacggcagcctacaaaggcttgaagtttaccatgtacctgacgcttgcttctatttggacttacaactcttcagttgtgcggcaaccaccgcagaaaaacttagacagggtcctaccatgatgttggtagg

SEQ ID NO: 300 - DNA, 315 bp, Unknown
  Description of Unknown: unclassified Cosavirus sequence
ctacaagctttgtgtaaacaaacttttgtttggcttttctcaagcttctctcacatcaggccccaaagatgtcctgaaggtaccccgtgtatctgaggatgagcaccatcgactacccggacctgcaaaattttgcaaacgcatgtggtatcccagccccctcctctcggggagggggctttgctcactcagcacaggatctgatcaggagatccacctccggtgctttacaccggggcgtggatttaaaaattgcccaaggcctggcgcacaacctaggggactaggttttccttatattttaaagctgtcaat

SEQ ID NO: 301 - DNA, 316 bp, Unknown
  Description of Unknown: unclassified Picornaviridae sequence
gatgtcggatgacggctggccaccggggaaaaacggcaaatgtgcaccacctctgcaacccacgccgaccacgtttaaccatggcgttagtaggagtggaccactgcagtgggctctggtgtgcgacagtcagtggtagagtagacagtcctgactgggcaatgggaccgcgttgcgtatccctaggtggcatcgagattcctctgctacccaccagcgtggactcctatggggggggccccataggctaggtctatactgcctgatagggtcgcggctggtcgaccactgactgtataaccagttgtaactcact

SEQ ID NO: 302 - DNA, 317 bp, Unknown
  Description of Unknown: unclassified environmental samples sequence
atcctcggctccgtcccggaaagacttaaaacttgtccctctgagcgcactagcgtgctcactaaaccaaagacagtattctgccatggataccataccggacacacactctttattgtcccaaaaggcttggcattgtaggcttgaaggctatttagccttggattcaccatccaagagaaccccacgtgcgtagcttgagtcagctagcacatagtggtccccgacttacttcaaaacttacaacaatcagctctgctcctaacgatcataaggagtatagcgtgaaatttcatgatcaaacccctgactgggtt

SEQ ID NO: 303 - DNA, 318 bp, Pestivirus A
ggaacaaatcctcctcagcgaaggccgaagagaggctaaccatgcccttagtaggactagcatatagaggggggtagcaacagtggtgagttcgttggatggctgaagccctgagtacagggtagtcgtcagtggttcgacgctccagaatgcgagcctcgagatgccacgtggacgagggcatgcccacagcacatcttaacctaggcaggggtcgcctaggtgaaagcgggtggaccaaccgttacggacacagcctgatagggtgctgcagaggcccactggactgctactaaaaatctctgctgtacatggcac

SEQ ID NO: 304 - DNA, 319 bp, Pasivirus A
acatggggtatgttgtctgtcctgttttgttgaaacaatatataagatcctttccgccgatatagacctcgacagtctagtgtaggaggattggtgatagtaacttgccccagaagagtgaccgtgacacatagaaaccatgagtacatgtgtatccgtggaggatcgcccgggactggattccatatcccattgccatcccaacaaacggagggtatacccactatgtgcgcgtttgcagtgggagcctgcaaatttagtcatactgcctgatagggtgtgggcctgcactctggggtactcaggctgtttatataat

SEQ ID NO: 305 - DNA, 319 bp, Unknown
  Description of Unknown: unclassified Enterovirus sequence
gaatgcggctaatcctaaccacggagcacccaccagtaaaccagctgggagggtgtcgtaacgggtaactctgtggcggaaccgactactttgggtgtccgtgtttccttttgatcctattttggctgcttatggtgacaacgataagttgttatcataaagcttttgggttggccacctggaaaaagttatcagtgtttgatattgctcggctttcacgcctaccaataaaacaagctttatattacttaatttccttttacccaaaggaagaaatctctgaatttcatcttcaactgctcttaacattatcagcaag

SEQ ID NO: 306 - DNA, 321 bp, Enterovirus B
agagtctattgagctaattggtagtcctccggcccctgaatgcggctaatcctaactgcggagcagatacccacacaccagtgggcagtctgtcgtaacgggcaactctgcagcggaaccgactactttgggtgtccgtgtttccttttattttttacactggctgcttatggtgacaattgagaaattgttaccatatagctattggattggccatctggtgacaaacagagcgattatttacctatttgttggttttgtaccattgaattttaaagtattaaaaacccttaacctcattctaacatttaacacagtaac

SEQ ID NO: 307 - DNA, 322 bp, Unknown
  Description of Unknown: unclassified Enterovirus sequence
agagagttatgtatggacatgtccagtcaggtctaggggtcctgctggcgacagtgttctagcctgcgtggctgcctgcgtgtcctcacgggcacgaagccatttacttgacaaggtgtgaagagtcccgtgtgctcgtcttgagtcctccggcccctgaatgtggctaaccttaaccctgcagccagtacacacaaaccagtgtgtagctggtcgtaatgagcaattgcgggatgggaccaactactttgggtgtccgtgtttcactttttaccttttattatgcttatggtgacaatatatagacatatatattgacacc

SEQ ID NO: 308 - DNA, 323 bp, Pegivirus B
ggtgcgcgtgaaaccttctcgtcacagaagattagcgcgctaggtacgccaaaggcgtaggcccccggcggtttgcaccgacgtgggacaatgcgctggaggattttacagccgacagagctgcaaaacctgtagtaaggccggagtaccggcctcccagcccgcgtcagcctaaacctggctgtcatacgcggtgtatggaggacatgtccaactatgggtgccttggggtggttccccttggcgtggtgtgacgaccatagcagtactgcctgatagggtcccggcggatgggtcggctgtgtacatccgttgtccccccc

SEQ ID NO: 309 - DNA, 323 bp, Unknown
  Description of Unknown: unclassified Picornaviridae sequence
ggaatgtggatgacggatgacggttggccaccggggaaaaacggcaattgtgcacctcctctacaacctacgccgaccatgcctaaccatggcatcagtaggagtgggcccctgtagtgggtcaaggtgtgcgacagtcagtggtagagtagacaatcctgaccgggcaataggactgcattgcatatccttaggcggcattgagaagcctctgccacccaccggcatggatttctatggggggggccccatagactaggtctatactgcctgatagggtcgcggctggtcgaccactgactgtataaccagttgtgtataac

SEQ ID NO: 310 - DNA, 324 bp, Unknown
  Description of Unknown: unclassified Enterovirus sequence
agcctactgagctacttgagagtcctccggcccctgaatgcggctaatcccaaccacggagcaggtgaccataaaccaatggttggcctgtcgtaatgcgcaagtctgtggcggaaccgactactttgggtgtccgtgtttccttttacctttttcattggctgcttatggtgacaatcatagattgttatcataaagcgaattggattggccatccggtgaaaatcagagcgattgtatacttgtttattggattcactccattaacaccaaactccctaacactcatcaaactagttttgttgataagacactactatcata

SEQ ID NO: 311 - DNA, 327 bp, Enterovirus B
ggtgtgaagagtatattgagctagctggtagtcctccggcccctgaatgcggctaatcctaactgcggggcaagcacccacaatccagtgggcagcttgtcgtaacgggtaaccctgcagcggaaccgactactttgggtgtccgtgtttcctttatttttaaaactggctgcttatggtgacaattgagagattgttaccatatagctattggattggccatccagtcaccaacagagcaattgtgtacctctttgtagggttcataccacttaattttactagctacaacacactgtgtttcattatcgatttaaacacagcaag

SEQ ID NO: 312 - DNA, 328 bp, Unknown
  Description of Unknown: unclassified Enterovirus sequence
ccggcccctgaatgtggctaatcccaaccacggagcgctcgccaacaaaccagttggtagggcgtcgtaacgggtaactctgtggcggaaccgactactttgggtgtccgtgtttccttttgatcctatattggctgcttatggtgacaacgataagttgttatcataaagcttttgggttggccacctggaaaaagttatcagtgtttgatattgttcggctctcgcgcctaccagtaaaacaagcattatactatttaatttccttttatccaaaggaagagatttctgagtttcatttacagttgctcttagtgttgtcaacaag

SEQ ID NO: 313 - DNA, 329 bp, Pegivirus H
tgaactgttgttgtagcaatgcgcatattgctacttcggtacgcctaattggtaggcgcccggccgaccggccccgcaagggcctagtaggacgtgtgacaatgccatgagggatcatgacactggggtgagcggaggcagcaccgaagtcgggtgaactcgactcccagtgcgaccacctggcttggtcgttcatggagggcatgcccacgggaacgctgatcgtgcaaagggatgggtccctgcactggtgccatgcgcggcaccactccgtacagcctgatagggtggcggcgggcccccccagtgtgacgtccgtggagcgcaac

SEQ ID NO: 314 - DNA, 329 bp, Unknown
  Description of Unknown: unclassified Teschovirus sequence
ttcccaccctcaccctctggatttgtaactgataagtgatgatccttggaagctaggtactcgttacgctggttttggattgtcttgtgcccaacactagttttcggactcttgttgtgtttaaacacagaaatctgattatttggttgtagatttactggacccaccctttgaaagacctgctctggcgcgagctaaagcgcaattgtcaccgggtattgcaccaatggtggcgacagggtacagaagagcaagtactcctgactgggtaatgggactgcgttgcatatccctaggcacctattgagatttctctggggcccaccagc

SEQ ID NO: 315 - DNA, 331 bp, Teschovirus A
actagtccttggacttttgttgtgtttaaacacagaaatttaattacctggccatgaattcattggattaacccttctgaaagacttgctctggcgcgagctaaagcgcaattgtcaccaggtattgcaccagtggtggcgacagggtacagaagagcaagtactcctgaccgggcaatgggactgcattgcatatccctaggcacctattgagatttctctggggcccaccggcgtggagttcctgtatgggaatgcaggactggacttgtgctgcctgacagggtcgcggctggccgtctgtactttgtatagtcagttgaaactcacc

SEQ ID NO: 316 - DNA, 331 bp, Unknown
  Description of Unknown: unclassified Teschovirus sequence
actagacctcggtcttctgttgtgtttaaacacagaaatcttgctatctgactatgaattcataggactaacccctctgaaagacttgctctggcgcgagcaaaagcgcaattgtcaccaggtattgcaccaatggtggcgacagggtacagaagagcaagtactcctgactgggcaatgggactgcgttgcatatccctaggcacctattgagatttctctggggcccaccagcgtggagttcctgtatgggaatgcaggactggacttgtgctgcctgacagggtcgcggctggccgtctgtactttgtatagtcagttgaaactcatc

SEQ ID NO: 317 - DNA, 332 bp, Teschovirus A
actagaccttggtctcttgttgtgtttaaacacagaaatttttcctatttggttatgaattcattggatcaatccctctgagagacctgctctggcgcgagcaaaagcgcaattgtcaccaagtactgcactaatggtggcgacagggtacagaagagcaagtactcctgactgggcaatgggactgcgttgcatatccctaggtacctattgagatttctctggggcccaccagcgtggagttcctgtatgggaatgcaggactggacttgtgctgcctgacagggtcgcggctggccgtctgtactttgtatagtcagttgaaactcact

SEQ ID NO: 318 - DNA, 333 bp, Pestivirus A
caatgattaggcctagggaatgaatcccccttagcgaaggccgaaaagaggctagccatgcccttagtaggactagcataatgaggggggtagcaacagtggtgagtttgctggatggcttaagccctgagtacagggtagtcgtcagtggttcgacgcctcagtgaggaggtctcgatatgccacgtggacgagggcatgcccaaagcgcatcttaacctgggcgggggtcgctcaggcgaaagcggtttattaactgctgcaaatacagcctgatagggtgctgcagaggcccactgtattgctactaaaaatctctgctgtacatggcac

SEQ ID NO: 319 - DNA, 333 bp, Pestivirus K
tgctgtgagccccgtggtgagtgggggaaaggggttaaccaggcctctagtaccacaggcaccattggacagggcaactcgaacctgagagagaggtaccgaacccttaagccccgagtacggggtagacgtcaccgagtagtacacccaaagaccaccacattcaggtgtagggtctactgaagctcgggtggacgtgggcgtgcccaaagggaaatcggtggtggacctgggggttgggcccgccatgccccttcatggggtagacctcactgcttgatagagtgccggcggatgcctcaggtaagagtataaaatccgttgttcattaac

SEQ ID NO: 320 - DNA, 335 bp, Teschovirus A
caacactagacctcggtctactgttgtgtttaaacacagaaatctcgctacttggttatgaattcattggatcaatccctttgaaagacctgctctggcgcgagcaaaagcgcaattgtcaccaggtattgcaccaatggtggcgacagggtacagaagagcaagtactcctgactgggcaatgggactgcattgcatatccctaggcacctattgagatttctctggggcccaccagcgtggagttcctgtatgggaatacaggactggacttgtgctgcctgacagggtcgcggctggccgtctgtactttgtatagtcagttgaagcacact

SEQ ID NO: 321 - DNA, 337 bp, Shanbavirus A
accttttccccctctaaggcaatgcactttggtttattctcatggatcatgattttagaggctggccacctaggttaaacggcaattattagtgataggggtcaaacactcatcgtgaaaccgtccagtagcgaggagtagttccctatctactagtgactagtgtgagcagagtaggaggtatacaaggaagtgggacgctatttgctatccccgtattgagagttctctacaccttgtgtatacagtggattgggaagtccactctggtcctatactgcctgatagggttgttaactgtcagctcacacttagtataacagtttgtcaaacactt

SEQ ID NO: 322 - DNA, 337 bp, Unknown
  Description of Unknown: unclassified Enterovirus sequence
tacccatggctaacgccatgggacgctagttgtgaacaaggtgtgaagagcctattgagctacttaagagtcctccggcccctgaatgcggctaatcctaaccacggagcaagtgcccacaaaccagtgggtagcttgtcgtaacgcgtaagtctgtggcggaaccgactactttgggtgtccgtgtttccttttatttttatcatggctgcttatggtgacaatctaagattgttatcatatagctgttggattggccatccggtgatttacagagacttgagaactaacccgcctttctacaacactcatttacttattaatctcacaatacaaa

SEQ ID NO: 323 - DNA, 338 bp, Unknown
  Description of Unknown: unclassified Picornaviridae sequence
ctcgtgagtagtacttggccctgcccattacttgaggaccgactcttcttgactacaatgtgtttaaagtaacctggaccacattgtgtatccagacaactccattaggtaatgtacgctggagacgttttcagtgcatagggttctaaagtggtgctgaaatattgcaagctcaatggaatactgaacgctgaaaaccgccgctattatcttttgggccccttgtgggcaaacgttggctttaagcatatactgcttgggaatgcagtactggttgtagacagggtgatagcctaccggctggcgtagttgagttggtatagccagttgattgccat

SEQ ID NO: 324 - DNA, 341 bp, Artificial Sequence
  Description of Artificial Sequence: Synthetic polynucleotide
gccagcccccgattgggggcgacactccaccatagatcactcccctgtgaggaactactgtcttcacgcagaaagcgtctagccatggcgttagtatgagtgtcgtgcagcctccaggaccccccctcccgggagagccatagtggtctgcggaaccggtgagtacaccggaattgccaggacgaccgggtcctttcttggatcaacccgctcaatgcctggagatttgggcgtgcccccgcgagactgctagccgagtagtgttgggtcgcgaaaggccttgtggtactgcctgatagggtgcttgcgagtgccccgggaggtctcgtagaccgtgcacc

SEQ ID NO: 325 - DNA, 343 bp, Unknown
  Description of Unknown: unclassified Flavivirus sequence
atataaatcccagtttggttaaacctatttcaaggcttaagttgtttattattttatcgccgctcgtgactataaagttgcctagcggagagagataaagaagaaggagttcaaggctcagggcagggcgcaagttccctggtccctaggccgctcgcaggaaggaggagtgaagaagaagaaagagaaggagaggaccaccgccgaaagaaggcaggtgcctcacaagagggccaaccagcgtgttggaccagtggccaacgccggacggcgtggtggcctgctgggacgcctggggattggatggagtgccttcctacaggaagacatcgttcaagccatc

SEQ ID NO: 326 - DNA, 343 bp, Unknown
  Description of Unknown: unclassified Parechovirus sequence
acatggggcaggtgtgctgtgccaagagcaacactacggtggccgagccgatggttcgtcaccacgtagtaggactccgtagtgcttggttacggcggacgtaagtcagttgagtgatgtctaagtggcaaaccatgagtacatggtaaccttgtgtggactcgcgggacggaatttcctatcccattgactccttgtagcaaggtgggtatacccaaccacaatggcagcaccctgggtgggaacccaggggcctggattagtatccagtcacacagcctgatagggtggcggctcagccactgaccagcgtctctaaataattgtgagctgttcatgcacc

SEQ ID NO: 327 - DNA, 343 bp, Teschovirus A
cttgtgcccaacaaaaggctttggtctcttgttgtgtttaaacacagaaattttgttactcggttatgaattcactggattaacccctttgaaagacctgctctggcgcgagctaaagcgcaattgtcaccgggtattgcaccaatggtggcgacagggtacagaagagcaagtactcctgactgggcaatgggactgcattgcatatccctaggcacctattgagatttctctggggcccaccagcgtggagttcctgtatgggaatgcaggactggacttgtgctgcctgacagggtcgcggctggccgtctgtgctttgtatagtcagttgaaattcact

SEQ ID NO: 328 - DNA, 343 bp, Teschovirus A
cttgtgcccaacattggtcctcggacttctgttgtgtttaaacacagaaattcaactattcggttatgaattcattggatcaaccctcttgaaagacctgctctggcgcgagctaaagcgcaattgtcaccaggtattgcaccatcggtggcgacagggtacagaagagcaagtactcctgactgggcaatgggactgcattgcatatccctaggtacctattgagatttctctggggcccaccagcatggagttcctgtatgggaatgcaggactggacttgtgctgcctgacagggtcgcggctggccgtctgtactttgtatagtcagttgaaatgcact

SEQ ID NO: 329 - DNA, 347 bp, Pestivirus A
aattccaaaacagaaatcaggcctagggaacaaaatcctcctcagcgaaggccgaaaagaggctaaccatgcccttagtaggactagcaaattggggggggtagcaacagtggtgagttcattggatggccgaagccctgagtacggggtagtcgtcagtggttcgacgccttaaggaaactaggtctcgagatgccacgtggacgagggcatgcccacggcatatcttaacctgcgcgggggtcgctcaggtgaaagcggcataaatgaccgttatggacacagcctgatagggtgctgcagaggcccactgtattgctactgaaaatctctgctgtacatggcac

SEQ ID NO: 330 - DNA, 347 bp, Unknown
  Description of Unknown: unclassified Picornaviridae sequence
atgtttgtttcatcatatcactatttttgtatcctatcttgattaatcgcttagattggcttggggaagccgatgcgaatttccgccacctcacccccctcaattgtccaaatcagggactgggaaggttttaactaagggcataatttgtcagtggatggtctaggtacagagaatggcgcggtcacttcttctcagtgaacaccgtttgtcctaccctcttaggcccgccatctgctgaatttctgttgcagctggtagtcgcttttgtaattaatcactatagaaatacaatccactttcgtcttctttttgtatccccttctctatagattcgtgtgttttac

SEQ ID NO: 331 - DNA, 348 bp, Pestivirus A
cgaaccactgacgactaccctgtactcagggcttcagccatccaacgaactcaccactgttgctaccccccccgggatgcccttagtaggactagcataccggggggggtagcaacagtggtgagttcgttggatggctgaagccctgagtacagggtagtcgtcagtggttcgacaccttagaatttaggtctcgagatgccacgtggacgagggcacgcccacagcacatcctaacctggacaggggtcgtccaggtgaaagcgggcaaccgttacggacacaacctgatagggtgctgcagaggcccactgtattgctactaaaaatctctgctgtacatggcac

SEQ ID NO: 332 - DNA, 349 bp, Unknown
  Description of Unknown: unclassified Pegivirus sequence
ggacttcggtccccctgttactctgcgagccaccgcagagccagggttggtacgcccgaggtgttagaccccggccgaaagctcctaaccatggggttagtaggacgtggtaaatgccactgaggggttggagagctggtagagcgagtaagtcggcgtaaggcccgagtacgggcctcccagcccgggtcagcctaaacctggctgtgatacccggtgcatggagggcgtgtcccaacgctcgatcgctgtagggtgggtccctgcagttgggtgtggctaccctgctcgtactgcttgatagagtcccggcggacggaccagctctcgtcagtccgtggagttgcac

SEQ ID NO: 333 - DNA, 353 bp, Enterovirus B
cccgtaggacgctctaatactgacatggtgcgaagagtcgattgagctagttagtaatcctccggcccctgaatgcggctaatcctaaccgcggaacacatgctcacataccagtgaggagtgtgtcgtaatgggcaactctgcggcggaaccgactactttgggtgaccgtgtttctttttattctcatactggctgcttatggtgacaattgaaagattgttaccatatagctattggattggccatccggtgacgaatagagcaattatatacttattcgttggatacatcccactcaactttaaagaactaagaactcttaattatatattgcaattaaatttcgcaaa

SEQ ID NO: 334 - DNA, 354 bp, Unknown
  Description of Unknown: unclassified Enterovirus sequence
acccataggacgctctaatgtggacatggtgcgaagagtctattgagctagttagtagtcctccggcccctgaatgcggctaatcctaactgcggagcgcatgcccccaaaccagggggaggtgcgtcgtaacgggcaactctgcagcggaaccgactactttgggtgtccgtgtttccttttatctttgcaatggctgcttatggtgacaattgagagattgttaccatatagctattggattggccatccggtgagcaatagagcgatcatctattcctttattggatttgtaccattggactatactgcctttgtcacattgaaatacattctattgttgaacactataaa

SEQ ID NO: 335 - DNA, 355 bp, Pestivirus K
gcattatgtatgggacatcctaaattggagtgagccccgtggtgagtgggggaaaggggttaaccaggcctctagtaccacaggcaccaatgaacagggcaactcgaacccgagagagaggtaccgaactcttaagccccgagtacggggcagacgtcaccgagtagtacacccaaagaccaccactaggtgtagggtctactgaggctcgggtggacgtgggcgtgcccaaagagaaatcggtggtggacctgggggtcggggccaccatacccctaaacagggtagaccttactgcttgatagagtgccggcggatgcctcgggcaagagtataaaatccgttgtctatcaac

SEQ ID NO: 336 - DNA, 356 bp, Pestivirus D
gaactacatcatactcgtgtacaaaattggacattccaaaactcgattgggttagggagccctcctagcgacggccgaaccgtgttagccatacacgtagtaggactagcagacgggaggactagccatcgtggtgagatccctgagcagtctaagtcctgagtacaggacagtcgtcagtagttcaacgcaaacatgctctgcctgaaatgctacgtggacgaggcatgcccaagactgcttaatctcggcggggtcgccgaggtgaaacacctaccggtgttgggttacagcctgatagggcgctgcagggcccacgtataggctagtataaaaatctctgctgtacatggcac

SEQ ID NO: 337 - DNA, 358 bp, Unknown
  Description of Unknown: unclassified Pestivirus sequence
gttcattctcgtgtacaaaattgggcatataaatttctgattcgattagggaatccctctagcgacggccgaactgggctagccatgcccatagtaggactagcaaacggagggactagccgtagcggtgagctccctgggaagtctaagccctgagtacagggtagtcgtcagtagttcgacgtggacgagagtccatctcgagatgctacgtggacgagggcatgcccaagacataccttaacccaggcgggggtcgtctgggtgaaatcacttagcgtgatgggggtacaacctgatagggtgctgcagaggcccgctattaggctagtataaaaatctctgctgtacatggcac

SEQ ID NO: 338 - DNA, 359 bp, Pegivirus A
gtgatgccagggttggtaggtcgtaaatcccggtcatcttggtagccactataggtgggttttaagggagggttaaggtccctctggcgcttgtggcgagaaagcgcacggtccacaggtgttggccctaccggtgtgaataagggcccgacgtcaggctcgtcgttaaccaataggcaatgccggcgagttgacaaagaccagtgggggccgggcggcgggggaaggacccccgtcgccgcccttcccgggaggggtgggaaatgcatggggccacccagctccgcggcggcctgcagccggggtagcccaagagccttcgggtgagggcgggtggcatttcctttcttgtaccgatc

SEQ ID NO: 339 - DNA, 360 bp, Pestivirus B
atacagattggatgttggcaaaaagtgaatcgataaatagggaaccttcccctcagcgaaggccgaaaggaggctagccatgtccttagtaggactagcaaagagaggggactagcggtagcagtgagttcattggatggccgaatccctgagtacagggaagtcgtcaatggttcgacgctctggcaacaaagagcctcgagatgccatgtggacgagggcatgcccacggcacatcttaacctatgcgggggttgcgtaggtgaaagcatcatcttgagatgttatggacacagcctgatagggtgtagcagagacctgctattccgctagtataaaaaactctgctgtacatggcac

SEQ ID NO: 340 - DNA, 363 bp, Unknown
  Description of Unknown: unclassified Enterovirus sequence
cagggtcgcctttgtgtttgatgggttagtcgctcagtcagttaccccctgatagacctggcagatgaggttggaaacaccccactggtaacagtgttccagcctgcgtggctgcctgcccctctttttgaggggaagcccatatgtagacaaggtgagaagagccgcgtttgctaatcatgagtcctccggcccctgaatgcggctaatccaaccccacagctactgcgcagaaaccactgcgtgggtagtcgtaatgagcaattgtgggacggaaccgactactttgggtgtccgtgtttcctgttttaccttacattgcttatggtcacaacatatatgaaatcgtatatgttgttcacc

SEQ ID NO: 341 - DNA, 365 bp, Pestivirus A
gctcttgtatacaaattggacatccacaaattaaaaatccggcctagggaaaaatccctctcagcgaaggccgaaaagaggctaaccatgcccttagtaggactagcaaaaggagaggggtagcaacagtggtgagttcgttggatggctgaagccctgagtacagggtagtcgtcagtggttcaacacctcggaaagaaggtcttgagatgccacgtggacgagggcatgcccacagcacatcttaacctggacgggggtcgcccaggtgaaagcagttttaaccaactgttatgaacacagcctgatagggtgctgcagaggcccactgcattgctactaaaaatctctgctgtacatggcac

SEQ ID NO: 342 - DNA, 366 bp, Pestivirus C
aggttagttcgttctcgtatgtaatatcggacaaactaaaattctgatttggtttagggcacccctccagcgacggccgaactgggctagccatgcctatagtaggactagcaaacggagggactagccgtagtggcgagctccctgggtggtctaagtcctgagtacaggacagtcgtcagtagttcgacgtgagcaggggctcacctcgagatgctatgtggacgagggcatgcccaggacacaccttaaccctagcgggggtcgctagggcgaaatcacgctatgtgatgggggtacgacctgatagggcgctgcagaggcccactaacaggctagtataaaaatctctgctgtacatggcac

SEQ ID NO: 343 - DNA, 367 bp, Unknown
  Description of Unknown: unclassified Pestivirus sequence
tataagctgggggtgggagcccagcttgtactaaagtttacagcacgtgtgtgaagtttacttagtcctgtagaggtgacggggataacctatgccagtgggtgtgtaccagtaaccattgaactacagggactgcaacctgggagagcacctagagcccctaaggcatgagcacatgccattcgtcaagtggtcagctggaaaggatcacccacctggaaaccactgtggacgagggtattcacccaagggtaactctattaattggggggggccccaattatcaacacaattgtgttgggtgtgctgcctgacagggtcccggctgatggcccaggaagcagtataatatcagttgttttggcac

SEQ ID NO: 344 - DNA, 369 bp, Pestivirus D
gtatacgagagtagctcatgctcgtatacaaaattggacattctaaaagattaattggactaggattccctcccagcgacggccgaaccgggttagccatacctgcagtaggactagcagacgggaggactagctatcgtggtgaggtccctgagtggtctaagtcctgagtacaggacagtcgtcagtagttcgacacaaacttttgtctcgaggtgctacgtggacgagggcgtgcccaagacacactttaaccctggcgggggtcgctagggtgaaagcgcctaacggcgttggaactacagcctgatagggtgctgcagaggcccacgtaccagctagtataaaaatctctgctgtacatggcac

SEQ ID NO: 345 - DNA, 369 bp, Pestivirus E
gtatacgcagttagttcatcctgtgtatacagattggagactctaaaaacaacgattcggaataggggcccgcggcgaagaccgaagacaggctaaccatgccgttagtagggctagcaccaaaacgcgggaactagacacttaggagagtggtctggctactctaagaggtgagtacaccttaaccgtcaagggttctactcctcagttgaggactagagatgccctgtggacgggggcatgcccaagagttagcttagccggggcgggggttgttccggtgaaagtagcaatattgaccacactgcctgatagggcggagcaggccccctaggtagtctagtataaaatgtctgctgtacatggcac

SEQ ID NO: 346 - DNA, 369 bp, Pestivirus K
ggccaattaaagcattatgcgtgggacatcctaaatatttatgagccctgcggtgagtgggggaaagaggttaaccaggcctctagtaccacaggcaccaatggacagggcaactcaaacctgagagagaggtaccgaactcttaagccccgagtacggggcagacgtcaccgagtagtacacccaaagaccaccacttctaggtgtagggtctactgaggctcgggtggacgtgggcgcgcccaaagagaaatcggtggtggacctgggggtcggggccaccatgcccctttacggggtagaccttactgcttgatagagtgccggcggatgcctcaggtaagagtataaaatccgttgttcattaac

SEQ ID NO: 347 - DNA, 370 bp, Pestivirus D
gtatacgaaagtagctcacgttcgtatacaaaattgactgtaccaaatccccaattcggttagggcccctcccagcgacggccgaaccgggttagccatacccgtagtaggactagcaaacgggaggactagcttacgtggtgagatccctgagtggtctaagtcccgagtacggggcagtcgtcagtagttcaacgcaatgtggagttgccttgagatgctacgtggacgagggcatgcccaagacacactttaaccctggcgggggtcgccaggtgaactcacctaatggtgttgggattacagcctgatagggtgctgcagaggcccacgcataagctagtataaaaatctctgctgtacatggcac

SEQ ID NO: 348 - DNA, 370 bp, Pestivirus D
gtatacgagagtagctcaagtctcgtatgcagattggatacacaaaattgttgaattggtgtagggcccccagcgacggccgaactaggctaaccatgcccacagtaggactagcatacggggggactagctttcgtggtgagatccctgagcggtctaagccctgagtacagggtagtcgtcagtagttcgacacaaacgtggttttgtctcgagatgctacgtggacgagggcatgcccatgacacgctttaggcccggcaggggtcgccgggtcgaaaacacctcactgtgttggggttacagcctgatagggtgctgcagaggcccacgcataagctagtataaaaatctctgctgtacatggcac

SEQ ID NO: 349 - DNA, 370 bp, Pestivirus A
gtaaaatactcgtatacatattggaaaagaaaaaaataataattaggcctagggaacaaatcctcctctgcgaaggccgaaaagaggctagccatgcccttagtaggactagcacaatgaggggggtagcaacagtggtgagttcgttggatggcttaagccctgagtacagggtagtcgtcagtggttcgacaccttggcataaaggtctcgagatgccacgtggacgagggcatgcccaaagcacatcttaaccagggcgggggtcgctctggtaaaagcagttagatcaactgttatgaatacagcctgatagggtgctgcagaggcccactgtattgctactaaaaatctctgctgtacatggcac

SEQ ID NO: 350 - DNA, 370 bp, Sicinivirus A
cccgattgctgtcctgcttgtctggtgaactcggctggaagcattcagtttctggatttgctggtttgtggtgattagtagaccccctggaggtacccgtctggatctgaccagggacccgtgactataccgttccggtaattcgggtttaaaactatgaacgtcaccacccattttgttttgtttggttgggctggattgtttgtttagatgctcctagaatccctgttggtgattgtagcacttgttgtagtggtcgtctctcctagtgaattaccccagctgtttgctatttgcatctacaactttgtcttgatttttctctggttatttggtaccttagagctccccaattatcccaccattcatc

SEQ ID NO: 351 - DNA, 370 bp, Deltapapillomavirus 1
tacctaaaggttcggacacaactccgcgcttcagcctccttaccaaaacaggtgggcagccctgtcttatacttagtggaaacgggaaccaaacgaagtgctttcggttccgttgcaaaaagcatttccgcaggcattacgagcacgtcacgaccacctggtggactgtgggcgagcgtggatctgagagacagggggatgcctgcattttagtaactttcaaaaactcctgtcaaagacaggacttcctcaaaactgtgcctttgccgccaggaatgcaagcgcaaggaattaccatgcatttagactattaacagacaatcttgcattgcacctgcagtgaaggacatctttgtgcagaaaaactgtg

SEQ ID NO: 352 - DNA, 371 bp, Pestivirus A
agttctcgtatacacattggacactctaaaaatatattgtaattaggtctaggggactaaatcctccttagcgaaggccgaaaagaggctagccatgcccttagtaggactagcacaataaggggggtagcaacagtggtgagttcgttggatggctgaagccctgagtacagggtagtcgtcagtggttcgacgcctcggaggacaggcctcgagatgccacgtggacgagggcacgcccacagcacatcttaacctgaacgggggtcgtttaggtgaaagcggtttaaccaaccgctacgaatacagcctgatagggtgctgcagaggcccactgtattgctactgaaaatctctgctgtacatggcac

SEQ ID NO: 353 - DNA, 372 bp, Pestivirus D
gtatacgggagtagctcatacccgtatgcaaaattggacgtctcaaaattcgattgggtgagggagccctcctagcgacggccgaaccgtgttaaccatacacgtagtaggactagcaaacgggaggactagccatcgtggtgagatccctgagcagtctaagtcctgagtacaggatagtcgtcagtagttcaacgcaggcgtggttctgccttgagatgctacgtggacgagggcatgcccaagacatgctttaatcccgacgggggtcgccgggatgaaaacacctactggtgttgggattacagcctgatagggtgttgcagagacccacgtataggctagtataaaaatctctgctgtacatggcat

SEQ ID NO: 354 - DNA, 372 bp, Pestivirus D
gtatacgggagtagctcatgcccgtatacaaaattggatattccaaaactcgattgggttagggagccctcctagcgacggccgaaccgtgttaaccatacacgtagtaggactagcagacgggaggactagccatcgtggtgagatccctgagcagtctaaatcctgagtacaggatagtcgtcagtagttcaacgcaggcacggttctgccttgagatgctacgtggacgagggcatgcccaagacttgctttaatctcggcgggggtcgccgaggtgaaaacacctaacggtgttggggttacagcctgatagggtgctgcagaggcccacgaataggctagtataaaaatctctgctgtacatggcac

SEQ ID NO: 355 - DNA, 372 bp, Pestivirus C
gtatacggtgttagctcatcaccgtatgcaagattggacaaaccaaatctcaatctggctcagggcatccctccagcgacggccgaactgggctagccatgctcatagtaggactagcaaacggagggactagccgtagtggcgagctccctgggtggtctaagtcctgagtacaggacagtcgtcagtagttcgacgtaagcggaagctcacctcgagatgctacgtggacgagggcatgcccaagacacaccttaaccctggcaggggtcgccagggtgaaatcacactatgtgaggggggtacgacctgatagggtgctgcaggggcccactattaggctagtataaaaaactctgctgtacatggcac

SEQ ID NO: 356 - DNA, 372 bp, Unknown
  Description of Unknown: unclassified Megrivirus sequence
tgggctcttttccgtacggtggcgtgacgaaccaccgtgcgtgaccctgctaagtcgtctgtgcctctcgggcatgtcgtggctccggctccgatatgcttgggacaacggatgggcggcttggtggggctagtcaccccgtttttggacttcctggttttgactccctctttgtctttcgggcttggtccaccgacggactaattggtatctgcaaggcctatagcctcgttctgaaatgccctagccaaagggacgtagtaggatcttggtgtttcccttgcagctctaccgaccgtattagctagagctaggactgtgcaggatgtttcagacctctttttgagcaatctgggacaagaccccggtctg

SEQ ID NO: 357 - DNA, 373 bp, Pestivirus A
actagataaaatactcgtatacgtattgggcatttaaaaatataattaggcctagggaataaatccccctctgcgaaggccgaaaagaggctagccatgcccttagtaggactagcataatgaggggggtagcaacagtggtgagttcgttggatggcttaagccctgagtacagggtagtcgtcagtggttcgacgccttgtcgcaaaggtctcgagatgccacgtggacgagggcacgcccaaagcacatcttaacctgagcgggggtcgctcaggcgaaagcagtttaaccaactgttacgaatacagcctgatagggtgctgcagaggcccactgtattgctactaaaaatctctgctgtacatggcac

SEQ ID NO: 358 - DNA, 373 bp, Pestivirus C
gtatacgaggttagttcattctcgtatgcattattggacaaatcaaaatttcaatttggttcagggcctccctccagcgacggccgaactgggctagccatgcccatagtaggactagcaaacggagggactagccatagtggcgagctccctgggtggtctaagtcctgagtacaggacagtcgtcagtagttcgacgtgggcagaggcccatctcgagatgctatgtggacgagggcatgcccaagacacaccttaaccctggtgggggtcgctagggtgaaatcacacaacgtgatgggggtacgacctgatagggtgctgcagaggcccactaacaggctagtataaaaatctctgctgtacatggcac

SEQ ID NO: 359 - DNA, 373 bp, Pestivirus C
gtatacgaggttagttcattctcgtatgcatgattggacaaattaaaatttcaatttggatcaggtcctccctccagcgacggccgaagtgggctagccttgcccgcagttggactagcaaacggagggactagccgtattggcgagctccctgggtggtctaagtcctgagtacaggacagtcgtcagtagttcgacgtgagcagaagcccacctcgatatgctatgtggacgagggcatgcccaagacacatcttaaccctagcgggggtcgctagggtgaaatcacaccacgtgatgggagtacgacctgatagggtgctgcagaggcccactattaggctagtataaaaatctctgctgtacatggcac

SEQ ID NO: 360 - DNA, 373 bp, Unknown
  Description of Unknown: unclassified Sicinivirus sequence
gtgtcattaaggtgtgtttggaagttcgaattagctggtttgtggtgattagtagaccccctggaggtacccaattcggatctgaccagggacccgtgactataccgctccggtaattcgggtttaaaacaatgaacgtcaccacacaattacttttctcattttattttcatcattgtcttcctatttaccgattacactcgatttccttggatgttcctggagatttccctggttacctggaccctcattattgttgttgtttcacccagcgagctgtcccaattgcttattatttgcgcttacaacttcgtcctaatatttttctggttgatcgggttgattgagctcccgggctatcctgccattcaac

SEQ ID NO: 361 - DNA, 374 bp, Pestivirus C
gtatacgaggttagctcattctcgtatacatgatcggacaaatcaaaatctcaatttggttcagggcctccctccagcgacggccgaactgggctagccatgcccacagtaggactagcaaacggagggactagccatagtggcgagctccctgggtggtctaagccctgagtacagggcagtcgtcagtagttcgacgtgagcagaagcccacctcgagatgctatgtggacgagggcatgcccaagacacaccttaactctagcgggggttgctagggtgaaatcacaccatgtgatgggagtacgacctgatagggcgctgcagaggcccactattaggctagtataaaaaatctctgctgtacatggcac

SEQ ID NO: 362 - DNA, 374 bp, Pestivirus D
gtatacggggtagctcatgcccgtgtacaaaattggactttccaaaaaactcaattggattagggagccctcctagcgacggccgaaccgtgttagccatacacgtagtaggactagcagacgggaggactagccatcgtggtgagatccctgagcggtctaagtcctgagtacaggatagtcgtcagtagttcaacgcagacatggttctgccttgagatgctacgtggacgagggcatgcccaagacgcgctttaatcctggcgggggtcgccagggtgaaaacacataccagtgttggggttacagcctgatagggtgctgcagaggcccacgtataggctagtataaaaaatctctgctgtacatggcac

SEQ ID NO: 363 - DNA, 374 bp, Pestivirus C
gtatacgaagttagctcaccctcgtatacataattgggcaggtcaaaattccaatttggttcagggcccccctccagcgacggccgaactgggctagccatgcccacagtaggactagcagacggagggactagccgtagtggcgagctccctgggtggtctaagtcctgagtacaggacagtcgtcagtagttcgacgtgagcagcagctcatctcgagatgctatgtggacgagggcatgcccaagacacaccttaatcctggcgggggtcgccagggtgaaatcacactgcgtgatgggggtacgacctgatagggtgctgcagaggcccactattaggctagtataaaaaatctctgctgtacatggcac

SEQ ID NO: 364 - DNA, 374 bp, Pestivirus C
gtatacgaggttagctcgttctcgtatacgatattggatacactaaatttcgatttggtctagggcacccctccagcgacggccgaaatgggctagccatgcccatagtaggactagcaaacggagggactagccgtagtggcgagccccctgggtggtctaagtcctgagtacaggacagtcgtcagtagttcgacgtgagcaccagcccacctcgagatgctacgtggacgagggcatgcccaagacacaccttaaccctggcgggggtcgctagggtgaaatcacattatgtgatgggggtacgacctgatagggtgctgcagaggcccactattaggctagtataaaaaaatctctgctgtacatggcac

SEQ ID NO: 365 - DNA, 374 bp, Pestivirus A
ggaaaaaacactcgtatacatattgggcgattctaaaacgataattaggcctagggaatgaatccccttcagcgaaggccgaaaagaggctagccatgcccttagtaggactagcataatggagggggtagcaacagtggtgagttcgttggatggcttaagccctgagtacagggcagtcgtcagtggttcgacaccttggaagaacaaggcctcgagatgccacgtggacgagggcatgcccaaagcacatcttaacccgggcgggggtcgctcaggtgaaagcagtttaaccaactgttacgaatacagcctgatagggtgctgcagaggcccactgtattgctactaaaaatctctgctgtacatggcac

SEQ ID NO: 366 - DNA, 374 bp, Unknown
  Description of Unknown: unclassified Enterovirus sequence
ggtacctgtggctaaaagccacaggacgctagttgtgaacaaggtgtgaagagtctattgagctacaagagagtcctccggcccctgaatgcggctaatcccaaccatggagcaagtgctcacgcaccagtgagtagcttgtcgtaacgggtaactctgtggcggaaccgactactttgggtgtccgtgtttccttttatttttataatggctgcttatggtgacaatctcagattgttatcataaagcgaattggattggccatccggtgaaagtgagatatattatatacctttttgttggatttactccaatcaattccttcacttatcagctcatcactataactctgttgattagaagcatataccaca

SEQ ID NO: 367 - DNA, 375 bp, Pestivirus C
gtatacgaggttagttcgttctcgtgtacaatattggacaagaccaaaattccgatttggcctagggcacccctccagcgacggccgaactgggctagccatgcccacagtaggactagcaaacggagggactagccgtagtggcgagctccctgggtggtctaagtcctgagtacaggacagtcgtcagtagttcgacgtgagcaggagcccacctcgagatgctatgtggacgagggcatgcccaagacacaccttaaccctggcgggggtcgccagggtgaaatcacaccatgtgatgggggtacgacctgatagggtgctgcagaggcccactaacaggctagtataaaaaatctctgctgtacatggcac

SEQ ID NO: 368 - DNA, 375 bp, Pestivirus I
gtatacgagattagctcacactcgtatacaaattggatatgacaaattcaaattggactagggactccctctagcgacggccgaacggggttaaccatacctctagtaggactagcaaacggagggactagctatagtggtgagctccctgggaggtctaagttccgagtacggaatagtcgtcagtggttcaacgccggtaaaccccggccttgagatgccacgtggacgagggcatgcccaagacacaccttaacctgggcgggggtcgtccaggtgaaaacacccctttttgggtgctgggggtacagcctgatagggtgctgcagaggcccactaataggctagtataaaaatctctgctgtacatgagac

SEQ ID NO: 369 - DNA, 375 bp, Pestivirus A
atttagaaaaggttctcgtatacgtattgggcaatcaaaaataatgattaggcctagggaacaaaccctctcagcgaaggccgaaaggaggctagccatgcccttagtaggactagcaaaatgaggggggtagcaacagtggtgagttcgttggatggctgaagccctgagtacagggcagtcgtcagtggttcgacacctaggatggtaggtctcgagatgccacgtggacgagggcatgcccacagcacatcttagcctgagcgggggtcgcccaggtgaaagcggtacagacagaccgctacgaatacagcctgatagggtgctgcagaggcccactgcaatgctactaaaaatctctgctgtacatggcac

SEQ ID NO: 370 - DNA, 376 bp, Pestivirus D
gtatacgagagtagttcaggctcgtatgcaaaattgggtgtttcaaattttaaaattcgactagggccaccccccagcgacggccgaaacgggttagccatacccttagtaggactagcggacggggggactagccatcgtggtgagatccctgagcggtctaagtcctgagtacaggacagtcgtcagtggttcgacgcggtcatcgcatcgtctcgagatgccacgtggacgagggcatgcccaagacacgctttaatcctggcgggggtcgccagggtgaaaacgtcctagtggcgttggggttacagcctgatagggtgctgcagaggcccacgcataggctagtataaaaaaactctgctgtacatggcac

SEQ ID NO: 371 - DNA, 376 bp, Pestivirus D
gtatacgagagtagctcatgctcgtatacagattggacacgctaaattttttaattagggttagggtgttccccccagcgacggccgaactgggttagccatacccatagtaggactagcagacgggaggactagccatcatggtgaggtacctgagcggtctaagccctgagtacagggcagtcgtcagtagttcgacactaacttggcttagtctcgagatgctacgtggacgagggcatgcccatgacacgctttagccccagcgggggtcgttggggtgaaaacacattacggtgctggtatcacagcctgatagggtgctgcagaggcccatgaataggctagtataaaaaatctctgctgtacatggcac

SEQ ID NO: 372 - DNA, 376 bp, Pestivirus A
agatttaggaaagctctcgtatgcatattgggcaatctaaaataataattagacctagggaacaatccctctcagcgaaggccgaaaggaggctagccatgcccttagtaggactagcaaaatgaggggggtagcatcagtggtgagttcgttggatggctgaagccctgagtacagggcagtcgtcagtggttcgacgcctaggatgataggtctcgagatgccacgtggacgagggcatgcccacagcacatcttagcccgagcgggggtcgcccgggtgaaaacggtaaatacagaccgctacgaatacagcctgatagggtgctgcagaggcccactgtaatgctactaaaaaactctgctgtacatggcac

SEQ ID NO: 373 - DNA, 377 bp, Pestivirus D
gtatacgagagtagttcatgctcgtatacagaattggatattctaaaatttgttaattggactagggtctcctcctggcgacggccgaaccgggttagccatacccgtagtaggactagcatatgggaggactagctttcgtggtgaggttcctgagtggtctaagtcctgagtacaggatagtcgtcagtagttcgacacaaacggagttttagtctcgagatgctacgtggacgagggcatgcccaagactcactttaatcctggcgggggtcgccagggtgaaaacgcccaatggcgttggaactacagcctgatagggtgctgcagaggcccacgcaacagctagtataaaaaatctctgctgtacatggcac

SEQ ID NO: 374 - DNA, 377 bp, Pestivirus I
gtatacgagattagctcatactcgtgtacaaattggacgtagcaaatttaaaaattcggatagggtccccatccagcgacggccgaacggggttaaccatacctctagtaggactagcagacggatggactagccacagtggtgagctccctgggaggtctaagttctgagtacagaacagtcgtcagtagttcaacgctggtaaaccccagccttgagatgctacgtggacgagggcatgcccaagacacaccttaacctggacgggggtcgtccaggtgaaagtacccatctttgggtgctgggagtacagcctgatagggcgctgcagaggcccactgacaggctagtataaaaatctctgctgtacatggaac

SEQ ID NO: 375 - DNA, 377 bp, Pestivirus A
agatttagctcaatctctcgtatgcacattgggcaagcaaaataacaattaggcctagggaaaaaataatcctcctcagcgaaggccgaaaagaggctagccatgcccttagtaggactagcatattggggagggtagcaacagtggtgagttagttggatggctgaagccctgagtacagggtagtcgtcagtggttcgacgccttagaatacaggcctcgagatgccacgtggacgagggcatgcccacagcacatcttaacctgagcgggggtcgcccaggtaaaagcggatgaaaaccgttactaacacagcctgatagggtgctgcagaggcccactgcactgctactaaaaatctctgctgtacatggcac

SEQ ID NO: 376 - DNA, 377 bp, Pestivirus K
gcataatgcttagattggctgcattatgtttgggacatcctaaatttttatgagccctgtggtgagtgggggaaaggggttaaccaggcctctagtaccacaggcaccaatggacagggcaactcgaacctgagagagaggtaccgaactcttaagtcccgagtacggggcagacgtcaccgagtagtacacccaaagaccaccacttttaggtgtagggtctactgaggctcgggtggacgtgggcgtgcccaaagagaaatcggtggtggacccgggggtcgggaccaccatgcccttcacggggcagaccttactgcttgatagagtgccggcggatgcctcgggtgagagtataaaatccgttgtttattaac

SEQ ID NO: 377 - DNA, 378 bp, Pestivirus B
ttgcatggtacgggctgagctacggattggatgttgacaaattttgaattggcaaagtaggtaactttcccctcagcgaaggccgaaaagaggctagccatgcccttagtaggactagcaaaaggaggggactagcggtagcagtgagttcattggatggccgaacccctgagtacaggggagtcgtcaatggttcgacactccatcattcatggagtctcgagatgccatgtggacgagggcatgcccacggcacatcttaacctatgcgggggttgcatgggtgaaagcgccattcgtggcgttatggacacagcctgatagggtgtagcagagacctgctattccgctagtaaaaaactctgctgtacatggcac

SEQ ID NO: 378 - DNA, 378 bp, Pestivirus K
gcataatgctttgattggctgcattatgtgttggacacctcaaattaccacgcgccctgcggtgagtgggggaaaggggttaaccaggcctctagtaccacagacaccaattggcagggcaactcaaacctgagagagaggtaccgaactcttaagccccgagtacggggcagacgtcaccgagtagtacacccaaagaccaccatgtttaggtgtagggtctactgaggcttgggtggacgtgggcgtgcccaaagagaaatcggtggtggacctgggggtcgggcccaccacacccctttatggggtggaccttactgcttgatagagtgccggcggatgcctcaggtaagagtataaaatccgttgtttattaac

SEQ ID NO: 379 - DNA, 378 bp, Pestivirus K
gcataatgctttgattggctgcattatgtgtgggacatcctaaattgtcataagccctgcggtgagtgggggaaaggggttaaccaggcctctagtaccacaggcacctatggacagggcaactcaaacctgagagagaggtaccgaactcttaagtcccgagtacggggcagacgtcaccgagtagtacacccaaagaccaccatttctaggtgtagggtctactgaggctcgggtggacgtgggcgtgcccaaagagaaatcggtggtggacctgggggtcggggccaccataccccgttatggggtagaccttactgcttgatagagtgccggcggatgcctcgggtaagagtataaaatccgttgtctattaac

SEQ ID NO: 380 - DNA, 378 bp, Pasivirus A
gcataatgctttgattggctgcattatgtatggaacatcctaaattgttgtgagccccgtggtgagtgggggaaaggggtttaccaggcctctagtaccacaggcaccgatagacggggcaactcgaacctgagagagaggtaccgaactcttaagtcccgagtacggggcagacgtcaccgagtagtacacccaacgaccaccactcctaggtgtagggtctactgaggctcgggtggacgtgggcgcgcccaaagagaaatcggtggtggacctgggggccggggccaccatgctcctttacggggtagaccttactgcttgatagagtgccggcggatgcctcgggtaagagtataaaatccgttgtctattatt

SEQ ID NO: 381 - DNA, 378 bp, Pestivirus B
gcttttgaccagtggctctgggttacttagccaagtccctttctcttattttcactagtttatgttgtgtgttgtctgttttgttttgtttaaattgtatacaagatccttcccgccgacacagacctcgacagtctggtgtaggagggttggtgatattaatttgccccaaaagagtgaccgtgatacgtggaaaccatgagtacatgtgtatccgtggaggatcgcccgggactggattccatatcccattgccatcccaacaaacggagggtatacccaccacgtgcgcgtttgcagtgggaatctgcaaatttagtcatactgcctgatagggtgtgggcctgcactttggggtactcaggctgttcatataat

SEQ ID NO: 382 - DNA, 379 bp, Pestivirus C
tcctcgttgaaattctcgtatacagattgggtgttggcaaacagttaattagtgaagtagggaaccttcccccctctgcgaaggccgaaaagaggctaaccatgcccttagtaggactagcaaaaagagggggctagcggtagcagtgagtttattggatggccgaatccctgagtacagggaagtcgtcaatggttcgacactctggtaatataagagtctcgagatgccatgtggacgagggcatgcccacggcacatcttaacctatgcgggggttgcatgggtgaaagcaccatttacggtgttataaacacagcctgatagggtgtagcagagacctgctatcccgctagtaaaaactctgctgtacatggcac

SEQ ID NO: 383 - DNA, 379 bp, Pestivirus K
gcatactcaggacttagaccaccctcgcatctgcatgatatcggacaaatcaaatttcaatttggttcagggcctccctccagcgacggccgaactgggctagccatgcccacagtaggactagcaaacggagggactagccgtagtggtgagctccctgggtggtctaagtcctgagtacaggacagtcgtcagtagttcgacgtgagcagaagcccacctcgagatgctacgtggacgagggcatgcccaagacacaccttaaccctagcgggggtcgctagggtgaaatcacaccacgtgatgggagtacgacctgatagggtgctgcagaggcccactattaggctagtataaaaatctctgctgtacatggcac

SEQ ID NO: 384 - DNA, 379 bp, Pestivirus K
gcataatgctttgattggctgcattatgtatgggacatcctaaattgctacgagccctgcggtgagtgggggaaaggggttaaccaggcctctagtaccacaggcaccaataaacagggcaactcgaacctgagagagaggtaccgaactcttaagtcccgagtacggggcagacgtcactgagtagtacacccaaagaccaccacatctaggtgtagggtctactgaggctcaggtggacgtgggcgtgcccaaagagaaatcggtggtggacctgggggtcgggtccaccatgccccctttagggggtagaccttactgcttgatagagtgccggcggatgcctcgggtaagagtataaaatccgttgttcattaac

SEQ ID NO: 385 - DNA, 380 bp, Unknown
  Description of Unknown: unclassified Sicinivirus sequence
tgcataatgcttcgattggctgcattatgtgtgggacatcctaaattgttaagcgccctgcggtgagtgggggaaaggggttaaccaggcctctagtaccacaggcaccattggacagggcaactcgaacctgagagagaggtaccgaactcttaagctccgagtacggggcagacgtcaccgagtagtacacccaacgaccaccatgtttaggtgtagggtctactgaagctcgggtggacgtgggcgtgcccaaagagaaatcggtggtggacctgggggtcgggcccaccatgccccccttacggggtagacctcactgcttgatagagtgccggcggatgcctcaggtgagagtataaaatccgttgttcgttaac

SEQ ID NO: 386 - DNA, 380 bp, Teschovirus A
ttttgtcccgattgttgcaacattggcttggggaaccgaactcggttgcatttaagttgtgaacttgttggtctgtgatgattagtagaccccctggaggtacccgtctggatctgaccagggacccgtgactataccgttccggtaattcgggtttaaaacaatgaacgtcatcactcaacattctttcccattttattttgtatcttactgtcttagtatgctcattgagatttcgctggtagttgttgctttggttgtagtggttgtttcgcacagtgagtctcatcagcttctcacagtttgtatctacaattttgctttgaccttcctttggctgttcggatttcttgaacttcctaactatcctgctgttcaac

SEQ ID NO: 387 - DNA, 380 bp, Unknown
  Description of Unknown: unclassified Pestivirus sequence
ttggaagctaggtacttgttacgctagttttggattgtcttgtgcccaacattagtctttggacttctgttgtgtttaaacacagaaatttgaacatttggctatagattcacaggataaaccctttgaaagacctgctctggcgcgagctaaagcgcaattgtcaccgggtattgcaccaatggtggcgacagggtacagaagagcaagtactcttgactgggtaatgggactgcgttgcatatccctaggcacctattgagatttctctggggcccaccagcgtggagttcctgtatgggaatgcaggactggacttgtgctgcctgacagggtcgcggctggccgtctgtactttgtatagtcagttgaaactcact

SEQ ID NO: 388 - DNA, 381 bp, Pestivirus Giraffe-1
gtatagcagcagtagctcaaggctgctatacgattggacataccaaattccaattggtgttagggaccacctaggtgaaggccgacgacaggtagccattcctgttagtaggacgaaccgttatggtggactggttgctcaggtgagcaggctgcaatgcgtaagtggtgagtacaccacagccgtcaaaggtgccactggtaaggatcacccactggcgatgccttgtggacgggggcgtgcccaacgcaatgttagcggtggcgggggctgccatcgtgaaagctaggtcttgatggaccttgttgcctgtacagtctgataggatgccggcggatgccctgtgacagccagtataaagaatatccgttgtgattgcac

SEQ ID NO: 389 - DNA, 381 bp, Pestivirus G
gtatacgagattagctcatcactcgtatacataatcggatataaccaaaacaatgatttggcataggaaataccccgatgcgaaggccgaaacaggctaaccatgcctttagtaggactagcacaaaatcggggactagccaaggtggcgagcttcctggatgaccgaagtcctgagtacaggacagtcgtcaacagttcaacgcgcaggacaggtctgcgtcttgatatgctgtgtggacgagggcatgcccacggtacatcttaacccagccgggggtcggttgggtgaaagtccaataggactggaagtacggcctgatagggtgtagcagagacccacctgttaggctagtataaaatactctgctgtacatggcac

SEQ ID NO: 390 - DNA, 382 bp, Pestivirus A
gtatacgagtttagctcaatcctcgtatacaatattgggcgtcaccaaatatagatttggcataggcaacaccccgatgcgaaggccgaaaagggctaaccatgcccttagtaggactagcaaaaaatcggggactagcccaggtggtgagcttcctggatgaccgaagccctgagtacagggcagtcgtcaacagttcaacacgcagaataggtttgcgtcttgatatgctgtgtggacgagggcatgcccacggtacatcttaacctatccgggggtcggataggcgaaagtccagtattggactgggagtacagcctgatagggtgttgcagagacccatctgataggctagtataaaaaactctgctgtacatggcac

SEQ ID NO: 391 - DNA, 382 bp, Unknown
  Description of Unknown: unclassified Pestivirus sequence
gtatacgagaattagatcaatctctcgtatacacattgggcatcccaaacagcaattaggcatagggaaaatcctcctcagcgaaggccgaatagaggctagccatgcccttagtaggactagcaaattgaggggggtagcagcagtggcgagttcgttggatggctgaagccctgagtacagggtagtcgtcagtggttcgacgccttaggatctaaggcctcgagatgccacgtggacgagggcatgcccacagcacatcttaatccgagcgggggtcgctcgggtgaaagctgttgtgctaacagttatgaacacggcctgatagggtgctgcagaggcccactgtgttgctactaaaaatctctgctgtacatggcac

SEQ ID NO: 392 - DNA, 382 bp, Pestivirus A
gtatacacaaggttagctcaatccattgtgtgtacgattggatgttgcaaatttataatttgagatatagggacccattcatcacagcgaaggccgaacaagggtagccaatcccttcattaggactagcacaagtgatggactggagacgtggatgagtgagctgtagagaggaagtggtgagtacaccacagtcgtcaagagtactaccggtaaggatcacccgctagttatgctctgtggacgagggcatgcccaccttttctactagataccccgggggttggggtgtcgaaagtcgaaatatcgattgctcacacagtctgataggatgccggcggatgctccacgtataccagtataaaaatccgttgaatagcac

SEQ ID NO: 393 - DNA, 383 bp, Pestivirus H
atgtatacgagaatttgcctaacctcgtatacatattgggcattctaaaaataaattaggcctaagggacaaatcctccttagcgaaggccgaaaagaggctagccatgcccttagtaggactagcaaaacaaggagggtagcaacagtggtgagttcgttggatggctgaagccctgagtacagggtagtcgtcagtggttcgacgcttcgtgtgacaagcctcgaggtgccacgtggacgagggcatgcccacagcacatcttaacctgagcgggggtcgttcaggtgaaagcggtttaaccaaccgctacgaatacagcctgatagggtgctgcagaggcccactgtattgctactaaaaatctctgctgtacatggcac

SEQ ID NO: 394 - DNA, 383 bp, Pestivirus A
gtatacgcccagttagttcaggtggacgtgtacgattgggtatcccaaattaataatttggtttagggactaaatcccctggcgaaggccgaaacaggttaaccatacctttagtaggacgagcataatgggggactagtggtggcagtgagctccctggatcaccgaagccccgagtacggggtagtcgtcaatggttcgacgcatcaaggaatgcctcgagatgccatgtggacgagggcgtgcccacggtgtatcttaacccaggcgggggccgcttgggtgaaatagggttgttatacaagcctttgggagtacagcctgatagggtgttgcagagacctgctacaccactagtataaaaactctgctgtacatggcac

SEQ ID NO: 395 - DNA, 383 bp, Pestivirus A
gtatacgagaattagttaaaactatcgtatacacattgagcattccaaaatgataattggacctagggaacaatccctcccagcgaaggccgaaaagaggctagccatgcccttagtaggactagcaaaatggggggggtagcaacagcggtgagttcgttggatggccgaagccccgagtacggggcagtcgtcagtggttcgacgcctggcgcgacaggcctcgagatgccacgtggacgagggcacgcccacggcacatcttagccagagcgggggtcgctcgggtgaaagtggtcaaacagactactacgaatacagcctgatagggtgctgcagaggcccgctgtaatgctactaaaaatctctgctgtacatggcac

SEQ ID NO: 396 - DNA, 384 bp, Pestivirus A
gtatacgagaatttgcctaggacctcgtttacaatatgggcaatctaaaattataattaggcctaagggacaaatcctcctcagcgaaggccgaaaagaggctagccatgcccttagtaggactagcaaaataaggggggtagcaacagtggtgagttcgttggatggctgaagccctgagtacagggtagtcgtcagtggttcgacgcttcggaggacaagcctcgagataccacgtggacgagggcatgcccacagcacatcttaacctggacgggggtcgttcaggtgaaaacggtttaaccaaccgctacgaatacagcctgatagggtgctgcagaggcccactgtattgctactgaaaatctctgctgtacatggcac

SEQ ID NO: 397 - DNA, 384 bp, Pestivirus A
gtatacgagatttagaaaagtctctcgtatacacattggacataacaaaataacaattaggcctagggaacgaatccctctcagcgaaggccgaaaagaggttaaccatacccttagtaggactagcaaacgagaggggtagcaatggtggtgagttcgttggatggctgaagccctgagtacagggtagtcgtcaatggttcgacacctatggaacgtaggtctcgagatgccatgtggacgagggcatgcccacagcacatcttaactttggcaggggtcgccaaagtgaaagtggcctaaccaaccactacgaacacagcctgatagggtgctgcagaggcccaccttcttgctactaaaaatctctgctgtacatggcac

SEQ ID NO: 398 - DNA, 384 bp, Pestivirus A
gtatacaggaattaggaaaagctcctgtatacaaattgggcaattaaaaattgaagattaggcctagggaaagatccctctcagcgaaggccgaaaagaggctagccatgcccttagtaggactagcaaaatgagaggggtagcaacagtggtgagttcattggatggctgaagccctgagtacagggtagtcgtcagtggttcgacacctcggaaagaaggtctcgagatgccacgtggacgagggcatgcccacagcacatcttaacctggacgggggtcgcccaggtaaaagcagtttaactaactgttatggacacagcctgatagggtgctgcagaggcccactgcattgctactaaaaatctctgctgtacatggcac

SEQ ID NO: 399 - DNA, 384 bp, Unknown
  Description of Unknown: unclassified sequence
cctacctcaagcagcagtagcagtagaaaagcagagaagcgctctcaaggtctgcaggttggagaatgagcgtaagaggaagaagggttgaagatatagagaggtgatagcaaggaggaggtgctcaggttaggagaccaatggtagcagggggtaagggtactttccctagttgagatagctatatatggctgggggaggtgctgggattgtttaaagattgtctaaatgtggcgcaagttctgttaatattttacctgacctttaccgtaaaaggaacaaggaagcatgtctttgcattacataacgcatgagtggttttaatctgttaccaattaacagagtacggtcagggttcgttgcggcttcctttgatacgtgggc

SEQ ID NO: 400 - DNA, 385 bp, Pestivirus A
gtatacgagagttagataaaaatactcgtatacacattgggcaattaaaagtaataattaggcctagggaacgaatcctcctccgcgaaggccgaaaagaggctagccatgcccttagtaggactagcatagcgaggggggtagcaacagtggtgagttcgttggatggcttaagccctgagtacagggtagtcgtcagtggttcgacgccttaacatgaaggtctcgagatgccacgtggacgagggcacgcccaaagcacatcttagcccgagcgggggtcgctcggacgaaaacagtttgatcaactgctacgaatacagcctgatagggtgctgcagaggcccactgtattgctactaaaaatctctgctgtacatggcac

SEQ ID NO: 401 - DNA, 385 bp, Unknown
  Description of Unknown: unclassified vectors sequence
gtatacgagaactagataaaatactcgtatacatattggacaacagaaaataactattaggcctagggaatgaatccctctcagcgaaggccgaaaggaggctagccatgcccttagtaggactagcataatgaggggggtagcaacagtggtgagttcgttggatggcttaagccctgagtacagggtagtcgtcagtggttcgacgcctcggtataaaggtctcgagatgccacgtggacgagggcacgcccaaagcacatcttaacctgagcgggggtcgcccaggcaaaagcagatcgaccaatctgttacgaatacagcctgatagggtgctgcagaggcccactgtattgctactaaaaatctctgctgtacatggcac

SEQ ID NO: 402 - DNA, 385 bp, Pestivirus B
gtatacgaaattagctaaagtactcgtatacggattggacgttggcaaacattgaattgacaaggtagggaattttcccctcagcgaaggccgaaaagaggctagccatgcccttagtaggactagctaaaagaggggactagcggtagcagtgagttcattggatggccgaatccctgagtacagggaagtcgtcaatggttcgacactccgtcagtcgaggagtctcgagatgccatgtggacgagggcttgcccacggcacatcttaacccatgtgggggttgcatgggtgaaagcaccattctaggtgttatggacacagcctgatagggtgtagcagagacctgctattctgctagtaaaaactctgctgtacatggcac

SEQ ID NO: 403 - DNA, 385 bp, Pestivirus K
atatggggcataatgcatagattggctgcattatgtgtataacatcccaaattgccataggctctgtggtgagtgggggaaaggggttaaccaggcctctagtaccacaggcaccatttaacagggcaactcaaacctgagagagaggtaccgaactcttaagcctcgagtacggggcagacgtcaccgagtagtacacccaacgaccaccacatttaggtgtagggtctactgaggctcgggtggacgtgggcatgcccaaagagaaaacggtgggggacctgggggtcgggtccgccatgcccctcaatggggtagaccttactgcttgatagagtgccggcggatgcctcaggtaagagtataaaatccgttgtttattaac

SEQ ID NO: 404 - DNA, 385 bp, Pestivirus B
gtatacgagattagctaaagtactcgtatacggattggacgtcgacaaactttgaattggcaacacagggaaccttcccctcggcgaaggccgaaaagaggctagccatgcccttagtaggactagacaaaggaggggactagtggtagcagtgagtccattggatggccgaacccctgagtacaggggagtcgtcaatggttcgacactcctttagtcgaggagtctcgagatgctatgtggacgagggcatgcccacggcacatcttaacccacgcgggggttgcgtgggtgaaagcgccattcgtggcgtcatggacacagcctgatagggtgtagcagagacctgctactccgctagtaaaaactctgctgtacatggcac

SEQ ID NO: 405 - DNA, 386 bp, Pestivirus B
gtatacgagattagctaaagtactcgtatacagattggatgttgacaaaatattgaattgacaaggtagggaattttcccctcagcgaaggccgaaaagaggctagccatgcccttagtaggactagcaaaaggaggggactagcggtagcagtgagttcattggatggcctaatccctgagtacagggaagtcgtcaatggttcgacactccatcagttgcggagtctcgagatgccatgtggacgagggcatgcccaaggcacatcttaacctatgcgggggttgcataggcgaaagcaccattcgtggtgttatggacacagcctgatagggtgtagcagagacctgctattccgctagtaaaaactctgctgtacatggcac

SEQ ID NO: 406 - DNA, 386 bp, Pestivirus A
gtgtatacgagatttagaaaaagctcttgtatacatattgggcaatctaaacaacaatcaggcctagggaattaatcctcctcggcgaaggccgaaaagaggctagccatgcccttagtaggactagcataacgaggggggtagcaacagtggtgagttcgttggatggcttaagccctgagtacagggtagtcgtcagtggttcgacgcctcggaaatagaggtctcgatatgccacgtggacgagggcacgcccaaagcacatcttaacctgagcggggggtcgctcaggtgaaagcggttcaaccaaccgttacggatacagcctgatagggcgctgcagaggcccactgttttgctactaaaaatctctgcttacatggcac

SEQ ID NO: 407 - DNA, 386 bp, Pestivirus A
gtatacgagaattattcgcccttctcgtatacgtattgggcaattaaaataataattaggcctagggaacaaaagtccccctcagcgaaggccgaaaagaggctagccatgcccttagtaggactagcataaagaggggggtagcagcagtggtgagttcgttggatggcttaagccctgagtacagggtagtcgtcagtggttcgacgccttggaataaaggtctcgagatgccacgtggacgagggcatgcccaaagcacatcttaacctgagcgggggtcgcccaggtaaaagcagttctaaccgactgttacgaatacagcctgatagggtgctgcagaggcccactgttctgctactaaaaatctctgctgtacatggcac

SEQ ID NO: 408 - DNA, 386 bp, Pestivirus B
gtatacgagtactttagctaacctcgtatacagattggatgttgacaaacattgaattggcaaagtagggaacctttcccctcagcgaaggccgaaaagaggctagccatgcccttagtaggactagcaaaaggaggggactagcggtagcagtgagttcattggatggccgaatccctgagtacagggaagtcgtcaatggttcaacactccactaatcgaggagtcttgagatgccatgtggacgagggcatgcccacggcacatcttaacctatgcgggggttgcatgggtgaaagcaccatttgtggtgttatggacacagcctgatagggtgtagcagagacctgctattccgctagtaaaaactctgctgtacatggcac

SEQ ID NO: 409 - DNA, 386 bp, Pestivirus C
tttgcccgattgtgcatacgaggttagttcattctcgtatgcacaatcgggcaaatggaaacttcaatttggttcagggcctctctccagcgacggccgaactgggctagccatgcccatagtaggactagcaaatggagggactagccgtagtggcgagctccctgggtggtctaagtcctgagtacaggacagtcgtcagtagttcgacgtgagcagaagctcacctcgagatgctatgtggacgagggcgtgcccaagacacaccttaactctagcgggggtcgctagggtgaaatcacaccatgtgatgggagtacgacctgatagggtgctgcagaggcccactattaggctagtataaaaatctctgctgtacatggcac

SEQ ID NO: 410 - DNA, 386 bp, Pestivirus A
gtatacgaggttaggcaagttctcgtatacatattggacactctaaaaaaaaataattaggtctaggggacaaaaatcctccttagcgaaggccgaaaagaggctagccatgcccttagtaggactagcaaaataaggggggtagcaacagtggtgagttcgttggatggctgaagccctgagtacagggtagtcgtcagtggttcgacgctttgaagaacaagcctcgagatgccacgtggacgagggcatgcccacagcacatcttaatctggacgggggtcgttcaggtgaaaacggtttaaccaaccgctacgaatacagcctgatagggtgctgcagaggcccactgtattgctactaaaaatctctgctgttcatggcac

SEQ ID NO: 411 - DNA, 386 bp, Pestivirus A
gtatacgagaagatttagctaaaaactctcgtatacaaattgggcattccaaacaacaattaggtctagggaagaatcctcctcagcgaaggccgaaaagaggctagccatgcccttagtaggactagcaaattggggagggtagcagcagtggtgagttcgttggatggctgaagccctgagtacagggtagtcgtcagtggttcgacacctcaaggttgaggtctcgagatgccacgtggacgagggcatgcccacagcacatcctagtctgggcaggggtcgctcagatgaaagcggttgagtcaaccgttacggacacagcctgatagggtgctgcagaggcccactgtgttgctactaaaaatctctgctgtacatggcac

SEQ ID NO: 412 - DNA, 386 bp, Sapelovirus A
ccttccaaatcggatggactactggacttgaaactatggaaagtaaattggtgagattttggatacacttgaacggtagtagcgtggcgagctatggaaaaatcgcaattgtcgatagccatgtcagtgacgcgcttcggcgtgctcctttggtgattcggcgactggttacaggagagtagacagtgagctatgggcaaacccctacagtatttcttagggggaatgtgcaattgagacttgacgagcttctctcagagatgtggcgcatgctcttggcattaccatagtgagcttccaggttgggaaacctggactgggtctatactacctgatagggtcgcggctggccgcctgtaactagtatagtcagttgaaaccccccc

SEQ ID NO: 413 - DNA, 387 bp, Pegivirus C
tagccactataggtgggtcttaaggggaggttatggtccctctcgcgcttatagagagaaagcgcacggtccacaggtgttggccctaccggtgtaataagggcccggcgctaggcacgccgttaaaccgagaccgttacccccctgagcaaacgacgcccacgtacggcctacgtcgcccttcaatgtctctcttgaccaataggcgatgccggcgagttgacaaaggccagtgggggccgggcggcaggggaaggacccctgtcgctgctcttcccgggggggcgggaaatgcatggggccacccagctccgcggcggcctacagccggggtagcccaagagccttcgggtgagggcgggtggcatttttcttccttaactgatc

SEQ ID NO: 414 - DNA, 387 bp, Pestivirus A
cgtatacgagagttagacaaaatgctcgtatacacattgggcaaactaaataataataattgggcctagggtactaatccccctctgcgaaggccgaagagaggctagccatgcccatagtaggactagcataatgaggggggtagcaacagtggtgagttcgttggatggcttaagccctgagtacagggtagtcgtcagtggttcgacgccttagtataaaggtctcgagatgccacgtggacgagggcacgcccaaagcacatcttaacctgagcgggggtcgctcaggcgaaagcagtttaaccaactgttacgaatacagcctgatagggtgctgcagaggcccactgtactgctactaaaaatctctgctgtacatggcac

SEQ ID NO: 415 - DNA, 387 bp, Pestivirus B
gtatacgaggttagttaaagttatcgtatacagattggacgtttacaaaacagtgaattggcaaaatagggaaccttcccctcagcgaaggccgaaaagaggctagccatgcccttagtaggactagcaaaaagaggggactagcggtagcagtgagttcattggatggccgaatccctgagtacagggaagtcgtcaatggttcgacgctctagcaattgcagagcctcgagatgccatgtggacgagggcatgcccacggcacaccttaacctatgcgggggttgcgtaggtgaaagcaccattttgtggtgttatgaacacagcctgatagggcgtagcagagacctgctactccgctagtaaaaactctgctgtacatggcac

SEQ ID NO: 416 - DNA, 387 bp, Pestivirus B
gtatacgagattagctaaagtactcgtatacggattggacgttgacaaaatattgaattgaaaatgtagggaatcttcccctcagcgaaggccgaaaagaggctaaccacgcccttagtaggactagcaaaaggaggggactagcggtagcagtgagttcattggatggccgaacccctgagtacaggggagtcgtcaatggttcgacactccttcagttaaggagtctcgagatgccatgtggacgagggcatgcccacggcacatcttaacccatgcgggggctgcatgggtgaaagcgccattcgtggcgttatggacacagcctgatagggtgtagcagagacctgctatcccgctagtaaaaaactctgctgtacatggcgc

SEQ ID NO: 417 - DNA, 387 bp, Pestivirus A
cgtatacgaggatttaggaaaaactctcgtatacagattgggcactcaaaaataacaattaggcctagggatcaaatcctcctcagcgaaggccgaaaagaggctagccatgcccttagtaggactagcaaattgaggggggtagcaacagtggtgagttcgttggatggctgaagccctgagtacagggtagtcgtcagtggttcgacacctacggcgtgtaggtctcgagatgccacgtggacgagggcatgcccacagcacatcttagcctgggcgggggtcgctcaggtgaaagcggtttaaccaactgctacgaatacagcctgatagggtgctgcaggggcccactggactgctactaaaaatctctgctgtacatggcac

SEQ ID NO: 418 - DNA, 387 bp, Unknown
  Description of Unknown: unclassified Sapelovirus sequence
ccccaatccactaaccttttccccctcctttaatcggactgatatttgtgttttgacgcttgttttccttttgcggatgtcggttgcgtggctggccaccacgggaaaaatggcaattgtggattgatgggtctacacattctcaccgaacgccttgtgttattaggggagtctaagtgtccatcatgaagcgagtgtactggtaagagaggagacctagctaggggcaatgggacggcgttgcctatccctaattagccatcgagatttctctggcgattacccagtgatggtcgggttgtcggggggcaacctgcttagctccttactgcctgatagggtcgcggctggccgtatcagtacactatagtcagttgatgttcgaat

SEQ ID NO: 419 - DNA, 387 bp, Rosavirus B
taaggtagcagatgatttagtgaaaagctttggattgtttggagttttgtagcgatgctagtagtgtgtgtggacctccccacgtggtaacacgtgccccacaggccaaaagccaaggtgttgaaagcacccctactagtcccagaccctcccatctgggaactcctctcatgaaaaaccctagtaactaatgatttggcttctcatcaacctctctagtcaaggctgaaggatgcccggaaggtacccgcaggtaacgataagctcactgtggatctgatccggggctctggtgcgaccgactgtccggcgtagcagggttaaaaaacgtctaggcccttctaccccaagggattggggtttccccaatcattttagaagttcact

SEQ ID NO: 420 - DNA, 388 bp, Pegivirus C
tagccactattggtgggtcttaaggggtggtcaaggtccctctggcgcttgtggcgaaaaagcgcacggtccacaggtgttggccctaccggtgggaataagggcccgacatcaggctcgtcgttaaaccgagcccattatccccctgggcaaacgacgcccacgtacggtccacgtcgcccttcaatgtctctcttgaccaataggcgatgccggcgaattgacaaggaccaatgggggccgggcgtcaggaaatggactcctgccgctgcccttcccgggggagtgggaaatgcatggggccacccagctccgcggcggcctgcagccggggtagcccaagagccttcgggtgagggcgggtggcatttttcttcctgtaccgatc

SEQ ID NO: 421 - DNA, 388 bp, Unknown
  Description of Unknown: Bovine viral diarrhea virus genotype 2 strain 1373 polyprotein1 sequence
gtatacgagattagctaaagtactcgtatatggattggacgtcaacaaatttttaattggcaacgtagggaaccttcccctcagcgaaggccgaaaagaggctagccatgccctttagtaggactagcaaaagtagggggactagcggtagcagtgagttcgttggatggccgaacccctgagtacaggggagtcgtcaatggttcgacactccattagtcgaggagtctcgagatgccatgtggacgagggcatgcccacggcacatcttaacccatgcgggggttgcatgggtgaaagcgctaatcgtggcgttatggacacagcctgatagggtgtagcagagacctgctattccgctagtaaaaaactctgctgtacatggcac

SEQ ID NO: 422 - DNA, 388 bp, Pestivirus A
acatggggtatacgagatttagatcaatctctcgtatacacattgggctatcaaaaaagaaaattaggcctagggaacaatcctcctcagcgaaggccgaaaagaggctagccatgcccttagtaggactagcaaattggggggggtagcaacagtggtgagcttgttggatggctgaagccctgagtacagggtagtcgtcagtggttcgacgccagagatgaggcctcgagatgccacgtggacgagggcatgcccacagcacatcttaatctgggcgggggtcgctcagacgaaagcggttgtaccaaccgttacaagcacagcctgatagggtgctgcagaggcccactgcactgctactaaaaatctctgctgtacatggcac

SEQ ID NO: 423 - DNA, 389 bp, Pegivirus C
tagccactataggtgggtcttaagggtgggtcaaggcacctcttactcctgcggcgggacagcgcacggtccacaggtgatggccctaccggtgtgaataagggcccgacgtcaggctcgtcgttaaaccgagcccgttacccacctgggcaaacgacgcccacgtacggtccacgtcgccctacaatgtctctcttgaccaataggctatgccggcgagttgacaaggaccagtgggggccgggcgttatggggaaagaccccctgcgctgcccttcccggtggggcgggaaatgcatggggccacccagctccgcgggggcctgcacccggggtagcccaagaaccttccggtgaaggcgggtggcatttttctttcctgactaatc

SEQ ID NO: 424 - DNA, 390 bp, Pestivirus A
acatggggtatacgagatttagctaaaactctcgtatacatattggacattccaaacaataattaggcatagggaaaatcctcctcagcgaaggccgaaaagaggctagccatgcccttagtaggactagcaaattgaggggggtagcagcagtggcgagttcattggatggctgaagccctgagtacagggtagtcgtcagtggttcgacgccttaggatctaaggcctcgagatgccacgtggacgagggcacgcccacagcacatcctaatccgggcgggggtcgctcggatgaaagcggttgtaataaaccgttatggacacggcctgatagggcgctgcaggggcccactgtgttgctactaaaaatctctgctgtacatggcac

SEQ ID NO: 425 - DNA, 391 bp, Pestivirus H
gtatacgcccggttagctcatgtcggcgtatatgattgggtatcccaaattaatgatttggtttagggactaaattcccctagcgaaggccgaaataggttaaccataccttcagtaggacgagcataatgggggactagtggtagcagtgagctccttggattaccgaagccccgggtacagggtcgtcgtcaataaggttcgacgcatcaacgagtggatgcctcgagatgccatgtggacgagggcgtgcccacggtatgtcttaacccaagcgggggccgcttgggtgaaagatggtcgattatgtggccctttgggagtacagcctgatagggtgttgcagagacctgctatatcactagtataaaaactctgctgtacatggcac

SEQ ID NO: 426 - DNA, 391 bp, Pestivirus H
gttgggtgtgtttgggccgggtagctcatgtcggcgtatatgattgggtatcccaaattaataatttggtttagggactaactcccctagcgaaggccgaaatgggttaaccataccttcagtaggacgagcgtaatgggggactagtggtagcagtgagctccttggattaccgaagccccgagtacggggtagtcgtcaatggttcgacgcatcaaggaatgcctcgagatgccatgtggacgagggcgtgcccacggtgaatcttaactcaagcgggggccgcttgggtgaaagagggtcattatatggctctttgggagtacagcctgatagggtgttgcagagacctgctacattactagtataaaaactctgctgtacatggcac

SEQ ID NO: 427 - DNA, 391 bp, Unknown
  Description of Unknown: unclassified Pestivirus sequence
tgcataaccctgattgtaattggctgggttatgcatgtgagaacgcaaaattttttaaattatgttaccggctttgaggttggcggaccagagttaaccaggctctcagtacgacaccctcctaaacaaagtcggaactgctgactaggagactatgcactcagcactaagcccggagtaccgggcattctactacagctctgcactcaacgacggctcttgaggcctagagtccaggatggctgtgtaagtagaggacatgtccaagtgtgaggtgtaatccggtgggggttgccggatttgctactggtagaccagtagtcatagactgcctgatagggtcccggcggacggcctaggcttagcagtataatagtccgttgtattcaac

SEQ ID NO: 428 - DNA, 392 bp, Unknown
  Description of Unknown: unclassified Picornaviridae sequence
taactccttggctagcaaggagctgtggccgccaaaagtggtgatacactgactaatactctacttgggtacagtgagttggtccctttggaaagtcacctgatgatctttcaattggggtaggctacgggtgaaaccccttctccctccatttgttatacaaatgtggagtgacaacgctaaggccctggatagaaatgagttctttatggacaagaatttctcaacagggggagcaccggtgtatgtctttgaatgcgtcttgtgactgaaaaaggagcaggcttattgtgttcacatagagttaaggtgtaccctatgagtttagggctactcaggggcatgttaggttttaaaatgctcatttattgttttctatgagttgagagaag

SEQ ID NO: 429 - DNA, 393 bp, Unknown
  Description of Unknown: unclassified sequence
agcgaagcgatcggtgtctcgggcactgtgacgataagcaaactcagcatcagggacgaggctggaggaagaacctacttatctaagcgccccgtctgagcagcagcgtcgaaaatcaacttcgtcttcgtcgtgaactgcgacgactggttgtgcgaacggcaacgatcctagtcgtagtgttggttctcgcccgtcgagacgcgcccccgcggactcggcgcctgctgacgcgtcgtctccgacgcgacctagcagcacccaatcctaagagtgtgcgaagggtcagagctccgcgtcggagcccaactccccgcataccgtgacgggagatacgtcgtggtctcatggcgccccaaccgcggttgtcgctgggtgagatcaaaatggaca

SEQ ID NO: 430 - DNA, 393 bp, Unknown
  Description of Unknown: unclassified sequence
gattttctggttatcccttttggacttggtaggggcccacgtgcccacccacctctgtgtgtgttgatttctaatcgatgcctggcagtggcggccacctctccttactggtaaacctccggtgagtgaagttgtcaagctacaggtaccgtgcaggatgaaatgcgcacatgtgaacaaactaggagtcatacaccgggtcaaactctggaaacggagtccgggactctgaccttggttgggtgagctcgaggcatcacattgatggacgcgattcgctatccttccctagtaggaccttgtggtgtacccctggttgggaatccagggctggtcgggtgcagggtgacagcctgttctccacctcaaccattgtaggagaaatcaacccct

SEQ ID NO: 431 - DNA, 395 bp, Unknown
  Description of Unknown: unclassified Kobuvirus sequence
accacgtctttcctccagatcgacagtcctgctgtgtgaattcccattgcgcacttagtggtgtcactgtgcgctcccaatctcggccgcggagtgctgttccccaagccaaacccctggcccttcactatgtgcctggcaagcatatctgagaaggtgttccgctgtggctgccagcctggtaacaggtgccccagtgtgcgtaaccttcttccgtcttcggacggtagtgattggttaagatttggtgtaaggttcatgtgccaacgccctgtgcgggatgaaacctctactgccctaggaatgccaggcaggtaccccacccccgggtgggatctgagcctgggctaattgtctacgggtagtttcatttccaattcctttatgtcggagtc

SEQ ID NO: 432 - DNA, 396 bp, Pestivirus D
ctctgcagatatcaggggtgtatacgaaagtagctcaagttcgtatacaaattgactatgaccaaaatagtattcggcgtagggacaccctccagcgaaggccgaacggggttaaccatacccttagtaggactagcagacggagggactagccatcatggtgagcttcctgaggggtctaagtcctgagtacaggacagtcgtcaatagttcgacacgtgcgagtcgcacgtctcgagatgctatgtggacgagggcatgcccaagacactttctctagcctgggcgggggtcgcccaggtgaaagcacctgataggtgttgggagtacagcctgatagggtgctgcagaggcccatgcataggctagtataaaaatctctgctgtacatggcac

SEQ ID NO: 433 - DNA, 396 bp, Unknown
  Description of Unknown: unclassified Teschovirus sequence
gataagtgatagtccttggaagctaggtacttgttacgctagttttggattatcttgtgcccaacaattgtctttggacacttgttgtgtttaaacacagaaatctttgattattggttgtgaatttaatggattcttcccttgaaagacttgccttggcgcgggctagagcgcaattgtcaccaggtattgcaccaacggtggcgacagggtacagaagagcaagtactcctgactgggcaatgggactgcattgcatatccctaggcatctattgagatttctctggagcccaccagcatggagttcctgtatgggaatgcaggactggacttgtgctgcctgacagggtcgcggctggccgtctgtactttgtatagtcagttgaaactcatt

SEQ ID NO: 434 - DNA, 399 bp, Pestivirus F
tacgcggggtataacgacagtagttcaagtgtcgttatgcatcattggccataacaaattatctaatttggaatagggacctgcgacctgtacgaaggccgagcgtcggtagccattccgactagtaggactagtacaaataggtcaactggttgagcaggtgagtgtgctgcagcggctaagcggtgagtacaccgtattcgtcaacaggtgctactggaaaggatcacccactagcgatgcctgtgtggacgaggacatgtccaagccaatgttatcagtagcgggggtcgttactgagaaagctgcccagaatgggtagttgcacatacagtctgataggatgccggcggatgccctgtattttgaccagtataaatattatccgttgtaaagcat

SEQ ID NO: 435 - DNA, 399 bp, Unknown
  Description of Unknown: unclassified Pasivirus sequence
attttctggccgtgtagctgcttttgaccagtggctctgggttacttagccaaatcccccttccttcacccttttaaatttgatggtctgtgttgtttgttttgtcttgtctaaataatatataagatccttcccgccgatacagacctcgacagtctggtgtaggagggttggtgttattaatttgccccagaagagtgaccgtgacacatagaaaccatgagtacatgtgtatccgtggaggatcgcccgggactggattccatatcccattgccatcccaacaagcggagggtatacccactatgtgcgcgtttgcagtgggaatctgcaaatttagtcatactgcctgatagggtgtgggcctgcactctggggtactcaggctgttcatataat

SEQ ID NO: 436 - DNA, 400 bp, Pegivirus C
ggtcatcttggtagccactataggtgggtcttaagggtgggtcaaggtccctctggcgcttgtggcgagaaagcgcacggtccacaggtgttggccctaccggtgtgaataagggcccgacgtcaggctcgtcgttaaaccgagcccatttcccacctgggcaaacgacgtccacgtacggtccacgtcgcccttcaatgtctctcttgaccaataggctttgccggcgagttgacaaggaccagtgggggccgggcagcaggggaaggacccctgttgtcgcccttcccggtggggatgggaaatgcatggggccacccagctccgcggcggcctgcagccggggtagcccaagaaccttcgggtgagggcgggtggcatttttcttcctataccgatc

SEQ ID NO: 437 - DNA, 401 bp, Unknown
  Description of Unknown: unclassified Enterovirus sequence
tttgatcgttatccgcaaaacaactacgcaaagcctagtatcatcttcaaagatatgtggttggtcgctccgctataaacccaatagcagacctggcagatgaggctagaaattccccactggcgacagtgttctagcctgcgtggctgcctgcgtaccctgcatgggtacgaagccatatattggacaaggtgtgaagagccccgtgtgcttgttttgagtcctccggcccctgaatgtggctaaccttaaccctgcagctggtgtgtgcaatccagcacatggccagtcgtaatgagtaattgcgggatgggaccaactactttgggtgtccgtgtttcctgttttacctttatatttgcttatggtgacaatatatatataacatatatattggcatc

SEQ ID NO: 438 - DNA, 402 bp, Pegivirus A
tggtcaccttggtagccactataggtgggtcttaagagaaggttaagattcctcttgtgcctgcggcgagaccgcgcacggtccacaggtgttggccctaccggtgtgaataagggcccgacgtcaggctcgtcgttaaaccgagcccatttcccgcctgggcaaacgacgcccacgtacggtccacgtcgcccttttaatgtctctcttgaccaataggttcatccggcgagttgacaaggaccagtgggggccgggggtcacagggatggaccctgggccctgcccttcccggcggggtggggaaagcatggggccacccagctccgcggcggcctgcagccggggtagcccaagaaccttcgggtgagggcgggtggcatttttcttcctataccgatc

SEQ ID NO: 439 - DNA, 403 bp, Unknown
  Description of Unknown: unclassified Pasivirus sequence
gcggctggatattctggccgtgcaactgcttttgaccagtggctctgggtaacttagccaaagtgtccttctccctttccctattatatgttttatggctttgtctggtcttgtttagtttatatataagatcctttccgccgatatagacctcgacagtctagtgtaggaggattggtgatattaatttgccccagaagagtgaccgtgacacatagaaaccatgagtacatgtgtatccgtggaggatcgcccgggactggattccatatcccattgccatcccaacaagcggagggtatacccactatgtgcacgtctgcagtgggagtctgcagatttagtcatactgcctgatagggtgtgggcctgcactctggggtactcaggctgtttatataat

SEQ ID NO: 440 - DNA, 404 bp, Unknown
  Description of Unknown: unclassified Pasivirus sequence
gctggactttctggctgcgcaactgcttttaaccagtggctctgggttacttagccaaaaccccctttccccgtaccctagtttgtgtgtgtattattattttgttgttgttttgtaaatttttatataagatcctttccgccgatatagacctcgacagtctagtgtaggaggattggtgatattaatatgccccagaagagtgaccgtgacacatagaaaccatgagtacatgtgtatccgtggaggatcgcccgggactggattccatatcccattgccatcccaacaaacggagggtatacccgctatgtgcgcgtctacagtgggaatctgtagatttagtcatactgcctgatagggtgtgggcctgcactctggggtactcaggctgtttatataat

SEQ ID NO: 441 - DNA, 405 bp, Unknown
  Description of Unknown: unclassified Aalivirus sequence
gctcttccctccacctcctttcaacgtctggcccacgaaacgggccacttttcaatcttaaataactatcccttttcttgttttgactttccggttaagaataatatggatcacacaattggattttctctaaggataatggataggatactttcgggataccactccctttctgtgctaacacaaattctaattctctacatctcttatatgctcgaagaggtggtgctgaaatattgcaagccattcttgcatgtaggtggtttagactcaagatgaatgttgtgttactcaagacaagtgtagctatcaccatggtattggtagcgtgaatcggattaccggtagtagcgcaatcttccgccatggtgctctagtgactagaggacaacgacatggcattgg

SEQ ID NO: 442 - DNA, 405 bp, Unknown
  Description of Unknown: unclassified Enterovirus sequence
caaaaacctcaaagatcgttatccgctcattaactacgcaaagcctagtaacatcttggatgtggtaaagttggtcgctccctgcattcccagcagtagacctggcagatgaggctggatgttccccactggcgacagtgatccagcctgcgtggctgcctgctcacccaaacgggtgagaagccttattactgacatggtgtgaagagccccgtgtgcttaatgtgagtcctccggcccctgaatgtggctaaccttaaccctgtagccgttgctcataatccaatgagtatgcggtcgtaatgcgcaagtacgggatgggaccaactactttgggtgtccgtgtttcttatttttctttatctgcgttatatggtgacaatttatagaatatagattgtcatc

SEQ ID NO: 443 - DNA, 405 bp, Unknown
  Description of Unknown: unclassified Enterovirus sequence
tgtgcttgtaacgccatgggggaaatcacttgatcgaacgcctagtaccatcatgtctttgactaggcgttcgatcaagtgatttcccccatcactagtttggtcgatgaggctaggaattccccacgggcgaccgtgtcctagcctgcgtggcggccaacccagcagttgctgggacgccttttttagggacatggtgcgaagactcgcatgtgcttggttgtgactcctccggcccctgaatgcggctaaccttaaccctggagccttgtgctacaatccagtagcattaaggtcgtaatgagtaattccgggatgggaccgactactttgggtgtccgtgtttcctgttttttccaaatgttttcttatggtcacagcatatagcatatatatactgtgatc

SEQ ID NO: 444 - DNA, 407 bp, Unknown
  Description of Unknown: unclassified Picornaviridae sequence
ccactgtatatacatttaatcatttccccttctttttggtctctcttgtacataaggataaaacccctctaacaaagcctgttcttcagactattaagtatgacaatatattacattatctaactacacatgaaggccgtcgtgctttctcacgccttcccacctacttccatcttcacagacattgggtagaggcactttatcctgaaggactccagcccacatccactcatttatcttctgagactttccattgtaaatatctttgcggccattttcttcagacgtgtgagtggcatgcaaacgttcaagtccctccttttattttagttcgtaggcaacttatttataatattctttgcaaattgaatcttcttgatagtcttcctttcttcctttcagtggca

SEQ ID NO: 445 - DNA, 407 bp, Unknown
  Description of Unknown: unclassified Hepatovirus sequence
ggataccaatggaacgaccgctgcgcccggcggggttaacttgttgattagcaacaagctgtagtttctaaaagtcctgacaccataggtccacgtcccgacctttggcattttaacttcattttggtgaagtccattgatcttctaggaggagtaggctatgggtgaaactcctcatgctagtacctatattaggagatgcattgtgtaggtgaaggtttccggtagaggtgagttttacgacgcaacctctcaacggatgtgggcccatctcacacactagatgctttggatgaatccaatctgagggtgtcattgttagggatctggatactaggtgccctcccgagaggtcgtaggggtaatcaggggcatataggtttccacacattaaatgttattatgtt

SEQ ID NO: 446 - DNA, 410 bp, Unknown
  Description of Unknown: unclassified Picornaviridae sequence
gaaacccgtatacaccggaccttttctcccctccctctccacttacctttttcccctcttcggcatgaaacaaggattattcaagtggaaacgcgatttaatatgcggctggccaccgcggaataacggcaattgtgtatctgctggaagccaagcctgcctagccgatagcccttgaccgggtgtgtaggatagcccaggaaccagcaatacgcgacaggttatggtagagtagatacctagccaggggcaatgggactgcattgcatatccctaatgaaccattgagatttctctggtcattacccggtgatggttactagaggggggcctctagtactagatctatactgcctgatagggtcgcggctggccgaccatgacctgtatagtcagttgatttgagcaat

SEQ ID NO: 447 - DNA, 410 bp, Unknown
  Description of Unknown: unclassified Enterovirus sequence
ttgaagctgtagcgttcgttacccgcacacgtactgcgtgacggctagtagcatcttgcattttcctttaggtgtttcgctcattgtggttaccccaccacatagatcagggcaatggggctacacaatccccactggcgacagtggtgtagcccgcgtggtgccccgcccaggctttgcctgggacgccttaggaaagacagggtgtgaagaccttaatgcgctacgtgtgagtcctccggcccctgaatgcggctaatcctaaccccgtagccatggtgcgcaatccagcgcatgtgtggtcgtaacgagcaattacgggatggaaccgactactttgggtgtccgtgtttcactttttatttgaaattgtctcatggttacagatttgtgtatacagatttgtaatc

SEQ ID NO: 448 - DNA, 411 bp, Pegivirus C
ccgacgcctatcttaagtgagacgtaatggccccgcgccgaactggcgaccggccaaaaggtggtggatgggtgatgacagggttggtaggtcgtaaatcccggtcatcctggtagccactataggtgggtcttaaagggaggctacggtccctcttgcgcttatggcgagaaagcgcacggtccacaggtgttggccctaccggtgtgaataagggcccggcgctaggcacgccgttaaaccgagcccgtcatccccctgggcaaacgacgcccatgtacggtccacgtcgcccttcaatgtctctcttgtaccaataggttttgccggcgttgttgacaaggaccagtgggggctgggcggtaggggaaggacccctgccgctgcccttcccggtggggtgggaaatgc

SEQ ID NO: 449 - DNA, 412 bp, Deltapapillomavirus 1
ttagtcatactcaaggtgtaaatattcatttgatctttgtacagtttttataccatatttacattattataggttactggttgctacatcctggtcatagtcacatcatcatcataggtctaggtcacaattaggtttgtcagatactcaagacgacgtggaatctctcttgtcacctgaatcctatcctttactgtcctatcctatcctatactgcctttgttttgttatccaaagtcagcaagtgccatctttctccaagtgcaatgtcatctgcctgtaatcccaaaagctggtgtcatccttgtcagtagaacagtcaaactaagcctttgaaaagaaagcctcacacggaaaccttgtatgtatacctcgtgaaaaagctttgaactgccacgacattgacgcctgc

SEQ ID NO: 450 - DNA, 413 bp, Unknown
  Description of Unknown: unclassified Sapelovirus sequence
gttgtatcccccataccttaccctcccttccacacaggacggacaaatggacttggacttacggcaagaacatatggtatggcttttggatacggatgaatggcagtagcgtggcgagctatggaaaaatcgcaattgtcgatagccatgttagtgacgcgctccggcgtgctcctttggtgattcggcgactggttacaggagagtaggcagtgaactatgggcaaacctctgcagtattactcagggggaatgtgcaattgagacttgacgagcgtctccttggagatgtggcgcatgctcttggcattaccatagtgagcttccaggttgggaaacctggactaggcctatactacctgatagggtcgcggctggccgcctgtaactagtatagtcagttgaaacccccc

SEQ ID NO: 451 - DNA, 414 bp, Tremovirus A
ggagcgcacggtatatatgtgctcccgcatggcaggggcgtgctaccttgccccttgacgcatggtatgcgtcaaactgattttggatttgtcttaaggattagtcgctttgtgccgaaaatctctttgcgtttcacagaaccatcctaaccatggatgtagtatgggaggcgtgtataggggtgagtaggatctctcatagagggataggcatgccattcaaatccggggagtactccggctctgacattgggacatttgatttaaccggacctggttcagtatccgggttgtcctgtattgtcacggtgtatccgtcttggcatgttgaaaaggtatctttgggtaatcccttcctactgcctgatagggtggcgtgcccggccatgagagattaagggtagcattttaacc

SEQ ID NO: 452 - DNA, 415 bp, Unknown
  Description of Unknown: unclassified Teschovirus sequence
cccctttgaacttgtaactgataagtgatagtccttggaagctaggcacttgctgcgctagttttggattatcttgtgcccaacactagtcttcggactcttgttgtgtttaaacacagaaattttgttatctggttatgaattcattggatcaatccttctgaaagacctgctctggcgcgagcgaaagcgcaattgtcaccaggtattgcaccaatggtggcgacagggtacagaagagcaagtactcctgactgggcaatgggactgcgttgcatatccctaggcacctattgagattcctctggggcccaccagcatggagttcctgtatgggaatgcaggactggacttgtgctgcctgacagggtcgcggctggccgtctgtactttgtatagtcagttgaaactcacc

SEQ ID NO: 453 - DNA, 415 bp, Unknown
  Description of Unknown: unclassified Teschovirus sequence
ctccctttgaatttgtaactgataagtgatgatccttggaagctaggtacttgttacgctagttttggattgtcttgtgcccaacactagtcttcggactcttgttgtgtttaaacacagaaatctgattgtctggttgtggatttattggattaaccctttgaaagacctgctctggcgcgagctaaagcgcaattgtcaccgggtactgcaccaatggtggcgacagggtacagaagagcaagtactcctgactgggcaatgggactgcgttgcatatccctaggcacctattgagatttctctggggcccaccagcatggagttcctgtatgggaatgcaggactggacttgtgctgcctgacagggtcgcggctggccgtctgtactttgtatagtcagttgaaactcatc

SEQ ID NO: 454 - DNA, 415 bp, Rhinovirus B
ggttgtacccacgaccaaaagcctttaaccgttacccgccaatcaactacgtaacggctagtaccatcatgtttttaatctggtgttcgatcaggtggtatcccccactagtctggtcgatgaggctaggaattccccacgggtaaccgtgtcctagcctgcgtggcggccagcccagcttatgctgggacgcctttttaaagacatggtgtgaagacccgcatgtgcttgattgtgagtcctccggcccctgaatgcggctaaccctaaccccggagcccagcaacataatccaatgttgtttgggtcgtaatgagtaattctgggatgggaccgactactttgggtgtccgtgtttccttttattcttatattgtcttatggtcacagcatatatatcatatatactgtgatc

SEQ ID NO: 455 - DNA, 416 bp, Unknown
  Description of Unknown: unclassified Teschovirus sequence
cttccttttaattcgtaactgataagtgatagtccttggaagctaggtatttgttacgctagttttggattatcttgtgcccaacatttgttttcgaacatatgttgtgtttaaacacagaaatctagtttctttggttatgagtttaatggaatatccttttgaaagacttgccttggcgcgggctagagcgcaattgtcaccaggtattgcaccaatggtggcgacagggtacagaagagcaagtactcctgactgggtaatgggactgcattgcatatccctaggcatctattgagatttctctggagcccaccagcatggagttcctgtatgggaatgcaggactggacttgtgctgcctgacagggtcgcggctggccgtctgtactttgtatagtcagttgaaactcatt

SEQ ID NO: 456 - DNA, 419 bp, Unknown
  Description of Unknown: unclassified Picornaviridae sequence
gggttttacgaaacccgtatacaccagaccttttctcccctccccctccacctaccttttccccctctttggaccgaaacaaggacacgtaagtggaaacgcgattttatatgtggttggccaccacggaataacggcaattgtctacatgtgggaagtgcaacctccctagccgataacccctgaccgggtgtgtaggataggaaaggtgcccactgtgggcgacaggttatggtagagtggatacctagccaggggcaatgggactgctttgcatatccctaatgaagtattgagatttctctgctcattacccggtgatggttgtgtggggggggccccatacactagatccatactgcctgatagggtcgcggctggccgaccataacctgtatagtcagttgaattcagccaag

SEQ ID NO: 457 - DNA, 419 bp, Unknown
  Description of Unknown: unclassified Sapelovirus sequence
tattacggtaccggtatatcttagtccatttcccccttccctctccacttaccttttccccctcttgtgacggatacttttggttttgactgtatgctagaaaaccctctgatatctggatggcctccagggaataaaggcaattgtggatcgctggtattgggctctgtcggggaaagtaggttaaccataccactagtaccagtctgagcaccccagtgtgaagcgacagtacatagtagagttgggagtgaggcttgggaaatgggactgcattgcatatccctagtgacctattgagatttctctgggcaccaccttgctgagcttaccaggggggggcccctggtactggcccattactgcctgatagggtcgcggctggccgactgtgtattgtatagtcagttgaatttaac

SEQ ID NO: 458 - DNA, 419 bp, Sapelovirus A
cttaaggtggttgtatcccctaccccatcctcccctccaaacaggacggacaatcggacctgacatctggcgagaagaattggaatggtatttggacacacttgaatggcagtagcgtggcgagctatggaaaaatcgcaattgtcgatagccatgttagtgacgcgcttcggcgtgctcctttggtgattcggcgactggttacaggagagtagacagtgagctatgggcaaacccctacagtgttacttagggggaatgtgcaattgagacttgacgagcgtctcgtagagatgtggcgcatgctcttggcattaccatagtgagcttccaggttgggaaacctggactgggtctatactacctgatagggtcgcggctggccgcctgtaactagtatagtcagttgaaaccccccc

SEQ ID NO: 459 - DNA, 420 bp, Pegivirus C
gttggtaggtcgtaaatcccggtcatcttggtagccactataggtgggtcttaagggtgggtcaaggttcctcttacgcctgtggcgggacagcgcacggtccacaggtgttggccctaccggtgtgaataagggcccgacgtcgggctcgtcgttaaaccgagaccattacccgcctgggcaaacgacgcccacgtacggtccacgtcgcccttcaatgtctctcttgaccaataggctttgccggcgagttgacaaggaccagtgggggccgggtgcagggggaaggaccccctgtactgcccattccggcggggtgggaaatgcatggggccacccagctccgcggcggcctgcagccggggtagcccaagaatccctcgggtgagggcgggtggcatttttctttctgtaccaatc

SEQ ID NO: 460 - DNA, 420 bp, Aichivirus B
cccggtggtttgatggtagctctcttatggttctgccctggcaaggctatagagtactgtgatccgctgcggacgccatcctggtaacaggacccccagtgtgcgcaacagtatgctcacggttcgccgtgtccaccatgactggaacactgctttcatgaaacagtgtgtgtccaatccctgtgatcagtatcaaccacaccacctaggaatgctaggaaggtaccccaattcgttgggatctgatcctaggctaattgtctacggtggtgctcctttttattttcacttcacttctctggtcacaactgcttgattctgtgtttgctgcttcctccgctctcactgccattctcaagtgttcacactgtccaagttcctttggttgatctcttccacttgccactgtcaactcttgtc

SEQ ID NO: 461 - DNA, 421 bp, Unknown
  Description of Unknown: unclassified Teschovirus sequence
ccccccctcctttgaatttgtaactggtaagtgataatccttggaagctaggtacttgttacgctagttttggattgtcttgtgcccaacattggtcttcggacttctgttgtgtttaaacacagaaattttaacacctgactatgaattcaatggaccaccccttttgaaagacctgctctggcgcgagctaaagcgcaattgtcaccaggtactgcaccaatggtggcgacagggtacagaagagcaagtactcctgactgggcaatgggactgcattgcatatccctaggcacctattgagacttatctggggcccaccagcgtggagttcctgtatgggaatgcaggactggacttgtgctgcctgacagggtcgcggctggccgtctgtactttgtatagtcagttgaaactcacc

SEQ ID NO: 462 - DNA, 421 bp, Enterovirus C
agtctggacatccctcaccggcgacggtggtccaggctgcgctggcggcctacctgtggtccaaagccacgggacgctacatgtgaacaaggtgtgaagagcctattgagctacaaaagagtcctccggcccctgaatgcggctaatcccaaccacggatcaagggtgcacaaaccagtgtacaccttgtcgtaacgcgcaagtctgtggcggaaccgactactttgggtgtccgtgtttcctttttaattttgatggctgcttatggtgacaatcatagattgttatcataaagctaattggattggccatccggtgagagtgaaatatattgtttacctccctgttgggtttactctaactaacttctccatttataaacttgtcatcacagttttaataattagaagtgcagtttaca

SEQ ID NO: 463 - DNA, 423 bp, Pegivirus C
catggacgaaagcccgtggatggacggtgacagggttggcaggtcgtaaatcccggccgccctggtagcgggtataagtctgagggaaacccactagaggcttacgtgttcttgtccgagtggacgtgcacggtccacaggagacgcctattccggtgtgaataataggccgactcgagcggagtcgttaaactgaggaccgtctgagagatggtaacttggcctgcgtacgggaacgccgctaaagaatacagtgggttaagtccggcgggttggcaatcccagcagggcgggggggttctactgttgaatcctgccagttcctctcagatggtaggcatggggggacccagctccgcggcgcgctacagccggggtagcccaaaatccttcgggtgagggcgggtcccatgtccctttttg

SEQ ID NO: 464 - DNA, 423 bp, Pegivirus C
gtgcaagccccacaaaccgacgcctatttaaatagacgttaagaaccggcgcctgcccggcgaccggccaaaagttggtggatgggtgatgccagggttggtaggtcgtaaatcccggtcatcttggtaaccactataggtgggtcttaagggttggtcaaggtccctctgaaccctgtggcgagaaagcgcacggtccacaggtgttggccctaccggtgtgaataagggcccgacgtcaggctcgtcgttaaaccgagcccattacccacctgggcaaacaacgcccacgtacggtccacgtcgcccttcaatgtctctcttgaccaataggctttgccggcgagttgacaaggaccagtgggggctgggcgtcgggggaaggacccccggcgctgcccttcccggtggggtgggaaatgc

SEQ ID NO: 465 - DNA, 424 bp, Hepatovirus G
gtcttcttttatccgggctcacgtgatgccaatggtccgacccatgcgcccgtgggggttaacacatggattagccatgtgctgtaggccctaaaagtcacgttcacgtaaggcttggatgaaactcatgtctgttaactgagggtggtaagttacattgatcttctaaagagggtaggctacgggtgaaaccctctaggttagtactcatattgagagatacctccagtaggtgaaggtttccggatattggtgagtttaacgacaataaccattcaacggatgtgggcccacctcactggttagatgccttgtaatccaacacccaaggggatatgagtgaattcttagtcccaagtgaccctcccgaaaggttgtaggggtactcaggggcatttaggttttccacatttaaagtgaattg

SEQ ID NO: 466 - DNA, 426 bp, Unknown
  Description of Unknown: unclassified Teschovirus sequence
ccccccccctccccctttgaacttgtaactggtaagtgatgatccttggaagctaggtacctgttacgctagttttggattatcttgtgcccaacactagtctttggacttctgttgtgtttaaacacagaaatctgattgcttggttatgaattcactggactaacccttttgaaagacctgctctggcgcgagctaaagcgcaattgtcaccgggtattgcaccaatggtggcgacagggtacagaagagcaagtactcctgactgggcaatgggactgcattgcatatccctaggcacctattgagatttctctggggcccaccagcgtggagttcctgtatgggaatgcaggactggacttgcgctgcctgacagggtcgcgggtggccgtctgtactttgtatagtcagttgaaactcacc

SEQ ID NO: 467 - DNA, 426 bp, Teschovirus A
ttgaaaccccctccctttgaatttgtaattgataagtgatgatccttggaagctaggtacttgatacgctagttttggattgtcttgtgcccaacattagtctttggacttctgttgtgtttaaacacagaaattttgttatctggctacgaattcattggattaatccctctgaaagacctgctctggcgcgagcgaaagcgcaattgtcaccgggtattgcaccaatggtggcgacagagtacagaagagcaagtactcctgactgggcaatgggactgcattgcatatccctaggtacctattgagatttctctggggcccaccagcgtggagttcctgtatgggaatgcaggactggacttgtgctgcctgacagggtcgcggctggccgtctgtactttgtatagtcagttgaaactcact

SEQ ID NO: 468 - DNA, 426 bp, Teschovirus A
cccccctcctctccttttggactcgtaactgataagtggtagtccttggaagctaggtactcgttacgctagttttggattatcttgtgcccaacattggacctcggtcctgtgttgtgtttaaacacagaaatcttgacacttggttatgaattcattgtatcaacccttttgaaagacctgctctggcgcgagcaaaagcgcaattgtcaccaggtattgcaccaatggtggcgacagggtacagaagagcaagtactcctgactgggtaatgggactgcattgcatatccctaggcacctattgagatttctctggggcccaccagcatggagttcctgtatgggaatgcaggactggacttgtgctgcctgacagggtcgcggctggccgtctgtactttgtatagtcagttgaaaagcacc

SEQ ID NO: 469 - DNA, 427 bp, Pegivirus A
ctggacgaaagcccgtggacgggcggtgacagggttggcaggtcgtaaatcccggccgccctggtagcgggtataagtctggaggaaacccgtgaaccggcagcgtgaagctctgctagcgaacgtgcacggtccacaggagacgccgattccggtgtgaataatcggccgactcgagcggagtcgttaaactgaggaccatcagggagatggcaacttggcttgcgtacgggaacgccgctaaagtcacagtgggttaagtccggcgggttgacaatcccagcaaggcgagggggtgctattgttgcaccctgccagtccctcccttttggtaggcatggggggacccagctccgcggcgcgctacagccggggtagcccaaaatccttcgggtgagggcgggtcccatgtcccttttattcaggc

SEQ ID NO: 470 - DNA, 427 bp, Pegivirus C
tggacgaaagcccgtggatggacggtgacagggttggcaggtcgtaaatcccggccgccctggtagcgggtataagtctgagggaaacccactagaggcttacgtgtacttgtccgcgtggacgtgcacggtccacaggagacgcctattccggtgtgaataataggccgactcgagcggagtcgttaaactgaggaccatttgtaagatggcaacctggcctgcgtacgggaacgccgctaaagaatacagtgggttaagtccggcgggttggcaatcccagcagggcggggggactctattgttgagccctgccagttccttacaagtggtaggcatggggggacccagctccgcggcgcgctacagccggggtagtccaaaatccttcgggtgaggacgggtcccatgtccctttttatggctc

SEQ ID NO: 471 - DNA, 427 bp, Pegivirus D
cggcgcggtgttttgggttcagggcagtaggggcagccgggccagcagtagctggctcctggtaccaccaccctacccggacgacctccctcgcgaaaggtcgccacggtctgtggctcgacgacgcctacaattcagtccgaggggcgcagccctcgttaaactcagacttgattcctcgcctttgatctggccaggggtttaagtgaacgccgcccttttaatgtttaatagggttctttcccggcgggttgacaaacacttccctgggcttttcttcggcttcggtttcatgttgcttcggcacccatgagcgcacaggggggggaccctgcgacagtccgccaagaggaaaatccttcgggtgacctcgtgcgcaacccaatccctttctcttccacatggcgtgtctgtggtgcatgctgtg

SEQ ID NO: 472 - DNA, 428 bp, Unknown
  Description of Unknown: Sicinivirus sp. strain RS/BR/2015/1R-1 polyprotein gene, complete1 sequence
tggctggaagcattcagtttctggatttgttggtttgtggtgattagtagaccccctggaggtacccgttctggatctgaccagggacccgtgactataccgttccggtaattcgggtttaaaactatgaacgtcaccacccattttcttttcctattttattttttcttatattctgatatacgtgtgagtattgatgttccctgatctttgtgtctggtctgcattttcagttattcaatttggttgggctgggctctttatttagatgtttttagaggtctttcttgttattgtagcgctcgttgttgtggtattgtctcctagcgaattatcccagctgttgactatttgcatctacaactttgtcttgatttttctctggttatttggtaccttagagctccccaattatcccaccattcatc

SEQ ID NO: 473 - DNA, 430 bp, Unknown
  Description of Unknown: unclassified Sapelovirus sequence
cccctccacccttaaggtggttgtatcccacataccccaccctcccttccaaagtggacggacaactggattttgactaacggcaagtctgaatggtatgatttggatacgtttaaacggcagtagcgtggcgagctatggaaaaatcgcaattgtcgatagccatgttagtgacgcgcttcggcgtgctcctttggtgattcggcgactggttacaggagagtaggcagtgagctatgggcaaacctctacagtattacttagagggaatgtgcaattgagacttgacgagcgtctctttgagatgtggcgcatgctcttggcattaccatagtgagcttccaggttgggaaacctggactgggcctatactacctgatagggtcgcggctggccgcctgtaactagtatagtcagttgaaaccccccc

SEQ ID NO: 474 - DNA, 430 bp, Unknown
  Description of Unknown: unclassified Sapelovirus sequence
cctccacccttaaggtggttgtatccccataccctaccctcccttccaaagcggatggatatacggacctgaacttttggcgagtacatatggtatgattattggatacaccctgaatggcagtagcgtggcgagctatggaaaaatcgcaattgtcgatagccatgttagtgacgcgcttcggtgtgctcctttggtgattcggcgactggttacaggagagtaggcagtgagctatgggcaaacctctacagtattacttagagggaatgtgcaattgagacttgacgagcgtctcctagagatgtggcgcatgctcttggcattaccatagtgagcttccaggttgggaaacctggactgggcctatactacctgatagggtcgcggctggccgcctgtaactagtatagtcagttgaaaccccccc

SEQ ID NO: 475 - DNA, 430 bp, Unknown
  Description of Unknown: unclassified Enterovirus sequence
cgcgaggcataggttgtacccacggccaaaaaccttcaaccgttacccgccaatcaactacgtaacagctagtatcatcatgtctttgtctaggcgttcgatcaggtggttttcccctccactagtttggtcgatgaggctaggaaatccccacgggtgaccgtgtcctagcctgcgtggcggccaacccagcatcagctgggacgccttttcagagacatggtgtgaagactcgcatgtgcttgattgtgattcctccggcccctgaatgcggctaacctcaaccccggagccttgtattgcaatccagcaatattaaggtcgtaatgagcaattctgggacgggaccgactactttgggtgtccgtgtttcctgtttttcataaatttttcttatggtcacagcatatagtacatatatactgtgatc

SEQ ID NO: 476 - DNA, 431 bp, Unknown
  Description of Unknown: unclassified Enterovirus sequence
aggtcgatgagtcactgcattccccacaggcgactgtggcagtggctgcgttggcggcctgcctatggggcaacccataggacgctttaatgttgacacggtgcgaagagtctactgagctagttagtagtcctccggcccctgaatgcggctaatcctaactgcggagcgcacaccagcaaaccagctggtaatgcgtcgtaacgggcaactctgcagcggaaccgactactttgggtgtccgtgtttccttttattcttattatggctgcttatggtgacaatctaagattgttatcatatagctattggattggccatccggtgactaacagacacatcatttacctttttgttggatttgttccactaaactcactctcatatcaaaccttattgtacatccttaagtccaattatttaaagcaact

SEQ ID NO: 477 - DNA, 432 bp, Pegivirus C
gggtgatgacagggttggtaggtcgtaaatcccggtcatcttggtagccactataggtgggtcttaagggctggtcaaggtccctctggcgcttgtggcgagaaagcgcacggtccacaggtgttggccctaccggtgtgaataagggcccgacgtcaggctcgtcgttaaaccgagcccgttacccacctgggcaaacaacgcccatgtacggtccacgtcgcccttcaatgtctctcttgaccaataggctttgccggcgagttgacaaggaccagtgggggttgggcggtgggggaaggacccctttcgctgcccttcccggtggggcgggaaatgcatggggccacccagctccgcggcggcctgcagccggggtagcccaagaaccttcgggtgagggcgggtggcatttccttttctgtaccgatc

SEQ ID NO: 478 - DNA, 433 bp, Parechovirus A
ctctattagtgagataccacgcttgtggaccttatgctcacacagccatcctctagtaagtttgtaagacgtctggtgacgtgtgggaacttgtgggaatcaatattttgctttaaagcatccattagccagcggataaaacacctggtaacaggtgcctctggggccaaaagccaaggtttaacagaccctagtggattggtttcaaaacctgaaatattgtggaacacactcagtacctactgatctggtagtaatgcaagcactagttgtaaggcccacgaaggatgcccagaaggtacctgtagggaacaagagacactatagatctgatctggggctggctacctctattttggtgagtcagttaaaaaacgtctagtgggccaaacccaggggggaccctggtttccatttattttacaaaggcact

SEQ ID NO: 479 - DNA, 433 bp, Unknown
  Description of Unknown: unclassified Picornaviridae sequence
agtagtggccgtaagccacttttctttctttataacctatcactatactccaacttaatcttctctacttggactaggatctactggttatcgatgagtcgtgatgcttagtgatttggatagggaaatcccacctgagggtaccgatggtatcactcaaacgggtaggggagatacccatttgctattggctgaaccggattaccgatgtacgccagtattagcagtggggcaaatacctccccgagcattatggttagagacagaactacgggtgctagccccggtggcattgcctagtagggttccgacctaatggtattggaaaccacccgtagtaaggtgagtgttggggaacctcaccagtgtctgttactgcctgatagggtcgcggctggccgaatcataatgcttaatgtcagttgaactagtc

SEQ ID NO: 480 - DNA, 438 bp, Rhinovirus C
ttccccggacgtgtgaataggctccaccaggggctgaagctgtagcgttcgttacccgcactgctactacgcaagggttagtatctaactgaaaacattgtggagtttcgctcagcagaaccccactgtagatcggggtaatggggctacacaacccccaccggcgacggtggtgtagcccgcgtggtgccccgcctgaggcttgtgcctcaggacgccacaatgttgacagggtgagaaggcctacgtgtgctagcagtgagtcctccggcctctgaatgcggctaatcctaaccccatagccatcacacacaatccagtgtgcaggtggtcgtaacgggtaactatgggatggaaccgactactttgagtgtccgtgtttcctattttacctttacatgtcttatggtcacaatatagtgtatacatattgtgatc

SEQ ID NO: 481 - DNA, 439 bp, Unknown
  Description of Unknown: unclassified Enterovirus sequence
gttaccccggagcggagtatagatggccaccgctgtcaaaagctcttaaccgttacccgccagttaactacgcaacggctagtagcatcctgttgccttcatggcgttcgatcaggtgagacttccctcctcactagtctggtcgatgaggctgagaactccccacgggcgaccgtgtctcagcctgcgtggcggccagcccagcttttgctgggacgccttgattgagacatggtgtgaagacccgcgtgtgcttaactgtgagtcctccggcccctgaatgcggctaacctaaaccctggagccttgaaacacaatccagtgttcgcaaggtcgtaatgagcaattccgggacgggaccgactactttgggtgtccgtgtttcctttttacctttcaattgttcttatggtcacaatataagtgttatattgtgatc

SEQ ID NO: 482 - DNA, 439 bp, Unknown
  Description of Unknown: unclassified Enterovirus sequence
tccccggcatgagaggaatagactctttcagggttgaagccacgagtgtcgttacccgcactggtactacgcaaagcctagtaacatcttgaaactctttttggttggtcgttccactagttaccccctagtagacctggcagatgaggcaggacgctccccactggcgacagtggtcctgcctgcgtggctgcctgcacacccttcggggtgtgaagccaaaagaaagacaaggtgtgaagagccccgtgtgctaccagtgaatcctccggcccctgaatgcggctaatcttaccccacagctattgcacacaatccagtgtgtatgtagtcgtaatgagcaattgtgggacggaaccgactactttgggtgtccgtgtttccttttattcccatgtttctgcttatggtgacaatactgacgtatagtgttgttacc

SEQ ID NO: 483 - DNA, 439 bp, Enterovirus C
tgtagatcaggctgatgagtcactgcactcctcacgggcgaccgtggcagtggctgcgttggcggcctgcctatggggcaacccataggacgctctaaagtggacatggtgcgaagagtctattgagctagttagtagtcctccggcccctgaatgcggctaatcccaaccacggagcaagtgctatcaaaccagagagtggcttgtcgtaatgcgcaagtctgtggcggaaccgactactttgggtgaccgtgtttccttttatttttatcgtggctgcttatggtgacaatctcagattgttatcataaagcaaattggattagccatccggtgaaagtcaaatcgattatttacttacttgttagtttttctccactaacaccacaaacacttaaaattattgaaatagtgctgctaattagataccactatcata

SEQ ID NO: 484 - DNA, 442 bp, Unknown
  Description of Unknown: unclassified sequence
aagcgactcttccgacgacgaggagcagtgggacgccttcgagtcaactgaccgcccgaagaaggagaaacggcgggaacagaagactcgagagatcacccagccccgatctccaaggaaaaagtcaccgccgcgacactaaacgacctccacccctgcattgagtctgccaataaaccctcgaatactttctgtcgtcctcttttttcctttaacctttcgtgggagagcagcgccgcgcggtcctcctcctctttccgacaccgttccatcgcattcaggaacgggtccaacccctcaccgcaattacgcacttccgcaaggccacgcaaaaagtgaccattgcaccgtgccaaacccctccctcagttaatattaacagccgtcctcaatatccttctaccttccgtgacaggacacagtctccgaacaacccagagca

SEQ ID NO: 485 - DNA, 443 bp, Sapelovirus A
acactcatttcccccctccacccttaaggtggttgtatcccctacaccctaccctcccttccacataggacgaataaacggacttgagattaaggcaagtacataaggtatggtttttggatacacttaaatggcagtagcgtggcgagctatggaaaaatcgcaattgtcgatagccatgttagcgacgcgcttcggcgtgctcctttggtgattcggcgactggttacaggagagtagacagtgagctatgggcaaacccctacagtattacttaggggaatgtgcaattgagacttgacgagcgtctctttgagatgtggcgcatgctcttggcattaccatagtgagcttccaggttgggaaacctggactgggtctatactgcctgatagggtcgcggctggccgcctgtaactagtatagtcagttgaaaacccccc

SEQ ID NO: 486 - DNA, 443 bp, Sapelovirus A
acacccatttcccccctccacccttaaggtggttgtatcccctataccctatcctcccttccaaacaggatggacaaatggacttgacattatggcaagtacataaggtatggtctttggatacacctgaatggtagtagcgtggcgagctatggaaaaatcgcaattgtcgatagccatgtcagtgacgcgcttcggtgtgctcctttggtgattcggcgactggttacaggagagtaggcagtgagctatgggcaaacccctgcagtattactcaggggaatgtgcaattgaggcttgacgagcgtctcttagagatgtggcgcatgctcttggcattaccatagtgagcttccaggttgggagacctggactgggcctatactacctgatagggtcgcggctggccgcctgtaactagtatagtcagttgaaaacccccc

SEQ ID NO: 487 - DNA, 443 bp, Kappapapillomavirus 1
ctacgtctgataagattgatctgaaatctgagaatagagatttatttagaattgtttcatattcgggaaccgtgcagtggagagcattgtgcggtccttgcagacggggggtggggacattgcctcaaatacctttgcttgaaaggcctttgccaacacagcctttgtgcaactgcagcttttgcagcccattgcttgcagaagcagcacctttagttactgtagattctggaggtggttccagatcagcgattcctactgggccttgcgactgcgaggagtgcagtggtaataggacacccgacggggaggaggaaccaggagcaagaaatacaagtagccctgacagttctgtttgtggttgtcctctttgcgagggagaaattattaacgtttaagcttcttgctcatatttggggcgtaggtataataaagcaaaaatt

SEQ ID NO: 488 - DNA, 445 bp, Artificial Sequence
  Description of Artificial Sequence: Synthetic polynucleotide
accacaaacactccagtttgttacactccgctaggaatgctcctggagcaccccccctagcagggcgtgggggatttcccctgcccgtctgcagaagggtggagccaaccaccttagtatgtaggcggcgggactcatgacgctcgcgtgatgacaagcgccaagcttgacttggatggccctgatgggcgttcatgggttcggtggtggtggcgctttaggcagcctccacgcccaccacctcccagatagagcggcggcactgtagggaagaccggggaccggtcactaccaaggacgcagacctctttttgagtatcacgcctccggaagtagttgggcaagcccacctatatgtgttgggatggttggggttagccatccataccgtactgcctgatagggtccttgcgaggggatctgggagtctcgtagaccgtagcac

SEQ ID NO: 489 - DNA, 445 bp, Enterovirus B
gcacaacccaagtgtagatcaggctgatgagtcaccgcattccccacgggtaaccgtggcggtggctgcgttggcggcctgcccatgaggcaactcatgggacgcttcaatactgacatggtgcgaagagtctattgagctaattggtagtcctccggcccctgaatgcggctaatcctaactgcggagcagatacccacatgccagtgggcagtctgtcgtaacgggcaactctgcagcggaaccgactactttgggtgtccgtgtttccttttatttctattttggctgcttatggtgacaattgagagattgttaccatatagctattggattggccatccggtgacaagtagagcaattatctacctatttgttggctttgttccactgaattttagagttctaaaaaccttaacttcattttagcactcaatacggcaaa

SEQ ID NO: 490 - DNA, 446 bp, Unknown
  Description of Unknown: unclassified Enterovirus sequence
gcacttctgtttccccggacgtgtgaataggcctcaccaaggctgaagctgtagcgttcgttatccgctcacctactgcgcaaagactagtaactaactagatacttagtggtgtttcgctcagcagtaccccactgtagatcggggcaatgaggctacgcatcccccactggcgacagtggcgtagcctgcgtggtgccctgcccaggcttcggtctgggacaccactatgttgacagggtgtgaagaccggcgtgcgctaggtgtgactcctccggcccctgaatgcggctaatcctaaccccgcagccaccgcatgcaacccagcatgtagatggtcgtaacgagtaattgtgggatggaaccgactactttgggtgtccgtgtttcctgtttttctttattgttgtcctatggttacaaatttgtgtatcagatttgtgacc

SEQ ID NO: 491 - DNA, 449 bp, Rhinovirus C
agctctgcagatatctccccggacgtgtgaataggccctaccagggctgaagctgtagcgttcgttatccgcatgcctactgcgcaaaggttagtaactaactagatacttagtggtgtttcgctcagcagtaccccactgtagatcagggtaatgaggctacgcatcccccactggcgacagtggcgtagcctgcgtggtgccctgcccaggtttatacctgggacaccactatttggacagggtgtgaaggccagcgtgcgctaggcatgagtcctccggcccctgaatgcggctaatcctaaccctgcagccattgcatgcaaaccagcatgttggtggtcgtaatgagcaattgcgggatggaaccgactactttgggtgtccgtgtttcttgtttttccattaattgtcttatggttacaagtttgtgcaacaaatttgtgacc

SEQ ID NO: 492 - DNA, 450 bp, Pegivirus A
tagagtggttgcgctggaatctggacgaaagccagcggatgggtggtgacagggttggcaggtcgtaaatcccggccatcctggtacctggtataagtctgaaggaacgcgcaagcaactagtgcgatttgttggcaaagtttgagtgcacggtccacaggtgacgcctataccggtgtgaataataggccgactcgagcggagtcgttaaactgaggacccccttggcgatcgcaacttggcctgcgtacgggaacgccgctaaagtcacagtgggttaataccggcgggttgacaatcccagcagggcgggggggagctactgttgcatcctgcgagttccgtcttgggggtaggcatggggtggcccagctccgcggcgcgctacagccggggtaggccaaaaatccgaaaggtgaggccgggccacatgtccgtttttatttaccc

SEQ ID NO: 493 - DNA, 452 bp, Pegivirus B
taaatcccggtccaggtttattcagtatatgataggtggagtcgagccccccgaccggggctctgtgaccactgtccagccggacgaggtggtgaaagttgttcgggcacggtccacaggttgggttcaccggtgtgaatagagccccgtctcgagcggagacgttaaacttagatggtctgcaggatggcaacgcggcccgcgtacgggaacgtcgcaaaataccttcgggaacagtgcatgcagcgggttgtcaaacccagcggtggcgcgctccggagaggtggagccctcaatggaggccagttccctgcagaaccagcccttcggggcaggcatggccccccccagccggcgcggcgctacacgcggcaagaggaagagccttcgggtgacctcgggggggatttgtccctttcaacccaatgagagttcgtgcgttggtcgcagtc

SEQ ID NO: 494 - DNA, 455 bp, Sapelovirus A
cgcatgtattccacactcatttcccccctccacccttaaggtggttgtatccacttaccctatcccccccctccaaagcggacggactcttggacctgaaactctggcaagttaaatgataagatatctggatacacttgaatggcagtagcgtggcgagctatggaaaaatcgcaattgtcgatagccatgttagtgacgcgcttcggcgtgctcctttggtgattcggcgactggttacaggagagtagacagtgagctatgggcaaactcctacagtattacttaggaggaatgtgcaattgagacttgacgagcgtctcttagagatgtggcgcatgctcttggcattaccatagtgagcttccaggttgggaaacctggactgggtctatactacctgatagggtcgcggctggccgcctgtaactagtatagtcagttgaaaccccccc

SEQ ID NO: 495 - DNA, 455 bp, Enterovirus C
gcagtagagatgggagtgtagcttaggtcgatgagtctggacattcctcaccggcgacggtggtccaggctgcgttggcggcctacctgtggcccaaagccacaggacgctagttgtgaacaaggtgtgaagagcctattgagctacaaaagagtcctccggcccctgaatgcggctaatcccaaccacggagcaagtgctcacaaaccagtgagtggcttgtcgtaacgggtaactctgtggcggaaccgactactttgggtgtccgtgtttccatttatttttacaatggctgcttatggtgacaatcgttgattgttatcataaagcgatttggattggccatccggtgaaagtgaaatatattatttatctttttgttggattcgctccaatcaactcctttacttacaaactcatcacaacagtactactaattaggaacatataccact

SEQ ID NO: 496 - DNA, 455 bp, Unknown
  Description of Unknown: unclassified Enterovirus sequence
tgcacttctgtttccccggtactagggtgttaaacttccccagaggttgaagcccgatgtatcgttacccgcatggttactaagcagagcctagtagcatcttgctttgcatatgagctggtcgttcagtcagtaaaccccctgatagacctggcagatgaggctggaaataccccactggtaacagtgttccagcctgcgtggctgcctgcccctcttttgaggggaagcccatatgtagacaaggtgtgaagagccgcgtttgctaactatgagtcctccggcccctgaatgcggctaatccaaccccacagctactgcgcagaaaccactgcgtaggtagtcgtaatgagcaattgtgggacggaaccgactactttgggtgtccgtgtttcctgttttactttacattgctcatggacacaacatatataaaatcgtatatgttgttcacc

SEQ ID NO: 497 - DNA, 457 bp, Avisivirus C
gggtatggtggttaaccccgtccactgggcatctttgccctctcagaagtggatcaatccaccccaactccccccctggttacctgagccacagtggactccggtgacgaagctagggaccccaatacctcaagtgccaagagagtccccccctcgcgagaggtgctcttgggcccaaaaggctagttggcagagtgaagtgaaggaagctgctaacgtggtgaccttaagcgtaattcgaagctgacctttgaggttaaccctagtggaccactggaggaatctgtggaggtggtggttaggaaagttggccacttgtgagtagatgcccagaaggcataaggctgatctggggccagtgactataccgttccggtaaacctggtataaaaaccatgaaagcaagtgggtgaaattttctctttttatccttcattcagcagttgatattggcaaa

SEQ ID NO: 498 - DNA, 460 bp, Unknown
  Description of Unknown: Picornaviridae sp. isolate ybb044pic01nc genomic sequence.1 sequence
aaaagactcgctaactcaaaactctctcactctcactctccactcccaaactattatccgactaagtgacccactaactaatccaaaattccaatcctacactatcttgcacctttcactctcctctatctaatctataaagctcttacaactaaacctctccataccccattacaaccgcaaaatctacgaattcaaataaactcccaattgcccgaaaattcacttccacctaattctctcaaaatttctgactcactctcagaacaaaccaattcagtgcaaactgaacatacactctcccctgaacaaacgcagcaactcctccaaaccactcttaagactgcgtctcaaatttttgctcaactccaagagaaacaaatctcttctccccagaaagttaatactccaacgctctctgattcctcctccgaccccactcttcaacaagcttcatatc

SEQ ID NO: 499 - DNA, 460 bp, Unknown
  Description of Unknown: unclassified Picornaviridae sequence
ctccactctcctttctcccttccccctccctttaccttttccccctctgtaactaagttttgtccctgcagagcagtgatacgacataaccgagttggaacgcgtattgggtattggtgaatatctatctcatgtggttaagctaaggcttgaaatacctttggcattgggttatagtagggcattagtgttcccacatgagagaaccatctatccacttgacacagtgggtgtatagtacaaaggaccctatttggtatcctgacgcgtgggcgagtaagtcttgctggatttccgcgagcatcaaccacaccctgatagtctcaatggggtcactcccgagacggggcaagtcacctatacactacctatggttgggaagccatagctggactgtgacagcttgatagagtgtcggcgggcacagtggattggatgtaaagtccgttgaaatgccatt

SEQ ID NO: 500 - DNA, 464 bp, Unknown
  Description of Unknown: unclassified Sapelovirus sequence
ttcggcacgcatgtattccacactcatttcccccctccgcccttaaggtggttgtatcccataacctttaccctcccccttcccagtcggacggaactatagttcatagacttagattctgtattaaggtgtgactaggatcaaccccatgtggcagtagcgtggcgagctatggaaaaatcgcaattgtcgatagccatgttagtgacgcgcttcggcgtgctcctttggtgattcggcgactggttacaggagagtaggcagtgagctatgggcaaacctctacagtgttacttagagggaatgtgcaattgaggcttgacgagcgtctccttgagatgtggcgcatgctcttggcattaccatagtgagcttccaggttgggaaacctggactgggcctatactacctgatagggtcgcggctggccgcctgtaactagtatagtcagttgaaaccccccc

SEQ ID NO: 501 - DNA, 465 bp, Unknown
  Description of Unknown: unclassified Enterovirus sequence
cagcggtcaagcacttctgtctccccggcatagggatgttaggcttctcacgaggctgaagtcccgattgtcgttatccgcacaactactggacaaagcctagtaacaccctacgacgtagtatggttggtcgttccaccagtgaatccccccctggtagacctggcagatggggctagaaattcctcactggcgacagtgttctagcccgcgtggctgcctgctccctaacgggagaagccatcctactgacaaggtgtgaagagccccgtacgctagttgtgagtcctccggcccctgaatgcggctaatccaaccctgcagccattgcatggaagccaccatgtagatggtcgtaatgagtaattgcgggacggaaccgactactttgggtgtccgtgtttcttttatttcttgtatattgcttatggtgacaatatatatacagcatatatattgttcatc

SEQ ID NO: 502 - DNA, 466 bp, Cardiovirus B
atggggaagggtatgacgtgccccttccttcttcggagaactcgctctagtggtctttccacttctggaaaagagtgagtgcacgtgatcaggaccgtcgaagacgacaaatacctggtgctctatctcatagacgtttcacagctgtagcgacccctcagtagcagcggaagccccctcctggtgacaggagcctctgcggccaaaagccacgtggataagatccactgctgagggcggtgcgaccctagcaccctgtgatgcatactagttgtagcgtgccggactattggtctgtcataagacacctgatagagagaccaagaatgtcctggaggtaccccgcgtgcgggatctgaccaggagaccattgcccaatgctttacaacgggtctatggtttaaaaactgtcgcagtctctccaaaccaagtggtcttggttttcaattactttgaatatttcact

SEQ ID NO: 503 - DNA, 468 bp, Unknown
  Description of Unknown: unclassified Picornaviridae sequence
aaaaggagggatacaaatggtaccacggacaagcgtggaaaaccacctgtatccccccttttgggcttggcaacccattaatcaagatgccttctcttttgccggttttaagactccattttgcctgctgaatctgatgtgttctcactagacgtgtagcttagcacgatggccaggtcttgtttatactggcataagccgggagaacggtcttacagtgatcttggagtttggttagtatctgctagagtggcgtaactgcagacatgttgcccagggccgtaggctaggtaactagcaccctgggggccgcaagcctaggtggtcacaaccaccctcatgtaacccttgtcgggcattcttgtagtagaacccctaactccacttttgctgggaccaagtaccctgtgagagcaatgtaagtagatgccctgtaggtacccgtttaggatctgagcaggggccggg

SEQ ID NO: 504 - DNA, 475 bp, Unknown
  Description of Unknown: unclassified Sapelovirus sequence
gtacatgcgtattacggtacgcatgtattccacactcatttcccccctccacccttaaggtggttgtatccactcaccctaccctcccttccaaagcggatggactttatgtgtttgaaactttggcaaccataaaaggaatggtatttggatacggatgaatggcagtagcgtggcgagctatggaaaaatcgcaattgtcgatagccatgttagtgacgcgcttcggcgtgctcctttggtgattcggcgactggttacaggagagtaggcagtgagctatgggcaaacctctacagtattacttagagggaatgtgcaattgagacttgacgagcgtctctttgagatgtggcgcatgctcttggcattaccatagtgagcttccaggttgggaaacctggactgggcctatactacctgatagggtcgcggctggccgcctgtaactagtatagtcagttgaaaccccccc

SEQ ID NO: 505 - DNA, 476 bp, Unknown
  Description of Unknown: unclassified Enterovirus sequence
aacacatcgctcaacagcagttccacatccagtgggattatgagcaagcactcctgtttccccggaagggactaacggtacgctgtacccacggcggaagtatgtcctaccgttaaccggccatgtacttcgagaagcctagtaccattatgaaggttgattgatgttacgctccccggtatccccaaccggtagttctggtcgatgagtctcggcatcccccacgggcgaccgtggccgaggctgcgttggcggccagcctacacccaccagggtgtaggacgtcatgatactgacatggtgtgaagagcctattgagctacgtggtagtcctccggcccctgaatgcggctaatcctaactccggagcatccgctaacaatcccgttagaagggtgtcgtaacgcgaaagtctggagcggaaccgactactttgggtgtccgtgtttcctgttttacttactgtttggctgctt

SEQ ID NO: 506 - DNA, 478 bp, Unknown
  Description of Unknown: unclassified Shanbavirus sequence
tgaaaagggggcgcagggtggtggtggttactaaatacccaccatcgccctgcacttcccttttcccctgtggctcagggtcacttagccccctctttgggttaccagtagttttctacccctgggcacagggttaactatgcaagacggaacaacaatctcttagtccccctcgccgatagtgggctcgacccccatgtgtaggagtggataagggacggagtgagccgatacggggaagagtgtgcggtcacaccttaattccatgagcgctgcgaagaaggaagctgtgaacaatggcgacctgaaccgtacacatggagctccacaggcatggtactcgttagactacgcagcctggttgggagtgggtataccctgggtgagccgccagtgaatgggagttcactggttaacacacactgcctgatagggtcagggcctcctgtccccgccgtaatgaggtagaccatatgcc

SEQ ID NO: 507 - DNA, 478 bp, Unknown
  Description of Unknown: unclassified Enterovirus sequence
gtgcgccacatccagtggtgttttgtacaagcacttctgtttccccggagcgaggtataggctgtacccactgccaaaagcctttaaccgttatccgccaaccaactacgtaaaagctagtaacatcttgtttgtaatctggcgttcgatcaggtggatttcccctccactagtttggtcgatgaggctaggaatccctcacgggcgaccgtgtcctagcctgcgtggcggccaacccagcatatgctgggacgcccttttatagacatggtgtgaagactcgcatgtgcttggttgtgattcctccggcccctgaatgcggctaaccttaaccctggagccttgtattacaaaccagtgatattaaggtcgtaacgagcaattccgggacgggaccgactactttgggtgtccgtgtttctctttttactcattattgtcttatggtcacagcatatttgttaaatatactgtgatc

SEQ ID NO: 508 - DNA, 478 bp, Unknown
  Description of Unknown: unclassified sequence
gtgacaatcagccagattgttaacggtcaagcacttctgtttccccggtacccttgtatacgcttcacccgaggcgaaaagtgaggttatcgttatccgcaaagtgcctacgagaagcctagtagcacttttgaagcctatggctggtcgctcaactgtttacccagcagtagacctggcagatgaggctagatgttccccaccagcgatggtgatctagcctgcgtggctgcctgcacactctattgagtgtgaagccagaaagtggacaaggtgtgaagagcctattgtgctcactttgagtcctccggcccctgaatgtggctaatcctaaccccgtagctgttgcatgtaatccaacatgtctgcagtcgtaatgggcaactatgggatggaaccaactactttgggtgtccgtgtttcttgtttttctttatgcttgcttatggtgacaactgtagttattacatttgttacc

SEQ ID NO: 509 - DNA, 480 bp, Unknown
  Description of Unknown: unclassified Enterovirus sequence
gtggtaaatccataccactaatggtcaaacacttctgttcccccggcatgtgaggaataggctccaaaagggctaaagccactagtgtcgttatccgcattggtactacgcaaagcctagtatcactctggaagtctctcggttggtcgctccaccaggtaccccactggtagacctggcagatgaggcaggactcaccccactggcgacagtggtcctgcctgcgtggctgcctgcacacccctacggggtgtgaagcctagagatagacagggtgtgaagagccccgtgtgctaccaatgagtcctccggcccctgaatgcggctaatcttaccccacagctgttgcacgcaatccagcgtgtatgcagtcgtaatgagcaattgtgggatggaaccgactactttgggtgtccgtgtttccttttattcctattatttgcttatggtgacaatattgatagcatcagtgttgtcatc

SEQ ID NO: 510 - DNA, 480 bp, Unknown
  Description of Unknown: unclassified Enterovirus sequence
gtgcttgaccgtcagtaacctggatggtcaccacctattggtcattgtgtacaagcttctatatgtttcaccagaggcgaaaaacgaggttatcgttatccgcaaagtgcctacgagaagcctagtagcactttcgaaacctatggctggtcgctcagctgcttgcccagcagtagacctggtagatgaggctagacattccccaccagcgatggtggtctagcctgcgtggctgcctgcacacccaatcgggtgtgaagccagaaagtggacaaggtgtgaagagcctattgtgctcactttgagtcctccggcccctgaatgtggctaatcctaaccccgtagctgttgcatgcaacccagcatgtatgcagtcgtaatgggcaactatgggatggaaccaactactttgggtgtccgtgtttcttgttttacttttcattgcttatggtaacaattgtagttgatacacttgttacc

SEQ ID NO: 511 - DNA, 487 bp, Rafivirus B
gtgtccgggaagcgactcaagcttttgactgagtctctacaccttcatccgtaacatctttaagtttatgtgcctatggacctctagtgcactgccatcaccgggggtgtattggactggtttttccacaatccattcatcctgaggaattttggctttgttactaggatggtcccaccacacgcttatctgtgcctattgtgtcaaccatgttcttaagtagttgtgcccgtgggtgagtagataaccacaacaatccgataaagcatctcgcaaggatgtgagtaatggagtgtatgtgctacagagacccacaacctgaaccaagagagacacagtgaggattgtaaagggggaactctttgaaagggcatgtcccgcaattcctactgactgacaccgggggttggtgtcggtggattttagcaaatcctgttactgggtgatagccttgtgcacttcacttggttcttgtataagtgctgta

SEQ ID NO: 512 - DNA, 488 bp, Tremovirus A
tttgaaagaggcctccggagactccggaggtattctttcgacccaacccatactggggggagtgtgggaccgtacttggagcgcacggtatatatgtgttcccgcatggcaagggcgtgttaccttgctccctgacgcatggtatgtgtcgatttgattttcaacttatcctaaggtctaggcgtttcgtgccgaaaacctctttgcgtttcacagaaccatcctaaccatgggtgcagtatgggaatcgtgtatgggggtgattaggatctctcatagagggataggtatgtcatcaaaccggggagtactccggctctggcattgggacatttgaattaaccggacctggttcagtatccgggttgtcctgtattgttacggtgtatccgtcttggcatactgaaagggtattcttgggtaatcctttcctactgcctgatagggtggcgtgcccggccatgagagattaagggtagcatttaacc

SEQ ID NO: 513 - DNA, 489 bp, Unknown
  Description of Unknown: unclassified Sapelovirus sequence
ttgaaatgggtgtggggtacatgcgtattacggtacgcatatattccacactcatttccccccctccacccttaaggtggttgtatccccataccttaccctcccttctaaaacagatggacaaatggatttgaacttatggcaagtgaatatggtatgactttggatacactttaacggcagtagcgtggcgagctatggaaaaatcgcaattgtcgatagccatgttagtgacgcgcttcggcgtgctcctttggtgattcggcgactggttacaggagagtaggcagtgagctatgggcaaacctctacagtattacttagagggaatgtgcaattgagacttgacgagcgtctcttagagatgtggcgcatgctcttggcattaccatagtgagcttccaggttgggaaacctggactgggcctatactacctgatagggtcgcggctggccgcctgtaactagtatagtcagttgaaacccccc

SEQ ID NO: 514 - DNA, 489 bp, Unknown
  Description of Unknown: unclassified Cardiovirus sequence
gttcgtctgctttctgagtactattcatgaaaagggtatgtgctaccccttccttcttggagaatctgcgtggcggtctttccgtctcttgaaaagcgcagatgtagcatgctggaaccggtgaagaaaacagttctctgtggagacttagagcagacatcgaaacagctgtagcgacctcacagtagcagcggaaccccctcctggtgacaggagcctctgcggccaaaagccacgtggataagatccactgctgtgagtggtgcaaccccagcaccctggttcgatggttgttctctgtggaatcagggaatggttattctcaagccctccagtagagaagccaagaatgtcctgaaggtaccccgcgtgcgggatctgatcaggagatcagttaccagtgctctacactggtactctgatttaaaaaatgtcacagcttctccaaaccaagtggtcttggttttccttttacctacaaagttcatg

SEQ ID NO: 515 - DNA, 489 bp, Unknown
  Description of Unknown: unclassified Enterovirus sequence
gaagaccaataggcggtggttatccaaaccatcaacggtcaagcacttctgtttccccggttagattgatacgctccaacagggcgaaaacaactctaatcgttatccgcaagatgcctacgcaaagcttagtatcacctttgattctatttggttggtcgctcagctacaaacccagtagtagacctggcagatgaggctagaaacaccccactggtaacagtgttctagcctgcgtggctgcctgcacaccctatgggtgtgaagccgactagttgacaaggtgtgaagagccccgtgtgctcatcttgattcctccggcccctgaatgtggctaaccttaaacctgcagccaatgtacacgatccagtgtgctgttggtcgtaatgagtaattgcgggatgggaccaactactttgggtgtccgtgtttctctttttacctttattattgcttatggtgacagtatatggtatatatattgtcact

SEQ ID NO: 516 - DNA, 491 bp, Unknown
  Description of Unknown: unclassified Sapelovirus sequence
ttgaaatgggtgtggggtacatgcgtattacggtacgcatgtattccacactcatttcccccctccacccttaaggtggttgtatccacataccctaccctcccttccacacaggacggacttttggacttggaccttcggcaagcacatatggtatgattactggatacaccttgaatggcagtagcgtggcgagctatggaaaaatcgcaattgtcgatagccatgttagtgacgcgcttcggcgtgctcctttggtgattcggcgactggttacaggagagtaggcagtgagctatgggcaaacctctgcagtattactcagagggaatgtgcaattgagacttgacgagcgtctctttgagatgtggcgcatgctcttggcattaccatagtgagcttccaggttgggaaacctggactgggcctatactacctgatagggtcgcggctggccgcctgtaactagtatagtcagttgaaaccccccc

SEQ ID NO: 517 - DNA, 491 bp, Unknown
  Description of Unknown: unclassified Enterovirus sequence
aaagtgaccaataggcggcaatcacccagattgtcaaaggtcaagcacttctgtttccccggtcgaagctgatatgctccaacagggcaaaaacagctgagatcgttatccgcaaagtgcctacgcaaagcctagtaacattttcgaagttatatggttggtcgctcagccaaaccccatggtagacctggcagatgaggctagaaataccccactggtgacagtgttctagcctgcgtggctgcctgcacaccctctgggtgtgaagccatataatagacaaggtgtgaagagccccgtgtgctcactttgagtcctccggcccctgaatgtggctaaccttaaccctgcagctagtgcatgcaatccagcatgtatctagtcgtaatgagtaattgcgggatgggaccaactactttgggtgtccgtgtttcctttttatccttattgattgcttatggtgacaatatatagtactatatattgacacc

SEQ ID NO: 518 - DNA, 492 bp, Avisivirus B
caccccctactgccctaacccccaaagttagttatagggtggctccctacccttactccacggggtaagccctaacccggttgaatctcaagatcagccttagcgaggactattagtaccgctcaaaccctttgcctgtagtgcccaggggtcacagaggggtgaccctctccctggggcccaaaaggctaggtggcaagacagggtccaagtgaggggctactctaagtagccccaagctgaacatcctgtctgaagccacccttgcagggccaggtttgattggggaaactagacaccagctttgtcctgggattggggggatatcgagttagtccaggaggtgcgagtagatgcccccgaaggtaccccaggcacatctgggatctgatcgggggcccgtgactatacaataggtaaaccgggttaaaaaacatgaaagcgcctctctctttcctacttcttttattgactggtgacaaaaatagcagt

SEQ ID NO: 519 - DNA, 493 bp, Tremovirus A
tttgaaagaggcctccggggtatccggaggtcctttttcgacccaacccatactggggggtgtgtggggccgtatttggagtgcacggtatatatgcattcccgcatggcaagggcgtgccaccttgccccttgacgcatggtatgtgtcatcatttgccttggttaaaccccataaaacgaggcgccacgtgccgaaaatccctttgcgtttcacagaaccatcctaaccatgggtgtagtatgggaatcgtgtatgggggtgattaggatctctcgtagagggataggtgtgtcattcaaatccagggagtactctggctctgacattgggacatttgatgtaaccggacctggttcagtatccgggttgtcctgtattgttacggtgtatccgtcttgacacactgaaagggtattcttgggtaatcccttcctactgcctgatagggcggcgtgcccggccacgagagattaagggtagcaatttaaac

SEQ ID NO: 520 - DNA, 494 bp, Unknown
  Description of Unknown: unclassified Picornaviridae sequence
tttgcatcagttcgcccctcccctcaccatacctttttcccctctttaggactgatacttggttatgatgagcagaggatttcgcaagttatgcttcttgataaaaagtaattcacgaatcatgggattatagcctggaagtgaacactcatgtggcaagtgggttagtagctctccatgttcccatgtgcagtggactgacaacagtgagttcggggttgtgtagtaaagggaaagtattacttacccgcacctgctatacgtggtgtacgtaggatacgagttagtagtgcttagcaactttaaactggtgctgaaatattgcaaggtcactgaagttgtgaacgcgaacgctccgccactgccatgtatagcgtgcaatgcataaatggtgcactacatgatacgagggaatgggaaaccctccatggccgaatgcagggtgacagcctgccggcggatgcctgttgttagtataatccgttgtttgccac

SEQ ID NO: 521 - DNA, 494 bp, Tremovirus A
tttgaaagaggcctccggagtgtccggaggctctctttcgacccaacccatactggggggtgtgtgggaccgtacctggagtgcacggtatatatgcattcccgcatggcaagggcgtgctaccttgccccttgacgcatggtatgcgttatcatttgccttggttaagccccatagaaacgaggcgtcacgtgccgaaaatccctttgcgtttcacagaaccatcctaaccatgggtgtagtatgggaatcgtgtatggggatgattaggatctctcgtagagggataggtgtgccattcaaatccagggagtactctggctctaacattggcacatttgatgtaaccgaacctggttcagtatccgggttgtcctgtattgttacggtgtatctgtcttggcacactcacagggtatttttgggtaatcctttcctactatctgatagggtggcgtgcccggccacgagagattaagggtagcaatttaaac

SEQ ID NO: 522 - DNA, 494 bp, Unknown
  Description of Unknown: unclassified Enterovirus sequence
atcgagaaacctagtaccaccatgaaggttgcgcagcgtttcgctccgcacaaccccagtgtagatcaggccgatgagtcaccgcgttccccacgggtgaccgtggcggtggctgcgttggcggcctgcccatggggcaacccatgggacgcttcaatactgacatggtgtgaagagtctattgagctaattggtagtcctccggcccctgaatgcggctaatcccaactgcggagcagatacccacacgccagtgggcagtctgtcgtaatgggcaactctgcagcggaaccgactactttgggtgtccgtgtttccttttattttttgtactggctgcttatggtgacaattgagagattgttaccatatagctattgggttggccatccggtgtcaaacagagcgatcatctatttgtttgttggattcatacccttaaaccttaaagccctaaacactcttaattttgtgttgcaactgaactcagcaaa

SEQ ID NO: 523 - DNA, 496 bp, Unknown
  Description of Unknown: unclassified Picornaviridae sequence
taagcggaaagcattcttgtcccccggtcagtaacctataggctgttcccacggctgaaagggtgaacatccgttacccgcctcagtacttcgagaaacctagtacgcctgatgattccaaattggtatgatccggtcaaccccagaccagaaactgtggatgggggtcaccattcctagtatggcaacatacaggtgtccccgcgtgtgtcacaggcccttacgggtgccatttcggatgagtctggccgaagagtctattgagctactgttgatacctccggccccctgaatgcggctaatctcaaccccggagccactgggtggtgaaccaaccacttggtggtcgtaatgagcaattctgggacggaaccgactactttggggtgtccgtgtttcttttgttcatattaaactgttttatggtcacaacacaacttggtacgatttgtgattattcactgctcacttgtcacagtaaatatacacaatcatc

SEQ ID NO: 524 - DNA, 496 bp, Enterovirus B
tacttcgagaaacccagtaccaccatgaaggttgcgcagtgtttcgctccgcacaaccccagtgtagatcaggtcgatgagccaccgcattccccacgggcgaccgtggcggtggctgcgttggcggcctgcccatggagcaatccatgggacgcttcaatactgacatggtgtgaagagtctattgagctaattggtagtcctccggcccctgaatgcggataatcctaactgcggagcagacgctagcaaaccagcgagtagtctgtcgtaacgggcaactctgcagcggaaccgactactttgggtgtccgtgtttccttttattctcatactggctgcttatggtgacaattgaagaattgttgccatatagctattggattggccatccagtgacaaatagagcaattgtctatttatttgtcggttttgtaccgttaaactacaaagttctaaacactctcaatcttgttttatcactcaatacatcaaa

SEQ ID NO: 525 - DNA, 498 bp, Pegivirus A
gcttcggcgcctagccgaaaccgacaccctgttcgaaatctttccgaaacatagagcggttgtggggaaactggacgaaagccagcggatggggggtgacagggtaggcaggtcgtaaatcccggcctccctggtacctggtataagtctggtggaaccatagcttaactgtgtggactttggacgtaggcagagtgcacggtccacaggtgacgcctataccggtgtgaataataggccgactcgagcggagtcgttaaactgaggacccattctaggatcacaacttggctgccgtacggtgacgccgctaaagtcacagtgggttaagtccggcgggttgacaacaccaggcaggcggggggacgctactgttgcgccctgtgagttccctagttgggtaggcatggggggacccagctccgcggcgcgctacagccggggtaggccaaaaatccgaaaggtgaggccgggtcccatttttcctttttgagtctc

SEQ ID NO: 526 - DNA, 498 bp, Unknown
  Description of Unknown: unclassified Pestivirus sequence
gtataagggttgggaaccttgtaccaagctacctctgccattcagtatttgggagtagaagtagatgtgtttacaaactcacacgtgtgggggcggggatagactgtgccagcggtcgtgtaccagcacctacgcatacgtgtggactgcgaaccaggagagcacctaggtctgacaagctgtgagaacacagtagtcgtcagtgagtcagctggtaaggatcacccacctggatactcacgtggacgagggagtttcccagtcagaaacctacaccagaggaggggtcctctggagacatggatggtctgagtaacagactatctactggggtgtgctgcctgacagggtctcggctgatagcctggctagcagtataaaaatcagttgaattggcatatgagttgtgaacatctagtaaacaatgaaagacaaaaacaaaaaatgagcataataaaaaaattgtacaatccactactcaggtgtggctgcagactt

SEQ ID NO: 527 - DNA, 500 bp, Unknown
  Description of Unknown: unclassified sequence
tttcaaatcggactccggtagttataccggagcccggtttggacgcttgggccgcgttaacagccccccacccctttcccactgactgatttctcggattggactcatttgcattgctaactctgattctggatttccccgtttatgtcgtcgcggtcggaagtgcacgtacttcgacgttgatctgatggcgtttgtttccaggggggaggtggcggcagaaacgcccccgccgtaaacttcggcgggccacgcctgtcaagccactccctggggccgagcgcctgaggtgatacagagagataagcacactgggcgctgacaacgcccgggacctcagtgagaagagcagtagggccgtgtttatgggactccattggatatcccccgcttgtcggaactcacggctactccgggttgggaagcccgcgactggtactgtactgggtgatagcctggtgccttccctctcactgttgtatgaaggctgaaaaccccct

SEQ ID NO: 528 - DNA, 501 bp, Pegivirus C
accgacgcctatcaaagtaggcaataaggcctcgcgccgaaccggcgaccggccaaaaggtggtggatgggtgatgccagggttggtaggtcgtaaatcccggtcatcttggtagccactataggtgggtcttaaggggaggctacagtccctctagtgcctgtggagagaaagcgcacggtccacaggtgttggtcctaccggtgtgaataaggacccgacgtcaggctcgtcgttaaaccgagcccgttaaccccctgggcaaacgacgcccacgtacggcccacgtcgcccttcaatgtctctcttgaccaataggcaaagccggcgagttggcaagggccagtgggggccgggggcagggagaaggactccctgtcctgcccttcccgggggtgcgggaaatgcatggggccacccagctccgcggcggcctgcagccggggtagcccaagagccttcgggtgagggcgggtggcatttttctttcctataccgatc

SEQ ID NO: 529 - DNA, 502 bp, Unknown
  Description of Unknown: unclassified Enterovirus sequence
ctttgtgtttgagggccaataggtgagtggtaaaccataccactaaaaggtcaagcacttctgtttccccggtgtgcagggaataagctctacccgggctgaagccttaaacatcgttatccgcacaattactacgcaaagcttagtagtaccttgaaagctccttgactggtcgctccgctagattacccatctagtagacctggcagatgaggctggatactccccactggcgacagtgatccagcctgcgtggttgcctgcacacctggtaacaggtgtgaagccaatgagtagacagggtgtgaagagccccgtgtgctaattgtgagtcctccggcccctgaatgcggctaatctaaccccacagctaatgcatacaaaccagtatgtatttagtcgtaatgggcaactgtgggacggaaccgactactttgggtgtccgtgtttcctttattctcattattttgcttatggtgacaaatacgatatatttgtcatc

SEQ ID NO: 530 - DNA, 506 bp, Anativirus B
gtgtgtcatttctcccctccccctcccaaaccttttccccctctaatcggattgattaacccggttaaagatgattaatggtttgtgagttgatatgatggcccggcattgaatccgggaattcttaagtaatggaattgcatccaatatgaaagtgagtgtggcaagctcacaagtagtacttggctctgcccattatttgaggaccaactcttcttgactacaatgtgtttaaagtaaactggaccacattgtgtatccagacaactccatttgataatgtacgctggaaacgttttcagtgcatagggtcctaaagtggtgctgaaatattgcaagctcaatgggatactgaacgctgaaaaccgccgctgttatcatatgggcccctagtgggtaaatgttggctttaggcatatactgcttgggaatgcagtactggttgtagacagggtgatagcctaccggctggcgtagttgagttggtatagccagttgattgccat

SEQ ID NO: 531 - DNA, 506 bp, Aquamavirus A
ttcaaaggtggcgggagagttggcctcacgctgtttagcgtgagagctggctctcctgccccttcccctgagccggggatcttggctcattcccctcttttctatcctccctcattggactttacggatgacccggcataaacttgacaaccgatgttggatttcccttgtggctgtgatggaggacataccctcgggtgtagttgtgtgcgtgtcgctctgcgactcgagcttcaaagtggtgctgaaatattgcaagcgtcgttgctcgattaacggagtggtacaatcctatgaacccaagtgcattcatgcgaaagccccggaggggtgagtagcatggactcgaatcagaagagctggagctcgcttggtacggcacgtagcattgctttgcctaaagaccaagggggtatggctataggtgggggcctatagcttgtccagtgctggttgacagactcgtgctacgcgtctggttcgagtataagtagctgcaactcact

SEQ ID NO: 532 - DNA, 508 bp, Unknown
  Description of Unknown: unclassified Crohivirus sequence
gtataagagacaggtgtttgccttgtcttcggactggcatcttgggaccaaccccccttttccccagccatgggttaaatggcaataaaggacgtaacaactttgtaaccattaagctttgtaattttgtaaccactaagctttgtgcacataatgtaaccatcaagcttgttagtcccagcaggaggtttgcatgcttgtagccgaaatggggctcgaccccccatagtaggatacttgattttgcattccattgtggacctgcaaactctacacatagaggctttgtcttgcatctaaacacctgagtacagtgtgtacctagaccctatagtacgggaggaccgtttgtttcctcaataaccctacataataggctaggtgggcatgcccaatttgcaagatcccagactgggggtcggtctgggcagggttagatccctgttagctactgcctgatagggtggtgctcaaccatgtgtagtttaaattgagctgttcatatacc

SEQ ID NO: 533 - DNA, 509 bp, Aquamavirus A
gctcaggggaaggggtagggtggctggacgcccgccatacaggcgggctccaaccaccccaccccttcccctgagccggggttctttggctcatcccccttctttatctatctccctcatgtacggattaaactggcataaatttgatatcgatgttggattatcccttaaatggttttggtgggggacatagccccgggcgacctctagtcggacatgctggctttcctagattcaaagtggtgctgaaatattgcaagcgtcgtttctaggtaggttggtatgaatggctttagtgaacccaactgcaatcatttgaacgcccctgaggggttagtaaaatggactcacagctggagagctggagtgagtgcaccacggtacatagcattgctctacctatagggtgtacttgcatggctaagggtgggggcccttagcttgtccagtgctgggtgacagcctcgtgccacgcgctggcctgtgagtataagtggctgaatatcgct

SEQ ID NO: 534 - DNA, 510 bp, Pegivirus C
aagccccagaaaccgacgccccacggaatagtgggactaaggcccaatcaaagccaggaattccggccgaaagggtgtggatggtggtgacagggttggcaggtcgtaaatcccggccattctggtagcacctataggtgggttgaactggcggcgagaagtccctaatacctcttgcacgtgttgcgcacggtccacaggattggtctttccggtgtgaatagagacccgacgccagtcacgtcgttaaacagagtgcctttccccatcgcaacgccggccctcgtacgggaacgtcgcccttttaataccactctggtcagtagcatgtgcggcgagttggcaatcccagggggcgggcggggcgtacacggtaggaccgtgccgcctgcgttgtcggggtctggtattaatgcatggggccacccagctccgcggcggactgcagccggggtagaccaagatccttcgggtgaggtcgggtggcatctttctttctttgacatcatg

SEQ ID NO: 535 - DNA, 512 bp, Bopivirus A
ttttctcccctccccctccacttaccttttccccctcttgtaacgctagaagtttgtgcaaatcgcctgtagggtactgcaatccagcagtgcataggcaaagcttttcttgttaccccaccccacattatactgaggaggatggtgaaattgtgttagtatgggttagtagcggtgacccgggtaaccccaacccagaaactcacggatgagatgaacaggaccccacatggtaacgtgtgtgttcgtctgccccgcaaggtgaggccgtgagagctccgcacgcgaaaaccttgaaaacccaaaagtaccttgagctcttcgctattttgtgtttcctccaggaccctgaatgcggctaaacccaacccgcgatccgcacgtagcaacccagctagagtgtggtcgtaatgcgcaagttgcgggcggtaccgactactttggtgttcctgtgtttcctttattttattttaaatttttatggtgacaacagctggaaaataagagtgatc

SEQ ID NO: 536 - DNA, 512 bp, Bopivirus A
ttttctcccctccccctccccttaccttttccccctctagtaacgttagaagctagcactaaccgcctgtagggtactgcaatccagcagtgcataggcaaagtctttcttgtcaccccaaccccacactatactgaggaggatgacgaaatttgactagtatgggttagtaacggtgatccgggtgaccctgacccagaaactcacggatgaggtgaacagaaccccgcacggtaacgtgtgtgttcgcctgccccgcaaggtgaggccgtgagagctttgcacgtaaaacccctgaaagtccgagagtagtttgagctcttcgctattttgtgtttcctccaggaccctgaatgcggctaaacctaacccgcgatccacacatggcaatccagctagggtgtggtcgtaatgcgcaagttgcggacggtaccgactactttggtgttcctgtgtttcttttattttattttaaatttttatggtgacagcaatccagaaaagagataaac

SEQ ID NO: 537 - DNA, 512 bp, Unknown
  Description of Unknown: unclassified Picornaviridae sequence
gagtgcttgatttgtaatggaaaaagcaaagcttatccaaatacaaatcaagcacccgtttggggagttcaccgtccccttaattcataggtgattggactgattttgatactgatttaggatttcctttgacctggattgggataaagacttaaacatgttgaataaggatggattagctcgatccattaggtgggtctcatatataccaccacagagccggagaataaccttacaaaggatgttagtaattaaatacacttgttgggtggcgtaactgcagaccatgtggacatgggcctatgttgtggtaacacaatcccatgtggccaaaagcctagtggataacaatccacccatggtaatccaatttggacactcaacatttaagtgtttagtgaaagtatctgatggggtgacactctgtgagaacccagggagtagatgcccaggaggtacccttttaaaggatctgacttggggcctagacacttaatgctaggttaaaaact

SEQ ID NO: 538 - DNA, 513 bp, Pegivirus A
cctccccctcccccgaccggagcggaactccggaaaaccgacacctagtgaacatttcggatcattggcgcggatctggtgttaatctggacgaaagcccgtggacgggcggtgacagggttggcaggtcgtaaatcccggccgccctggtagcgggtataagtctggaggaaaccagtgaaccctcagtgtgaagtcagactaacgaaagtgcacggtccacaggagacgccgattccggtgtgaataatcggccgactcgagcggagtcgttaaactgaggacctccttggggatggcaacttggcttgcgtacgggaacgccgcaaaagtcacagtgggttaagtccggcgggttgacaatcccagcaaggcgggggggcactattgttgtgccctgccagttcccccaagggggtaggcatggggggacccagctccgcggcgcgctacagccggggtagcccaaaatccttcgggtgagggcgggtcccatgtcccttttttgtatgc

SEQ ID NO: 539 - DNA, 513 bp, Pegivirus C
cccccccccggcactgggtgcaagccccagaaaccgacgcctactgaagtagacgtaatggtccagcgccgaactggcgaccggccaaaaggtggtggatgggtgatgacagggttggtaggtcgtaaatcccggtcatcctggtagccactataggtgggtcttaaagggaggttatggtccctcttgcgcatatggagggaaagcgcacggtccacaggtgttggtcctaccggtgtaataaggacccggcgctaggcacgccgttaaaccgagcccgttactcccctgggcaaacgacgcccatgtacggtccacgtcgcccttcaatgtctctcttgaccaataggcttagccggcgagttgacaaggaccagtgggggccccccccgttgcccttcccggggaggcgggaaatgcatggggccacccagctccgcggcggcctacagccggggtagcccaagagccttcgggtgagggcgggtggcatttttctttcctgtaccgatc

SEQ ID NO: 540 - DNA, 513 bp, Unknown
  Description of Unknown: unclassified Picornaviridae sequence
gttaggcatagacacctacgaggcccaggacatacgcaatttcaattgcgaaaatgccctgggccccgtaggtgtctatgcctaacttcaacgagtagtggccgtaagccactttctttctaaactctctaactctacattttcctccttgtttgcaggttttatggtcttaaacttggaacgcgaatgacgatgaaactggaacaactttctgattgggctacccgccttccaaccggcaatggtgtaaaggtaaaagggtagattgctaccacttatggcatgtgaactggattaccaatgtagcatggaccctctaggtggggaatggcaatcgactatcctagctagattggaccactcatgggctttgggcgcgaattacgcagaacctaccgacaacatgtctggaaaccccatgagtggaggggaattgggaaaacccctttgatccaaactgcctgatagggtcgcggctggccgagttaggattagtagtcagtagaatttaac

SEQ ID NO: 541 - DNA, 516 bp, Rosavirus A
tatgcatcactggacggcctaacctcggtcgtggcttcttgccgatttcagcgctaccaggctttctggtctcgccaggcgttgattagtaggtgcactgtctaagtgaagacagcagtgctctctgtgaaaagttgatgacactcttcaggtttgtagcgatcactcaaggctagcggatttccccgtgtggtaacacacgcctctaggcccagaaggcacggtgttgacagcaccccttgagtggctggtcttccccaccagcacctgatttgtggattcttcctagtaacggacaagcatggctgctcttaagcattcagtgcgtccggggctgaaggatgcccagaaggtacccgcaggtaacgataagctcactgtggatctgatctggggctgcgggctgggtgtctttccacccagccaaaacccgtaaaacggtagtcgcagttaaaaaacgtctaggccccacccccccagggatggggggttcccttaaaccctcacaagttcaac

SEQ ID NO: 542 - DNA, 517 bp, Unknown
  Description of Unknown: unclassified Crohivirus sequence
gttgaagtccatttcttgcttgcccccgatgaatcctgttaaggcctcacggccctaagggtgaaactcggttatcccctcctgtacttcgagaagattagtacaacactatgaaatctacatcttgtgatccgggataaccccaatcccagaaacctgtgatgggcgtcaccacccctcttatggtaacataagggtgtcgccgcgttggcacaggaccctttgggctggatgtttttagtaatggtgtcgaaggtcctattgagctacaggagtttcctccgccctggtgaatgcggctaatcttatccctgagcctaaggttgcgatccagcaacttgatggtcgtaatgcgtaagttgggggcggaaccgactactttccagaaggcgtgtttctttgttttgtctgttactatggtgcatgatatagatattgaatatttgatctttttgagctgtttcttatcttattgctacatcctttcaggtgttggatttacattttggttaataag

SEQ ID NO: 543 - DNA, 518 bp, Foot-and-mouth disease virus
gacgtcagcgcacgaaacgcgccgccacttcggaacactcgtacaaacacgatcacacgcgggtttcccaactggcatcctcgtgcaacctggagtttcgcctggtctttccaggtctggagagatgacacgttgtactggaaccaactccacgatcggtctactggcgggtgctagtaacgacattgttgcttcgtagcggagcatgcaagccgtgggaactcccccctggcaacagggacccacggggccaaaagccacgttctccgaaccttgcatgtgtgcaaccccagcacggtaacactgttgtgaaacacgctttaaggtaacactgagactggtacttggtttctggggacaggctaaggatgccctccaggtaccctgaggtaacaagcgacactcgggatctgaggaggggactgggacttctataaaagtgcccagtttaaaaagcttctatgcctgaataggtgaccggaggccggcaccttttccttttacacacaaaccactac

SEQ ID NO: 544 - DNA, 518 bp, Cardiovirus A
ccggtgtgcgtttgtatacatgttacttccaccacgttgtcgtcttttgacaacgtgagggcccggaacctggccctgtcttcttggcgagtattcctaggagtctttctcctctcgacaaaggaatacaaggtctgttgaatgtcgtgaaggaagcagttcctctggaagcttcttgaagacaagcaacgtctgtagcgaccctttgcaggcagcggaatcccccacctggtaacaggtgcctctgcggccgaaagccacgtgtataagatacacctgcaaaggcggcacaaccccagtgccacgttgtgagttggatagttgtggaaagagtcaaatggctctcctcaagcgtattcaacaaggggctgaaggatgcccagaaggtactccactggctggaatctgatctggggcctcggtgcacgtgctatacacgtgttgagtcgaggttaaaaaacgtctaggccccccgaaccacggggacgtggttttcctttgaaaaccacgaagataat

SEQ ID NO: 545 - DNA, 520 bp, Foot-and-mouth disease virus
gggacgtcagcgcacgaaacgcgctgttgctctttgcattcttgtacaaacacgatctcacgcaggaatcttagaccaacccaacccgtgcaactgcaagtttcacccggtctttccgggcctagagagacgaacagctgtactgagactgactccacgatcggtctactagcgggtgctagtaacactcactttgcttcgtagcggagcacatgagcggtgggaacccccccatggtaacatggacccaccgggccaaaagccacgcctcacggcctcatgtgtgtgcaaccccagcacggcaacttgtttgtgaaacacatcttaaggtaacactgagactggtactcggtttctggagacaggctaaggatgcccttcaggtaccccgaggtaacaagagacactcgggatctgagaaggggaccaggagttctttaaaactgcttggtttaaaaagcttctatgcctgaataggtgaccggaggccggcaccttttcctttatccacaacaacttt

SEQ ID NO: 546 - DNA, 520 bp, Enterovirus C
ccagtgtggtttcgagcaagcacttctgtttccccggccgcgccctatatgctgtgcaaacggcagaaaggggcaacgtcgttacccgcttgcatactacgggaaacccagtaccaccattgattgtattgagagttgcgttcagcgcctctcccccctggcgtagctcgggccgatgaggctcagaagcccccacaggtgactgtgtctgagcctgcgttggcggcctgcccgcacctcttggtgtgggacgcttaatacatgacatggtgcgaagagtctactgtgctatgtaagattcctccggcccctgaatgtggataatcctaaccactgatcccatgtgcgcaaaccagcgtgcggtgggtcgtaacgcgcaagtcggtggcggaaccaactactttgggtgtccgtgtttcctttattacctattgaatgtttatggtgacaattgcttgattcagttgttgccatttattacattcgttgacctagactgaaaaccaactgaaccattaca

SEQ ID NO: 547 - DNA, 522 bp, Unknown
  Description of Unknown: unclassified sequence
ccgggtataacccggagttttggggcaggtccaagccccacataggaacatacgatccacggatcgtgtgttcttttatgctttctaaccttaccctttgtaaccattacgctttacgccgcatggtgtttggcggcaccatgacgtggacaagaggttacgccattacgatatgtaccctccccttttggggagagaccgaccaattatggtacagtatccaactgtattgtggtcaagtacttctgtttccccggtgatgcgggataggctgtacccacggccaaaacctgctgatccgttacccgactcacatctacgaggaggctagtaaaaggcatgaagttcaagagtatgatccaaccagatccccactggtaaactagtgatgagggttcccgttccgaacatggcaacatgtgggttccctgcgttggcactaggccccttccgaggggtgctctgaagatggattgttgatgaagaccaatttgtgcatgtgtttatcctccggccctctga

SEQ ID NO: 548 - DNA, 523 bp, Pegivirus A
ggggaatctcacccccccccgtccggttccggaagaatcggaaaccgacaccctgaccaatcattcttgatcatagagtggatgttagtgaaagccagacgaaagccggcggatgggtggtgacagggttggtaggtcgtaaatcccggccaccctggtacccggtataagttgggcggaagctgactgaagctccgtgctcttttctgtgcgttcttggtgcacggtccacaggtgacgcctataccggtgtgaataataggccgactcgagcggagtcgttaaactgagaacctccatacggatggcaacttggcttgcgtacggggacgccgctaaagtcacagtgggttaagtccggcgggttgacaaccccagcaaggcgagggggtcctattgttggactctgccagttcccggtggaggtaggcatggggtggcccagctccgcggcgcgctacagccggggtagcccaaaatccgaaaggtgagggcgggccacatgtccgaaatttagtcaagc

SEQ ID NO: 549 - DNA, 523 bp, Enterovirus B
ggaaaaaacgtccgttatccggccaattacttcaagaaacccagtaccaccatgaaggttgcgcagcgtttcgctccgcacaaccccagtgtagatcaggtcgatgagtcaccgcattcctcacgggcgaccgtggcggtggctgcgctggcggcctgcccatggggcaacccatgggacgcttcaatactgacatggtgcgaagagtcaattgagctaattggtagtcctccggcccctgaatgcggctaatcctaactgtggagcagattcccgcatgccagcgggtggtctgtcgtaacgggcaactctgcagcggaaccgactactttgggtgaccgtgtttccttttattcctatattggctgcttatggtgacagttgagagattgttaccatatagctattggattggccatccggtgacaaacagagcaattatctaccaatttatcggttttgtaccattgaatttcaacgcattcaaaaccctcaactttattttgactcttaatacagcaaa

SEQ ID NO: 550 - DNA, 524 bp, Pegivirus C
cactgggtgcaagccccagaaaccgacgcctatctaagtagacgcaatgactcggcgccgacccggcgaccggccaaaaggtggtggatgggtgatgccagggttggtaagtcgtaaatcccggtcatcttggtagccactataggtgggtcttaagggaaggttaagattcctcttgtgcctgtggcgagacagcgcacggtccacaggtgttggccctaccggtgtgaataagggcccgacgtcaggctcgtcgttaaaccgagaccgacacccacctgggcaaacgacgcccacgtacggtccacgtcgcccttcaatgtctctcttgaccaataggctttgccggcgagttgacaaggaccagtgggggccggggacgggggggagggacccccccgccccgcccttcccggtgggacgggaaatgcatggggccacccagctccgcggcggcctgcagccggggtagcccaagagccttcgggtgagggcgggtggcatttttcctttctgtactaatc

SEQ ID NO: 551 - DNA, 524 bp, Limnipivirus B
agctacaggaaagagagagataatcacagcacataaatacaactacagaagagagcctttccctgagcactatttacagcaaaccacgctgggaaaagtggtagcatgacccacttacgggttacttagtataggattttaatatcttcgattctttattttcttttcttaactaagttcgcccggactttatccgtgttttattttagtttaagcaaaattgagtaactaagtttttaacctgccaaatggtgagaagtaactctgtgaaaataccatttgtgcatgaaattgtcttgaaaactcttaggcttttggggggtcccactgctgtttggaggactattgacagactctattgtagttgagtagtgactaatgataacgatttgcgtattacgcaatgggctgtacccgttagatttagtatgccggggggaggggtcccactggattgcactatgtaacctgacagggcgtctgccgacgcactacaatgaggataagatcggctgtttttattt

SEQ ID NO: 552 - DNA, 527 bp, Unknown
  Description of Unknown: Human pegivirus isolate GBV-C-ZJ-180501, complete genome.1 sequence
cccggcactgggtgcaagccccagaaaccgacgcctatttaaacagacgttatgaaccggcgccgacccggcgaccggccaaaaggtggtggatgggtgatgccagggttggtaggtcgtaaatcccggtcatcttggtagccactataggtgggtcttaagggttggtcaaggtccctctggcgcttgtggcgagaaagcgcacggtccacaggtgttggccctaccggtgtgaataagggcccgacgtcaggctcgtcgttaaaccgagcccattacccacctgggcaaacaacgcccacgtacggtccacgtcgccctacaatgtctctcttgaccaataggctttgccggcgagttgacaaggaccagtgggggctgggcgacgggggtcgtataggaagaaaaatgccacccgccctcacccgaaggttcttgggctaccccggctgcaggccgccgcggagctggggtagcccaagaaccttcgggtgagggcgggtggcatttttcttcctataccgatc

SEQ ID NO: 553 - DNA, 527 bp, Hepatovirus C
ttcaaaagccccagcggggtttcattaccccgctgtggcttttggacttccctaggatggggaagtaaattaccatcctcgcgtttgccgtgcgttaacggctacttttcttctagctgtagaagtaaaattcagcatgttttatgtttgtttgtcttgtttgttatatacatttttacactcctacaaatgcacatgaagaacagtttgtagagattaacaaacgcttagctgaacctaggtggtgaatctagtagtaagataagtagaggaagctataccttaagttggttgggccctcgtgtttgctctataaacaaaaccaagtgagtagagtggatgaacagtactaaatccctgagtacagggaacctcacaggtgtgatacacttatgtctatgtgacctggttggaggttgggcgtgccctatgatactggagtgggagatcttttggggaacccacgttttcacactgcctgatagggtcttgccgagagactcacttgtttcggctgtacttgtaac

SEQ ID NO: 554 - DNA, 527 bp, Unknown
  Description of Unknown: unclassified Picornaviridae sequence
gggctacacatgtgataccatgttctagcatggaaaatcacacatgcagcccgatttcgggcttgggaacccgttcatcaagatcccataacctttcttttcttttgtctatcccttgagtagctaggctcgcggcagggtcttgtatatacctgcactagctgccacgaagtgctacagaaaccattagtatatatttagaaaccacctgttgacgtaactgtgattgattgcctggggctgagggcatggtaacatgcaccccaggggccaaaagcctagtgggtaacaacccaccattcatgatgcccttcttggcacaacaagtggatctctctatctatagaacatgggagtatggtatggagtggtgtaaggagcacgctagtagatgccccataggtacccttctggatctgagtgggggccatgaggaggtctttccctctgaattggttaaaaaccatgaacgtttgctccgcccatctttcttctaattttatcaacttacttgaattctgatcaca

SEQ ID NO: 555 - DNA, 528 bp, Unknown
  Description of Unknown: unclassified Hepatovirus sequence
cttttcacgctttctgtcatcttatttcctgggctctccccttgcccaaggctctggccgttgcgcccggcggggtcaactccatggttagcatggagctgtaggagtctaaattggggacgcagatgctgggaacgtcaccctgcagtgttaacttggctttcatgaagctctttgatcttctacaagaggtaggctacgggtgaaacctcttagattaatactcctatggagagatatcttgaatagggtaacagcggtggatattggtgagttcctttgggacaagaaccattcaacaccggaggactggctctcattcagtagttgcattgagtgaattgtctgtcagggctgtctctgggtttaattcctggcctctctgtgcttagggcaaaccatttcctggccttaaatggagttctgtgagaggggactcctcctttatatgctggacatattttggggccttagggttctggtttgcctctgaggtactcaggggcatttaggtttttcctcacttat

SEQ ID NO: 556 - DNA, 529 bp, Pegivirus C
ccccccggcactgggtgcgagccccagaaaccgacgcctatcaaagtagacgtaatggccctgcgccgaaccggcgaccggccaaaaggtggtggatgggtgatgacagggttggtaggtcgtaaatcccggtcaccttggtagccactataggtgggtcttaaggctaggtaatggtccctcttgcgcttatggcgagaaagcgcacggtccacaggtgttggtcctaccggtgtaataaggacccggcgctaggcacgccgttaaaccgagcccgttatccccctgggcaaacgacgcccacgtacggcccacgtcgcccttcaatgtctctcttgaccaataggcttagccggcgagttgacaaaggccagtgggggccgggcgtagagggaaggaccctctgcgctgcccttcccgggggagcggtaaatgcatggggccacccagctccgcggcggcctacagccggggtagcccaagagccttcgggtgagggcgggtggcatttttctctcctataccaatc

SEQ ID NO: 557 - DNA, 529 bp, Sapelovirus B
ctgacctgtttatgaacatgagcagcggcactgctccacgggctatccgtgtaagaaatattgattattcttatggatcatgatttcagggttggccgcccagtctaaaaggcaattgtggtaagctatgtaagtagttggctgttgaaaggagccaagtacatcctaggtctacgctgtgcgggccgaagtaagacttggaacaactctgagtaggcagtttttctctttagcccaacacgaccgcatactgaagagctagaggcactttggggcaaaggtaaaagcattgcttagaccgaatgttcaatgagaccttgacgagtgctgtcacagtgtcccctgatggcagtatggcgcatgctcttggcattacccatatgtgtatctatagggggggggccccctatacttagtctagtgctacctgacagggccgcggctggtcgtcggtgtgtggtataaccagtagtaatcccccatggattgctttaactccccctcctccctcaacaaaactttctctaag

SEQ ID NO: 558 - DNA, 529 bp, Cardiovirus A
ttggaataagaccggtgtgcgtttgtctatatgttgcttctactacactgttgcctgtgacagtgtaagggcccagaacctggccctgtcttctcgacgagtgttcctaggggtctttcccctcttgacaaaggaatacaaggtctgttgaatgtcgtgaaggaagcagttcctctggaagcttcttgaagacaaacaacgtctgtagcgaccctttgcaggcagcggaatcccccacctggtaacaggtgcctctgcggccaaaagccacgtgtataagatacacctgcaaaggcggcacaaccccagtgccacgttgtgcgttggatagtttcggaaagagttaaacggctctccccaagcgtattcaacaaggggctgaaggatgcccagaaggtaccccactggttgggatctgatctggggccccggtgcacgtgctttacacgtgttgagccggggttaaaaaacgtctaagcccccctaaccacggggacgtggttttccttttgaaaaccacgataacaat

SEQ ID NO: 559 - DNA, 529 bp, Unknown
  Description of Unknown: unclassified Enterovirus sequence
ccccccacctaacatatccaagtaacttagaagatttgaacactgcacaatagggactattgcaaccagcaatagtcagtgcaagcacttctgtctccccggagcggagtatagacggccaccgctgtcaaaagctcttaaccgttatccgccagttaactacgcaacagctagtaacatcttgttgttcttagggtgttcgatcaggtgagtttaccccctcactagtctggtcgatgaggctgagaaatccccacgggtgaccgtgtctcagcctgcgtggcggccagcccagcatatgctgggacgccttaagtatgacatggtgtgaagactcgcgtgtgcttagctgtgagtcctccggcccctgaatgcggctaacctaaaccccggagccttgaggcacaatccagtgcccgcaaggtcgtaatgagtaattctgggacgggaccgactactttgggtgtccgtgtttccttttatctttttgatgttcttatggttacaatatatagagtatattgtaatc

SEQ ID NO: 560 - DNA, 529 bp, Unknown
  Description of Unknown: unclassified Enterovirus sequence
cccccctccttaatgtaacttagaagcttgaacaatcgcccaataggatatgaccactccatggttatgaagggcaagcacttctgtttccccgggtgtgtgaataggctctaacagggctgaagctgtagcactcgttatccgcgcatctactacgcagaggttagtagggccatgtcaatcctttaggcgtttcgctcagcgtgtacccccacgtagatcagggcaatggggctacacattccccatcggcgacgatggtgtagcccgcgtggtgccccgcctaggcctatttggcctaggacgccaaaggaaagacagggtgtgaagacccgagtgtgctaggtgtgagtcctccggcccctgaatgtggctaatcctaaccccgtagccatggtgtacaagccagtacaaacatggtcgtaatgggcaactatgggatggaaccaactactttgggtgtccgtgtttctctttttaccctttactgcatttatggttacaagcttgtgaatacagacttgtaatc

SEQ ID NO: 561 - DNA, 530 bp, Pegivirus A
cccccggcactgggtgcaagccccagaaaccgacgcctactaaagtagacgtgatggccccgcgccgaaccggcgaccggccaaaaggtggtggatgggtgatgccagggttggtaggtcgtaaatcccggtcatcttggtagccactataggtgggtcttaaggggaggtaaaggtccctctcgcgcttacggagggaaagcgcacggtccacaggtgttggtcctaccggtgtaataaggacccggcgataggcacgccgttaaaccgagcccgtaagccccctgggctaacgacgcccacgtacggtccacgtcgcccttcaatgtctctcttgaccaataggcttagccggcgagttgacaaggaccagtgggggccgggcgagggggggaaggaccccccctcgctgcccttcccgggggttgcgggaaatgcatggggccacccagctccgcggcggcctacagccggggtagcccaagagccttcgggtgagggcgggtggcattttttttcttgtaccgatc

SEQ ID NO: 562 - DNA, 530 bp, Unknown
  Description of Unknown: unclassified Rosavirus sequence
ggagtgtcttaagtgatcccctccagtctctttagtgcctatgcttcagagagcggtgaactgacaccgttgcttcttgcacagcccttcgtgccggtctttccggttctcgacagcgttgggcatcatggctagttaggctaagatggcaaatgatctggtgaaaagttttggattgtttggagctttgtagcgatgctagtagtgtgtgtggatctccccacgtggtaacacgtgccccacaggccaaaagccaaggtgttaaaagcacccctactagtcccagatacccccatctgggagctcctctcatgaaaaatcttagtaccctttgatttggctgttcatcaacctctctagtcaagggctgaaggatgcccggaaggtacccgcaggtaacgataagctcactgtggatctgatccggggccctggtgcgaccgtctgtccggcgtagctagggttaaaaaacgtctaggcccttccaccccaagggattggggtttccccaatcattttagaagttcact

SEQ ID NO: 563 - DNA, 530 bp, Unknown
  Description of Unknown: unclassified Enterovirus sequence
cttccgatctcctaaagtaacttagaagttgagcacaatgaccaataggcgacatttctccagaatgtcaaaggtcaagcacttctgtttccccggtcaaggttgatatgctccaacagggcaaaaacagctgcgatcgttatccgcaaagcaactacacaaagcctagtatcacttttgagaatgtatggttggtcgctccactataaacccaatagtagacctggcagatgaggctagaagttccccactggtaacagtgttctagcctgcgtggctgcctgcgtgctccttgtgggcacgaagccatatatttgacaaggtgtgaagagccccgtgtgcttgttttgattcctccggcccctgaatgtggctaaccttaaccctgcagctagcgtgtgcaatccagcacaaagctagtcgtaatgagcaattgcgggatgggaccaactactttgggtgtccgtgtttcttgtttttcttttatacttgcttatggtgacaatatatataatatatatattggcatc

SEQ ID NO: 564 - DNA, 531 bp, Pegivirus A
ccccccggcactgggtgcgagccccagaaaccgacgcctatcaaagtagacgttatggccccgcgccaaactggcgaccggccaaaaggtggtggatgggtgatgacagggttggtaggtcgtaaatcccggtcatcctggtagccactataggtgggtcttaaagggaggctacggtccctctagcgcttatggagagaaagcgcacggtccacaggtgttggtcctaccggtgtaataaggacccggcgctaggcacgccgttaaaccgagaccgttatccccctgggcaaacgacgcccatgtacggcctacgtcgcccttcaatgtctctcttgaccaataggcagttctgccggcgagttgacaagggccagtgggggccgggcggcgggggaaggacccccgtcgctgcccttcccgggggagcggtaaatgcatggggccacccagctccgcggcggcctacagccggggtagcccaagaaccttcgggtgagggcgggtggcattttctttcctataccgatc

SEQ ID NO: 565 - DNA, 531 bp, Unknown
  Description of Unknown: unclassified Enterovirus sequence
accgcctattggtctttgtgtaaacttctaagttacgcaaaagggaaggggtggcaaatccataccactaacggtcaaacacttctgtttccccggcatgcgaggaataggctccaaaagggctgaagccactagtgtcgttatccgcattggtactacacaaagcctagtattaccttgaaaatttcttggctggtcgttccaccagataccccgctggcagacctggcagatgaggcaggacttaccccactggcgacagtggtcctgcctgcgtggctgcctgcacaccccttacggggtgtgaagcccagaaacagacagggtgtgaagagccccgtgtgctaccaatgagtcctccggcccctgaatgcggctaatcttaccccatagctgttgcacgcaaaccagcgtgtatgcagtcgtaatgagcaattgtgggatggaaccgactactttgggtgtccgtgtttctttttattcctattatttgcttatggtgacaatattgatattatcagtgttgtcatc

SEQ ID NO: 566 - DNA, 532 bp, Kunsagivirus C
ttttgaacgccacctcggagcgatatccggggaccccctcccctttttccttcctaccttcttcccaaatttccctcttcccttgttattttggtttggatttcctggacatgactcggacggatctatctcatttgctttgtgtctgctccaccagtggcatggtcgaaagatcatcaacactggacgtgtactgtaatggccaaacgtgcccacaggggaaaccatgccggtcgctgtagcggcgggtggacgtggtggacccctctccctgctcataaactttgggtaggtgaagggttcaagcgacgcttgccgtgagggcgcatccggatggtgggaaccaacaaactaggctgtaatggccgacctcaggtggatgagctagggctgctgcaccaaaagggactcgattcgatatcccggcctggtagcctagtgcagtggactcgtagttgggaatctacgactggcctagtacagggtgatagccccgtttcccacgcccacctgttgtagggacacccccccc

SEQ ID NO: 567 - DNA, 532 bp, Unknown
  Description of Unknown: unclassified Enterovirus sequence
cccctaccccttttatgtaacttagaagttttgtacacaccgaccaataggtggtatttaaccaaaataccaaaggtcaagcacttctgttaccccggtcaagattgatatgctctaccagggcaaaaacaatcgcgatcgttacccgcaaagcaactacgcaaagcctagtatcatttttgatggtgtatggttggtcgttccgctatgaacctgatagtagacctggcagatgaggctagaaaatccccactggtaacagtgttctagcctgcgtggctgcctgcgtaccccttgtgggtacgaagccgtacatttgacaaggtgtgaagagccccgtgtgcttgctttgagtcctccggcccctgaatgtggctaaccttaaccctgcagctagtgtgcacaagccagtgcatagctagtcgtaatgagcaattgcgggatgggaccaactactttgggtgtccgtgtttcttgtttttcttttatatttgcttatggtgacaatatattcaatacatatattgacacc

SEQ ID NO: 568 - DNA, 533 bp, Pegivirus C
cccccccccggcactgggtgcaagccccagaaaccgacgcctactgaagtagacgtaatggtccagcgccgaactggcgaccggccaaaaggtggtggatgggtgatgacagggttggtaggtcgtaaatcccggtcatcctggtagccactataggtgggtctaaaagggaggttatggtccctcttgcgcatatggagggaaagcgcacggtccacaggtgttggtcctaccggtgtaataaggacccggcgctaggcacgccgttaaaccgagcccgttactcccctgggcaaacgacgcccacgtacggtccacgtcgcccttcaatgtctctcttgaccaataggcttagccggcgagttgacaaggaccagtgggggccgggcgggagggggaaggacccccaccgctgcccttcccggggaggcgggaaatgcatggggccacccagctccgcggcggcctacagccggggtagcccaagagccttcgggtgagggcgggtggcatttttctttcctgtaccgatc

SEQ ID NO: 569 - DNA, 533 bp, Pegivirus C
cccccccacggcactgggtgcaagccccagaaaccgacgcctatctaagcaggcaataaggcctcgcgccaaaccggcgaccggccaaaaggtggtggatgggtgatgccagggttggtaggtcgtaaatcccggtcatcttggtagccactataggtgggtcttaaggggaggctacagtccctctgtcgcccgtggcgagaacgcgcacggtccacaggtgttgaccctaccggtgtgaataagggtccgacgtcaggctcgtcgttaaaccgagcccattatccccctgggcaaacgacgcccacgtacggtctacgtcgcccttcaatgtctctcttgaccaataggcaatgccggcgagttgacaaagaccagtgggggccgggggtgagggagaaggactccccaccctgcccttcccgggggagtgggaaatgcatggggccacccagctccgcggcggcctgcagccggggtagcccaagagccttcgggtgagggcgggtggcattttctttcttataccgatc

SEQ ID NO: 570 - DNA, 533 bp, Unknown
  Description of Unknown: unclassified Picornaviridae sequence
ccttttaacgtaccgtagcacgttagctacaaacttagcatttattttattttaattctaaatttattttaatttacataatttcggctctagtaacaaaaaccttattatcgtatttatacgaacagcatttattatttaatacatatccttatttttaaattacaaatacataccccccttttaacttactataattgctaatcaccaacaaccttcaaatttgatctagtacacattttaaaattccgtttctaaattttattaacttgcatctttgattataactctgggagtctattcagacttggcaaacccttgagcagccctcaaaatttgtagaacacctcaggcgatcttttaatacatgacccctgttgtaataacgtattactgaaaacacaaacacaactgaattaacagaagacattaatacaacccaagaacaacaatttactttcgataaccaacgcacagttaagacagaaaactcttatctgttgcctccaataaattcaatttcggctcagaaa

SEQ ID NO: 571 - DNA, 534 bp, Pegivirus C
cccccccccggcactgggtgcaagccccagaaaccgacgcctactaaagcaggcattaaggcctcgcgccgaaccggcgaccggccaaaaggtggtggatgggtgatgccagggttggtaggtcgtaaatcccggtcatcttggtagccactataggtgggtcttaaggggaggctacagtccctctattgcccgtggcgggaacgcgcacggtccacaggtgttggccctaccggtgtgaataagggcccgacgtcaggctcgtcgtaaaaccgagcccgttgtctccctgggcaaacgacgcccacgtacggctcacgtcgcccttcaatgtctctcttgaccaataggcttagccggcgagttgacaagagccagtgggggccgggggtgagggggatggaccccccaccctgcccttcccgggagagcgggaaatgcatggggccacccagctccgcggcggcctgcagccggggtagcccaagaaccttcgggtgagggcgggtggcattttcttttcctgtaccaatc

SEQ ID NO: 572 - DNA, 534 bp, Rhinovirus A
ccaaagtagttggtcccgtcccgcatgcaacttagaagctttgcacaaagaccaatagccagtaatcatccagattacttaaggtcaagcacttctgtttccccggtcaaagttgatatgctccaccagggcaaaaacaactgcgatcgttatccgcaaggcgcctacacaaagcttagtagcattctgaaagttgtctggttggtcgttccaccattccccctggtagacctggcagatgaggctagaaactccccactggcgacagtgttctagcctgcgtggctgcctgcacaccctctgggtgtgaagccatacgatggacagggtgtgaagagccccgtgtgctcgctttgagtcctccggcccctgaatgtggctaaccttaaccctgcagctagagcacacaatccagtgtgtttctagtcgtaatgagcaattgcgggacgggaccaactactttgggtgtccgtgtttccttgttctctttgaatatctgcttatggtgacaatatatacgtatatattgacacc

SEQ ID NO: 573 - DNA, 534 bp, Enterovirus D
tttcaaatcaaagctcaataggtggggcacagacgtgcgcattaagtctcaagcacctctgtttccccggtgtggttgtataaactgttcccacggttgaaaacaacctatccgttatccgctatagtacttcgagaaacctagtatcacctttgaattgttgacgcgttgcgctcagcacactaacccgtgtgtagcttgggtcgatgagtctggacgtaccccactggtgacagtggtccaggctgcgtcggcggcctactcatggtgaaaaccatgagacgctagacatgaacaaggtgtgaagagtctattgagctactatagagtcctccggcccctgaatgcggctaatcctaaccatggagcaagtgttcacaggccagtgagttgcttgtcgtaatgcgcaagtctgtggcggaaccgactactttgggtgtccgtgtttcactttttacttttatgactgcttatggtgacaatttgatattgttaccatttagcttgtcaaattaattgcaaaagatcctaagt

SEQ ID NO: 574 - DNA, 535 bp, Unknown
  Description of Unknown: unclassified Enterovirus sequence
ccccgtttccatttacacccaaccctatgtaacttagaagcagtacactggaccaataggtggtaacaatccatgttgccaaaggtcaagcacttctgtctccccggcatgcgtggaataaacagtgcaaacggttgaaaccacaaatgtcgttatccgcgcatgaactacgcagagcctagtatctccctgaaaatctgttggttggtcgttcagctaatccccatagtagacctggcagatgaggcaagacgcaccccactggcgacagtggtcttgcctgcgtggctgcctgcacacccccccccggggtgtgaagccaattgatagacagggtgtgaagagccgagtgtgcttcatgtgagtcctccggcccctgaatgcggctaatctaaccccgcagctgtggcacacaagccagtgtgtatgcagtcgtaacgggcaactgcgggacggaaccgactactttgggtgtccgtgtttccttttattcttttatcaggtacttatggtgacaatagtgaatattgttacc

SEQ ID NO: 575 - DNA, 537 bp, Grusopivirus B
gccatccgtaggttctggtaaggttccatcaactgttggggcgctagttgctatgaccgcattcacggacggatgatttatagtatcacccaatccgggcacaacttctttagccacttcttccacattactaagggctctcttgccgagtttcaacgtctagtccacgacacggaccttcctacttttctatcttcttattttctctactaaattggtatctggtactgaagatatgcggattgtgattttgtgcctgtctaaactaaccctattctagggttaggtgggtaccatatactaatggtgaacaggattacctatgtatccattagtccctatggatctggcgacccacaaactcatgttcatagagaggctaagctgagtgctcgccgaataagcattgcttcaggtgccgactattgtctggaaaccactcagtgatagctataggggggggccccgtagcatctgccttactgcctgatagggtggcggctggtccatgaacatgcagtaaccagttgacttgac

SEQ ID NO: 576 - DNA, 538 bp, Unknown
  Description of Unknown: unclassified Rosavirus sequence
cagggagatctccatgaataatcttttccaccctctttagcgtctatgctattgaggacgggttggagccccgttgacccagcgtcagagtgtgtcggtagcaggctttctgctctcgccccatgccggccacacctcccattagtgatgtgaaggttgtaagttacatgtgaaaaggtttctaataattgagctgaatgtagcgattacctaaggtgagcggattcccccacgtggtaacacgtgcctctcaggccaaaagccaaggtgttaaaagcaccccttaggtaggccactaccccgtggcctcagttctcttagaagattcacttagtagtgtgtgcactggcaactcttaagcagagctagtgagtgggctaaggatgccctgaaggtacccgcaggtaacgttaagacactgtggatctgatcaggggctcgagtgctgaagctttacagaggtagctcgagttaaaaaacgtctatgcccctcccccacgggagtgggggttcccccacaccaattttagattgcact

SEQ ID NO: 577 - DNA, 539 bp, Bovine rhinitis A virus
tttgttttgcggctttgccgttgttcgggttttacctgttttcacacagcaaaacaggccttctagtttcgtgcttaaacgagatcatgctcgaactagaactacatagctggtcactggactcataccacaccttgtggagctttatgggaaaggtggctagtgggctgtggaagtgactctgaccacatgcctctcaagtgtgggaaatcacggatcggtgtagcgacgacaacaggccttgggacaccctctccagtaatggagacccaaggggccaaaagccacgcctcgtgccctgttgttcacaaccccagtgcgacccgtgttagtacctatttgcgagaactgtgtctggacagctaaacacaaccctagtgggagactaaggatgcccaggaggtacccggaggtaacaagtgacactctggatctgacctggggagagagggcttgctttacaggcgcctctctttaaaaagcttctatgtctcatcaggcaccggaggccgggccttttccttttaaaattacactta

SEQ ID NO: 578 - DNA, 539 bp, Unknown
  Description of Unknown: unclassified Aphthovirus sequence
tttgtttcgcggctctgccgctgttcgggttttacctgttttcacagagcaaaacaggacatctagtttcgtgcttaaacgatatcatgctcgaactagaactacaatgctggttaccgaacccgcaccacaccttgtggaactttgcggggaaagtgactagtgggctgtagaagtgactctgaccacatgccccatcagcgtgggaaaccacaaatcggtgtagcgacgacaacaggccttgggacaccctctccagtgatggagacccgaggggccaaaagccacgccttgtgccctgttgttcacaaccccagtgcgatttgtgttagtacctactcatgggaattgtgtttggacagctgaacacaaccctagtgggagactaaggatgcccaggaggtacccggaggtaacaagtgacactctggatctgacctggggagagggggcctgctgtacaggcgcccctctttaaaaaacttctatgtctcatcaggcaccggaggccgggccttttccttttaaaacaacatttt

SEQ ID NO: 579 - DNA, 540 bp, Unknown
  Description of Unknown: unclassified Enterovirus sequence
taactttgtgtttgactcccctaacatgtaacttagaagtttgaacgataagaccaataggtgataatcatccagattatcaaaggtcaagcacttctgtttccccggtcgatgaggatatgctttacccgaggcaaaaaccttagagatcgttatccacacactgcctacacagagcctagtaccacttttgacgtaactaggttggtcgctccctgcaaacccagcagtagacctggcagatgaggctggacgttccccactggcgacagtggtccagcctgcgtggctgcctgctcaccctattgggtgagaagcctatttattgacaaggtgcgaagagccgcgtgtgctcagtgtgcttcctccggcccctgaatgtggctaaccttaaccctgcagccgctgcccataatccaatgggtttacggtcgtaacgcgtaagtgcgggatgggaccaactactttgggtgtccgtgtttcttgtttttcctttatttgcattttatggtgacaatttatggtatatagattgtcatc

SEQ ID NO: 580 - DNA, 541 bp, Unknown
  Description of Unknown: unclassified Picornaviridae sequence
aaaatggggtgcatatagcatggttcccatgctgtatgctaccccattttcttccctccccctccaactaccttttccccctctattgtaacttagaagctaatacacatagcccaataggggcaccacacccagtggtgtatagggcaagcacttctgtttccccggctttgccgttaacccccacagtactacgcgactgttagtaggtaacgtaactagtgaaggttgatccggaggtaaaccccaacctccagaaacgtgagatgagggttcagtaaccccctatggtaacatagactgatccctgcgctggctcacgggcttcgtgcactgaatctaggtaaagttactgaagccacgagtgtgctactgtggtttcctccagcgccttgaatgcggctaaccctaaccccggagcacatgcatataatccaatatgtagtgtgtcgtaatgagtaattctgggacgggaccgactactttaggttgctgtgtttcctttatttttatatatcaatttatggtgacaagttacaag

SEQ ID NO: 581 - DNA, 541 bp, Unknown
  Description of Unknown: unclassified Enterovirus sequence
ccagttttatctcccccccccttttatgtaacttagaagttctgcacaccgaccaatagtgaacaatcagccagattgttttaggtcaagcactcctgtttccccggtcaacgttgatatgctccaacagggcaaaaacaacagcgatcgttatccgcaaggtgcctacacagagcctagtatcatcttagaagaattgtggttggtcgctcagttgcaaacccagcaatagacctggcagatgaggctggacattccccactggtgacagtggtccagcctgcgtggctgcctgcacacctctatgaggtgtgaagccagaatttcgacaaggtgtgaagagccgcgtgtgctcaccttgagtcctccggcccctgaatgcggctaaccttaaacccgcagccatggtccacaaaccagtggatgtgtggtcgtaatgagtaattgtgggatgggaccgactactttgggtgtccgtgtttcctgtttttctttttatactgcttatggtgacaatatatataggatatatattgacacc

SEQ ID NO: 582 - DNA, 542 bp, Unknown
  Description of Unknown: unclassified Aphthovirus sequence
acgatctttgcggctctgccgccgttcgggttttacctgttttcacagagcaaaacaggacctctagtttcgtgcttaaacgagatcatgctcgaactagaactataacgctggtcactggacccgtgccgcgccttgcggatctttgcgggaatggtggctagtgggctgtggaagtgactctaaccacacgcccctcaagtgtgggaaaacacgaactggtgtagcgacgacgataggccttgggacaccctctccagtgatggagacccaaggggccaaaagccacgccttgtgccctgtcgttcacaaccccagtgcagttcgtgccagtacctgcttttgggaagtgtgctttggacagctgaaaacagtcctagtgggagactaaggatgcccaggaggtacccggaggtaacaagtgacactctggatctgacttggggagagcgggtctgctttacagacgccactctttaaaaaacttctatgtctcgtcaggcaccggaggccgggccttttcctttaaaacaatacacttt

SEQ ID NO: 583 - DNA, 542 bp, Unknown
  Description of Unknown: unclassified Enterovirus sequence
cccccccctccccaacccttttatgtaacttagaagtttctaaacacaagaccaatagcaggcaactctccaggttgtctaaggtcaagcactcctgtctccccggttgacgttgatatgctccaacagggcaaaaacaactgatatcgttatccgcaaagtgcctacacagagcttagtagtgctctgaaagatttttggttggtcgctcagctgcatacccagcagtagaccttgcagatgaggctggacattccccactggtaacagtggtccagcctgcgtggctgcctgcacacctctcacgaggtgtgaagccaaagattggacagggtgcgaagagccgcgtgtgctcactttgagtcctccggcccctgaatgcggctaaccttaaacccgcagccatggttcacaaaccagtgaacttatggtcgtaatgagcaattgtgggatgggaccgactactttgggtgtccgtgtttcactttttcctttattgattgcttatggtgacaatatatatatagatatatattggcatc

SEQ ID NO: 584 - DNA, 544 bp, Cardiovirus A
atgtggtcgaagccacttggaataagaccggcgtgcgcttgtctatatgttacttccaccacattgccgtcttttggcaatgtgagggcccggaacctggccctgtcttcttgacgaacattcctaggggactttcccctctcgccaaaggaatgtaaggtctgttgaatgtcgtgaaggaagcagttcctctggaagcttcttgaagacaaacagcgtctgtagcgaccctttgcaggcagcggaaccccccacctggtaacaggtgcctctgcggccgaaagccacgtgtataagatacacctgcaaaggcggcacaaccccagtgccacgttgtgcgttggatagttgtggaaagagtcaaatggctttccccaagcgtattcaacaaggggctgaaggatgcccagaaggtaccccactggttgggatctgatctggggcctcggtgcaggtgctttacacctgttgagtcgaggttaaaaaacgtctaggccccccgaaccacggggacgtggttttcctagaaaaccactatgacaat

SEQ ID NO: 585 - DNA, 546 bp, Pegivirus A
ggggggttgatccccccccctcggcactgggtgcaagccccagaaaccgacgcctatctaagtagacgcaatgactcggcgccgactcggcgaccggccaaaaggtggtggatgggtgatgacagggttggtaggtcgtaaatcccggtcaccttggtagccactataggtgggtcttaagagaaggttaagattcctcttgtgcctgcggcgagaccgcgcacggtccacaggtgttggccctaccggtgtgaataagggcccgacgtcaggctcgtcgttaaaccgagcccgttccccacctgggcaaacgacgcccacgtacggtccacgtcgcccttcaatgtctctcttgaccaataggcgtagccggcgagttgacaaggaccagtgggggccgggggcctggagagggactccaggtcctgcccttcccggtgggccgggaaatgcatggggccacccagctccgcggcggcctgcagccggggtagcccaagaacccttcgggtgagggcgggtggcatttctcttttctataccatc

SEQ ID NO: 586 - DNA, 548 bp, Unknown
  Description of Unknown: unclassified Sapelovirus sequence
ggtaaactggtgttgcggcaccagtttatcctcatctcatttcccccctccccctccaaataccttttccccctcaatcggacggattctcaggcttaaacggtggaggataccccttcaaggtccgcaggtgccaagtctaaaacctgaattggaagccctttgctatcagctcatttggccgataacccctgaccgggtgtgtaggacaattgagacgctctgggtgtacgactgcctatggtagaggtagagtgtacaagtaaaggctcctttttggataccgctaggcgaatgttgagatttctcctaccctagcacttgtgcatatgactaaggggggggccccttagtttgtctactgctgcctgacagggtcgcggctggccgaccataggtagtatagtcagttgatttaacacatggattgcttcaagttccttacaacctacaaacaaaccttcaaagctcaccagtgccaccagtattggttcactgtgtgtgaacaaaaacaagtaactgtagcaaagaagagccccggccccaaa

SEQ ID NO: 587 - DNA, 548 bp, Avisivirus A
ttcactcgctttccccccctctctataggggcggtcttttaattcttattaatttcctactttactatcaaatttcttctaagtagggactgaggtcacttagccctccctctcctgggctttccagggttatagaggttctaaagctaagccatgtgtcttgagctacacttagtacaaaggtttagtaatgattgtacatgccagtaaccttctagtgcccatggattaaagagtggtaacactctccatggggcccgaaaggctagtgggcatagttggcatcaaggaaggggtccccaccccaacctgaattgctggctagaagctcaccttagaagaagtgctgggtgacaacgtgtccaatcgtgaacgactgatggaaacgtgtggagatggatatgtgggggttcactgagtagatgccctgaaggagaaatctgatcaggggcccgtgactatacgctaggtaaaccgggtataaaaaccatgaaaggtggcccaaaatctcttccttttattttatttctatgttggtgacagtcaag

SEQ ID NO: 588 - DNA, 548 bp, Parechovirus A
gatacactattcgaaggcatctagcaataagaagagtggatttagggcgcttaaagcatagtgcaaataatcatttctagcctgtgttttacacagggtggcagatggcgtgccataactctactagtgagataccacgcttgtggaccttatgctcacacagccatcctctagtaagtttgtaaagcgtctgatgacgtgtgggaacttattggaaacaatagtttgctgcaaagcatcctactgccagcggaataacacctggtaacaggtgcctctggggccaaaagccaaggtttaacagaccctttaggattggttcaaacctgaactattgtggaagatatttagtacctgctgatttggtagttgtgcaaacactagttgtaaggcccacgaaggatgcccagaaggtacccgtaggtaacaagtgacactatggatctgatctggggccaactatctctatcttgatgagttggttaaaaaacgtctagtgggccaaacctgggggggaccccagtttccttttattttataatgccact

SEQ ID NO: 589 - DNA, 548 bp, Unknown
  Description of Unknown: unclassified Enterovirus sequence
catgtacgccagttttatatcccctctccccttttgtaacttagaagataagcacaaagaccaataggtggtggctatcccagtcactaaaggtcaagcacttctgtttccccggtcgatgttgatatgctccaccagggcaaaaacaacagagatcgttatccgcaaagtgcctacacaaagcctagtaacactttgaatggtatgtggttggtcgctccgctattccccatagtagacctggcagatgaggctagaaatcccccactggcgacagtgttctagcctgcgtggctgcctgcgtgtcctaacgggcacgaagccatatacttgacaaggtgtgaagagccccgtgtgctcactttgagtcctccggcccctgaatgtggctaaccctaaccctgcagctgaggcacacaacccagtgtgaactcagtcgtaatgagcaattgcgggatgggaccaactactttgggtgtccgtgtttcacttttttttcttttataatgcttatggtgacaatatataacaatttatatattggcacc

SEQ ID NO: 590 - DNA, 548 bp, Unknown
  Description of Unknown: unclassified Enterovirus sequence
cgtgaagccagttttgccacccttccctaatatgtaacttagaagtttgagcaacaagaccaataggtgataatcatccagattatcaaaggtcaagcacttctgtttccccggtcgatgaggatatgctttacccaaggcaaaaaccttaaagatcgttatccacacactgcctacacagagcctagtaccacttttgatgtaattaggttggtcgctccctgcaaacccagcagtagacctggcagatgaggctggacattccccactggcgacagtggtccagcctgcgtggctgcctgctcaccctattgggtgagaagcctacttattgacaaggtgtgaagagccgcgtgtgctcagtgtgcttcctccggcccctgaatgtggctaaccttaaccctgcagccgctgcccataatccaatgggtctacggtcgtaacgcgtaagtgcgggatgggaccaactactttgggtgtccgtgtttcttatttttcctatatatttgcttatggtgacaatatataattacttgtatattggcacc

SEQ ID NO: 591 - DNA, 550 bp, Parechovirus A
ggaccccattattcgagggcatctagcaataagaactggagattaaggacgctcaaagcatagtgtaagtattcttttctaacctgtgttttacacagggtggcagatggcgtgccataaccctattagtgagataccacacttgtggaccttatgctcacacagccatcctctagtaagtttgtaaggcgtctgatgacgtgtgggaacttgttggaaataatggtttgctgtaaagcatcctactgccagtgggtaaacacctggtaacaggtgcctctggggccgaaagccaaggtttaacagaccctttaggattggttcaaacctgaactattatggaagacacttagtacctgctgatttggtagttgtgcaaacactagttgtaaggcccacgaaggatgcccagaaggtacccttaggtaacaagtgacactatggatctgatctggggccaaccacctctatctcggtgggttggttaaaaaacgtctagtgggccaaacccaggggggaccctggtttccttttatttatcataaacaat

SEQ ID NO: 592 - DNA, 550 bp, Enterovirus A
tatcagtagactgcttacgcggttgaaggagaaaacgttcgttacccggctaactacttcgggaaacctagtaacaccattgaagctgcagagtgtttcgctcagcacttcccccgtgtagatcaggtcgatgagtcactgcaaacctcacgggcgaccgtggcagtggctgcgttggcggcctgcctatggggtaacccataggacgctctaatgtggacatggtgtgaagagtctactgagctggttagtagtcctccggcccctgaatgcggctaatcctaactgtggagcgcatacttccaaaccagggagcagtgcgtcgtaatgggcaactccgcagcggaaccgactactttgggtgtccgtgtttccctttattcttatattggctgcttatggtgacaattgaagagttgttaccatatagctattggattggccatccggtgtgcaacagagcaattatatacctatttgttggatatattccactgacatttaagtcactcaatactctacagtacatcttgaatttaaacaccagaaa

SEQ ID NO: 593 - DNA, 550 bp, Unknown
  Description of Unknown: unclassified Enterovirus sequence
ggctcttccgatctgccgcaactttctttcactctttgtttctggtaatttagaagttgacacagagtccaatagggtgcagctaatccaagactgctacggacaagcacttctgtctccccgggtgtgtgaatagactctaacagggttgaagctgtagcactcgttatccgcacaactactacgcgaatgttagtaacaccctctaagtatagtgggatttcgctccgcagataccccatctgtagattggggtaatgaggctacacataccccactggcgacagtggtgtagcctgcgtggtgccctacctggggttctttaccccaggattccactttactgacagggtgtgaaggcgctagtgtgctagttgtgagtcctccggtccctgaatgtggctaatcctaaccccgtggccattacatgtaacccaacatgcagatggtcgtaacgagtaatcacgggatggaaccaactactttgggtaaccgtgtttcctgttttactttaatgtgtgtatcttatggttacaactatagagtaacc

SEQ ID NO: 594 - DNA, 551 bp, Cardiovirus A
aaatactggtcgaaaccgcttgggataagaccggggtttgttaatgtctcaatgttattctccacccaattgacgtcttttgtcaattggagggcagtgaaaccttgcccttgcttcttgcagaggattcccagtggtctttccgctctcgacaagggaattcatgatccaccaaaagttgtgaagagagcaggtcccatggaagctttctgacgactgatgatgactgtagcgaccctttgcaggcagcggacccccccacctggtgacaggtgcctctgcggccaaaagccacgtgtttaacagacacctgcaaaggcggcacaaccccagtgcctcatcaaaagtctgatgactgtggaaatagtcaaccggcttttcttaagcaaatttggtgtcggggctgaaggatgcccggaaggtaccacactggttgtgatctgatccggggccacagtacatgtgctttacacatgtagctgcggttaaaaaacgtctaggccccccgaaccacggggacgtggttttcctttgaaaaccacgattacaat

SEQ ID NO: 595 - DNA, 552 bp, Enterovirus C
agactgtacccacggttgaaaacgactgatccgttatccgctttagtacttcgagaagcctattaacaccttggaatcttcgatgcgttgcgctcagcactcaaccccagagtgtagcttaggtcgatgagtctggacatacctcaccggcgacggtggtccaggctgcgttggcggcctacctgtggtccaaagccacaggacgctagttgtgaacaaggtgcgaagagcctattgagctactaaggagtcctccggcccctgaatgcggctaatcccaaccacggatcaggtgctcacgagccagtgagcggcctgtcgtaacgcgcaagtctgtggcggaaccgactactttgggtgtccgtgtttcctttttaactttatcatggctgcttatggtgacaatcgaagattgttatcataaagcgaattggattggccatccggtgaaaattaaatatatagtttacctgtttgttggatttattccactaacacaacatacttggaaattactcaactttgtgttgttaatcagacactgttaccaca

SEQ ID NO: 596 - DNA, 552 bp, Unknown
  Description of Unknown: unclassified Enterovirus sequence
ttccggtaactttgtatgccagttttatcacccttcccccacgtaacttagaagatgtacacttggaccaataggcgataatcctccagattatctaaggtcaagcacttctgtttccccggtctaaactgatatgctccaacagggcaaaaacagtgcagatcgttatccgcaggatgcctacgcaaagcctagtaattcctttgaagatatttggttggtcgttccactattccccatagtagacctggcagatgaggctagaaactccccactggcgacagtgttctagcctgcgtggctgcctgcacaccctcttgggtgtgaagccaaatattggacaaggtgtgaagagccccgtgtgctcatcctgagtcctccggcccctgaatgtggctaaccttaaccctgcagctagtgcatgcaatccagcatgtagctagtcgtaatgagtaattgcgggatgggaccaactactttgggtgtccgtgtttcactttttaccttatatttgcttatggtgacaatatatatagtatatatattggcatc

SEQ ID NO: 597 - DNA, 553 bp, Bopivirus A
ttgaaagacctcggcatatatcgttgtcacaacggtatatgtcgagatctttctccccaccccctccaattcccttttccccctcttgcaacttagaagtttgtacacacagggcaataggatacgtgatccagccaggacacgtgagctcaagcacttctgtttccccgtccccttcacgtactacgggaatgttagtaatttgtgtgcactttagtaaggttgatccgggattaaccccaaatcccagaaactggtgatgagcgttaccacccccgccgggcgaccggaaggtttcgctgcgttggcaccagggcttcggcaccagaaaaaggtaaagcaaatgaaggcgctactgtgctacgagaagtttcctccaggcccctgaatgcggctaatcctaaccagtgatccaccggtgcaaaaccatgtactaggtggtcgtaacgcgcaagtcgctggcggaaccgactactttgggtgtcctgtgtttccatattttattttattcaattttatggtgacaagagtaaagagatacagatttgcagcc

SEQ ID NO: 598 - DNA, 554 bp, Unknown
  Description of Unknown: unclassified Enterovirus sequence
taggtaactttgtgtttgatgccagttttatcctcccctcccccatgcaacttagaagttttgcacagagaccaataggcagtaatcatccagattacttacggtcaagcacttctgtttccccggtcaaagttgatatgctccaccagggcaaaaacagctgcgatcgttatccgcaaagcgcctacgcaaagcttagtagcattctggaagttgtctggctggtcgctccaccatttcccctggtagacctggcagatgaggctagaaattccccactggcgacagtgttctagcctgcgtggctgcctgcacaccctctgggtgtgaagccatacaatggacagggtgtgaagagccccgtgtgctcgctttgagtcctccggcccctgaatgtggctaaccttaaccctgcagctagagcacacaatccagtgtgtttctagtcgtaacgagcaattgcgggatgggaccaactactttgggtgtccgtgtttccttgttttctttaaatatttgcttatggtgacaatatatacgcatatattgacacc

SEQ ID NO: 599 - DNA, 554 bp, Enterovirus C
gtataggctgtactcacggctgaaaacaaacgatccgttatccgcttaggtacttcgagaagcctagtaccatcttggaatcttcgacgcgttgcgctcagcactctaccccgagtgtagcttaggctgatgagtctgggcgttccccaccggtgacggtggcccaggctgcgttggcggcctacccatggctcacgccatgggacgctagttgtgaacaaggtgtgaagagcctattgagctacctaagagtcctccggcccctgaatgcggctaatcctaaccacggagcaagtgccttcagcccagaaggtagcttgtcgtaacgcgcaagtctgtggcggaaccgactactttgggtgtcccgtgtttccccttattttcattgtggctgcttgcgggactataattgattgccatcataaagcgatttggattggccatccggagaaagttaaacacgttgtttatttattcgttggattcacctcattaacccaaattacacccagcttgatatatatagtgttgccgactagacaaaatcaccacca

SEQ ID NO: 600 - DNA, 557 bp, Unknown
  Description of Unknown: unclassified Picornaviridae sequence
atcttattaacaatacgtattttaaaagctcttactctagtaagggtatgtggttaacataggatgtaatacccatttatggatattgcatcttgtggagttagtcctcacacatacttgtctagcacctgcattccaaggagtatttgcgaaaatcttattcttaaaaccaattcttaattttaagtacaaacctcgcagaacttacaaatcgtgctcacgccttttgttctatttagttaatttgtatttgaagaatttagacgaataatataacgtgcttattattcacgagaccctctaacgtttttaacgcattgatctcgtaaaatctaaagactgatcttacattgatattgaattaaactaaagaaacgcaccacgacagtagtgtggccttactgttaaaacaactaggcctaacgagtatttctaactgtgacgttcgatgaattattccgaactatgtactaactgatctaaatcgttgttctacaaggaacgtttcaccgcctcaatagatcctaactatagaggaaaagaaacaacaaacaaac

SEQ ID NO: 601 - DNA, 557 bp, Limnipivirus C
ttgaaagagagtccatacggggaactgcggttctcctattggattctgctttcacagtttctgagcactggtaagagcttagacaaacgtttttaaaatttattttctctgcaacttttgtttgtgtttatttttatttgttaattttgtgcctaaacatttgttgcgaagtatttgattcattagcaatattcattattgtttatttagatggcattcaaagtggtgggagtatcgaacccaagcgtcgtatgttatctccttgaataattttggattttttcgacatgatcattgaaaaggataagtgtttaagaactcaaggagtgttaacaatggtgggtgacaggtgtccccatataatttgttaacatgatttggactggttatctagtaagaagaaccatcgaacgcacgagcgagcattgcttgcggggcagttaccctgcgtcgatgtaagtgtgtaccggggggtgcacatgttgattctttatggcctgatagggtgcgtcattcgcgcctagataattagtataatgcgaatggaataaatttac

SEQ ID NO: 602 - DNA, 557 bp, Foot-and-mouth disease virus
acaagttcagcagttttgcccgttttcaggagaaacgggacgtcagcgcacgaaacgcgccgccactttcggaacacttgtacaaacacgatctgacgcaggtatccctaactggcattctcgtgcaacttggagtctcgcctggtctttccaggtctagggaggcaacactttgtactgaaaccaactccacaactggtctactggcgggtgctagtaacgactttgttgcttcgtagcggagcatgcgagccgcgggaactcccccctggtaacagggacccgcggggccgaaagccacgtccctcggacctcgcatgtgtgcaaccccagcacggcaacactgtagtgaaacacactttaaggtaacactgagactggtacttggtttctggggacaggctaaggatgccctccaggtaccccgaggtaacaagcgacactcgggatctgaggaggggactggggcttctataaaagcgcccagtttaaaaagcttctatgcctgaataggtgaccggaggccggcaccttttcttttgtacacgaatcacttt

SEQ ID NO: 603 - DNA, 557 bp, Enterovirus A
ggataaagaggctactcacgtggttgaaggagaaaacgtccgttacccgactaactacttcgagaaacctagtagcaccattgaacctgcggagcgtttcgctcagcacttcccccgtgtagatcaggctgatgagtcactgcactcctcacgggcgaccgtggcagtggctgcgttggcggcctgcctatggggcaacccataggacgctctaaagtggacatggtgcgaagagtctattgagctagttagtagtcctccggcccctgaatgcggctaatcctaactgcggagcgcataccctcaatccagggggtggtgtgtcgtaacgggcaactctgcagcggaaccgactactttgggtgtccgtgtttccttttattcttacactggctgcttatggtgacaattaaagaattgttaccatatagctattggattggccatccggtgtgcaacagagcgatcatttactcctttgttgcttttattcccttgaacttcacttctttgagcacactaaattatatactccatctcaactccaagaagcgagt

SEQ ID NO: 604 - DNA, 558 bp, Unknown
  Description of Unknown: unclassified Picornaviridae sequence
tttgtggggtgggctcccactttattcatagcccatctgctctgactctacctattgacccgtaactggtactcgtttgagattgactggtttaaagattttggtgtggttctttaggaaggattagctcgatcctttaggtgggacttatttttaccactacagagcacctatgattagttatagacagtggaggaaccattagtaactctttggaatgcgtaactgctaatcctgtgcccttggccaagacatagtaatatgttccaaggggcccaaaaggctagtgggtaaaaacccacctgggatggtcacttctgtgaattctgattagtgaagtttggattccgaatcctgtctagctaaaagtggggttagatggcactgagtagatgccctggaggtaccaattgatctgaccaggggcctagatacttaatgctaggttaaaaactatgaaaggtaagccatcgaaaattattttcctatttttactttgtttaactgattagtgaaatttactaatatttagctaggccttgctttattttattaagg

SEQ ID NO: 605 - DNA, 560 bp, Unknown
  Description of Unknown: unclassified Megrivirus sequence
gggggttttccccctgggagtcttttccgttgggtctgtggcttggttgaaccatggatctggcgttagccggcatagtggtctgcggaaaagggccctcacgcggctgcggcttcgtgagctgttcttttccactagtgggccatctatgttggtataagctcaaccacccaaattttgtaacggccaattaagcttaggtcccgcacagattcgttctggcgtgctttataggaataggcggtctgactcggttttgtcttgacaactctcttgtttttccctttggctttgttttctttttaggctaacggttcagccttgttcagaacggccctatggcaagtgggcctagtaggttcttggtgttttccgttagtcgacccatccatagtgctagactaggtgggcgtgaggtaaaacgggacgcgtttttcgctatcccaatgaccggacctctgttgaatgcgctggatctccgcgtagccagaggaaaccacccgaaccctgatggcaactgacggtagtagggctcgtagtcagcctcatgttacccgtgg

SEQ ID NO: 606 - DNA, 560 bp, Hepatovirus H
gtcatgtttctctttaagaacactcaattttggccataagtgagactcttgtcgaacctttcatgtcaggaccatgttagggccattatccttttccctggggcattcttcttgcccctgtttcatctttctatcatctttcttccgggctctcacaatgccaatggagcgaccgatgcgcacgtcggggttaacccatggattagccatgggctgtagctgctaaaagttgtgactcctgaagcatactatcaatggtagtagatgtaactgaaacactgaagcttctctgatcttgaaagaagggtaggctacgggtgaaacccttcaggttaatactcatattgagagatacctttggtaggttaacgttggcggataatgttgagtttaacgacaataaacattcaacgcctgtgggcgaacctcaccaatttcatgctttgaagtgaatgtgcgtagggtctctatcggagatgctatgtggatggtgccctccctggaaacaggttgtaggggtactcaggtgcacttaggtttccacattttaaagatttttc

SEQ ID NO: 607 - DNA, 560 bp, Unknown
  Description of Unknown: unclassified Picornaviridae sequence
tgcgaatttattcgcacagtctcttttcccccatcttgtgtgtgtgatggggtaagccgcagagtaatacctactctgctgcaaacacactcactcttttctatctactttatatcatgtaataataagtagggaacatattcaattcatattgttcatctcactgaacccgcatgaaggactgcattgcatatcctggacgaagtgacgtggaatatttggacatttatggattggacaccattacgctttgtgcctctacggagatgtaaccataatcttaagtagtagtaccccagcacaagaggataaagtggcatacacgacaacgggtgttgctcgcaccttagtaatgtggatgttcacccttggagcgtgctgaaactctgtgggtaaagacacacattagtacaaatgtgggggaactcactgaaagggcatgtcccgtgtactggtgtgccggaaagtgggggtcgctttctggagaacttagtagttcttgttattgggtgatagccttgcggcggatcaactcacagttttaatccgttgttttgcat

SEQ ID NO: 608 - DNA, 560 bp, Enterovirus A
tccccggactgagtatcaataggctgcttgcgcggctgaaggagaaaacgttcgttacccggccaactacttcgaaaagcctagtaccaccatcaatgaggcagagcgtttcgctcggcactaccccagtgtagatcaggctgatgagtcactgcaatccccatgggcgaccatggcagtggctgcgctggcggcctgcccatggaggaatccataggacgctctaatttggacatggtgcgaagagcctattgagctagttggtagtcctccggcccctgaatgcggctaatcctaactgcggagcgcacacccacaaaccagtgggcagtgcgtcgtaacgggcaactctgcagcggaaccgactactttgggtgtccgtgtttccttttattcctatattggctgcttatggtgacaaacgaagagttgttaccatatagctattggattggccatccggtgtgtaacagagcaattgtctatcagttcgttggttttgtaccattacattaaagtccttaacacattacatttatcttgaccctaaatacaaaagc

SEQ ID NO: 609 - DNA, 560 bp, Rhinovirus C
cggtacacttgcacgccagtttgcctccctttccctttcccttgccaaacccccttggaacttagaagcaatacattagaccaataggaggtaacgatccatgttacctaaggtcaagcacttctgtctccccggtatgcgtggaataaacagtgcaaacggttgaagccacaattatcgttatccgcgcacaaactacgcagagcctagtactaccctgaaagtctgtaggttggtcgatcagctaatccccatagtagacctggcagatgaggcaagacactccccactggcgacagtggtcttgcctgcgtggctgcctgcacaccctctggggtgtgaagcctactgacggacagggtgcgaagagccgagtgtgctttgtgtgagtcctccggcccctgaatgcggctaatccaaccccacagctgtggcatacaagccagtatgtacgcagtcgtaacgggtaactgtgggacggaaccgactactttgggtgtccgtgtttcctgtttttctttatatatatgcttatggtgacaatagtgaatattgttacc

SEQ ID NO: 610 - DNA, 561 bp, Unknown
  Description of Unknown: unclassified Avisivirus sequence
cattcccctttccccagccatgggttaaatggcccctcaccaggttcggtgctgtctaggcttccagtaaagaagtcaaccgagcattgaacaaaacctcagtgggtatggtagttaaccccgtccactggacaactttgtcctcttaaaagtggatcaatccaccccaactccccccctagccacctgagccatggtggatagcagtgacgaaactagggaccccaatacctctagtgccaagagaattcccccctcgcgagaggtgctcttgggcccgaaaggctagttggcagggtgaagtgaaggaagctgctagcgtggcaaccttaagcgtagcccgaagctgaccttagaggttaaccctagtggaccactggatgaagctgtggaggtggtggataggaaagttggccacttgtgagtagatgcccagaaggcataaggctgatctggggccagtgactataccgttccggtaaacctggtataaaaaccatgaaagcaagtgggtttaaaatttcttctaattccttcatttcagtagtgataactggcaga

SEQ ID NO: 611 - DNA, 564 bp, Enterovirus C
tgacgttgcatagactgctcacgcggttgaaagcgattgatccgttatccgcttgtgtacttcgagaagcctagtatcgccttgggatcttcgacgcgttgcgctcagcacccgaccccggggtgtagcttaggctgatgagtctggacattcctcaccggtgacggtggtccaggctgcgttggcggcctacctatggctaacgccataggacgctagatgtgaacaaggtgtgaagagcctattgagctacacaagagtcctccggcccctgaatgcggctaatcctaaccacggagcaggcggtcgcaaaccagcgattggcctgtcgtaatgcgcaagtctgtggcggaaccgactactttgggtgtccgtgtttcctgttatttttatcatggctgcttatggtgacaatcagagattgttatcataaagcgaattggattggccatccggtgagaattgtgtcaagcgtacaactgtttgttggaatcactgtgttagctttaattctcatttaaccgattaatcaaaactacacgagaacaaaacactagcatcact

SEQ ID NO: 612 - DNA, 565 bp, Enterovirus B
ttaccccggactgagtatcaatatgctgctcacgcggctgaaggagaaaacgttcgttacccggccaattacttcgagaaacctagtaccaccatgaaggttgcgcagtgtttcgctccgcacaaccccagtgtagatcaggccgatgagtcaccgcaatcctcacgggcgaccgtggcggtggctgcgttggcggcctgcccatggggcaacccatgggacgcttcaataccgacatggtgagaagagtctattgagctaattggtagtcctccggcccctgaatgcggctaatcctaactgcggagcagatgcctgcatgccagcgggtagtctgtcgtaacgggcaactctgcagcggaaccgactactttgggtgtccgtgtttccttttattcttgtgttggctgcttatggtgacagttgagaagttgttaccatatagctattggattggccatccgttaacaaatagagcaattatcttctcttttgttggattcgttccactgaattacaaggcactaaacacacttaatttcattttaatacttaacacatcaaa

SEQ ID NO: 613 - DNA, 565 bp, Enterovirus C
tgacgttgcatagactgctcacgtggttgaaagcgatcgatccgttatccgctcgcgtacttcgagaagcctagtatcgccttggaatcttcgatgcgttgcgctcagcgcccgaccccggggcgtagcttaggctgatgagtctggacgttcctcaccggtgacggtggtccaggctgcgttggcggcctacctatggctaacgccataggacgctagatgtgaacaatgtgtgaagagcctattgagctacacgagagtcctccggcccctgaatgcggctaatcccaaccacggagcaagcggtcacaaaccagtggctggcttgtcgtaacgcgcaagtctgtggcggaaccgactactttgggtgtccgtgtttcctgttatttttatcatggctgcttatggtgacaatctgtgattgttatcataaagcgatttggattggccatccggtgagtgttatatcgaatacttgactgtttgtcagacccactgtattagaatcacttcatatttaagtagtcaatcaaaaacagcacgaagataagacaatagtaccaca

SEQ ID NO: 614 - DNA, 565 bp, Enterovirus C
tgacgttgcatagactgctcacgcggttgaaagcgatcgatccgttatccgctcgcgtacttcgagaagcctagtatcaccttggaatcttcgatgcgttgcgctcagcgctcgaccccggggcgtagcttaggctgatgagtctggacgttcctcaccggtgacggtggtccaggctgcgttggcggcctacctgtggctaatgccataggacgctagatgtgaacaaggtgtgaagagcctattgagctacacgagagtcctccggcccctgaatgcggctaatcctaaccacggagcaagcggtcacaaaccagtgactggcttgtcgtaatgcgcaagtctgtggcggaaccgactactttgggtgtccgtgtttcctgttatttttatcatggctgcttatggtgacaatctgtgattgttatcataaagcaatttggattggccatccggtgagtgttgtatcgaatacttgactatttgccaggactactatattaaattcattttatatttgagaaatcagttaaaaacagtaggaagataaaacaataataccaca

SEQ ID NO: 615 - DNA, 566 bp, Unknown
  Description of Unknown: unclassified Rosavirus sequence
tgtcttctccggatgctgttacagcatgtggacccaggagtgttttaagtgatcttctacagtctctttagtgtctatactttagagagcggtgaactgacaccgttgcttcttgcacagcccttcgtgctggtctttccggttctcgacagcgttgggcatcatggctagtcaggctaagatagcagatgatttagtgaaaagttttggattgtttggagctttgtagcgatgctagtagtgtgtgcggacttccccacgtggtaacacgtgcctcacaggccaaaagccaaggtgttaaaagcacccctactagtcccaggctttcccacctgggagctcctctcatgaaaattcctagtaattaatgattgggctattcatcaacctttctagtcaatggcttaaggatgcccggaaggtacccgcaggtaacgatgagctcactgtggatatgatccggggctctggtgcgaccgtctgtccggcgtagtcagagttaaaaaacgtgtaagcccttccaccccaagggattggggtttccccaatcatttaacaggttcatt

SEQ ID NO: 616 - DNA, 567 bp, Unknown
  Description of Unknown: unclassified Enterovirus sequence
aaaccagtaccaccacgaacaagcacttctgtttccccggtgaagctgtatagactgttcccacggttgaaaatggcagatccgttatccgcttaagtacttcgagaagcctagtatcactttggaatcttcgatgcgttgcgctcagcactctaccccgagtgtagcttaggctgatgagtctgggcataccccaccggcgacggtggcccaggctgcgttggcggcctacccatggctaacgccatgggacgctagttgtgaacaaggtgtgaagagcctattgagctacttaagaatcctccggcccctgaatgcggctaatcccaaccacggagcaagtgcttacaaaccagtgagtagcttgtcgtaacgcgtaagtctgtggcggaaccgactactttgggtgtccgtgtttcctttttatttccattgtggctgcttatggtgacaatctaagattgttatcatatagctattggattggccatccggtgatttactgagatcaaacacttgcccatttccttgttgcacccacccatttgttatatttatacaattaca

SEQ ID NO: 617 - DNA, 568 bp, Rhinovirus A
gagttgtactctgttattccggtaactttgtatgccagttttatttccctccccaattgtaacttagaagatgtacataaagaccaataggtggtgatcacccagatcactaaaggtcaagcacttctgtttccccggtcaaagttgatatgctccaacagggcaaaaacaacttggatcgttatccgcaaagtgcctacgcaaagcttagtaccatctttgagagcctatggttggtcgctccactgaaccccacagtagacctggcagatgaggctagaagacccccactggcgacagtgttctagcctgcgtggctgcctgcacacccctacgggtgtgaagccatacgtttgacaaggtgcgaagagccccgtgtgctcactttgagtcctccggcccctgaatgtggctaaccttaaccctgcagctagtgcatacaaaccagtatgttgctagtcgtaacgagcaattgcgggatgggaccaactactttgggtgtccgtgtttcactttttacctttattttgcttatggtgacaatatatatagcatatatattgacacc

SEQ ID NO: 618 - DNA, 569 bp, Aichivirus C
aagggggtgggggggcttcggccctctcaccctcttttccggtggccacccgcccgggccaccgttactccactccactccttcgggactggtttggaggaacacaacagggcttcccacccctgtttaccccgatttcatctacccttctcccgaactgaccctatccacaccccactgactaactcctttggattagacctcggaatgcctacttgacctcccacttgcctctccctttctggattgccggtggtgcctggcggaaaaagcacaagtgtgttgcaggctaccaaactcctacccgacaaaggtgcgtgtccgcgtgctgagtaatgggataggagatgcctacaacaggctcgcccatgagtagagcatggactgcggtgcatgcgacttcggtcgccacgggcatagcattgctcacccgtgaatcaagtcatcgagatttctctgacctctgaagtgcactgtggttgcgtggctgggaatccacgcttgaccatgtactgcttgatagagtcgcggctggccgactcatgggttaaagtcagttgacaagacac

SEQ ID NO: 619 - DNA, 571 bp, Unknown
  Description of Unknown: unclassified Picornaviridae sequence
ttcgtgttgggagaaccgtccaaaagaccctccggggttaaaccccggaagggcttttggacggttctcccaacacgaaagattgggacacttctcgtggtgagtgcttcactgcgacccgatggtgttatggagggcttccatcccgccgtttgcctaggctataggctgttttatttcttctttatttttctctatttccaggttgtctccataccgagagctgctaccgctgcgcccggcggggttaactccagggctagcctggagctgtggccgccaaaagtggagagagtgtgactaactgggatggtccgtcctgagtggctgtttccttgcacatactaaacattgatctgggtgctcaggtaggctacgggtgaaacctgaggtgtaataatgttcttctgttgaagaaactgcacgtcaaacgctaaccttatcagatatagctgagatttaagtgtcaaaaagctatcaatgattgcgggggggtgtaaggccaccttgcgatgtttggttgtgtgaggttaagaggccctcttgatggggtttccctaggcactcccct

SEQ ID NO: 620 - DNA, 571 bp, Unknown
  Description of Unknown: unclassified Enterovirus sequence
tttccccggtgatgttgtatagactgtacccacggttgaaaatgactgatccgttatccgcttttgtacttcgagaagcccagtatcatcttggaatctccgatgcgttgcgctcagcactcgaccccagagtgtagcttaggtcgatgagtctggacgttcctcaccggtgacggtggtccaggctgcgttggcggcctacctgtggcccaaagccacaggacgctaggtgtgaacaaggtgtgaagagcctattgagctacagaagagtcctccggcccctgaatgcggctaatcccaaccacggagcaagggtgcacgaaccagtgtatgccttgtcgtaatgcgcaagtctgtggcggaaccgactactttgggtgtccgtgtttccttttatttttatattggctgcttatggtgacaatcatagattgttatcataaagcgaattggattggccatccggtgaaagcaaaacacattatttacttatttgttggatttactccactcaataattttacctataaactcattacatcagtcttgctgattagaaataagtatcata

SEQ ID NO: 621 - DNA, 572 bp, Enterovirus B
acttctgtttccccggaccgagtatcaataaactgctcacgcggtcgaaggagaaaacgtccgttacccggccaactacttcgagaaacctagtaacaccatggaaattgcaaagtgtttcgctcagcacacccccagtgtagatcaggccgacgagtcaccgcgttccccacaggcgactgtggcggtggctgcgttggcggcctgcccgtgggacaacccatgggacgctttaatatggacatggtgtgaagagtctattgagctagttggtagtcctccggcccctgaatgcggctaatcctaactgcggagcatgcgcccccattccagagggtagcgtgtcgtaacgggcaactctgcagcggaaccgactactttgggtgtccgtgtttccttttatcttctcattggctgcttatggtgacaattgcgagattgttaccatatagctattggattggccatccggtgtctaacagagctataatataccaatttgtgggattcgttccattaagtttgaaagtcttacaaaccctcaacttgatactgcaactcaatagtgtaaa

SEQ ID NO: 622 - DNA, 573 bp, Cardiovirus A
cccccccctccccctcccccttattttcctggtcgaaaccgctcggaataagaccggggtcttgtaatgtctaaatgttacttctacccaaccattgtctatgatggttggagggctgtagaacctagcccttgcttcttgcagagaaatccaagtggtctttccactctcgacaatgggtttcatggctcgccaaaagttgtgaagaaagcaagtcctatggaagctttctgacgaccgatgatgtctgtagcgaccctttgcaggcagcggaatcccccacctggtaacaggtgcctctgcggccaaaagccacgtgtttaacagacacctgcaaaggcggcacaaccccagtgccacatcaagagtctgatgactgtggaaatagtcaactggcttttcttaagcaaatttggtgtcggggctgaaggatgcccggaaggtaccacactggttgtgatctgatccggggcccatgtgcatgtgctatacacatgtagcctgggttaaaaaacgtctaggccccccgaaccacggggacgtggttttccttttgaaaaccacaatgataat

SEQ ID NO: 623 - DNA, 574 bp, Unknown
  Description of Unknown: unclassified Pegivirus sequence
cgcaccggtacttggtgcacacagtcaggttagtccgctgtgtgcaagtggtggtcccacaaaccgactgccgccctctaacgtggttttagaatgcggacgccaagtctgcaactggacgaagcgctaccggcagcgctctcctggtcgcttgagggactggagggttgcactgttagtgaataagtccggggggataagctaagggggccgtacccacggcccgcctcacgcctctgccctgctcacctaagctgatgcggacgactccatgctatggtagcagcacggtctcacaggttgtgcaaccggtggaaaaatgctccgtcaggcgcagctgacgttaaactcagtgcccccgcgctcttgcgtggtttccgggctggaagtacgccgccttcctaaagtcgttactcggccaatacattctcgggcgggttgacaaacggaaagcgcggacccatagctccgggcgggggggtatagtccatgggggggcccaggcggcacgcctgcgacacgtggcaaggggaaaaatccttcgggtgaccccgggccccatcttcttttcttt

SEQ ID NO: 624 - DNA, 574 bp, Unknown
  Description of Unknown: unclassified Enterovirus sequence
ttgagtgctctgttattccggtaactttgcacgccaattttataacccctcttccccatgtaacttagaagttttacaaatagaccaatagcaagcagcgaaccagctgtacaaggtcaagcacttctgtttccccggtcaatgttgatatgcttcaacaaggcaaaaacaacagcgatcgttatccgcaagatgcctacacaaagcttagtacctccttcgatggtatttgtctggtcgctcaggtgtttccccaacactagacctggcagatgaggctagaaactccccactggcgacagtgttctagcctgcgtggctgcctgcacaccctttcgggtgtgaagccaaatactggacaaggtgtgaagagccccgtgtgctcatcttgagtcctccggcccctgaatgcggctaaccttaaacccgcagccattgctcacaatccagtgagcagatggtcgtaatgagcaattgtgggatgggaccgactactttgggtgtccgtgtttcactttttcctttatcaattgcttatggtgacaatatatatataaatatatatattggcatc

SEQ ID NO: 625 - DNA, 575 bp, Unknown
  Description of Unknown: unclassified Picornaviridae sequence
cccgttggtagggggtgctaatacctaccacccgtttgccgtgggaaacggctatggagggtcgggacgcctcgttaatcacgttctagtaattgagtgtgttactttaaatcttacacttatctatttagagtagttaatgtttctactattctttactatatatatcatagctgtcgtcttgctaagagctccgaccactgcgcccggtggggttaaccaatggactagccattggctgtaggcgccagaagagacgacctcctgactatgattgagatttgtcttgcttcagggctgtggaccatggatgtgatcgatcgaaccagggaaggtaggctacgggtgaaaccttccatgtaatgatgatgtcatattgacataccgcatccatacgctaatgcagcggatattgctgagatgataagtcaataagcattcaacgttggtgcccaggtgtcatggctggggcgcggttgcgtgcgtggttcacagtataacttgaagtgtcccttaagataaatctcactctaagggaggaccctgctagtaatagtacagggctaatcaggggc

SEQ ID NO: 626 - DNA, 576 bp, Aichivirus C
tttggaaaaaggtggggggggcttcggccctctcaccctcttttccggtggccacccgcccgggccaccgttactccactccactccctcgggactggtttggaggaacacaacagggcttctcatccctgtttacccttattccacttacccttctccccgaactacccaacccactccccactgattgactcccttggattaagacctcggaatgtcttcctgaccttcttcttggttttcccttttcggattgccggtggtgcctggtggaaaaagcacaagtgtgttgttggctaccaaactcctacccgacaaaggtgcgtgtccgcgtgctgagtaatgggataggagatgccaataacaggctcgcccatgagtagagcatggactgcggtgcatgtgacttcggtcaccaggggcatagcattgctcacccctgaatcaagtcatcgagatttctctgacctctgaagtgcactgtggttgcgtggctgggaatccacgcttgaccatgtactgcttgatagagtcgcggctggccgactcatgggttaaagtcagttgacaagacac

SEQ ID NO: 627 - DNA, 576 bp, Cardiovirus A
tccccccctttctcttccccttccttaatttaactggccgaaaccacttgggataaggccggtgtgtgtttgtctatatgtcacttctaccacaccactgtcttttggtggtgtgggggcccagaacctggccctgtcttcttgacgagcactcctaggggtctttcccctcttgccaaaggagtgtaaggtctgttggatgtcgcgaaggaagcaatctctctgtaagcttctggaagacaagcaacgtctgtagcgaccctttgcaggcagcggatttccccacctggtaacaggtgcctctgcggccaaaagccacgtgtataacatacacctgcaaaggcggcacaaccccagtgccacgttgtgagttggatagtcgtggaaagagtttgatggctttcctcaaacgtatccagcaaaagggctgaaggatgcccagaaggtaccccattttatgggatctgatctggggccacggtgcacgtgctttacacgtgtcgagccggggttaaaaaacgtctaagcccttaagtcacggggacgtggctttccctgttaaattaacactgaaac

SEQ ID NO: 628 - DNA, 576 bp, Enterovirus B
gcctattggtactcggtccggggtaacagaagtgcttggccaaggtggctgaaggggaaaacgttcgttaaccgactaataacttcgagaaacctagtaccaccatgaaagttgcgcagtgtttcgctccacacaaccccagtgtagatcaggtcgatgagtcaccgcgttccccacgggtgaccgtggcggtggctgcgttggcggcctgcccatggggcaacccatgggacgcttcaatactgacatggtgcgaagagtctattgagcttattggtagtcctccggcccctgaatgcggctaatcctaactgcggagcaggtacccacaagccagtgggtggcctgtcgtaacgggcaactctgcagcggaaccgactactttgggtgtccgtgtttccttttattcttaaattggctgcttatggtgacaattgaaaggttgttgccatatagctattggattggccatccggtgtctaatagagcaattatctacctttttgttggattcattccactcaactataaaacactcaaaacactcatatacattgtaggtctcaacacagcaaa

SEQ ID NO: 629 - DNA, 576 bp, Unknown
  Description of Unknown: unclassified Enterovirus sequence
acccaagtggtgtagtactcttgtatttcggtacacttgtacgccagtttgccaccccttccccaagcgaacgtagaagcttacaatcccggtcaataggaggtggtgaaccacaccacttaagaccaagcacttctgtttccccggctcaagaggaatatgctttgcaaagggctgaagccccgagagtcgttatccgcatacatactacgcaaagcctagtactgtcctggaagtctgttggttggtcgctccgtcaattccccattgatagacctggcagatgaggcaggaaatcccccactggcgacagtgttcctgcctgcgtggctgcctgcacaccctcacgggtgtgaagccaactgatggacagggtgagaagagccccgtgtgctatgtatgagtcctccggcccctgaatgcggctaatccaaccccacagctgccgcacacaaaccagtgtgttgacagtcgtaatgggtaactgtgggacggaaccgactactttgggtgtccgtgtttcctttattctttcaattgatgcttatggtgacaacatcaagtgatattgttacc

SEQ ID NO: 630 - DNA, 578 bp, Aichivirus C
tttgaaaagggggtgggggggcttcggccctctcaccctcttttccggtggccacccgcccgggccaccgttacttcactccactccttcgggactggtttggaggaacataacagggcttcccaatcccctgttatcctttatcccaaacaccttttcccttaaccaaccctatccacaccccactgactgattcctttggattttgacctcagaatgcctacctgacctcccactcgcctctcccttctcggattgccggtggtgcctggcggaaaaagcacaagtgtgttgcaggctaccaaactcctacccgacaaaggtgcgtgtccgcgtgctgagtaatgggataggagatgcctacaacaggctcgcccatgagtagagcatggactgcggtgcatgtgacttcggtcaccacgggcatagcattgctcacccgtgaatcaagtcatcgagatttctctgacctctgaagtgcactgtggttgcgtggctgggaatccacgcttgaccatgtactgcttgatagagtcgcggctggccgactcatgggttaaagtcagttgacaagacac

SEQ ID NO: 631 - DNA, 578 bp, Enterovirus C
gcacttctgtttccccggtacgacgacatagattgtgcccacggtcgaaagtcgtcaatccgttatccgctttggtacttcgaaaagcctagtatcaccttggaattctcgatgcgttgcgctcagcacccaaccccagagtgtagcttaggctgatgagtctgggcactccccaccggcgacggtggcccaggctgcgttggcggcctacccatggctaacgccatgggacgctagagttgaacaaggtgtgaagagcctattgagctaccaaagagtcctccggcccctgaatgcggctaatcccaaccatggatcaagtgcgtgcaatccagcatgtagcttgtcgtaatgcgcaagtccgtggcggaaccgactactttgggtgtccgtgtttccttttatttttattatggctgcttatggtgacaatctcggattgttatcatatagcaattggattggccatccggtgagagtgagagatattatctatttgtttgtggcatttactccactagatactaacacaccaattctaattagagcagttatactaattagatcaatacatcaca

SEQ ID NO: 632 - DNA, 579 bp, Aichivirus C
tttgaaaagggggtgggggggcctcggccccctcaccctcttttccggtggccactcgcccgggccaccgttactccactccactccctcgggactggtttggaggaacataacagggcttcccatccctgtttttacccttatttccatctaccctttcccttaaccaaccctatccacaccccactgactgactcctttggattttgacctcagaatgcctacttgacctcccacttgcctctcccttatcggattgccggtggtgcctggtggaaaaagcacaagtgtgttgttggctaccaaactcctacccgacaaaggtgcgtgtccgcgtgctgagtaatgggataggagatgccaatgacaggctcgcccatgagtagagcatggactgcggtgcatgtgacttcggtcaccaggggcatagcattgctcacccctgaatcaagtcatcgagatttctctgacctctgaagtgcactgtggttgcgtggctgggaatccacgcttgaccatgtactgcttgatagagtcgcggctggccgactcatgggttaaagtcagttgacaagacac

SEQ ID NO: 633 - DNA, 579 bp, Enterovirus C
gcacttctgtttccccggtgcgatgacatagactgtacccacggttgaaagtcgttaatccgttatccgctttggtacttcgagaagcctagtacctccttggaattttcgatgcgttgcgctcaacactcaaccccagagtgtagcttaggctgatgagtctgggcattcctcaccggcgacggtggcccaggctgcgttggcggcctacccatggctaacgccatgggacgctagatttgaacaaggtgtgaagagcctattgagctaccaaagaatcctccggcccctgaatgcggctaatcccaaccatggatcaagtgcatgcaaaccagcatgtggcttgtcgtaacgcgtaagtccgtggcggaaccgactactttgggtgtccgtgtttcctttttatttttataatggctgcttatggtgacaatctcagattgttatcatatagcgattggattggccatccggtgagaataagagatattatctatttgtttgtggcattcactccacttaactcatacacaccaagtttaatcaaagcagttttactaattagatcagcataccaca

SEQ ID NO: 634 - DNA, 581 bp, Unknown
  Description of Unknown: unclassified Picornaviridae sequence
aatgcaaataacaatcaaggacccgtttgtggggtgggctcccactttattcatagcccataacattggtatcctgttaaactgactactggctgttctactaggtatttcaactggtttaaagattttaattttgttgaaacaggaaggattagctcgatcctttaggtgggacttatttttaccaccacagagcgcccatgaacaattaaaggtagtggaggaactattagtaaccatgtgaaatgcgtaactgctatccctgtgcccttggccttggcatagtaatatgctccaaggggcccgaaaggctagtgggtagaaactcacctagggtggtcactctgtgaatttcacatggcgaagtttagattctgaatcctactttgttgtgagtggggtcaggtgacactgagtagatgccctggaggtaccaattgatctgaccaggggcctggatacttaatgccaggttaaaaattatgaaaagtaagtcaccgaactgaaatgtttttcctttttatttcatctcatactgctgtgttgtttggtgtaatagtttgaagacacaattttccagg

SEQ ID NO: 635 - DNA, 584 bp, Cadicivirus A
gtccgtataccaacggatcgatttccctgttacagcctctttgcttccccaccccactcctctccgtggagagcctagtaggattcttgaaagcaaatgtctgttgaccccaccttcaatcccggaaggaagaaaccgagaatgagactcgtctattcccccatggtgacatggagacttgtctgcgtgtgtctcgggctcccttatgagtattgtgggagaaccgctaccctgactccgaggagtctgatgggatatgttagtacctatgaaagtaaggtgacagactttgttagtatggatacgaagagccgactgccgttggagtgtatcctccggacccgtgaatgcggctaaccctaaccccggatcaagtgcccacaaaccagtgggtggcttgtcgtaatgcgtaagtctgggatgggaccgactactttcggtgttccgtgtttcctatttattttatcaataaagtatatggtgacaatattactagtgtgatatatagcctctattgtatttttattgatcaattttaataggttatttggtggtgatttaaatagagatagttactattagag

SEQ ID NO: 636 - DNA, 584 bp, Rhinovirus B
tactctggtattatgtacctttgtacgcctgtttcttccctacaaccccttcctaaaactcccacccatgaaacgttagaagcttgacatttaagtacaataggtggcaccacatccagtggtgtctacgtacaagcacttctgtttccccggagcgaggtataggctgtacccactgccaaaagcctttaaccgttatccgccaaccaactacgtaacagctagtatcatcttgttcttcactggacgttcgatcaggtggattccccctccactagtttggtcgatgaggctaggagctccccacgggtgaccgtgtcctagcctgcgtggcggccaacccagctcatgctgggacgcccttttaaggacatggtgtgaagactcgcatgtgcttggttgtgagtcctccggcccctgaatgcggctaaccttaaccctggagccttatgccacgaaccagtggttgtaaggtcgtaacgagcaattccgggatgggaccgactactttgggtgtccgtgtttcctatttttctttatattgtcttatggtcacagcatatatataagtatatactgtgatc

SEQ ID NO: 637 - DNA, 587 bp, Rhinovirus C
catggttacccacgaggtgcagtggtcttgtattacggtacatttccataccagttttataaaccctaccctgaaacttatagaagcttgtacacaccgaccgacaggtggcaatcatccagattgtcgaaggtcaagcacttctgtttccccggtatccttgtatacgcttcacccgaggcgaaaaccgaggttatcgttacccgcaaagtgcctacgagaagcctagtatcactttggaaacctatggttggtcgctcagctgttttcccaacagtagacctggcagatgaggctggacgctccccaccagcgatggtggtccagcctgcgtggctgcctgcacaccctgtggggtgtgaagccagaaagtggacaaggtgtgaagagcctattgtgctcactttgagtcctccggcccctgaatgtggctaatcctaaccccgtagctgttgcatgtaatccaacatgtatgcagtcgtaatgggcaactatgggatggaaccaactactttgggtgtccgtgtttcttgtttttctttatatactgcttatggtgacaatagtaattcattactcttgttacc

SEQ ID NO: 638 - DNA, 588 bp, Cadicivirus A
gttcgtatgccaacggattgatttccctgttacagcctctttgcttccccaccccactcctctctgtggagagcctagtaggattcttgaaagcaaatatctgttgaccccaccttcaatcccggaaggaagaaaccgagaatgagactcgtctattcccccatggtgacatggagacttgtctgcgtgtgtctcgggctcccttatgagtattgtgggagaaccgctaccctgactccgaggagtctgatgggatatgttagtacctatgaaaataaggtgacaggttttgttagtatggatacgaagagccgactgccgttggagtgtatcctccggacccgtgaatgcggctaaccctaaccctggatcaagtgctcacaaaccagtgagtggcttgtcgtaacgcgcaagtctgggatgggaccgactactttcggtgttccgtgtttctatttattttatcaataaagttttatggtgacaatcttgtgatattaagatataaagcttttatccttttgtttattgattatcttaaatagattgcttggtggtgatttaaaatagagatagttattattagag

SEQ ID NO: 639 - DNA, 588 bp, Unknown
  Description of Unknown: unclassified Enterovirus sequence
ggctcttccgatctgggggttgtactctattattccggtaattttgtacgccagttttatctccccttcccccgactgtaacttagaagtttatcattacggccaataggtggtagttatccaaactaccaaaggtcaagcacttctgtctccccggtcaaagttgatatgctccaacagggcaaaaacaactaagatcgttatccgcaaagtgcctacgcaaagcctagtaatgtctttgaaaatttatggttggtcgctccgctattccccatagtagacctggcagatgaggctagaaattccccactggtgacagtgttctagcctgcgtggctgcctgcgcaccctttgggtgcgaagccatacattggacaaggtgtgaagagccccgtgtgctcactttgagtcctccggcccctgaatgtggctaaccttaaccctgcagctagtgcatgtaatccaacatgttgctagtcgtaatgagcaattgcgggacgggaccaactactttgggtgtccgtgtttcactttttccttttattattgcttatggtgacaatatatatagatatatatattgacacc

SEQ ID NO: 640 - DNA, 589 bp, Rhinovirus A
ccatgtggagttgtactctattattccggtaattttgtacgccagttttatctcccctcccccttttacataacttagaagtttgtacacatcgaccgataggtggcatttatccaaaatgttgaaggtcaagcacttctgttaccccggttaaaattgatatgctccaacagggcaaaaacagttttaatcgttatccgcaaagcaactacgcaaagcctagtatcatttttgataatatacggttggtcgctccactgtgaacccgacagtagacctggcagatgaggctggaaaccccccactggtgacagtgttccagcctgcgtggctgcctgcgtacccctttgtgggtacgaagccatatgtttgacaaggtgtgaagagccccgtgtgcttgttttgagtcctccggcccctgaatgtggctaaccttaaccctgcagctagtgtgtacaatccagtacatagctagtcgtaatgagtaattgcgggatgggaccaactactttgggtgtccgtgtttcctgtttttcttttatatttgcttatggtgacaatatatatacatcacatatatattggcacc

SEQ ID NO: 641 - DNA, 591 bp, Shanbavirus A
ccccccctccctccttttcatcggctgtccgttgccgtggagcttcactatccgtagtgttgttccggaaaacggacacagcaacaccttcctccgggttggtgcttgcaatccctttccccttttgttgacttcccggactcattcgttttggctttcacattggccctagaggctatcttgttggattcctgtaccctggcaatctgaactccttcgcatgccctcccacatggtcgaggacagtaaggcgcgggaccaagagagccgggcaccagacccatttctgaattggactgccaccgccaagaattgcggagcggctctgttgtgtgagatcctcctttcccacagatagcgcatcccagtgcgtgtgtatgggggttagggtgcatacagcatccgcgactgtggtcagatgagcggaagcatctgctaggataaaggggacgcgattcgctatccccgaagcatccctcattgaggtaaagccctagtaggtgacggtggactggaatgccaccctggttccgtgcagcttgacagagtgccggccggtgctctggccacagaaatcggctgttttgggac

SEQ ID NO: 642 - DNA, 591 bp, Unknown
  Description of Unknown: unclassified Enterovirus sequence
cccgtaggcagtatgggtgtagtactcttgtattctggtacatttgtacgccagtttttcttcccacccccaagtaacctttagaagcaattgcatccagacgagcaggcgaccaacactccacgttggttcacgtcaagcacttctgtttccccggtattagagtgttaggcttctcaagaggctgaagctcgaggtatcgttatccgcacagttactaagcagagcctagtatcactctgaccttctcactggctggtcgttcaatgagagacccactcatagacctggcagatggggctggaagtaccccactggcgacagtgttccagcccgcgtggctgcctgtccccctttctgggggaaagccgatgttaagacagggtgtgaagagccgcgtttgctaactgtgagtcctccggcccctgaatgcggctaatcttaccccacagctattgcatggaaaccaccatgtggatagtcgtaatgggcaactgtgggacggaaccgactactttgggtgtccgtgtttccttttattccatttattatctcatggtgacaacgtataagagttatatgttgtttacc

SEQ ID NO: 643 - DNA, 591 bp, Unknown
  Description of Unknown: unclassified Enterovirus sequence
ccgtctacggacgtagtactcttgtatttcggtacacttgtacgccagttttcctccctccaccccttatgcaacttatagaagcttgaacttacaggcgaataggaggccagcaatccatgctggtaaacgccaagcacttctgtatccccggtattagagtgttaggcttctcacgaggctgaagcttgatatatcgttatccgcacagttactaagcagagcctagtatcatcttactctttatgctggttggtcgctcagtcagtttcccctgatagacctggcagatggggctggaaatccctcactggtaacagtgttccagcccgcgtggctgcctgtccccctccttagggggaaagccaatataaagacaaggtgtgaagagccgcgtttgctaattgtgagtcctccggcccctgaatgcggctaatccaaccccacagctatcgcatggaatccaccatgtaggtagtcgtaatgggcaactgtgggacggaaccgactactttgggtgtccgtgtttccttttataccttatctgatctcatggtgacaacatatattgacaagtgtatgttgttcacc

SEQ ID NO: 644 - DNA, 596 bp, Unknown
  Description of Unknown: unclassified Enterovirus sequence
gtaccaccacgaacaagcacttctgtttccccggtgaagttgcatagactgtgcccacggttgaaagcgactgatccgttatccgctcttgtacttcgagaagcctagtaccatcttggaatcttcgacgcgttgcgctcagcactcaaccccagagtgtagcttaggctgatgagtctggacattccccatcggtgacgatggtccaggctgcgttggcggcctacctgtggcccaaagccacaggacgctagttgtgaacaaggtgtgaagagcctattgagctacatgagagtcctccggcccctgaatgcggctaatcccaaccacggagcaggtggtcataatccaatgactggcctgtcgtaacgcgcaagtctgtggcggaaccgactactttgggtgtccgtgtttccttttatttttacaatggctgcttatggtgacaatcatagattgttatcataaagcgaattggattggccatccggtgagaatcaaatcgcttgtatatttgtttgttggatttgctccattaacattaaacaccttaacacttattaaagtagttctattgataagacattgctattaca

SEQ ID NO: 645 - DNA, 596 bp, Rhinovirus B
gacccactgggtgtagtgctctggtattttgtacccttgcacgcctgtttcccatttgtacccttccttgatttcctccccatgtaacgttagaagtttcggaattttaaagtacaataggaagcgccacatccagtggtgttgtgtacaagcacttctgtttacccggggcgaggtataggctgtgcccacggccaaaaacctttaaccgttatccgccaaccaactacgtaacggctagtatcatcttgtttctgacttggcgttcgatcaggtggtaacccccactagtctggtcgatgaggctaggaattccccacgggcgaccgtgtcctagcctgcgtggcggccagcccagcttttgctgggacgccttttcaaagacatggtgtgaagacccgcatgtgcttggttgtgagtcctccggcccctgaatgcggctaaccttaaccctggagcccagtgacataatccaatgttatttgggtcgtaatgagtaattccgggatgggaccgactactttgggtgtccgtgtttccttttattctttataatgtcttatggtcacagcatatatattgtatatactgtgatc

SEQ ID NO: 646 - DNA, 596 bp, Rhinovirus C
atcccaccatgattgttcactgaacgttgtactcttgtattacggtacacttgtacgccagttttataatcccctccccttgtaacttagaagcaagtacacacaggccaatagcaagtagcaagccatgctacttatggtcaagcacttctgtttccccggtctgacgggatatgcttcacccgaggcagaaactcagatgatcgttatccgcaaagtgcctacgggaagcctagtagcaccctggaaactgttaggttggtcgctcaattgctgaccccgagcaatagacttggcagatgaggctagacataccccaccagcgatggtggtctagcctgcgtggctgcctacccaccctaatagggtgggaagcctatcaatggacagggtgtgaagagcctactgtgctcactttgactcctccggcccctgaatgtggctaatcctaaccccgtatctatcgcatgcgcaccagcatgtaggtagtcgtaatgggcaactacgggatggaaccaactactttgggtgtccgtgtttcctgttttctttattatttgcttatggtgacaattgtatgaaatacgattgacacc

SEQ ID NO: 647 - DNA, 597 bp, Rhinovirus A
gttgttcccacctggacttcctatgtggagttgtacactgttatcccggtaaccttgtacgccagttttatacacccttccctgtaacttagaagttataagcacgaggaccaataggtagtgactttccaggtcactaaaggtcaagcacttctgtctccccggtcaaagttgatatgctctccccagggcaaaaacaattgagatcgttatccgcaatgtgcctacgcaaagcctagtaatatcttagatgatatatggttggtcgctccgccatttcccatggtagacctggcagatgaggctagaaactccccactggcgacagtgttctagcctgcgtggctgcctgcgcactctctgagtgcgaagccatatatttgacaaggtgtgaagagccccgtgtgctcacattgaatcctccggcccctgaatgtggctaaccttaaacctgcagctagtgcacacaaaccagtgtgtagctagtcgtaacgagcaattgcgggatgggaccaactactttgggtgtccgtgtttcacttttttccttttatatttgcttatggtgacaatatatataatacatatattgacacc

SEQ ID NO: 648 - DNA, 598 bp, Unknown
  Description of Unknown: unclassified Enterovirus sequence
cccagtaacgttagaagaaagtacaaatgacacttagcaaatccaccaacccaggtgggttttcgtcaagcacttctgtttccccggacctagtaccaataggctgtacccacggctgaaggggaaaacgttcgttacccggctacctacttcgaaaagcctagtatcatcatagaatgtctcaagtgttacgctcagcacaaccccagtgtagttcaggtcgatgagtcaccgaattccccacgggcgaccgtgtcggtggctgcgttggcggcctgcctgcgagtttcactcgcaggacgcttgattcatgacatggtgtgaagagcctattgagctaggtagtagtcctccggcccctgaatgcggctaatcctaaccacggagccatgcgtcacaatccagtgatgtcgtggtcgtaacgagcaattctgtggcggaaccgactactttgggtgtccgtgtttcctgttttatttaccttggctgcttatggtgacaattgtatagttgtcatcatatagctattggattggccatccggatatatacaagcaactagtgttcacactacctcttttgctataacacaagtatc

SEQ ID NO: 649 - DNA, 598 bp, Rhinovirus C
ccaccgggcacactgtgcgtagtactctgtgattacggtcactttgtacgcctgtttgcatccccaacccacatttcctatcatcttttatatccgtaacttagaagcataacacacagtccaataggaagcagctaaaccaagactgctaaggacaaatacttctgtttccccgggcgtgtgaatagactccaacagggttgaagctgtagcgctcgttatccgcacaactactacgcgactgttagtagcactttggatagcatgtggggttccgctccacagaaaccccatctgtaggtcagggcaatggggctacacataccccactggcgacagtggtgtagcccgcgtggtgccctgcctgggactgtgtcccaggactccacttgtttgacagggtgtgaaggcactagtgtgctagttgtgagtcctccggcccctgaatgcggctaatcctaaccctgcagccattgcaaacattccagtttgtgggtggtcgtaacgagtaattgcgggatggaaccgactactttgggtgtccgtgtttctctttttaacttgatgagtgtcttatggttacaattatacagtaacc

SEQ ID NO: 650 - DNA, 600 bp, Unknown
  Description of Unknown: unclassified Hunnivirus sequence
agctttcttacccttcatttgtgaacccactagtctaagccgcttggaatacgatgagtggaaacgttcattctaaatggagtgaaacatgctcaattttctagctcgtgctggtctttccagtgcggggcggccctgtctggccgtaactctacagagtgtcacgccgtgcttgcggatctcacgtggcacatgacaaggctctcgctggaactgtgagtctgatgcatgtggagtaacagtgaaaagtgcatgatcacacatttgtgtgggctatgagcctgcggaacaacaactggtaacagttgcctcaggggccgaaagccacggtgttaacagcaccctcatagtttgatctatcccaggatagtgatgttgtgtacctagtaattgccaatcctcatgtcttggtatcacggcataccggagagttcgcgggtgaaggatgcccagaaggtacccgtaggtaaccttaagagactatggatctgatctggggccctgtctggagtgctttacacacagctcagggttaaaaaacgtctagcccgccaggacccgagggattcgggttttcccttaaaaacccgattagagcat

SEQ ID NO: 651 - DNA, 600 bp, Unknown
  Description of Unknown: unclassified Enterovirus sequence
cggtaagccacccgagttctggccaagcacttctgtttccccggactgagtatcaataagttgctcgcgcggctgaaggagaaaacgttcgttacccgaccaactacttcaagaaacccagtatcaccatggaagttgcgcagtgtttcgctccgcacaaccccagtgtagatcaggtcgatgagtcaccgcaacccccacgggtgaccgtggcggtggctgcgctggcggcctgcccatggggcaacccatgggacgcttcaatactgacatggtgtgaagagtctattgagctagttggtagtcctccggcccctgaatgcggctaatcctaactgcggagcagacgctcgcatgccagcgggtagtctgtcgtaacgggtaactctgcagcggaaccgactactttgggtgtccgtgtttccttttattcttatactggctgcttatggtgacaattgaaaggttgttaccatatagctattggattggccatccggtgacaaacagagcgattatatactcttttgttgggttcatcccattgaattacaaggtattaaacaccctcagttttatcctgatactaaatacaacaaa

SEQ ID NO: 652 - DNA, 601 bp, Rhinovirus C
acccacaccgtctacggacgtagtactcttgtatttcggtacatttgtacgccagttttccctccctcccccctttcacgtaacttatagaagcttgaacatacaggcgaataggaagccaacaaaccatgttggtaaacgccaagcacttctgtttccccggtattagagtgttaggcttctcacgaggctgaagcttgatatatcgttacccgcacagttactaagcagagcctagtaacactttgatctctatactggctggtcgctccgtcagaaaccccctgatagacctggcagatggggctggaaattccccactggtgacagtgttccagcccgcgtggctgcctgtccccctttcttgggggaaagccaatatatagacaaggtgccaagagccgcgtttgctaattgtgagtcctccggcccctgaatgcggctaatccaaccccacagctatcgcatggattccaccatgtaggtagtcgtaatgggcaactgtgggacggaaccgactactttgggtgtccgtgtttccttttataccttattttatctcatggtgacaacatatattgacaagtatatgttgactacc

SEQ ID NO: 653 - DNA, 602 bp, Unknown
  Description of Unknown: unclassified Enterovirus sequence
ttaaaacagctgtgtggttgcacccaccaccaggcacaatgtgcgttgtacactgggattccggtcactttgtacgcctgtttgaccacccccccccatgcaacttagaaaatatacacatagcccaataggatgcggccaaaccaggttcgtcacgggcaagcacttctgtttccccgggtgtgtgaatagaccctaccagggttgaagctgtagcactcgttatccgcatggctactacgcaaatgttagtaacaccctctattgtacttgggatttcgttccgcagataccccatctgtagattagggcgatgaggctacacactccccactggcgacagtggtgtagcctgcgtggcgccctacctgggtctcctgacccaggattccacttacaagacagggtgtgaaggcacaagtgtgctagtcatgagtcctccggcccctgaatgcggctaatcttaaccccgtagccattgcaggcaaaccagtctgtggatggtcgtaatgggtaactacgggatggaaccgactactttgggtgaccgtgtttctcttttttctttatgtaggcactttatggttacaacataagtaacc

SEQ ID NO: 654 - DNA, 603 bp, Rhinovirus A
ttgtacccacccacactgtctacggacgtagtgctctcatattacggtatgcttgcacgccagtttttaccccccttttcccaatttgtaacattagaagtttgtactattaatttggtcaataggaggtagcaagccatgctatctaagaccaagcacttctgttaccccggtatacggagaatagactccaaaagggttgaagctccaaatatcgttatccgcacaattactacgcaaagcctagtaacatcttgataagctctttggttggtcgctcagctgttacccccagtagacttggcagatgaggctgggtattccccactggcgacagtgacccagcctgcgtggctgcctacacacctggcgacaggtgtgaagccaaaagtggacaaggtgtgaagagccccgtgtgctaattgtgattcctccggcccctgaatgcggctaatccaaccccacagccaatgcatgtaaaccaacatgtatttggtcgtaacgggcaactgtgggacggaaccgactactttgggtgtccgtgtttccttttattttaaatgacttgcttatggtgacaaatattggtgtatatttgtcatc

SEQ ID NO: 655 - DNA, 603 bp, Unknown
  Description of Unknown: Human rhinovirus A strain HRV-A80_p1187_sR2954_2009 polyprotein1 sequence
ggcttgacctttgacaactttgtgtttgaggagcagtactctactattccggtagttttgtacaccagttttatctcccttcccctatgtaacttagaagacaagcactcaagaccaataggatgataactaaccaagttgtcaaaggtcaagcacttctgtttccccggtcaaaattgatatgctccaccagggcaaaaacagttttggtcgttatccgcaaagtgcctacgcaaagcttagtaacactttgaagaatgtatggttggtcgttccgctattccccatagtagacctggcagatgaggctagaaaatccccactggcgacagtgttctagcctgcgtggctgcctgcgcacctctttgaggtgcgaagccattcctttgacaaggtgcgaagagccccgtgtgctcactttgagtcctccggcccctgaatgtggctaaccttaaccctgcagctagtgcatgcaatccagcatgtctctagtcgtaatgagcaattgcgggatgggaccaactactttgggtgtccgtgtttctctttttacttttaaattgcttatggtgacaatatatataacacatatatattgacacc

SEQ ID NO: 656 - DNA, 604 bp, Aalivirus A
ttgaaagggggtgctcagggtagctccctgagctcttccctccaccctctttcaacgtctggcccacgatacgggccacctttcaatcttaactaactatccctttaatctatttggattttctggtttagaataatttggaacacataattggattatcttttaggattgtggataggatttgttcgggatatcactcccttcctgtgctaacacatattctaattccctcctttgtctattatctcttggaggtggtgctgaaatattgcaagccacttgagtgtatagatgaagtaggctcaagatgaatgttgtgttactcaaggcaagtgtagctatcactaagatattggtaacgtgaaacggattaccggtagtagcgtgatcttccgtcttagtgctctagtgactagaggacaacgacatggcatcacatatcttaaccctccagttttggcatccgggacagaatgggctggatatccgctttctttctggggtatgtgatgggtggtattggggtaaccaccttgaccatgacgctcgataagagtgaccgcctgatcattgaaacctctagtataaaattcaggctgaaatc

SEQ ID NO: 657 - DNA, 605 bp, Enterovirus C
aactttagaagcaattcaaagagttcaatacagggggtacaaaccagtaccaccacgaacaagcacttctgtttccccggtgaggctgtatagactgtgcccacggtctaaaacggcagatccgttacccgctcaagtacttcgagaagcctagtatcaccttggaatcttcgatgcgttgcgctcagcaccctacccccgggtgtagcttaggtcgatgagtctgggcatgccccaccggcgacggtggcccaggctgcgttggcggcctacccatggctaacgccatgggacgctagttgtgaacaaggtgtgaagagcctattgagctacttgagagtcctccggcccctgaatgcggctaatcccaaccacggagcaagtgcctgcatgccagcaggtagcttgtcgtaacgcgcaagtctgtggcggaaccgactactttgggtgtccgtgtttccttttattcttataatggctgcttatggtgacaatctaagattgttatcatatagcttttggattggccatccggtgattatttgacttttgagcacttgtttaccttatctcatcacatattcatttaattgcttgattgcata

SEQ ID NO: 658 - DNA, 606 bp, Rhinovirus A
taataatagtgtactactccacgtgggaagtacgggtggagtagtacactattattacggtaatcttgtacgccagttttataaccccttcccctatgtaacttagaagtttgaactcaagaccaacaggtggtaatcaaccagattactaaaggtcaagcacttctgtttccccggtcaatattgatatgctccaccagggcaaaaacaattgcgatcgttatccgcaaagtgcctacgcaaagcttagtaacattttgaataatatatggttggtcgttccgctattccccatagtagacctggcagatgaggctggaaactccccactggcgacagtgttccagcctgcgtggctgcctgcgcactctcacgagtgcgaagccatatatttgacaaggtgtgaagagccccgtgtgctcactttgagtcctccggcccctgaatgtggctaaccttaaccctgcagctagtgcatacaagccagtatgtagctagtcgtaatgagcaattgcgggatgggaccaactactttgggtgtccgtgtttcacttttatctttattatttgcttatggtgacagtatatagtgtatatattgttacc

SEQ ID NO: 659 - DNA, 607 bp, Rhinovirus C
ttaaaacagctgtgtggttgttcccaccaccaggcacactgtgcgttgtacactgggattccggtcactttgtacgcctgtttgctatcccccccaacttatgtaatttagaagatgtacacaacgcccattaggatgcggccaaaccaggtccgcttagggcaagcacttctgtttccccgggtgtgtgaatagactctaacagggttgaagctgtagcactcgttatccgcgcaactactacgcgaatgttagtagcatcctgtgttgcatttgggatttcgctccgcagaaaaccccatctgtagattagggcaatgaggctacacataccccactggcgacagtggtgtagcctgcgtggtgccctacccaggccttcttggcctgggattccacttacaagacagggtgtgaaggcactagtgtgctagttgtgagtcctccggcccctgaatgcggctaatcttaaccccgtagcccccgcaagtaaaccaacttgtaggtggtcgtaatgagtaattacgggatggaaccgactactttgggtgtccgtgtttccttttattctttatatttgcatcctatggttacaacataagtaatc

SEQ ID NO: 660 - DNA, 608 bp, Unknown
  Description of Unknown: unclassified Enterovirus sequence
ttaaaactgggtataggttgttcccacctgtaccacccacgtggtgtagtgctcctgtattccggtacacttgcacgccagtttgccctcccttcctgtaacgtagaagtaatataaacagaccaataggggatggcgaaccacgccgttcaaggtcaagcacttctgtttccccggcatgcgaggaatagaccttttcaagggttgaagccacaagtgtcgttacccgcattggtactacacagagcttagtaccgctctggaaacttattggttggtcgttcagccattttcccctggtagacccggcagatgaggcaagaagctccccactggtaacagtgttcttgcctgcgtggctgcctgcacaccctaatgggtgtgaagccaataagtagacagggtgtgaagagccgcgtgtgctaccaatgagtcctccggcccctgaatgcggctaatccaaccccacagctatggcatgcaatccagcatgtgcgtagtcgtaatgagtaattgtgggacggaaccgactactttgggtgtccgtgtttcccttattctcttatgtcttgcctatggtgacaatattaagtattaatattgctacc

SEQ ID NO: 661 - DNA, 608 bp, Rhinovirus C
ggcatgggttgtacccacccatgccacccaagtggtgtagtgctcctgtatcccggtacacttgcacgccagtttgccctcccttttccccaagtaacttagaagcttacacacaggccactaggaggtggtaatccataccactgatggtcaagcacttctgtctccccggcacgcatggaatagaccttgaaaagggttgaagccataaatgtcgttatccgcattggtactacacaaagcctagtaatgccttgaaacttctacggttggtcgttccgctagatgcacccctctagtagacctggcagatgaggcagggcaaaccccactggcgacagtggccctgcctgcgtggctgcctgcgcgcccacttgggtgcgaagccgatgaacagacaaggtgtgaagagccccgtgtgctaccaatgagtcctccggcccctgaatgcggctaatccaaccccacagctattgcacacaaaccagtgtgtatgtagtcgtaatgagtaattgtgggacggaaccgactactttgggtgtccgtgtttccttttattctttaaatttgcacatggtgacaatattggtagtatcagtattgtcatc

SEQ ID NO: 662 - DNA, 608 bp, Rhinovirus C
ttaaaactgggttatagttgctcccactataaccacccacgcggtgttgtggacttgtatttcggtacacttccatgccagttttatcttcccccctgcaacacttagaagaaatgtacttatggaccaataggcggcggccacccaggtcgttgacggtcaagcacttctgtctccccggtgatactggatacgctttacccaaggcgaaaaccgggctcatcgttatccgcaaagtgcctacgagaagtctagtagcactctgaaaacctatgactggtcgctccactgcaatcccagcagtagacctggcagatggggctagacataccccaccagcgatggtggtctagcccgcgtggctgcctgcacaccctatgggtgtgaagccagaaagtggacagggtgtgaagaacctattgtgctcactttgagtcctccggcccctgaatgtggctaatcctaaccctgcaaccgttgcgcacaacccagtgcgtatgcggtcgtaatgagcaattgcgggatggaaccaactactttgggtgtccgtgtttcttgttattcttttatttgcttatggtgacactgtatagctatacattgtcatc

SEQ ID NO: 663 - DNA, 609 bp, Unknown
  Description of Unknown: unclassified Enterovirus sequence
taaaactgggtacaggttgttcccacctgtaccacccacgtggtgtggtgctcttgtattccggtacatttgcacgccagtttgctacccctcaccctttgtaacctagaagctattaactcgaccaataggcggtggtaaaccataccacttacggtcaagcacttctgtttccccggtatgcgaggaatagactctcacagggttgaagcctcaagtatcgttatccgcattggtactacgcaaagcctagtagcgcctcggaaatcccttggttggtcgttccgctagtttcccctagtagacctggcagatgaggcaggacattccccactggtgacagtggtcctgcctgcgtggctgcctgcgcacccttcggggtgcgaagccaagtgatggacaaggtgtgaagagccccgtgtgctactaatgagtcctccggcccctgaatgcggctaatccaaccccacagctattgcacacaaaccagtgtgtatatagtcgtaatgagcaattgtgggacggaaccgactactttgggtgtccgtgtttccttttattctcattatcttgcttatggtgacaatactgtgatatagtgttgttacc

SEQ ID NO: 664 - DNA, 609 bp, Unknown
  Description of Unknown: unclassified Enterovirus sequence
aactgggcttgggttgtgcccacccaagctgcccacgtggcgttgtgctcttgtattccggtacacttgcacgccagtttgcctcccctaccctgcaacgaatttagaagaatggacacaaatagaccaataggtggtgacaatccatgtcactaatggtcaagcacttctgtttccccggtgtgatgtggaataaactcccccagggttgaagccataagcatcgttacccgctacgtgcctacgcaaaacctagtagcattctggagtctacttggttggccgttcagccactaacccgtggtaggcctggcagatgaggctgggcgtaccccactggtaacagtggcccagcctgcgtggctgcctgcccctctttgaggggaagccaattaggtgacagggtgtgaagagtcccgtgtgctcacgtagagtcctccggcccctgaatgtggctaatcctaaccccgcagctattgcacacaatccagtgtgttagtagtcgtaatgggcaactgtgggatggaaccaactactttgggtgtccgtgtttcttgtttttcttttatacttgcttatggtgacaaatagtgcatactgtttgacacc

SEQ ID NO: 665 - DNA, 610 bp, Unknown
  Description of Unknown: unclassified Kobuvirus sequence
gtaacttcaagtgtgtgtgctcgtaatcttgactcctgccggaatgccgcccggttcagtgaacaaacagctaggcaagtccctcccttcccctgtggtcggttctcaccggccaccatccctcccccagcctgacgtgttacaggctgtgcaaagcccccgcgaaagctgctcacgtggcaattgtgggtcccccctttgtcaagacaccgagtctttctcccttaaggctagcccggtcccacgaacgtggaactggcaactagtggtgtcactacacgcctccgacctcggacgcggagtgctgttccccaagctgtaaccctgacccaagactgtgctgcctggcaagcaccgtctgggaagatgttccgctgtggctgccaaacctggtaacaggtgccccagtgtgtgtagtcttcctccagtctccggactggcagtcttgtgtaaagatgcagtgtaaggttcaagtgccaaatccctggaaggagtgaccctctactgccctaggaatgctgtgcaggtacccccaacttcggttggggatctgagcacaggctaattgtctacgggtagtttcatttcccatcctctcttttttggcatc

SEQ ID NO: 666 - DNA, 610 bp, Unknown
  Description of Unknown: unclassified Enterovirus sequence
ttaaaactgggtacaggttgttcccacctgtatcacccacgtggtgtggtgctcttgtattccggtacacttgcacgccagtttgccacccctcacccgtcgtaacttagaagctaacaactcgaccaacaggcggtggtaaaccataccacttacggtcaagcactcctgtttccccggtatgcgaggaatagactcctacagggttgaagcctcaagtatcgttatccgcattggtactacgcaaagcttagtagtgccttgaaagtcccttggttggtcgctccgctagtttcccctagtagacctggcagatgaggcaggacactccccactggcgacagtggtcctgcctgcgtggctgcctgcgcacccttaggggtgcgaagccaagtgacagacaaggtgtgaagagccccgtgtgctaccaatgagtcctccggcccctgaatgcggctaatccaaccccacagctattgcacacaagccagtgtgtatgtagtcgtaatgagcaattgtgggacggaaccgactactttgggtgtccgtgtttccttttattcttatcattctgcttatggtgacaatactgtgaaatagtgttgttacc

SEQ ID NO: 667 - DNA, 610 bp, Rhinovirus A
ttaaaactggatctaggttgttcccacctagatctcctacatggagttgtactctattattccggtaattttgtacgccagttttatatccctacccccatgtaacttagaagttaagcacaacgaccaataggaggcaattgaccaaattgctaaaggtcaagcacttctgtttccccggtcaagattgatacgctccaccagggcgaaaacaattgagatcgttatccgcaaagtgcctacgcgaagcctagtaacactttgaagagtttatggttggtcgctccgctattccccatagcagacctggcagatgaggctagaagctccccactggtgacagtgttctagcctgcgtggctgcctgcacacccttatgggtgtgaagccatatacttgacagggtgtgaagagcctagtgtgctcactttgagtcctccggcccctgaatgtggctaaccttaaacccgtagctagtgcacacaatccagtgtgtggctagtcgtaatgagcaattacgggatgggaccaactactttgggtgtccgtgtttcactttttccttttgtatttgcttatggtgacaatatatagattatatattgacacc

SEQ ID NO: 668 - DNA, 610 bp, Rhinovirus A
ttaaaactgggtctaggttgttcccacctaggcctcctacatggagttgtactctattattccggtaattttgtacgccagttttatatcccttcccccatgtaacttagaagtttgacacactgaccaataggtggcaattaaccaaattgctaaaggtcaagcacttctgtttccccggtcaagattgatacgctctaccagggcgaaaacaattgagatcgttatccgcaaagtgcctacgcgaagcctagtaatatcttgaagaatttatggttggtcgctccgccattacccatggtagacctggcagatgaggctagaaattccccactggtgacagtgttctagcctgcgtggctgcctgcacaccctcacgggtgtgaagccatacgtttgacaaggtgtgaagagcctagtgtgctcactttgagtcctccggcccctgaatgtggctaaccttaaacccgtagctggtgcacacaaaccagtgtgtagctagtcgtaatgagcaattacgggatgggaccaactactttgggtgtccgtgtttcactttttccttttatatttgcttatggtgacaatatatagattatatattggcacc

SEQ ID NO: 669 - DNA, 610 bp, Rhinovirus A
ttaaaactgggtttgggttgatcccacccaaacctcccaagcggagtggtactctgttatttcggtaactttgtacgccagttttatattccctcccccctttaaactgtaaagctaagcacacagaccaatagctgacaatcatccagattgttaatggtcaagcacttctgtttccccggtcaacgttgatatgctccaacagggcaaaaacaactgcgatcgttatccgcaaagtgcctacgcaaagcctagtagcacctttgaagtcatttggttggtcgctccgctgttccccacagtagacctggcagatgaggctagaaataccccactggtgacagtgttctagcctgcgtggctgcctgcacaccctttgggtgtgaagccaaatcatggacaaggtgtgaagagccccgtgtgctcactttgagtcctccggcccctgaatgtggctaaccttaaccctgcagctagagtgcacaatccagtgcatttctagtcgtaatgagcaattgcgggatgggaccaactactttgggtgtccgtgtttcactttttacctattatttgcttatggtgacaatatatataattatatattggcacc

SEQ ID NO: 670 - DNA, 610 bp, Rhinovirus A
ttaaaactgggtccaggttgttcccacctggatctcctaatgggagttgtactctgttattccggtaactttgtatgccagttttatctccctacccccaatgtaacttagaagatgtacacaacgaccaataggtgatgatcaaccagattatcaaaggtcaagcacttctgttttcccggttagagttgatatgctccaacagggcaaaaacaactttaatcgttatccgcaaagcgcctacgcaaagcctagtaacagcttcgaagatttatggttggtcgttccgctgttccccacagtagacctggcagatgaggctagagattccccactggtaacagtgttctagcctgcgtggctgcctgcgcacccttcgggtgcgaagccatatttcggacaaggtgcgaagagccccgtgtgctcgctttgagtcctccggcccctgaatgtggctaaccttaaccctgcagctagtgcatacaaaccagtatgtggctagtcgtaatgagcaattgcgggatgggaccaactactttgggtgtccgtgtttctctttttccttttattattgcttatggtgacaatatatagtttatatattggcacc

SEQ ID NO: 671 - DNA, 610 bp, Rhinovirus C
ttaaaactgaaccatagttgttcccactgtggttgcccaaggggcgtggtggtcttgtattacggtacatttccatgccagttttatcaccccttcccgaaacatagaagaaatgcacacaccgaccaataggaggtggtcaaccagaccactaaaggtcaagcacttctgtttccccggttggcttggatatgcttcacccgaggcaaaaaccgagccaatcgttatccgcaaagtgcctacgagaagcctagtagcacccttgaagccaatggttggtcgctccgttgcaaccccagcagcagacctggcagatgaggctgagcattccccaccagcgatggtggctcagcctgcgtggctgcctgcgcatccttcgggatgcgaagccagaaagtggacaaggtgtgaagagcctattgtgctcactttgagtcctccggcccctgaatgtggctaatcctaaccccgcagctactacacataagccaatgtgcaggtagtcgtaacgggcaactgtgggatggaaccaactactttgggtgtccgtgtttccttgttatctttttgaatgcctatggtgacaattgtacagtatacatttgttacc

SEQ ID NO: 672 - DNA, 611 bp, Rhinovirus A
ttaaaactgaatccagattgttcccatctggatttcctacatggagttgtactctattattccggtaattttgtacgccagttttatcaccccttcccccgtaacttagaagtttgaaacaaaagaccaataggaggtaactatccaagttactataggtcaagcacttctgtttccccggtcaaagttgatatgctccaccagggcaaaaacaattgagatcgttatccgcaaagtgcctacgcaaagcctagtagtatcttgaaaagcatgtggttggttgctccgctgtaccccacagtaaacctggcagatgaggctagaagttccccactggtgacagtgttctagcctgcgtggctgcctgcgcactctttgagtgcgaagccatatgtttgacaaggtgtgaagagccccgtgtgctcactttgagtcctccggcccctgaatgtggctaaccttaaccctgcagctagtgcatgcaatccagcatgtggctagtcgtaatgagcaattgcgggatgggaccaactactttgggtgtccgtgtttcacttttttccttttataattgcttatggtgacaatatatagtgatatatattgacacc

SEQ ID NO: 673 - DNA, 611 bp, Rhinovirus A
ttaaaactggatctaggttgttcccacctagatctcccaagtggagtggtacactattatcacggtaattttgtacgccggttttatctccccttaccccaagtaacttagaagtattacataaagaccaacaggcagtgattatccagatcactaaaggtcaagcacttctgtctccccggtcaaagttgatatgctccaacagggcaaaaacaactgagatcgttatccgcaaagtgcctacgcagagcctagtaactaccttgaaattacttggttggtcgttccaccaaaccccatggtagacctggcagatgaggctagaaattccccactggtaacagtgttctagcctgcgtggctgcctgcacaccctttgggtgtgaagccaagtaatggacagggtgtgaagagccgagtgtgctcactttgagtcctccggcccctgaatgtggctaaccttaaccctgcagctagagcgcgcaaaccagcgtgtatctagtcgtaatgagcaattgcgggacgggaccaactactttgggtgtccgtgtttctttttattcttatatttgcttatggtgacaatatataattatttgtatattggcacc

SEQ ID NO: 674 - DNA, 611 bp, Rhinovirus A
ataaaactggcgtgcatagttcccatccagatcacccaagtggtgtagtgctctgttattccggtaactttgcacgccagttttattacccctttccccagtaacttagaagctttaatacactgaccaatagggtgcgacaaccagtcgtacaaggtcaagcacttctgtttccccggtcaatgttgatatgctcctccagggcaaaaacaatagcgatcgttatccgcaagatgcctacgcaaagcctagtagcatctttgaaaatacttggttggtcgctcatgtgcaaccccagcattagacctggcagatgaggctagaaattccccactggcgacagtgttctagcctgcgtggctgcctgcacaccctaacgggtgtgaagcctggtattggacaaggtgtgaagagccccgtgtgctcatcttgagtcctccggcccctgaatgcggctaaccttaaacctgcagccattgcttacaatccagtgagtttatggtcgtaatgagcaattgcgggatgggaccgactactttgggtgtccgtgtttctctttttacttaaatttgagcttatggtgacaatatatagcaatatatattggcatc

SEQ ID NO: 675 - DNA, 611 bp, Unknown
  Description of Unknown: unclassified Enterovirus sequence
ttaaaactgaatcatggttgttcccaccatgattacccacgcggtgcagtggtcttgtattacggtacatttccataccagttttatacaccccaccccgaaacatatagaagtttgtacacaatgaccaataggtggtggccatccaggttactgacggtcgagcacttctgtttccccggtacccttgtatacgcttcacccgaggcgaaaaacgaggttatcgttatccgcaaagtgcctacgagaagcctagtaacacttttgaaacctatggctggtcgctcagctgctcacccagcagtagacctggcagatgaggctagacattccccaccagcgatggtggtctagcctgcgtggctgcctgcacaccctattgggtgtgaagccagaaagtggacagggtgtgaagagcctattgtgctcactttgagtcctccggcccctgaatgtggctaatcctaaccccgtagctgttgcatgcaacccagcatgtatgcagtcgtaatgggcaactatgggatggaaccaactactttgggtgtccgtgtttctcgtttcacttttcattgcttatggtgacaattgtagttgatacacttgttacc

SEQ ID NO: 676 - DNA, 611 bp, Rhinovirus A
ttaaaactgggtgcgagttgttcccactcgcacttcctacgtggagtagtacactattattacggtaattttgtacgccagttttataacccttccccttttgtaacttagaagtttgaacttgagaccaataggtggtgatcaaccagatcgccaaaggtcaagcacttctgtttccccggtcaacattgatatgctccaccagggcaaaaacaattgcgatcgttacccgcaaagtgcctacgcaaagcttagtaatatcttgaacgatatatggttggtcgctccactaatccccatagtagacctggcagatgaggctggaaactccccactggcgacagtgttccagcctgcgtggctgcctgcgcactctcacgagtgcgaagccatatatttgacaaggtgtgaagagccccgtgtgctcactttgagtcctccggcccctgaatgtggctaaccttaaccctgcagctagtgcatacaaaccagtatgtggctagtcgtaatgagcaattgcgggacgggaccaactactttgggtgtccgtgtttcactttttcttttatggtttgcttatggtgacagtatatagtgtatatattgttacc

SEQ ID NO: 677 - DNA, 611 bp, Rhinovirus A
ttaaaactgggtccaggttgttcccacctggacttcccacgtggagttgtgcactgttattccggtaactttacacgccagttttatctcccttcccaaatgtaacttagaagatgtacacagcgaccaataggtggcaactagccaagttgcttaaggtcaagcacttctgtccccccggtcaatgttgatacgctctcccagggcgaaaacaactgagatcgttatccgcaaggcgcctacacaaaacctagtaacatcttgaatggtatgtggctggtcgttccgctaaaccccatagtagacctggcagatgaggctagaaattccccactggcgacagtgttctagcctgcgtggctgcctgcgtgtccttacggacacgaagccatatacttgacaaggtgtgaagagtcccgtgtgctcgtcttgagtcctccggcccctgaatgtggctaaccttaaccctgcagccagtgcgcacaaaccagtgtgtagctggtcgtaatgagtaattgcgggatgggaccaactactttgggtgtccgtgtttcactttttaccttttattatgcttatggtgacaatatatagatgcatatattgacacc

SEQ ID NO: 678 - DNA, 611 bp, Rhinovirus A
ttaaaactgaatccaggttgttcccacctggatttcccatgtggagtagtacactgttattccggtaactttgtacgccagttttataaccccttccccttatgtaacttagaagataagcacaaagaccaataggtggtggctatcccagtcactaaaggtcaagcacttctgtttccccggtcaacgttgatatgctccaccagggcaaaaacaaccgagatcgttatccgcaaagtgcctacgcaaagcctagtagcactttgaatagcatgtggttggtcgctccactattccccatagtagacctggcagatgaggctagaaatcccccactggcgacagtgttctagcctgcgtggctgcctgcgtgtcctaacggacacgaagccatatgtttgacaaggtgtgaagagccccgtgtgctcactttgagtcctccggcccccgaatgtggctaaccttaaccctgcagctggggcatacaatccagtgtgaactcagtcgtaatgagcaattgcgggatgggaccaactactttgggtgtccgtgtttcacttttttttataatgcttatggtgacaatatataataatttgtatattggcacc

SEQ ID NO: 679 - DNA, 611 bp, Enterovirus B
attagctggcccggtacaccaatcgggtcttgaccaagcacttctgttaccccggactgagtatcaataggctgctcacgcggctgaaggagaaaacgttcgttatccggccaattacttcgagaaacctagtaacaccgtgaaggttgcgcagcgtttcgttccgcactaccccagtgtagatcaggtcgatgagtcaccgcatcccccacgggtgaccgtggcggtggctgcgttggcggcctgcccatggggaaacccatgggacgcttcaatattgacacggtgcgaagagtctattgagctaattggtagtcctccggcccctgaatgcggctaatcctaactgcggagcagatacccgcacaccagcgggcagtctgtcgtaatgggtaactctgcagcggaaccgactactttgggtgtccgtgtttccttttatttttatattggctgcttatggtgacaattgaaagattgttaccatatagctattggattggccatccagtgagcaacagagcgattgtatttctctttgttggattcataccactaaactacaatagttataacactctattgtatatcattcatctgaacacaaaaag

SEQ ID NO: 680 - DNA, 612 bp, Unknown
  Description of Unknown: unclassified Kobuvirus sequence
tttcccctgttcgtaactaagtgtgtgcccaatctcctcactcctgctggcttcaccgaccggcagtgtccaaaatgctaggtgaatcccctccctttcctctgggcttctgcccagcttcctccccccagcctgacgtgacacaggctgtgcaaagaccccgcgaaagctgccaaaagtggcaattgtgggtcccccctttgtaaaggcgtcgagtctttctccctcaaggctagacccgtcagtgaattctgtcgggcaactagtgacgccactgcacgcctctgacctcggccgcggagtgctgccccccaagtcgtgcccctgaccacaagttgtgctgtctggcaaacattgtctgtgagaatgttccgctgtggctgccaagcctggcaacaggctgccccagtgtgcgtagttctcatccagacttcggtctggcaacttgctgttaagacacggcgtaaggggcgtgtgccaacgccctggaacgagtgtccactctaataccccgaggaatgctacgcaggtacccctggttcgccagggatctgagcgtaggctaattgtctaagggtattttcatttcccattctttctttcttgttcata

SEQ ID NO: 681 - DNA, 612 bp, Rhinovirus A
ttaaaactggatctgggttgttcccacccagatttcccatgtggagtagtactctattattccggtaattttgtacgccagttttatattccctaccccgagtaacttagaagataagcacacaaggccaatagtgggtgattagccaaatcatcaaaggtcaagcacttctgtttcccccggtcaaggttgatatgctctaccagggcaaaaacaactgagatcgttatccgcaaaatgcctacacaaagcctagtatcatcttggaaggcacagagttggtcgctccactattccccatagtagacctggcagatgaggctagaaaatccccactggcgacagtgttctagcctgcgtggctgcctgcgtgccttgcgaggcacgaagccctgtgtttgacaaggtgtgaagagccccgtgtgctcattttgattcctccggcccctgaatgtggctaaccttaaccctgcagctagtgcacacaaaccagtgtgtatctagtcgtaatgagtaattgcgggacgggaccaactactttgggtgtccgtgtttcactttttaccttttaattgcttatggtgacaatatatataaatatatattgacacc

SEQ ID NO: 682 - DNA, 612 bp, Rhinovirus A
ttaaaactggatctgggttgctcccacccagattacccaagtggtgtagtactctgttattacggtagctttgtacgccagttttatcacccctccccacaatgtaacttagaagttttacacttacagaccaataggatgtgattatccaaatcactaaaggtcaagcacttctgtttccccggttagatttgatacgctccaacagggcgaaaacagatctgatcgttatccgcaagatgcctacgcaaagcttagtagcgctctgaatgctttttggctggttgttccactacaaacccagtagtaaacctggcagatgaggctagaagttccccactggcgacagtgttctagcctgcgtggctgcctgcacaccctatgggtgtgaagccaatcagttgacagggtgtgaagagccccgtgtgctcatcttgagtcctccggcccctgaatgtggctaaccttaaacccgcagccaaggtgtgcaaaccagcacattcttggtcgtaacgagtaattgtgggatgggaccaactactttgggtgtccgtgtttctttttattcttttacaatgcctatggtgacaatatatagtatatattgtcatt

SEQ ID NO: 683 - DNA, 612 bp, Rhinovirus A
ttaaaactgggtccaggttgttcccacctggatctcctacatggagttgtactctgttattccggtaaccttgtacgccagttttatatcccctccccaaatgtaacttagaagttatacacacagaccaataggcggtgatcctccagatcactaacggtcaagcacttctgtctccccggtttgaattgatacgctccaacagggcgaaaacaatttgaatcgttacccgcaaagtgcctacgcaaagcctagtagcactttagaaaatttatggttggtcgctcagctataccccctagtagacctggcagatgaggctagaagtaccccactggcgacagtgttctagcctgcgtggctgcctgcacaccctcacgggtgtgaagccatatatttgacaaggtgtgaagagccccgtgtgctcactttgagtcctccggcccctgaatgtggctaaccttaaccctgcagctagtgcatgtaatccaacatgttgctagtcgtaatgagcaattgcgggatgggaccaactactttgggtgtccgtgtttcactttttaccttttatttgcttatggtgacaatatatataatatatatattggcatc

SEQ ID NO: 684 - DNA, 612 bp, Unknown
  Description of Unknown: unclassified Enterovirus sequence
ttgaaactgagtgtgggttgttcccacccacacttcccatgtggagtagtacactgttattacggtaaccttgtacgccagttttatcatccctttccctttgtaacttagaagttttaaacttgagaccaataggtggtgatcagccagatcactaaaggtcaagcacttctgtctccccggtcaacgctgatatgctccgccagggcaaaaacagctgcgatcgttatccgcaaagtgcctacgcaaagcctagtaatatcttgaatgatatatggttggtcgttcagctaaaccccatagtagacctggcagatgaggctggaaataccccactggtgacagtgttccagcctgcgtggctgcctgcgcactcttgcgagtgcgaagccatatatttgacaaggtgtgaagagccccgtgtgctcactttgagtcctccggcccctgaatgtggctaaccttaaccctgcagctagtgcatacaatccagtgtgtggctagtcgtaatgagcaattgcgggatgggaccaactactttgggtgtccgtgtttcactttttcctttataatttgcttatggtgacagtatatagcttatatattgttacc

SEQ ID NO: 685 - DNA, 612 bp, Rhinovirus C
ttaaagctggatcatggttgttcccaccatgattacccacgcggtgcagtggtcttgtattacggtacatttccataccagttttatacaccccaccccgaaactcatagaagtttgtacacaatgaccaataggtggtggccatccaggtcgctaatggtcaagcacttctgtttccccggcacccttgtatacgcttcacccgaggcgaaaaatgaggttgtcgttatccgcaaagtgcctacgaaaagcctagtaacactttgaaaacccatggttggtcgctcagctgtttacccaacagtagacctggcagatgaggctagacattccccaccagcgatggtggtctagcctgcgtggctgcctgcacaccctgccgggtgtgaagccagaaagtggacaaggtgtgaagagcctattgtgctcactttgagtcctccggcccctgaatgtggctaaccctaaccccgtagctgttgcatgtaacccaacatgtatgcagtcgtaatgggcaactatgggatgggaccaactactttgggtgtccgtgtttcctgttttactttttcattgcttatggtgacaattgtatctgatacacttgttacc

SEQ ID NO: 686 - DNA, 612 bp, Rhinovirus A
ttaaaactgggtccaggttgttcccacctggatctcctacatggagttgtactctattatcccggtaatcttgtacgccagttttatatcccttccctttttgtaacttagaagttaaacacacagaccaataggtggtggctatccaagtcattaatggtcaagcacttctgtttccccggtttagattgatacgctccaccagggcgaaaacaatttaaatcgttatccgcaaaatgactacgcaaagcctagtaatatcttgaaggacttatggttggtcgctccactaaaccccatagtagacctggcagatgaggctagaaataccccactggagacagtgttctagcctgcgtggctgcctgcacaccctatgggtgtgaagccatactttcgacaaggtgtgaagagccccgtgtgctcattttgagtcctccggcccctgaatgtggctaaccttaaccctgcagctagtgcatgcaatccagcatgttgctagtcgtaacgagcaattgcgggatgggaccaactactttgggtgtccgtgtttcactttttccttttatttgcttatggtgacaatatatatagtacatatatattggcatc

SEQ ID NO: 687 - DNA, 613 bp, Rhinovirus A
ttaaaactggatctgggttgttcccactcaggtctcccacgtggagtagtacactgttattacggtaactttgtacgccagttttacatcccctccccccaagtaacttagaagataagcacacaggccaataggagatgatcagccagatcattatgggccaagcacttctgtttccccggtcgaagttgatatgctccaacagggcaaaaacaactgagatcgttatccgcaaagcgcctacgcaaagcctagtaactatctggaaattacttggttggtcgctccgccataccccatggtagacctggcagatgaggctagaaattccccactggcgacagtgttctagcctgcgtggctgcctgcacaccctttttgggtgtgaagccaagtaatggacagggtgtgaagagccccgtgtgctcgctttgagtcctccggcccctgaatgtggctaaccttaaccccgcagctagagcacacaacccagtgtgtatctagtcgtaatgagcaattgcgggatgggaccaactactttgggtgtccgtgtttcttgtttttcttttatatttgcttatggtgacaatatatagtgatatatattggcatc

SEQ ID NO: 688 - DNA, 613 bp, Rhinovirus A
ttcaaactgggttgtggttgatcccaccacaactgctcactgagcgtagtgctctcatattccggtatgcttgcacgccagttttactcccctcccctcattgtaacttagaagcaaagcacacctgatcaataggagataacttgccaggttatctaagatcaagcacttctgtttccccggcaagtgtgaatatgctttacccaaggcaaaagctgatcttgtcgttatccgcaaggtgcctacgagaagcctagtaatgctcaagatgtggtttgactggtcgctccgctgttccccacagtagacctggcagatgaggctggacattccccaccagcgatggtggtccagcctgcgtggctgcctgcacaccctatgggtgtgaagccaaatttactgacagggtgtgaagagcctattgtgctcaccttgattcctccggcccctgaatgtggctaatcctaaccccgctgctattgcacacgaaccagtgtgtagatagtcgtaatgagcaatagtgggatggaaccaactactttgggtgtccgtgtttcttgtttttctttatttgtcttatggtcacaatatatatataacgtatattgtgatc

SEQ ID NO: 689 - DNA, 613 bp, Unknown
  Description of Unknown: unclassified Enterovirus sequence
tgtggttgtacccaccaccgggcatactgtgcgtggtacactgtgattccggtcaccttgtacgcctgtttgctaccctaccccaactttctttcgttctttacttccagtaacttagaagttgacacagagtccaataggatgcagctaatccaagtctgccacggacaagcacttctgtttccccgggtgtgtgaatagactccaacagggttgaagctgtagcactcgttatccgcataactaccacgcgaatgttagtaacaccctctaggtatagtgggatttcgctccgcagaaaccccatctgtagattagggcaatgaggctacacggaccccactggcgacagtggtgtagcctgcgtggtgccctacctggggtttcataccccaggattccactttactgacagggtgtgaaggcgctagtgtgctagttgtgagtcctccggtccctgaatgtggctaatcctaaccccgtggccatttcatgtaaaccaacatgcaggtggtcgtaacgagtaatcacgggatggaaccaactactttgggtaaccgtgtttcctgttttactttaatgtgtgtcttatggttacaactatagagtaacc

SEQ ID NO: 690 - DNA, 614 bp, Rhinovirus A
ttcaaactggatctgggttgttcccacccagatcacccaagtggtgtagtactctgtcattccggtgactttgtacgccagtttttacaccccccccttcttgtaacttagaagaattaagttcagaccaataggaaaacgacaaaccagtcgtttaaggtcaagcacttctgtttccccggtcaatgctgatatgcttcaccaaggcaaaaacagcagcgatcgttacccgcaagacgcctacgcaaagcctagtaatgcctttgaagatatttgtctggtcactcaggtacaatcccagtactagacctggcagatgaggctggaaaatccccactggcgacagtgttccagcctgcgtggctgcctgcacacccatacgggtgtgaagccaaatattggacaaggtgtgaagagccccgtgtgctcgtcttgagtcctccggcccctgaatgcggctaaccttaaccccacagccattgcttgcattccagcaagtctatggtcgtaatgagcaattgtgggatgggaccgactactttgggtgtccgtgtttcactttttaccttttattatgcttatggtgacaatatatagcgttatatattggcatc

SEQ ID NO: 691 - DNA, 614 bp, Rhinovirus A
cacttgggtgatctgggtgggaacaacccagatcccccaagtggtgtagtgctctgttattccggtaaccttgcacgccagttttatcacccctttccccatgtaacttagaagttttaaacacagaccaatagggagcgacaaaccagtcgtgaaaggtcaagcacttctgtttccccggtcaacgttgatatgctctcccagggcaaaaacaacagcgatcgttacccgcaagatgcctacgcaaagcttagtaacgccctcgaagatactcggttggtcgttcatgtgcaaccccagcattagacctggcagatgaggctagaaattccccactggcgacagtgttctagcctgcgtggctgcctgcacaccctgacgggtgtgaagcctagtattggacaaggtgtgaagagccccgtgtgctcatcttgagtcctccggcccctgaatgcggctaaccttaaacctgcagccattgctcacaatccagtgagtttgtggtcgtaatgagcaattgcgggatgggaccgactactttgggtgtccgtgtttctctttttaccttacattttagcttatggtgacaatatatagtgatatatattggcatc

SEQ ID NO: 692 - DNA, 614 bp, Unknown
  Description of Unknown: unclassified Enterovirus sequence
ttaaaactgaaccatggttgttcccaccatggttacccacgtggtgcagtggacttgtattacggtacatttccataccagttttataacccctaccctgaaacttttagaagcatgtacacatacagaccaacaggtggcaatcagccagattgctaacggtcaagcacttctgtttccccggtaatcttgcatacgcttcacccgaggcgaaaagtgagattatcgttatccgcaaagtgcctacgagaagcccagtagcacattgaaagcctatggttggtcgctcagctgttcacccaacagtagacctggcagatgaggctagatattccccaccagcgatggtgatctagcctgcgtggctgcctgcacaccctatcgggtgtgaagccagaaagtggacaaggtgtgaagagcctattgtgctcactttgagtcctccggcccctgaatgtggctaatcctaaccccgtagctgttgcatgtaacccaacatgtctgcagtcgtaatgggcaactacgggatggaaccaactactttgggtgtccgtgtttcttgtttttctttatatttgcttatggtgacaattgtagatactacacttgttacc

SEQ ID NO: 693 - DNA, 615 bp, Enterovirus A
cgaccaatagtgggcgtgacgcaccagtcacgtcttggtcaagcacttctgtttccccggaccgagtatcaatagactgcttacgcggttgaaggagaaaacgttcgttacccggctaactacttcgagaaacctagtagcaccatgaaagttgcagagtgtttcgctcagcacttcccccgtgtagatcaggtcgatgagccactgtgaaccccacgggcgaccgtgacagtggctgcgttggcggcctgcccatggggcaacccgtgggacgctctaatacagacatggtgtgaagagtctattgagctagttagtaatcctccggcccctgaatgcggctaatcctaactgcggagcacgcaccctcaatccagggggcagtgtgtcgtaacgggtaactctgcagcggaaccgactactttgggtgtccgtgtttccttttattccttactggctgcttatggtgacaatcaaagagttgttaccatatagctattggattggccatccggtgtctaacagagctattgtctacctgttcattggatacgtccctctcaattacaagactctccaaactcttaactacatactgctacttaatcataagaa

SEQ ID NO: 694 - DNA, 615 bp, Rhinovirus A
ttaaaactgggtttgggttgatcccacccaaaccacccacgtggtgtagtacactgttatctcggtaactttgtacgccagttttatctccccctcccccctttgtaacttagaagtcatgcacaatgaccaatagcaggcaatcatccagattgtcatcggtcaagtacttctgtttccccggttcagattgatatgctccaacagggcaaaaacaacctggatcgttatccgcaagatgcctacgcagaacctagtatcacactggaagattctcggttggtcgctcagttacaaccccagtaacagacctggcagatgaggctagaaattccccactggcgacagtgttctagcctgcgtggctgcctgcacacccgtttgggtgtgaagcctagaattggacagggtgcgaagagtcgagtgtgctcatcttgagtcctccggcccctgaatgcggctaaccctaaccctgcagccattgcccacaaaccagtgggtctatggttgtaatgagcaattgcgggatgggaccgactactttgggtgtccgtgtttcactttttacttattatttgcttatggtgacaatatatagatacatatattgacacc

SEQ ID NO: 695 - DNA, 615 bp, Rhinovirus A
ttaaaactgggtttgggttgttcccacccaaaccacccacgcggtgttgtacactgttattccggtaaccttgtacgccagttttatatcccttcccccccttgtaacttagaagacatgcgaatcgaccaatagcaggcaatcaaccagattgtcaccggtcaagcacttctgtttccccggctctcgttgatatgctccaacagggcaaaaacaattggagtcgttacccgcaagatgcctacgcaaaacctagtagcatcttcgaagatttttggttggtcgctcagttgctaccccagcaatagacctggcagatgaggctagaaataccccactggtgacagtgttctagcctgcgtggctgcctgcacacccacacgggtgtgaagccaaagattggacaaggtgtgaagagtcacgtgtgctcatcttgagtcctccggcccctgaatgcggctaaccttaaccccgtagccattgctcgcaatccagcgagtatatggtcgtaatgagtaattacgggatgggaccgactactttgggtgtccgtgtttcactttttacttatcaatttgcttatggtgacaatatatatagatatatattgacacc

SEQ ID NO: 696 - DNA, 615 bp, Rhinovirus A
ttaaaactgggttcaggttgatcccacctgaacctcccaagcggagtagtactctgttatttcggtaactttgtacgccagttttatatccccctccccatgtaacttagaagatgagctcacagaccaatagccggcaatcatccagattgtcaatggtcaagcacttctgtttccccggtcaacgttgatatgctccaacagggcaaaaacaactgagatcgttatccgcaaagtgcctacgcaaagcctagtaatgctttcgaagtcatttggttggtcgctccgctgtaacccacagtagacctggcagatgaggctagaaactccccactggcgacagtgttctagcctgcgtggctgcctgcacaccctttgggtgtgaagccaaattacggacaaggtgtgaagagccccgtgtgctcactttgagtcctccggcccctgaatgtggctaaccttaaccctgcagctagagtgcacaatccagtgtatttctagtcgtaatgagcaattgcgggatgggaccaactactttgggtgtccgtgtttcactttctttttttatcttttatttgcttatggtgacaatatattgaattatatattgacacc

SEQ ID NO: 697 - DNA, 615 bp, Rhinovirus A
ttcaaactggatctgggttgttcccacccagatcacccaagaggtgtagtgctctgtcattccggtgaccttgcacgccagttttatcaccccttccctcttgtaacttagaagaattaaactcagaccaataggaagcgacaagccagtcgtgacaggtcaagcacttctgtttccccggtcaaagttgatatgcttcaccaaggcaaaaacaacagcgatcgttatccgcaagatgcctacgcaaagcctagtagtgcctttgaaaatatttgtctggttgctcaagtacaaccccagtactaaacctggcagatgaggctggagcttccccactggtaacagtgttccagcctgcgtggctgcctgcacacccttacgggtgtgaagccaaatattggacaaggtgtgaagagccccgtgtgctcatcttgagtcctccggcccctgaatgcggctaaccttaaccccacagccattgctcacaatccagtgagtgtatggtcgtaacgagcaattgtgggatgggaccgactactttgggtgtccgtgtttctcttttttcctttttaattctgcttatggtgacaatatatagtgttatatattggcatc

SEQ ID NO: 698 - DNA, 615 bp, Rhinovirus A
ttaaaactggatcatggttgttcccaccatgattacctacgggtgtagtatacttgtatcccggtacatttatacgccagttttataacccccaccccaaatgtaacttagaagcatgtacacaatgatcaatagggtggtggctatccaagtcatctaagatcaagcacttctgtctccccggtgagtgtgaatatgctttacccaaggcaaaagctaatctcatcgttatccgcaaggtgcctacgggaagcctagtaacattctgaagatattttggttggtcgatcagttgcactcacccatgcaatagacctggcagatggggctaggcatacctcactggtaacagtggcctagcccgcgtggctgcctgcacaccttcgggtgtgaagccataatattgacagggtgcgaagagcctactgtgctcaccttgagtcctccggcccctgaatgtggctaatcctaaccccgtatccattgcacacaaaccagtgtgtctatggtcgtaatgggtaactacgggatggaaccaactactttgggtgtccgtgtttcttgtttttctttaatactgcttatggtgacattatatattgatatagtgtcatc

SEQ ID NO: 699 - DNA, 615 bp, Unknown
  Description of Unknown: unclassified Enterovirus sequence
ttaaaactgggcaggagttgttcccactcttgccacccacagggtgtggtgctcttgtattacggtacacttgcatgccagttttatctcccccctccccacaatgtaatttagaagccaatcacatgaccaataggaagtggtaagccataccacttaaggtcaagcacttctgtttccccggtatgcgtggaataggcctcttaaggggctgaagccacaattatcgttacccgcatgtgaactacgcgaaacctagtactaccttgaaagtacattgtctggtcgctcagccaatccccatggtagacctggcagatgaggcaagaggtaccccactggtaacagtgttcttgcctgcgtggctgcctgcacacccttaccgggtgtgaagccaatgtatagacagggtgagaagagtcgagtgtgcttcacatgagtcctccggcccctgaatgcggctaatccaaccccgcagctgtagtatgcaagccagcatatgtgcagtcgtaatgggtaactgcgggacggaaccgactactttgggtgtccgtgtttcctgtttttcctttattcatgcttatggtgacaatattgagaattaatattgtcact

SEQ ID NO: 700 - DNA, 615 bp, Rhinovirus A
ttaaaactggatctgggttgttcccacttggatctcccaaagggagtggtactctgttattacggtaactttgtacgccagttttatcctccccttaccccatgtaacttagaagtttttcataaagaccaatagttggtaatcatccagattacttaaggtcaagcacttctgtttccccggtcaatgttgatatgctccaacagggcaaaaacaactgcgatcgttatccgcaaagcgcctacgcaaagcttagtagcacctttgagattgtttggttggtcgttccgccatttcccctggtagacctggcagatgaggctagaagtaccccactggcgacagtgttctagcctgcgtggctgcctgcacaccctgtgggtgtgaagccaaataatggacaaggtgtgaagagccccgtgtgctcgctttgagtcctccggcccctgaatgcggctaaccttaaccctgcagctagagcatacaaaccagtgtgtatctagtcgtaatgagcaattgcgggatgggaccgactactttgggtgtccgtgtttcactttttttttacttataattgcttatggtgacaatatatatatagtatatattgacacc

SEQ ID NO: 701 - DNA, 616 bp, Rhinovirus A
ttaaaactgggtctgggttgttcccacccaaaccacccacgcggtgtagtacactgttattccggtaactttgtacgccagttttatatccccaccccccttttgtaacttagaagttatgcacactgaccaatagtgggcaatcatccagattgtcatcggtcgagcacttctgtttccccggtttgagttgatatgctccaccagggcaaaaacaactcagatcgttatccgcaagatgcctacacagaacttagtaccattctggaaaattcttggctggtcgttcaattactaccccagtaatagacctggcagatgaggctagaagttccccactggcgacagtgttctagcctgcgtggctgcctgcacacccttctggggtgtgaagcctagaattggacagggtgtgaagagtcgcgtgtgctcatcttgagtcctccggcccctgaatgcggctaaccctaaccctgcagccattgcccacaatccagtgggtttatggtcgtaatgagcaattgcgggatgggaccgactactttgggtgtccgtgtttcactttttacttattatttgcttatggtgacaatatatagatacatatattgacacc

SEQ ID NO: 702 - DNA, 616 bp, Rhinovirus A
ttaaaactgggagtgggttgttcccactcactccacccatgcggtgttgtacactgttattacggtaaccttgtacgccagttttgccacccttccccattatgtaacttagaagtttgtacaacaagaccaataggtgataattatccagattatcaaaggtcaagcacttctgtttccccggtcgatgaggatatgctttacccaaggcaaaaaccttaaagatcgttatccccacactgcctacacagagcctagtaccacttttgatgtaattaggttggtcgctccctgcaaacccagcagtagacctggcagatgaggctggacactccccactggtgacagtggtccagcctgcgtggctgcctgctcaccctattgggtgagaagcctacttattgacaagatgtgaagagccgcgtgtgctcagtgtgcttcctccggcccctgaatgtggctaaccttaaccctgcagccgctgcccataatccaatgggtttacggtcgcaacgcgcaagtgcgggatgggaccaactactttgggtgtccgtgtttcctatttttcttttatttgcattttatggtgacaatttatagtatatagattgtcgtc

SEQ ID NO: 703 - DNA, 616 bp, Rhinovirus A
ttaaaactggatctaggttgttcccacctagatctcccatgtggagtagtactctattattacggtaattttgtacgccagttttatatccccttccccttttgtaacttagaagtcgtgaacacagaccaataggtggcgatcacccagatcgcttaaggtcaagcacttctgtttccccggtcaacgttgatatgctccaccagggcaaaaacaacggagatcgttatccgcaaggtgcctacgcaaagcctagtaacctcttggaggatatatggttggtcgctcagctataccccatagtagacctggcagatgaggctagaaactccccactggcgacagtgttctagcctgcgtggctgcctgcgcactcttatgagtgcgaagccatatatttgacaaggtgtgaagagccccgtgtgctcaccttgagtcctccggcccctgaatgtggctaaccctaaccctgcagctagtgcatgaaatccatcatgttgctagtcgtaatgagcaattgcgggatgggaccaactactttgggtgtccgtgtttcactttttccttttatatttgcttatggtgacaatatatatataacatatatattggcatc

SEQ ID NO: 704 - DNA, 616 bp, Rhinovirus A
ttaaaactgggttcaggttgttcccacctgaatctcctacatggagttgtactctattatcccggtaattttgtacgccagttttatcctcccctccccatgtaacttagaagctgtacacaacgaccaacaggtaacattcatccagagtgttaaaggtcaagcacttctgtttccccggtcaaagttgatatgctccaacagggcaaaaacaactgcgatcgttatccgcagagcaactacgcaaagcttagtaccactttcaatggtgtatggctggtcgctccactataaacccaatagtagacctggcagatgaggctagaaactccccactggtaacagtgttctagcctgcgtggctgcctgcgtgcccttttgggcacgaagccttacatttgacaaggtgcgaagagccccgtgtgcttgctttgagtcctccggcccctgaatgtggctaaccttaaccctgcagctagtgtgtgcaatccagcacatggctagtcgtaatgagcaattgcgggatgggaccaactactttgggtgtccgtgtttcttgtttttcttttatatttgcttatggtgacaatatatatagaatatatatattggcatc

SEQ ID NO: 705 - DNA, 616 bp, Rhinovirus C
ttaaaactgggtacaggttgttcccacctgtaccacccaagtggtgtagtgctcttgtattccggtacatttgcacgccagtttgccacccctaccctctatgtaacttagaagcttacacaaagaccaataggcggtggtaaacccataccactaacggtcaaacacttctgtttccccggcatatgaggaataggctccaaaagggctgaagccactagtgtcgttatccgcattggtactacgcaaagcctagtatcggcctgaaaatttcttggttggtcgttcggccagttaccccactggtagacctggcagatgaggcaggacttaccccactggcgacagtggtcctgcctgcgtggctgcctgcacacccttatggggtgtgaagcctaggaacggacagggtgtgaagagccccgtgtgctaccaatgagtcctccggcccctgaatgcggctaatcttaccccgcagctgttgcacacaatccagtgtgtatgcagtcgtaatgagcaattgtgggatggaaccgactactttgggtgtccgtgtttccttgttttccttatatttgcttatggtgacaatattgatattatcagtgttgtcatc

SEQ ID NO: 706 - DNA, 617 bp, Pegivirus D
tgataccgtgtcccggtacgacctcgcgcgtccccaagctcgccctgaggggggagcgtaagggcgcgtagtggggtagccccccaaaccgagccaccctagtgagtgactttagaatggttagggagactaccgccttcgctgtttggggacctaatgatccgcgtgccagggttcttcgggtaaatcccggcgcggtgttttgggttcagggcagtaggggcagacgggccagcagtcgctggttcctggtaccaccaccctatccggacgacctccctcacgaaaggtcgccacggtctgtggctcgacgacgcctataattcagtccgaggggcgcagccctcgttaaacttaggcaaggttcctcgccattgatttggccaggggtttaagtgaacgccgcccttttaatgtttaatagggttctttcccggcgggttgacaaacacttccctgggctcttcgttggcctcggttccttgatgcttcggcacccatgagcgcacaggggggggaccctgcgacagtccgccaagaggaaaatccttcgggtgacctcgtgcgcaacccaatcccttcttcttccacatggcgtgtctgtggtgcatgctgtg

SEQ ID NO: 707 - DNA, 617 bp, Rhinovirus A
ttaaaactgggtctgggttgtccccacctagatcacccaagtggtgtagtacactgttatttcggtaaccttgtacgccagttttataaccccctccccaaatgtaacttagaagctgtacacaacgaccaatagagggtaatcatccagattacttacggtcaagcacttctgtctccccggtttactttgatatgctccaacagggcaaaaacaaagtgaatcgttacccgcaagatgcctacgcaacgcctagtaacatcctgaattgtttatggttggtcgctcaattacaaccccagtaatagacctggcagatgaggctagatattccccactggcgacagtgatctagcctgcgtggctgcctgcacaccccttgtgggtgtgaagccataatcatgacagggtgcgaagagccacgtgtgctcatcttgagtcctccggcccctgaatgcggctaaccctaaccctgcagccattgcctacaaaccagtgggtatgtggtcgtaacgagaaattgcgggatgggaccgactactttgggtgtccgtgtttcactttttaccttatatttgcttatggtgacaatatatacgagtttatatattgacacc

SEQ ID NO: 708 - DNA, 617 bp, Unknown
  Description of Unknown: unclassified Enterovirus sequence
ttaaaactgagtgtgggttgcacccacccacactgtctacggacgttgtacacttgtatcccggtacatttgtacgccagtttgcctccccttccctttatgtaacgtaagaagcctcagcacaatggccaacaggtggtaacaatccatgttacctacggtcaagcacttctgtctccccggtacgaagagtgttaagtcttacccaagaccgaagctttgagtatcgttatccgcataactactggacaaagcccagtaacaccccacgatgtaggatggttggtcgttccaccagtgtaaccccctggtagacctggcagatgaggctagagtttccccactggtgacagtgttctagcctgcgtggctgcctgctcccttatgggagaagccattctattgacaaggtgtgaagagccccgtgcgctagttatgagtcctccggcccctgaatgcggctaatccaaccctgcagccattgcatggaaaccaccatgtagatggtcgtaatgagcaattgcgggacggaaccgactactttgggtgtccgtgtttcttgtttttcttatcaattgcttatggtgacaatatatacagctaatatattgttcacc

SEQ ID NO: 709 - DNA, 617 bp, Rhinovirus A
ttaaaactggatctgggttgttcccacccagatcacctacatggtgttgtacactattattacggtaattttgtacgccagttttatatccccttccccaaatgtaacttagaagcaatgcaaactgatcaatagggggcaatcatccagattgctaatgatcaagcacttctgtttccccggtcaaggttgatatgctccacaagggcaaaaacaaccgagatcgttatccacaagatgcctacgcaaagcctagtaatgcttttgaagatacttggttggtcgctcagctgtgcacccgacagtagacctggcagatgaggctagaagtacccctctggcgacagagttctagcctgcgtggctgcctgcacacccttttgggtgtgaagccaagtattggacaaggtgtgaagagccccgtgtgctcatcttgaatcctccggcccctgaatgtggctaaccttaaacctgcagccagtgcacacaaaccagtgtgtagctggtcgtaatgagcaattgcgggatgggaccaactactttgggtgtccgtgtttcactttttacctttatattgcttatggtgacaatatatatagcacatatatattgttatc

SEQ ID NO: 710 - DNA, 617 bp, Unknown
  Description of Unknown: unclassified Enterovirus sequence
ttaaaactgaatcatggttgttcccaccatgattgtctactggacgttgtactcttgtattccggtacacttgtacgccagttttataaccccttcccctttgcaacttagaagaaagtaaacactggccaataggaaatagcaaaccacgctatttacggtcaagcacttctgtttccccggtctgacgggatatgcttcacccgaggcagaaactcagatgatcgttatccgcaaagtgcctacgggaagcctagtagcactttggaagttgttgggctggtcgctcaattgctgaccccgagcaatagacttggcagatgaggctggacgtgccccaccagtgatggtggtccagcctgcgtggctgcctactcaccctaacagggtgagaagcctatcaatagacaaggtgtgaagagcctactgtgctcactttgattcctccggcccctgaatgtggctaatcctaaccccgtatctatcgcatgcacaccagcatgtaggtagtcgtaatgggcaactacgggacggaaccaactactttgggtgtccgtgtttccttgttcttttattacttgcgtatggtgacaattgtatgaaatacgattgacacc

SEQ ID NO: 711 - DNA, 618 bp, Rhinovirus A
ttaaaactgggagtgggttgttcccactcactccacccatgcggtgttgtactctgttattacggtaactttgtacgccagtttttcccacccttccccataatgtaacttagaagtttgtacaatatgaccaataggtgacaatcatccagactgtcaaaggtcaagcacttctgtttccccggtcaatgaggatatgctttacccaaggcaaaaaccttagagatcgttatccccacactgcctacacagagcccagtaccatttttgatataattgggttggtcgctccctgcaaacccagcagtagacctggcagatgaggctggacattccccactggcgacagtggtccagcctgcgtggctgcctgctcacccttcttgggtgagaagcctaattattgacaaggtgtgaagagccgcgtgtgctcagtgtgcttcctccggcccctgaatgtggctaaccttaaccctgcagccgttgcccataatccaatgggtttgcggtcgtaatgcgtaagtgcgggatgggaccaactactttgggtgtccgtgtttcctgtttttcttttgattgcattttatggtgacaatttatagtgtatagattgtcatc

SEQ ID NO: 712 - DNA, 618 bp, Rhinovirus A
ttaaaactgggagtgggtgttcccactcactccacccacgtggtgctgtacactgttattccggtaactttgtacgccagtttttccctcccttccctcattatgtaacttagaagcatgaacatatggaccaataggcaataatcatccagattattgaaggtcaagcacttctgtttccccggtcaataaagatatgctttacccaaggcaaaaacttttgagatcgttacccgcacatcaactacgcaaagcctagtatcacctttgatgtactaagactggtcgtttcctgcaaccccagcagtagacctggcagatgaggctggacgtaccccactggcgacagtggtccagcctgcgtggctgcctgctcgcccatatgggcgagaagccttattattgacaaggtgtgaagagccgcgtgtgcttggtgtgagtcctccggcccctgaatgtggctaaccttaaccctgcagccattgctcataatccaatgagttagtggtcgtaatgcgcaagtgcgggatgggaccaactactttgggtgtccgtgtttcttattttttctttcatgtgtgttatatggtgacaatttatagtatataagttgtcatc

SEQ ID NO: 713 - DNA, 618 bp, Rhinovirus A
ttaaaactgggtccaggttgttcccacctggacctcctaagtggagtggtacactattattccggtaattttgtacgccagttttatctccccaccccccttttgtaatttagaagttatgaacacagaccaataggtggcaactagccaagttgttaaaggtcaagcacttctgtctccccggctgacgttgatatgctccaacagggcaaaaacaatgaaagtcgttatccgcaaagtgcctacgcaaagcctagtaacactttgaaatgtctatggttggtcgctcagctattccccatagtagacctggcagatgaggctagaaataccccactggtaacagtgttctagcctgcgtggctgcctgcgcaccctccccgggtgcgaagccatatatatgacaaggtgcgaagagccccgtgtgctcactttgaatcctccggctcctgaatgtggctaaccttaaccccgcagccagtgcacataagccaatgtgtggctggtcgtaatgagcaattgtgggatgggaccaactactttggatgtccgtgtttcctgtttttcttttattcttgcttatggtgacaatatatatagtttatatatattggcatc

SEQ ID NO: 714 - DNA, 618 bp, Rhinovirus C
ttaaaactggatacaggttgttcccacctgtatcacccaagtggtgtggtgctcttgtatttcggtacgtttgcacgccagtttgctaccccttcccttttacgtaacttagaagtttacacaaagaccaataggcggtggtaaatccataccactaacggtcaaatacttctgtttccccggcatgcgaggaataggctccaaaagggctgaagccactagtgtcgttatccgcattggtactacgcaaagcctagtattaccttgaaaatttcttggctggtcgctccaccagataccccactggtagacctggcagatgaggcaggacttaccccactggcgacagtggtcctgcctgcgtggctgcctgcacaccccttacggggtgtgaagcccagaaacagacaaggtgtgaagagccccgtgtgctactagtgagtcctccggcccctgaatgcggctaatcttaccccacagctgttgcacgcaaaccagcgtgtatgcagtcgtaatgagcaattgtgggatggaaccgactactttgggtgtccgtgtttctttttattcctattatttgcttatggtgacaatattgatattatcagtgttgtcatc

SEQ ID NO: 715 - DNA, 619 bp, Shanbavirus A
tttcaaaaggccctgggcatacggcgttattcgtaacgtcgtatgtccagggcggtagcatcaggccaaggcctgatgctaccacgtgtggactaaaccacacactcttcttgtgacacgttgtgtcacctatccctttcttggtaacttagaagcttgtacacttacgcacgtaggtgccccacatccagtggggtttgtgcaaagcaatcttgttccccggtaaaccctgataggctgtaaccacggccgaaacaaggtttgtcgttacccgactcactactacacaaagcctagtaaagttcaatgaaagtgcgcagcgtgatccggtcaaaacccccttgaccagaaacacatgatgagggtcaccaacccccactggcgacagtgtggtgtccctgcgttggcatgtggcctcgtagaggcgttgcaatctggatttgctccgaagagccccgtgtgctagtgtttatacctccggccccttgaatgcggctaatcctaacccccgagcatgtacacacaagccagtgtgtagcatgtcgtaatgagcaatttggggatggaaccgactactttagggtgtccgtgtttctcattattctttgtttgatgtttt

SEQ ID NO: 716 - DNA, 619 bp, Enterovirus B
cacacggtcaatagataactcagcaaaccagctgggtcttgaccaagcacttctgttaccccggactgagtatcaataagctgctcgcgcggctgagggagaaaacgtccgttacccggccaattacttcgagaaacccagtatcaccatgaaggttgcgcagcgtttcgttccgcacaaccctagtgtagatcaggtcgatgagccaccgcgttccccacgggcgaccgtggcggtggctgcgctggcggcctgcccatggggtgacccatgggacgcttcaacactgacatggtgcgaagagtctattgagctaattggtaatcctccggcccctgaatgcggctaatcctaactgcggagcagatacccacacaccagtgggcagtctgtcgtaatgggcaactctgcagcggaaccgactactttgggtgtccgtgtttcctcttattcttgattggctgcttatggtgacaattgggagattgttaccatatagctattggattggccatccagtgacaaacagagcaattatctactcgttcattggttttgtgccactgaattataaggttttaatcaccctcaaattcatattagcactcaacacatcaaa

SEQ ID NO: 717 - DNA, 619 bp, Rhinovirus A
ttaaaactggatctaggttgttcccacctagatctcctacacggagttgtactctgttattccggtaactttgtacgccagttttatacccccttccccctttgtaacttagaagctgaacatactgaccaataggcggcattcaaccagaatgtcaaaggtcaagcacttctgtttccccggttaaagctgatatgctccaacagggcaaaaacagccttaatcgttatccgcaagacaactacgcaaagcctagtatcatctttgaaagtatgtggttggtcgctccgctataaactcaatagcagacctggcagatgaggctagaaactccccactggcgacagtgttctagcctgcgcggctgcctgcgtgccctatacgggtacgaagccatatatttgacaaggtgtgaagagccccgtgtgcttgtcttgagtcctccggcccctgaatgtggctaaccttaaccctgcagctggtatgcacaatccagtacatggccagtcgtaatgagcaattgcgggatgggaccaactactttgggtgtccgtgtttcctattttacctttatatttgcttatggtgacaatatatatataacatatatattggcatc

SEQ ID NO: 718 - DNA, 619 bp, Rhinovirus A
ttaaaactgggtctgggttgtccccacccagaccacccacgtggtgttgtacactgttattccggtaactttgtacgccagttttgaactccccttaccccttttgtaacttagaagttaaacaaaccgaccgatagcaggcaatcacccagattgcttatggtcaagcacttctgtctccccggtctcctttgatatgctccaccagggcaaaaacagagtagatcgttatccgcaagatgcctacgcaacgcctagtagcattttgaagtaattttggctggtcgctcatttacaaccccagtaatagacctggcagatgaggctagatactccccactggtgacagtgatctagcctgcgtggctgcctgcacaccctttccgggtgtgaagccaaacttatgacaaggtgtgaagagccacgtgtgctcatcttgagtcctccggcccctgaatgcggctaaccttaaccctgcagccattgcctacaagccagtgggtatgtggtcgtaatgagaaattgcgggatgggaccgactactttgggtgtccgtgtttcactttttaccttatatttgcttatggtgacaatatatatatagatatatattgacacc

SEQ ID NO: 719 - DNA, 619 bp, Rhinovirus C
ttaaaactgagtatgggttgttcccacccatactgcctacgggcgtagtactcttgtgctccggtacatttgtacgccagtttttcacccccaccccctaggtaactcttagaagcacttgcacacagacgaataggcagccaacactccacgttggtcaacgtcaagcacttctgtttccccggtattaggggttaggcttttcaagaggctgaagcctgaagtatcgttacccgcgcaattactaagcagagcctagtatcacttcgacccttccactggctggtcgttcaatgagaaaacccactcatagacctggcagatggggctggaaataccccactggcgacagtgttccagcccgcgtggctgcctgtcccccattttgggggaaagccaatgtaaggacaaggtgtgaagagccgcgtttgctaattgtgagtcctccggcccctgaatgcggctaatcttaccccacagctattgcatggaagccaccatgtggatagtcgtaacgggcaactgtgggacggaaccgactactttgggtgtccgtgtttccttttattccatttattatctcatggtgacaacgtatacagattatatgttgtttacc

SEQ ID NO: 720 - DNA, 620 bp, Rhinovirus B
ttaaaacagcggatgggtatcccaccatccgacccactgggtgtagtactctggtactttgtacctttgtacgcctgtttctccctcccttcccaacctaaacaatccttgtaacttagaaggtttcgattatcgcacaatagggactattgcaaccagcaatagtcagtgcaagcacttctgtttccccggagcggagtgtagatggccaccgctgtcaaaagctcttaaccgttatccgccagttaactacgcaacggctagtagtgccttgttgcttttatggcgttcgatcaggcgagatttaccccctcgctagtctggtcgatgaggctgagaattccccacgggcgaccgtgtctcagcctgcgtggcggccagcccagcctttgctgggacgccttgattgcgacatggtgtgaagacccgcgtgtgcttaactgtgagtcctccggcccctgaatgcggctaacctaaaccctggagccttgaaacacaacccagtgttcgcaaggtcgtaacgagcaattccgggacgggaccgactactttgggtgtccgtgtttcctttattctttcaattgttcttatggtcacaatataagtgttatattgtgatc

SEQ ID NO: 721 - DNA, 620 bp, Rhinovirus A
ttaaaactgggagtgagttgtccccactcactctacccacgcggtgttgtacactgttattacggtaactttgtatgccagtttttgttcccctatccccctttaaagtaacttagaagcatgaacttacagaccaaaaggtgatgatcacccagatcattaaaggtcaagcacttctgtttccccggtcaatgttgatatgcttcaacaaggcaaaaacaacagcgatcgttatccgcaagatgcctacacaaagcttagtacctcctttgatggtatttgtctggtcgctcaggtgtttccccaacactagacctggcagatgaggctagaaactccccactggcgacagtgttctagcctgcgtggctgcctgcacaccctttcgggtgtgaagccaaatactggacaaggtgcgaagagccccgtgtgctcatcttgagtcctccggcccctgaatgcggctaaccttaaacccgcagccattactcacaatccagtgagcagatggtcgtaatgagcaattgtgggatgggaccgactactttgggtgtccgtgtttcatgttttactttatgacttgcttatggtgacaatatatagagatatatattggcatc

SEQ ID NO: 722 - DNA, 620 bp, Unknown
  Description of Unknown: unclassified Enterovirus sequence
ttaaaactgagtgtgggttgttccccacccacactgtctacgggacgttgtactcttgtattccggtacacttgtacgcccagtttgccaccctaaacaccccgtaacaatagaagtctacgcacacttagaccaatagggggtgttcatccagttcacccaaggtcaagcacttctgtttccccggcataggggtgttaggcttcgcccgaggccaaagctctgattgtcgttatccgcacaactactggacaaagcctagtagcaccctacgatgtagcatggttggttgttccgccagtatcccctggtaaacctggcagatggggctagaagttcctcactggcgacagtgttctagcccgcgtggctgcctgctcccttatgggagaagccattctactgacaaggtgtgaagagccccgtacgctagttgtgattcctccggcccctgaatgcggctaatccaaccctgcagccattacatggaagccaccatgtggatggtcgtaatgagtaattgcgggacggaaccgactactttgggtgtccgtgtttcttgtttttcttttactgacgtttatggtgacaatatatatataacgtatatattgttcatc

SEQ ID NO: 723 - DNA, 621 bp, Unknown
  Description of Unknown: unclassified Picornaviridae sequence
gggggctcttcaagcccccccaaccgaattttcttcaacaactactatgtaagttgcattatactctccagatcaattcgaatttgtataatgtactttagtttttgttgtcgactacagtgattataagtaagtagcaatatgtgtccagatcaattcgaatcacaatattgttcattataattgtatgtaggtctcagttgagagaaaaattttgttttgaaaacccagttttttcacaccggaggaatgaatctcaaatcttgggttttcgaggttgtcgtgcggacacttctcgagtagttgaatgatgctgatttgactgctttggaatgttgtcttttgcgatgatgtcggattcacacgggcttcacatgccgagagatggcttcgaacacgctcgtgataatgtcagtggttgcttcgagatttacaaatgtatgcgtacccggaaacagaacttggaaattgatgtcacggtgattgagttctgcacgatggcgatagtacctctttgtactgatcgttgaactggtcaaggcccctgcaggaagtacctgtttcgggctagttgactggcattgagcaccagagtcgaagtttgcccttcaaattgcaaca

SEQ ID NO: 724 - DNA, 621 bp, Rhinovirus A
ttaaaactgagtgtgggttgtccccacccacactgtctacggacgtagtactctcatatcacggtatgtttgtacgccagtttgcctcccctcccaagtgtaacttagaagtttgtactttataaaggccaataggcgggtagtcaaccacactactcatggtcaagcacttctgtttccccggtatgcgaagaataagctttaacaaaggctgaagcttcaattatcgttatccgcatgataactacgcaaagcttagtagcattttgaaagtttattggttggtcgctccactggaaaacccccccagtagacctggcagatgaggctaagtaatccccactggcgacagtgacttagcctgcgtggctgcctgcacacctggagacaggtgtgaagccaagtaatggacaaggtgtgaagagccccgtgtgcttatcatgagtcctccggcccctgaatgcggctaatccaaccccacagctattgcacataatccaatgtgtatttagtcgtaacgggcaactgtgggacggaaccgactactttgggtgtccgtgtttcctttattctcatttaagtttcctatggtgacaaatataagtgattatatctgtcatc

SEQ ID NO: 725 - DNA, 621 bp, Unknown
  Description of Unknown: unclassified Enterovirus sequence
tctgcagatatcttaaaactgggttcaggttgttcccacctgaacttcccacgtggagtagtacactattattacggtaattttgtacgccagttttgcttccctccccaatggtaacttagaagatgtacacaacgaccaacaggcggtggttacccaaaccatcaaaggtcaagcacttctgtttccccggtcaacgttgatatgctccaacagggcaaaaacaaccacgatcgttacccgcaagatgcctacgcaaagcctagtaatacactggaagatttatggctggtcgctccactataccccatagtagacctggcagatgaggctagaagtaccccactggcgacagtgttctagcctgcgtggctgcctgcgcaccctatgggtgcgaagccatatattggacagggtgtgaagagccccgtgtgctcatcttgagtcctccggcccctgaatgtggctaaccttaaccccgcagccagagcacgcaatccagtgtgtttctggtcgtaatgagtaattgtgggatgggaccaactactttgggtgtccgtgtttcacttttttcctttattatgcttatggtgacaatatatacacatatatattgacacc

SEQ ID NO: 726 - DNA, 621 bp, Rhinovirus A
ttaaaactgggagtgagttgtccccactcactctacccacgcggtgttgtacactgttattacggtaactttgtatgccagtttttgttcccctatccccctttaaagtaacttagaagcatgaacttacagaccaaaaggtgatgatcacccagatcattaaaggtcaagcacttctgtttccccggtcaatgaggatatgctttacccaaggcaaaaaccttaaagatcgttatccgcacattaactacgcaaagcctagtatcgcctttgatgtattaagactggtcgttccctgcatacccagcagtagacctggcagatgaagctggacgttccccactggcgacagtggtccagcctgcgtggctgcctgctcacccatttgggtgagaagccttattattgacaaggtgtgaagagccccgtgtgcttaatgtgaatcctccggcccctgaatgtggctaaccttaaccccgcagccgttactcacaatccagtgaaatgacggtcgtaacgcgaaagtgtgggatgggaccaactactttgggtgtccgtgtttcctattttttccttaatgtgtgttatatggtgacaatttatagcgtataagttgtcatc

SEQ ID NO: 727 - DNA, 621 bp, Rhinovirus A
ttaaaactggatctaggttgttcccacctaaatctcctacatggagttgtactctattattccggtaattttgtacgccagttttatcctcccctccccttaaagtaacttagaagttggacatatcgaccaataggtaacatttatccaaaatgttaaaggtcaagcacttctgtttccccggtcaaggttgatgtgctctaacagggcaaaaacagctgcgatcgttatccgcaaagcaactacgcaaagcctagtagcattttttgagagtatgtggttggtcgctccactataaacccaatagtagacctggcagatgaggctagaaattccccactggtaacagtgttctagcctgcgtggctgcctgcgtgctccttgtgagcacgaagccatatatttgacaaggtgtgaagagccccgtgtgcttgctttgagtcctccggcccctgaatgtggctaaccttaaccctgcagctagcgtgtacaatccagtacaaagctagtcgtaatgagcaattgcgggatgggaccaactactttgggtgtccgtgtttcctgtttttcttttatatttgcttatggtgacaatatatatataacatatatattggcatc

SEQ ID NO: 728 - DNA, 622 bp, Rhinovirus B
ttaaaacagcggatgggttccctaccatccgacccactgggtgtagtactctggtactctgtacctttgtacgcctgtttatccactacccttttcctaaattttccacccgtgtaaccttagaagcaaacaaattgtacaatagggtgcatcacaaccagtgatgtacagtacaagcacttctgtttccccggagcggggtatagacggtcaccactgtcaaaagcccttaaccgttacccgccaaccaactacgtaacggctagtaacaccatgaatttgtcttgacgttcgatcaggtggtaaccccccactagtttggtcgatgaggctgagaactccccacgggtaaccgtgtctcagcctgcgtggcggccaacccagcttctgctgggacgccaattcattgacatggtgtgaagacctgcatgtgcttggttgtgattcctccggcccctgaatgcggctaaccctaaccccggagccacgcggcataatccaatgtcgtatgggtcgtaatgagtaattctgggatgggaccgactactttgggtgtccgtgtttcctgtttttccaaattattcttatggtcacagcatataaatagatatatactgtgatc

SEQ ID NO: 729 - DNA, 622 bp, Rhinovirus B
ttaaaacagcggatgggtatcccaccatccgacccactgggtgtagtactctggtactctgtacctttgtacgcctgtttctcctcaaccctcccctacccgttatatatctcagtaacttagaagatatcattaccgcacaatagggaccgttgtaaccagcaacggtcagtgcaagcacttctgtttccccggagcggagtatagacggccactgctgtcaaaagctcttaaccgttacccgccagttaactacacaacagctagtaacatcttgttgttcttagggcgttcgatcaggtgagtttaccccctcactagtctggtcgatgaggctgagaaatccccacgggtgaccgtgtctcagcctgcgtggcggccagcccagcttatgctgggacgccttaagtatgacatggtgtgaagactcgcgtgtgcttagctgtgagtcctccggcccctgaatgcggctaacctaaaccccggagccttgaggcacaatccagtgcccgcgaggtcgtaacgagaaattctgggacgggaccgactactttgggtgtccgtgtttccttttatctttttgatgttcttatggttacaatatataaagtatattgtaatc

SEQ ID NO: 730 - DNA, 622 bp, Rhinovirus A
ttaaaactgggtccaggttgttcccacctggatctcctacgtggagttgtactctattattccggtaattttgtacgccagttttatctcccctacccctctatgtaacttagaagtttatgcacagcggccaataggtgacatttatccaaaatgtcaaaggtcaagcacttctgttaccccggttagaattgatatgctccaacagggcaaaaacaattttgatcgttatccgcaaggcaactacgcaaagcctagtaccatttttgatgatgtgtggttggtcgctccactgtgaacccgacagtagacctggcagatgaggctagaaattccccactggtaacagtgttctagcctgcgtggctgcctgcgtacccttttgcgggtacgaagccatacatttgacaaggtgtgaagagccccgtgtgcttgccttgagtcctccggcccctgaatgtggctaaccttaaccctgcagctagtgtgcacaatccagtgcatggctagtcgtaacgagcaattgcgggatgggaccaactactttgggtgtccgtgtttcttgtttttcttttatatttgcttatggtgacaatatatacataatatatatattggcacc

SEQ ID NO: 731 - DNA, 622 bp, Rhinovirus A
ttcaaactgaatcatggttgttcccaccatgattacctacgggtgtagtacacttgtatcccggtacatttgtgcgccagttttatatcccctaccccaattgtaacttagaagttaagcaacacaagatcaataggcggtggttatccaaaccatcaatgatcaagtacttctgtctccccggtaggtgtgaatatgctttaaccaaggcagaagctaatcctatcgttatccgcaaggtgcctacgggaagcctattaacactttgaaagaaatttggctggtcgctcagttgcgcaatcccacgcaatagacctggcagatggggctagacaaaccccaccagcgatggtggtctagcccgcgtggctgcctgcacacccttttttgggtgtgaagccagaaattggacagggtgcgaagagcctactgtgctcaccttgagtcctccggcccctgaatgtggctaatcctaaccctgcagctgttgcacaagatccattgtgtatacagtcgtaatgagcaattgcgggatggaaccaactactttgggtgtccgtgtttccttgttttcttttatcattgcttatggtgacaagtatatatagatatatttgtcatc

SEQ ID NO: 732 - DNA, 623 bp, Avihepatovirus A
tttgaaagcgggtgcatgcatggccattttccagcacaggttcagctggtatggcatgcatgcatcgactgcttgggggtgtccctgacccccttaattcaacgtctagcccacgatacgggcaccctatccaatttgtatccctttacctcccatggactgacttgtatggacttggatctaaattggattatcctttacttgtggtggttagccaaccatgctctggtgtaatgattccatgtgttcatttggctaagtgccgaccttggaggtgggggtgaaattttgcaagccactagcgtcgtcaactttagcctctggagatgttggattagttgcattctggacagaccaagcctcgtctataccgtgggctaatggtcttcgttgtgaagcggattaccggtagtagcatcttagacttccaaggttgtcatgagtgtgtctgtagagtaggcacacatctgtccaggcacaagcacatctctcgatcgctccagactagttcctgagggacagatgttgtggggggcttgggaaaacccccttaacctacactaccggatagggtcgcggctggtcgagtcccacacactataatatcactagactttcatgca

SEQ ID NO: 733 - DNA, 623 bp, Rhinovirus B
aaaacagcggatgggtatcccaccatccgacccactgggtgtagtactctggtactttgtacctttgtacgcctgttcttcccattgtaccctcccttaacttccaacccaagcaacattagaagttatcaattttcagtacaataggaagcatcacatccagtgatgttgtgtacaagcacttctgtctccccggagcgaggtataagcagtacccactgctaaaagcctttaaccgttacccgccaatcaactacgtaacagctagtatcatcatgtttttgactggacgttcgatcaggtggttcccccccactagtttggtcgatgaggctaggaataccccacgggtaaccgtgtcctagcctgcgtggcggccaacccagcatttgctgggacgcccttttaaagacatggtgtgaagactcgcatgtgcttgattgtgattcctccggcccctgaatgcggctaaccttaaccccggagccttgtgttgcaatccagcaaaagcaaggtcgtaatgagcaattctgggacgggaccgactactttgggtgtccgtgtttctcattttacattacttttcttatggtcacagcatatataataaatatactgtgatc

SEQ ID NO: 734 - DNA, 623 bp, Rhinovirus A
ttaaaactgggtgtgggttgcacccacccacactgtctacggacgtagtgctctcatattacggtatgcttgcacgccagtttgtttcccctttccccttttgtaactatagaagattgcacttaatctcgaccaataggcagtagtgatccacactacttacggtcaagcacttctgttaccccggtatgcggagaataggctctgaaaagggctgaagcttcaattatcgtcatccgcgcaattactacgcaaagcttagtaacttcccaagaaattctttggttggccgttccgctggtaccccaccagtaggcttggcagatgaggctgagtaatccccactggcgacagtgactcagcctgcgtggctgcctacacacctggtaacaggtgtgaagccatagaaaggacagggtgtgaagagccccgtgtgctaattgtgattcctccggcccctgaatgcggctaatctaaccccacatccaatgcgcataagccaatgcgtatttggtcgtaatgggcaactgtgggacggaaccgactactttgggtgtccgtgtttctttttattccttataattagttcatggtgacaagtataagtgtttatatttgtcatc

SEQ ID NO: 735 - DNA, 624 bp, Unknown
  Description of Unknown: unclassified Picornaviridae sequence
ttttcatgttgtataattcgagttctccaattatatttaatagaagattttcatttatgatcatgcaataatataatgaattcatgtagaaaatgttatattattccttcgtcctttgtgaaccggagagttagtattggaaatgagggatttattttaaaacaaatgtcttatttcctctctttaacgttatatttattgacagtttgtgatttatatatcatggttattgagagaaaattagcttttatataaattagtgtttttatttaaaagttttaattcttggcagtgtattaatgaatttaatttggcagtataagtttattcaaaacataccttccatatgtagtagggaacttgctgtatttaatacaatactgattattaagtgtttttcttgtcgtataataattgaagtagaatcttttgttattccgactatagacttgattaataactgataatctttattttattttgtatagtattattaggttctagggaagtttccccctatgagaacctcctaaccttttggcaattaggcgaactaagaaaattgcctggacaatgggaagacccatataatattcccttttcctttataaatttaaatcaagt

SEQ ID NO: 736 - DNA, 624 bp, Unknown
  Description of Unknown: unclassified Salivirus sequence
ttcccctgcaaccattacgcttactcgcatgtgcattgagtggtgcatgtgttgaacaaacagctacactcacatgggggcgggttttcccgccctacggcttctcgcgaggcccacccctcccctttctcccataactacagtgctttggtaggtaagcatcctgatcccccgcggaagctgctcacgtggcaactgtggggacccagacaggttatcaaaggcacccggtctttccgccttcaggagtatccctgctagcgaattctagtagggctctgcttggtgccaacctcccccaaatgcgcgctgcgggagtgctcttccccaactcaccctagtatcctctcatgtgtgtgcttggtcagcatatctgagacgatgttccgctgtcccagaccagtccagtaatggacgggccagtgtgcgtagtcgtcttccggcttgtccggcgcatgtttggtgaaccggtggggtaaggttggtgtgcccaacgcccgtactcaggggatacctcaaggcacccaggaatgccagggaggtaccccgcttcacagcgggatctgaccctggggtaaatgtctgcggggggtcttcttggcccacttctcagtacttttcagg

SEQ ID NO: 737 - DNA, 624 bp, Parechovirus A
tattagagttatggcacgccatctgccaccccacacaaatgtgggttagaaaagaaaactgtccctatgcctggtctccactattcgaaggcaacttgcaattagaagagtggaattaagacgcttaaagcatagagacagttttcttttctaacccacatttgtgtggggtggcagatggcgtgccataactctaatagtgagataccatgcttgtggaccttatgctcacacagccatcctctagtaagtttgtgagacgtctggtgacgtgtgggaacttattggaaacaacgttttgctgcaaagcatcctactgccagcggaaaaacacctggtaacaggtgcctctggggccaaaagccaaggtttaacagaccctttaggattggttctaaacctgagatgttgtggaagatatttagtacctgctgatctggtagttatgcaaacactagttgtaaggcccacgaaggatgcccagaaggtacctgtaggtaacaagtgacactatggatctgatttggggccagatacctctatcttggtgatctggttaaaaaacgtctagtgggccaaacccgggggggacccccggtttcctcttatcctattaatgccact

SEQ ID NO: 738 - DNA, 624 bp, Rhinovirus B
ttaaaacagcggacgggtatcccaccatccggctcactgagcgtagtactctggtattgtgtacctttgtacgcctgttttccccaaatcccctaccctttatatctcctaccccgtaacgtaagaagttttcaaacagtacaataggaagcaccacatccagtggtgttatgtacaagcacttctgtttccccggagcgaggtataggtggtcaccaccgccaaaagcctttaaccgttacccgccaaccaactacgtaatggctagtaacatcattgatttagattggcgttcgatcaggtggtatccccccactagtttggtcgatgaggctaggaataccccacgggtgaccgtgtcctagcctgcgtggcggccaacccagcatacgctgggacgccagtttactgacatggtgcgaagacttgcatgtgcttggttgagagtcctccggcccctgaatgcggctaaccttaaccccggagcctcgcagcataatccaatgttgtagaggtcgtaacgagtaattctgggatgggaccgactactttgggtgtccgtgtttcctgtttttctttaaaatgtcttatggtcacagcatatatactgtatatactgtgatc

SEQ ID NO: 739 - DNA, 624 bp, Rhinovirus B
acagcggatggataccccaccatccgacccactgggtgtagtacactggtactctgtacctttgtacgcctgtttctccccttgcaccctccctcattatcctaacccttgtaacattagaagatgagcaacccgtgcaataggagataccacaaccagtggtgttaagcacaagtacttctgtttccccggagcggagtatagacggtccccactgtcaaaagctcttaaccgttatccgccaaccaactacgtgacgactagtagcatcattttgacactttgacgttcgatcaggtaggttcaccccacctactagtttggtcgatgaggctgggagtccctcacaggtaactgtgtcccagcctgcgtggcggccaacccagcaattgctgggacgccaatttgttgacatggtgtgaagatcctaatgtgcttggttgtgagtcctccggcccctgaatgcggctaaccttaaccccggagccttgtggcacaagccagtgacattaaggtcgtaaggagcaattctgggatgggaccgactactttgggtgtccgtgtttcctatttttctttaaattgtcttatggtcacagcatatattaattatatactgtgatc

SEQ ID NO: 740 - DNA, 625 bp, Unknown
  Description of Unknown: unclassified Sapelovirus sequence
ccccatttctccccttcggcttcgtgccgtcgcacccctttacccttttccttaccctcttaagaatgattgtagattgttttagaaaggaaggttagtacacctgaaagtacaacaatttgcttctctggtttggataaaaggttaaagacattagaaggttaacacaggtccttgcaaaacctgagtacaattttgttttgacgacgagactggattatgatttcacggttggtcgccgaggttaaaagactattgtgctagctagagtaagtggttggcaattgaaagctaccaaaggggtgtaggtctacgctttgcgggctgaagctaccaatggattaatagtgagtatgttgtttttcccttctagtgatgcgcgaccgcacacaaaagagctaggggcacataggggcaaaaggaaaagtattacttatcctgaatgtgcaattgagtcggtgacgagtgcgtcagatgtgaatccagcatactggcgtatggcgcatcctcttggcattaccctaatgtgtatcttggtagggggggccctatcaacttagcctagtgctgcctgacagggttgcggctggtcatttgtgtgtggtataaccagtagtaatccctc

SEQ ID NO: 741 - DNA, 625 bp, Rhinovirus B
ttaaaacagcggatgggtttcccaccatccgacccactgggtgtagtgctctggtattttgtacctttgcacgcctgtttcccatttgtacccttccttaatctccttcccccgtaacgttagaagttttggaattttaaagtacaataggaagcgccacatccagtggtgttgcgtacaaatacttctgtttacccggagcgaggtataggttgtacccacggccaaaagcctttaaccgttatccgccaatcaactacgtaacggctagtatcatcttgcttttgatttggtgttcgatcaggtggtatcccccactagtctggtcgatgaggctaggaattccccacgggcgaccgtgtcctagcctgcgtggcggccagcccagcttttgctgggacgccttttcaaagacatggtgtgaagacctgcatgtgcttggttgtgagtcctccggcccctgaatgcggctaaccttaaccctggagcccagcagcataatccaatgttgtttgggtcgtaatgagcaattccgggacgggaccgactactttgggtgtccgtgtttccttttattcttacattgtcttatggtcacagcatatatattatatatactgtgatc

SEQ ID NO: 742 - DNA, 625 bp, Rhinovirus B
ttaaaacagcgggtgggtatcccaccacccgacccactgggtgtagtacactggtattttgtacctttgtatgcctgtttgccatccctccctctcctcttacccttacccttattttgcggtaactttagaagtttgtaaatcacgcgcaatagggtataccacatccagtggtatgaagcacaagcaattcttgttccccggagctggatataaactgctaacgtggttgaaagtccttaaccgttatccgccagttaactgcgagaagactagtaactccatgtttgtttttaagcgttcgatcaggtggataccccattcactagtttggtcgatgaggctgggaatcccccacaggtaactgtgtctcagcctgcgtggcggccaacccagcttttgctgggacgcttactgacagacatggtgtgaagatcctattgcgcttaactgtgagtcctccggcccctgaatgcggctaacctcaaccccggagccttgtggtgtaaaccaacactcgcaaggtcgtaacgagtaattctgggacgggaccgactactttgggtgtccgtgtttcctttatttcttattgattgtctcctatggttacaaatttactgtaatc

SEQ ID NO: 743 - DNA, 625 bp, Rhinovirus B
ttaaaacagcggatgggtttcccaccatccgacccactgggtgtagtgctctggtattttgtacctttgcacgcctgtttcccctttgtacccatcctgaatttcctccctctgcaacgttagaagtttgtgaaattaaaagtacaataggaagcatcacatccagtggtgttcagtacaagcactcctgtttccccggagcgaggtataggttgtacccacgaccgaaagcctttaaccgttatccgccaatcaactacataacggctagtatcatcatgtttttgatctggcgttcgatcaggtggtttcccccactagtctggtcgatgaggctaggatttccccacgggcgaccgtgtcctagcctgcgtggcggccagcccagcttatgctgggacgcctttttaaagacatggtgtgaagacctgcatgtgcttgattgtgagtcctccggcccctgaatgcggctaaccttaaccctggagcccgacagcataatccaatgttgtttgggtcgtaatgagcaattccgggatgggaccgactactttgggtgtccgtgtttctttttattcttatattgtcttatggtcacagcatatatagtatatatactgtgatc

SEQ ID NO: 744 - DNA, 625 bp, Rhinovirus A
ttaaaactgagtgtgggttgttcccacccacactgtctacggacgtagtgctctcatattccggtatgtttgcacgccagtttgcctctccttttcccacgtaacgttagaagcttatgcactaaatcgaccactaggtgagtgataaaccatatcattctttggtcaagcacttctgtttccccggtatgcagggaataggccctccccagggctgaagccttaattatcgttatccgcacatttactacgcaaagcctattagcgttctggaagttcactggctggtcgttccgctagactaacccgtctagtagacctggcagatgaggctggataaaccccactggcgacagtgatccagcctgcgtggctgcctgcacacctggaaacaggtgtgaagcccatgaatggacagggtgtgaagagccccgtgtgctaagtgtgagtcctccggcccctgaatgcggctaatctaaccccacagctaatacacacaaaccagtgtggatttagtcgtaatgggtaactgtgggacggaaccgactactttgggtgtccgtgtttccttttattccttttatattgcttatggtgacaggtatatagatatatatttgttacc

SEQ ID NO: 745 - DNA, 625 bp, Rhinovirus A
ttaaaactggatctgggttgttcccacccagatcacctacatggtgttgtacactattattacggtaatcttgtacgccagttttatactccctttcccaaatgtaacttagaagcaaagcaaactgatcaataggggacaatcatccagattgtcaaagatcaagcacttctgtttccccggtcaaagttgatatgctccacaagggcaaaaacaactgagatcgttatccgcaagatgcctacgcaaagcctagtaatacattgaaagatacttggttggtcgctcagctgttaacccaacagtagacctggtagatgaggctagagattcccctccggcgacggagttctagcctgcgtggctgcctgcacacccactgggtgtgaagccaagtattggacaaggtgtgaagagccgcgtgtgctcatcttgagtcctccggcccctgaatgtggctaaccttaaacctgcagccagtgcacacaatccagtgtgtagctggtcgtaatgagcaattgcgggatgggaccaactactttgggtgtccgtgtccgtgtttcactttttttccttttattattgcttatggtgacaatatatatagcatatatatattgttatc

SEQ ID NO: 746 - DNA, 625 bp, Unknown
  Description of Unknown: unclassified Enterovirus sequence
ttaaaactgggtaggggttgttcccacccctaccacccacgtggtgtagtgctcctgtattacggtacacttgcacgccagtttgcctccctacccccttcccattcacacccaaccctgcgtaacttagaagctatgcacaagaccaataggtggtaacaatccatgttactaaaggtcaagtacttctgtttccccggcatgcgtggaataaacagtgcaaacggttgaggccacaaatgtcgttacccgcgcatgaactacgcagagcctagtatccccctgaaagtccattggttggtcgctcagctaatccccatagtagacctggcagatgaggcaagacgcaccccactggcgacagtggtcttgcctgcgtggctgcctgcacacccttcggggtgtgaagccaattgatagacagggtgtgaagagccgagtgtgcttcatgtgagtcctccggcccctgaatgcggctaatccaaccccgcagctgtggcacacaatccagtgtgtatgcagtcgtaacgggcaactgcgggacggaaccgactactttgggtgtccgtgtttccttttattctttaatcaagtacttatggtgacaataataaatattgttacc

SEQ ID NO: 747 - DNA, 626 bp, Rhinovirus B
ttaaaacagcggatgggtatcccaccatccgacccactgggtgtagtactctggtattttgtacctttgtacgcctgtttcttccctttgtacccgccccttaaacttccaccccacgtaacgttagaagtttatacaagcagtacaataggttgcaccataaccagtggtgtttcgtacaagcacttctgtttccccggagcggggtatagacggtacccactgtcaaaagcccttaaccgttatccgccaatcaactacgtaatggctagtaacaccatgaaggtaagttgacgttcgatcaggtggtaacccccactagtttggtcgatgaggctaggaattccccacgggtaaccgtgtcctagcctgcgtggcggccaacccagcatttgctgggacgccaatttactgacatggtgtgaagacttgcatgtgcttgattgtgactcctccggcccctgaatgcggctaaccttaaccccggagccttgcagcataatccaatgttgtggaggtcgtaatgagcaattctgggatgggaccgactactttgggtgtccgtgtttcctgttttctttaagttgtcttatggtcacagcatatatactatatatactgtgatc

SEQ ID NO: 748 - DNA, 626 bp, Rhinovirus B
ttaaaacagcggatgggtaccccaccatccgacccactgggtgtagtactctggtacttcgtacctttgtacgcctgttcttcccattgtacccttcctgaacttccaacccaagtaacgttagaagctcaacatttagtacaacaggaagcaccacatccagtggtgtttagtacaagcacttctgtttccccggagcgaggtataggctgtacccactgccaaaaacctttaaccgttatccgccaaccaactacgtaaaagctagtagtattatgtttttaactaggcgttcgatcaggtggatttcccctccactagtttggtcgatgaggctaggaattccccacgggtgaccgtgtcctagcctgcgtggcggccaacccagcttatgctgggacgcctttttatagacatggtgtgaagactcgcatgtgcttggttgtgattcctccggcccctgaatgcggctaaccttaaccctggagccttgtgtcacaaaccagtgatgataaggtcgtaatgagcaattccgggacgggaccgactactttgggtgtccgtgtttcttatttttcttattattgtcttatggtcacagcatatatataacatatactgtgatc

SEQ ID NO: 749 - DNA, 626 bp, Unknown
  Description of Unknown: unclassified Enterovirus sequence
aacagccgtctggttgatcccaccagcgggcacaatgtgcgttgtacactgcgatctcggtcgctttgtatgcctgtttttaccacccaccccaactttactatcttctttacttcacaagtaacatagaagcatgtacatgacgcccaataggacaacgtctcacccagagatgttaagggcaagcacttctgtttccccggatgtgtgaataggcttcacccgaggctgaaactgtagcattcgttatccgcatgactactacgcgactgctagtagcgttctgtgtgacatgtggggtttcgttcagcagagacccagtctgtagatcagggtaatgaggctacacaatccccactggtgacagtggtgtagcctgcgtggtgccctgcccgaggttcgtcctcgggaccctccatgttagacagggtgtgaagacactagtgtgctagtcatgagtcctccggcccctgaatgcggctaatcttaaacctgcagccaccacatgcacgccagcatgcaggtggtcgtaatgagcaattgcgggatggaaccgactactttgggtgtccgtgtttctctttttacatttatgtgtctcttatggttacatcattggtgtaatc

SEQ ID NO: 750 - DNA, 627 bp, Unknown
  Description of Unknown: unclassified Picornaviridae sequence
ttcaaggttcagccggccgggggttttgaggggttttggctggtccctatggaggcatagttatcgggactgtattcccgatggtttgagttagggccgacctgctcctgtattgcccacagctttgggctatcttgaggtgtttgtttgtgggaccctctcttgggtctcatttgtttttcttctgttttatgtctatcttttcccggttgtctccatacctatgctgctaccgctgcgcccggcggggttaaccctggggctagcccatggctgtggccgccaaaagtggagatgtcatgactattccatggcttgggctttgggtgtgtccagcaggtgacaggaacttagctgatcttggcaggggggtaggctacgggtgaaacccccccgtcctctcactcatattgagtgatgtcgtgtacacgtgaaccttggtggataggggtgagatcgtttggtcaaaaacccctcaacgcctggtgcgggcatgtcgtcatgtcatgcggctttgttcgtgtttcctgtctgttggcacccagtgctgaactcatggtaattggcaccctatgagtttagggctaatcaggggcatttaggtttttagcaccactgcttaatttg

SEQ ID NO: 751 - DNA, 627 bp, Rhinovirus B
ttaaaacagcggatgggtatcccaccatccggcccactgggtgtagtactctggtacattgtacctttgtacgcctgttttccccctcttgtacccgcccttcaagctccttgcccaagtaacgttagaagtttgaacattggtacaataggaagcatcacatccagtggtgtactgtacaaacacttctgttgccccggagcgaggtatagatggtccccaccgtcaaaagcctttaaccgttatccgccaatcaactacgtaatggctagtagcaccttggatttaagttggcgttcgatcaggtggtaacccccactagtttggtcgatgaggctaggaattccccacgggtgaccgtgtcctagcctgcgtggcggccaacccagcatccgctgggacgccaatttaatgacatggtgtgaagacctgcatgtgcttgattgtgagtcctccggcccctgaatgcggctaaccctaaccccggagccttgcagcacaatccagtgttgttaaggtcgtaatgagcaattctgggatgggaccgactactttgggtgtccgtgtttcttatttttcttgaatttttcttatggtcacagcatatatacattatatactgtgatc

SEQ ID NO: 752 - DNA, 627 bp, Rhinovirus B
ttaaaacagcggatgggtatcccaccatccgacccacagggtgtagtgctctggtattttgtacctttgcacgcctgtttccccattgtacccctccttaaatttcctccccaagtaacgttagaagtttaaggaaacaaatgtacaataggaagcatcacatccagtggtgttatgtacaagcacttctgtttccccggagcgaggtataagtggtacccaccgccgaaagcctttaaccgttatccgccaatcaactacgtaatggctagtattaccatgtttgtgacttggtgttcgatcaggtggttccccccactagtttggtcgatgaggctaggaactccccacgggtgaccgtgtcctagcctgcgtggcggccaacccagcttttgctgggacgcctttttacagacatggtgtgaagacctgcatgtgcttgattgtgagtcctccggcccctgaatgcggctaaccttaaccccggagccttgcaacataatccaatgttgttgaggtcgtaatgagtaattctgggatgggaccgactactttgggtgtccgtgtttccttttattctttatattgtcttatggtcacagcatatatagcatatatactgtgatc

SEQ ID NO: 753 - DNA, 628 bp, Rhinovirus B
ttaaaacagtggatgggtttcctaccatccgacccactgggtgtagtgctctggtatattgtacctttgcacgcctgttttcccattgtacccttccttaaattcctccccatgtaacgttagaagtttaagaacataaatgtacaataggaagcatcacatccagtggtgtatggtacaagcacttctgtttatccggagcgaggtataagcggtacccactgctgaaagcctttaaccgttaaccgccaatcaactacgtaacggctagtattaccttgtttgcaatctggcgttcgatcaggtggttccccccactagtttggtcgatgaggctaggagttccccacgggcgaccgtgtcctagcctgcgtggcggccaacccagcatttgctgggacgcctttttgtagacatggtgtgaagacctgcatgtgcttgattgtgagtcctccggcccctgaatgcggctaaccttaaccccggagccttgtgacataatccaatgtcattaaggtcgtaatgagcaattctgggacgggaccgactactttgggtgtccgtgtttctctttattctttacattgtcttatggtcacagcatatataatacatatatactgtgatc

SEQ ID NO: 754 - DNA, 628 bp, Rhinovirus B
ttaaaacagcggatgggtatcccaccattcgacccattgggtgtagtactctggtactatgtacctttgtacgcctgtttctccccaaccacccttccttaaaattcccacccatgaaacgttagaagcttgacattaaagtacaataggtggcgccatatccaatggtgtctatgtacaagcacttctgtttcccaggagcgaggtataggctgtacccactgccaaaagcctttaaccgttatccgccaaccaactacgtaacagttagtaccatcttgttcttgactggacgttcgatcaggtggattttccctccactagtttggtcgatgaggctaggaattccccacgggtgaccgtgtcctagcctgcgtggcggccaacccagcttatgctgggacgcccttttaaggacatggtgtgaagactcgcatgtgcttggttgtgagtcctccggcccctgaatgcggctaaccttaaccctagagccttatgccacgatccagtggttgtaaggtcgtaatgagcaattccgggacgggaccgactactttgggtgtccgtgtttctcatttttcttcatattgtcttatggtcacagcatatatatacatatactgtgatc

SEQ ID NO: 755 - DNA, 630 bp, Rhinovirus B
ttaaaacagcggatgggttctcccaccatccgacccactgggtgtagtactctggtatgatgtacctttgtacgcctgtttattcccaaacccccacccgttattcgcccaacccctgtaacgttagaagtttggaacttaattgtacaatagggagcaccatatccaatggtgtaacgtacaagcacttctgtttccccggagcgaggtataggtggtacccactgccgaaagcctttaaccgtcatccgccaatcaactacgtaacagctagtaacatcttgttgttgattggacgttcgatcaggtggttcaccccccactagtttggtcgatgaggctgggaatcccccacgggtgaccgtgtcccagcctgcgtggcggccaacccagcttatgctgggacgccctttcaatgacatggtgtgaagactcgcatgtgcttgattgtgagtccgccggcccctgaatgcggctaaccctaaccctggagccttgcaccacaatccagtggtgtctgggtcgtaatgagtaattctgggatgggaccgactactttgggtgtccgtgtttctcatttttcttttaattgtcttatggtcacagcatatagtattatatactgtgatc

SEQ ID NO: 756 - DNA, 631 bp, Rhinovirus B
ttaaaacagcgggtgggtatcccaccacccgacccactgggtgtggtacactggtactttgtacctttgtatgcctgtttgcttccactcccctttacctaatattcttccccaagtatattttgcggtaacgttagaagaagcaaagttagtgcaataggatgtatcacaaccagtggtataaagcacaagcaattcttgttccccggagctggatatagactgctaacgtggtcaaaagtccttaaccgttatccgccagctaactgcgagaagactagtaacaccatgtttgtttttagacgttcgatcaggtgaataccccattcactagtttggtcgatgaggctgagaataccccacaggtaactgtgtctcagcctgcgtggcggccaacccgactcatgtcgggacgcctactaatagacatggtgtgaagatcctattgcgcttagttgtgagtcctccggcccctgaatgcggctaaccctaaccccggagccttgtggtgtaaaccaacatttgcaaggtcgtaatgagtaattctgggatgggaccgactactttgggtgtccgtgtttcctttatttttattgtgtgtgtcttatggttacaaatacaatttgtaatc

SEQ ID NO: 757 - DNA, 632 bp, Unknown
  Description of Unknown: unclassified Picornaviridae sequence
ttgaaaactggcccccctggggatctttgcacctttgaagtgcatatcctcaggggttaaccaggtggtggacataatgtccacctttgtttcaacatggttctttggcattttctccagagtaactaaaagataaatgccatctggatggattttctggttataaaatgactttctcgttgatcggtttttccactatcttcattgccgggtggttgccaagcccggaagtgctatcactctaggattcgagtcttcatccgtcgcggatttctagggcccatatctggtgctgaaatattgcaaggaatggtgaaccctagttgtctaacactgtaagtctcgatgtcttagaccaggtagccttggcacaattcctaaccaccaacatgtttctcgtgaaattccctcgccggggtgtagtagcgagtctcctctgttgggctcatggttaggggatgctcctaggtagagtggaacctcttcttcattttaaggtgggacctgattcagtatcccactggaagttagaggtctgggtattggggtaacccagcttggtccacactgcttgatagagtcgcggctggccgacctaggacatctttaaaaagtcagttgattttaacctt

SEQ ID NO: 758 - DNA, 633 bp, Unknown
  Description of Unknown: unclassified Megrivirus sequence
gggggctcttccccctgggctcttttccggtaatccgattggcgaccggattatcgtgactctgctgagtcgtccgtgcctctaggaaacttgttggctccggctgacactttttctggacatcggatgggcggcttggtggggctagccaaccctgactgactttatgtgtatgacctcttttcctcttgcgctttagtctgtcgcgtctgatccacgtacggattaaatggtatgtcataaggctaagcctcgttctgaaatcccctagccaaaggggcctagtaggatcttggtgtttccttatgacctctaccgaccatgttagctagagctagggctgaataggatgcatcccagactcctttttggatatctggagcaagacaccggagtttaactatgtacgctggataaggctcgaacacacccagattgaaggtggtgctgaaatattgcaagcctaggtctgtgtagtgttagtagatgcccgccgctatagttttctccgccccctgtgggttagtagtgtacctatttggacgcagagccggcaatctctgcctttgcctagtactggttgatagacccgcggctggtcgagttaacatggtataaccagttgaaacggct

SEQ ID NO: 759 - DNA, 633 bp, Enterovirus B
cacccacagggcccactgggcgctagtacactggtatcacggtacctttgtgcgcctgtttgacccaccttccccaaacgtaacttagaagcacaactcaaatgatcattagacggctcagtatgccaactgggtctcgatcaagcacttctgttaccccggactgagtaccaataggctgctcacgcggctgaaggggaaaccgttcgttacccgaccaactacttcgagaaacctagtaccaccatgaaagttgcgcagcgtttcgctccgcacaaccccagtgtagatcaggccgatgagtcaccgcaaaccccacgggcgaccgtggcggtggctgcgctggcggcctgcccatgggacaactcatgggacgctacaatactgacatggtgtgaagagtctattgagctagttggtagtcctccggcccctgaatgcggctaatcctaactgtggagcagatacccacgcaccagtgggcagtctgtcgtaatgggcaactccgcagcggaaccgactactttgggtgtccgtgtttcttttattcctacgctggctacatatggtgacgatttgtaccataaagccttaaccgctcctcaacaccgtcataacacttaacacgctgag

SEQ ID NO: 760 - DNA, 633 bp, Rhinovirus A
ttaaaactgggtgtgggttgttcccactcacaccacccaatgggtgttgtactctgttattccggtaactttgtacgccagttttccctcccttctccccctcctacccttttacgtaacttagaagctttaaacatgagaccaatagcaggcaactttccaggttgtctaaggtcaagcacttctgtttccccggttgacgttgatatgctccaacagggcaaaaacaactgatatcgttatccgcaaagtgcctacacagagcctagtaggattctgaaagatctttggttggtcgctcagctgcatacccagcagtagacctcgcagatgaggctggacattccccactggtaacagtggtccagcctgcgtggctgcctgcacacctcttacgaggtgtgaagccaaggattcgacagggtgtgaagagccgcgtgtgctcactttgagtcctccggcccctgaatgcggctaaccttaaacctgcagccatagctcataagccaatgagtttatggtcgtaatgagtaattgcgggatgggaccgactactttgggtgtccgtgtttcattttttccttttatcaattgcttatggtgacaatatatatatatatatatattggcatc

SEQ ID NO: 761 - DNA, 634 bp, Parechovirus B
agaatagccaatctgtaacttcaacacctaagcgcatcttgcccgccgttatctggtcgaaggcacttgcaataagactggttaaccctccatgcgtgattcacaatcctatctgtctctcgagtgctttacgctcgggtaggggctcacccaggaggtcccactctttacagaggtctgcgcaggtggctttcacctctcgacagcgcccctcaatcctgccttaggtgtgaaggttgcacgtattccaatgtgaacagtgcttgaattttgttggtaggtgtagcgaccacacatgagccagcggatttcccctggtggtaacaccagcctctgggcccaaaaggcatgtctttgacctcatgtgtgcacaatcccagtgatgccaatgattagtaaagcacttagtatatatatgggatataccaatctcaagcacctaagggtgtaggtatggtaggctgaaggatgccctggaggtacccgcaggtaacgattggttcactgtggatctgaccaggggcccaccggaacttcgttctgggtagaagctctcgagccttgggttaaaaaacgtctaggcctatcccccggggggacccggggtttcccttataaccccatattttgcatc

SEQ ID NO: 762 - DNA, 636 bp, Pestivirus A
tggagtctatacgaggaggacagcctgttaataacccagttagaaatatcaaataatttactcatatcagaagacttgccagccgctgtcaagaacataatggccaggactgatcacccagagccgatccaacttgcttacaacagttatgaggtccaggtcccagtcctgttcccaaaaataaggaacggagaggttacagacacctacgaaaactactcatttctaaacgctaggaagttaggagaggatgtgcccgtatacatctatgccactgaagatgaggacctggcagttgacctcctagggctggactggcccgaccctgggaatcagcaggtcgtggagaccagcaaagcactgaagcaagtggccggattgtcttcagctgagaatgccttgctcatagctttatttgggtatgtaggttaccaagctctatcaaagaggcatgtcccaatggtcacagatatatacactatagaggaccagagactggaagacaccacccacctccagtatgcacccaacgccataaaaaccgaagggacagagactgaattgaaggaattgccggcgggtgacgtggagaaaatcatgggagccatctcggattatgcagctggaggactggaa

SEQ ID NO: 763 - DNA, 637 bp, Enterovirus A
acttagaagcttcacacaatcacgaccatcagtaggcctggcatcccagtcacgtcttggtcaagcacttctgttccccctgactgagtatcaataaactgctcacgcgggtgaaggagaaaacgttcgttatccggctaagtacttcgagaaccccagtagcaccgtgaaagttgcggagtgtttcgctcagcacttcccccgtgtacatcaggtcgatgagttactgttaaccccacgggcgaccgtgacagtggctgcgttggtagcctgcccatggggttacccttgggacgctctcatacagacctggtgtgaagagtctattgagctagttagtagtcctccggcccctgaatgcggctaatcctaactgcggagcacgcaccctcaacccagggggcggcgtgtcgtaacgggtaactctgcagcggaaccgactactttgggtgtccgtgtttccttttattccttactggctgcttatggtgacaattgaaaagttgttaccatatagctattggattggccatccggtgtctaacagagctattgtttacctatttattggatacgtccctcttaatctcaaggccattcaaactcttaattatatattgctccttaactgtaagaa

SEQ ID NO: 764 - DNA, 638 bp, Hepatovirus B
gggagtaaacctcaccaccgtttgccgtggtttacggctacctatttttggatgtaaatattaattcctgcaggttcaggtctcttgaattatgtccacgctagtggcactctcttacccataagtgacgccttagcggaacctttctacacttgatgtggttaggggttacattatttccctgggccttctttggccctttttcccctgcactatcattctttcttccgggctctcagcatgccaatgttccgaccggtgcgcccgccggggttaactccatggttagcatggagctgtaggccctaaaagtgctgacactggaactggactattgaagcatacactgttaactgaaacatgtaactccaatcgatcttctacaaggggtaggctacgggtgaaaccccttaggttaatactcatattgagagatacttctgataggttaaggttgctggataatggtgagtttaacgacaaaaaccattcaacagctgtgggccaacctcatcaggtagatgcttttggagccaagtgcgtaggggtgtgtgtggaaatgcttcagtggaaggtgccctcccgaaaggtcgtaggggtaatcaggggcagttaggtttccacaattacaatttgaa

SEQ ID NO: 765 - DNA, 639 bp, Unknown
  Description of Unknown: unclassified Megrivirus sequence
ttcccgaccggtctggcaaaccggacggttatcctggttagatgtctgatggttgctggaacgtggtggctactgctgccaccttctggcttcctttaatgggcatctagctgggttctttgccacaatccatcttactctcttacccattttctattacccagacttgttgttaactggtaaagttgacctactggcttcgttttgagactattctggtgttggtggacactctttccacaagtagattgtatggagttcatgctcgttttgaaccgggaatggcacaacccgtagtaggatcttgcctctgccatactaatctgcgcctgttgcttttagactatgggctgctaaggatgacattggaacccctttttggatattccatgtcaagtcaactgtttcatctggtgtacgctggaaatccttgttccgaggtcttgtctggaggtggtgctgaaatattgcaagccacaggcagttccttggacttggtgccgctatcagatgctacaccctctatgggcaaatgttgaaccttagtggacgcgtgagatgggaatccacgccggccatagactggctgataagctcgcggctgatcgagttgcaacagtaatcagttgatttgccact

SEQ ID NO: 766 - DNA, 639 bp, Rhinovirus C
ttaaaacagccgtgtggttgtacccaccaccgggcacattgtgcgtggtacactggaattacggttcctttgtacgcctgttttcccttcccactttctttcttccttcacttcctaattgtaacataattagaagcatgacatacagtccaataggaggcggttaatccataaccgtcatagacaagcacttctgtttccccggatgtgtgaataggcttccaccgaggctgaagctgtagcattcgttatccgcacacgtactacgcgaaaactagtaacaccttgattggtggtgtggtgtttcactcggcgctaccccagcgtagatcagggcaatggggctacggaaaccccaccggcgacggtgtcgtagcccgcgtggtgccctgcccagatccttgcgatctgggacaccatatcattgacagggtgtgaagattctagtgtgctacgtgtgagtcctccggcccctgaatgtggctaaccttaaccccgcagctatggtgtgcaaaccagcacattcgtagtcgtaatgggcaactgtgggatgggaccaactactttgggtgtccgtgtttccttttattcttataattttccttatggttacaagcttatggttataggtttgtaacc

SEQ ID NO: 767 - DNA, 639 bp, Unknown
  Description of Unknown: unclassified Enterovirus sequence
gacataagcgccgggtttgttaaaacagctgcgtggttgttcccaccaccaggcacacagtgcgtggtacactggaatttcggttcctttgtacgcctgttttcccaccctcatgtttgtttgtctttacgcgtaacttagaagcattgcaaacagctcaataggaatagtccatccaggactgttacgagcaagcacttctgtctccccggacgtgtgaatagacctcaccaaggttgaagctgtagcgttcgttatccgctcatctactgcgcaaagactagtaactaactgaagccttaatggtgtttcgctcagcagtaccccactgtagatcagggcaatgaggctacgcattccccactggtgacagtggcgtagcctgcgtggtgccctgcccaggtttcggcctgggacaccattttgacgacagggtgtgaagaccggcgtgcgctaggtgtgagtcctccggcccctgaatgcggctaatcctaaccctgcagccattgcatgtgatccaacatgtggatggtcgtaatgagtaattgcgggatggaaccgactactttgggtgtccgtgtttcctgttttaccaattactgtctcatggttacaaatttgtgtatcaagtttgtaact

SEQ ID NO: 768 - DNA, 640 bp, Unknown
  Description of Unknown: unclassified Picornaviridae sequence
ttttgaaaagggtcccagggggatcttttattccctctgggcccttttcacgtagtagggagtggcgcccctactgcgttactctgccaggtagtctgggtaggtaaacgggagatcggcttcgggcttatcttcttaatagcctacgtaactgggctgactggtgggggagctactagatccgggaaaggactagttaccccttgtaactctccttcgtgtcaccccatccacttaccctttttccctaccccttagaatcttaagtagatgtgcaggcctggccccccggaaatgggcaaatcggacgtttgcgtgtagggtcgttctgaaaggtggggcccactccaccgtagtaggatcttcctgtttcacgtttaaacctctccgggcaggtgtcgctagacactaggctgtataggatggcaagcacttaggtttcgcaccttcctagtgcgccaagaccccgtcttttagttttagtacatggttctttgtaagatgtctaaccagaggaggtggtgctgaaatattgcaagccactctggcgaacgtccgctgcattgcctggaacgaactttctgacgtctagcactggtagcgcggtactagattagtagggtacctatatggacagggg

SEQ ID NO: 769 - DNA, 640 bp, Unknown
  Description of Unknown: unclassified Enterovirus sequence
ttaaaacagccgtgtggttgttcccaccaccggacacactgtgtgttgtgcactggaatctcggttcctttgcatgcctgttttataaccccttcccctttactttctatcattcttttcttccaagtaacttagaagctgaacaacagtccaataggaagtgaccaacccatggtcactaaggacaagcacttctgtttccccggatgcgtgaatagactctaaaagggttgaagctgtagcattcgttatccgcacttgtactacgcgatggctagtatcatcctgctctttccattggcgtttcgctcagcgtggtatcccccacgtagatcagggtaatgaggctacatgtaccccaccggcgacggtgatgtagcctgcgtagtgccccgcctgggtcttgtgcccaggacgccataggtcagacagggtgtgaagacttgagtgtgctacaagtgagtcctccggcccctgaatgcggctaatcctaaccccgcggctatcgtacgcaatccagcgtattggtagtcgtaatgagcaattgtgggatggaaccgactactttgggtgtccgtgtttcctttatttcttgacatgttgcttatggtcacaagtttatggttataaatttgtgatc

SEQ ID NO: 770 - DNA, 641 bp, Unknown
  Description of Unknown: unclassified Kobuvirus sequence
ggatttaggccgtggtgcccgtgggcacgacggccacggctccagccgcactcctctccacgccttgtcccacgggacataaagtggagccctaagccctaaacccccatgttacccaattttcttatccacttccctttttccctttgactcacatttttcttgaccgcgcttgtgaggcggttcccgtacagttgagttgacgggtcccgcgcgggacctgaaaattactccatactgattaggaaaggttctagtacgcttgtacccttaaggccagcgggctacctcctttaggtcttatagccccaactggttagaaccactccagctcacctctatcggtgcgggagtgctaccacccctgcctgcgtcaagcccgtttttctagtgatctgtccacaaacacttggattcccgtcgcgactgacagaacctggcgacaggtgtctcgatgtgtgtgaccaagtggcatgagaatcggaaactaacgctggtaagatggtaagtgcccaatccctgtggggtgatgtttttctctgcataggaatgctgcgaaggtaccccggccttgagtcgggatctgatcgcaggctaattgtcctctgtgcagttcatttccttttcttttcattggcatc

SEQ ID NO: 771 - DNA, 641 bp, Rhinovirus C
ttaaaacagccgtgtggttgtacccaccaccggacacactgtgtgttgtgcactggaatctcggttcctttgcatgcctgttttaaaccccccttcccccactctttctatcattcttttcttcctaatgtaacttagacgttataccacagtccaataggacgtggccaatccaggccatgacggacaagcacttctgtctccccgggcgtgtgaataggcctcaacaaggctgaagctgtagcgctcgttatccgcatttgtactacgcgatggctagtatcatccttctcttggtcttggcgtttcgctcagcgtggtaaccccccacgtagatcagggcaatgaggctgcatatgccccaccggcgacggtgatgcagcctgcgtggtgccccgcctgggttaacccccaggacgccacaatcaagacagggtgagaagacctgagtgtgctacagatgagtcctccggcccctgaatgcggctaatcctaaccctgcagctatcgtatgcaaaccagcatattggtagtcgtaacgagcaattgcgggacggaaccgactactttgggtgtccgtgtttctctttttatttgaaatgttgcttatggttacaagttttggtattaaacttgtgacc

SEQ ID NO: 772 - DNA, 641 bp, Unknown
  Description of Unknown: unclassified Enterovirus sequence
tgtgtacatctcttctagtttcggggaggggtttaaaactgaaccacggttgttcccactgtggttacctaaagggtgtagtggtcttgtattacggtacatttccatgccagttttatcacccctccccgaaattagaagagatgtacacaccgaccaatagggagtggccaaccaggtcgctaaaggtcaagcacttctgtttccccggttggtttggatatgctttacccaaggcaaaaaccgaaccagtcgttatccgcaaagtgcctacgagaagcctagtagcatcttcgaaaccaatggttggtcgctccattgcaaccccagcaatagacctggcagatgaggctgagcagtccccgccagcgatggtggctcagcctgcgcggctgcctgcgcaccccttagggtgcgaagccagaaagtggacaaggtgtgaagagcctattgtgctcactttgagtcctccggcccctgaatgtggctaatcttaaccccgcagctatcgcacataaaccaatgtgtaggtagtcgtaatgggcaactgtgggatggaaccaactactttgggtgtccgtgtttccttgttttctttacaaatgcttatggtgacaattgtgtgatatacagttgtcgcc

SEQ ID NO: 773 - DNA, 642 bp, Enterovirus B
taatgtaacgtagaagttttacacactgatcaacagtaggcacagcgcaccagttgtgtctcgatcaagcacttctgtctccccggaccgagtatcaatagactgctcacgcggttgaaggagaaagcgttcgttacccggctgactacttcgagaaacctagtagcactatgaaagttgcgaagtgtttcgttcagcacttcccccgtgtagatcaggtcgatgagtcactgtattccctacgggtgaccgtagcagtggctgcgttggcggcctgcccatggggcaacccatgggacgcttcaatacagacatggtgcgaagagtctattgagctagtcagtagtcctccggcccctgaatgcggctaatcctaactgcggagcatgtgccttcgatccagagggtagcatgtcgtaatgggcaactctgcagcggaaccgactactttgggtgtccgtgtttccttttattcttatactggctgcttatggtgacaattgagagattgttgccatatagctattggattggccatccggtgagtaatagagctattatctactcctttgtgggttttgtatcattgaactataaggtcttgaagactctcaactttattttgacactcaacaccgcaaa

SEQ ID NO: 774 - DNA, 643 bp, Enterovirus B
aagcgtaacttagaagcttacctcacgtggtcaataggcggctcagtacaccaactgggtcttgaccaagcacttctgttaccccggaccgagtatcaataggctgcccacgcggctgaaggagaaaacgttcgttacccggccaattacttcgagaaacctagtatcaccatggaagttgcgcggcgtttcgctccacacaaccccagtgtagatcaggctgatgagtcaccgcactcctcacgggcgaccgtggcggtggctgcgttggcggcctgcccatggggcaacccatgggacgcctcaatactgacatggtgtgaagagtctattgagctaattggtagtcctccggcccctgaatgcggctaatcctaactgcggagcagacactcacaagccagtgggcggtctgtcgtaacgggcaactctgcagcggaaccgactactttgggtgtccgtgtttccttttattcctacattggctgcttatggtgacaattgagagattgttaccatatagctattggattggccatccggtgacaaacagagcgattgtctattcatttgtcggttttgtaccattaaactccaaagtcttgaaaaccctcaacctaatcatcctacttaactcagtaaa

SEQ ID NO: 775 - DNA, 643 bp, Enterovirus D
ccaagggcccacgtggcggctagtactctggtacttcggtacctttgtacgcctgttttatctcccttcccaatgtcaataggtggggcgcaaaccagcgctctcatgagcaagcactcctgtctccccggtgtggttgtataaactgttcccacggttgaaaacaacctatccgttatccgctatagtacttcgagaaacctagtatcacctttggattgttgacgcgttgcgctcagcacactaacccgtgtgtagcttgggtcgatgagtctggacataccccactggcgacagtggtccaggctgcgttggcggcctactcatggtgaaaaccatgagacgctagacatgaacaaggtgtgaagagtctattgagctactatagagtcctccggcccctgaatgcggctaatcctaaccatggagcaagtgctcacaggccagtgagttgcttgtcgtaatgcgcaagtccgtggcggaaccgactactttgggtgtccgtgtttcactttttacttttatgactgcttatggtgacaatttgatattgttaccatttagctgtcaaattaattgcaaaagatcctaagtcttacttaccaatttgcattttgataaccttgatttgaaaattttaata

SEQ ID NO: 776 - DNA, 643 bp, Unknown
  Description of Unknown: unclassified Enterovirus sequence
cggataacgtttaaaacagcggatgggttcccccaccatccgacccactgggtgtagtactctggtattatgtacctttgtacgcctgtttactcccaaaccccccctcccgttacatttccaacccctgtaacgttagaagtttggaatttaacagtacaataggaggcaccatacccaatggtgtaatgtacaagcacttctgtttccccggagcgaggtataggtggtacccaccgctgaaagcctttaaccgttatccgccaatcaactacgtaacagctagtagcattttgtcgttgactggacgttcgatcaggtggtttacccccccactagtttggtcgatgaggctggaaattccccacgggtgaccgtgttccagcctgcgtggcggccaacccagctcatgctgggacgccctttcaatgacatggtgtgaagactcgcatgtgcttggttgtgaatcctccggcccctgaatgcggctaaccctaaccccggagccttgcatcgcaatccagtgatgttggggtcgtaatgagtaattctgggatgggaccgactactttgggtgtccgtgtttctcatttttctttgaattatcttatggtcacagcatatagtaatatatactgtgatc

SEQ ID NO: 777 - DNA, 644 bp, Unknown
  Description of Unknown: unclassified Picornaviridae sequence
gaaaagagtcccaggaggaattccccctgggaacccttttccgttgggaaggcttggcaaccttcctggcgttaggctgcttagtagtctgcgtattgcgcgccagtttggcttcggctgagctgccgttcaatacactagtgggctattctaggtggctgtagttgccctacagtggccggccagtgaaaccacactgtagtttacccctaccccaaaatctctaatttatgaccgtaatccctaagtgactttcttgtttgctctcacacatgggctttggatcttgttttggattttggtatctgatctctatctggatgtatcagtaatctgaagtgcggacgcaatccgcctagtaggatgactgttgtccttttagaggaaaacctctgtggctagacatagtggtgtatagattcaacaggactcctttttggatatcctaactcccggacccttgttgaatgggctggatttccgcctagccaagggaaaccaccggaacggggatggcaactgaacctagtacggctagtaggaggtctatacatacgatgggctgggaaacccatcctggactatgactgggtgatagcctcgcggcggatcgagtcacagttgtaatccgttgttttgcactc

SEQ ID NO: 778 - DNA, 644 bp, Unknown
  Description of Unknown: unclassified Enterovirus sequence
aattggcggataacggttaagagcttaaaacagcggatgggttccccaccatccgacccaatgggtgtagtactctggtattctgtacctttgtacgcctgtttctcccctccctcccatcctaaattgtcccagtaacttagaagacttgaattaccgtacaataggtgctgtcacatccagtgatggcttgtacaagcacttctgtttccccggagcggagtatagatggccaccgctgtcaaaagctcttaaccgttatccgccaattaactacgcaacggctagtaacatcttgttattcttagggcgttcgatcaggtgagtacacccctcactagtctggtcgatgaggctgagaattccccacgggcgaccgtgtctcagcctgcgtggcggccagcccagcttatgctgggacgccttaattgtgacatggtgtgaagacccacgtgtgcttaattgtgagtcctccggcccctgaatgcggctaacctaaaccctggagccttgagacacaatccagtgttggcaaggtcgtaatgagcaattccgggacgggaccgactactttgggtgtccgtgtttcctgttatttccaaattgttcttatggtcacaatataagctatatatattgtgatc

SEQ ID NO: 779 - DNA, 644 bp, Unknown
  Description of Unknown: unclassified Enterovirus sequence
cgaatccttgtagtaatttatgttaaagtacttgatgagacctccattggtggcagtaatagcattctcatgtgatccggtggtattccggtacacttgtacgccagtttgccaccctaaataccccgtaacaatagaagtctacacacacttagaccaatagggggtgttcatccagttcacccaaggtcaagcacttctgtttccccggcataggggtgttaggtttcacccgagactgaagctctgattgtcgttatccgcacaactactggacaaagcctagtaacaccctacgatgtaccatggttggttgttccgccagtaccccctggtaaacctggcagatggggctagaagttcctcactggtgacagtgttctagcccgcgtggctgcctgctcccttatgggagaagccattttactgacaaggtgtggagagccccgtacgctagttgtgactcctccggcccctgaatgcggctaatccaaccctgcagccattgcatggaagccaccatgtagatggtcgtaatgagtaattgcgggacggaaccgactactttgggtgtccgtgtttcttgtttttcttttactgacgtttatggtgacaatatatatataacatatatattgttcatc

SEQ ID NO: 780 - DNA, 645 bp, Unknown
  Description of Unknown: unclassified Enterovirus sequence
ttaaaactgggcattggttgtccccaccaatgcacaccaagtgtgttagtgctctggaatcttcgttcctttgcacgccagtttgccctcccttccccaagtctttctatcattcttttcttcctaatgtaacttagacgttataccacagtccaataggacgtggccaatccaggccatgacggacaagcacttctgtctccccgggcgtgtgaggaataggcctcaaaaaggctgaagctgtagcgctcgttatccgcattggtactacgcgatggctagtatcatcctggaagtctcttggttggtcgctcagcgtggtaaccccccacgtagatcagggcaatgaggctgcatatgccccaccggcgacggtgatgcagcctgcgtggtgccccgcctgggttaacccccaggaagccaatgagtggacagggtgtgaagagccgcgtgtgctaccaatgagtcctccggcccctgaatgcggctaatccaaccccacagctatggcatgcaagccagcatgtgcgtagtcgtaatgagtaattgtgggacggaaccgactactttgggtgtccgtgtttcctttattctttgaaatgttgcttatggtgacaatattggtattataccattcttgtcatc

SEQ ID NO: 781 - DNA, 647 bp, Unknown
  Description of Unknown: unclassified Enterovirus sequence
tgtgacctcaccggggaaacagaagtgcttgttcgtggtggtactggtttgtaccaccacgaacaagcacttctgtttccccggtgaggtcacatagactgttcccacggttgaaagtgatcaatccgttatccgctcatgtacttcgggaagcctagtatcacctttggatcttcgacgcgttgcgctcagcactcaaccccagagtgtagcttaggctgatgagtctggacgttccccactggtgacagtggtccaggctgcgttggcggcctacctgtggttcaaagccacaggacgctagttgtgaacaaggtgtgaagagcctactgagctacctgagattcctccggcccctgaatgcggctaatcctaaccacggagcaggtgatcataaaccaatgataggcctgtcgtaatgcgcaagtctgtggcggaaccgactactttgggtgtccgtgtttccttttattctttacattggctgcttatggtgacaatcatagattgttatcataaagcgaattggattggccatccggtgaaaatcagagcgattatatatttgtttattggattcactccattaacaccaatttctcctacactcattaagctagtcctattaataaggtactattatcata

SEQ ID NO: 782 - DNA, 647 bp, Enterovirus C
cggtacctttgtacgcctgttttatatcccctcccccatgcaactttagaagcaattcaaacagttcaatagagggggtacaaaccagtaccaccacgaacaagcacttctgtttccccggtgaagctgtatagactgtgcccacggttgaaaatggctaatccgttatccgcttaagtacttcgagaagcctagtatcaccttggaatcttcgacgcgttgcgctcagcactctaccccgagtgtagcttaggctgatgagtctgggcataccccaccggcgacggtggcccaggctgcgttggcggcctacccatggctaacgccatgggacgctagttgtgaacaaggtgtgaagagcctattgagctacttgagagtcctccggcccctgaatgcggctaatcccaaccacggagcaagtgctcacaaaccagtgagtggcttgtcgtaacgcgcaagtctgtggcggaaccgactactttgggtgtccgtgtttccttttatttttatcatggctgcttatggtgacaatctaagattgttatcatatagcgtttggattggccatccggtgatttcaaaagtgatatatttgacctatcgccttactgtgtttacctactcattacatccactcaaccata

SEQ ID NO: 783 - DNA, 648 bp, Enterovirus C
tcacggtacctttgtacgcctgttttacatcccctccccaagtaactttagaagtaaatcataaagttcaatagaagggggtgcaagccagcaccaccacgaacaagcacttctgtttccccggtgaagccgtatagactgcccccgcggttgaaaatggcagatccgttatccgctcacgtacttcgagaagcctagtatcaccttggaatcttcgacgcgttgcgctcagcactctaccccgagtgtagcttaggtcgatgagtctgggcataccccaccggtgacggtggcccaggctgcgttggcggcctacccatggttaacaccatgggacgctagttgtgaacaaggtgtgaagagcctattgagctacctgagagtcctccggcccctgaatgcggctaatcccaaccacggagcaagtgctcacaaaccagtgggtagcttgtcgtaacgcgcaagtctgtggcggaaccgactactttgggtgtccgtgtttccttttatttttatcatggctgcttatggtgacaatctaagattgttatcatatagctattggattggccatccggtgatttttgaaagtgatatttgccttgctatttcattgcatttgcttacttataatactgcaaactcaca

SEQ ID NO: 784 - DNA, 648 bp, Unknown
  Description of Unknown: unclassified Enterovirus sequence
tactaatacagagtactacacccagtgggtcggatgggtatcccaccatccgacccactgggtgtagtactctggtattatgtacctttgtacgcctgttcttcccattgtaccctccctaaatttccaacccaagtaacgttagaagttccacataacagtacaataggaagcaccacatccagtggtgttttgtacaagcacttctgtctccccggagcgaggtataggctgtacccactgccaaaagcctttaaccgttatccgccaaccaactacgtaaaagctagtaacatcttgtttgtaacttggcgttcgatcaggtggattccccctccattagtttggtcgatgaggctaggaattccccacgggcgaccgtgtcctagcctgcgtggcggccaacccagcatttgctgggacgcccttttatagacatggtgtgaagactcgcatgtgcttggttgtgactcctccggcccctgaatgcggctaaccttaaccccggagccttgtgttgcaagccagcaacattaaggtcgtaatgagtaattctgggacgggaccgactactttgggtgtccgtgtttccaatttttcttattattgtcttatggtcacagcatatttgacaaatatactgtgatc

SEQ ID NO: 785 - DNA, 649 bp, Enterovirus B
ccaccccgtcgtaacttagaagctaatcaactatggtcactaggcggcccagtatgccaactgggtcttgaccaagcacttctgttaccccggactgagtatcaataggctgctcacgcggctgaaggagaaaacgttcgttacccggccagttacttcgagaaacctagtaccaccatgaaggttgcgcagcgtttcgctccgcacaaccccagtgtagatcaggccgatgagtcaccgcatccctcacgggcgaccgtggcggtggctgcgttggcggcctgcccatggggcaacccatgggacgcttcaatactgacatggtgcgaagagtctattgagctaattggtagtcctccggcccctgaatgcggctaatcctaactgcggagcagatacccgcgtgccagcgggcagtctgtcgtaatgggcaactctgcagcggaaccgactactttgggtgtccgtgtttccttttattcttacactggctgcttatggtgacaattgaaagattgttaccatatagctattggattggccatccggtgactaacagagcgattatctatcaatttgttggttttgtgccattggatttcccaaccctaagaacccttaattttatattggtacttaacacgacaag

SEQ ID NO: 786 - DNA, 651 bp, Unknown
  Description of Unknown: unclassified sequence
ggttaacttgtttaaccaaggcttccgtgcagggcttgcacgttaggagttcatgttgattcatgctccaatgcccaaaactttgtgtgtttgtttatgtctttcccaaagtttcccccaaggtttcggtactcaaaccttaattcctagtcccatcttttgggccttagtatctaggaaatgtacccgtgccttgacgaacgtaagaaagctgtcttttattgaacggttctaatgaactaagtataactggctcgcgccacctggtgtgtgccgttggaattcccccatggtaacatggtccaacgggcccgaaaggctagtgggcaatcggtcctccaaggaaggggttcccaccccgacctgaacaggatttgatgaagctcacctcccaggctcctaaccccaaggaagtttacttatagtaattagaatttagtatgtaattgctggcaatcttgctagtagtcaggaacgttatgaccaaatgagtagacccccagaaggtaccccattatatgggatctgatctgggcctcatactgtgtgtctccccacatatgaggttaaaaccatgaaagtttggtccaaaatattcttttccttttatcttttctttagtggtgacgccattatatcagcagtttgctg

SEQ ID NO: 787 - DNA, 651 bp, Enterovirus C
ccccgtaacttagaagcataaaaccaagttcagcaggaaggggtgcaaaccagtacctctatgaacaagcacttctgtttccccggtgacattgcatagactgctcacgcggttgaaagcgatcgatccgttatccgcttgtgtacttcgaaaagcctagtatcgccttggaatcttcgacgcgttgcgctcagcacccgatcccggggtgtagcttaggctgatgagtctggacgtccctcaccggcgacggtggtccaggctgcgttggcggcctacctatggctaacgccataggacgctagatgtgaacaaggtgtgaagagcctattgagctacacgagagtcctccggcccctgaatgcggctaatcctaaccacggagcaagcggtcacgaaccagtggctggcttgtcgtaacgcgcaagtctgtggcggaaccgactactttgggtgtccgtgtttcctgttatttttatcatggctgcttatggtgacaatctgtgattgttatcataaagcgatttggattggccatccggtgagtgttgtatcgaacatttgactgttcatcagaactactgtgttagattcacttcttattcaactaattaatcaaaaacagtacgaagacaaaacaacaatactaca

SEQ ID NO: 788 - DNA, 651 bp, Unknown
  Description of Unknown: unclassified Enterovirus sequence
cccctaccccttgcaacatagaagcattgtaccacggatcaatagcaggtgtgtcgatccagacgcatcttgatcaagcacttctgttcccccggaccgagtatcaataagctactaacgtggctgaaggagaaaatgtccgttacccggccaactacttcgagaagcccagtaccaccatgaacgttgcagagtgtttcgctcagcacaaccccagtgtagatcaggccgatgagtcaccgcattcctcacgggcgaccgtggcggtggctgcgctggcggcctgcctatggggaaacccataggacgctctaatactgacatggtgcgaagagcctattgagctagttggtagtcctccggcccctgaatgcggctaatcctaactgcggagcatgtgctcacaatccagtgagtggcatgtcgtaacgggtaactctgcagcggaaccgactactttgggtgtccgtgtttccttttatatttatactggctgcttatggtgacaatcaaggaattgttaccatatagctattggattggccatccggtgactaatagagctataatttacctatttgttggattcgtccccctgaacacaaaaacagttcagactctacagtacatcttatttttgaacttgaagaa

SEQ ID NO: 789 - DNA, 652 bp, Unknown
  Description of Unknown: unclassified Enterovirus sequence
gggggttgtacccacccctggggcccacgtggcgccagtactctggtacgctagtacctttgtacgcctgttttcccctcccgtaaataaatcaagattgctggtcctgtggggagtagtccgactccgcaccgatacgtcgcaccagtactccggtacgcctagtaccctagtacggaggtaccagtactcctctcccgtaacttagaagcaaagcaccaaaccgacccaaaaggacgcgttgcacccagcagcgtgatggtcaagcacttctgtttccccggccgcaaggtcgttacccacccgcaccactacgagaagcctattagacagccaagcttgcaaagcgttgcgttcaaccacaaccccagtggtagctctgagagatgggactcgtcgttcccccatggcaacatggtgacttgtccgcgtgtgctctcgggttcgccaataggcgttcacgccgcacaagtgtaactgttgaagagcctattgtgctggagcggttttcctccggagccgtgaatgctgctaatcccaacctccgagcgtgtgcgcacaaaccagtgttgctacgtcgtaacgcgtaagttggaggcggaacagactactttcggtactccgtgtttccttattttatattactcaatct

SEQ ID NO: 790 - DNA, 652 bp, Unknown
  Description of Unknown: unclassified Enterovirus sequence
gagcctggtggagcgtatcaatctaaaccggggagacagaagtgcttgaccgttaatgacttggatagccatctcctacatggagttgtactctattattccggtaatcttgtacgccagttttatatcccttccccctttgtaacttagaagttaagcacacagaccaataggtgatggctatccaagtcattaacggtcaagcacttctgtctccccggtttagattgatacgctccaccagggcgaaaacaatctaaatcgttatccgcaaagtgactacgcaaagcctagtaataccttgaagaacttatggttggtcgctccactaaaccccatagtagacctggcagatgaggctagaagtaccccactggtaacagtgttctagcctgcgtggctgcctgcacaccctttgggtgtgaagccatatttttgacaaggtgtgaagagccccgtgtgctcactttgagtcctccggcccctgaatgtggctaaccttaaccctgcagctagtgcatgcaatccagcatgttgctagtcgtaacgagcaattgcgggatgggaccaactactttgggtgtccgtgtttcactttttaccttttatttgcttatggtgacaatatatatagtacatatatattggcatc

SEQ ID NO: 791 - DNA, 654 bp, Enterovirus J
tttgtacgcctattttaaaacccctacccccgtaacttagaagcatttgacacaagttcaatagtaggaccatcatccaggtggttcatcgaacaagcacttctgttaccccggtcctagtacctgtgaagctgtacccacggcggaaggggaaaacgatcgttacccggctatctacttcgagaagcctagtaacagcattgaaactcttgagcgttgcgttcagcacagtaacccctgtgtagctttggctgatgagtctgggcattccccactggcgacagtggcccaggctgcgttggcggccaaccgatccgggcaaccgggtcggacgcttatttgtggacatggtgtgaagagcctattgagctagatagtagtcctccggcccctgaatgcggctaatcctaactccggagcaaatgcacgcaacccagcgtgtagtttgtcgtaacgcgtaagtctggagcggaaccgactactttgggtgtccgtgtttcctgttttaccttatttggctgcttatggtgacaatatagtattgttaccatatagctattggattggccatccggtgaacagatttcgacaaactctattttactgttgttcacagcctaaagttacaaatcttactctgactcagtagtaatc

SEQ ID NO: 792 - DNA, 655 bp, Parechovirus A
ctggatttctctaggagagtccctttcccagccctgaggcggctggtaaataaaagcctcaattgtaacaaacatctaagaacactacattaaccccatgcctggtctccactagttgaaggcgacttgcaataagatgagtggaaacaagacgcttaaagcatggtgtaaatcaacttttctaacctgtacattgtatggggtggcagatggcgtgccataattctatcagtgagataccacgcttgtggaccttatgctcacacagccatcctctagtaagtttgtgagacgtctggagacgtgtgggaacttattggaaacaacattttgctgtaaagcatcctactgccagcggaacaacacctggtaacaggtgcctctggggccaaaagccaaggtttaacagaccctctaggattggtttaaaacctgagatgttgtggaaaatattcagtacctaccaatctggtagtagtgcaaacactagttgtaaggcccacgaaggatgcccagaaggtacccgtaggtaacaagtgacactacggatctgatctggggccaggtacctctatctaggtgacctggttaaaaaacgtctagtgggccaaacccgggggggaccccggtttccttttattttatcaatgccact

SEQ ID NO: 793 - DNA, 655 bp, Enterovirus A
ctgttttatctcccctcccccgtaacgttagaagattaaacaaatgacaaatagcaaatccaccaacccaggtgggttttcgtcaagcacttctgtttccccggacctagtaccaataggctgtacccacggctgaaagggaaaacgttcgttacccggctacctacttcgagaagcctagtaccatcattgaatgtctcaagtgttacgctcagcacaaccccagtgcagttcaggctgatgagtcaccgaatcccccacgggcgaccgtgtcggtggctgcgttggcggcctgcctgcgagttccactcgcaggacgcttgattcatgacatggtgcgaagagcctattgagctaggtagtagtcctccggcccctgaatgcggctaatcccaaccacggagcatccactgacaaaccagtcagcagggtgtcgtaatgggcaactctgtggcggaaccgactactttgggtgtccgtgtttcctgttttatttactctggctgcttatggtgacaatttacggattgttaccatatagctattggattggccatccggattacaagcaagtaatattactgtttgtgggatttttacccttgaatcacattaactacttcattctactaatagtcttgaagttaagtacatc

SEQ ID NO: 794 - DNA, 656 bp, Unknown
  Description of Unknown: unclassified Picornaviridae sequence
cgaattccggacatctcctttcgggggcgagcgtcaccgtgcccctcatggaggcaactgtgcctctaatcggtgacccactgagaaaattttctttctacgtggctaaacaatgcaactttataataacacaaatttaatgcttaatcttaacaccaaagatttgaacatatgtttggaaagtggcacacttcaaacattgcatagttgctaggggtgaagtccctttaaggggttgcagaggatctttcctctttatgagcggctaggagtatcttcttgatattatgtggtcgtgcaactcacttcccagatgtatgacggtgtactaagcgattggaactagtcataacctctttgaattttggtattgcgagtctagcagggggatatttaccgctaaagggtgacacactcgtgagggtggcctttggtgtgtgtatatttattccgcccatcttgcatggggtgctaaaattctaatgctgtgaaataaccattttctgaatacattctctacatttggagtcaaatatgaggaatgccactcaggtacccttgacatgatcttggatctgagagtgggctaattatctaattatttggcgactttctaaaatcttctgtttttagtggtgacaatttatggttataaa

SEQ ID NO: 795 - DNA, 656 bp, Unknown
  Description of Unknown: unclassified Enterovirus sequence
gaaaggaggggaaggggttttaaaacagtcgaccggttgttcccaccggcgagcacactgtgcgttgtacactggaattacggttcctttgtatgcctgttttataaccccttcccctcctttctatcacctctaacttccatgtaacttagaagcaacgtacatgagcccaataggagcggctaatccacagccgtatagggcaagcacttctgttaccccggatgtgtgaatagacttctcacgaggttgaagctgaagcattcgttatccgcgcttgtactgcacggaaattagtagcactcttgccagcctcatggtgtttcgctcagcgtttcccccacgtagatcagggcaatggggctacacaacccccaccggcgacggtggtgtagcccgcgtggtgccccgcccgagctactagctcgggacgccatgatgaagacagggtgtgaaggttcgagtgcgctacaagtgagtcctccggcccctgaatgcggctaaccttaaccccgtagctgtggtgtgcatgccagtacaaacacagtcgtaatgggtaactacgggatgggaccgactactttgggtgtccgtgtttcactttttcctttaaatttgtcttatggttacaggtttatgcaaatagatctgtaatc

SEQ ID NO: 796 - DNA, 657 bp, Enterovirus B
gcggccccctcccccactgtaacttagaagcaatgcataccgatcaacagtgggcgtggcaaaccagccatgtcttgatcaaacacttctgtttccccggactgagtatcaatagactgctcgcgcggttgaaggagaaaacgttcgttatccggccaactacttcgagaagcttaagtaacatcatgaaagttacggagcgtttcgttcagcacatccccagtgtagatcaggccgatgagtcactgctctccccacgggcgaccgtggcagtggctgcgctggcggcctgcccatggggtgacccatgggacgctctaagatggacatggtgcgaagagcctattgagctagttggtagtcctccggcccctgaatgcggctaatcccaactgcggagcatgtgtcttcactccagaagatagcatgtcgtaacgggcaactctgcagcggaaccgactactttgggtgtccgtgtttccttttattcctacactggctgcttatggtgacaattcaagaattgttaccatatagctattggattggccatccggtgagcaatagagcaattatctaccaatttgttggatttgtacccctcgattttacagccattggaacacttaaatacatcttagtactcaacacgacaaa

SEQ ID NO: 797 - DNA, 660 bp, Enterovirus L
acatgggccagcccaccacacccactgggtgtagtagtctggttctatggaacctttctacgcctcttttgcttccctcccccatttctccttcgattgctccacctgtgatctttgcaacttagaagaaataatgaacccgcacaatagcgggcgctgagccacagcgtcaatgtgcaagcacttctgtttccccggaatgggcccataggctgtacccacggctgaaagggaccggcccgttacccgccttggtactgcgagaatgttagtaactccctcgatagctttaggcgttacgctcagccctttgagcccgaagggtagttcgggtcgatgaggctcgtcattccccactggcgacagtgtgacttgcctgcgttggcggcccggggtggggggcaacccccatccacgcctactgaaggacagggtgtgaaggcgctattgcgctactaaggagtcctccggcccctgaatgcggctaacccgaaccccgagcccacggtggtaaacccgccacaagtgggtcgtaatgagtaatttggggcagggaccgactactttgggtgtccgtgtttcctgtttttccatacgatggctgcttatggtgacaaccataagcaattggattggccatccggtgttcatattgcgaat

SEQ ID NO: 798 - DNA, 662 bp, Cardiovirus A
ctctttccgagggaaaggaagcgccccagtctgcattcacaagctggtgcttccccgcccagactaagcgccgcacggagggaatcagggtcccggtgccccccctccctaacagtactggtcgaaaccacttgggataagaccggtgtcttgtttagtctatatgttatttctactcatctggtttctttgccagatgatgggcagtgtaaccttgccctcgcttcttgcggagaattcctagtggtctttccactctcgacaaaggaattcatgttccaccaaaagttgtgaagaaagcaagtcctatggaagctttctgatgactgatgatgactgtagcgaccctttgcaggcagcggactcccccacctggtaacaggtgcctctgcggccaaaagccacgtgtttgacagacacctgcaaaggcggcacaaccccagtgcctcatcaaaagtctgatgactgtggaaatggtcaactggcttttcttaagcaaatttggtgtttggggctgaaggatgcccggaaggtaccacactggttgtgatctgatccggggctttagtgcatgtgctttacacatgtagctaaggttaaaaaacgtctaggccccccaaccacggggacgtggttttcctttgaaaaccacaatttataat

SEQ ID NO: 799 - DNA, 663 bp, Unknown
  Description of Unknown: unclassified Hunnivirus sequence
gccctcacctgtcaattgggaccaccactttcagtgaccccatgcgaagtgctgagagaaggaagctttcttacccttcatttgtgaacccactagtctaagccgcttggaatacgatgagtggaaaagttcattctaaatggagtgaaacatgcttaatttttctagtcaggcacacccttgtgtgtctgagcgccactgtcttggcgtaagtcttcagagtgtcacgccgtgcttgcggatctcacgtggcacatgacgaggctctcgctggaactgtgagtctggaacaagtgaagtaacagtgaaaagtgcatgatcacacattgtgtgggctatgagcctgcggaacaacaactggtaacagttgccccaggggccgaaagccacggtgttaacagcaccctcatagtttgatccatcccaggatggtgatgttgtgtacctagtaattgccaatttgcttgttttggtatcatggcataccggagagtttgcgggtgaaggatgcccagaaggtacccgtaggtaaccttaagagactatggatctgatctggggccctgtctggagtgctttacacacagctcagggttaaaaaacgtctagcccgcatcaacccgagggattcgggttttccctttaaaaacccgactggcattt

SEQ ID NO: 800 - DNA, 663 bp, Enterovirus C
tttaaaacagcctgggggttgttcccacccccagggcccactgggcgttagtactctggtatcgcggtaccttagtatgcctgttttatgtctcctttcccccgcaactttagaagtaatcaagttatggctcaacagtcgccacacccccagtgtggttccgagcaagcacttctgttccccggttgcgtcttatatgctgtgtgaacggcagaaagggacaatatcgttatccgctcaactactacgggaagcctagtaccaccatggattgacctgaaagttgcgttcagcgcacccccagcgcagctcaggccgatgaggctccgaataccccacgggcgaccgtgtcggagcctgcgttggcggcctgcccacgttgcaaaacgtgggacgctcatttcatgacatggtgcgaagagcctactgtgctagttgagagtcctccggcccctgaatgtggataatcctaaccactgaacctacgggcgcaaaccagcgtctggtaggccgtaacgcgcaagtcggtggcggaaccaactactttgggtgtccgtgtttccttttatctttttgaatgtttatggtgacaattgttgtgtacagttgttaccatagtttgcattcagaaataaacctaacactttccaattatttgttaca

SEQ ID NO: 801 - DNA, 664 bp, Tottorivirus A
cccctttacgtaactgcaacttaaagagtaccctactgcattggatgtgtggtaaacttttacgcacacatttgtagtagtgttagttatgttctacctaatgagtatgcatgcacccgtcgaaacacgcttgtgataagataggtgagtccatgtgactaatctcattaagataaataagcaccctacaacgcacggcacgctcgtgtcttccgtgcggggccgggacaacagcggcctaaatcttctaggtgaccaccatgcttttgggactatggcaccactgtggacgtgagtacctggcagtaagtctgtgaaaagatggaaggtgtcccaagctatggggcgtatgcatatagcctgcggaacaaacaacggcgacgttgtccccagggcccaaaaggcacgtggataagatccacctatatgtttaccccatagtgtaagtcactggaagtcctagtaatggatgtctggagtaaggctcacggggtagggcgaaggatgcccagaaggtacccgtaggtaaccttaagagactatggatctgatctggggaccggatggcgccatcaccatgacgtggaggccggtttaaaaaacgtctaagcccgaccaacaacctaggggactaggttttccttttttattcatgtatgacgtt

SEQ ID NO: 802 - DNA, 664 bp, Unknown
  Description of Unknown: unclassified Enterovirus sequence
ccacgcggcgttagtactctggtatcacggtacctttgtatgcctgttttatctcccttcccccgtaacgttagaagaaaacacaaccgacaactagcagattcaccaatccaggtgagtcttcgtcaagcacttctgtttccccggacttagtaccaataggctgtacccacggctgaaggggaaaacgttcgttatccggctacctacttcgagaagcctagtaccaccattgaatgtctcaagtgttacgttcagcacaaccccagtgtagttcaggtcgatgagtcaccgaattccccacgggcgaccgtgtcggtggctgcgttggcggcctgcctgcgggtttcacccgcaggacgcttgattcatgacatggtgcgaagagcctattgagctaggtagtagtcctccggcccctgaatgcggctaatcctaaccacggagccatgcgttacaatccagtaacgttgtggtcgtaacgagtaattctgtggcggaaccgactactttgggtgtccgtgtttcctgttttactcattttggctgcttatggtgacaatctagggttgtcatcatatagcgattggattggccatccggatttgtctttgtgtgatttatctcttgctcacaagcaattttcataggtcatagcatcatc

SEQ ID NO: 803 - DNA, 665 bp, Tremovirus B
ttcaaatggcccctgggttgatacccagtggtcatttggacactttggtaaggaggtgtaattatccttcccatgtggaacctagtgcttaggtttactttatatgttctttgtttgtcctttgtactttctatcgggcaatcttgttgttcaatacaatatgtatttgaactgcctaagataaattcagttttcaaccaacccctctcttggggttgtgtctttctttctttcttatatcctcttaagctgacttacttgctaatccgactcctcgtcaacgggagggtaaagcagtatcactagggtattgtgatgtaggagaaaaagtaagtagagatagtgcatgtaacgaaagtgacttggtactttaaactctcttaatcccaaagtgtggtattggtcatgttggagtaggctacgggtgaaactccttcacatttagtaatgtgttcacacgctaacgctacggtagatgacagactaggtcttattctcaacgtagggggacgggtgtatgttcatgattagccacatattaaggttttgaggggctgagtcatataagtatgtgcattaatttctggtactggtccctggggactggcccttttctaggttgattttagtttccccaatttttaaaaactaatgagatttacgac

SEQ ID NO: 804 - DNA, 666 bp, Unknown
  Description of Unknown: unclassified Hunnivirus sequence
cggcggctgagatgatgttcattctaatggagtgaaacatgtctttgattttctagtgcgtgttaggctttctagcacgcagcggcactgtcttgccgtaactctccagaccgtcacgccgtgcttgcggatctcacgtgccggatgacaaggctgtagctggaactgagtgtctagtgcacattgtgtaacagtgaaaactttgtgatcaccgaaaggtgggctagtagcctgcggaacaacaactggtaacagttgcctcaggggccaaaagccacggtgttaacagcaccctactagtttgatggaagcaattcctgatgttgcagagctagtaattgccaagctttgtacattagtatctcggcataccgtgcagtctgtgccagtgaaggatgccctgaaggtacccgtaggtaaccttaagagactatggatctgatcaggggctctctccgtactgctttacaggcggctgagagttaaaaaacgtctagctggccccagcccaagggattgggctttccctttaaagcccacaactcgcatatggtgacaataattgctgttcagacgaacagtgttattgttgtctattctcagagctttttccagacgcactcacacaacggaacttcttggcaagcaaatccaacaacagtcaat

SEQ ID NO: 805 - DNA, 666 bp, Senecavirus A
tttgaaatggggggctgggccctgatgcccagtccttcctttccccttccggggggttaaccggctgtgtttgctagaggcacagaggggcaacatccaacctgcttttgcggggaacggtgcggctccgattcctgcgtcgccaaaggtgttagcgcacccaaacggcgcacctaccaatgttattggtgtggtctgcgagttctagcctactcgtttctcccccgaccattcactcacccacgaaaagtgtgttgtaaccataagatttaacccccgcacgggatgtgcgataaccgtaagactggctcaagcgcggaaagcgctgtaaccacatgctgttagtccctttatggctgcaagatggctacccacctcggatcactgaactggagctcgaccctccttagtaagggaaccgagaggccttcgtgcaacaagctccgacacagagtccacgtgactgctaccaccatgagtacatggttctcccctctcgacccaggacttctttttgaatatccacggctcgatccagagggtggggcatgacccctagcatagcgagctacagcgggaactgtagctaggccttagcgtgccttggatactgcctgatagggcgacggcctagtcgtgtcggttctataggtagcacatacaaat

SEQ ID NO: 806 - DNA, 666 bp, Enterovirus H
ttaaaatagctgctgggttgttcccatccagcaggcccactgggcgtgatactctggtattgcggtacctttgtatgcctattttacctcccttccccctgaaacttagaagaaagaaacaaacacgctcactaggtacactgcatccagcagtgtaatgagcaagcacttctgtttccccggaagggatatatggtacgctgtgcaaacggcggaaattaatcctaccgttaaccgcccatctactccgagaagcctagtacctaattgaacttatcaatggagttgcgctcagcaggtgaccctgacctgccagctccggctgatggacctgggcatcccccacaggcgactgtggcccaggtcgcgtggcggccggcccactcttttgagtgggacgccttgataatgacaaggtgggaagagcctattgggctagctggtttcctccggcctcctgaatgcggctaaccctaaccccggagcatatggtggcaacccagccactggtatgtcgtaacgcgtaagtctgggatgggaccgactactttggagagtccgtgtttccattattttctttattgaatcttatggtgacaaattgggagttactcgggtgacgattgattattacttctgaaaacgtagagatatagaatcaacaca

SEQ ID NO: 807 - DNA, 667 bp, Unknown
  Description of Unknown: unclassified Rosavirus sequence
gggtttctctgccctgtgctttggacgcccgccatggcgttaaactggcaatccccccttttccctacccgtaactaagtttttcctcggtcctttaggctgctaagacgcttgttgctacagcatattggaaccaccgagtcctccataagtaatcatttccacctctttgggtgtctatgcccttagagacggtttggagccccgttgactatgtcagagtgtgtcggtagcaggctttctgctctggacccatgccggccacacctcccagtagtgttgtgaaggaagtaagggattagtgaaaagattaggaatgttgccttggaatgtagcgattactgtaggtgagcggacttccccgggtggtaacacccgcctctcaggccaaaagccacggtgttaacagcacccctacagtaggccactaccccgtggtctccaagaatacagacctcttcttagtaactatccccctagctttcctgaagcatgctgctgtaaaggctaaggatgccctgaaggtacccgcaggtaacgttaagacactgtggatctgatcaggggcttgagtactgaagctttacagaagtagctcaagttaaaaaacgtctatgcctttcccccacgggagtgggggttcccccacacaatttcaacaggcact

SEQ ID NO: 808 - DNA, 667 bp, Mischivirus D
ttatttttcaaaatgccactggcattacaccatattcgtatggtgtaatgtcagtggttggatgctcagtcctgagggactgtgcatccagtggttaagagccacattctttatttatcaactattgatctttgtaactaagtttaagccagagttctattatggttccacatccagtgggattcagaacaagtacttctgttaccccggtcattattagctgttaagacgtacccacgtctgaaggctgagaagatcgttacccggctgttgtctacgggaaggttagtaacttttagtgaaaggtgatttcattgatccgagaggtgaccccgacctctcagaaactagtgatgagtgtccacatccctcttatggtaacataaggtggtcgctgcgctggcactagggcccaaaaggcatgaatgaaccaagatctgattgtgaagacccaactgtgcacttcagtattcctccggcccctgaatgcggctaatcctaacccatctgcatgtgcctacaacccagtaggtagcatgtcgtaatgcgtaagagatggatggaaccgactactttgggtgaccgtgtttcttttatttttatcaagtctcttatggtcacaagcatagaaaacaagatgcctgtgatcacacgtgagacatccaat

SEQ ID NO: 809 - DNA, 667 bp, Unknown
  Description of Unknown: Human parechovirus 17 isolate 157Chzj058, complete genome.1 sequence
cttgtttccactcattttattgcaagttgccttcaactagtggagaccaggcatgaggttaatgctataatcttagatgtttgttacagttgaggtttttattaacctcatgcctggtctccactagttgaaggcaacttgcaataaaatgagtggaaacaagacgcttaaagcatggtgtaaattagcttttctaacccacactttgtgtggggtggcagatggcgtgccataactctattagtgagataccacgcttgtggaacttatgctcacgcagccatcctctagtaagtctgtgagatgtctggtgacgtgtgggaacttattggaaacaacattttgctgtaaagcatcctattgccagcggaacaacacctggtaacaggtgcctctggggccaaaagccaaggtttaacagaccctttaggattggttcataacctgaaatgttgtggaagatacttagtacctaccgatctggtagtattgcagacactagttgtaaggcccacgaaggatgcccagaaggtacccgtaggtaacaagagacactatcgatctgatctggggccaggtacctctatcttggtggcctgttaaaaaaacgtttggggggccagcccggggggggtccccgggtttcttttatcttacaactgctata

SEQ ID NO: 810 - DNA, 668 bp, Unknown
  Description of Unknown: unclassified Picornaviridae sequence
ctgtctcttatacagatgtcagtcagccaacaggctggctgggatgtgcccattttggacgcatgcccccgcgagagtggggcaccttgggggcgggtgagccccccatgttcgccaggtgttactgtcggcccttttatagaggcttttgtgggtatcagaagccgtttttgggtttggtgatggcgaccagcattgtcttgctggttgtgactgtctttttctcctgtttcttttcttattatctccaggctgtctccatgccaatgctgctaccgctgcgcccggcggggttaacccctggattagccaggggctgtggccgctagaagtggagatgcggtgactaatgtagtgtcatgggtaattgatgaggtcatggctgtggtgtggattggtgatcttccattgggggtaggctacgggtgaaacccccacgattgcaccatactatgtatggtgtccggtggtacgtgaaccccctggataggtttgagttttacgacaagaaagcctcaacagggagcgcaggcacggtacgcgtggatgcgccctccactaagcagtcatgcatcatttgttgtctgtcacactactaagccgtaccctatgagtttagggctactcaggggcatttaggtttttaaagcgcatgttgtaaatcactt

SEQ ID NO: 811 - DNA, 671 bp, Parechovirus A
cgtcgggccttataccccgatttgctgagcttctctaggagagtccctttccccagccagaggtggctggtcaaataataccaattgtaacaaaacatctaagatacaacaaccacacacctggtctccaccagtcgaaggcaactagcaataagataggtgggttgagacgcttaaagtgtgtagtacatttacttttccaacctgtgctttgcacagggtggcagatggcgtgccataactctaatagtgagataccacgcttgtggaccttatgctcacacagccatcctctagtaagtttgcaagacgtctgatgacgtgtgggaacttgttggaaataatagtttgctgtaaagcatcccattgccagcggaatcacatctggtaacaggtgcctctggggccaaaagccaaggtttaacagaccctttgggattggttcaaacctgaactattatggaaaatatttagtacctgccgatttggtagtagtgcaaacactagttgtaaggcccacgaaggatgcccagaaggtacccgtaggtaacaagtgacactatggatctgatctggggccaactacctctatcttggtgagttggttaaaaaacgtctagtgggccaaacccgggggggaccccggtttccttttatttaataatgccact

SEQ ID NO: 812 - DNA, 672 bp, Unknown
  Description of Unknown: unclassified Picornaviridae sequence
gggagagcttattgctctcccgccgtcttgcctatctataggtccaatctgtgtgatattccctaattaattaggtttgtcagttttcagatggatataatagtcattaatttatatttaatcatattagttcaaagggctataacttacccctgaatagtaacaaaatataaaatactcggtaccgaccggggtccgatctaatactaattattatatgatttgaccttatgataagttcaagaagtttctcttgattccagataaacccccctggaatttccccttatctttttcatataataactagtaatttcggatgcataaatactagttgtaagtcaaggtataattattaaaccgaacatttaattacttattagcactaatgaatgcccccatataaatagttatgggtatgagttcgcgattttcaacaacgatgcatgatttagagtaatgttaataagtgattttattagtaaagttttctaatgtatatgtcggcagttgcctacaacacgttaacctctgtgttaaaacctcgatgatatgtttatccatagacttcgggcatatacttctaaagtatgcgtgttcttctgaaaactcggtatgattgtcgcatgagtaagatagcgttccaatcaattccttttaatttctttcacg

SEQ ID NO: 813 - DNA, 672 bp, Unknown
  Description of Unknown: unclassified Senecavirus sequence
ccctttttgaatggggggctgggccctcatgtccagcccttcctttccccttccggggggtaaaccggctgtgtttgctagaggcacagaggagcaacatccaacctgcttttgtggggaacggtgcggctccaattcctgcgtcgccaaaggtgttagcgcacccaaacggcgcatctaccaatgctattggtgtggtctgcgagttctagcctactcgtttctcccctgctcactcatttacacacaaaaactgtgttgtaactacaagatttggccctcgcacgggatgtgcgataaccgcaagactgactcaagcgcggaaggcgctgtaaccacatgctgttagtccctttatggctgcgagatggctatccacctcggatcactgaactggagttcgaccctccttagtaagggaaccgagaggccttcccgcaacaagctccgacacagagtccacgtgattgctaccaccatgagtacatggttctcccctctcgacccaggacttctttttgaatatccacggctcgatccagagggtggggcatgatccccctagcatagcgagctacagcgggaactgtagctaggccttagcgtgccttggatactgcctgatagggcgacggcctagtcgtgtcggttctataggtagcacatacaaat

SEQ ID NO: 814 - DNA, 672 bp, Enterovirus C
tttaaaacagcttgagggttgttcccaccctcaaggcctactgggcgctagtacaccggtatctcggtacccttgtacgcctgttttatcttccctccccaaaagtaactttagaagcaagtaaactcacagctcaatagccgtcgcaccgccagtgcgactatgagcaagcactcctgtttccccggttgcgtcctatatgctgtggaaacggcagaaggggacaatatcgttacccgcttatctactacgggaagcctagtaacaccattgaacactttgagggttgcgttcagcgccaaacccggcgtagctcaggccgatggggcttcggaatccccacgggtgaccgtgtcgaagcccgcgttggcggcctgcccacaccaatgggtgtgggacgctcaatttgtgacatggtgcgaagagcctactgtgctaggtgagagtcctccggcccctgaatgtggctaatcccaaccaccgaacccgtggttgcaatccagcaactagcgggccgtaatgcgcaagtcggtgacggaaccaactactttgggtgaccgtgtttcctttatctcttatattgcaattttatggtgacatttatagtatttaagtgttaccatatattgcgcaaacatattgtaataatacagagttactactgcagaaatc

SEQ ID NO: 815 - DNA, 673 bp, Harkavirus A
taaaaggggacgcggtgtggcagctttggctgtcatgccgtgttctccttttaccccaaggactagccttgggggttttccaaattcctttccctgtaggctttacttctctttatctatcttttctgtaactaagttttgcctattctaaaaatattttagaatgtgtttggatgtaactaagtttgtgcctgccctaaaaatattttagggcttgtttggataacctcgtcccttgtgttcagtgccgcacaatttgctaggcactgttcacttcctttgtttgtccattatgtatgctaaggtatgaattccatcatatgcttagcctctacatgcataatcttattccctccctggtgcaaactacgcccccaacatatgtgaatcttttaagcatattcctgaccccacacatatatatgtgttctcgtgaattcccccaccgtgaggtggtcacttggacgtggtgtgtgtcacacagcatatatatgatgcaggatgttgtttttaagataagcatatgtccttagtgctttgcatcatttcctccacaccccgtgaatgcggctaatcttaaccctgttgggtccgtgggtaaaccaacccattaaccacaggacggaaccgactactttcgggagtgtgtgtttctttttcttcttttgtcact

SEQ ID NO: 816 - DNA, 673 bp, Unknown
  Description of Unknown: unclassified Enterovirus sequence
agggcccacgtggcgtagtactctggtatcacggtacctttgtacgcctattttacccccccttccccattgtaacttagaagataatcaaacagttcaatagtcgggctgccacccaggtagcttactgaacaagcacttctgttaccccggtcttagtacctgagaagctgtacccacggcggaaggggaaagtgatcgttacccggctatctacttcgagaagcctagtaacaccattgaacttgctgagtgttgcgctccacacagtaaccccctgtgtagctttggctgatgagtctgggcattccccactggcgacagtggcccaggctgcgttggcggccaaccgatccaggcaactgggtcggacgctgagtaacggacatggtgtgaagagcctattgagctagatagtagtcctccggcccctgaatgcggctaatcctaaccccggagcaggtacgcacaatccagtgtggagcctgtcgtaatgcgtaagtccgggacggaaccgactactttgggtgtccgtgtttcctgttttatttaccttggctgcttatggtgacaaactagtgttgtcatcatatagcgtttggattggccatccggttttgtacacgagtgtttcactacccgagactctatcacctctaccttattgagaaaa

SEQ ID NO: 817 - DNA, 675 bp, Unknown
  Description of Unknown: unclassified Enterovirus sequence
gtattggtactggtttatactcccttcccctgtaacttagaagatataaaccaagttcaatagaagggggtacaaaccagtaccaccacgaacaagcacttctgtttccccggtaaagttgcatagactgtacccacggttgaaggcgactgatccgttatccgctcttgtacttcgagaagcctagtaacatcttggaatcttcgatgcgttgcgctcatcactcaaccccagagtgtagcttaggtcgatgagtctggacattccccaccggtgacggtggtccaggctgcgttggcggcctacctgtggtccaaagccacaggacgctagttgtgaacaaggtgtgaagagcctattgagctacaagagagtcctccggcccctgaatgcggctaatctcaaccacggagcaagtgctcacaaaccagtgagtggcttgtcgtaacgggtaactctgtggcggaaccgactactttgggtgtccgtgtttccttttatttttataatggctgcttatggtgacaatcacagattgttatcataaagcgaattggattggccatccggtgaaagtgagatatattatttatctttttgttggatttactccgattacttctttcacttacaaaatcatcaccacagttttgctaattagaaatacataccata

SEQ ID NO: 818 - DNA, 679 bp, Unknown
  Description of Unknown: unclassified Enterovirus sequence
ggtacctttgtgcgcctgttttatactcccttccccgagtaactttagaagcaattcaacaagttcaatagagggggtgcaatccagcgccaccacaacaagcacttctgtctccccggtgactttacataagctgtacccacggctgaaagtgaatgatccgttatccgcttgtgtacttcgagaagcctagtaccaccttggaatctccgacgcgttgcgctcagcactctaccccgagtgtagcttaggttgatgagtctgggcattccccaccggcgacggtggcccaggctgcgttggcggcctacccatagctaacgctatgggacgctagttgtgaacaaggtgtgaagagccgattgagctactcaagagtcctccggcccctgaatgcggctaatcccaaccacggagcaagtgccttcaaaccagagggtggcttgtcgtaatgcgcaagttcgtggcggaaccgactactttgggtgtccgtgtttccttttattccattactggctgcttatggtgacaatcatagattgttatcataaagcgacttggattggccatccggtgaaatataaacacattgtctacttgtttgtcgggtttaccccactcactcagtccaccctcagcataataaacattgtgtcactgataagatattactactaca

SEQ ID NO: 819 - DNA, 682 bp, Enterovirus B
ggtacctttgtgcgcctgttttatatacccttccccctctacagtaacttagaagtttgaatcatacggtcaatagacaacccagtgcaccagctgggccctgaccaagcacttctgttgccccggaccgagtatcaataagctgctcacgcggctgaaggagaaaacgttcgttacccggccatttacttcgagaaacctagtaacaccatgaaggtagcgcagcgtttcgctccgcacaaccccagtgtagatcaggtcgatgagccaccgcactccccacgggtgaccgtggcggtggctgcgttggcggcctgcccatggggcaacccatgggacgcttcaatactgacatggtgcgaagagtctattgagctaaatggtagtcctccggcccctgaatgcggctaatcccaactgcggagcagatacccacacaccagtgggcagtctgtcgtaacgggcaactctgcagcggaaccgactactttgggtgtccgtgtttccttttattctcacattgactgcttatggtgacaattgaaagattgttaccatatagctattggattggccatccagtgacaaacagagcaattgtgtatctttttgttggtttcataccactgaactgcaaagttttgaaaacccttgacctcattttgctactcaacacaacaaa

SEQ ID NO: 820 - DNA, 683 bp, Unknown
  Description of Unknown: unclassified Kobuvirus sequence
tttgaaaagggggtggggggggcctcggccccctcaccctcttttccggtggccacgcccgggccaccgatacttcccttcactccttcgggactgttggggaggaacacaacagggctcccctgttttcccattccttcccccttttcccaaccccaaccgccgtatctggtggcggcaagacacacgggtctttccctctaaagcacaattgtgtgtgtgtcccaggtcctcctgcgtacggtgcgggagtgctcccacccaactgttgtaagcctgtccaacgcgtcgtcctggcaagactatgacgtcgcatgttccgctgcggatgccgaccgggtaaccggttccccagtgtgtgtagtgcgatcttccaggtcctcctggttggcgttgtccagaaactgcttcaggtaagtggggtgtgcccaatccctacaaaggttgattctttcaccaccttaggaatgctccggaggtaccccagcaacagctgggatctgaccggaggctaattgtctacgggtggtgtttcctttttcttttcacacaactctactgctgacaactcactgactatccacttgctctcttgtgcctttctgctctggttcaagttccttgattgtttttgactgcttttcactgcttttcttctcacaatccttgctcagttcaaagtc

SEQ ID NO: 821 - DNA, 683 bp, Foot-and-mouth disease virus
cccccccataaagaacgttaccgtcttttccgacgttaaagggatgcaaccaaacgcctcttaccgtcctttccgacgttaaaggattgcaaccatacgacttgccttcttttccgaagtaaaaggatacaagcatacagttttgcccgttttcatgagaaatgggacgtccgcgcacgaaacgcgccgttgctctttgcattcttgtacaaacacgatcttgacgcaggaatcctagaccaacccaacccgtgcaactgcgagtttcgcccggtctttccgggtcttgagagacaaacagatgtactgagaccaactccacgattggtctactagcgggtactagtaacactcattttgcttcgtagcggagcacatgagcggtggggactcccccatggtaacatggacccaccgggccaaaagccacgcctcacggcctcatgtgtgtgcaaccccagcacggcaacttgtttgtgaaccacaccttaaggtaacactgagactggtacttggtttctggagacaggctaaggatgcccttcaggtaccccgaggtaacacgagacactcgggatctgagaaggggaccgggagttctatcaaactgcccgatttaaaaagcttctatgcctgaataggtgaccggaggccggcaccttttctttattttaaaccacttt

SEQ ID NO: 822 - DNA, 685 bp, Hepatovirus A
cttttggagttctttggtctggggaactaaaataccagacccgcgtttgcctagcgatataggctttaattgttgtttgtcattgtgcgtttgatatgtgttttaatgtaaataataattctagcaggttctagttcttgatcatgtcctctttaaggcactcatttcaacttgctatctttcttttcttccttggttctccctacaccaaatgcactggccgctgcgcccggcggggtcaaccacatgattagcatgtggctgtaggtgttgaaggctgggacatgaacatcaatggaatagtgcgcatgcttactggggtccattgaagtagtgggatctttctattggggtaggctacgggtgaaaccccttaggttaatactcatattgagagataccttggataggttaactgtgctggatatggttgagtttaacgacaaaaagccatcaacagctgtggacagaacctcatccttagattgctcactatggatatgtgctctgggcgtgtttcttgcatgatggccattggtcaattcatgcctgggccaatgtaggattagccttaaattactttttaaaagtagcctcatttagctggactaatggtggggcgtatgatcctgcatttggcctctggggtaatcaggggcatttaggtttccacataatagcaaat

SEQ ID NO: 823 - DNA, 686 bp, Enterovirus C
caccccagaggcccacgtggcggccagtactctggtatcacggtacctttgtacgcctgttttatatcccttccccatgtaactttagaagcaattcacatagttcaatagagggggtacaaaccagtgccaccacgaacaagcacttctgtttccccggtgaagctgtatagactgtccccacggtcaaaaacggcagatccgttatccgctcatgtacttcgagaagcctagtagcatcttggaatcttcgatgcgttgcgttcagcactctaccccgagtgtagcttaggtcgatgagtctgggcataccccaccggcgacggtggcccaggctgcgttggcggcctacccatggctaacgccatgggacgctagttgtgaacaaggtgtgaagagcctattgagctacatgagagtcctccggcccctgaatgcggctaatcctaaccacggagcaagtactcacaacccagtgagcagcttgtcgtaacgcgtaagtctgtggcggaaccgactactttgggtgtccgtgtttccttttatttttgatatggctgcttatggtgacaatcaaagattgttatcatatagcttttggattggccatccggtgatttttgagactataacgtttacttgccttaccacacaacttagtactttgctacattcacacagtcata

SEQ ID NO: 824 - DNA, 687 bp, Enterovirus B
tggtatcacggtacctttgtgcgcctgttttatctacccctccccaatgtaatttagaagcatatgaaaagcggtcaatagccggctcagtatgccaactgagtcttgaccaagcacttctgttaccccggactgagtatcaataagctgctcgcgcggctgaaggagaaaacgttcgttacccggccaattacttcgagaaacccagtaccaccatggaggttgcgcggcgtttcgctccacacaaccccagtgtagatcaggtcgatgagtcaccgcgttccccacgggcgaccgtggcggtggctgcgttggcggcctgcccatgggttagcccatgggacgcttcaatactgacatggtgcgaagagtctattgagctaattggtagccctccggcccctgaatgcggctaatcctaactgcggagcagacgcctacatgccagtgggtagtctgtcgtaacgggcaactctgcagcggaaccgactactttgggtgtccgtgtttccttttatctttgtattggctgcttatggtgacaattgaaagattgttaccatatagctattggattggccatccagtgacaaacagagcgattgtttactcatttataggttttgtaccacttgactacaaggccctaatcactctcaattatatattgatactaaatacgacaaa

SEQ ID NO: 825 - DNA, 687 bp, Unknown
  Description of Unknown: unclassified Enterovirus sequence
tggtatcacggtacctttgtgcgcctgttttatttaccctctccccagtgtaacttagaagcacgcttcatgcggtcaataggcggctcagtataccaactgagtctcgaccaagcacttctgttaccccggaccgagtatcaataagctactcacgtggctgaaggagaaaacgtccgttacccggccaactacttcgagaaacctagtaccaccatgaatgttgcgcggcgtttcgctccgcacaaccccagtgtagatcaggtcgatgagtcaccgcatccctcacgggcaaccgtggcggtggctgcgctggcggcctgcctatggggcaacccataggacgcttcaatacggacatggtgagaagagtctattgagctagttggtagtcctccggcccctgaatgcggctaatcctaactgcagagcagattcccacacgccagtgggtagtctgtcgtaacgggcaactctgcagcggaaccgactactttgggtgtccgtgtttccttttattcttgtactggctgcttatggtgacaattgaaagattgttaccatatagctattggattagccacccagtgtctaatagagcaattatttatctttttgttggatttatcccacttgactataaagcacttgtaacgctcaagtatattatagatctcaacacaacaa

SEQ ID NO: 826 - DNA, 689 bp, Enterovirus C
ttcccactccagaggcccacgtggcggctagtactctggtattgcggtacctttgtacgcctgttttataccccctccccaagtaactttagaagcaattcacaaagttcaatagagggggtacaaaccagtaccaccacgaacaagcacttctgtttccccggtgaagctacatagactgtccccacggtcgaaggtggcagatccgttatccgctcaagtacttcgagaagcctagtaccaccttggaatcttcgatgcgttgcgctcagcactctaccccgagtgtagcttaggtcgatgagtctgggcatgccccaccggtgacggtggcccaggctgcgttggcggcctacccgtggctaacgccatgggacgctagttgtgaacaaggtgtgaagagcctattgagctacttgagagtcctccggcccctgaatgcggctaatcctaaccacggagcaagtgctcacaaaccagtgagtggcttgtcgtaacgcgtaagtctgtggcggaaccgactactttgggtgtccgtgtttccttttattttcattatggctgcttatggtgacaatctaagattgttatcatatagcttttggattggccatccggtgatttgaaagagatatatttaccttattgttctaccatatctaattactcatcacagccacataatcaca

SEQ ID NO: 827 - DNA, 689 bp, Unknown
  Description of Unknown: unclassified Enterovirus sequence
gacagttgggtagcattgtgcgcctgttttatacaccctttcccacaatgcaacttagaattataactaaaccggccaatagaaagctcggcaaaccagccgagttctggtcaagcacttctgttgccccggactgagtatcaataagctgctcgcgcggctgaaggagaaaacgttcgttacccgaccaactacttcgagaaacccagtatcaccatgaaagctgcgtagcgtttcgttccgcacaaccccagtgtagatcaggccgatgagtcaccgcaatccccacgggcgaccgtggcggtggctgcgctggcggcctgcccatggggcgacccatgggacgcttcaataccgacatggtgtgaagagtctattgagctagttggtagtcctccggcccctgaatgcggctaatcccaactgcggagcagacgcttgcataccagcaagtagtctgtcgtaacgggcaactctgcagcggaaccgactactttgggtgtccgtgtttccttttattttttatactggctgcttatggtgacaattgaaagattgttgccatatagctattggattggccatccggtgacgaacagagctatcatatactcttttgttgggtttgtcccattgaactacaaggcattgaataccctcaatttcattctagcactaaatacaataaa

SEQ ID NO: 828 - DNA, 691 bp, Unknown
  Description of Unknown: unclassified Cosavirus sequence
tggaatactgcaaagatgtcaccgtgctatacacggtctttgaaccacacaccggctacttggcacttgcagcgcagtaagtttattttccacttatccttgatttttagccgtacagtttctctctgcatgggcggcgtgatactcccgttccttcttggacagattgcctccgcgttctctgtggatctcaaggtggtcaagtcactggtgagtagagcgaaggttaaggagatctgaggcattcccacgtggcgttgccgggagttgtagcaatgctgcgtgtgtgtacggatctcgcctcatggcgtcatgagcctcacacgccaaaagctctgtccgagaggacctacacagtcgagcaaccctagctccttcctacaaagccttgtgtgaatgagctcacgtttactcaactttattctctactcacatcaggcgccaaagatgtcttgaaggtacctcgtgtatctgggcacgagcaccatcgactacccggacttgcacttcggtgcagacacatgtggtgtcccagcccccttgctccggcaagggggctctgctcgctcagcacgagatctgatcaggagtctcccccggtgtaaagcaccttgacagggatttaaaaattgaccaaggccttgcacacaacctaggggactaggttttcctttttatttacaaggttttc

SEQ ID NO: 829 - DNA, 693 bp, Enterovirus A
gttgtacccactcacagggcccactgggcgttagcactctggtaccccggtacctttgtgcgcctgttttatatccccccaagtaatgcacctcgatcaatagcgggcgtggcgcaccagccacgtcatgatcaagcacttctgtttccccggaccgagtatcaatagactgctaacgcggttgagggagaaaacgtccgttacccggccaactgcttcgagaaatccagtaacatcatgaaaattgcagagtgtttcgctcagcacttccccagtgtagatcaggtcgatgagtcaccgcgttccccacgggcgaccgtggcggtggctgcgttggcggcctgcctgtggggcaacccgcaggacgctctaatatggacatggtgtgaagaatctattgagccagttggtagtcctccggcccctgaatgcggctaatcctaactgcggagcacgcgccttcaatccagtgggtagcgtgtcgtaatgggtaactctgcagcggaaccgactactttgggtgtccgtgtttccatttattcttacattggctgcttatggtgacccatatagctattggattggccatccggtatcgaatagagcgattatctatcagtttgttggatttattccgttgagtgtgcagcagtatcgcactttgcttttaatagtgagactgaatagtgcaaa

SEQ ID NO: 830 - DNA, 693 bp, Enterovirus A
ctgattctgcggaatctttgtgcgcctgttttatactccctcccccaacacagtaacttagaagtcataaactcacatgaccaatagtgggcatgacgcaccagtcatgtctcggtcaagcacttctgtctccccggactgagtatcaataagctacttgcgtggctgaaggagaaaacgttcgttatccggctaactacttcgagaagcttagtagcaccatgaaagttgcggagtgtttcgctcagcacttcccccgtgtagatcaggtcgatgagtcactgcgttcctcacgggagaccgtggcagtggctgcgttggcggcctgcctatggggcaacccataggacgctctaatatggacatggtgtgaagagcctattgagctagttagtggtcctccggcccctgaatgcggctaatcctaactgcggagcacataccctcaacccagggggcagtgtgtcgtaacgggcaactctgcagcggaaccgactactttgggagtccgtgtttccttttattcttatattggctgcttatggtgacaattgagagattgttaccatatagctactggattggccacccggtgtctaatagagccctggtttaccaatttattggatttgtgcctttatcacccacagtttattcaaccttagtatttttgatatatcttaacaataggcg

SEQ ID NO: 831 - DNA, 693 bp, Enterovirus C
tacgttatcgcggtacccttgtacgcctgttttatactcccttcacccgtaacttagaagcaagcaaaccaagttcaatagaagggggtacaaaccagtaccaccacgaacaagcacttctgtttccccggtgaggttgcatagactgtacccacggtcaaaagcgattgatccgttatccgctctagtacttcgagaagcctagtatcaccttgggatcttcgatgcgttgcgctctgcactcgaccccggagtgtagcttaggtcgatgagtctggacacccctcaccggtgacggtggtccaggctgcgttggcggcctacctgtggcccaaagccacaggacgctagttgtgaacaaggtgtgaagagcctattgagctaccagagagtcctccggcccctgaatgcggctaatcccaaccacggagcaagtgctctcaaaccagagagtggcttgtcgtaacgcgcaagtctgtggcggaaccgactactttgggtgaccgtgtttccttttatttttatcatggctgcttatggtgacaatctcagattgttatcataaagcaaattggattagccatccggtgaaagtcaaatcgattatttacttatttattggtttttctccactaacaccacaaacacttaaaattattgaaatagtgctgctaattagataccactatcata

SEQ ID NO: 832 - DNA, 694 bp, Unknown
  Description of Unknown: unclassified Enterovirus sequence
cgtcgaccggggagacagaagtgcttgaccttatacagctggtatgctgcttgctattggtctgtgtgcaaaacttctaagttaaaattgggtctgggttgctcccacccagatcacccacgtggtgttgtgctctgttattccggtaactttgcacgccaattttataaccccttcccccatgtaacttagaagttttgcacacagaccaatagcaagcagcataccagctgtataaggtcaagcacttctgtctccccggtcgacgttgatatgcttcaacaaggcaaaaacaacagagatcgttatccgcaagatgcctacacaaagcctagtacctcctttgacggtgtttgtctggtcgctcaggtgcttccccagcactagacctggcagatgaggctagaaactccccactggcgacagtgttctagcctgcgtggctgcctgcacacccttctgggtgtgaagccaaatactagacaaggtgtgaagagccccgtgtgctcatcttgagtcctccggcccctgaatgcggctaaccttaaacccgcagccattgctcacaatccagtgggtagatggtcgtaatgagcaattgtgggatgggaccgactactttgggtgtccgtgtttcatgttttactttatgatttgcttatggtgacaatatatagtgatatatattggcatc

SEQ ID NO: 833 - DNA, 694 bp, Enterovirus C
tccggtattacggtacccttgtacgcctgttttatactcccctcccccgtaacttagaaaacttcaaaatcaaagttcaataggagggggtacaaaccagtaccaccacgaacaagcacttctgtttccccggtgatgttgtatagactgtctccacggttgaaaacgactgatccgttatccgctctagtacttcgagaagcccagtaccaccttggaatcttcgatgcgttgcgctcagcactcaatcccagagtgtagcttaggttgatgagtctggacatccctcaccggcgacggtggtccaggctgcgttggcggcctacctgtggcccaaagccacaggacgctagttgtgaacaaggtgcgaagagcctattgagctactagagattcctccggcccctgaatgcggctaatcccaaccacggagcaggtactcacaacccagtgagcagcctgtcgtaacgcgcaagtctgtggcggaaccgactactttgggtgtccgtgtttccttttatttttatatggctgcttatggtgacaatcattgattgttatcataaagcgaattggattggccatccggtgaaagttagacttatcatttacttgtttgttggattcactcctttgactaaattcacccctgacatcatcttagttgtgatactgattaggagacttcatcata

SEQ ID NO: 834 - DNA, 695 bp, Enterovirus A
tctgattctgcggaatccttgtgcgcctgttttatatcccctttcccaatttgaaacatagaagtgatgcgcaccattgatcaatagtaggcgtaacgcgccagttacgtctcgatcaagcacatctgtttccccggaccgagtatcaatagactgctcacgcggttgaaggagaaagcgttcgttacccggctaactacttcgagaaacccagtagcaccatggaagctgcagggtgtttcgctcagcacttcccccgtgtagatcaggtcgatgagccactgcaatccccacgggcgaccgtggcagtggctgcgttggcggcctgcctatggggagacccataggacgctctaatgtggacatggtgcgaagagtctattgagctagttagtagtcctccggcccctgaatgcggctaatcctaactgcggagcacatgccttcaacccagaaggtggtgtgtcgtaacgggcaactctgcagcggaaccgactactttgggtgtccgtgtttcctttcattcttatatcggctgcttatggtgacaattacggaattgttaccatatagctattggattggccatccggtgtgtaatagagctattatatatctgtttgttggctttgtgccattaactttaaagtctacaactactcttgattttatattgaccctcaacacagttaaac

SEQ ID NO: 835 - DNA, 696 bp, Cardiovirus A
ttgccagtctgctcgatatcgcaggctgggtccgtgactacccactccccctttcaacgtgaaggctacgatagtgccagggcgggtactgccgtaagtgccaccccaaacaacaacaacaaaacaaactccccctccccccccttactatactggccgaagccacttggaataaggccggtgtgcgtttgtctacatgctattttctaccgcattaccgtcttatggtaatgtgagggtccagaacctgaccctgtcttcttgacgaacactcctaggggtctttcccctctcgacaaaggagtgtaaggtctgttgaatgtcgtgaaggaagcagttcctctggaagcttcttaaagacaaacaacgtctgtagcgaccctttgcaggcagcggaaccccccacctggtgacaggtgcctctgcggccaaaagccacgtgtataagatacacctgcaaaggcggcacaaccccagtgccacgttgtgagttggatagttgtggaaagagtcaaatggctctcctcaagcgtattcaacaaggggctgaaggatgcccagaaggtaccccattgtatgggatctgatctggggcctcggtgcacgtgctttacacgtgttgagtcgaggtgaaaaaacgtctaggccccccgaaccacggggacgtggttttcctttgaaaaccacgattacaat

SEQ ID NO: 836 - DNA, 697 bp, Enterovirus B
ctagcactccggtattgcggtacccttgtgcgcctgttttatcctccctccccctaacgtaatttagaagcaagactttaacggtcattaggtggctcagcacaccagccgagtcaagaccaagcacttctgttaccccggactgagtatcaataagctgctcacgtggctgaaagagaaaacgttcgttacccggccaattacttcgagaaacctagtaccaccatggaggttgcgcagcgtttcgctccgcactaccccagtgtagatcaggtcgatgagtcaccgcattccccacgggcgaccgtggcggtggctgcgttggcggcctgcccatggggaaacctatgggacgcttcaatactgacatggtgtgaagagtctattgagctaattggtaatcctccggcccctgaatgcggctaatcctaactgcggagcagacacccacaagccagtgagcagtctgtcgtaacgggcaactctgcagcggaaccgactactttgggtgtccgtgtttccttttattccattactggctgcttatggtgacaattgagagattgttaccatatagctattggattggccatccggtgagcaacagagcacttatatatctctttgttggattcataccactagacaccaggagttttacgtctttggtttatattttaaggttgaacacagcaaa

SEQ ID NO: 837 - DNA, 697 bp, Unknown
  Description of Unknown: unclassified Enterovirus sequence
aacagaagtgcttgaccattgacaatttggttaattgccgcctattggtcgttatgtactttcttctaagttacaaggggggggtgttaaaactggatctgggttgttcccactcaggtctcccacgtggagttgtactctattattccggtaatcttgtacgccagtttttacacccccccccttgtaacttagaagaaagtacataacgaccaataggcggcaattaaccaaattgtcaatggtcaagcacttctgtttccccggtcaagattgatacgctccaacagggcgaaaacaatcgagatcgttatccgcaaagtgcctacgcaaagcttagtaacattttggaaagtttatggttggtcgctcagctaaaccccatagtagacctggcagatgaggctagagactccccactggcgacagtgttctagcctgcgtggctgcctgcacaccctcacgggtgtgaagccatatactcgacaaggtgcgaagagccccgtgtgctcactttgagtcctccggcccctgaatgtggctaaccttaaccccgcagctagcgcatgcaaaccagtatgtagctagtcgtaatgagcaattgtgggatgggaccaactactttgggtgtccgtgtttcactttttaccttttatttgcttatggtgacaatatatatatagtatatattgacacc

SEQ ID NO: 838 - DNA, 697 bp, Unknown
  Description of Unknown: unclassified Enterovirus sequence
ggcaccttgcggataacgatcgctgttgtttttgccctgttggagcatatcaacattgaccggggaaacagaagtgcttgacctattaaaactggatctgggttgttcccacccagatcatccacgtgatgttgtgctctattattccggtaattttgcacgccagtttttcatccctttccctttgtaacttagaagattgaacaaatgaccaataggacgcaacaaaccagttgtaataggtcaagcacttctgtttccccggtcaatgttgatatgctccaacagggcaaaaacaacagcgatcgttatccgcaaggtgcctacgcaaagcctagtagcactcttgaaattgcttggttggtcgctcaggtgcaaacccagcactagacctggcagatgaggctagaaaatccccactggtgacagtgttctagcctgcgtggctgcctgcacacccatttgggtgtgaagccaaacaatggacagggtgtgaagagccccgtgtgctcatcttgattcctccggcccctgaatgcggctaaccttaaacctgcagccattactcacaatccagtgagttggtggtcgtaatgagtaattgcgggatgggaccgactactttgggtgtccgtgtttcactttttaccttattttatgcttatggtgacaatatattgtaatatatattgacacc

SEQ ID NO: 839 - DNA, 698 bp, Enterovirus A
ttaaaacagcctgtgggttgttcccacccacagggcccactgggcgctagtactctggtattacggtacctttgtacgcctgttttacaacccttcccccatgtaacttagaagcaacaaataaacgaccaatagcacactcaccaatccagatgagtgatggtcaagcacttctgttaccccgggcttagtaccaatagactgccatcgcggttgaaggggaaaacgctcgttatccggctctctactgcgagaagcctagtaacgccttagaaatgctcaagcgttgcgctcagcacaaccccagtgtagctcaggtcgatgagtcactgcattccccacgggcgaccgtggcagtggctgcgtttgcggcctgcctacagctctacgctgtaggacgcttgtgtatggacatggtgtgaagagcccattgcgctagggagtagtcctccggcccctgaatgcggctaatcctaaccccggagctggtgcttgtaaaccaacaagtggccagtcgtaatgggcaactctgggatggaaccgactactttgggtgtccgtgtttcctgttttatttaccttggctgcttatggtgacaatctagtgttgttgccatatagcgattggattggccatccggatattgttttagacacttgtgtttgtgagtagatctcttctgacataggatataaca

SEQ ID NO: 840 - DNA, 698 bp, Enterovirus D
ttaaaacagccttggggttgttcccactccaagggcccatgtggcggctagtactctggtacttcggtacctttgtacgcctgttttatctcccttcccaatgtaatttagaagctcttaaatcaaggctcaataggcggggcgcaacccagcgctctcatgagcaagcacttctgtctccccggtgtggttgtataaactgttcccacggttgaaaacaacctatccgttatccgctatagtacttcgagaaacctagtatcacctttggattgttgacgcgttgcgctcagcacactaacccgtgtgtagcttgggtcgatgagtctggacataccccactggcgacagtggtccaggctgcgttggcggcctactcatggtgaaaaccatgagacgctaaacatgaacaaggtgtgaagagtctattgagctactatagagtcctccggcccctgaatgcggctaatcctaaccatggagcaagcgctcacaagccagtgagttgcttgtcgtaatgcgcaagtccgtggcggaaccgactactttgggtgtccgtgtttcactttttacttttatgactgcttatggtgacaatttgatattgttaccatttagcttgtcaaattaattacaaaaggttctaaatcttacttaccaacctgcattttgataaccttgatttgaaaattttaata

SEQ ID NO: 841 - DNA, 699 bp, Enterovirus J
ttaaaatagcctcagggttgttcccaccctgagggcccacgtggcgtagtactctggtatcaaggtacctttgtacgcctattttatttcccttcccccacagtaacttagaagcttatctcatagttcaacagtagggtcactaaccaagtggctcagcgaacaagcacttctgtttccccggtcctagtacctgtgaagctgtacccacggcggaaggggaaaaagatcgttatccggccccctacttcggaaagcctagtaacaccattgaagcaatcgagtgttgcgctcagcacagtaacccctgtgtagctttggttgatgagtctgggcactccccactggcgacagcggcccaggctgcgttggcggccaaccgactcgggcaaccgggtcggacgctcgtttgtggacatggtgtgaagagcctactgagctagagggtagtcctccggcccctgaatgcggataatcctaaccccggagcacccacactcaatccagagtgcaggatgtcgtaacgcgtaagtctgggacggaaccgactactttgggtgtccgtgtttcctgttttacttactttggctgcttatggtgacaatctagtgttgttaccatatagctattggattggccatccggtgttttgaattgtgtgtttatactaattcttttacatatcacagacaaccaaat

SEQ ID NO: 842 - DNA, 699 bp, Unknown
  Description of Unknown: unclassified Enterovirus sequence
tagtactccggtatcgcggtacccttgtacgcctgttttatactcccttcccccgtaacttagaagcaatcaaaccaagttcaatagaagggggtacaaaccagtaccaccacgaacaagcacttctgtttccccggtgaggttgcatagactgtacccacggttgaaagcgactaatccgttatccgctcaagtacttcgggaagcctagtaccaccttcggatcttcgatgcgttgcgctcagcactcaaccccagagtgtagcttaggctgatgagtctggacattcctcactggcgacagtggtccaggctgcgttggcggcctacctgtggcccaaagccacaggacgctagttgtgaacaaggtgtgaagagcctactgagctacttgagattcctccggcccctgaatgcggctaatcccaaccacggagcaggtggtcataaaccaatggctggcctgtcgtaatgcgcaagtctgtggcggaaccgactactttgggtgtccgtgtttccttttatcttttcattggctgcttatggtgacaatcatagattgttatcataaagcaaattggattggccatccggtgaaaatcagagcgattatatatttgtttactggatttacatcactgacaccatactctccaatactcattaggttggttttattaataaggtattattaccata

SEQ ID NO: 843 - DNA, 700 bp, Enterovirus A
ttaaaacagcctgtgggttgtacccacccgcagggcccactgggcgctagtacactgatatcacggtacctttgtacgcctgttttatctccctacccccatcgtaacttagaagcttaacaatacagatcaatagcctctgcaccaaaccaggtgtggaatgatcaagcatttctgttaccccggacctagtaccaataggctgtgtcaaacggctgaaggggaaaaagttcgttacccggccacctacttcgagaagcctagtagcatcactgaagctgtgaagcgttacgatcagcacaaccccagtgtagttcaggtcgatgagtcactgcattccccacaggcgactgtagcagtggctgcgttggcggcctgcccttggtctctgaccaagggacgctttggagtggatatggtgcgaagagcctattgagctaggtggtagtcctccggcccctgaatgcggctaatcctaaccccggagctggtgcacacaaaccagtgtgtggccagtcgtaatgagcaattctgggatggaaccgactactttgggtgtccgtgtttcctgtttcacttaccttggctgcttatggtgacaattgtatagttgtcatcatatagctattggattggccatccggatattattcttgtgtttatttgtgtaatttgatataatttagaaccctgtataaga

SEQ ID NO: 844 - DNA, 702 bp, Enterovirus A
gcgttagcacactgattctacggaatctttgtgcgcctgttttataaccccttccccaagcagcaacttagaagcttcgcgccaccacgaccagtagtgggcgtgacacaccagtcacgttttggtcaagcacttctgtttccccggactgagtatcaatagactgctcacgcggttgaaggagaaaacgttcgttatccggccaactacttcgagaaacctagtagcatcgtggaagttgcggagtgtttcgctcagcacttcccccgtgtagatcaggtcgatgagtcactgtaaaccccacgggcgaccgtgacagtggctgcgttggcggcctgcccatggggcaacccatgggacgctctaatacagacacggtgtgaagagtctattgagctagttggtagtcctccggcccctgaatgcggctaatcctaactgcggagcgcgcaccctcaacccagggggcagtgcgtcgtaacgggtaactctgcagcggaaccgactactttgggtgtccgtgtttccttttattctctattggctgcttatggtgacaattgaaaagttgttaccatatagctattggattagccatccggtgaccaacagagctattatttacctgtttgttgggtatatccctctcactctcaaggccattcaaactcttaactatatattactccttaactgtaagag

SEQ ID NO: 845 - DNA, 704 bp, Cardiovirus A
tgtgctcttccgatctgggagatccagattgccagtctgctcgatatcgcaggctgggtctgtgactacccactccctctttcaacgtgaaggctacgatagtgccagggcgggtactgccgaaagtgccaccccaaagtacacaaccccccccgtacattactggccgaagccgcttggaataaggccggtgtgtgtctgtctacatgttatttctactacattgtcgtctatggcaatgtaagggcccggaacctggccctgtcttcttgacgaatattcctaggggtctttcccctctcgacaaaggaatataaggtctgttgaatgtcgtgaaggaagcagttcctctggaggcttcttgaagacaaacagtgtctgtagcgaccctttgcaggcagcggaaacccccacctggtaacaggtgcctctgcggccaaaagccacgtgtataagatacacctgcaaaggcggcacaaccccagtgccacactgtgcgttggatagttgcggaaagagccaaatggctctccttaagcgtattcaacaaggggctgaaggatgcccagaaggtaccccactagttgggatctgatctggggcctcggtgcacgtgctctacacgtgttgagtcgaggttaaaaaacgtctaggccccccgaaccacggggacgtggttttcctttgaaaaccacgatgacaat

SEQ ID NO: 846 - DNA, 704 bp, Enterovirus C
tagtactccggtatcacggtacccttgtacgcctgttttaaactcccttccctcgtaacttagaagcaaacaaaccaagttcaatagaaaggggtacaaaccagtaccaccacgaacaagcacttctgttgccccggtgatgtcgtatagattgtacccacggtcgaaaacgattgatccgttatccgcttttgtacttcgagaagcctagtaccaccttggaatcttcgatgcgttgcgctcggcactcaatcccagagtgtagcttaggtcgatgagtctggacataccccaccggtgacggtggtccaggctgcgttggcggcctacctgtggcccaaagccacaggacgctagttgtgaacaaggtgtgaagagcatattgagctacaaaagagtcctccggcccctgaatgcggctaatcctaaccacggagcaagggtgcacaaaccagtgtataccttgtcgtaacgcgtaagtctgtggcggaaccgactactttgggtgtccgtgtttcctgttattttttatcatggctgcttatggtgacaatcagagattgttatcataaagcaaattggattggccatccggtgagtgttgtgtcaagtatacaactgtttgttggaaccactgtgttagcttcacttctcatttaaccaattaatcaaaaacaatacgaggataaaacaataatactaca

SEQ ID NO: 847 - DNA, 704 bp, Enterovirus B
atgggcgctagcacactggtatcccggtacctttgtgcgcctgttttatctacccctccccaaacgtaacttagaagcacatcacacatggtcaacaggtggcacagtacaccaactgggccgtgaccaagcacttctgttaccccggaccgagtatcaatagactgctcgcgcggttgaaggagaaaacgttcgttacccggccaattacttcgagaaacccagtaccaccgtgaaggttgcgcagcgtttcgctccgcacaaccccagtgtagatcaggtcgatgagccaccgcattccccacgggtgaccgtggcggtggctgcgttggcggcctgcccatggggcaacccatgggacgcttcaatactgacacggtgcgaagagtctattgagctaattggtattcctccggcccctgaatgcggctaatcctaactgcggagcagatacccacaagccagtgggcagtctgtcgtaacgggtaactctgcagcggaaccgactactttgggtgaccgtgtttccttttattcttatattggctgcttatggtgacaattgaaagattgttgccatatagctattggattggccacccagtgacaaacagagctattgtttacctatttgttggctttataccactgaatcttaaagttttagaaactctcaacctgatcttattactcaattcggtaaa

SEQ ID NO: 848 - DNA, 705 bp, Enterovirus B
cacggggcgcaagcacactggtattacggtacctttgtgcgcctgttttacccacccttccccaatgaaatttagaagcttgacttaaacggtcagtagacaacccagtatgccaactgggtcccgaccaagcacttctgtctccccggactgagtatcaataggctgcttgcgcggctgaaggagaaaacgttcgttacccgaccaactacttcgagaaacctagtaccaccatgaacgttgcgcagcgtttcgctccacacaaccccggtgtagatcaggtcgatgagtcaccgcaatccccacgggcgaccgtggcggtggctgcgctggcggcctgcccatggggcaacccatgggacgcttcaacactgacatggtgcgaagagtctattgagctagttggtagtcctccggcccctgaatgcggctaatcctaactgcggggcagatacccacataccagtgggcagtctgtcgtaacgggcaactctgcagcggaaccgactactttgggtgtccgtgtttccttttatccttatattggctgcttatggtgacaattgaaagattgttaccatatagctattggattggccatccagtgagcaacagagcgatcatactcctctttgttgggtttataccacttgactacagcagttacaacaccttgttgtacatcgtttatttgaatacgagaaa

SEQ ID NO: 849 - DNA, 707 bp, Unknown
  Description of Unknown: unclassified Enterovirus sequence
aggctagtacaccgggtaccgtgataccggtgtactagcctgttttatactcccttcccccgtaacttagaagtaaataacacaagttcaatagaagggggtacaaaccagtaccaccacgaacaagcacttctgttcccccggtgaggtcacatagactgtctccacggttgaaagtgactgatccgttatccgctcttgtacttcgggaagcctagtagcatcttcggatcttcgatgcgttgcgctcagcactcaatcccagagtgtagcttaggtcgatgagtctggacatccctcactggcgacagtggtccaggctgcgttggcggcctacctgtggcccaaagccacaggacgctagttgtgaacaaggtgtgaagagcctactgagctacttgagagtcctccggcccctgaatgcggctaatcccaaccacggagcaaatgactgcaatccagcagttagtttgtcgtaatgcgtaagtctgtggcggaaccgactactttgggtgtccgtgtttccttttatattttatattggctgcttatggtgacaatcactgattgttatcataaagcgacttggattggccatccggtgaaaataagagttattatctacttatttgttggatttactccactatcaacctacacaccagagctcatacgcattgttatagtactaagaaatatacatcaca

SEQ ID NO: 850 - DNA, 707 bp, Enterovirus C
taaaacagctctggggttgttcccaccccagaggccacgtggcggccagtactctggtatcaaggtacctttgtacgcctgttttatatcccctcccccaagtaactttagaagcaattcaaacagttcaatagagggggtacaaaccagtaccaccacgaacaagcacttctgtttccccggtgaggctgtatagactgttcccacggttgaaaatggctgatccgttatccgctcatgtacttcgagaagcctagtatctccttggaatcttcgatgcgttgcgctcagcactctaccccgagtgtagcttaggctgatgagtctgggcataccccaccggtgacggtggcccaggctgcgttggcggcctacccatggctaacgccatgggacgctagttgtgaacaaggtgtgaagagcctattgagctacttgagagtcctccggcccctgaatgcggctaatcccaaccacggagcaagtgcctgcataccagcaggtagcttgtcgtaacgcgcaagtctgtggcggaaccgactactttgggtgtccgtgtttccttttattcttatcatggctgcttatggtgacaatctaagattgttatcatatagcttttggattggccatccggtgattgtttgatatttgaacacttgtttaccttatcttattacacaccaatttacatacctaacttcatt

SEQ ID NO: 851 - DNA, 708 bp, Enterovirus B
cccactgggcgctagcacactggtattacggtacctttgtgcgcctgttttatctaccctccccccaacgcaacttagaagcataacttaaatggtcaacagataactcagtatgccaactgagccctgaccaagcacttctgttatcccggactgagtaccaataggctgctcacgcggccgaaggggaaaccgttcgttacccggccaattacttcgagaaacctagtaccaccatgaaagttgcgcagtgtttcgctccgcacaaccccagtgtagatcaggtcgatgagtcaccgcaaaccccacgggcgaccgtggcggtggctgcgttggcggcctgcccatggggcaacccatgggacgcttcaatactgacatggtgcgaagagtctattgagctaattggtagtcctccggcccctgaatgcggctaatcccaactgcggagcagatacccacacaccagcgggcagtctgtcgtaatgggcaactctgcagcggaaccgactactttgggtgtccgtgtttccttttattctcatactggctgcttatggtgacaattgagagattgttaccatatagctattggattggccatccggttacaaacagagcaattatttacttatttgttggttttgtaccactgaactacagagtcctgaaaaccctcaatctcattataacactcaatacgttaaa

SEQ ID NO: 852 - DNA, 708 bp, Enterovirus B
gcccactgggcgttagcactctggtattaaggtacctttgtgcgcctgttttataatcccttcccaacttgcaacttagaagtaacacactatgaccaatagggggcgtggcaaaccagccatgccttggtcaagcacttctgtttccccggactgagtatcaataagctgtccacacggctgaaggagaaaacgtccgttacccggccagttacttcgagaaacctagtaccaccatgaaagttgcgtagcgtttcgctccgcacatccccagtgtagatcaggtcgatgagtcaccgcaatccccacgggcgaccgtggcggtggctgcgctggcggcctgcccatggggcaacccatgggacgctacaatactgacatggtgtgaagagtctattgagctaactggtagtcctccggcccctgaatgcggctaatcctaactgcggagcagatacccacacgccagtgggcagtctgtcgtaacgggcaactctgcagcggaaccgactactttgggtgtccgtgtttccttttattcatattttggctgcttatggtgacaattgagagattgttaccatatagctattggattggccatccggtgacaaacagagctatcatctatcttttcatcggcttcgtaccgctgaaccacaaagtatttaacaccctcaatttagtattggccttcaatatagcaaa

SEQ ID NO: 853 - DNA, 708 bp, Unknown
  Description of Unknown: unclassified Enterovirus sequence
ccactgggcgttagcacactggtatcacggtacccttgtgcgcctgttttatatacccttccccgtagagtaacttagaagcttgactacgacggtcaataggaaacccagtgcaccaactggggcgcgaccaagcactcctgtaaccccggactgagtatcaataagctgcttgcgtggctgaaggagaaaacgttcgttacccggccaattacttcgagaaacctagtaccaccatgaaagttgcgcagcgtttcgctccgcacaaccccagtgtagatcaggccgatgagtcaccgcattccccacgggcgaccgtggcggtggctgcgttggcggcctgcccatgggataacccatgggacgcttcaatactgacatggtgcgaagagtctattgagctaattggtagtcctccggcccctgaatgcggctaatcctaactgcggagcagacacccacaagccagtgggcagtctgtcgtaacgggtaactctgcagcggaaccgactactttgggtgtccgtgtttccttttatttctatactggctgcttatggtgacaattgaaaggttgttaccatatagctattggattggccatccggtgtctaacagagcaatcatttatttatttgttggattcgtacccctaaatcctaaagtctttaacactctcaacttcatattacgattaaatacagcaag

SEQ ID NO: 854 - DNA, 709 bp, Enterovirus B
gggcccactgggcgctagcactctggtattacggtacctttgtgcgcctgttttacgctccttcccccaagtgcaacttagaagccaaacaccacgaccaatagtaggcaaggcgcaccagccgtgtctcggtcaagcacttctgtctccccggactgagtatcaataaactgctcacgtggttgaaggagaaaacgttcgttacccggctaattacttcgagaagcctagtaacaccatggaggttgcgaggcgtttcactcagcacgcccccggtgtagttcaggtcgatgagtcaccgcgttccccacaggcgactgtggcggtggctgcgttggcggcctgcccatggggcaacccatgggacgcttcaatgtcgacatggtgtgaagagcctattgagctagttagcagtcctccggcccctgaatgcggctaatcctaactgcggagcacgcgcccccaacccagagggtagcgtgtcgtaacgggtaactctgcagcggaaccgactactttgggtgtccgtgtttctttttatcttttattggctgcttatggtgacaattgagagattgttaccatatagctattggattggccatccggtgacgaacagagctataatttaccaatttgtaggatttattccattaagtttgaaagccttaaagacccttagtttaatactattgctcaatagtgtaaa

SEQ ID NO: 855 - DNA, 709 bp, Enterovirus B
ggcccactgggcgccagcacactggtatcacggtacccttgtgcgcctgttttatttacccccccccaacgtaacttagaagcacaacctaatcggtcaatagataactcagtacaccaactgagtccagaccaagcacttctgttaccccggaccgagtatcaataagctgctcgcgcggctgaaggagaaaaggttcgttacccgaccaattacttcgagaaacccagtaccaccatggaagttgcgcagtgtttcgctccgcacaaccccagtgtagatcaggtcgatgagtcaccgcgttccccacgggcgaccgtggtggtggctgcgttggcggcctgcccatgaggtaacccatgggacgcttcaatactgacatggtgcgaagagtctattgagctaattggtagtcctccggcccctgaatgcggctaatcctaactgcggagcagatacctacacgccagtaggcagtctgtcgtaatgggcaactctgcagcggaaccgactactttgggtgtccgtgtttccttttattcttacattggctgcttatggtgacaattgagagattgttaccatatagctattggattggccatccagtgacaaacagagcgatcatctacttgtttgttggttttataccactaaattacaaagtcttaaacacactcaatttcattctgtcacttaatacattgag

SEQ ID NO: 856 - DNA, 710 bp, Cardiovirus A
ttgaaagccgggggtgggagatccggattgccagtctgctcgatatcgcaggctgggtccgtgactacccactccccctttcaacgtgaaggctacgatagtgccagggcgggtactgccgtaagtgccaccccaaaataacaacagaccccccccctaacgttactggccgaagccgcttggaataaggccggtgtgcgtttgtctatatgttattttccaccatattgccgtcttttggcaatgtgagggcccggaaacctggccctgtcttcttgacgagcattcctaggggtctttcccctctcgccaaaggaatgcaaggtctgttgaatgtcgtgaaggaagcagttcctctggaagcttcttgaagacaaacaacgtctgtagcgaccctttgcaggcagcggaaccccccacctggcgacaggtgcctctgcggccaaaagccacgtgtataagatacacctgcaaaggcggcacaaccccagtgccacgttgtgagttggatagttgtggaaagagtcaaatggctctcctcaagcgtattcaacaaggggctgaaggatgcccagaaggtaccccattgtatgggatctgatctggggcctcggtgcacatgctttacatgtgtttagtcgaggttaaaaaacgtctaggccccccgaaccacggggacgtggttttcctttgaaaaacacgatgataat

SEQ ID NO: 857 - DNA, 710 bp, Enterovirus C
ttaaaacagctctggggttgttcccaccccagaggcccacgtggcggctagtactctggtattgcggtacctttgtacgcctgttttatacccccttccccagtaactttagaagcaattcattcagttcaatagagggggtacaaaccagtaccaccacgaacaagcacttctgtttccccggtgaagccgtatagactgtacccacggttgaaaatggcagatccgttatccgctcatgtacttcgagaagcctagtatcatcttggaatcttcgatgcgttgcgctcagcactctaccccgagtgtagcttaggctgatgagtctgggcataccccaccggcgacggtggcccaggctgcgttggcggcctacccatggctaacgccatgggacgctagatgtgaacaaggtgtgaagagcctattgagctacttgagagtcctccggcccctgaatgcggctaatcctaaccacggagcaagcgcttacaaaccagtaagtagcttgtcgtaacgcgcaagtctgtggcggaaccgactactttgggtgtccgtgtttccctttatttttattgtggctgcttatggtgacaatctaagattgttatcatatagctattggattggccatccggtgatttgtcgagtttcaaacgcttgtttatttctccacaacacttgcctactcaatacatttacaaaccata

SEQ ID NO: 858 - DNA, 710 bp, Enterovirus D
tttaaacgcttctaaggttgtttacattgggggaggggagataaaaaccgtatttctgggtcttcggtacctttgtacgcctgttttatctccctccccaatgtaacttagaagctttcaaatcaaagctcaataggtggagcgcaaaccagcgctttcgtgagcaagcactcctgtttccccggtgcggttgtatagactgttcccacggttgaaaacaacctatccgttatccgctatagtacttcgagaaacctagtatcacctttggattgttgatgcgttgcgctcaacacactaacccgtgtgtagcttgggtcgatgagtctggacataccccactggtaacagtggtccaggctgcgttggcggcctactcatggtgaaaaccatgagacgctagacatgaacaaggtgtgaagagtctattgagctactatagagtcctccggcccctgaatgcggctaatcttaaccatggagcaagtgctcacaaaccagtgagttgcttgtcgtaatgcgcaagtccgtggcggaaccgactactttgggtgtccgtgtttcactttttacttttatgactgcttatggtgacaatttaatattgttaccattcagctagtcgaaataatcgcataaaactttaaatcctatctaacaattcacatttggatagtttcattttgaggactttaaacctacttacaaag

SEQ ID NO: 859 - DNA, 711 bp, Hepatovirus D
ttcaaagggtggtgggcggtttccccgccctcccctctttggatgcccatagtgcgggggtataaataccgcactccctttagctgttccgagggtatcggaacctatatgtttgttttctgtctgtctgtcagctttatgtgtgctcgtcccctttagggcactcatttcagcttgctttcattcttttcttccccggttctcaccttaccggaggcactggccgttgcgcccggcggggtcaacctagtgattagcactaggctgtaggtgtctaaagtggtgacattaagacttggtaactgatttcagcactgttaactgatgttggggatgacttgattgatcttctggaaggggtaggctacgggtgaaaccccttatcttaataccactatgtagagatagattcagtaggttaagggcagtggataaggttgagttcattttggacaataaaccttcaacactggtggacccaatctcactgaccagatgctttcttgactgatccttcagaggggtgattcttctgaataggttgccttgacactgatgcctgagacccattgggtcgggccttaaatcatggaactccactggactttcatggcctagcttctgccttagacagactctggggccccacgaccctctgggcccttcggggtactcaggggcatttaggtttttccacaattaaaagagtta

SEQ ID NO: 860 - DNA, 711 bp, Hepatovirus F
ttcaaagggtggctgggattttgtcccagcctccctttggagttccttggctctggggaactaaattaccaggcccgcgtttacctagcgcttaggttaaaacccccatcccttatttgtaaatattgatttctgcaggttcagagtttcttaatcatgttccctttaggacactcactccacttgctttcattcttgtttccgtggttctcccatcaccacaagcactgaccattgcgcccggtggggttaaccatatgattagcatatggctgtaggtgtttaagggtgggacaataatggaaggtcaaatagcaggcttgtttaacttccttttgtttcatctcatgtatctttctgaaggggtaggctacgggtgaaaccccttaggttaatactcatattgagagatacctgtggtaggttaattgccctggataaacttgagttgttagacaataaagtttcaacaggggtggacaagatctcaccaccagactggcatgttgtgggacatctgggaggcaagtttcttcctgtgatgttggcctttacatattgcctgggtgttaagaaggagcccttaaattcacttttctgtgagcctagcttccgctggacggactttgggggcagcatccttcttgatgcttctggggtactcaggggcatttaggtttttccacattataaatatatagatgaatagag

SEQ ID NO: 861 - DNA, 711 bp, Enterovirus C
ttaaaacagctctggggttgttcccaccccagaggcccacgtggcggctagtactctggtatcgaggtacctttgtacgcctgttttacaccccttcccctgtgcaactttagaagcaaatcacaaagttcaatagagggggtgcaaaccagcaccaccacgaacaagcacttctgtttccccggtgatgctgtatagactgttcccacggtcaaaaatggcagatccgttatccgcttgagtacttcgagaagcctagtaccaccttggaatcttcgatgtgttgcgctcagcactctaccccgagtgtagcttaggctgatgagtctgggcataccccaccggcgacggtggcccaggctgcgttggcggcctacccatggctaacgccatgggacgctagttgtgaacaaggtgtgaagagcctattgagctactcaagagtcctccggcccctgaatgcggctaatcctaaccacggagcaagtactcacaaaccagtgagcggcttgtcgtaacgcgtaagtctgtggcggaaccgactactttgggtgtccgtgtttccttttatttttattgtggctgcttatggtgacaatctaagattgttatcatatagcttttggattggccatccggtgattgttgagattatattactcatttgttttactacggttcttgcccaattgttacatttgcactaacata

SEQ ID NO: 862 - DNA, 711 bp, Enterovirus C
ttaaaacagctctggggttgttcccaccccagaggcccacgtggcggctagtacactggtatcacggtacctttgtacgcctgttttatatcccctcccccatgcaactttagaagtaattcaaatagttcaatagagggggtacaaaccagtaccaccacgaacaagcacttctgtttccccggtgaggctatatagactgttcccacggtcgaaggtggctgatccgttatccgcttgagtacttcgagaagcctagtaccacctttggatcttcgatgcgttgcgctcagcactctaccccgagtgtagcttaggctgatgagtctgggcataccccaccggcgacggtggcccaggctgcgttggcggcctacccgtggctaacgccatgggacgctagttgtgaacaaggtgtgaagagcctattgagctacttaagagtcctccggcccctgaatgcggctaatcccaaccacggagcaagtgctcacaaaccagtgggtggcttgtcgtaacgcgcaagtctgtggcggaaccgactactttgggtgtccgtgtttccttttatttttatcatggctgcttatggtgacaatctaagattgttgtcatatagcgtttggattggccatccggtgacttcgaaagcgatatatttgactcattgtcttactgaatttacctatttattacacttgtataacaata

SEQ ID NO: 863 - DNA, 711 bp, Enterovirus C
ttaaaacagctctggggttgttcccaccccagaggcccacgtggcggccagtactctggtattgcggtacctttgtacgcctgttttatatcccctccccaagtaactttagaagcaattcacaaagttcaatagagggggtacaaaccagtaccaccatgaacaagcacttctgtttccccggtgaagctgtatagactgttcccacggtcgaaaatggcagatccgttatccgctcacgtacttcgagaagcctagtatcatcttggaatcttcgacgcgttgcgctcagcactctaccccgagtgtagcttaggccgatgagtctgggcataccccaccggcgacggtggcccaggctgcgttggcggcctacccatggctaatgtcatgggacgctagttgtgaacaaggtgtgaagagcctattgagctacttgagagtcctccggcccctgaatgcggctaatcctaaccatggagcaagtgcccacaagccagtgggtggcttgtcgtaatgcgcaagtctatggcggaaccgactactttgggtgtccgtgtttccttttattcttattatggctgcttatggtgacaacctaagattgttgtcatatagcttttggattggccatccggtgatctttgagattaatataccttccttattacttcatagtactcatttattcattacactactgtagttaca

SEQ ID NO: 864 - DNA, 711 bp, Enterovirus D
ttaaaacagccttggggttgttcccacctcaagggcccacgtggcggctagtactctggtatttcggtacccttgtacgcctgttttatctccctccccaatgtaacttagaagctttcaaatcaaagctcaataggtggagcgcaagccagcgcttccgtgagcaagcactcctgtttccccggtgcggttgtatagactgttcccacggttgaaaacaacctatccgttatccgctatagtacttcgagaaacctagtatcacctttggattgttgatgcgttgcgctcagcacactaacccgtgtgtagcttgggtcgatgagtctggacataccccactggtgacagtggtccaggctgcgttggcggcctactcatggtgaaaaccatgagacgctagacatgaacaaggtgtgaagagtctattgagctactatagagtcctccggcccctgaatgcggctaatcttaaccatggagcaagtgctcacaaaccagtgagttgcttgtcgtaatgcgcaagtccgtggcggaaccgactactttgggtgtccgtgtttcactttttacttttatgactgcttatggtgacaatttaatattgttaccatttagctagtcaaattaatcacataaaaactttaaatcctatctaacaattcacatttggatagcttcattttgaggactttaaacctatttacaaag

SEQ ID NO: 865 - DNA, 711 bp, Enterovirus B
agggcccactgggcgctagcacactggtatcacggtacctttgtgcgcctgttttatttccccatccccgccgtaacttagaagtctcacttaagcggtcaatagatagcccagtaaaccaactgggttccgaccaggcacttctgttaccccggaccgagtatcaataggctactcacgtggccgaaggagaaaacgttcgttacccggccaattacttcgagaaacttagtaacaccatggaagttgcgcagtgtttcgctccgcacaaccccagtgtagatcaggtcgatgagtcaccgcgtaccccacgggcgaccgtggcggtggctgcgttggcggcctgcccatggggcaacccatgggacgcttcaataccgacatggtgcgaagagtctattgagctaattggtagtcctccggcccctgaatgcggctaatcctaactgcggagcagacgcctacgaaccagtgggtagtctgtcgtaacgggcaactctgcagcggaaccgactactttgggtgtccgtgtttccttttattcttacactggctgcttatggtgacaattgagagattgttaccatatagctattggattggccatccggtgacaaacagagctattgtttatctatttattggtttcataccactaaacttcaaggtcctaggaaccctcaatttaatattactacttaatagtgcaaa

SEQ ID NO: 866 - DNA, 712 bp, Aichivirus A
tcaccctcttttccggtggtccggacccagaccaccgttactccattcagcttcttcggaacctgttcggaggaattaaacgggcacccactcaccctctcccccctctcgtaaccaagtgtgtgcccaatctcttcactcctgctggcttcaccgaccagcagtgtccaaaatgctaggtgaacctcctccctcccccactgggctcttgcccagtttcctccccccagcctgacgtgtcacaggctgtacaaagaccccgcgaaagctgccaaaagtggcaattgtgggtcccccctttgtgaaggcgtcgagtctttctcccttaaggctagacccgccagtgaattctgtcgggcaactagtgacgccactgcatgcctccgacctcggccgcggagtgctgccccccaagtcgagcccctaagccacaagttgtgctgtctggcaaacactgtctgtgagaatgttccgctgcggctgccaagcctggcaacaggctgccccagtgtgcgtagttctcatccagacctcggtctggcaacttgctgttaagacacggcgtaaggggcgtgtgccaacgccctggaacgagtgtccactctaataccccgaggaatgctacgcaggtacccctggcccgccagggatctgagcgtaggctaattgtctaagggtattttcatttcccactctttttctcttgttcata

SEQ ID NO: 867 - DNA, 712 bp, Aichivirus A
tcacgcacttttccggtggtccggacccagaccaccgtcactccattcagcttcttcggaacctgttcggaggaattaaatgggcacccactcacccttcccctcttctcgtaactaagtgtgtgcccaatctcttgactcctactggctccaccgaccggtagtgtccaaaatgctaggtggacttcctcccttcccttctgggcatcttgcccagcttcctccccccagcctgacgtgtcacaggctgtgcaaagaccccgcgaaagctgccaaaagtggcaattgtgggtcccccctttgtcaaggcgtcgagtctttctcccttaaggctagtcccatcagtgaattctgatgggcaactagtgacgccactgcatgcctccgacctcggccgcggagtgctgccccccaagtcgtgcccctgaccacaagttgtgctgtctggcaaacattgtctgtgagaatgttccgctgtggctgccaagcctggtaacaggctgccccagtgtgcgtagttctcatccagacttcggtctggcaacttgttgttaagacacggcgtaaggggcgtgtgccaacgcccaggaacgagtgtccactctaataccccgaggaatgctacgcaggtacccctggtccaccagggatctgagcgtaggctaactgtctaagggtattttcatttcccactctctctttctcgttcata

SEQ ID NO: 868 - DNA, 712 bp, Limnipivirus A
tttaaatggtgaccttaaacgggaaatgcgttttccgttctttggatatccatttaacgtgtaccctatacgataattggggtggattctggatgcctagttccagtgattggttaagaactcgtttactacgtatagtatgattagcaaagtgctcgattgatcacgtaatgatctatgtggttaaaaacccagtagtatggtatatactcagtagtgtacactgtgagtacaactcttggcgtagagagaacaattcacccgaatccgtggcgtatccatggaaataagtttacctaattgtatgttacaaggcatatgagacatttatgagatatggtttattttgactaaacgagtgtagaggtggtggagtctatccaacttcaagccatgcaattgttgtgttgattgatatcattgaccatttttgtggattgtgtacacatacaatttgaaaattaaccccctcaagaataagacatgggaccattcgtggtagataccgtgctcggatgcttgagattagatgggttagactagttttggaatgagattgccgagaaagtcccgctagacatgttttacaagtcgtggtattccgctagactttttcgcagacacatggaagggtccatgtgttgtgcaattgcagggtgacagcccaactgcagagttttccttactagaataaaaatctgttgtcaatttt

SEQ ID NO: 869 - DNA, 712 bp, Enterovirus C
ttaaaacagctctggggttgatcccaccccagaggcccacgtggcggctagtactctggtattacggtacctttgtacgcctgttttatatcccctcccccaagtaactttagaagcaattcaaacagttcaatagagggggtacaaaccagtaccaccacgaacaagcacttctgtttccccggtgaagctgtatagactgttcccacggttgaaaatggcagatccgttatccgcttgagtacttcgagaagcctagtatcaccttggaatcttcgacgcgttgcgctcagcactctaccccgagtgtagcttaggtcgatgagtctgggcataccccaccggcgacggtggcccaggctgcgttggcggcctacccatggccaacgccatgggacgctagttgtgaacaaggtgagaagagcctattgagctacttaagagtcctccggcccctgaatgcggctaatcccaaccacggagcaagtgctcacaaaccagtgagtagcttgtcgtaacgcgcaagtctgtggcggaaccgactactttgggtgtccgtgtttccttttatttttactatggctgcttatggtgacaatctaagattgttatcatatagctgttggattggccatccggtgatttattgagatttaacgttcgcctgtttttcttactacatctacccaccagtttcactcatataacaaca

SEQ ID NO: 870 - DNA, 712 bp, Enterovirus C
cccacgtggcggccagtactccggtatcacggtacccttgtacgcctgttttatactcccttcccccgtaacttagaagcaatgaaaccaagttcaatagaagggggtacaaaccagtaccaccacgaacaagcacttctgtttccccggtgacgttgcatagactgtccccacggttgaaggcggctgatccgttatccgcttgtgtacttcgagaagcctagtaccatcttggaatctccgatgcgttgcgctcagcactcaaccccagagtgtagcttaggctgatgagtctggacattccccaccggcgacggtggtccaggctgcgttggcggcctacctgtggtccaaaaccacaggacgctagttgtgaacaaggtgtgaagagcctattgagctacatgagagtcctccggcccctgaatgcggctaatcccaaccacggagcaggtgtttgcaatccagcaaatagcctgtcgtaacgcgcaagtctgtggcggaaccgactactttgggtgtccgtgtttccttttattttcatactggctgcttatggtgacaatctcggattgttatcatagagcaaattggattggccatccggtgaaaatcagattgattatttaactttttgttggatttacatctttgacatcacatactccgaatctcattaagatagtgctcttgatacgacatcatcgtcatt

SEQ ID NO: 871 - DNA, 713 bp, Unknown
  Description of Unknown: unclassified Kobuvirus sequence
tcacgcacttttccggtggtccggtctcagaccaccgttactccattcagcttcttcggaacctgttcggaggaattaaacgggcacccactaaccccaacccccttctcgtaactaagtgtgtgcccaatctcttgactcctgctggaaccaccgaccagtagtgtccaaaatgccaggtggaaaatcctcccttcccctctgggctacatgcccagcatcctccccccagcctgacgtgccacaggctgtgcaaagaccccgcgaaagctgccaaaagtggcaattgtgggtcccccctttgtcaaggcgtcgagtctttctcccttaaggctagccccgtcagtgaactctgtcgggcaactagtgacgccactgcatgcctccgacctcggccgcggagtgctgccccccaagtcatgcccctgaccacaagttgtgctgcctggcaagcactgcccgtgagaatgttccgctgtggctgccaagcctggtaacaggctgccccagtgtgcgtagttctcatccagacctcggtctggcaacttgctgttaagacatggcgtaaggggcgtgtgtcaacgccctggaacgagtgtccactctaataccccgaggaatgctacgcaggtacccctggctcgccagggatctgagcgtaggctaattgtctaagggtattttcatttcccactctctctttcttgttcata

SEQ ID NO: 872 - DNA, 713 bp, Unknown
  Description of Unknown: unclassified Hepatovirus sequence
atttaaaccctctcccttttggacttctctagtctggggaagtaaaataccagactcccgtttgcctagggtataggctattatttatgtttgttttgttatgtttgtcttttaatgttttgtaaatattaattccagcaggttctggtttctgaatttgtcctctttaaggcactcataatgctttctttcatcttcatttccctggctctcaccttgccagatggactgacccatgcgcccgtgggggttaaccacaggactagcctgtggctgtaggttctgaaagaggtgacattaagactatggttgtgattccacatgttttaactggtatgatgtagtagcaattgatctttggtatggggtaggctacgggtgaaaccccataggttaatactaatatttagagatacctccagtaggtgaagtgcacaggataagattgagttattttgacaaaagatcttcaactgtggtggacaccatctcactgggccaatgcttttgttatgaaaccatattgggcatgtctcttggatgagcattcatggacactgatgcctagactagggtgaatattgccttaaatcatagagttctttgggattttatggccttgcttctgttgaacagacactggggcttatggtattcaccctggcctctggggtaatcaggggcatttaggttttccacatttatataatgct

SEQ ID NO: 873 - DNA, 713 bp, Unknown
  Description of Unknown: unclassified Senecavirus sequence
gctcctctgtgcctctagcaaacacagccggtttaccccccggaaggggaaaggaaggactgggcatgagggcccggccccccctttccccttccggggggtaaaccggctgtgtttgctagaggcacagaggagcaacatccaacctgcttttgtggggaacggtgcggctccaattcctgcgtcgccaaaggtgttagcgcacccaaacggcgcatctaccaatgctattggtgtggcctgcgagttctagcctactcgtttctcccctattcactcactcacgcacaaaaagtgtgttgtaactacaagatttagccctcgcacgggatgtgcgataaccgcaagattgactcaagcgcggaaagcgctgtaaccacatgctgttagtccctttatggctgcgagatggctatccacctcggatcactgaactggagctcgaccctccttagtaagggaaccgagaggccttcttgcaacaagctccgacacagagtccacgtgattgctaccaccatgagtacatggttctcccctctcgacccaggacttctttttgaatatccacggctcgatccagagggtggggcatgatccccctagcatagcgagctacagcgggaactgtagctaggccttagcgtgccttggatactgcctgatagggcgacggcctagtcgtgtcggttctataggtagcacatacaaat

SEQ ID NO: 874 - DNA, 713 bp, Enterovirus B
acagggcccactgggcgtcagcactctggtattgaggtacctttgtgcgcctgttttataaccctctccccatttgaaaattagaagcaatacacaatggtcagtagctggcatggcaaaccagtcatgttttgaccaagcacttctgtttccccggaccgagtatcaatagactgctcacgcggttgaaggagaaagcgttcgttacccgaccaactacttcgagaaacctagtaacgccatgaaagttgcagagcgtttcgctcagcacatccccagtgtagatcaggccgatgagtcaccgcattccccacgggcgaccgtggcggtggctgcgctggcggcctgcttgtggggcgacccacaagacgctccaaaacagacatggtgtgaagagtctattgagctagttggtagtcctccggcccctgaatgcggctaatcctaactgcggagcacgtgcctccaacccaggaggtggcgtgtcgtaacgggtaactctgcagcggaaccgactactttgggtgaccgtgtttccttttattcttatattggctgcttatggtgacaattgaaaggttgttaccatatagctattggattggccatccggtgacaaacagagcaattatatatctctttgttgggtatattccactcgattacaaggaattcagaactctcaattatatactgtctttaaactccgcaag

SEQ ID NO: 875 - DNA, 714 bp, Enterovirus C
ttaaaacagcctgtgggttgttcccaccccagaggcccacgtggcggctagtactctggtatcacggtacctttgtacgcctgttttatatcccttcccccgcaactttagaagcttaacaaaagttcaacagcaggggtacaaaccagtgcctctacgaacaagcacttctgtttccccggtgaaatcacatagactgtacccacggtcaaaagtgattgatccgttatccgcttgagtacttcgagaagcctagtatcaccttggaatcttcgacgcgttgcgctcaacactctaccccgggtgtagcttaggctgatgagtctgggtactccccaccggtgacggtgacccaggctgcgttggcggcctacccatggctaatgccatgggacgctagttgtgaacaaggtgtgaagagcctattgagctactcaagaatcctccggcccctgaatgcggctaatcctaaccacggagcaatcgctcacgacccagtgagtaggttgtcgtaatgcgtaagtccgtggcggaaccgactactttgggtgtccgtgtttcccttttttattcatattggctgcttatggtgacaatttacagattgttaccatatagctattggattggccatccagtattgtgtcatacatattaaaatacttttctacaagcaataacaacattgtatttgaaccacaatagccattacaa

SEQ ID NO: 876 - DNA, 714 bp, Enterovirus D
ttaaaacagcctgtgggttgttcccaccccagaggcccacgtggcggccagtactctggtatcacggtacctttgtacgcctgttttatatccccttcccccgcaacttagaagaaaacaaatcaagttcactaggagggggtacaaaccagtaccaccacgaacaagcacttctgtttccccggtgatgtcgtatagactgtaaccacggttgaaaacgattgatccgttatccgctcttgtacttcgaaaagcccagtatcaccttggaatcttcgatgcgttgcgctcagcactcaaccccagagtgtagcttaggtcgatgagtctggacactcctcaccggcgacggtggtccaggctgcgttggcggcctacctgtggtccaaagccacaggacgctagttgtgaacaaggtgtgaagagcctattgagctacaagagaatcctccggcccctgaatgcggctaatcctaaccacggagcaagggtacacaaaccagtgtatatcttgtcgtaacgcgcaagtctgtggcggaaccgactactttgggtgtccgtgtttccttttgtttttatcatggctgcttatggtgacaatctaagattgttatcatatagctgttggattggccatccggtaatttattgagatttgagcatttgcttgtttcttcaacaatttcacctattcattgcatttcagcagtcaaa

SEQ ID NO: 877 - DNA, 714 bp, Enterovirus B
cacagggcccactgggcgctagcactctggtattgcggtacctttgtgcgcctgttttatggcccccccccagttggaacttagaagtgaagcctctcgaccaatagtgggcgtggcacaccagccacgtcttggtcaagcacatctgtttccccggactgagtatcaataaactgctcgcgcggttgaaggagaaaacgttcgttacccggctaactacttcgggaaacccagtagtatcatggaaattgcgaggcgtttcgctcagcactccccccgtgtagatcaggtcgatgagtcactgcaccccccacgggtgaccgtggcagtggctgcgttggcggcctgcctatggggtgacccataggacgcttcaaaatggacatggtgcgaagagtctactgagctagttagtagtcctccggcccctgaatgcggctaatcctaaccgcggagcaagtgtccacaaaccagtgggttgcttgtcgtaatgggtaactctgcggcggaaccgactactttgggtgtccgtgtttccttttatcttttattatggctgcttatggtgacaattgagagattgttaccatatagctattggattggccatccggtgaacaacagagcgatcatttacctctttgttggtttcgttccattgagtcccaaagtttttacgacactcaaatttattctcctacttaacaaagcaaa

SEQ ID NO: 878 - DNA, 714 bp, Enterovirus B
cagggcccactgggcgccagcacactggtatcaaggtacctttgtgcgcctgttttgcttccctttttccccagaggcaacttagaagcaatactccacgaccaatagcaggcgtggcacaccagccatgtctcggtcaagcacttctgtggccccggactgagtatcaataaactgctcacgcggtcgaaggagaaaacgtccgttacccggctagctacttcgagaaacctagtaacgccatgaaaattgcgaggcgtttcgctcagcacatccccagtgtagatcaggtcgatgagtcaccgcattccccacaggtgactgtggcggtggctgcgttggcggcctgcccatggggtaactcatgggacgcttcaatacggacatggtgtgaagagtctattgagctagttagtattcctccggcccctgaatgcggctaatcctaactgtggagcatgcgcccccattccagagggtagcatgtcgtaacgggtaactccgcagcggaaccgactactttgggtgtccgtgtttccttttattttatcattggctgcttatggtgacaattgaaagattgttaccatatagctattggattggccatccggtgacgaacagagctataatttaccaatttgtgggatttgttcctataagtttgaaagtcttaaagacccttaatttaatattactactcaatagtgcaag

SEQ ID NO: 879 - DNA, 714 bp, Enterovirus C
tattaaaacagctctggggttgttcccaccccagaggcccacgtggcggccagtacactggtattacggtacctttgtacgcctgttttatatccccttacccagtaactttagaagtaattcacacagttcaatagagagggggtacaaaccagtaccaccacgaacaagcacttctgtttccccggtgaagctacatagactgtccccacggttgaaagtggcagatccgttatccgcttaagtacttcgagaagcctagtatcaccttggaatcttcgacgcgttgcgctcagcactctaccccgagtgtagcttaggctgatgagtctgggcataccccaccggcgacggtggcccaggctgcgttggcggcctacccatggctaacgccatgggacgctagttgtgaacaaggtgtgaagagcctattgagctacttaagagtcctccggcccctgaatgcggctaatcctaaccacggagcaagtgcccacaaaccagtgggtggcttgtcgtaacgcgtaagtctgtggcggaaccgactactttgggtgtccgtgtttccttttatttttatcatggctgcttatggtgacaatctaagattgttatcatatagctattggattggccatccggtgattcacagagacttgaaagctaactcaccttcctataacactcatttgtttatcaatcttatagcacaca

SEQ ID NO: 880 - DNA, 714 bp, Enterovirus B
ggcttaccaactatgcttacaccaggcagcacgcagtttttgacgtcagatgattttcaatcaccatcagctatgccacagtttgatgtgaccccagagatgaacattccagggcaagtgaggaacctgatggaaattgcggaagttgattctgtggtaccaatcaataacttgaaagctaatctgatgacgatggaggcttaccgggtgcaggttaggtccactgacgagatgggaggacagatatttggcttccccttacagccaggggcatcaagcgtgttacaaagaacactactgggagagatattaaattactacactcattggtcagggagcctcaagttaacatttgtgttctgtgggtcggcaatggcaactggcaaattcttactagcatactcaccacctggagcaggggcaccagacagcaggaagaacgctatgttagggacccacgtcatatgggacgttggactgcaatccagctgtgtgctctgtgtaccgtggatcagccagacgcactacaggtatgttgttgatgacaagtacacggctagtggtttcatttcgtgctggtaccaaactaatgtcatagtcccagctgaagctcagaaatcgtgctacataatgtgctttgtgtcagcatgcaacgatttctctgtacgcatgttgagggacacgcaattcattaagcaaacaaacttttatcag

SEQ ID NO: 881 - DNA, 715 bp, Hunnivirus A
tctttcccccctcccctttccctttacctcttgcaacgaaacagtttttgacaaggaccctcacctgtcaatcgggaccaccactttcagtgaccccgtgcgaagtgttgagagaaagtgagctttcttacccttcatttgtgaacccttcagtcgaagccgcttggaataagatggaaggaaatgttcattctaaatggagtgaaacatatacttaatttccagtgtttagtggtctttccactagacaacggcactgtcttgccggaactctacacaccaacattccacgcttgtgggactcaaatgttggatgacacagttgtagctggaactgagtgtttagtgcactctgtgtaacagtgaaaacaatgtgatcacttcggtgggctagtagcctgtggactaacaactggtaacagttgcctcaggggccaaaagccacggtgttaacagcaccctactagtttgattggagcaatccatgatgttacagagttagtaactgccaaacagattgtactggtatcttggcataccgtgcaacttaggatagtgaaggatgccctggcggtacccataggtaacaagtgacactatggatctaaacaggggctcactctacgttgctttacaactagctgtgagttaaaaaacgtctaactatccacaacctaggggactaggttttcctttttatttttatacacaacta

SEQ ID NO: 882 - DNA, 715 bp, Enterovirus C
ttaaaacagctctggggttgttcccaccccagaggcccacgtggcggctagtactctggtattacggtacctttgtacgcctgttttacactcccttccctacgcaactttagaagtttaacataaagttcaatagagggggtacaaaccagcaccaccacgaacaagcacttctgtttccccggtgaaactgcatagactgtaaccacggttgaaagcggttgatccgttatccgcttgagtacttcgagaagcctagtaccaccttggaatctccgatgcgttgcgctccacactctaccccgagtgtagcttaggccgatgagtctgggcgttccccaccggcgacggtggcccaggctgcgttggcggcctacccatggttaacgccatgggacgctagttgtgaacaaggtgtgaagagcctattgagctactcaagagtcctccggcccctgaatgcggctaatcccaaccacggagcgagtgctcacaatccagtgagtggcttgtcgtaacgcgcaagtctgtggcggaaccgactactttgggtgtccgtgtttccttttatttttactatggctgcttatggtgacaatctaggattgttatcatatagcttttggattggccatccggtgacttctaacgttcaagtagtttactcgcttaattttctaaacacattctcagttgttgaattataaacttcaca

SEQ ID NO: 883 - DNA, 715 bp, Enterovirus C
ttaaaacagcctggggttgttcccaccccagaggcccacgtggcggccagtactctggtattacggtacctttgtacgcctgttttatatcccctcccctgagtaactttagaagcaattcaaaaggttcaatagagggggtacaatccagtaccaccatgaacaagcacttctgtttccccggtgaggctacataaactgtacccacggttgaaagtggctaatccgttatccgctcaagtacttcgagaagcctagtaataccttggaatcttcgacgcgttgcgctcagcactctaacccgggtgtagcttaggtcgatgagtctgggcataccccaccggtgacggtggcccaggctgcgttggcggcctacccatggctaacgccatgggacgctagttgtgaacaaggtgtgaagagcctattgagctacttgagagtcctccggcccctgaatgcggctaatcctaaccacggagcaagtgctctcaaaccagagagtggcttgtcgtaacgcgtaagtctgtggcggaaccgactactttgggtgtccgtgtttccttttatttttatcatggctgcttatggtgacaatctaagattgttatcatatagcttttggattggccatccggttgttgtttagagcgtttcatctgtgctttgtttgtttgaccagatcaatataaacactacatcctatttgttcata

SEQ ID NO: 884 - DNA, 715 bp, Enterovirus B
acagggcccactgggcgttagcacactggtatctcggtacccttgtgcgcctgttttatacacccttcccccaaaagaaacttagaagcttgactataacggtcaataggaaacccagtataccagctgggttacgaccaagcacttctgtaaccccggactgagtatcaataggctgctcacgcggctgaaggagaaaacgttcgttacccggccaattacttcgagaaacctagtaccaccatgaaagttgcgcggcgtttcgctccgcacaatcccagtgtagatcaggtcgatgagccaccgcgttccccacgggtgaccgtggcggtggctgcgttggcggcctgcccatggggcaacccatgggacgcttcaatactgacatggtgcgaagagtctattgagctaattggtagtcctccggcccctgaatgcggctaatcctaactgcggagcagatacccacataccagtgggctgtctgtcgtaacgggtaactccgcagcggaaccgactactttgggtgtccgtgtttccttttattcttatactggctgcttatggtgacaattgagagattgttaccatatagctattggattggccatccggtgtctaacagagcgatcatctatctgtttgttggtttcatacccttgaattttaaagtcctcaacactcttaaccttgtgctacaactaaactcggtaaa

SEQ ID NO: 885 - DNA, 715 bp, Enterovirus C
tgttcccaccccagaggcccacgtggcggctagtactctggtatcacggtacctttgtacgcctgttttatacccccttcccccgcaacttagaagcatgaaatcttaagctcaacaggaggggtgcaaaccagcacctctacgagcaagcactactgtctccccggtgaggttacatagactgttcccacggttgaaagtagccgatccgttatccgctcatgtacttcgagaagcctagtattgctctggaatcttcgatgcgttgcgctcaacactcgaccccggagtgtagcttaggccgatgagtctggacattccccactggcgacagtggtccaggctgcgttggcggcctacctgtggtccaaagccacaggacgctagttgtgaacagggtgtgaagagcctattgagctacatgagagtcctccggcccctgaatgcggctaatcccaaccatggagcaggcaactgcaacccagcagtcagcctgtcgtaacgcgcaagtccgtggcggaaccgactactttgggtgtccgtgtttccttttatcttttgaatggctgcttatggtgacaatcatagattgttatcataaagcgaattggattggccatccagagaattactaccgtgtttattgagtctactcttgaaaaacctaactcctcaacgtactagaattatttgaagacaggatatcgacacgaca

SEQ ID NO: 886 - DNA, 716 bp, Unknown
  Description of Unknown: unclassified Hepatovirus sequence
ttcaagaggggtctccggagatttcctgagtccctcttgggagtccatggtgaggggacttgatacctcaccgccgtttgcctaggctataggctaaacttccctttcccctttccctttattgttgtaaatattaattcctgcaggttcaggtctcttggatttgttccactttatggacactcatttcacgctttctgtctgcttttcttccagggctctccccttgccctaggctctggccgttgcgcccggcggggtcaactccatgattagcatggagctgtaggagtctaaattggggacacagatgttgggaacgtcaccttgcagtgttaacttggctttcatgaagctttttgatcttccacaagaggtaggctacgggtgaaacctcttaagctaatacttctatgaagagatgctttggatagggtaacagcggcggatattggtgagttgtttgacaaaaaccattcaacgccggaggactggctctcatccagtggatgcattaagtggattgtctgtcagggctgtctctaggtttaattcctggcctctctgtgcttagggcaaacaaaacttggccttaaatgaggtcctgtgagaggggacctcgccattgaatgctggacatttctttggggccttatgttttgtttgcctctgaggtactcaggggcatttaggtttttcctcatcaataaataatt

SEQ ID NO: 887 - DNA, 716 bp, Unknown
  Description of Unknown: unclassified Hepatovirus sequence
ttcaagaggggtctccgggtttttccggagcccctcttgggagtccatggtgaggggacttgatacctcaccgccgtttgcctaggctataggctaattttcccttttccttttccctgtgttattgtaaatattaattcctgcaggttcagggttcttgaatttgttctgctgtacggacactcttttcacgctctctgtctgcttttcttccagggctctccccttgccctaggctctggccgttgcgcccggcggggtcaactccatgattagcatggagctgtaggagtctaaattggggacacagatgttgggaacgtcaccttgcagtgttaacttggctttcatgaaactccttgatcttccacaagaggtaggctacgggtgaaacctcttaagctaatacttctatgaagagatgctttggatagggtaacagcggcggatattggtgagttgtatgacaaaaaccattcaacgccggaggactggctctcatccagtggatgcattgagtgaattgactgtcagggctgtctttaggcttaattcctgacctctctgtgcttagggcaaacaaaatttggccttaaatgaggctctgtgagagggggcctcgccattgaatgctggacatttctttggggccttatgttttgtttgccgctgaggtactcaggggcatttaggtttttcctcatcaataaataaat

SEQ ID NO: 888 - DNA, 716 bp, Enterovirus J
aaaatagcctcagggttgttcccaccctgagggcccacgtggcgtagtactctggtatcacggtacctttgtacgcctattttacatcccttccccgtaacttagaagctttcaactataagttcactagcagggctaccaaccaggtagttcatcgaacaagcacttctgttaccccggtcctagtacctgagaagctgtacccacggcggaaggggaaaaagatcgttacccggctatctacttcgagaagcctagtaacgtcattgaaactcttgagcgttgcgttcagcacagtaccccctgtgtagctttggctgatgagtctgggcattccccactggcgacagtggcccaggctgcgttggcggccaaccgatccgggcaaccgggtcggacgctcatttgtggacatggtgtgaagagcctattgagctaggtagtagtcctccggcccctgaatgcggctaatcccaactccggagcaagtgcgcacaatccagtgtgtggcttgtcgtaatgcgtaagtctggagcggaaccgactactttgggtgtccgtgtttcctgtttttccttatttggctgcttatggtgacaatctagtgttgttaccatatagcgattggattggccatccggtgaatagctttgtgacaattccctacgttatttttcataactcaacttcacgagagtcattgagtttgactaatt

SEQ ID NO: 889 - DNA, 716 bp, Enterovirus B
cacagggcccactgggcgctagcacactggtatcccggtacctttgtgcgcctgttttataccccctttcccgctttgtaacttagaagtaacacaacttcggtcaatagtcgacgcaacaacccagttgcgttttgatcaagcacctctgtgaccccggactgagtatcaataggctgctcgcgcggctgaaggagaaaccgttcgttacccggctaactacttcgagaagcctagtagcatcatgaacgttgcggagtgtttcgctcagcacttcccccgtgtagatcaggtcgatgagtcaccgcgttccccacgggtgaccgtggcggtggctgcgttggcggcctgcctgtggggcaacccacaggacgctctaatacagacatggtgcgaagagtctattgagctagttagtagtcctccggcccctgaatgcggctaatcctaactgcggagcacattctcacaagccagtgagcggtgtgtcgtaacgggcaactctgcagcggaaccgactactttgggtgtccgtgtttccttttattctaatactggctgcttatggtgacaattgagagattgttaccatatagctattggattggccatccggtgtctaacagagcaattatttacctgtttgttggtttcacacccctaaatctcaaggttttaaataccctcaatttcgtactgaaactaaactcagtaaa

SEQ ID NO: 890 - DNA, 716 bp, Enterovirus D
cagccttggggttgttcccactccaagggcccacgtggcggctagtactctggtacttcggtacctttgtacgcctgttttatctcccttcccaatgtaacttagaagttcttaaatcaatgctcaataggtggggcgcaaaccagcgctctcatgagcaagcactcctgtctccccggtgaggttgtataaactgttcccacggttgaaaacaacctatccgttatccgctatagtacttcgagaaacctagtaccacctttggattgttgacgcgttgcgctcagcacactaacccgtgtgtagcttgggtcgatgagtctggacatacctcactggcgacagtggtccaggctgcgttggcggcctactcatggtgaaagccatgagacgctagacatgaacaaggtgtgaagagtctattgagctactatagagtcctccggcccctgaatgcggctaatcctaaccatggagcaagtgctcacaggccagtgagttgcttgtcgtaatgcgcaagtccgtggcggaaccgactactttgggtgtccgtgtttcactttttacttttatgactgcttatggtgacaatttgatattgttaccatttagcttgtcaaatcaattgcaaaagatcctaactcttatttatcaacttgcatctcgataactctaatttgaaaatatcatctctaaccaatttgaaaattttaaca

SEQ ID NO: 891 - DNA, 717 bp, Enterovirus A
acagggcccactgggcgctagcactccgattctgcggaatctttgtgcgcctgttttataaccctcccccgaaacttgcaacttagaagttatgtacgttactgatcaacagcaggcgtggcacaccagccatgtcttgatcaagcacttctgtaaccccggactgagtatcaatagactgctcacgtggtcgaaagagaaaacgttcgttatccggctaactacttcgagaaacttagtagcaccactgaaactgcggagtgtttcgctcagcacttcccccgtgtagatcaggtcgatgagtcactgcttaccccacgggtgaccgtggcagtggctgcgttggcggcctgcctatggggcaacccataggacgctctaaagtggacatggtgtgaagagtctattgagctagttagtagtcctccggcccctgaatgcggctaatcctaactgcggagcacatgccctcaatccagggggtggtgtgtcgtaacgggcaactctgcagcggaaccgactactttgggtgtccgtgtttcttttattctcataatggctgcttatggtgacaattgaggaattgttgccatatagctattggattggccatccagtgacaaacagagctttgatatacttgttcgtgggtttcgttccactcaccagtcgtacagttcatactctaaagtacattctgattctgaacaatagaaa

SEQ ID NO: 892 - DNA, 717 bp, Enterovirus C
ttaaaacagcttgggggttgttcccacccccagggtccaatggacgctagtacaccggtatcacggtacccttgtacgcctgttttataatccccttcccccgtaacattagaagcacaaaagcaaccgctcaatagacaccatacatccagtgtggttacgagcaagcacttctgtctccccggttgcgccctatatgctgtgcgaacggcaaaaaggggcaatatcgttacccgcttgactactacgggaaacccagtatcatcttcgattgatttgagagttgcgttcagcgccttacccccggcgtagctcaggctgatgaggctccgaacaccccacaggcgactgtgtcggagcctgcgttggcggcctgcccataccctgcggtatgggacgctcacttcatgacatggtgcgaagagtctactgtgctagtcaagattcctccggcccctgaatgtggataatcccaaccactgatcctacgttcgcaatccagcgttcagtaggtcgtaacgcgcaagtcggtggcggaaccaactactttgggtgtccgtgtttcctttatttcctactgaatgcttatggtgacaattgttttgatcagttgttgccaatactcgcgttcagtgtgtaattacaaaaacaagattatcagttattacaatccctcacgttcagtgcacaattacgaaaacgagattttctgtcata

SEQ ID NO: 893 - DNA, 719 bp, Enterovirus A
acagggcctactgggcgctagcactctgattctacggaacctttgtgcgcctgttttataacccctcccccaaactatgtaacttagaagttatgcactctaccgatcaacagcaggcatggcgctccagccatgtctcgatcaagcacttctgtttccccggactgagtatcaatagactgctcacgtggtcgaaggagaaaacgttcgttatccgactaactacttcgagaagcctagtagcaccatcgagactgcggagcgtttcgttcagcactccccccgtgtagatcaggtcgatgagtcactgcataccccacgggcgaccgtggcagtggctgcgttggcggcctgcctatggggtgacccataggacgctctaaagtggacatggtgtgaagagcctattgagctagttagtagtcctccggcccctgaatgcggctaatcctaactgcggagcgcatgccctcgaaccagagggtagtgcgtcgtaacgggcaactctgcagcggaaccgactactttgggtgtccgtgtttctttttattcacttattggctgcttatggtgacaatcaaggaattgttaccatatagctgttggattggccatccggtgtgtaatagagcaattatctatttgtttgttggttacattccattaacatttaagtccctcaatacattacactacattttaaccctaaacgcaagaag

SEQ ID NO: 894 - DNA, 719 bp, Enterovirus C
ccagaggcccacgtggcggctagtactccggtattacggtacccttgtacgcctgttttatactcccttccccgtaacttagaagaaccaaaccaagttcaatagaagggggtacaaaccagtaccaccacgaacaagtacttctgtttccccggtgaagttgtatagactgtacccacggttgaaaacgactgatccgttatccgctttcatacttcgagaagcctagtatcatcttggaatcttcgatgcgttgcgctcaacactcaaccccagagtgtagcttaggctgatgagtctggacgtccctcaccggcgacggtggtccaggctgcgttggcggcctacctgtggcccaaagcctcaggacgctagttgtgaacaaggtgtgaagagcctattgagctatgaaagagtcctccggcccctgaatgcggctaatcccaaccacggagcgagagtgtgcaaaccagcgcatttatcgtcgtaacgcgcaagtctgtggcggaaccgactactttgggtgtccgtgtttccttttatttttctacattggctgcttatggtgacaatcatagattgttatcataaagcgaattggattggccatccggtgaaagtgaaacatattattcacctccttgttggatttactccaatcaacctctccacttataagattatcatcacagtcttaccaaatagaagcatattcaaca

SEQ ID NO: 895 - DNA, 720 bp, Unknown
  Description of Unknown: Chicken picornavirus 1 isolate 55C, complete genome.1 sequence
ctgcttaaggacgttcccggtgctgttgatgctttccgtcaggcagtggccgacttgcagaacttcctaccgaaccaccacctcacccccataactccttccctctacaccttccgctatggtggttaccactgctttattgccttgactgagaatggccaccccctcgacacctgccccctactgccccaccgcgcaaccttttgcttgtccactcggttggagaggcatgggggccccgttcatatccccagtccagttggtgaccttccccctccccgtccggtagatggtccagagggctttgccgacgccctctatgatgcttgcttgtctttcctccgtcagcgcgagcatgcacttgtcgagcccacggaaacacagcctagcttttgcttctctcaccctgcgtaccctgggcgccttccgctcgagattcgctttgttcgacaccctggcgtccccccaccgctacgtgattttactcgtggcatacaccgccctggcgttcagtacattccactgcctaatttgggtggcctccctcaatctcccgcaccccccattgcgcacgtcatcaccgccgccgctaacgcgatccggcgcggttctcactggcactgtcccctcgtccgccgggtttccactcatggttggcttttcacttattctggttactggtgttccatcctacttcatgatggtcgccatgaccatgac

SEQ ID NO: 896 - DNA, 721 bp, Unknown
  Description of Unknown: unclassified Rosavirus sequence
gggatgggtctggtgctgcgccgcgtgtgtcttgacaccgcgctgctcaggatgcttctgccccgtgctttggacgcctaccagggcgttaaactggtcccccccttaccctttccccgtaactaagtttgtacctcccccatataggctgctaagacgcttgttgctacagcatatgtggatcagggagttctccatgagtaatcttttccaccctctctagtgtctatgctattgaggacgggttggagccccgttgacctagtgtcagagtgtgtcggtagcaggctttctgctctcgccccatgccggccacacctcccgtcagtaatgtgaagactgcaagttgcatgtgaaaaggtttctaatatttgagctgaatgtagcgattacccaaggtgagcggacttccccacgtggtaacacgtgcctctcaggccaaaagccaaggtgttaaaagcaccccttgggtagaccactaccccgtggtctcagttctcttagaagattcacttagtaatgtgtatactggcagctcccaagcagagctggcgagcgggctaaggatgccctgaaggtacccgcaggtaacgttaagacactgtggatctgatcaggggctcgagtgctgaagctttacagaggtagctcgagttaaaaaacgtctatgcccctcccccacgggagtgggggttcccccacaccaattttagattgcact

SEQ ID NO: 897 - DNA, 721 bp, Unknown
  Description of Unknown: unclassified Picornaviridae sequence
aaactattgggtgtcaattcagaaactgcagccaaagctgaggtggtaactgactcctcaagagcagcagctgttgcagcagcattctgggcaatttgatccaaaccagtcactctatcagttgccatttttcacaccatacataaaattttcaatggaataaaagggaaaatgctcaaacatgtttttcataattttaaacccataacctggtaaagccaaactatgggtcccagatcagattcataaaatgagtaccttttggagcttggaaactccttgggaaagatgctaaaggagtatctgttacaaggttggtaacctgtcctcttttataggcaaacaactcatacataaatgaccaagacaagatctcctttgacagaacttggatgagttacttttgttccctctgtgcccagggccttaggtatggtaacatacaccctgggggccaaaagcctagtgagtcgaaactcacctggaggtgggcctttacggccacttgtccattagtatgcattggatgctgtcctgtctgaactcatttatgtgtgcaagtcttgaacatgttgagtagacccccagaaggtactcattttatgaatctgatctgggacccatagtttggctttaccaggttatgggtttaaaattatgaaaaacatgtttgagcattttcccttttattccattgaaaattttatgtatggtgtgaaaa

SEQ ID NO: 898 - DNA, 721 bp, Enterovirus A
ccacccacagggcccactgggcgctagcacactgattctacggaaactttgtgcgcctgttttatacccctccccaaatgagtaacttagaagtttaatatgttcatgaccaatagcaggcgtgacacaccagtcacgtcttggtcaagcactcctgtttccccggactgagtatcaataagctgctcacgcggctgaaagagaaaacgttcgttacccggctaactacttcgagaaacctagtaacaccatgaaagttgcagagtgtttcgttcagcacttcccccgtgtagatcaggtcgatgagtcactgcaaaccccacgggtgaccgtggcagtggctgcgttggcggcctgcccatggggtaacccatgggacgctctaatacagacatggtgcgaagagtctattgagctagttagtagtcctccggcccctgaatgcggctaatcctaactgcggagcacataccctcaatccagagggcagtgtgtcgtaacgggcaactctgcagcggaaccgactactttgggtgtccgtgtttccttttatctcattatggctgcttatggtgacaattgaagaattgttaccatatagctattggattggccatccggtgtctaacagagcaattgtatttctatttgttggatttgttcctttgtcgcacacatctctcaatactttatactacattataaagttaaatacaggaag

SEQ ID NO: 899 - DNA, 721 bp, Enterovirus B
cccacccatagggcccactgggcgctagcacactggtatcacggtacctttgtgcgcctgttttatttaccctcccccaactgaaaattagaagccaaactcaaacggtcaataggaaacccagtgaaccaactgggctgcgaccaagcacttctgttaccccggactgagtatcaataggctgctcgcgcggctgaaggagaaaacgttcgttacccggccaattacttcgagaaacctagtaccaccatgaaagttgcgaaacgtttcactccgcacaaccccagtgtagatcgggtcgatgagtcaccgcattccccacgggtgaccgtggcggtggctgcgttggcggcccgcccatggggcaacccatgggacgcttcaatactgacatggtgtgaagagtctattgagctaattggtagtcctccggcccctgaatgcggctaatcctaactgcggatcagacacccacacgccagtgggcagtctgtcgtaatgggcaactctgcagcggaaccgactactttgggtgtccgtgtttctttttatccttatactggctgcttatggtgacaattgaaagattgttaccatatagctattggattggccatccggtatctaacagagctattatttacttatttgttggtttcgtacctctcagtatcagagttttgagaacacttaacttcatactactgctaaacactgcaag

SEQ ID NO: 900 - DNA, 722 bp, Enterovirus B
ttaaaatagcctgtgggttgctcccacccacagggcccaagtggcgtagtacttggtattccggtacctttgtacacctatttacaaaccctaccccttgtaaccttagaagcaattatttaaccgctcactagggggtgtgctatccaagcacatcaagagcaagcacttctgtctccccgggaggggctaatggtacgctgtgcccacggcggaaatgagccctaccgttaaccggcagtctacttcgggaagcccagtaactacattgaaactttgaggcgttacactcagcacataaccccaatgtgtagttctggtcgatgagccttggcatcccccacaggcgactgtggccaaggctgcgttggcggccagcctgcggaccaaaagtccgtaggacgcctaattgtggacatggtgtgaagagcctactgagctagactgtagtcctccggcccctgaatgcggctaatcctaaccctggagcatccgcgtgcaacccagtacgtagggtgtcgtaatgcgtaagtctgggatggaaccgactactttgggtgtccgtgtttcttgtttttcatactgggtcgcttatggttacaactaattgttgtaatcattggcagtgcgcgctgaccacgcgattattgatatttccatttgttggatactccaatagtgtcaactcatatacacaacttttaccactgatcaagataaaa

SEQ ID NO: 901 - DNA, 723 bp, Hepatovirus G
ttcaaaagtccctccgggaatttcccggaggacttttgggccaccattgcaaggggtggttttaaccttgcacgcgtttaccgtgcgttaacggttttccatgtttgtatgtcttgtttgtattatgtgttttgtaaatattaattcctgcaggttcagggttctttaatcatgttgggctgtacccacactcaacttttggccataagtgagtttcttaacgaaccttttaacacaggatgttattagggcccaatattttccctgaggccttctttggcctctattttttccccttttctatctccttgtattccgggctcacgtgatgccaatggactgacccatgcgcccgtgggggttaactactggagtagccagtagctgtaggtgctaaaagtcacgtacgtgtaagactggacgagacctctcagctataactgaaagtagtaagtatgtctgaacttcttgaaggggtaggctacgggtgaaaccccttaggttaatactcatattgagagatacctctgataggtgaaggtttccggtagaggtgagtttaacgacaaagcctctcaacggatgtgggcccacctcatcagcaagatgctttcatacccaataccgtaggggctgggttgttgagttcagtcccaagcgtccctcccgcaaggttgtaggggtactcaggggcatttaggtttccacaattaaacaaataca

SEQ ID NO: 902 - DNA, 723 bp, Enterovirus A
ccacccacagggcccactgggcgttagcactctggtaccacggtacctttgtgcgcctgttttatccccccaaacccccgtaacactacactagaagatagacaatgcgaccaatagccagtggggcaacccagcctcaccttggtcaagcacctctgttttcccgggcttagtaccaataagctgctcgcgtggctgaaggggaacgcgctcgttatccggctaactacttcgagaaacctagtatcaccatggaagttgcagagtgtttcgatcagcacaaccccagtgtagatcaggccgatgagtcaccgtgtaccccacgggcgaccgtgacggtggctgcgttggcggcctgcccatggagtacaccatgggacgctctaatacagacatggtgcgaagagtctattgagctagttagtagtcctccggcccctgaatgcggctaatcctaactgcggagcacgcgctctcaacccagagagtagcgtgtcgtaacgggcaactctgcagcggaaccgactactttgggtgtccgtgtttctctttattcttacattggctgcttatggtgacaattgaaagattgttaccatatagctattggattggccatccggtgtgcaacagagctatcatatattcttttgttggctttgtgccactagattatactgcaattattactttaaggtatatcttgcttttgaacacagcaaa

SEQ ID NO: 903 - DNA, 723 bp, Enterovirus B
ggttgcccacccacagggcccactgggcgctagcacactggtatcacggtacctttgtgcgcctgttttatccaccctccccaacgtaacttagaagcttatttaaaccgaccaacagacggtccagcataccagctgggttacggtcaagcacttctgttaccccggactgagtatcaataggccgctcgcgcggctgaaggagaaaacgttcgttacccggccaattacttcgagaaacctagtaccaccgtggaggtcgcgaagtgtttcgctccgcacaaccccagtgtagatcaggtcgatgagtcaccgcattccccactggcgacagtggcggtggctgcgtggcggcctgcccatggggtaacccatgggacgcttcaatactgacacggtgtgaagagtctattgagctaattggtagtcctccggcccctgaatgcggctaatcctaactgcggagcagatatccacgagccagtggacagtctgtcgtaatgggtaactctgcagcggaaccgactactttgggtgtccgtgtttccatttattcctatactggctgcttatggtgacaattgagagattgttaccatatagctattggattggccatccggtgacaaacagagcaattatatatctctttgttggttatattccactcaacattaaggttttaagaacgcttaattacatcctattgttaaacacattaag

SEQ ID NO: 904 - DNA, 723 bp, Enterovirus B
ttcccactcacagggcccactgggcgctagcacactggtatcccggtacctttgtgcgcctgttttataccccctcctccaaccgtaacctagaagcagcaccatatggccaatagtagacgtggcgcaccagccacgttttggtcaagcacttctgtttccccgggccgagtatcaataggctgctcacgcggctgaaggagaaagcgtccgttacccggccaattacttcgagaaacctagtaccaccatggaagttgcgcggcgtttcgctccacacaaccccagtgtagatcgggtcgatgagtcaccgcatttccccacgggtgaccgtggcggtggctgcgttggcggcctgcccatgaggaaactcatgggacgcttcaatactgacatggtgtgaagagtctattgagctaattggtagtcctccggcccctgaatgcggctaatcctaactgcggagcagatgctcacaaaccagtgggtggtctgtcgtaatgggcaactctgcagcggaaccgactactttgggtgtccgtgtttccttttattttcacactggctgcttatggtgacaattgaaggattgttaccatatagctattggattggccatccggtgacaaacagagcgattgtctatctatttgttggttttgtaccattagatttcaaagtcctgaaaaccctcaatttcgtcttaacactcaattcggcaag

SEQ ID NO: 905 - DNA, 723 bp, Unknown
  Description of Unknown: unclassified Enterovirus sequence
tgatcccacccatagggcccactgggcgccagcacactggtattacggtacctttgtgcgcctgttttatctaccccccccaacgcaactcagaagctcaactgaaccgaccaatagatgacccggcaagccagcagggccctggtcaagcacttctgttaccccggactgagtatcaataagctgctcgcgcggctaaaggagaaaacgttcgttacccggccaattacttcgagaaacccagtaccaccgtgaaagttgcgcagtgtttcgctccgcacaaccccagtgtagatcaggccgatgagtcaccgcattccccactggtgacagtggcggtggctgcgttggcggcctgcccatggggcaacccatgggacgcttcaatactgacacggtgcgaagagtctattgagctaattggtagacctccggcccctgaatgcggctaatcctaactgcggagcagatacccacgcgccagtgggcagtctgtcgtaatgggcaactctgcagcggaaccgactactttgggtgtccgtgtttccttttattcttatactggctgcttatggtgacaattgaaagattgttgccatatagctattggattggccatccagtgactaacaaagcaattgtctatctatttgttggttttataccattaaactacaaagctataagcacactcaaatttatattggtactcaactcagcaaa

SEQ ID NO: 906 - DNA, 724 bp, Enterovirus A
ccacccgcagggcccactgggcgccagcactctgattctgcggaatctttgtgcgcctgttttataaccccttccccaaatttgcaatttagaagcaaagcacactaacgatcaacagcaggcgtggcataccagctacgtcacgatcaagcacttctgtttccccggactgagtatcaataagctgcttgcgcggctgaaggagaaaatgtccgttatccggctaactacttcgagaaacctagtagcaccattgaagctgcagagtgtttcgctcggcacttcccccgtgtagatcaggtcgatgagtcactgcactccccacgggcgaccgtggcagtggctgcgttggcggcctgcctatggggcaacccataggacgctctaatgtggacatggtgtgaagagtctattgagctagttagtagtcctccggcccctgaatgcggctaatcctaactgcggagcgcatgcccccaaaccagggggaggtgcgtcgtaatgggcaactctgcagcggaaccgactactttgggtgtccgtgtttccttttatctttatattggctgcttatggtgacaattgagagattgttaccatatagctattggattggccatccggtgagcaatagagcaattatttattcctttattggatttgtaccgttgaattatactgcttttattacactgaaacacatcctattgttgaacacaataaa

SEQ ID NO: 907 - DNA, 724 bp, Enterovirus C
ggggttgttcccaccccagaggcccacgtggcggccagtacaccggtatcacggtacccttgtacgcctgttttatactcccttccccgtaacttagaagtaacaaacctatgttcaatagaagggggtacaaaccagtaccaccacgaacaagcacttctgtttccccggtgagatcacatagactgttcccacggttgaaagtgatcgatccgttatccgctcttgtacttcgagaagcctagtattatcttgggaccaacgatgcgttgcgatcagcactcgaccccagagtgtagcttaggtcgatgagtctggacattcctcaccggtgacggtggtccaggctgcgttggcggcctacctgtggcccaaagccacaggacgctagttgtgaacaaggtgtgaagagcctattgagctacatgagagtcctccggcccctgaatgcggctaatcctaaccacggagcaggcgattgcaaaccagcaattagcttgtcgtaatgcgtaagtctgtggcggaaccgactactttgggtgtccgtgtttccttttattttatcaatggctgcttatggtgacaatcatagattgttgtcataaagcgaattggattggccatccggtgacgttcagagttatttgtttgtgaaattcattctctcaatcctgtccacatttgacatacttccttaaatctttatacagaacaccttaacaca

SEQ ID NO: 908 - DNA, 724 bp, Enterovirus C
caccccagaggcccacgtggcggctagtactccggtatcacggtacccttgtacgcctgttttatgctcccttccccttgtaacttagaagcaaacaacactagttcaataggagggggtacaaaccagtaccaccacgaacacgcacttctgtttccccggtgaagctgcataagctgttcccacggctgaaagcgactgatccgtcatccgctcaggtacttcgggaagcctagtaccatcttggaatcttcgatgcgttgcgctcagcactcaaccccagagtgtagcttaggctgatgagtctggatgtgcctcactggtgacagtggtccaggctgcgttggcggcctacccatggcccaaagccatgggacgctagttgtgaacaaggtgtgaagagcctactgagctacctgagagtcctccggcccctgaatgcggctaatcccaaccacggagcgagtgcccacaatccagtgagtggctcgtcgtaatgcgcaagtctgtggcggaaccgactactttgggtgtccgtgtttccttttaaccttattatggctgcttatggtgacaatcatagattgttatcataaagcgaattggattggccatccggtgaaagtcagaacgctaatttatctgtttgttggatacaccaaagttaactgcaatacactaaccttgattcgcatagtgttgttaattagatatcattaccaca

SEQ ID NO: 909 - DNA, 725 bp, Unknown
  Description of Unknown: unclassified Sapelovirus sequence
tggggaggtgcctcctccccattgcagagtgctttgtcctacgggtcaagtacctgccgttgttggtgttcccacgggtgcagtcagcaaagcccccttttcgccccttccccctcacctaacctttttcccctctctttggcaagcgatgaaaggattacgagcaaggtttgcggaagaattgttatggcgattgcggaagaatatggattaaggattttccacgtaccttagatgatcataggtggctttcacctctggaccagtgatcaaacgtggaccatagtttaagtgaagtaagcatgttccaggtgaaaacgcatattgaaatgaacgtgtctgtagcgacctccaagtgcgcatggcctcccatgatggtgacatcatccatgcggaccaaaagtcaagtgtgcagtgacgtgcgaataatagactgtacccacggttgaagattcgcacggcatgagttcaccacttggagcggccgaccccgggccacacgggattggagatgtgcttgagtaatctggaagaggcttatataaacactctatgggggctgtgaagaatgccatgcaggtaccctcacacagaggatctgagcattgggccacggagacgatctataaactcgaagtggttgaaaagtatctaagcagcccgcaaggggcccatggttgggcccctctattttccccttattattttatcagtggtgacaatag

SEQ ID NO: 910 - DNA, 725 bp, Enterovirus A
ttcccacccacagggcccactgggcgctagcacactgattctacggaaactttgtgcgcctgttttatacctcctccccgaagagtaacttagaagcttaacatacccatggccagcagcaggcgtgacataccagtcatgccccggtcaagcacttctgtctccccggactgagtatcaatagactgctcgcgcggttgaaggagaaaacgttcgttatccggctaactacttcgagaaacctagtaacaccatgaaagttgcagagtgtttcgttcagcacttcccccgtgtagatcaggtcgatgagtcactgcaaaccccacgggcgaccgtggcagtggctgcgttggcggcctgcccatgggaccacccatgggacgctctaatacagacatggtgtgaagagtctattgagctagttagtagtcctccggcccctgaatgcggctaatcctaactgtggagcacacgccctcaacccagggggtagtgtgtcgtaatgggcaactctacagcggaaccgactactttgggtgtccgtgtttccttttatctttatattggctgcttatggtgacaattgaagaattgttaccatatagctattggattggccatccggtgtctaatagagcaattgtatacctatttgttggatttgtccccttgtcatacacatctataaacaccctacaatatattgtaaaattgaatacaggaaa

SEQ ID NO: 911 - DNA, 725 bp, Enterovirus A
ccacccacagggcccactgggcgttagcacactgattctaaggaatctttgtgcgcctgttttatatccctcccccccaaaagtgtaacgtagaagtttaatacactcacgaccaatagcaggcgtgacgcaccagtcacgtcttggtcaagtacttctgtctccccgggccaagtatcaatagactgcttacgcggttgaaggagaaaacgctcgttacccggctaactacttcgagaaacccagtagcaccatgaaagttgcagggtgtttcgttcagcacttcccccgtgtagaccaggtcgatgagtcactgcaaaccccacgggcgaccgtggcagtggctgcgttggcggcctgcccatggggtaacccatgggacgctctaatacagacatggtgtgaagagtctattgagctagttagtagtcctccggcccctgaatgcggctaatcctaactgcggagcacacaccctcaacccagggggcggtgtgtcgtaacgggtaactctgcagcggaaccgactactttgggtgtccgtgtttccttttatatttattatggctgcttatggtgacaattgaagaattgttaccatatagctattggattggccatccggtgtctaacagagcaattgtatacctatttgttggatttgtccctctgtcacacacacctctcaataccctatactatattatagagttgaatacaggaag

SEQ ID NO: 912 - DNA, 725 bp, Enterovirus A
ttgctcccacccacagggcccactgggcgctagcaccctggtgccacggcacctttgtgcgcctgttttatcaccctaccccatatgaaacttagaagtaatacatagccgaccaatagcaggtgtggcgtgccagccacatcttggtcaagcacttctgtttccccgggtcgagtatcaataagctgttcacacggctgaaggagaaaacacccgttatccggccaactacttcgagaaacctagtaccaccatgaacgttgcaaggtgtttcgctcagcacttcccccgtgtagatcaggccgatgagtcaccgcataccccacgggtgaccgtggcggtggctgcgttggcggcctgcctatgggttaacccataggacgccttaatactgacatggtgcgaagagtctattgagctagttggtagtcctccggcccctgaatgcggctaatcctaactgcggagcacacactcacaaaccagtgagcggtgtgtcgtaacgggcaactctgcagcggaaccgactactttgggtgtccgtgtttccttttacctttatattggctgcttatggtgacaatcagagaattgttaccatatagctattggattggccatccggtgtctaatagagctattgtatatctgtttgttggattcactccgctgacctacaaatctctaaacaccttgtgctatattttgaatctaaatacacgaaa

SEQ ID NO: 913 - DNA, 725 bp, Unknown
  Description of Unknown: unclassified Enterovirus sequence
ttaaaatagcctgagggttgttcccacccacagggcccacgtggcgcagtactctggtatcacggtacctttgcacgcctattttataccccttccccatcgtaacttagaagcaacaaacaaactgcccaatagcagcacaacacccagttgtgttaggggcaagcacttctgtttccccggaagggtctgacggtatgctgtacccacggcagaagtatgacctaccgttaaccggccatgtacttcgagaagcctagtaccattatgaaggttgattgatgttacgctccccagcaaccccagctggtagttctggtcgatgagtctcggcattccccacgggcgaccgtggccgaggctgcgttggcggccagcctacaccatacggtgtaggacgtcaagatactgacatggtgtgaagagcctattgagctacgtggtagtcctccggcccctgaatgcggctaatcctaactccggagcatccgccagtaagcccactggaagggtgtcgtaatgcgaaagtctggagcggaaccgactactttgggtgtccgtgtttcctgttttacttattgtttggctgcttatggtgacaacttatagttatcatcataagctacttggtcttgccaaccggagaattatttggttatttgttggtttcataaacctacagtcgtattttcctgtcttattaattgttctcaaaattaacaaca

SEQ ID NO: 914 - DNA, 725 bp, Unknown
  Description of Unknown: unclassified Enterovirus sequence
ttcccaccctagaggcccacgtggcggctagtactctggtattacggtacctttgtacgcctgttttatattccttcccctatcgtaacttagaagtttcaaacacagctcaacagacagtagtacataccagtactgctacgagcaagcacttctgttaccccggtgaagtcacatagactgtgcccacggttgaaagtgactgatccgttacccgctttagtacttcgagaagcctagtaatatcttggaatcttcgatgcgttgcgctcaacactcaaccccagagtgtagcttaggtcgatgagtctggacactccccaccggcgacggtggtccaggctgcgttggcggcctacctgtggcccaaagccacaggacgctagttgtgaacaaggtgtgaagagcctattgagctactaaagagtcctccggcccctgaatgcggctaatcccaaccacggagcaagtgctcacaatccagtgagtggcttgtcgtaacgagcaattctgtggcggaaccgactactttgggtgtccgtgtttccttttatttttatcattggctgcttatggtgacaatctaagattgccatcatatagcttttggattggccatccggtgatattttgaattactcagcttgctgttcacagcactcttcaaatagtaattatttattaccacctgcagtttgttcttaaattgtctccagacagtcaaa

SEQ ID NO: 915 - DNA, 725 bp, Unknown
  Description of Unknown: unclassified Enterovirus sequence
atcccacccacagggcccattgggcgctagcacaccggtattacggtacccttgtgcgcctgttttatacaccctacccccaaaacgtaatttagaagcaagtcaacaaagaccaatagcaagcacggcacaccagctgtgttttggtcaagcacttctgttaccccggactgagtatcaataggctactcacgtggctgaaggagaaaacgttcgttatccgtccaattacttcgagaagcctagtaacaccatagaggttgcgcagcgtttcgctccgcactaccccagtgtagatcaggtcgatgagtcaccgcattccccacgggtgaccgtggcggtggctgcgttggcggcctgcccatggggcaacccatgggacgcttcaatactgacatggtgcgaagagcctattgagctaattggaagtcctccggcccctgaatgcggctaatcctaactgcggagctggtacccacaaaccagtgggtggccagtcgtaacgggcaactctgcagcggaaccgactactttgggtgtccgtgtttcattttattcctatactggctgcttatggtgacaattgaaagattgttgccatatagctattggattggccatccggtgacaaataaagcgattgtttatcagttcattggtttcgtaccgctaaactacacaacattaaacaccctcaactttatcctattgctcaacacaacaag

SEQ ID NO: 916 - DNA, 726 bp, Enterovirus A
gtacccaccctcagggcccactgggcgctagcactctgattctgcggaatccttgtgcgcctgttttataaccctcccccgattcgtaacttagaagcaatgagcctcactgatcaacagtaggcgcggcgcaccagccgtgtcttgatcaagcactcctgtttccccgggctgagtatcaatagactgcttgcgcggttgaaggagaaaacgctcgttacccggctaactacttcgagaaacctagtagcaccatcgaaattgcagagtgtttcgctcagcacttcccccgtgtagatcaggtcgatgagtcactgcaacccccacgggcgaccgtggcagtggctgcgttggcggcctgcctatggggcaacccataggacgctctaaaatggacatggtgtgaagagtctattgagctagttagtagtcctccggcccctgaatgcggctaatcctaactgcggagcgcatgcccccaaaccagagggtggtgcgtcgtaacgggcaactctgcagcggaaccgactactttgggtgtccgtgtttccttttattcttactatggctgcttatggtgacaattgaagaattgttaccatatagctattggattggccatccggtgtctaatagagctattgtatatttatttgttggatttgttccattgacatatacatcacttaatacattaaacttcattgtgagattaaacacaagaaa

SEQ ID NO: 917 - DNA, 726 bp, Enterovirus C
ttaaaacagctctggggttgttcccaccccagaggcccacgtggcggccagtacaccggtatcacggtacccttgtacgcctgttttatactccctaccccgtaacttagaagcattgactcaagttcaatagtaggggtacaaaccagtaccaccacgaacaagcacttctgtttccccggtgatgtcgtatagactgtacccacggttgaaagtgacagatccgttacccgcttttgtacttcgagaagcccagtaccaccttggaatcttcgatgcgttgcgctcagcactcaatcccagagtgtagcttaggtcgatgagtctggacgttcctcaccggcgacggtggtccaggctgcgttggcggcctacctgtggcccaaagccacaggacgctagttgtgaacaaggtgtgaagagcctattgagctacaaaagagtcctccggcccctgaatgcggctaatcctaaccacggagcaggtgatcacaagccagtgattagcctgtcgtaatgcgcaagtctgtggcggaaccgactactttgggtgtccgtgtttccttttatttcatttatggctgcttatggtgacaatcatagattgttgtcataaagcgaattggattggccatccggtgagagtttagcgctttatttgtctgctcatcgaacttgcacttttgaattcttaccccttgcaccttattagacagtggtatcatc

SEQ ID NO: 918 - DNA, 726 bp, Enterovirus C
gttcccaccccagaggcccacgtggcggccagtacaccggtattacggtacccttgtacgcctgttttatactccctaccccgtaacttagaagcaaaaactcaagttcaatagcaggggggtacaaaccagtaccaccacgaacaagcacttctgtttccccggtgacttcgcataaactgtacccacggttgaaagcgatagatccgttatccgcttttgtacttcgagaagcctagtaccatcttggaatcttcgatgcgttgcgatcagcactcaaacccagagtgtagcttaggtcgatgagtctggacgatcctcaccggcgacggtggtccaggctgcgttggcggcctacctgtggtccaaagccacaggacgctagttgtgaacaaggtgtgaagagcctattgagctacaaaagagtcctccggcccctgaatgcggctaatcccaaccacggagcaggcgatcacaacccagtgactagcctgtcgtaatgcgcaagtctgtggcggaaccgactactttgggtgtccgtgtttctctttattccattaatggctgcttatggtgacaatcatagattgttatcataaagcgattcggattggccatccagtgaaaatcaagtgtactactcacttatttattgagtttacaactctaacccatcactcactacaacccattttattgtgtcactatccagacagtggtatcatc

SEQ ID NO: 919 - DNA, 726 bp, Enterovirus B
ttcccacccacaaggcccaccgggcgttggcacactggtatcacggtacctttgtgcgcctgttttaaaacccctacccccaaacgcaacttagaagataagcacacagtccaatagagggcgtggcactccagccatgtcttggacaggcactcctgttaccccggactaagtaccaataaactgctcacgcggttgaaggggaaaacgttcgttatccggctaactacttcgaggaacctagtaacaccgtgaaagttgcagagtgtttcgctcagcacaaccccagtgtagatcaggtcgatgagtcaccacgttccccacgggcgaccgtggtggtggctgcgctggcggcctgcctatgggtcaacccataggacgctctaacacagacacggtgtgaagagtcgattgagctagttagtagtcctccggcccctgaatgcggctaatcctaactgcggagcgtgcgtccccaaaccaggagatagcgcgtcgtaacgggcaactctgcagcggaaccgactactttgggtgtccgtgtttccttttttttacctctatttggctgcttatggtgacaattgaagaattgttaccatatagctattggattggccatccggtgactaatagagctattgtttacctctttgttggttttgtaccactgaacctcatagttctaaatacccttaatttgattttagtgcttaacacatcaaa

SEQ ID NO: 920 - DNA, 727 bp, Enterovirus D
ttaaaacagctctggggttgttcccaccccagaggcccacgtggcggctagtactccggtaccccggtacccttgtacgcctgttttatactccctttcccaagtaactttagaagaaataaactaatgttcaacaggagggggtacaaaccagtaccaccacgaacacacacttctgtttccccggtgaagttgcatagactgtacccacggttgaaagcgatgaatccgttacccgcttaggtacttcgagaagcctagtatcatcttggaatcttcgatgcgttgcgatcagcactctaccccgagtgtagcttgggtcgatgagtctggacaccccacaccggcgacggtggtccaggctgcgttggcggcctacccatggctagcaccatgggacgctagttgtgaacaaggtgcgaagagcctattgagctacctgagagtcctccggcccctgaatgcggctaatcccaaccacggagcaaatgctcacaatccagtgagtggtttgtcgtaatgcgcaagtctgtggcggaaccgactactttgggcgtccgtgtttccttttatttttattatggctgcttatggtgacaatctgagattgttatcatatagctattggattagccatccggtgatatcttgaaattttgccataactttttcacaaatcctacaacattacactacactttctcttgaataattgagacaactcata

SEQ ID NO: 921 - DNA, 728 bp, Unknown
  Description of Unknown: unclassified Enterovirus sequence
ttcccaccctagaggcccacgtggcggctagtactctggtattacggtacctttgtacgcctgttttatatccctttccccattgtaacttagaagtttcaaagtacagttcaatagacagtagtacaaaccagtactgctacgaacaagcacttctgttgccccggtgtagttgcatagactgtacccacggttgaaagcaactgatccgttatccgctttagtacttcgagaagcctagtagcaccttgggatcttcgatgcgttgcgctcagcactcaaccccagagtgtagcttgggtcgatgagtctggacattcctcaccggcgacggtggtccaggctgcgttggcggcctacctgtggcccaaagccacaggacgctagttgtgaacaaggtgtgaagagcctattgagctactaaagagtcctccggcccctgaatgcggctaatcctaaccacggagcaagtgctcacagtccagtgagtagcttgtcgtaatgagcaattctgtggcggaaccgactactttgggtgtccgtgtttccttttatttttatcattggctgcttatggtgacaatctaaggttgccatcatatagcttttggattggccatcccggtgatatttcgaattattcaatttgctgtttgcagctccttttaaacagtattcactcaccagcattcatattttactcttgagttattaacaaatagtcaaaa

SEQ ID NO: 922 - DNA, 729 bp, Aichivirus B
attcccaaggcccactcggttcaacttcggtttccggacaaatataaagaacctcagtcctcttggtactttctcgcctgagtcaacaaagcgagaaacctgcccctccagcgccagacgagcggcataaaacttgaacttctggcatgctccaccacccttttccccattccaacccccattgcgctctcaaggtcgcgctttttcgagactagctcggattcaaaagttcctggcaccctttgccccttcaggcccttaaggtaggaactgaccttgtgctgtgccctcggtgcggaagtgctactgcgtagcgattgtaagatccctttgtggttctgccctggcaaggttatagagtactgtgatccgctgcggatgccatcctggtaacaggacccccagtgtgcgcaacagtatgttcacggtcttccgtgtccaccacattcggaacactgctctcgtgaaacagtgtgtgtccaatccctgcaatcagtatcaactacaccacctaggaatgctaggaaggtaccccggtccgccgggatctgatcctaggctaattgtctacggtggtgctcctttttattttccacttcaattcattggttacaactgctcgatccctgtgtttgctgcccttctctgctctcatcgccattctcaagtgttcacactgtccaagttcctttggttgttcgcttccacttgccactgtcaactcttgtc

SEQ ID NO: 923 - DNA, 729 bp, Enterovirus A
gttgcacccacccacagggcccaccgggcgctagcactctgattttacgaaatctttgtgcgcctgttttatatccccttccctattcgtaacttagaagtaatgagcaacaacgatcaatagcaggcgtggcgcaccagccatgtcttgatcaagcacttctgttaccccggactgagtatcaatagactgctcacgcggttgaaggagaaaacgttcgttacccggctaaccacttcggaaaacctagtagcaccattgaagctgcagagtgtttcgctcagcacttcccccgtgtagatcaggtcgatgagtcactgcaacccccacgggcgaccgtggcagtggctgcgttggcggcctgcctatggggtaacccataggacgctctaatgtggacatggtgtgaagagtctactgagctggttagtagtcctccggcccctgaatgcggctaatcctaactgtggagcgcacactctcaaaccagggagcagtgcgtcgtaacgggcaactccgcagcggaaccgactactttgggtgtccgtgtttccttttatccttatattggctgcttatggtgacaatcacggaattgttgccatatagctattggattggccatccggtgtctaatagagctattgtgtacctatttgttggatttactccactgtcatataaatctctgaacactttgtgctttatattgaacttaaacacacgaaa

SEQ ID NO: 924 - DNA, 729 bp, Enterovirus C
ttaaaaacagctctggggttgttcccaccccagaggcccacgtggcggctagtactctggtattacggtacctttgtacgcctgttttatatcccctttcccctgtaactcagaagcatgaagtttaagctcaacaggaggggtgcaaaccagcacctctacgagcaagcactactgtttccccggtgaagttacatagactgttcccacggttgaaagtgattgatccgttatccgctcatgtacttcgagaagcctagtatcgctctggaatcttcgatgcgttgcgctcaacactcgaccccggagtgtagcttaggccgatgagtctggacattccccactggcgacagtggtccaggctgcgttggcggcctacctgtggtccaaagccacaggacgctagttgtgaacagggtgtgaagagcctattgagctgcatgagagtcctccggcccctgaatgcggataatcctaaccatggagcaggcaactgcaacccagcagtcagcctgtcgtaacgcgtaagtccgtggcggaaccgactactttgggtgtccgtgtttccttttatttttgaatggctgcttatggtgacaatcacagattgttatcataaagcaaattggattggccatccagtgaatcactaccgagtttgttaaatctatttcagagacacacaactcctcaacgcactatacctaaacagaggattatactacagcg

SEQ ID NO: 925 - DNA, 729 bp, Enterovirus B
catgctcccacccatagggcccactgggcgtcagcacactggtattgcggtacctttgtgcgcctgttttatccaccccaccccctcaacgtaacttagaagcacatcccacacggtcaatagttggctcgataagccaatcgagtctggatcaagcacttctgttaccccggactgagtatcagtaagctgcttgcgcggctgatggagaaaacgttcgttacccggccatttacttcgggaaacctagtaccaccatgaatgttgcgcagcgtttcgctccacactaccccagtgtagatcaggtcgatgagtcactgcataccccacgggcgaccgtggcagtggctgcgctggcggcctgcccatggggcaacccatgggacgcttcaatactgacatggtgcgaagagtctactgagctaagtggtagtcctccggcccctgaatgcggctaatcctaactgcggagcagatacccacgaaccagtgggcagtctgtcgtaatgggcaactctgcagcggaaccgactactttgggtgtccgtgtttccttttattctaatactggctgcttatggtgacaattgaacgattgttaccatatagctattggattggccatccggtgacaaacagagcgattatatactcatttgttgggttcgtaccacttaattacaaagttctaaacacccttaactatatactagcactcaacacatcaaa

SEQ ID NO: 926 - DNA, 730 bp, Unknown
  Description of Unknown: unclassified Hepatovirus sequence
ttcaaaggcggtgtcccggattgtttccgggccgcctttgggcaaccatgatgaggggttgtaaatcacctcatccccgtttgcctagggtgataggctttttatgttttatgtttgttggtctagttcgtcaattgtaaatattgatttctgcaggttcagagttcttaattatgttcctctataaggacactctctttaagtctaggccataagtgatcctagagataggtgaacctttcatatctggtctatgttagggcctttatatccctaggggcaatctttgtgccccttatttctcctatctttcttcttttcttccgggctctcacggtgccaatggaacgaccggtgcgcccgccggggttaactccaagattagcttggagctgtagttgctaaaagccgtgatgaaggaagcagactatcaagttagttaggtgttaactgaaacatgaattctattatgatctttgtgagtgggtaggctacgggtgaaacccactaggttaatactcatattgagagatacctccattaggctaaggttggcggtaaaggtgagtttaacgacgtatcctttcaacgcctgtgggccggtctcaatggcacaatgcgtagtagatgaagtgtgtagggcctactaaggagatgctctgtggaattcaccctcccgaaaggtcgtaggggtactcaggggcatttaggtttccacattttaaatttc

SEQ ID NO: 927 - DNA, 730 bp, Enterovirus A
tttaaaacagcctgtgggttgtacccactcacagggcccacgtggcgttagtactctggtatcacggtacctttgtatgcctgttttatctcccttcccccgtaacgttagaagaataaacaaatgacaactagcaaatccaccaacccaggtgggttttcgtcaagcacttctgtttccccggacttagtaccaataggctgtacccacggctgaaggggaaaatgttcgttacccggctacctacttcgaaaagcctagtaccaccaatgattgtctcaagtgttacgttcagcacaaccccagtgtagttcaggccgatgagtcaccgaattccccacgggcgaccgtgtcggtggctgcgttggcggcctgcctgcgggtttcacccgcaggacgcttgattcatgacatggtgcgaagagcctattgagctaggtagtagtcctccggcccctgaatgcggctaatcctaaccacggagcattcactggcaaaccagccagcagaatgtcgtaatgggtaactctgtggcggaaccgactactttgggtgtccgtgtttcctgttttacttattttggctgcttatggtgacaatttacggattgttaccatatagctattggattggccatccggattattgcaatactactatttgtgggatttctccctttgtgttataataactaccccattctaacattagctctcaagtttaatacact

SEQ ID NO: 928 - DNA, 730 bp, Enterovirus A
tgcacccacccacggggcccactgggcgccagcactctgattctacggaatccttgtgcgcctgttttataaccccccccctcaattaggtaacatagaagttagaaacatatatggccaatagcaggcgtggcgcaccagtcgcgtctcggtcaagcacttctgtttccccggactgagtatcaataagctgctcgcgcggctgaaggagaaaacgttcgttatccggctaactacttcgagaaacctagtagcaccatgaaagttgcggagtgtttcgctcagcacttcccccgtgtagatcaggtcgatgagtcactgcattccccacgggcgaccgtggcagtggctgcgttggcggcctgcctatggggtaacccataggacgctctaatacggacatggtgcgaagagtcaattgagctagttagtagtcctccggcccctgaatgcggctaatcctaactgcggagcacataccctcaatccagggggcggtgtgtcgtaatgggcaactctgcagcggaaccgactactttgggtgtccgtgtttccttttattcttatattggctgcttatggtgacaattgagagattgttaccatatagctattggattggccatccggtgtccaacagagctctggtttacttgttcgttggctttatacctctgtcacccacagtttattcaactctagtgttcttaatacgccttaacagtaagag

SEQ ID NO: 929 - DNA, 730 bp, Enterovirus A
gttgcacccacctacagggcctactgggtgctagcactctgattctacggaatctttgtgcgcctgttttataaccccctccccaatttgtaacttagaagcaatgaaccccatcgatcaatagcaggcataacgcaccagttatgtctcgatcaagcacttctgttttcccggactgagtatcaatagactgcttgcgcggtcgaaggagaaaacgttcgttacccggctaactacctcgagaagcctagtagcaccactgaaactgcagagtgtttcgttcaacacttcccccgtgtagatcaggtcgatgagtcactgctctccccacgggtgaccgtggcagtggctgcgttggcggcctgcctatggggtaacccataggacgctctgaagtggacatggtgtgaagagcctattgagctagttagtagtcctccggcccctgaatgcggctaatcctaactgtggagcgcatgccctcaaaccagggggtggtgcgtcgtaacgggtaactccgcagcggaaccgactactttgggtgtccgtgtttccttttattatcctattggctgcttatggtgacaattaaagaattgttaccatatagctattggattggccatccggtgtgtaatagagcgattatctacctatttgttggatacattccgttaacattcaaatctctcaacacattatactacattctgaccttgaacacaagaaa

SEQ ID NO: 930 - DNA, 730 bp, Unknown
  Description of Unknown: unclassified Enterovirus sequence
ggggttgttcccaccccagaggcccacgtggcggctagtacactggtatcacggtacctttgtacgcctgttttatactccttcccccgcaatttagaagcatacaattcaagctcaataggagggggtgcaagccagcgcctccgtgggcaagcactactgtttccccggtgaggccacatagactgttcccacggttgaaagtgtccgatccgttatccgctcatgtacttcgagaagcctagtatcgctctggaatcttcgacgcgttgcgctccacactcagtcccagagtgtagcttaggctgatgagtctggacattcctcaccggcgacggtggtccaggctgcgttggcggcctacctgtggcccaaagccacaggacgctagatgtgaacaaggtgtgaagagcctattgagctataagagagtcctccggcccctgaatgcggctaatcccaaccatggagcaggcagccgcaatccagcagccagcctgtcgtaacgcgcaagtctgtggcggaaccgactactttgggtgaccgtgtttccttttattatttcaatggctgcttatggtgacaatcatagattgttatcataaagcgagttggattggccatccagtgtgaatcggattatttactcccttgtttgttggattcactcccgaaacgttttaccccttaacttattgaaattgtttgaagacaggatttcagtgtcaca

SEQ ID NO: 931 - DNA, 731 bp, Unknown
  Description of Unknown: unclassified Salivirus sequence
gtgtttctcccccctttcgaccgccctatggcaggcgggcttgtggacggcttcggcccacccacagcaagaatgccatcatctgtcctcacccccatcttcccctttcttcccctgcaaccgtcacgcttactcacatgtgcattgagtggtgcacgtgttgaacaaacagctacactcacatggggcgggttttcccgccttgcggcctctcgcgaggcccacccctccctctcctcccataactacagtgctttggtaggtaagcatcctgatcccccgcggaagctgctcacgtggcaactgtggggacccagacaggttatcaaaggcacccggtctttccgccttcaggagtatccctgctagtgaattctagtagggctctgcttggtgccaacctcccccaaatgcgcgctgcaggagtgctcttccccaactcaccctagtatcctctcatgtgtgtgcttggtcagcatatctgagacgatgttccgctgtcccagaccagtccagtaatggacgggccagtgtgcgtagtcgtcttccggcttgcccggcgcatgtttggtgaaccggtggggtaaggttggtgtgcccaacgcccgtactttggtgatacctcaagaccacccaggaatgccagggaggtaccccgcttcacagcgggatctgaccctgggctaattgtctacggtggttcttcttgcttccacttctttctactgttt

SEQ ID NO: 932 - DNA, 731 bp, Unknown
  Description of Unknown: unclassified Enterovirus sequence
ttaaaatagcctgagggttgctcccacccacggggtccacgtgacgtagtactctggtatctcggtacctttgtacgcctattttatatccccttccccctttgtaacttagaagaaataagcaaactgcccaatagcggcacaatacccaattgtgttacgggcaagcactcctgtttccccggaagggtctatcggtatgctgtacccacggcagaagtatgacctaccgttaaccggccatgtacttcgagaagcctagtaccaccatgaaggttgattgatgttacgttccccagcaaccccagctggtagttctggtcgatgagtctcggcatcccccacgggcgaccgtggccgaggctgcgctggcggccagcctacacctctttggtgtaggacgtcaagatattgacatggtgtgaagagcctattgagctacgtggtagtcctccggcccctgaatgcggctaatcctaactccggatcgtccgctggcaatcccgccagaagggcgtcgtaatgcgcaagtctggagcggaaccgactactttgggtgtccgtgtttcctgttttatttactgtttggctgcttatggtgacaacttatagttatcatcataagctacttggtcttgccaaccggagaataatttggttatttgttggttttacaaacctacaagagtcagtactcatcctattaattgttctaagaataaacacacaag

SEQ ID NO: 933 - DNA, 732 bp, Hunnivirus A
tcgcccctcctttccccccttattttcccttttccctctctccctccctttgtaacttaacgtttggcaagaaccctcacctgtcaattgggaccaccactttcagtgaccccatgcgaagtagtgagagagaataagctttcttacccttcatttgtgaacccttcagtcgaagccgcttggaataagataggaggaaaagttcattctaaatggagtgaaacatgtacttcagaatttctagcacgcgctgggctttcttgcgtgtgacggcactgtcttgccggagctctccacactgacaccccacgcttgtggaccttggtggcagatgacaacactgcagctggaattgagtgtctggtacactctgtgtaacagtgaaaacaatgtgatcacttcggtgagctagtagcctgtggaccaacaactggtaacagttgcctcaggggccaaaagccacggtgtttacagcaccctactggtttgattggagcaatccaagatgtcacagagttagtaattgccaagcagtccgtactggtatcttgacataccgtgcagttttggatagtgaaggatgccctgacggtacccataggtaacaagtgacactatggatctaagcaggggctcactctacgctgctttacagctggctgtgagttaaaaaacgtctagctatccacaacctaggggactaggttttccttttatttagattacaattat

SEQ ID NO: 934 - DNA, 732 bp, Enterovirus C
ttaaaacagctctggggttgttcccaccccagaggcccacgtggcggctagtacaccggtattgcggtacccttgtacgcctgttttatactcccttttccctgtaacttagaagaaacaaaccaagttcaatagaagggggtacaaaccagtaccaccacgaacaagcacttctgtttccccggtgatgttgcatagactgtacccacggttgaaagcgattgatccgttacccgctcttgtacttcgagaagcctagtatcatcttggaatcttcgatgcgttgcgctcagcactcaaccccagagtgtagcttaggtcgatgagtctggacattcctcaccggcgacggtggtccaggctgcgttggcggcctacctgtggcccaaagccacaggacgctagttttgaacaaggtgtgaagagcctattgagctacatgagagtcctccggcccctgaatgcggctaatcccaaccacggagcaagggtgcacatgccagtgtataccttgtcgtaacgcgcaagtctgtggcggaaccgactactttgggtgtccgtgtttccttttatttttacattggctgcttatggtgacaatcgaagattgttatcataaagcgagttggattggccatccggtgaaagtaaagcatattatttacttggttgttgggattataccactcaatccttttactaacaatacgaggataaaacaacaatactaca

SEQ ID NO: 935 - DNA, 732 bp, Enterovirus B
tgtgggttgttcccacccacagggcccactgggcgctagtacactggtaccaaggtacctttgtacgcctgttttataccccctccccgatccgaaacttagaagtaaagcaaacccgatcaatagtaggtgcgacactccagtcgtatctcgatcaagcacttctgtttccccggactgagtatcaatagactgcccacgcggttgaaggagaaaacgtccgtcatccggctaactacttcgagaaacccagtagcaccatggaagttgcagagtgtttcgctcagcactaaccccgtgtagatcaggctgatgagtcaccgcattccccacgggtgaccgtggcggtggctgcgttggcggcctgcctatggggcaacccataggacgctctaatacggacatggtgtgaagagtctattgagctagttagtaatcctccggcccctgaatgcggctaatcctaactgcggagcacatactcctactccaaggagcagtgtgtcgtaacgggcaactctgcagcggaaccgactactttgggtgtccgtgtttcctattaacatatcactggctgcttatggtgacaattgaaagattgttaccatatagctattggattggccatccggtgtcaaacagagcaatagtgtacctattcgctgggtttatcccattgactgttaaagatatacaaactctctacttgataatacaactaaacactgtaaa

SEQ ID NO: 936 - DNA, 732 bp, Unknown
  Description of Unknown: unclassified Enterovirus sequence
ctgtgggttgttcccactcacagggcccactgggcgttagcacactggtattgcggtacctttgtgcgcctgttttatccaccctttccccatagtaacttagaagtacgttcaaatggtcaataggcggctcagtataccaactgagtctcgaccaagcacttctgttaccccggaccgagtatcaataagctactcacgtggctgaaggagaaaacgttcgttacccggccaactacttcgagaaacctagtaccaccatggatgttgcgcggcgtttcgctccgcactaccccagtgtagatcaggtcgatgagtcaccgcattcctcacgggcgaccgtggtggtggctgcgctggcggcctgcccatggggcaacccatgggacgcttcaatacagacatggtgtgaagagtctattgagctagttggtagtcctccggcccctgaatgcggctaatcctaactgcggagcagatccccacacaccagtgggcagtctgtcgtaatgggtaactctgcagcggaaccgactactttgggtgtccgtgtttccttttattcttatactggctgcttatggtgacaattgaaagattgttaccatatagctattggattggccatccagtgtctaacagagcaataatctatctttttgttggattcgtcccacttgactacagagcacttgcaacgctcaattacattatagatctcaacacaacgaa

SEQ ID NO: 937 - DNA, 733 bp, Unknown
  Description of Unknown: unclassified Enterovirus sequence
cttgtacccactcacagggcccactgggcgctagcactctgattccacggaatctttgtgcgcctgttttataaccccttccccaacttgaaacgtagaagcaatacacataaccgatcaatagcaggcgtgacgcaccagtctcgtctcgatcaagcacttctgtttccccggaccgagtaacaatagactgctaacgcggttgaaggtgaaaacgttcgttatccggctaactacttcgagaagcccagtaacactatgaaagctgcggagcgttacgttcagcactcccccccgtgtagttcaggccgatgagtcactgcgatccctacgggcgaccgtagcagtggctgcgctggcggcctgcctatggggcaacccataggacgctctaaagtggacatggtgcgaagagctaattgagctagttagtagtcctccggcccctgaatgcggctaatcctaactgcggagcgcacgcctccaacccagggggtggtgcgtcgtaacgggcaactctgcagcggaaccgactactttgggtgtccgtgtttccttttattcttatattggctgcttatggtgacaatcacagagttgttaccatatagctattggattggccatccggtgtgcaacagagctatcatttatctatttataggttttgtaccattaactttgagatctacgaccaccctagagtacatattggttttaaattcaattagac

SEQ ID NO: 938 - DNA, 733 bp, Enterovirus B
ctgtgggttgttcccacccacagggcccactgggcgccagcactctgattccacggaatctttgtgcgcctgttttacaaccctccccaatttgtaacgtagaagcaatacacactactgatcaatagtaggcatggcgcgccagtcatgtcatgatcaagcacttctgttccccggactgagtatcaatagactgctcacgcggttgaaggagaaaacgttcgttacccggctaactacttcaagaaacctagtagcaccatggaagctgcggagtgtttcgctcagcacttcccccgtgtagatcaggtcgatgagtcactgcaatccccacgggcgaccgtggcagtggctgcgttggcggcctgcctatggggtaacccataggacgctctaatgtggacatggtgcgaagagtctattgagctagttagtagtcctccggcccctgaatgcggctaatcctaactgcggagcacatgccttcaacccaggaggtggtgtgtcgtaacgggtaactctgcagcggaaccgactactttgggtgtccgtgtttccttttatccttatattggctgcttatggtgacaatcacggaattgttgccatatagctattggattggccatccggtgtctaacagagctattgtatacctatttgttggatttgtaccactaaattacaaggttttaaacactctcaaccttataatactactcaactcagcaaa

SEQ ID NO: 939 - DNA, 733 bp, Enterovirus D
ttaaaacagccttggggttgttcccacctcaagggcccacgtggcggccagtactctggtatctcggtacctttgtacgcctgttttaattccctccccaacgtaacttagaagcttttaaaccaaagctcaataggcggagcgcaaaccagcgctcttatgagcaagcacttctgtctccccggtgtggttgtatagactgtccccacggttgaaaacaacttatccgttaaccgctatagtacttcgagaaacctagtattgccttcggagtgtcgatgcgttgcgctcagcacactaacccgtgtgtagcttgggtcgatgagtctggacgtaccccactggcgacagtggtccaggctgcgttggcggcctactcgtggtgaaaaccatgagacgctagacatgaacaaggtgtgaagagtctattgagctactatagagtcctccggcccctgaatgcggctaatcctaaccatggagcaagtgctcacaaaccagtgggttacttgtcgtaatgcgcaagtccgtggcggaaccgactactttgggtgtccgtgtttcactttttacttttatgactgctaatggtgacaatttaatattgttaccatttggcttgtcgaattgatcacataagatctatagttttgttcactgatttgctttcaaataatctcacctcaaaacctccagtacataacatttaaagagtttaaacttatttataaca

SEQ ID NO: 940 - DNA, 734 bp, Unknown
  Description of Unknown: unclassified Picornaviridae sequence
ctccagcacatgtctattggtgcacttgagctgatccaagcaacggatgtacacacccggttcactaacactttcgcgacagctacccctcactgggaccggttcacaacaacgggccacggggttgcccccggtggtacggcacgtctggaataccggcaatgtgtaccacacactcaggtgagactgccactacttgagttagctactaggagtagccgcacccgccgaatgtcacaacccgcgcagttctgcattcccccgcacctggcggggagctggatggtgttgtaatgctcaccaccgctaatccgggaatcctaggactgacctgttgtgttttagacctcaagaagttaatcactacgagatcgcctagtgcccagttcgcgcgctggagcaggacccaccacggcctttgtgatgggggaatgcagaactgcgcgggttgtgacattcggcgggtgcggctactcctagtagctaactcaagtagtggcagtctcacctgagtgtgtggtacacattgccggtattccagacgtgccgtaccaccgggggcaaccccgtggcccgttgttgtgaaccggtcccagtgaggggtagctgtcgcgaaagtgttagtgaaccgggtgtgtacatccgttgcttggatcagctcaagtgcaccaatagacatgtgctggaggtacccgtaaggatctgaccagtagctaattagtccctgttggtgt

SEQ ID NO: 941 - DNA, 734 bp, Unknown
  Description of Unknown: unclassified Orivirus sequence
ttctctcccccctctgggccgccatccttggccagaaaccctcacgagtgcttgtggtaggtcccaggccaatattcttcgtaaggcttggttccaattttccaccactcgtgtttgggttctggcctatggtacccagaggggcggtttgggggaattaactccccctcccctgtggtcctataccaccccacacctctgtgggctttctttactatcttcttgttttccgacttttaaacactaggcaggcgcgcctagtcatacaccgcccggctggtctttccagctcttgtgggcggtgcgcgctggtccatcgtgcccagcgacatagcaccttgtggacacctccgaacgccctcccctgtatggggtggtgcccaggggtttcagtgtggtgacacactccctggggcccgaaaggctagtgtgcaacaggtgaggtacagccagctgcccccgtggctggagggaccaagcttgtgaagcacacctcaccttcttgggggtgggctagtaagtggtgaaagcatagtgtccgtgtcgctggccaacactttgggtcaagtccagccactcagtgagtagatgcccaggaggtacccctagtggatctgacttggggcctgttacttaatgcaggttaaaaactatgaaagctgagtagtgtagcccggctggtggcttctcttccttattcattctattttatggtgacaaacgcaactgaagcc

SEQ ID NO: 942 - DNA, 734 bp, Enterovirus A
gcctgtgggttgtacccacccacagggcccactgggcgctagcactctggcaccacggtacctttgtgcgcctgttttatcaccctaccccattcggaacttagaagcaatacacaaccgaccaatagtgggtgtggcacaccagccgcatcttggtcaagtacttctgtttccccgggttgagtatcaataagctgctcacacggctgaaggagaaaacacccgtcacccggccaactacttcgagaaacctagtaccactatgaatgttgcaaggcgtttcgctcagcacttcccccgtgtagatcaggtcgatgagtcaccgcattccccacgggcgaccgtggcggtggctgcgttggcggcctgcctatgggttaacccatgggacgccttaatactgacatggtgcgaagagtctattgagctagttggtagtcctccggcccctgaatgcggctaatcctaactgcggagcacatactcacaagccagtgagcggtgtgtcgtaacgggtaactctgcagcggaaccgactactttgggagtccgtgtttccttttatccttatattggctgcttatggtgacaattggagaattgttaccatatagctattggattggccatccggtgtctaatagagctattatatacctatttgttggatttactccactaacacacaaatccctaaacactttgtgctttatcttaaacttaaatacacgaaa

SEQ ID NO: 943 - DNA, 734 bp, Enterovirus C
gggggttgttcccaccccagaggcccacgtggcggctagtactccggtatcacggtacccttgtacgcctgttttatacccccttcccccgtaacttagaagcaataatccaagttcaatagaagggggtacaaaccagtaccaccacgaacaagcacttctgttaccccggtgaagttgtatagactgtgcccacggttgaaagcgaccgatccgttatccgctcttgtacttcgagaagcccagtatcatcttggaatcttcgatgcgttgcgctcagcactcaaccccagagtgtagcttaggtcgatgagtctggacggtcctcaccggtgacggtggtccaggctgcgttggcggcctacctgtggtccaaagccacaggacgctagttgtgaacaaggtgtgaagagcctattgagctacatgagagtcctccggcccctgaatgcggctaatcctaaccacggagcaagtgctcacaacccagtgagtggcttgtcgtaacgagcaattctgtggcggaaccgactactttgggtgtccgtgtttcctttattttattatatggctgcttatggtgacaatcattgattgttatcataaagcgagttggattggccatccggtgaaagtaaagcacattatttatctttttgttggatttactccattgagtgtttttactccagacgtgattcgagcagtcttattgattagaagcatctgccaca

SEQ ID NO: 944 - DNA, 734 bp, Enterovirus C
ttaaaacagctctggggttgttcccaccccagaggcccacgtggcggctagtacaccggtattacggtacccttgtacgcctgttttatactccctcccccccgtaacttagaagtacaaaactcaagttcaataggagggggtacaaaccagtaccaccacgaacgagcacttctgtctccccggtgaggttacatagactgtccccgcggttgaaagtaaccgatccgttatccgctcttgtccttcgagaagcccagtaccatcttggaatcttcgatgcgttgcgctcaacactcaaccccagagtgtagcttaggtcgatgagtctggacactccccaccggcgacggtggtccaggctgcgttggcggcctacctgtggcccaaagccacaggacgctagttgtgaacaaggtgtgaagagcctattgagctacaagagagtcctccggcccctgaatgcggctaatcccaaccacggagcaggtgacttcaagccagaagttggcctgtcgtaacgcgtaagtctgtggcggaaccgactactttgggtgtccgtgtttccctttattcttacaatggctgcttatggtgacaatcatagattgttatcataagccgaattggattggccatcgggtgagaatcagatcagttacttacctgtttgttggattcactccgttgacactttacatactaacccttgtcaatacacctgtattatcata

SEQ ID NO: 945 - DNA, 734 bp, Enterovirus B
gcctgtgggttgttcccacccacagggcccactgggcgttagcacactggtattccggtacctttgtgcgcctgttttatccaccctccccaatgtaacgtagaagctacgctcaaacggtcaacagatagtccagtaatccagctgggccacgaccaagcacttctgtttccccggacagagtaccaataagctgctcgcgcggctgaaggggaaaacgttcgttacccggccaattacttcgagaaacctagtaccgccatggacgttgcgcagcgtttcgctccacacaaccccagtgtagatcaggtcgatgagccaccgcattccccacgggcgaccgtggcggtggctgcgttggcggcctgcccatggggtaacccatgggacgcttcaatacagacatggtgcgaagagtctattgagctaattggtagtcctccggcccctgaatgcggctaatcctaactgcggagcaggtacccacaacccagtgggtcacctgtcgtaatgggcaactctgcagcggaaccgactactttgggtgtccgtgtttccttttaacctttacactggctgcttatggtgacaattgaaagattgttaccatatagctattggattggccatcctgtgagtaatagagcgattgtatacttatttgttggctttataccactcaatttgaaagctttacagacactgaattatattgtggcattaaacacagcaaa

SEQ ID NO: 946 - DNA, 734 bp, Enterovirus B
cctgtgggttgtccccactcacagggcccactgggcgccagcacactggtatcaaggtacctttgtgcgcctgttttatagccccttccccgaatgtaacgtagaagctgaacccaagcggtcaacaggcggctcagaacaccatctgggtcttgaccaagcacttctgttaccccggactgagtatcaataagctgctcacgcggctgaaggagaaaatgttcgttatccggccaattacttcgagaaacctagtaccaccatgaaggttgcgcagtgtttcgctccgcacaatcccagtgtagatcaggtcgatgagtcaccgcgttcctcacgggcgaccgtggcggtggctgcgctggcggcctgcccatggggcaacccatgggacgcttcaatactgacatggtgcgaagagtcaattgagctaattggtagtcctccggcccctgaatgcggctaatcctaactgcggagcagatgcccaagctccagtgggtagtctgtcgtaacgggtaactctgcagcggaaccgactactttgggtgtccgtgtttccttttattcttacattggctgcttatggtgacaattgagaaattgttgccatatagctattggattggccatccggtgacgaatagagcaattgtgtatctttttgttggattcataccactagataatacaaacttcaaaaccttgtgttacatcattaggttaaacacagcaag

SEQ ID NO: 947 - DNA, 735 bp, Aichivirus A
ggggggcctcggccccctcaccctcttttccggtggtctggtcccggaccaccgttactccattcagcttcttcggaacctgttcggaggaattaaacgggcacccactcacccccatctccccctgtaacttgaagtgtgtgctcgtgaccttgactcctgcgggcttcaccgacccgtccagtgaacaaactgctaggtgatttcttcccctcccctagcctggatgttccacatccaggtcttcttcccccagcccgacatgtcatgggctgtttggaatccccgcgaaagctgctaacgtggcaattgtgggtcccccttccaacaagacaccgagtctttctcccttaaggctagccccgtgtggtgaattccaccgggcaactagtggtgtcaatgcatgcctccgacctcggccgcggagtgctgccccccaagttgcgaaactgaccaaggattgtgctgcctggcaagcatagtctgaggagatgttccgctgtggttgccaaacctggtaacaggtgccccagtgcgcgtagtctccttccggttcgtccggctgtcctttggtaaagacacaatgtaaggggcgtgtgccaacgccctggaaagagtgaacttctactgccctaggaatgccacgcaggtacccctggtttcttaccagggatctgagcgtgggctaattgtctaacgggtagtttcatttccctcccttcttttgttgacatc

SEQ ID NO: 948 - DNA, 735 bp, Unknown
  Description of Unknown: unclassified Kobuvirus sequence
gggtgggggggtgtcggccccctcaccctcttttccggtggtctggacccggaccaccgttactccattcagcttcttcggaacctgttcggaggaattaaacgggcacccactttcctgtcctctccccttttctgtaactccaagtgtgtgctcgtaatcttgactcccgcggattgaccgctccgctggtgaacaaactgctaggtcatctcctccccacccttgggcgtccttccgggcgtccacaccctccccccagcctgacgtgtcacaggctgtacaaagaccccgcgaaagctgctaacgtggcaattgtgggtcccccctttgtaaaggaaccgagtctttctcccttaaggctagacccctgtgtgaattcacaggtggcaactagtggttccactgcatgctcccgacctcggccgcggagtgctgttccccaagtcgtaacactgaccttcacttatgtgcctggcaagcatatctgagaagatgttccgctgtggctgccaaacctggtaacaggtgccccagtgtgcgtagtcttcttccgtcttcggacggtaggtgttaggtaaagatgcggcgtaaggttcaagtgccaacgccctggaagggatgacccttctactgccctaggaatgccgcgcaggtaccccaggttcgcctgggatctgagcgcgggctaattgtctacgggtagtttcatttccctcttcttccactggcatc

SEQ ID NO: 949 - DNA, 735 bp, Enterovirus B
cttgtgggttgttcccacccacaaggcccactgggcgctagcacactggtattacggtacccttgtgcgcctgttttattcaccccctccccctacgtaacttagaagcgatacctacatggtcaacaggtgccccagcataccagctgggtcatgaccaagcaattctgttaccccggactgagtatcaataagctgctcgcgcggctgaaggagaaaacgttcgttacccggccagttacttcgagaaacccagtaccaccatgaaggttgcgcagtgtttcgctccgcacaaccccagtgtagatcaggtcgatgagtcaccgcgttccccacgggtgaccgtggcggtggctgcgttggcggcctgcccatggggcaacccgtgggacgcttcaatactgacatggtgtgaagagtctattgagctaactggtagtcctccggcccctgaatgcggctaatcctaactgcggagcagatgcccacatgccagtgggtggtctgtcgtaacgggcaactctgcagcggaaccgactactttgggtgtccgtgtttccttttattcctaaactggctgcttatggtgacaattgagagattgttaccatatagctattggattggccatccggtgacgaacagagctatcatttatttatttgttggttttgtgccgttgaaccgcaaagttctacacaccatcaatttcatcctactgcttaactcgacaaa

SEQ ID NO: 950 - DNA, 735 bp, Enterovirus B
agcctgtgggttgcacccacccacagggcccactgggcgccagcactctggtactgcggtacctttgtgcgcctgttttatcaccccaccccatccggaacgtagaagctagacttaaatggtcaatagacggcccagtatgccaattgggtctcgaccaagcactcctgtttccccgggtttagtatcaataagctgctcacgtggctgaaggagaaaacacccgttatccggccaactacttcgagaaacttagtaccgctatgaacgttgcaaggcgtttcgctcagcacttcccccgtgtagatcaggccgatgagtcaccgcattcctcacgggcgaccgtggcggtggctgcgctggcggcctgcctatgggcttgcccataggacgccttaatactgacatggtgcgaagagtctattgagctagttggtagtcctccggcccctgaatgcggctaatcctaactgcggagcacatactcacaaaccagtgagcagtgtgtcgtaacgggcaactctgcagcggaaccgactactttgggtgtccgtgtttccttttattcctacactggctgcttatggtgacaattaaagaattgttaccatatagctattggattggccatccggtgtctaacagagctattatatacttgtttgttggattcataccacttgattccaatagctataacaccctactttacatcgttcatttgaacacgagaaa

SEQ ID NO: 951 - DNA, 736 bp, Unknown
  Description of Unknown: unclassified Kobuvirus sequence
gggtgggggggcctcggccccctcaccctcttttccggtggtctggacccggaccaccgttactccattcagcttcttcggaacctgttcggaggaattaaacgggcacccactttcctgtcctctccccctttctgcaactcaagtgtgtgctcgtaatcctgactcccacgggttgaccgccccgttggtgaacaaacagctaggtcattccctccctacccctgggcgccatttcagtggcgttcatatcctccccccagcctgacgtgtcacaggctgtgcaaagtccccgcgaaagctgctcacgtggcaattgtgggtcccccctttgtgaaggaaccgagtctttctcccttaaggctagacccctgtgtgaactcacaggtggcaactagtggttccactgcatgctcccgacctcggccgcggagtgctgttccccaagtcgtgacactgacctccacttatgtgcctggcaagcatatctgagaagatgttccgctgtggctgccaaacctggtaacaggtgccccagtgcgtgtagtcttcttccgtctccggacggtaagtgtgtggtaaagatgcggcgtaaggttcaagtgccaacgccctggaagggatgacccttctactgccctaggaatgccgcgcaggtaccccaggttcgcctgggatctgagcgcgggctaattgtctacgggtagtttcatttccctctcttttcactggcatc

SEQ ID NO: 952 - DNA, 736 bp, Enterovirus C
cccactggaggatattcactatatcctccagtgtttcccactggaggatatggtactgcggtatcacggtacccttgtacgcctgttttatactccccttccctgcaacttagaagattgtgaaaacctgtgttcaataggaagggggtacaaaccagtaccaccacgaacaagcacttctgtttccccggtgaagttgtataaactgtatccacggttgaaaacgactgatccgttacccgctctagtacttcgagaagcctagtatcatcttggaatcatcgatgcgttgcgttcatcactcaaccccagagtgtagcttaggctgatgagtctggacaatcctcaccggtgacggtggtccaggctgcgttggcggcctacctgtggcccaaagccacaggacgctagatgtgaacaaggtgtgaagagcctattgagctactagagagtcctccggcccctgaatgcggctaatcccaaccacgaagcaagtgctcacaacccagtgagtagcttgtcgtaatgcgcaagtttgtggcggaaccgactactttgggtgtccgtgtttcctttttacttttgtatggctgcttatggtgacaatcattgattgttatcataaagcgaattggattggccatccggtgagagcgagcacaatcacttatttgttcgttggattcactcctttaacaaaattttattgttctcttaattagaaaacatcatcaca

SEQ ID NO: 953 - DNA, 736 bp, Enterovirus C
ccggggttgttcccaccccggaggcccacgtggcggctagtactctggtaccacggtacccttgtacgcctgttttatatcccctccccacgcaactttagaagaaattcaccaagttcaatagggggggtacgaaccagtaccaccacgaacaagcacttctgtttccccggtgattttacataggctgtacccacggctgaaagtgaatgatccgttacccgcttgagtacttcgagaagcctagtaccaccttggaatctccgatgcgttgcgttcagcactctaacccgagtgtagcttaggctgatgagtctgggcgatccccaccggcgacggtggcccaggctgcgttggcggcctacccgtggctaacgctacgggacgctagttttgaacaaggtgtgaagagcctattgagctacccaagaatcctccggcccctgaatgcggctaatcccaaccatggagcaagtgccctcaagccagggggtggcttgtcgtaacgcgtaagtctgtggcggaaccgactactttgggtgtccgtgtttccttttatttcatatttggctgcttatggtgacaatcacagattgttatcataaagcgaattggattggccatccagtgaaatataagctcattgtttatctccttgttggatttgttctgttaggaaattcctcaataaagttgactcgggtaatcttagtgattagaagtcatcatttcaaca

SEQ ID NO: 954 - DNA, 736 bp, Enterovirus B
agcctgtgggttgttcccacccacagggcccaccgggcgctagcacactggtatcccggtacctttgtgcgcctgttttacacaccctcccccgatggcaacttagaagatttccacacacggtcaataggcggctcagtataccaactgggtcatgaccaagcacttctgttcccccggactgagtatcaataagctgctcacgtggctgaaggagaaaacgttcgttatccggccaattacttcgagaagcttagtaccaccatagaggttgcgcagtgtttcgctccgcacaaccccagtgtagatcaggtcgatgagtcaccgcactcctcacgggcgaccgtggcggtggctgcgctggcggcctgcccatggggcaacccatgggacgcttcaatactgacatggtgcgaagagcctattgagctaattggtattcctccggcccctgaatgcggctaatcctaactgcggagcagatacccacgagccagtgggcagtctgtcgtaatgggtaactctgcagcggaaccgactactttgggtgtccgtgtttccttttattcctatattggctgctaatggtgacaattgagagattgttgccatatagctattggattggccatccggtgacaaacagagcgattatctatctatttgttggcttcataccattaaaccttagagtcctaaagaccctcaacttaattatacaatttaactctgcgaa

SEQ ID NO: 955 - DNA, 737 bp, Unknown
  Description of Unknown: unclassified Kobuvirus sequence
ggggcttcggccctcacaccctcttttccgatggtctggtcccggaccaccgtcactccattcagcttcttcggaacctgttcggaggaattaaacgggcaccccacttcccccccccaccctcgcaacttcaagtgtgtgtgcccataaccttgacccctgccggtatgccgcccggttcagtggacaaactgctaggcaaattcccccctccccctgtggctggtccttcaaccagccactctcttccccccagccggacgtgctacaggctgtgcaaagcccccgcgaaagctgctcacgtggcaattgtgggtcccccctttgtcaaggcttcgagtctttctcccttaaggctagtcccgtactgtgaaatcagtgtgggcaactagtgaagccactgcacgctcccgaccacggacgcggagtgctgtcccccaagtcatgacactaacaccaagctgtgctgcctggcaagcatagcctgggaaggtgttccgctgtggctgccaaacctggtaacaggtgccccagtgtgtgtaaccttcctccagtcttcggactggcagctttgtgtgaagacgtgacgtaaggttcaagtgccaactccctggaagggatgacccctctactgccctaggaatgctacgcaggtacccctggttcgccagggatctgagcgtaggctaattgtctacgggtagtttcatttcccacctttttatttctttagcatc

SEQ ID NO: 956 - DNA, 737 bp, Enterovirus A
ccgatctgttgtacccacccacagggcccactgggcgctagcactccgattctgcggaatctttgtgcgcctgttttatgaccctcccccgaaacttgtaacttagaagttatgtacatcaccgatcaatagcaggcgtggcgcaccagccatgtcttgatcaagcacttctgtacccccggactgagtatcaatagactgctcacgcggttgaaggagaaaatgttcgttacccggctaactacttcgagaaacctagtaacaccattgaaactgcggagtgtttcgctcagcattccccccatgtagatcaggtcgatgagtcactgcttaccccacgggcgaccgtggcagtggctgcgttggcggcctgcctatggggcaacccataggacgctctaaagtggacatggtgcgaagagtctattgagctagttagtagtcctccggcccctgaatgcggctaatcctaactgcggagcgcatgtcctcaaaccagagggtggtgcgtcgtaatgggtaactctgcagcggaaccgactactttgggtgtccgtgtttcttttgttcttaaaatggctgcttatggtgacaatcgaggaattgttaccatatagctattggattggccatccggtgtgcaacagagctattatctacttgtttgtcggatacatccccttaacacctaaatcctttaatacattgcattatattttaacattgaacgcgagaaa

SEQ ID NO: 957 - DNA, 737 bp, Enterovirus C
ctgggggttgttcccaccccagaggcccacgtggcggctagtactccggtattacggtacccttgtacgcctgttttatactccctttccccgtaacttagaagcaacaatccaagttcaatagaagggggtacaaaccagtaccaccacgaacaagcacttctgtttccccggtgaagttgcatagactgtacccacggttgaaagcgactgatccgttatccgctcttgtacttcgagaagcctagtatcactttggaatcttcgatgcgttgcgctcagcacccaaccccggggtgtagcttaggtcgatgagtctggacgttcctcaccggcgacggtggtccaggctgcgttggcggcctacctgtggcccaaagccacaggacgctagttgtgaacaaggtgtgaagagcctattgagctacatgagattcctccggcccctgaatgcggctaatcccaaccacggagcaaatgcccacaacccagtgggtggtttgtcgtaacgagcaattctgtggcggaaccgactactttgggtgtccgtgtttccctttttattattatgtggctgcttatggtgacaatcattggttgttatcataaagcgaattggattggccatccggtaagagtaaaacatatcatttacctttttgttggatttactccattgagtgttttcaccccagacgtaattcgtgtggttctgctgattagaagtttctatcaca

SEQ ID NO: 958 - DNA, 737 bp, Enterovirus J
ttaaaatagcctcagggttgttcccaccctgagggcccacgtggcgtagtactctggtattacggtacctttgtacgcctattttacccccttccccttgtaacttagaagcaaagcaaaccagttcaatagtaagcaacacaacccagtgttgtgacgaacaagtacttctgtttccccgggagggtctgacggtaagctgtacccacggctgaagtatgacctaccgttaaccggctacctacttcgagaagtctagtaataccattgaagttttgttggcgttacgctcaacacactaccccgtgtgtagttttggctgatgagtcacggcattccccacgggcgaccgtggccgtggctgcgttgcggccaaccaaggggcgcaagctccttggacgtcacttaacagacatggtgtgaagaacctattgagctaggtagtagtcctccggcccctgaatgcggctaatcctaactccggagcacatcagtgcaacccagcatttggtgtgttgtaatacgcaagtctggagcggaaccgactactttgggtgtccgtgtttcctgttttaccttatttggctgcttatggtgacaatttgatattgttaccatatagctgttggattggccatccggatttttgaaagagacccaaaactttcttctctacttcagattcaagtgcgaagttttccttttcatatattacttactaatttgaagtaccaaag

SEQ ID NO: 959 - DNA, 737 bp, Unknown
  Description of Unknown: unclassified Enterovirus sequence
ttaaaatagcctcagggttgttcccaccctgagggcccacgtggtgtagtactctggtattacggtacctttgtacgcctattttatacccccttccccaagtaatttagaagcaagcacaaaccagttcagtagtaagcagtacaatccagtactgtaatgaacaagtacttctgttaccccggaagggtctatcggtaagctgtacccacggctgaagaatgacctaccgttaaccggctacctacttcgagaagcctagtaatgccgttgaagttttattgacgttacgctcagcacactaccccgtgtgtagttttggctgatgagtcacggcactccccacgggcgaccgtggccgtggctgcgttggcggccaaccaaggagtgcaagctccttggacgtcatattacagacatggtgtgaagagcctattgagctaggtggtagtcctccggcccctgaatgcggctaatcctaactccggagcatatcggtgcgaaccagcacttggtgtgttgtaatacgtaagtctggagcggaaccgactactttgggtgtccgtgtttcctgttttaacttttatggctgcttatggtgacaatttaacattgttaccatatagctgttgggttggccatccggattttgttataaaaccatttcctcgtgccttgacctttaacacatttgtgaacttctttaaatcccttttattagtccttaaatactaaga

SEQ ID NO: 960 - DNA, 738 bp, Enterovirus C
ttaaaacagctctggggttgttcccaccccggaggcccacgtggcggctagtactctggtatcacggtacccttgtacgcctgttttatactcccctccccgtaatttagaagttcaaaacttaagttcaatagaagggggtacaaaccagtaccaccacgaacaagcacttctgtttccccggtgaggttgcatagactgtacccacggttgaaggcgactgatccgttatccgctcttgtacttcgggaagcccagtatcatcttcggatcttcgatgcgttgcgctcagcactcaaccccagagtgtagcttaggctgatgagtctggacaatcctcactggtgacagtggtccaggctgcgttggcggcctacctgtggcccaaagccacaggacgctagatgtgaacaaggtgtgaagagcccactgagctacaagagagtcctccggcccctgaatgcggctaatcccaaccacggagcaggtagttgcaaaccagcagccggcctgtcgtaacgcgcaagtctgtggcggaaccgactactttgggtgaccgtgtttccttttatcttttcaatggctgcttatggtgacaatcattgattgttatcataaagcgacttggattggccatccggtgaaatttaagtgcgtcagctatccatttattggatttaccccactaaaaccacatacgcctggccttagtgttgttggtgagacgctaccatcaaa

SEQ ID NO: 961 - DNA, 738 bp, Enterovirus B
cagcctgtgggttgtacccacccacagggcccacgtggcgctagcacactggtattccggtacctttgtgcgcctgttttatccaccccgtcccccactgtaacttagaagatatgcaaccctgatcaacagcaggtgtgacactccagtcacatcacgatcaagcacttctgttgccccggaccgagtatcaataagccactcgcgtggctgaaggagaaaacgttcgttatccgaccaactacttcgagaaacctagtaccaccctggaagttgcgtagcgtttcgctccacacaaccccagtgtagatcgggtcgatgagtcaccgcgttcctcacgggcgaccgtggcggtggctgcgttggcggcctgcccatggggcaacccatgggacgcttcaatactgacatggtgcgaagagtctattgagctagttggtggtcctccggcccctgaatgcggctaatcctaactgcggagcagatacccacatgccagtgggcgatctgtcgtaatgggtaactctgcagcggaaccgactactttgggtgtccgtgtttccttttattcttatattggctgcttatggtgacaattgagaagttgttaccatatagctattggattggccatccggtgacaaatagagcgattgtttatttgtttgttggatttataccactgaacttcaaggttttaaacaccctcaattttgtactagttcttaatacatcaaa

SEQ ID NO: 962 - DNA, 739 bp, Unknown
  Description of Unknown: unclassified Enterovirus sequence
acagctctggggttgtacccaccccagaggcccacgtggcggctagtactctggtgtcacggtacctttgtacgcctgttttataccccctcccccgtaacttagaagctataaaccaagttcaatagaagggggtacaagccagtaccaccacgaacaagtacttctgttaccccggtgacgttgtatagactgctcgcgcggtcgaaagcgacagatccgttacccgcttgtgtacttcgagaagtctagtaccaccttggaatcttcgatgcgttgcgctcagcactttaccccagagtgtagcttaggctgatgagtctgggcgctccccatcggcgacgatggcccaggctgcgttggcggcctacctatggctaacgccataggacgctagtagtgaacaaggtgtgaagaacctattgagctacacaagagtcctccggcccctgaatgcggctaatcctaaccatggagcaagtgatcacaatccagtgatattcttgtcgtaacgcgcaagtccgtggcggaaccgactactttgggtgtccgtgtttccctttatttttattatggctgcttatggtgacaatcattgattgttatcatagagcgaattggattggccatccggtgaaagtgaaactcattatctacttatttgttggattcactccatcaaacacattcacttatagtatcatcttgacagtgattagaattagacagtcgtatcaca

SEQ ID NO: 963 - DNA, 739 bp, Enterovirus B
ttaaaacagcctgtgggttgtacccacccacagggcccactgggcgccagcactctggtatcgcggtacctttgtgcgcctgttttgtttccctttaccccgaatggaacttagaagtaatgcacactgatcaatagcaggcgtggcaccagccacgtgatgatcaagcactactgtttccccggaccgagtatcaatagactgcttgcgcggttgaaggagaaaacgttcgttatccggctaactacttcgagaaacccagtaacaccatgaaggttgcaggcgatttcgctcagcacatccccagtgtagatcaggtcgatgagtcaccgcgttcccacgggcgaccgtggcggtggctgcgttggcggcctgcctatggggtaacccataggacgctctaatacggacatggtgcgaagagtctattgagctagttagtgttctccggcccctgaatgcggctaatcctaactgtggagcacatgcccctaatccaaggggtagtgtgtcgtaacgggcaactccgcagcggaaccgactactttgggtgtccgtgtttccttttattcttacattggctgcttatggtgacaattgagagattgttgccatatagctattggattggccatccggtgtctaatagagcgataatctaccagtttgttggatttgtaccactcaacttttcaacactcaagacactcaactacatactagcactcaacacagtaaa

SEQ ID NO: 964 - DNA, 739 bp, Enterovirus B
ttaaaacagcctgtgggttgtacccacccacagggcccattgggcgcttgcacactggtattccggtacctttgtgcgcctgttttatacatcctacccccgtaacttagaagcaagatcacccgatcaccaggaaatgtggcaaaccagtcacattctgatcaagcacttctgtttccccggactgagtatcaataggctgttcacacggctgaaggagaaaacgttcgttacccggccaactacttcgaaaaacctagtatcaccgtgaacgttgcagagtgtttcgctcagcactttccccgtgtagatcaggtcgatgagtcaccgcattccccacgggcgaccgtggcggtggctgcgttggcggcctgcctgcggggcaacccgtaggacgctctaatacagacacggtgtgaagagtctattgagctagttggtagtcctccggcccctgaatgcggctaatcctaactgcggagcgagcgcttgtaatccaacaggtagctcgtcgtaacgggtaactctgcagcggaaccgactactttgggtgaccgtgtttccttttatttcattactggctgcttatggtgacaatcacagagttgttaccatatagctattggattggccatccggtgtcaaatagagcaattgtgtttctttttgttgggtttgtaccacttgacttgaccagctacaacactctgtgctacattgttagattgaacacagcaaa

SEQ ID NO: 965 - DNA, 740 bp, Enterovirus A
ttaaaacagcctgtgggttgcacccactcacagggcccactgggcgtcagcactctggtacctcggtacctttgtgcgcctgttttatatcccccccccattgaaacttagaagcaatgcacttcgatcaatagcgggcgcggcgcaccagccacgtcatgatcaagcacttctgtttccccggaccgagtatcaatagactgctaacgcggttgagggagaaaacgtccgttacccggccaactgcttcgagaaatccagtaacatcatgaaaattgcagagtgtttcgctcagcacttccccagtgtagatcaggtcgatgagtcaccgcgttcctcacgggcgaccgtggcggtggctgcgttggcggcctgcctgtggggcaacccgcaggacgctctaatatggacatggtgtgaagaatctattgagccagttggtagtcctccggcccctgaatgcggctaatcctaactgcggagcacgcgccctcaatccagtgggtagcgtgtcgtaatgggtaactctgcagcggaaccgactactttgggtgtccgtgtttccttttattcttacattggctgcttatggtgacaattgagagattgttaccatatagctattggattggccatccggtatcgaatagagcggttatctatcaatttattggatttactccgttgagtgtgcagcagtatcgcactttgcttttaatagtgagactgaatagtgcaaa

SEQ ID NO: 966 - DNA, 740 bp, Enterovirus A
tgtgggttgttcccacccacagggcccactgggcgccagcactctgattccatggaatctttgtgcgcctgttttataacccttccccaatttgcaacttagaagtaatacacactacagatcaatagtaggcatggcgcgccagtcatgtctcgatcaagcacttctgtttccccggactgagtatcaatagactgcccacgcggttgaaggagaaaacgtccgttacccggctaactacttcgagaaacctagtagcaccaaataagctgcagagcgtttcgctcagcacctcccccgtgtagatcaggctgatgagtcactgcaatccccacgggcgaccgtggcagtggctgcgctggcggcctgcctatggggcaacccataggacgctctaatgtggacatggtgcgaagagtctattgagctagttagtagtcctccggcccctgaatgcggctaatcctaactgcggagcacataccttcaatccaggaggtggtgtgtcgtaacgggtaactctgcagcggaaccgactactttgggtgtccgtgtttccttttatccttatattggctgcttatggtgacaatcacggaattgttgccatatagctattggattggccatccggtgtctaatagagctattgtatacctatttgttggatttaccaagttaaatatcaccaactacaccacccttctttatattatattactgaatattagaaagagaaa

SEQ ID NO: 967 - DNA, 740 bp, Enterovirus B
ttaaaacagcctgtgggttgtacccacccacagggcccactgggcgctagcactctggtattacggtacctttgtgcgcctgttttacatcccttcccaatcgtaatttagaagccaaacactacgatcaatagtgggcgtggcacgccagccatgtctcgatcaagcactcctgtttccccgggccgagtatcaatagactgctcacgtggttgaaggagaaaacgctcgttatccggctaactacttcgagaaacctagtaacaccatggaagttgcagagtgtttcgttcagcacttccccagtgtagatcaggccgatgagtcaccgcgttccccacgggtgaccgtggcggtggctgcgttggcggcctgcccatggggtaacccatgggacgctctaatatggacatggtgtgaagagtctattgagctagttggtagtcctccggcccctgaatgcggctaatcctaactgcggagcatgtacctccaatccaggaggtggcgtgtcgtaatgggcaactctgcagcggaaccgactactttgggagtccgtgtttccttttattcttacactggctgcttatggtgacaattgagagattgttaccatatagctattggattggccatccggtgactaacagagcagttatctaccagttcgttggtttcattccattgtgtactcgcgaatacaacactcttcttttaatactagatttaaacaaagcaaa

SEQ ID NO: 968 - DNA, 741 bp, Sapelovirus B
ctcacactcatttcccccctcgcctgtcacaggcaacccccaccccttctcttacgggagttagggccaaggatctgttgcataggcgttgtatcccctaaccttttacctacccatcccaataggactggtatttcggttttgattgagtaatggatactgattctatacctgttacccattcaggggaaaaatggagtttctttcatggatctgacttgatatgaccaagagtcaacactttgcgtgttggccgtatggaatgctttaaggtttattctttggattatgacttcagggttggccgcccaggataaaaggcaattgtggtaagtgatgttagtcattggtggttgaaacctgcctaagacgtcctaggtctacgctgtgcgggccgaagtaagcttaggaataacagggagtatgccattttctgctttcacccaacacgaccgtacacgaaagagctagaggcactttggggcaaagggaaaagctttgcttagcccgaatgttcatttgagtccttgacgaatgcgtcccgtctgtcccgacggtgaggcgtatggcgcatgctcatggcattacccaatggtgtatctgtgaggggggggctcctcacacttagtctagtgctacctgacagggccgcggctggtcgtttgtgtatggtataaccagtagtaatcccccatggattgctttaacttcccctcctcccttaccaagacattctctaag

SEQ ID NO: 969 - DNA, 741 bp, Enterovirus A
ccgatgtgtgggttgtacccacccacagggcccactgggcgctagcactctaatcctacgggattcttgtgcgcctgttttataaccccttccccgatttgtaacttagaagcaatttacattagcgatcaatagacgacatggcacgccagccatgtcttgatcaagcacttctgtttccccgggctgagtatcaatagactgcttacgcggttgaaggagaaaacgctcgttacccggctaactacttcgagaaacctagtagcatcatgaaaactgcagagcgtttcgttcagcactccccccgtgtagatcaggtcgatgagtcactgcaatccccacgggtgaccgtggcagtggctgcgttggcggcctgcctatggggcaacccataggacgctctaatgtggacatggtgcgaagagtctattgagctagttagtagtcctccggcccctgaatgcggctaatcctaactgcggagcgcatactcccaacccagggggtggtgcgtcgtaatgggcaactctgcagcggaaccgactactttgggtgtccgtgtttccttttatccttttattggctgcttatggtgacaattagagaattgttaccatatagctattggattggccatccggtgagcaacagagcaattgtgtatctttttgttggatacgtccccttgacacttagaacctacaacacgctacactatattctaatcttgaactcgagacg

SEQ ID NO: 970 - DNA, 741 bp, Enterovirus A
ttaaaacagcctgtgggttgcacccacccacagggcccactgggcgccagcactctggtatcgcggtacctttgtgcgcctgttttatgacccctccccaaccgaaacttagaagttacacataccgatcaatagtgggcatagcacgccagctgtgtcttgatcaagcacttctgtttccccggaccgagtatcaatagactgctcacgcggttgaaggagaaagcgttcgttatccggctaactacttcgagaaacctagtaacaccatgaaagttgcggagtgtttcgctcagcacttccccagtgtagatcaggtcgatgagtcaccgcgttccccacgggcgaccgtggcggtggctgcgctggcggcctgcctatgggatgacccataggacgcttcaacacagacatggtgtgaagagtctattgagctagttagtagtcctccggcccctgaatgcggctaatcctaactgcggagcacgtgccctcaagccagagggtggcgtgtcgtaacgggcaactctgcagcggaaccgactactttgggagtccgtgtttccttttattcttacactggctgcttatggtgacaattgagagattgttaccatatagctattggattggccatccggtgagcaacagagcgattgtatactcttttgtgggttttgtgccattaaatcttactgtgattaccacactgaaactcatcttgcagtttaatacagcaaa

SEQ ID NO: 971 - DNA, 741 bp, Enterovirus A
gcattggaggctagcccccattggggcgtagcacttccactgggggctagcactccgattctgcggaatctttgtgcgcctgttttataaccctcccccaacttgcaacttagaagttatgtacgttgatcaatagcaggcgtggcacaccagccatgtcttgatcaagcacttctgtaaccccggactgagtatcaatagactgctcacgtggtcgaaagagaaaatgttcgttatccggctaactacttcgagaaacctagtagcaccactgaaactgcggagtgtttcgctcagcacttcccccgtgtagatcaggtcgatgagtcactgcttaccccacgggtgaccgtggcagtggctgcgttggcggcctgcctatggggcaacccataggacgctctaaagtggacatggtgtgaagagtctattgagctagttagtagtcctccggcccctgaatgcggctaatcctaactgcggagcgcatgcccccaaaccagagggtggtgcgtcgtaacgggtaactctgcagcggaaccgactactttgggtgtccgtgtttcttttattctcataatggctgcttatggtgacaattgaggaattgttaccatatagctattggattggccatccggtgtgcaacagagctattatctacttgtttgttggatacattccattgacacctaaatccttcaatacattgcactatattctaacgttgaacgcaagaaa

SEQ ID NO: 972 - DNA, 741 bp, Enterovirus B
taaaacagcctgtgggttgttcccacccacagggcccactgggcgctagcacactggtatcacggtacccttgtgcgcctgttttatccacccgccccctatgtaacttagaagcacatcacaaacggtcaacaggcagctcagtaaaccaactgagccacgaccaggtacttctgttaccccggaccgagtatcaatagactgctgacgcggtcgaaggagaaaacgttcgttacccggccaactacttcgagaaacccagtaccaccatggaggttgcgtggcgtttcgctccacacaaccccagtgtagatcaggtcgatgagtcaccgcattccccacgggcgaccgtggcggtggctgcgttggcggcctgcccatgaggtaactcatgggacgctacaataccgacatggtgcgaagagtctattgagctagttggtagtcctccggcccctgaatgcggctaatcctaactgcagagcggacacctacaaaccagtgggcagtccgtcgtaacgggcaactctgcagcggaaccgactactttgggtgtccgtgtttccttttattctcatattggctgcttatggtgacaattgagagattgttgccatatagctattggattggccatccggtgactaacagagctattgtctacttatttgttggttacgcaccgctcaatttcaaagtcttaaacacgattaatttcatattatcactcaacacaacaaa

SEQ ID NO: 973 - DNA, 741 bp, Enterovirus B
ttaaaacagcctgtgggttgttcccacccacagggcccatgggcgctagcacactggtatcgtggtacctttgtgcgcctgttttatacaccctccccatttgtaacttagaagtaaagcaatattgatcaatagcaagcatggcacaccagccgtgttcagatcaagcacttctgtaaccccggactgagtatcaataggctgccaaagcggctgaaggagaaaacgttcgttaaccggccaactacttcgagaagcccagtatcaccatgaaagttgcagagcgtttcgctcagcactccccccgtgtagattaggtcgatgagtcaccgcatcccccacaggcgactgtggcggtggctgcgttggcggcctacctacggggcaacccgtaggacgctctaatacagacatggtgagaagagcctattgagctagttggtagtcctccggcccctgaatgcggataatcctaactgcggagcatgtgctcgcaatccagcgagaggcatgtcgtaacgggcaactctgcagcggaaccgactactttgggtgtccgtgtttccttttattccttgtttggctgcttatggtgacaattgaaagattgttgccatatagctattgggtcggccacctggtatctaacagagcaattatttacttgtttgttggttttgtacccttaaatctcaaggttcttgaaacccttaactacacattgaaactcaattcattgaa

SEQ ID NO: 974 - DNA, 741 bp, Enterovirus B
ttaaaacagcctgtgggttgttcccactcacagggcctactgggcgctagcactctggtatcacggtacctttgtgcgcctgttttacacacccccctccctaggaatttagaagcaatacacaatgatcaatagtaggcgtggtacgccaaccatgtcttgatcaagcacttctgttcccccggactgagtatcaatagactgctcacgcggttgaaggagaaaacgttcgttacccggccagctacttcgagaaacccagtaacaccatggaaatagcggggcgtttcgctcggcacatccccagtgtagatcaggtcgatgagtcaccgcattccccacgggtgaccgtggcggtggctgcgttggcggcctgcctacagggcgacctgtaggacgcttcaatatggacatggtgcgaagagtctattgagctagctggtagtcctccggcccctgaatgcggctaatcctaactgcggagcgcgcgcctccaatccagggggtggtgcgtcgtaatgggtaactctgcagcggaaccgactactttgggtgtccgtgtttccatttatccttatattggctgcttatggtgacaattgaaaggttgttaccatatagctattggattggccatccagtgtctaacagagcgattgtattcctcttcgttggatttgttccacttaacaaaacaaattaccaaactttgtgttatattgtcaaactaaacacagcaaa

SEQ ID NO: 975 - DNA, 741 bp, Enterovirus B
ttaaaacagcctgtgggttgttcccacccacagggcccaccgggcgctagcacactggtatcgcggtacctttgtgcgcctgttttatttaccctgccctgatgtaacttagaagcatgacaccaacgatcaatagcaggctcaatgcaccaattgggtcaagatcaagcacttctgttaccccggactgagtatcaataagctgctagcgcggctgaaggagaaaaagttcgttacccggccagctacttcgagaaacctagtatcaccatgaaagttgcgtggcgtttcgctccgcacaaccccagtgtagatcaggtcgatgagtcaccgcattccccacgggcgaccgtggcggtggctgcgttggcggcctgcccgtggagcaatccatgggacgctataatacagacatggtgtgaagagtctattgagctagctggtagtcctccggcccctgaatgcggctaatcctaactgcggagcaggtacccacgaaccagtgggcagtctgtcgtaatgggcaactccgcagcggaaccgactactttgggtgtccgtgtttccttttatttcaacttggctgcttatggtgacaattgagagattgttaccatatagctattggattggccatccggtgactaacagagctatcatatacctttttattggctttgtgccacttactctgaaagaggtcaagactctgcattatatcatactattgaatgctataaa

SEQ ID NO: 976 - DNA, 741 bp, Enterovirus B
ttaaaacagcctgtgggttgttcccacccacagggcccactgggcgctagcacaccggtatcacggtacccttgtgcgcctgttttatccacctcccccgttgtaacttagaagctcaatacaaatggtcgatagccagcccgatacgccaattgggttttgaccaagcacttctgttaccccggactgagtaccaataggctgccaaagcggctgaaggggaaaacgttcgttaccccaccaactacttcgagaaacctagtaccaccatgaagattgcgcagcgtttcgctcagcacaaccccagtgtagatcaggtcgatgagtcaccgcattccccacaggcgactgtggcggtggctgcgttggcggcctgcccatggggctacccatgggacacttcaatatcgacatggtgcgaagagtctattgagctagttggtagtcctccggcccctgaatgcggataatcctaactgcggagcaggcacccacaagccagtgggcagcctgtcgtaacgggcaactctgcagcggaaccgactactttgggtgtccgtgtttctttttattcttacactggctgcttatggtgacaattgaagaattgttaccatatagctattggattggccatccagcgactaacagagctattatcttcttgtttgtggggtacgtaccactcaatttcacagtagtaaggactctcaatttcattttgtgcttgaataaggcgaa

SEQ ID NO: 977 - DNA, 741 bp, Enterovirus B
ttaaaacagcctgtgggttgtacccactcacagggcccactgggcgctagcacactggtatcacggtacctttgtgcgcctgttttataatcccttccccaccgtaacatagaagctacacacactgatcaacagcaggcacagcacaccagttgtgtctcgatcaagcacttctgtctccccggaccgagtatcaatagactgcttacgcggttgaaggagaaaacgttcgtcacccggctgactacttcgaaaagcctagtagtaccatgaatgttgcggagtgtttcgctcagcacttcccccgtgtagatcaggctgatgagtcactgcattccccacgggtgaccgtggcagtggctgcgttggcggcctgcccatggggcaacccatgggacgcttcaatacagacatggtgcgaagagtctattgagctagtcagtagtcctccggcccctgaatgcggctaatcctaactgcggagcatgcgcctccgacccagggggtagcatgtcgtaatgggcaactctgcagcggaaccgactactttgggtgtccgtgtttccttttattcttatattggctgcttatggtgacaattgagagattgttgccatatagctattggattggccatccggtgagtaatagagctattatatactcctttgtgggttttgtgccactggatcacaaggtcttgaaaactctcacttttgtcataatactaaacactgcaaa

SEQ ID NO: 978 - DNA, 741 bp, Enterovirus B
taaaacagcctgtgggttgttcccacccacagggcccattgggcgctagcacactgatatcacggtacctttgtgcgcctgttttatctacccctccccgatgcaacttagaagcatgttacaaacggtcaataggtggttcagttaaccaactgagcctcgaccaagcacttctgttaccccggactgagtatcaataggctgctcgcgtggctgatggagaaaacgtccgttacccggccaattacttcgagaaacctagtaccaccatggaagttgcgcagcgtttcgctccgcacaaccccagtgtagatcaggtcgatgagtcactgcgttccccacgggtgaccgtggcagtggctgcgttggcggcctgcccatggggtatcccatgggacgcttcaatactgacatggtgtgaagagtctattgagctaattggtagtcctccggcccctgaatgcggctaatcctaactgcggagcagatacccacgcaccagtgggcagtctgtcgtaacgggcaactctgcagcggaaccgactactttgggtgaccgtgtttccttttattttaatattggctgcttatggtgacaattgaaagattgttgccatatagctattggattggccatccggtaacaaacagagcaattatttacctgtttattggttttatacctctcaaccacaaggttataagtactctcaaccttgttttagcatttaacacagcaaa

SEQ ID NO: 979 - DNA, 741 bp, Enterovirus B
ttaaaacagctctggggttgttcccacccacagggcccactgggcgctagcatactggtatcacggtacctttatgcgcctgttttatccacccctccccaacgtaacctagaagacactcatggatgatcaataggaggctcggcatgccagctgagtctggatcaagcacttctgttgccccggaccgagtatcaataggctgctcacgcggctgaaggagaaaaagttcgttatccggccaattacttcgagaaacccagtaccaccatgaaggttgcgtggcgtttcgctccgcacagccccagtgtagatcaggtcgatgagtcaccgcgttccccacgggcgaccgtggcggtggctgcgttggcggcctgcccatggggtaacccatgggacgcttcaatactgacatggtgcgaagagtctattgagctaattggtagtcctccggcccctgaatgcggctaatcctaactgcggagcagacgtccacaaaccagtgggtggtctgtcgtaacgggcaactctgcagcggaaccgactactttgggtgtccgtgtttcctttattcttatattggctgcttatggtgacaattgagagattgttgccatatagctattggattggccatccggtttgcaatagagcgattatactcctctttgttgggtttgtacctctcaacctcaatagttacaggacattattatacattatccagctgaacacgaaaag

SEQ ID NO: 980 - DNA, 741 bp, Unknown
  Description of Unknown: unclassified Enterovirus sequence
taaaacagcctgtgggttgttcccacccacagggcccactgggcgctagcacactggtatcacggtacctttgtgcgcctgttttatttaccctcccccaacgtaacttagaagcatgactcaaatggtcaacagacaactcagcatgccagctgagcctcgaccaagcacttctgttaccccggactgagtaccagtaagctgctcacgcggctgagagggaaaccgttcgttacccggccaattacttcgagaaacctagtaccaccatgaaagttgcgcagtgtttcgctccgcacaaccccagtgtagatcaggtcgatgagtcaccgcaaaccccacgggtgaccgtggcggtggctgcgctggcggcctgcccatggggcagcccatgggacgcttcaatactgacatggtgcgaagagtctattgagctaattggtgatcctccggcccctgaatgcggctaatcctaactgcggagcagatacccacgcaccagtgggcagtctgtcgtaatgggcaactctgcagcggaaccgactactttgggtgtccgtgtttccttttattcttatactggctgcttatggtgacaattgagagattgttgccatatagctattggattggccatccggttacaaacagagcaattacttacctatttgttggttttgtaccactgaactacaaagtcttgaacaccctcaatttcattacaacacctaacacgttaaa

SEQ ID NO: 981 - DNA, 741 bp, Enterovirus B
ttaaaacagcctgtgggttgttcccacccacagggcccactgggcgctagcacactggtatcatggtacctttgtgtgcctgttttatttcccttccccagatgcaacttagaagcaacactccacgaccactagcaggcgtggcacaccagccatgtcttggtcaagcacttctgtaaccccggactgagtatcaataaactgctcacgcggtcgaaggagaaaacgtccgttacccggccaactacttcgagaaacctagtaacgccatgaaaattgcgaggtgtttcgctcagcacatccccagtgtagatcaggtcgatgagtcaccgcattccccacaggtaactgtggcggtggctgcgttggcggcctgcccatggggtgacccatgggacgcttcaatacggacatggtgtgaagagtctattgagctagttggtagtcctccggcccctgaatgcggctaatcctaactgtggagcatgcgcccccactccagagggtagcgtgtcgtaacgggtaactccgcagcggaaccgactactttgggtgtccgtgtttctttttattcttatattggctgcttatggtgacaattgaaagattgttaccatatagctattggattggccacccagtgacaaacagagcaataatttaccaatttgtgggatttattccaataagtttgaaagtcttgaagacacttaatctagtattacaactcaatagcgcaaa

SEQ ID NO: 982 - DNA, 741 bp, Unknown
  Description of Unknown: unclassified Enterovirus sequence
ccagggggccctgtgggtgggtgcaacccacagggcccactgggcgctagcacactggtattacggtacctttgtgcgcctgttttatacacccttaccctatgcaatatagaagcaaaacgacaaggtcaatagagagcccagtgagccaactgggtcgagaccaagcacttctgtttccccggaccgagtatcaataggctgcttacgcggctgaaggagaaaacgttcgttacccggctaactacttcgaaaaacctagtaacgccatggaagttgcgaaccgtttcgctcggcacttccccagtgtagatcaggtcgatgagtcaccgcattccccacgggcgaccgtggcggtggctgcgttggcggcctgcctatggggcaacccataggacgcttcaatatggacatggcgtgaagagtctattgagctagttagtagtcctccggcccctgaatgcggctaatcctaactgcggagcacatgcccccaacccaggaggtggtgtgtcgtaatgggtaactctgcagcggaaccgactactttgggtgtccgtgtttccttttatcccaatgttggctgcttatggtgacaattgaaagattgttaccatatagctattggattggccatccggtgactaacagagcaatcgtttacctattcattggttacgttccattaaatctcaaggaactaacgactctcaattacattttgctcttgaactctgcaaa

SEQ ID NO: 983 - DNA, 741 bp, Enterovirus B
ttaaaacagcctgtgggttgttcccacccacagggcccattgggcgctagcactctggtatcacggtacctttgtgcgcctgttttacatcccctccccaaattgtaatttagaagtctcacacaccgatcaatagcaagcgtggcacaccagccatgttttgatcaagcacttctgttacccggactgagtatcaatagaccgctaacgcggttgaaggagaaaacgttcgttacccggccaactacttcgaaaaacctagtaacaccatggaagttgcggagtgtttcgctcagcactaccccagtgtagatcaggtcgatgagtcaccgcgttccccacgggcgaccgtggcggtggctgcgttggcggcctgcctacggggaaacccgtaggacgctctaatacagacatggtgcgaagagtctattgagctagttggtaatcctccggcccctgaatgcggctaatcctaactgcggagcacataccctcaaaccagggggcagtgtgtcgtaacgggcaactctgcagcggaaccgactactttgggtgtccgtgtttcattttattcctatactggctgcttatggtgacaattgacgggttgttaccatatagttattggattggccatccggtgactaacagagcaattatatatctctttgttgggtttataccacttagcttgaaagaggttaaaacactacatctcatcattaaactaaatacaacaaa

SEQ ID NO: 984 - DNA, 741 bp, Enterovirus B
ttaaaacagcctgtgggttgttcccacccacaggcccattgggcgctagcactctggtatcacggtacctttgtgcgcctgttttatacacccttcccaagtgtaacttagaagcttaccacacacggtcaataggcgactcagtaagccaactgggtcttgatcaagcacttctgtttccccggactgagtatcaataagctgctcacgcggctgaaggagaaaacgttcgttaaccggccaattacttcgagaaacctagtaacaccatggaggttgcgcagcgtttcgctccgcacaaccccagtgtagatcaggccgatgagtcaccgcactcctcacgggcgaccgtggcggtggctgcgctggcggcctgcccatggggtaacccatgggacgcttcaatactgacatggtgcgaagagtctattgagctaattggtagtcctccggcccctgaatgcggctaatcctaactgcggagcagatacccacatgccagtgggcagtctgtcgtaatgggcaactctgcagcggaaccgactactttgggtgtccgtgtttccttttattcttatactggctgcttatggtgacaattgagagattgttaccatatagctattggattggccatccagtgacaaacagagcgattatttatttgtttgttggttatatcccattaagccaaaaagtcttagccactctcaatttcatactattgcttaatacaacgaa

SEQ ID NO: 985 - DNA, 742 bp, Enterovirus A
ttaaaacagcctgtgggttgttcccacccacagggcctactgggcgctagcacactggtatcccggtacctttgtgcgcctgttttatctacccctccccaagtgaaacttagaagatcatcacatatggtcaataggcggctcagtacaccaactgcgtctcgaccaagcacttctgtatccccggactgagtatcaatagactgctcacgcggttgaaggagaaaacgttcgttatccggctaactacttcgggaagcctagtagcaccttgaaagttgcggagtgtttcgctcagcacttcccccgtgtagatcaggccgatgagccactgtaaaccccacgggcgaccgtgacagtggctgcgctggcggcctgcccatgggggaacccatgggacgctctaatactgacatggtgtgaagagtctactgagctagttagtagtcctccggcccctgaatgcggctaatcctaactgcggagcacacaccctcaacccagggggcagtgtgtcgtaatgggtaactctgcagcggaaccgactactttgggtgaccgtgtttccttttattccttattggctgcttatggtgacaattgaaaagttgttaccatatagctattggattggccatccggtatctaatagagctattgtttacttatttattggatacgtccctcttaatttcaaggctatccaaactcttgattatatattgctccttaattataagaa

SEQ ID NO: 986 - DNA, 742 bp, Enterovirus A
ttaaaacagcctgtgggttgttcccactcacagggcccactgggcgctagtacactggtatctcggtacctttgtacgcctgttttataccccctccctgatttgcaacttagaagcaacgcaaaccagatcaatagtaggtgtgacataccagtcgcatcttgatcaagcacttctgtatccccggaccgagtatcaatagactgtgcacacggttgaaggagaaaacgtccgttacccggctaactacttcgagaaacctagtaacgccattgaagttgcagagtgtttcgctcagcactccccccgtgtagatcaggtcgatgagtcaccgcattccccacgggcgaccgtggcggtggctgcgttggcggcctgcccatggggtaacccatgggacgctctaatatagacatggtgcgaagagtctattgagctagttagcagacctccggcccctgaatgcggctaatcctaactgcggagcgcgcaccctcaacccagggggcggcgtgtcgtaatgggtaactctgcagcggaaccgactactttgggtgtccgtgtttccttttattctttattggctgcttatggtgacaattgaaaagttgttaccatatagctattggattggccatccggtgtctaacagagctattgtctacctatttattggatacgtccctcttaatctcaaggccattcaaactcttgattatatattgctcctcaactgtaggaa

SEQ ID NO: 987 - DNA, 742 bp, Enterovirus A
tttaaaacagcctgtgggttgtccccacccacagggcccactgggcgttagcactctggtattacggtacctttgtgcgcctgttttataacccctccccaactgtaaattagaagcaacacacgtcgatcaatagtaggcgtgacgcaccagtcacgtcttgatcaagcacttctgtttccccggaccgagtatcaatagactgctcacgcggttgaaggagaaaacgttcgttacccgaccaactacttcgaaaaacctagtagcaccatgaaggttgcggagtgtttcgctcggcacttccccagtgtagatcaggtcgatgagtcaccgcattccccacgggcgaccgtggcggtggctgcgctggcggcctgcctatggggtaacccataggacgctctaatacggacatggtgcgaagagtctattgagctagttggtagtcctccggcccctgaatgcggctaatcctaactgcggagcgcgcgcccccattccaggaggtagcgcgtcgtaacgggcaactctgcagcggaaccgactactttgggtgtccgtgtttccttttatctttattctggctgcttatggtgacaattgacagattgttaccatatagctattggattggccatccggtcacaagcagagcgattatctaccaatttattggatttatcccactgcacactcgtgaatataacacattactgctgatactgagtttggacaaagcaaa

SEQ ID NO: 988 - DNA, 742 bp, Enterovirus A
ttaaaacagcctgtgggttgcacccacccacagggcccactgggcgctagcactctggtatcacgatacctttgtgcgcctgttttatatccccaccccgagtaaacgttagaagttacgcaaccccgatcaatagtaggtgtagcactccagctgcatcgagatcaagcacttctgtctccccggaccgagtatcaatagactgctaacgcggttgaaggagaaaacgttcgttacccggccaattacttcgagaagcccagtagtgccgtgaaagttgcggagtgtttcgctcagcacttcccccgtgtagatcaggctgatgagtcaccgcgatccccacaggtgactgtggcggtggctgcgttggcggcctgcctatggggcaacccataggacgctctaatacagacatggtgcgaagagcctattgagctaattggtagtcctccggcccctgaatgcggctaatcctaactgcggagcacatgccctcaaaccagggggtggtgtgtcgtaacgggtaactctgcagcggaaccgactactttgggtgtccgtgtttctttttattcttataatggctgcttatggtgacaattaaagaattgttaccatatagctattggattggccatccggtgactaacaaatcgctcatataccagtttgttggttttgttcccttatcacatacagctcataacaccctcttatatttactacaattgaatagcaagaa

SEQ ID NO: 989 - DNA, 742 bp, Enterovirus A
ttaaaacagcctgtgggttgtacccacccacagggcccactgggcgctagcacactggtattacggtacctttgtgcgcctgttttataccccccccaacctcgaaacttagaagtaaagcaaacccgatcaatagcaggtgcggcgcaccagtcgcatcttgatcaagcacttctgtaaccccggaccgagtatcaatagactgctcacgcggttgaaggagaaaacgttcgttacccggctaactacttcgagaaacccagtagcatcatgaaagttgcagagtgtttcgctcagcactacccccgtgtagatcaggccgatgagtcaccgcacttccccacgggcgaccgtggcggtggctgcgttggcggcctgcctatggggcaacccataggacgctctaatacggacatggtgcgaagagtctattgagctagttagtagtcctccggcccctgaatgcggctaatcctaactgcggagcacatacccttaatccaaagggcagtgtgtcgtaacgggtaactctgcagcggaaccgactactttgggtgtccgtgtttccttttaatttttactggctgcttatggtgacaattgaggaattgttgccatatagctattggattggccatccggtgactaacagagctattgtgttccaatttgttggatttaccccgctcacactcacagtcgtaagaacccttcattacgtgttatttctcaactcaagaaa

SEQ ID NO: 990 - DNA, 742 bp, Enterovirus B
ttaaaacagcctgtgggttgatcccacccacagggcccactgggcgctagcacactggtatcccggtacctttgtgcgcctgttttatttacccttccccaatgtaatttagaagtttatcccaaatggtcaatagacaacccagcacgccagctgggcttcgaccaagcacttctgttaccccggaccgagtatcaataggctgctcacgcggctgaaagagaaaatgttcgttacccggccaaccacttcgagaaacttagtatcaccatgaaagttgcgcagtgtttcgctccgcacagccccagtgtagatcaggtcgatgagtcaccgcgttccccacgggcgaccgtggcggtggctgcgttggcggcctgcccatggggcaacccatgggacgcttcaatactgacatggtgcgaagagtctattgagctggttggtagtcctccggcccctgaatgcggctaatcctaactgcggagcagatacctacacaccagtgggcagtctgtcgtaacgggcaactctgcggcggaaccgactactttgggtgtccgtgtttccttttattcttatattggctgcttatggtgacaattgaaagattgttaccatatagctattggattggccatccagtgacaaacagagctatcgtgtacctatttgttggttttgtaccactgaaccgtaaggtgttagacactctaaacctcataattctgttcaattcagcaaa

SEQ ID NO: 991 - DNA, 742 bp, Enterovirus B
ttaaaacagctctggggttgttcccacccacagggcccaccgggcgccagcactctggtatcacggtacctttgtgcgcctgttttatacccccgtccccggttgtaacttagaagtaacactccacgaccgatagtaggtgtggcacgccagccatgtcttggtcaagcacttctgtttccccggattgagtatcaataggctgttcacacggccgaaggagaaaacatccgttatccggccaactacttcgagaaacctagtaccaccatgaaggttgcgcagtgtttcgctccgcacaaccccagtgtagatcaggccgatgagtcaccgctttccccacgggcgaccgtggcggtggctgcgttggcggcctgcccatggggaaatccatgggacgcttcaatactgacatggtgcgaagagtctattgagctagttggtattcctccggcccctgaatgcggctaatcctaactgcggagcagacacccacatgccagtgggcagtctgtcgtaacgggcaactctgcagcggaaccgactactttgggtgtccgtgtttccttttattcttatactggctgcttatggtgacaattgaaagattgttaccatatagctattggattggccatcctgtgactaacagagctattgtatacctatttgttggttttgtgccactgaattacaaggctttaaacaccctcaactttataatactactcaactcattaaa

SEQ ID NO: 992 - DNA, 742 bp, Enterovirus B
ttaaaacagctctggggttgttcccacccacagggcccactgggcgccagcactctggtattccggtaccctagtgcgcctgttttatcctcccctccccgttgaaacttagaagcaagtcacatgcggtcaatagggggcctagtatgccaactaggtcacgaccaagcactcctgttaccccggactgagtatcaataagctgctcgcgcggctgaaggagaaaacgttcgttacccggctaattacttcgagaaacccagtaccaccgtgaaggttgcgcagcgtttcgctccgcacaaccccagtgtagatcaggtcgatgagtcaccgcaatccccacaggcgactgtggcggtggctgcgttggcggcctgcccatgggacaacccatgggacgcttcaatactgacatggtgcgaagagtctattgagctaattagtaatcctccggcccctgaatgcggctaatcctaactgcggagcagatacccacacaccagtgggcagtctgtcgtaacgggcaactctgcagcggaaccgactactttgggtgtccgtgtttccttttattcttatactggctgcttatggtgacaattgacagattgttaccatatagctattggattggccatccggtgacgaacagagcgattatttacctgtttgttggttttataccacttaattacaaggttctaaacactctcaacttcattctaacactcaactcaacaaa

SEQ ID NO: 993 - DNA, 742 bp, Enterovirus C
ttaaaacagctctggggttgttcccaccccagaggcccacgtggcggctagtactccggtatcacggtacccttgtacgcctgttttatactccctgccccgtaacttagaagcaaaccaaacaagttcaataggagggggtgcaagcccgcaccaccacgaacaagtactcctgtctccccggtgaggttgtatagactgtacccacggttgaaaacgactgatccgttatccgctctagtacttcgggaagcctagtagcattttggaatcttcgatgcgttgcgctcagcactcaaccccggagtgtagcttaggtcgatgagtctggacatcccccaccggtgacggtggtccaggctgcgttggcggcctacctgtggtccaaagccacaggacgctagttgtgaacaaggtgtgaagagcctactgagctactagagagtcctccggcccctgaatgcggctaatcctaaccacggagcaggtagttgcaacccagcaaccagtctgtcgtaatgcgcaagtctgtggcggaaccgactactttgggtgaccgtgtttccttttattttcatatatggctgcttatggtgacaatcattgattgttatcatatagcgacttggattggccatccggtgagaattagaactactgtttacccgtttgctgatttttgataacactccacacacttaccatttgagaattgtactgttggcaagacagcaccattata

SEQ ID NO: 994 - DNA, 742 bp, Enterovirus B
ttaaaacagcctgtgggttgttcccacccacagggcccattgggcgctagcacactggtatcacggtacccttgtgcgcctgttttatccacccctccccatcgtaacctagaagcatgactccaacggtcaatagacagctcagtaaaccaattgagccttgaccaagcacttctgttaccccggactgagtatcaataggctgctcacgcggccgaaggagaaaatgttcgttacccggccaattacttcgagaaacctagtaccaccatgaaggttgcgcggtgtttcgctcagcacaaccccagtgtagatcaggccgatgagtcaccgcattccccacgggtgaccgtggcggtggctgcgctggcggcctgcccatggggcaacccatgggacgcttcaatactgacatggtgtgaagagtctattgagctaattggtagtcctccggcccctgaatgcggctaatcctaactgcggagcagatacccacgcaccagtgggcagtctgtcgtaacgggcaactctgcagcggaaccgactactttgggtgtccgtgtttccttttattcttgtactggctgcttatggtgacaattgagagattgttaccatatagctattggattggccatccagtgtcaaacagagcgattgtctacttgttcattggttttataccattgagttacaaggttctagccactcttaacttcattttaacactcaatacatcaaa

SEQ ID NO: 995 - DNA, 742 bp, Enterovirus B
ttaaaacagcctgtgggttgttcccacccacagggcccatggggcgcaagcacactggtattgcggtacctttgtgcgcctgttttatccacccttccccaatgaaacttagaagcttgactcaaacggtcaatagacagcccagtgcaccaactgggtctcgaccaggcactcctgtttccccggactgagtatcaataggctgcttgcgcggctgaaggagaaaacgttcgttacccggccaattacttcgagaaacctagtaccaccatggacgttgcgcagtgtttcgctccacacaaccccggtgtagatcaggtcgatgagtcaccgcaatccccacgggcgaccgtggcggtggctgcgctggcggcctgcccatggggcaacccatgggacgcttcaatactgacatggtgcgaagagtctattgagctaattggtagtcctccggcccctgaatgcggctaatcctaactgcggagcagatacccacataccagtgggcagtctgtcgtaacgggcaactctgcagcggaaccgactactttgggtgtccgtgtttccttttattcttatattggctgcttatggtgacaattgaaaggttgttaccatatagcttttggattggccatccagtgagcaacagagcgatcatactcctttttgttgggtttgtaccacttgattatagtagttacaacaccttgctatacgtcattcatttaaacacgagaaa

SEQ ID NO: 996 - DNA, 742 bp, Enterovirus B
ttaaaacagcctgtgggttgttcccacccacagggcccactgggcgccagcactctggtattacggtacctttgtgcgcctgttttatatccccctccccacttgaaacttagaagtgaaacacactgatcaatagttgacatggcaagccagccatgtcttgatcaagcacctctgtttccccggacctagtatcaatagactgctcgcgcggttgaaagagaaagcgttcgttacccggctaactacttcgagaaacttagtaacaccatggaagttgcggagtgtttcgctcagcacatccccagtgtagatcaggccgatgagtcaccgcattccccacgggcgaccgtggcggtggctgcgttggcggcctgcctgtggggcaacccacaggacgctctaatacaaacatggtgcgaagagtctattgagctagttagtagtcctccggcccctgaatgcggctaatcctaactgcggagcacgtgcttccaatccaggaggtggcgtgtcgtaacgggtaactctgcagcggaaccgactactttgggtgtccgtgtttccttttattcttgcattggctgcttatggtgacaattgagagattgttaccatatagctattggattggccatccggtgacaaacagagcaattatatatctctttgttggatacattccattgaactacaaggagttaaaaaccctcaattatattctgttcttgaattccgcaag

SEQ ID NO: 997 - DNA, 742 bp, Enterovirus B
ttaaaacagcctgtgggttgttcccacccacagggcccactgggcgcaagcacactggtattacggtacctttgtgcgcctgttttacatcccctctcccattataacttagaagcacatacaaaacgaccaataggtggtccagcactccagctgggctctggtcaagtacttctgttaccccggactaagtatcaataagcggctaacgcggctgaaggagaaagcgtccgttacccggccaactacttcgggaaatctagtaacaccatgaaggttgcgcagtgtttcgctccgcacaaacccagtgtagatcaggtcgatgagtcaccgcattccccacaggcgactgtggcggtggctgcgttggcggcctgcccatggggcaacccatgggacgcttcaatactgacatggtgcgaagaatctactgagctagttggtagtcctccggcccctgaatgcggctaatcctaactgcggagcacatacccctaacccaaggggcagtgtgtcgtaacgggcaactctgcagcggaaccgactactttgggtgtccgtgtttccttttattcttatactggctgcttatggtgacaattgagaaattgttaccatatagcttttggattggccatccagtgactaacagagctattatttacttgtttgttggctttgtaccactcaaccttagagttttaaggactctcaatttggttctgctatcgaatacaacaaa

SEQ ID NO: 998 - DNA, 742 bp, Unknown
  Description of Unknown: Sequence 2 from Patent WO2015007788.1 sequence
ttaaaacagcctgtgggttgttcccacccacagggcccactgggcgctagcacactggtatcacggtacctttgtgcgcctgttttatatccccctccccactgtaacttagagaaatcacataaacgatcaatagaaggcgcagcacaccagctgagtcttgaccaagcacttctgtttccccggactgagtatcaatagactgctcacgcggttgaaggagaaaacgttcgttacccggccaactacttcgagaaacctagtaccaccatgaaagttgcgcagtgtttcgctcagcacaaccccagtgtagatcaggtcgatgagtcaccgcattccccacgggcgaccgtggcggtggctgcgttggcggcctgcctatggggcaacccatgggacgcttcaatactgacatggtgcgaagagtctattgagctagttggtagtcctccggcccctgaatgcggctaatcctaactgcggagcaagtgcccacaaaccagtgggtagcttgtcgtaacgggcaactctgcagcggaaccgactactttgggtgtccgtgtttccttttattcttattctggctgcttatggtgacaattgagagattgttaccatatagctattggattggccatccggtgactaacagagcaatcatattcctctttgttggatttataccacttgattccactagttacaacactctgctacacattatttacttaaaaccaagaag

SEQ ID NO: 999 - DNA, 742 bp, Enterovirus B
ttaaaacagcctgtgggttgcacccacccacagggcccactgggcgctggtacactggtattaaggtacccttgtacgcctgttttatatccctcccccgatttgtaacttagaattaaagcaaacccgatcaatagtaggtgtggcaaaccagccacatcttgatcaagcacttctgtttccccggaccgagtatcaatagactgctgacgcggttgaaggagaaaacgttcgttacccggccaactacttcgggaaacctagtaccaccatgaaggttgcgcagtgtttcgctccgcacaaccccagtgtagatcaggtcgatgagccaccgcattccccacaggcgactgtggcggtggctgcgttggcggcctgcccatggggtaacccatgggacgcttcaatactgacatggtgcgaagagtccactgagctagttggtattcctccggcccctgaatgcggctaatcctaactgcggagcaggcacccacgagccagtgggcagcctgtcgtaatgggtaactctgcagcggaaccgactactttgggtgtccgtgtttccattttctttttattggctgcttatggtgacaatcacggaattgttaccatatagctattggattggccatccagtgactaacagagcagtaatattcctttttgttggttttgtaccactcaccgtcacgagcctcagaacactcgtattcatcttaacccttaacaagataaa

SEQ ID NO: 1000 - DNA, 742 bp, Enterovirus B
ttaaaacagcctgtgggttgtacccacccacagggcccaatgggcgctagcactccggtattacggtacccttgtgcgcctgttttatttccccttccccaactgaaacttagaagaaatacacaatgatcgacagtaagcgtggcgcaccagccatgttttgatcaagcacttctgtttccccggaccaagtatcaatagactgctcacgcggttgaaggagaaagcgttcgttaaccggctaactacttcgagaaacccagtaacaccatgaaagttgcagagtgtttcgctcagcactcccccagtgtggatcaggtcgatgagtcactgcgttccccacgggtgaccgtggcagtggctgcgttggcggcctgcctgtggggcaacccacaggacgctctaatacggacatggtgtgaagagtctattgagctagttagtagtcctccggcccctgaatgcggctaatcctaactgtggagcacatgcccctaacccaaggggtggtgtgtcgtaatgggtaactccgcagcggaaccgactactttgggtgaccgtgtttccttttatttttacattggctgcatatggtgacgattgagagattgttgccatatagctattggattggccatccagtgtctaacagagctattgtatatctttttgttggatttgtaccacttgacttgaaagaggtcaggacactacaatacattatactgctgaatactgcaaa

SEQ ID NO: 1001 - DNA, 742 bp, Enterovirus B
ttaaaacagcctgtgggttgcacccacccacagggcccacagggcgctagcactctggtatcacggtacctttgtgcgcctgttttattaccccttccccaattgaaaattagaagcaatgcacaccgatcaacagcaggcgtggcgcaccagtcacgtctcgatcaagcacttctgtttccccggaccgagtatcaatagactgctcacgcggttgaaggagaaagtgttcgttatccggctaaccacttcgagaaacccagtaacaccatgaaagttgcagggtgtttcgctcagcacttccccagtgtagatcaggtcgatgagtcaccgcgttccccacgggcgaccgtggcggtggctgcgttggcggcctgcctatgggttaacccataggacgctctaatacagacatggtgcgaagagtttattgagctggttagtatccctccggcccctgaatgcggctaatcctaactgcggagcacgtgcctccaatccagggggttgcatgtcgtaacgggtaactctgcagcggaaccgactactttgggtgtccgtgtttccttttattcttatactggctgcttatggtgacaatcgaggaattgttaccatatagctattggattggccatccggtgtctaacagagcgattatatacctctttgttggatttatgcagctcaataccaccaactttaacacattgaaatatatcttaaagttaaacacagcaaa

SEQ ID NO: 1002 - DNA, 742 bp, Enterovirus B
ttaaaacagcctgtgggttgatcccacccacagggcccattgggcgctagcactctggtatcacggtacctttgtgcgcctgttttataccccctcccccaactgtaacttagaagtaacacacaccgatcaacagtcagcgtggcacaccagccacgttttgatcaagcacttctgttaccccggactgagtatcaatagactgctcacgcggttgaaggagaaagcgttcgttatccggccaactacttcgaaaaacctagtaacaccgtggaagttgcagagtgtttcgctcagcactaccccagtgtagatcaggtcgatgagtcaccgcattccccacgggcgaccgtggcggtggctgcgttggcggcctgcccatggggaaacccatgggacgctctaatacagacatggtgcgaagagtctattgagctagttggtagtcctccggcccctgaatgcggctaatcctaactgcggagcacacaccctcaagccagagggcagtgtgtcgtaacgggcaactctgcagcggaaccgactactttgggtgtccgtgtttcattttattcctatactggctgcttatggtgacaattgagagattgttaccatatagctattggattggccatccggtgaccaatagagctattatatatctctttgttgggtttataccacttagcttgaaagaggttaaaacattacaattcattgttaagttgaatacagcaaa

SEQ ID NO: 1003 - DNA, 742 bp, Enterovirus B
ttaaaacagcctgtgggttgttcccacccacagggcccactgggcgccagcacactggtatcacggtacccttgtgcgcctgttttataaacccttccccaatgcaacttagaagctcaactttaccggtcaatagacagtccagtacgccaactgggcttcgatcaagcacttctgttaccccggactaagtatcaataggctgctcacgcggctgaaggagaaaacgttcgttacccggccaattacttcgagaaacccagtaacactatggaggttgcgcagtgtttcgttccacacaaccccagtgtagatcaggtcgatgagtcaccgctttccccacgggcgaccgtggcggtggctgcgttggcggcctgcccatggggcaacccatgggacgcttcaatactgacatggtgtgaagagtctattgagctaattggtattcctccggcccctgaatgcggctaatcctaactgcggagcagatactcacgagccagtgggcagtctgtcgtaacgggtaactctgcagcggaaccgactactttgggtgtccgtgtttccttttattcatatattggctgcttatggtgacaattgagagattgttaccatatagctattggattggccatccggtgactaatagagcaattgtttacctatttgttggctttgtgccgttgaactacaaggttttaaaaactattaactacatcctagtacttaacacgttgaa

SEQ ID NO: 1004 - DNA, 742 bp, Enterovirus B
ttaaaacagcctgtgggttgttcccacccacagggcccattgggcgtcagcaccctggtatcacggtacctttgtgcgcctgttttatatcccttcccccaattgtaacttagaagaaacacacaccgatcaacagcaagcgtggcacaccagccatgttttggtcaagcacttctgttaccccggactgagtatcaatagactgctcacgcggttgaaggagaaagcgtccgttatccggccagctacttcgagaaacctagtaacaccatggaagttgcggagtgtttcgctcagcactaccccagtgtagatcaggtcgatgagtcaccgctttccccacgggcgaccgtggcggtggctgcgttggcggcctgcctatgggggaacccataggacgctctaatacagacatggtgcgaagagtctattgagctagctggtattcctccggcccctgaatgcggctaatcctaactgtggagcacatgcccctaatccaaggggtagtgtgtcgtaatgagcaattccgcagcggaaccgactactttgggtgtccgtgtttcctcttattcttgtactggctgcttatggtgacaattgagagattgttaccatatagctattggattggccatccggtgactaatagagctattgtgtatctctttgttggatttgtaccacttaatttgaaagaaatcaggacactacgctacattttactattgaacaccgcaaa

SEQ ID NO: 1005 - DNA, 742 bp, Enterovirus B
ttaaaacagcctgtgggttgtacccacacacagggcccactgggcgctagcacactggtatcacggtacctttgtgcgcctgttttataaccccttccccaaacgtaacgtagaagccacacacactgatcaacagtgggcacagcgcaccagccgtgtctcgatcaagcacttctgttttcccggactgagtatcaatagactgctcacgcggttgaaggagaaaacgttcgttacccggctgactacttcgagaagcttagtaacgctatgaaagttgcgaagtgtttcgttcagcactccccccgtgtagatcaggtcgatgagtcaccgcattccccacgggtgaccgtggcggtggctgcgctggcggcctgcccatggggtgacccatgggacgcttcaatacagacatggtgcgaagagcctattgagctagtcagtagtcctccggcccctgaatgcggctaatcctaactgcggagcatgtgccctcaatccagagggtagcgtgtcgtaacgggcaactctgcagcggaaccgactactttgggtgtccgtgtttctttttattcttatattggctgcttatggtgacaattgagagattgttgccatatagctattggattggccatccggtgagtaacagagctattatttactccatcgtaggcttcgtgccattgaactacaaggtcttgaaaactctcaactttgttataatacttaataccacaaa

SEQ ID NO: 1006 - DNA, 742 bp, Enterovirus B
ttaaaacagcctgtgggttgttcccacccacagggcccactgggcgctagcacactggtatcacggtacccttgtgcgcctgttttatcttcccctccccactgtaacttagaagaatgacataaacggtcaacagatagctcagtacaccaactgagccccgaccaagcacttctgttaccccggaccgagtaacaataggctgctcgcgcggctgaaggtgaaaacgttcgttacccggccaattacttcgagaaacctagtaccaccatgaaggttgcgcagcgtttcgctccgcacaaccccagtgtagatcaggtcgatgagtcaccgcactccccacgggcgaccgtggcggtggctgcgctggcggcctgcctatggggcaacccatgggacgcttcaatactgacatggtgcgaagagtctattgagctaattggtagtcctccggcccctgaatgcggctaatcctaactgcggggcaagtgcccacaaaccagtgggtggcttgtcgtaacgggtaaccctgcagcggaaccgactactttgggtgtccgtgtttccttttattcttattctggctgcttatggtgacaattgagagattgttgccatatagctattggattggccatctggtgagtaacagagcaatcatattcctctttgttggatttataccacttgattccactagttacaacactctgctacatattatttgcttaaatacaagaag

SEQ ID NO: 1007 - DNA, 742 bp, Enterovirus B
ttttaaagcctgtgggttgttcccacccacagggcccattgggcgctagcactctggtattgcggtacctttgtgcgcctgttttatatccccctcccccatttgaaacttagaagcaagacacaccgatcaatagctgatatggcaagccagccatatcttgatcaagtacttctgtttccccggaccgagtatcaatagactgcttgcgcggtcgaaggagaaagcgttcgttacccggctaattacttcgagaaacctagtaacaccatgaaagttgcagagtgtttcgctcagcacaaccccagtgtagatcaggctgatgagtcaccgcattccccacgggtgaccgtggcggtggctgcgttggcggcctgcctgtggggcaacccacaggacgctctaatacagacatggtgtgaagagtctattgagctaattagtagtcctccggcccctgaatgcggctaatcctaactgcggagcacgtacccccattccaggaggtggcgtgtcgtaacgggtaactctgcagcggaaccgactactttgggtgtccgtgtttccttttatctttacactggctgcttatggtgacaattgaaagattgttaccatatagctattggattggccatccggtgacaaatagagcgattgtatatttgttcattggatttgtaccactaagctataaagcattaaacactcttaaccttatcctagtgcttaactcaacaaa

SEQ ID NO: 1008 - DNA, 742 bp, Enterovirus B
ttataaacagcgggctgggttgctcccactacagggcccacggcgcgcaagcacactggtatcacggtacttttgtgcgcctgttttatccaccctcccccaatgaaacttagaagcttgattcaaacggtcaatagacaacccagtacaccaactgggtctcgaccaagcacctctgtttccccggactgagtatcaataggctgcttacgtggctgaaggagaaaacgttcgttacccggccaattacttcgagaaacctagtaccaccatgaacgttgcgcagtgtttcgctccacacaaccccagtgtagatcaggtcgatgagtcaccgcattccccacgggtgaccgtggcggtggctgcgctggcggcctgcccatggggtaacccatgggacgctacaatactgacatggtgtgaagagtctattgagctaattggtagtcctccggcccctgaatgcggctaatcctaactgcggagcagatactcacatgccagtgggcagtctgtcgtaacgggcaactctgcagcggaaccgactactttgggtgtccgtgtttccttttattctcatctggctgcttatggtgacaatcgaaagactgttaccatatagctattggattggccatccagtgagtaacagagcgatcattttcctttttgttgggtttataccacttgattacaatagttacaataccttgctatacatcgttcatttgaacacaacaag

SEQ ID NO: 1009 - DNA, 742 bp, Enterovirus B
ttaaaacagcctgtgggttgttcccacccacagggcccactgggcgctagcacactggtatcacggtacccttgtgcgcctgttttatcaaccccttcccgatgtaacttagaagccaaatcttaccggtcaacaggtggtccagtatgccaactgggctctgaccaagcacttctgttaccccggactgagtatcaataggctgctcacgcggctgaaggagaaaatgtccgttacccggccaattacttcgagaaacctagtaccaccatgaaggttgcgcggcgtttcgctccacacaaccccagtgcagatcaggtcgatgagccaccgcttcccccacgggcgaccgtggcggtggctgcgttggcggcctgcccatgggacaacccatgggacgcttcaatactgacatggtgcgaagagtctattgagctaattggtagtcctccggcccctgaatgcggctaatcctaactgtggagcagatgcccgcaagccagcgggtggtctgtcgtaacgggcaactccgcagcggaaccgactactttgggtgaccgtgtttccttttatttttatactggctgcttatggtgacaattgaaagattgttaccatatagctattggattggccatccggtgactaacagagctatcatatatctatttgttggttacgtcccacttgactatagagttctacgcaccttatatttcattttagatctgaacaaagcgag

SEQ ID NO: 1010 - DNA, 742 bp, Enterovirus B
ttaaaacagcctgtgggttgttcccacccacagggcccatggggcgccagcacactggtattgcggtacctttgtgcgcctgttttattcaccctttcccaatgaaacttagaagcttaactcaaccggtcgatagacagcccagtacaccaactgggttttgaccaagtactcctgtttccccggactgagtatcaataagctgctcgcgcggctgaaggagaaaacgttcgttacccggccaattacttcgagaaacctagtaccaccatgaacgttgcgcagtgtttcgctccgcacaaccccagtgtagatcaggtcgatgagtcaccgcaatccccacgggcgaccgtggcggtggctgcgctggcggcctgcccatggggcatcccatgggacgcttcaatactgacatggtgcgaagagtctattgagctaattggtaatcctccggcccctgaatgcggctaatcctaactgcggggcagacacccacacgccagtgggcagtctgtcgtaacgggtaactccgcagcggaaccgactactttgggtgtccgtgtttccttttatctttatattggctgcttatggtgacaattgaaagattgttgccatatagctattggattggccatccggtgtctaatagagcaattatatatctctttgttggcttcatcccgttaaataaagtgagctaccagaccctgtgctatattatcaaattgaacacaataaa

SEQ ID NO: 1011 - DNA, 742 bp, Enterovirus B
ttaaaacagcctgtgggttgcccccacccgcagggcccattgggcgctagcacactggtatcacggtacctttgtgcgcctgttttatcctccctccccaagtgcaacgtagaagcaagacacaaaaggtcaacagatagcccagcacaccagttgggtttcgaccaagcacttctgtctccccggaccgagtatcaataagctgctcacgcggctgaaggagaaagcgttcgttacccggctagttacttcgagaaacccagtaccaccatgaaggttgcgcagcgtttcgctccgcacaaccccagtgtagatcaggtcgatgagtcaccgcgttccccacgggcgaccgtggcggtggctgcgttggcggcctgcccatggggcaacccatgggacgcttcaatactgacatggtgcgaagagtctattgagctaactagtagtcctccggcccctgaatgcggataatcttaactgcggagcaggtgctcacaatccagtgggtggcctgtcgtaacgggcaactctgcagcggaaccgactactttgggtgtccgtgtttccttttatctctttgttggctgcttatggtgacaattgaatgattgttgccatatagctattggattggccatccggtgagcagcagatccattatttaccagtttgttggatttgtaccacttgatcacatagtctttagaacacttgtctttattctaaatcttaacaaggcaag

SEQ ID NO: 1012 - DNA, 742 bp, Enterovirus B
ttaaaacagcctgtgggttgttcccacccacagggcccaccgggcgctagcacactggtattgcggtacctttgtgcgcctgttttatacacccctccttaatgtaactcagaagtacaacattaccggtcaacagatgactcagtaaaccaactgagcctcgaccaagcacttctgtttccccggaccgagtatcaataggctgctcacgcggctgaaggagaaagtgttcgttacccggccaattacttcgagaagcccagtaccaccatggaggttgcgcggcgtttcgctccgcacatccccagtgtagatcaggctgatgagtcaccgcgttccccacgggtgaccgtggcggtggctgcgctggcggcctgcccatggggtaacccatgggacgcttcaatactgacatggtgtgaagagcctattgagctaattggtagtcctccggcccctgaatgcggctaatcctaactgcggagcagatacccacacaccagcgggcagtctgtcgtaacgggcaactctgcagcggaaccgactactttgggtgtccgtgtttccttttatttttatgctggctgcttatggtgacaattgaggaattgttaccatatagctattggattggccatccagtgtccaacagagcgatcatttacctgttcgttgggttcgtaccactaaaccacaagtcactcagcacacttaattacattataactctcaacacaacaag

SEQ ID NO: 1013 - DNA, 742 bp, Enterovirus B
ttaaaacagcctgtgggttgttcccatccacagggcccactgggcgctagcacactggtatcacggtacctttgtgcgcctgttttatttcccccctcccgaagtaacctagaagcaggtaatatacggtcaataggtgacacagtataccaactgggtcttgaccaagcacttctgttaccccgggctgagtatcaataagctacttacgtggctgaaggagaaaacgctcgttacccggccaattacttcgagaaacctagtaacaccatgaaggttgcgcagtgtttcgctccgcacaaccccagtgtagaccaggtcgatgagtcaccgcattccccacgggcgaccgtggcggtggctgcgttggcggcctgcccatggggcaacccatgggacgcttcaaaactgacatggtgcgaagagtctattgagctaattggtagtcctccggcccctgaatgcggctaatcccaactgcggagcaaatacccacatgccagtgggcagtctgtcgtaatgggtaactctgcagcggaaccgactactttgggtgtccgtgtttctttttattcttatactggctgcttatggtgacaattgaggaattgttgccatatagctattggattggccatccggtgacaaacagagcaattatttacttgtttgttggattcgtaccgctaaaccacagagtactaagcacccttaattttattatattacttaactcgacaaa

SEQ ID NO: 1014 - DNA, 742 bp, Enterovirus B
ttaaaacagcctgtgggttgttcccacccacagggcccactgggcgctagcacactggtattacggtacctttgtgcgcctgttttatctacccttgcccaatgcaacatagaagcttagtccaaaaggtcaataggcagcccagtgcaccaactgggtccagaccaagcacttctgttaccccggaccaagtatcagtaggctgctcacgcggctgaaggagaaaacgttcgttacccggccaactacttcgagaaacctagtagcaccatgaaggttgcgcagtgtttcgctccgcacagccccagtgtagatcaggtcgatgagccaccgcattccccacgggtgaccgtggcggtggctgcgttggcggcctgcccatggggtaacccatgggacgcttcaatactgacatggtgtgaagagtctattgagctagttggtagtcctccggcccctgaatgcggctaatcctaactgcggagcgtgcgcttgcaacccagtgagtagcacgtcgtaatgggtaactctgcagcggaaccgactactttgggtgtccgtgtttccttttattccttgtctggctgcttatggtgacaattgagagattgttgccatatagctattggattggccatccggtatctaacagggcgatcatttacctgtttgttggtttcatacccttgaatcttgaggtttataataccctcactcttataataaaactcaatacatcaag

SEQ ID NO: 1015 - DNA, 742 bp, Enterovirus B
ttaaaacagcctgtgggttgtacccacccacagggcccactgggcgccagcacactggtatcacggtacccttgtgcgcctgttttatccacccctccccgaagtaacttagaagctctaaataagcggtcagcagccagcccagcacaccagctgggttttgaccaagtacttctgttaccccggaccgagtatcaataggctgcacacgcggctgaaggagaaaacgttcgttacccggccatctacttcgagaaacctagtaccactatgaaagttgcgaagcgtttcgctccacacaaccccagtgtagatcaggctgatgagtcaccgcattccccacaggtgactgtggcggtggctgcgttggcggcctgcccatggggcaacccatgggacgcttcaataccgacatggtgcgaagagtctattgagctagatggtagtcctccggcccctgaatgcggctaatcctaactgcggagcaggtgcacacaaaccagtgagtagcctgtcgtaatgggcaactctgcagcggaaccgactactttgggtgtccgtgtttctttttattcttatattggctgcttatggtgacaattgaaagattgttaccatatagctattggattggccatccggtgactagcagagcactgatatacctatttgtgggctttgtaccactcaactttgtcagctacaccacattgctatatattgtccaactgaacgcaagaag

SEQ ID NO: 1016 - DNA, 742 bp, Enterovirus D
ataaaacagcctgtgggttgttcccacccacagggcctactgggcgctagcacactggtattgcggtacctttgtgcgcctgttttatctgcccttccccaatgtaacttagaagttaaactcagacggccaatagacagcccagtacaccaactgggtctcggccaggcacttctgtttccccggactgagtatcaataagctgctcgcgcggctgaaggagaaaacgttcgttatccggccaattacttcgagaaacctagtaccaccatggacgttgcgcagtgtttcgctccgcacaaccccagtgtagatcaggtcgatgagtcaccgcaatccccatgggcgaccgtggcggtggctgcgctggcggcctgcccatgggtcaacccatgggacgcttcaatactgacatggtgtgaagagtctattgagctaattggtagtcctccggcccctgaatgcggctaatcccaactgcggagcagatacccacacgccagtgggcagtctgtcgtaacgggcaactctgcagcggaaccgactactttgggtgtccgtgtttccttttatccttacattggctgcttatggtgacaattgagagattgttaccatatagctattggattggccatccagtgagcaacagagcaattatatttctctttgttgggtttgtaccacttgattttgatagttacaacaccctactttatattgttcgcctgaacacgagaaa

SEQ ID NO: 1017 - DNA, 742 bp, Enterovirus B
ttaaaacagctctggggttgttcccaccccagaggcccacgtggcggccagtactccggtattgcggtacccttgtacgcctgttttatactcccttcccccgtaacttagaagaaataaaccaagttcactaggagggggtacaaaccagtaccaccacgaacaagcacttctgtttccccggtgacattgcatagactgtacccacggttgaaagcgactgatccgttacccgctactgtacttcgagaagcctagtaccatcttggaatcttcgacgcgttgcgctcagcactcaaccccagagtgtagcttaggtcgatgagtctggacaatccccaccggtgacggtggtccaggctgcgttggcggcctacctgtggcccaaagccacaggacgctagttgtgaacaaggtgtgaagagcctattgagcttcagtagagtcctccggcccctgaatgcggctaatcccaaccacggagcaggtggtcataatccaatgactggcctgtcgtaacgcgcaagtctgtggcggaaccgactactttgggtgtccgtgtttccttttattttgtcaatggctgcttatggtgacaatctaagattgccatcatatagcttttggattggccatccggtattattttgagttatttgatttgttgtccacagctctttacagtatcacttaactattattgtttgtattttgctccttggatcacaaccaggtaatcaga

SEQ ID NO: 1018 - DNA, 742 bp, Enterovirus B
ttaaaacagcctgtgggttgttcccacccacagggcccattgggcgctagcactctggtattacggtacctttgtgcgcctgttttatgtcccctcccccaatcgcaacttagaagcaacacacactgatcaacagtaagcgtggcataccagccacgttttgatcaagcacttctgttaccccggactgagtatcaatagactgctcacgcggttgaaggagaaagcgttcgttatccggccaactacttcgagaaacctagtaacaccgtgaaagttgcagagtgtttcgctcagcactaccccagtgtagatcaggtcgatgagtcaccgcattccccacgggcgaccgtggcggtggctgcgctggcggcctgcctacggggaaacccgtaggacgctctaatacagacatggtgcgaagagtctattgagctagttggtagtcctccggcccctgaatgcggctaatcctaactgcggagcacacacccccaagccagggggcagtgtgtcgtaacgggtaactctgcagcggaaccgactactttgggtgtccgtgtttcattttattcctatgctggctgcttatggtgacaattgacagattgttaccatatagctattggattggccatccggtgactaatagagccattatataccactttgttgggtttataccactcaacttgaaagaggtcaaaacactacagctcatcattaaattgaacacaacaaa

SEQ ID NO: 1019 - DNA, 742 bp, Enterovirus B
tttaaaacagcctgtgggttgttcccacccacagggcccactgggcgctagcactctggtatcacggtacccttgtgcgcctgttttatatccccaccccagtggaacattagaagcagcacacctatgatcaatagtgggcgtggcatccagtcacgttatgatcaagcacttctgtgaccccggactgagtatcaatagactgctcacgcggttgaaggagaaaacgttcgttacccggccagttacttcgagaaacccagtaacaccatgaatgttgcagagtgtttcgctcagcacttcccccgtgtagatcaggtcgatgagccactgcattccccacgggcgaccgtggcagtggctgcgttggcggcctgcctatggggtcacccataggacgctctaatactgacatggtgcgaagagtctattgagctaactggtagtcctccggcccctgaatgcggctaatcctaactgtggagcacattcccccaatccagggggcagtgtgtcgtaacgggcaactctgcagcggaaccgactactttgggtgtccgtgtttctttttattctcatattggctgcttatggtgacaattacagaattgttaccatatagctattggattggccatccggtgactaacagagcaattatttatcaattcgttggatttgtcccactcgatttcaaagcagtcaatacactctcatatatcgttacactcaacacaacaaa

SEQ ID NO: 1020 - DNA, 742 bp, Unknown
  Description of Unknown: unclassified Enterovirus sequence
ttaaaacagcctgtgggttgttcccacccacagggcccactgggcgctagcacactggtatcacggtacctttgtgcgcctgttttatccacccttccccaagtgacttagaagcataccacacacggtcaacaggcggctcaatgcaccaattgagtcatgaccaagtacttctgttaccccggacttagtatcaataagctgctcacgcggctgaaggagaaaacgttcgttacccggccaattacttcgagaaacctagtagcaccatggaggttgcgcggcgtttcgctccacacaaccccagtgtagatcaggctgatgagtcaccacaatcctcacgggcgaccgtggtggtggctgcgctggcggcctgcccatggggtaacccatgggacgctacaatactgacatggtgtgaagagtctattgagctaattggtagtcctccggcccctgaatgcggctaatcctaactgcggagcagatacccacacaccagtgggcagtctgtcgtaacgggcaactctgcagcggaaccgactactttgggtgtccgtgtttccttttttctcttatactggctgcttatggtgacaattgaaagattgttaccatatagctattggattggccatccagtgacaaacagagcgattgtttacctgttcattggtttcgtaccgctgaattacacagttttaaacacccttaatcttattttggcacttaatacatcaaa

SEQ ID NO: 1021 - DNA, 742 bp, Enterovirus B
ttaaaacagctctggggttgtacccactcacagggcccactgggcgctagcacactggtatcacggtacctttgtgcgcctgttttataaccccttccccaaacgtaacgtagaagctacacacactgatcaatagtaggcacagcgcaccagttgtgtcccgatcaagcacttctgtctccccggaccgagtatcaatagactgctcacgcggttgaaggagaaaacgttcgttaaccggctgactacttcgagaaacctagtagtactatgaaagttgcgaagcgtttcactcagcacttcccccgtgtagatcaggctgatgagtcactgcgttccccacgggtgaccgtggcagtgactgcgttggcggcctgcccatggggtaacccatgggacgcttcaatacggacatggtgcgaagagtctattgagctagccagtagtcctccggcccctgaatgcggctaatcctaactgcggagcatgtgccctcgatccagggggtagcgtgtcgtaacgggcaactctgcagcggaaccgactactttgggtgtccgtgtttctttttattcttatattggctgcttatggtgacaattgagagattgttaccatatagctattggattggccacccggtgactaatagagctattatctactcctttataggttttgtgccgttgaactacaaggtcttaaggactctcaactttatcataatacttaatactgcaaa

SEQ ID NO: 1022 - DNA, 742 bp, Enterovirus B
ttaaaacagcctgtgggttgttcccatccacagggcccactgggcgcttgcactctggtatcacggtaccattgtgcgcctgttttatatcccctatccccagttgtaacttagaagcgatgccttccgaccaatagtgggcatggcacaccagtcatgtcttggtcaagtacacctgtttccccggactgagtatcaatagactgctcacgcggttgaaggagaaaacgttcgttacccggctaactacttcgagaaacctagtaacaccatgaatattgcgaagtgtttcgttcagcaccccccagtgtagatcaggccgatgagtcaccgcgttccccacaggcggccgtggcggtggctacgctggcggcctgcctatggggcaacccataggacgcttcaatgtggacatggtgtgaagagtctattgagctagttagtagtcctccggcccctgaatgcggctaatcctaatctcggagcaggcacccacaaaccagtgggcaacctgtcgtaatgggtaactctgcggcggaaccgactactttgggtgtccgtgtttccctttattcttgtattggctgcttatggtgacaattaggagattgttaccatatagctattggattggccatccggtgtctaacagagcaattatttacctctttgttggttacgtaccattaaactttaaggttatagcaacgctcaagtttatcctacttctcaataaagtaaa

SEQ ID NO: 1023 - DNA, 742 bp, Enterovirus A
ttaaaacagcctgtgggttgttcccacccacagggcccactgggcgttagcacactggtatcaaggtacctttgtgcgcctgttttattcacccttccccttcgtaacttagaagcatagctcagacggtcaatagacagcccagcataccagctgggtcatgaccaagcacttctgttgccccggactgagtatcaataggctgcttgcgcggctgaaggagaaaagttcgttacccggccagttacttcgagaaacctagtaacaccatggaagttgcgtagtgtttcgctccgcacaaccccagtgtagatcaggtcgatgagtcaccgcataccccacgggtgaccgtggcggtggctgcgttggcggcctgcccatggggcatacccatgggacgctacaatactgacatggtgcgaagagtctattgagctaattggtagtcctccggcccctgaatgcggctaatcctaactgcggagcagatacccacacaccagtgggcggtctgtcgtaacgggtaactctgcagcggaaccgactactttgggtgtccgtgtttccttttattcctaatctggctgcttatggtgacaattgagagattgttaccatatagctattggattggccatccggtgactaacagagcgatcatctacctgtttgttggtttcattccactaaactacaaagtactaaacactctgaattacattttactgcttaactcatcaaa

SEQ ID NO: 1024 - DNA, 743 bp, Enterovirus A
ttaaaacagctgtgggttgtcacccacccacagggtccactgggcgctagtacactggtatctcggtacctttgtacgcctgttttataccccctccctgatttgcaacttagaagcaacgcaaaccagatcaatagtaggtgtgacataccagtcgcatcttgatcaagcacttctgtatccccggaccgagtatcaatagactgtgcacacggttgaaggagaaaacgtccgttacccggctaactacttcgagaagcctagtaacgccattgaagttgcagagtgtttcgctcagcactccccccgtgtagatcaggtcgatgagtcaccgcattccccacgggcgaccgtggcggtggctgcgttggcggcctgcctatggggtaacccataggacgctctaatacggacatggcgtgaagagtctattgagctagttagtagtcctccggcccctgaatgcggctaatcctaactgcggagcacatacccttaatccaaagggcagtgtgtcgtaacgggcaactctgcagcggaaccgactactttgggtgtccgtgtttctttttattcttgtattggctgcttatggtgacaattaaagaattgttaccatatagctattggattggccatccagtgtcaaacagagctattgtatatctctttgttggattcacacctctcactcttgaaacgttacacaccctcaattacattatactgctgaacacgaagcg

SEQ ID NO: 1025 - DNA, 743 bp, Enterovirus A
ttaaaacagcctgtgggttgcacccactcacagggcccactgggcgcaagcactctggcacttcggtacctttgtgcgcctgttttatatcccctcccccaatgaaatttagaagcagcaaaccccgatcaatagcaggcataacgctccagttatgtcttgatcaagcacttctgtttccccggactgagtatcaatagactgctcacgcggttgaaggagaaaacgttcgttatccggctaactacttcggaaagcctagtaacaccatggaagttgcggagagtttcgttcagcacttccccagtgtagatcaggtcgatgagtcaccgcattccccacgggcgaccgtggcggtggctgcgttggcggcctgcccatggggtaacccatgggacgctctaatacggacatggtgtgaagagtctactgagctagttagtagtcctccggcccctgaatgcggctaatcccaactgcggagcacacgcccacaagccagtgggtagtgtgtcgtaacgggcaactctgcagcggaaccgactactttgggtgtccgtgtttccttttattcttatgttggctgcttatggtgacaattaaagagttgttaccatatagctattggattggccatccggtgtgcaacagagcgatcgtttacctatttattggttttgtaccattgacactgaagtctgtgatcacccttaattttatcttaaccctcaacacagccaaac

SEQ ID NO: 1026 - DNA, 743 bp, Enterovirus A
ttaaaacagcctgtgggttgtacccaccctcagggcccactgggcgccagcactctggtaccacggtacctttgtgcgcctgttttatcatcccacccctacctgaaacgtagaagcaataatcagtcgaccaatagtgggtgtggcacaccagccacatcttggtcaagcacttctgtttccccgggttgagtatcaatatgctgttcacacggctgaaggagaaaacgcccgttatccggccaactacttcgagaagcctagtatcgccatgaacattgcaaggcgtttcgctcagcacttcccccgtgtagatcaggccgatgagtcaccgcattccccacgggcgaccgtggcggtggctgcgttggcggcctgcctgtgggttgacccacaggacgccttaatatagacatggtgtgaagagcctattgagctggttggtattcctccggcccctgaatgcggctaatcctaactgtggagcacatactcacaagccagtgggtggtgtgtcgtaatgggcaactctgcagcggaaccgactactttgggtgtccgtgtttccttttatacttatactggctgcttatggtgacaatcagagaattgttaccatatagctattggattggccatccggtgtgcaacagagctattgtgtatttatttgttggatttgtcccactatcacatacatcccttaacactttgtattttattttgaaattaaacgcaagaaa

SEQ ID NO: 1027 - DNA, 743 bp, Enterovirus A
tttaaaacagcctgtgggttgcacccacccacagggcccactgggcgctagcactctggtactgcggtacctttgtgcgcctgttttatcaccccaccccatctggaacgtagaagcaatgcacaactgaccaatagtgggtgtggcgcaccagccacatcttggtcgagcacttctgtttccccgggtttagtatcaataagctgctcacgcggctgaaggagaaaacacccgttatccggccgactacttcgagaaacctagtaccgctatgaacgttgcaaggcgtttcgttcagcacttcccccgtgtagatcaggccgatgagtcaccgcattcctcacgggcgaccgtggcggtggctgcgttggcggcctgcctatgggcttgcccataggacgccttaatactgacatggtgcgaagagtctattgagctagttggtagtcctccggcccctgaatgcggctaatcctaactgcggagcacatactcacaaaccagtgagcggtgtgtcgtaacgggcaactctgcagcggaaccgactactttgggtgtccgtgtttccttttattcttatactggctgcttatggtgacaattaaagaattgttaccatatagctattggattggccatccggtgtctaacagagctattatatacttgtttgttggattcatctcgttatcacacaaatcccttaacactttgtgttttatcttgaatttgaactcaaaaag

SEQ ID NO: 1028 - DNA, 743 bp, Enterovirus A
tttaaaacagcctgtgggttgtacccacccacagggcctactgggcgccagcactctggtactatggtacctttgtgcgcctgttttatattcctcccccaaattgcaacttagaagacatgcactccgatcaatagcaggcgtggcgcaccagctgcgtcttgatcaagcatttctgtttccccggactgagtatcaatagactgctcacgcggttgagggagaaaacgtccgttacccggccaactacttcgagaagcctagtaacactatgaaagttgcggggcgtttcgctcagcactcccccagtgtagatcaggtcgatgagtcaccgcattccccacgggcgaccgtggcggtggctgcgttggcggcctgcctatggggcaacccatgggacgctctaatatggacatggtgtgaagagcttattgagctagttggtagtcctccggcccctgaatgcggctaatcctaactgcggagcacgtgcctccaaaccagaaggtggcgtgtcgtaatgggcaactctgcagcggaaccgactactttgggtgtccgtgtttccttttattcttactctggctgcttatggtgacaattgacagattgttaccatatagctattggattggccatccggtgacgaacagagcgattgtgtaccagtttattggtttcgtccacttgaatacacgtgaattcaataccttgctgttggtattgaatttcaatacaacaaa

SEQ ID NO: 1029 - DNA, 743 bp, Enterovirus A
ttaaaacagcctgtgggttgcacccacccacagggcccaatgggcgtcagcactctggtaccgaggtacctttgtgcgcctgttttatttccccttcccctgatgcaacttagaagctccgaactaatgatcaatagtaggtgtggcacgccagccacatcttgatcaagcacttctgtttacccggaccgagtatcaataagctgcgcaagcggctgaaggagaaagcgttcgttatccggccaactacttcgagaagcttagtaccaccatgaacgttgcagagtgtttcgttcagcacaaccccggtgtagatcaggccgatgagtcaccgcgttccccatgggcgaccatggcggtggctgcgttggcggcctgcccatggagcaatccatgggacgctctaatactgacatggtgcgaagagcctattgagctagttggtgatcctccggcccctgaatgcggctaatcctaactgcggagcatgcgcccacaagccagtgggtggtgtgtcgtaacgggtaactctgcagcggaaccgactactttgggtgtccgtgtttccttttatctttacattggctgcttatggtgacaattgaagaattgttaccatatagctattggattggccatccggtgtgcaatagagcgattatatacctatttgttggatttgttccattgacatatagatctcttaacactctacaacacatcttgatcttgaacacgagaaa

SEQ ID NO: 1030 - DNA, 743 bp, Enterovirus A
ttaaaacagcctgtgggttgtacccacccacagggcccactgggcgctagcactctgattctacggaatctttgtgcgcctgttttacaaccccctccccctatgtaacttagaagcaatgcaccaatgatcaacagcaggcgtggcgcaccagccatgtcttgatcaagcacttctgtttccccggacagagtatcaatagactgctcgcgtggtcgaaggagaaaacgtccgttacccggctaactacttcgagaaacctagtagcaccaatgaagctgcagagcgtttcgctcagcacttaccccgtgtagatcaggccgatgagtcactgcgttccccacgggcgaccgtggcagtggctgcgttggcggcctgcctatggggtcacccataggacgctctaatgtggacatggtgcgaagagtctattgagctagttagtagtcctccggcccctgaatgcggctaatcctaactgcggagcgcataccctcaaaccagggggtggtgcgtcgtaacgggtaactctgcagcggaaccgactactttgggtgtccgtgtttccttttattttcttaatggctgcttatggtgacaattgaggaattgttaccatatagctattggattggccatcaggtgtgtaacagagcaattatctacttgtttgtaggatataccccattaacgttcaaatctcttaacacactacagtacatactaactttgaacacaagaaa

SEQ ID NO: 1031 - DNA, 743 bp, Enterovirus A
ttaaaacagcctgtgggttgtacccacccacagggcccactgggcgccagcactctggtaatacgttacctttgtgcgcctgttttacctccccctaccctggaacactttagaagtaaagcatatctggtcaatagaaggtgtggcgaaccagctgcatctcgaccaagcacttctgtttccccggactgagtatcaatagactgctaacgcggtcgaaggagaaaacgttcgttatccggctagctacttcgagaagcctagtaacaccatgaaagttgcagagtgtttcactcagcacttcccccgtgtagatcaggtcgatgagtcaccgcgacccccacgggcgaccgtggcggtggctgcgttggcggcctgcctgtggggcaacccataggacgctctaatacagacatggtgtgaagagcctattgagctagctagtagtcctccggcccctgaatgcggctaatcctaactgcggagcacatgctcgtgaaccagcgagtagtgtgtcgtaatgggtaactctgcagcggaaccgactactttgggtgtccgtgtttctttttattcttacattggctgcttatggtgacaattaaagaattggcaccatatagctattggattggccatcctgtgactaacagagctattatatatctctttgttggatttgttcccttgaggctcactacttataacacactttgttttatattgactctcaattcagcaaa

SEQ ID NO: 1032 - DNA, 743 bp, Enterovirus A
ttaaaacagcctgtgggttgtacccacccacagggcccactgggcgcgagcactctggtatcacgatacctttgtgcgcctgttttatatcccttccccattaatgtaacatagaagttatgcaccccgatcaatagcaggcatggcgctccagctatgtcttgatcaagcacttctgtttccccggactgagtatcaatagactgcttgcgcggttgaaggagaaaacgttcgttatccggctaactacttcgggaagcttagtaatgccatggaagttgcggagagtttcgctcagcacttccccagtgtagatcaggctgatgagtcaccgcattccccacgggtgaccgtggcggtggctgcgttggcggcctgcccatagggagacctatgggacgctctaatacggacatggtgtgaagagcctactgagctagttagcagtcctccggcccctgaatgcggctaatcctaactgcggagcacgcgtctccaatccaggggatagcgtgtcgtaatgggcaactctgcagcggaaccgactactttgggtgtccgtgtttccttttattcttacactggctgcttatggtgacaattgaggaattgttaccatatagctattggattggccatccggtgactaacagagctattatttaccaatttgttggatttgtacctctttcactcaccgtttaccacacccttctatacctattacaactgaatagtagaag

SEQ ID NO: 1033 - DNA, 743 bp, Enterovirus C
ttaaaacagcctgtgggttgttcccaccccagaggcccacgtggcggctagtactctggtattacggtacctttgtacgcctgttttatactccctccccatgtaactttagaagcaattcaataagttcaatagagggggtacaaaccagtaccaccacgaacaagcacttctgtctccccggtgatcttgcatagactgttcccacggttgaaagcgagtgatccgttatccgcttgagtacttcgagaagcctagtaccaccttggaatcttcgatgcgttgcgctcagcactctgccccgagtgtagcttaggctgatgagtctgggctttccccaccggcgacggtggcccaggctgcgttggcggcctacccgtggtcaacaccacgggacgctagttgtgaacaaggtgtgaagagcctattgagctactcaagagtcctccggcccctgaatgcggctaatcctaaccatggagcaggtactctcaacccagagggcagcctgtcgtaacgcgtgagtccgtggcggaaccgactactttgggtgaccgtgtttccttttatttttgactggctgcttatggtgacaatcatagattgttatcatagagcgaattggattggccatccagtgaaatataaacacgttatctacttgtttgttggatttactccactcactcagtttacccctagcataataatagcagtactactgataaggaattattgccacc

SEQ ID NO: 1034 - DNA, 743 bp, Enterovirus B
tttaaaacagcctgtgggttgttcccacccacaggcgccaccgggcgttagcacactggtatcacggtacccttgtgcgcctgttttataaccccaccccgagtaaaccttagaagcaatgcacctctggtcaatagtaggtgtgacacaccagtcacatcgtgaccaagcacttctgtctccccggactgagtatcaataggctgctcgcgcggctgaaggagaaagcgttcgttacccggccagctacttcgagaagcctagtaacaccatgaaggttgcagagtgtttcgctcagcacttcccctgtgtagatcaggccgatgagtcaccgcgttcctcacgggcgaccgtggcggtcgctgcgctggtggcctgcctatggggcaacccataggacgctctaatgctgacatggtgcgaagagtctattgagctagctggtagtcctccggcccctgaatgcggctaatcccaactgcggagcacgcaccctcaaaccagggggcagcgtgtcgtaacgggcaactctgcagcggaaccgactactttgggtgtccgtgtttctttttattcctatattggctgcttatggtgacaattgagagattgttaccatatagctattggattggccatccggtgagcaacagagctattgtgtatctgtttactggtttcataccccttaattacaaagaagtcaaaacccttcacttgatcttgttattcaatacaacaaa

SEQ ID NO: 1035 - DNA, 743 bp, Enterovirus C
ttaaaacagctctggggttgttcccaccccagaggcccacgtggcggccagtactctggtatcacggtacctttgtacgcctgttttatactcccttcccgcaacttagacgcataaaaaccaagttcaatagaagggggtacaagccagtaccaccacgaacaagcacttctgtttccccggtgatgttgtatagactgctcgcgtggttgaaagcgacagatccgttatccgcttgtgtacttcgagaagcccagtaccaccttggaatcttcgatgcgttgcgctcagcactcaaccccagagtgtagcttaggctgatgagtctggacatcccccaccggtgacggtggtccaggctgcgttggcggcctacccatggctaacgccatgggacgctagttgtgaacagggtgtgaagagcctattgagctacataagagtcctccggcccctgaatgcggctaatcccaacctcggagcaggtggtcacataccagtgactggcctgtcgtaacgcgcaagtccgtggcggaaccgactactttgggtgtccgtgtttccttttattttataatggctgcttatggtgacaatcacagattgtcgtcataaagcgaattggattggccatccggtgatagtgaaattcattacttaactgtttactggattcgctccaccgcaagtgtttgctctgagtacaatttcaatagttactttaagtagacaattgtattaca

SEQ ID NO: 1036 - DNA, 743 bp, Enterovirus B
ttaaaacagcctgtgggttgtacccacccacagggcccactgggcgctagcactctggtattacggtacccttgtgcgcctgttttatataccccgccccaagcaaacgctagatgtaacgcacttatgatcaatagcaggcgtggcactccagccacgttatgatcaagcacttctgtctccccggaccgagtatcaatagactgctcacgcggtcgaaggagaaaacgttcgttacccgaccagctacttcgagaaacctagtaactccatggaggttgcagagtgtttcgttcagcacttcccccgtgtagatcaggctgatgagtcaccgcgttcctcacgggcgaccgtggcggtggctgcgttggcggcctgcctatgggtatacccataggacgctctaatactgacatggtgcgaagagtctattgagctagttggtagtcctccggcccctgaatgcggctaatcctaactgcggagcacatacccccaacccagggggcagtgtgtcgtaacgggtaactctgcagcggaaccgactactttgggtgtccgtgtttccttttattcttacattggctgcttatggtgacaattgagagattgttaccatatagctattggattggccatccagtgactaacagagctattatttacctttttgttggcttcgtatcacttggtttaaaagaggttagtactttatattgcattatattactaaacacgagaaa

SEQ ID NO: 1037 - DNA, 743 bp, Enterovirus B
ttaaaacagcctgtgggttgttcccacccacagggcccactgggcgttagcactctggtatcgcggtacccttgtgcgcctgttttatccgccctttcccaaacgtaacttagaagctcaacttgaatggtcagcaggaaacccagtacgccaactgggtcacgaccaagcacttctgtaaccccgggccgagtatcaataagctgctcacgcggttgaaggagaaaacgcccgttacccggccaattacttcgagaaacctagtaccaccatggaggttgcgtagtgtttcgctccgcacaaccccagtgtagatcaggccgatgagtcaccgcgttccccacgggcgaccgtggcggtggctgcgttggcggcctgcccatgggataacccatgggacgcttcaatactgacatggtgcgaagagtctattgagctaattggtagtcctccggcccctgaatgcggctaatcccaactgcggagcagatacccacatgccagtgggcagtctgtcgtaacgggcaactctgcagcggaaccgactactttgggtgtccgtgtttccttttattcatacattggctgcttatggtgacaattgaaagattgttaccatatagctattggattggccatccggtgtctaatagagcgattgtctacttgttcattgggtttgtacctttaaaccttaaagttcttaacactctcaaccttgtgctacaactcaacacggcaaa

SEQ ID NO: 1038 - DNA, 743 bp, Enterovirus B
ttaaaacagcctgtgggttgatcccacccacagggcccactgggcgtcagcactctggtatcacggtacctttgtgcgcctgttttatactccctccccccaaccgtaacttagaagcagcactaactgatcaatagccagcgcggcatgccagccacgcttcgatcaagcacttctgttaccccggactgagtatcaatagactgctcacgcggttgaaggagaaaacgttcgtcatccggccaactacttcgagaaacctagtaacaccatggaagttgcggagtgtttcgctcagcactaccccagtgtagatcaggtcgatgagtcaccgcattccccacaggcgactgtggcggtggctgcgttggcggcctgcccatggggaaacccatgggacgctcttatatagacatggtgcgaagagtctattgagctagttggtagtcctccggcccctgaatgcggctaatcctaactgcggagcatacaccctcaaaccagagggcagtgtgtcgtaatgggcaactctgcagcggaaccgactactttgggtgtccgtgtttcactttatttctaaattggctgcttatggtgacaattgagagattgttaccatatagctattggattggccatccggtgaccaatagagctattatatatctctttgttgggttcataccacttagcttgaaagaggttaaaactctgcattacattatactattgaattccgcaaa

SEQ ID NO: 1039 - DNA, 743 bp, Enterovirus B
ttaaaacagcctgtgggttgttcccacccacagggcccattgggcgtcagcactctggtatcacggtacccttgtgcgcctgttttataatccctttccccacaagtaacttagacacagcacaaaccgatcaacagtaggcgtgacactccagtcatgtcgtgatcaagcacttctgttaccccggaccgagtatcaatagactgcttacgcggttgaaggagaaaacgcccgttacccggccaactacttcgagaaacccagtaacaccatggaaattgcggagtgtttcgctcagcacaaccccagtgtagatcaggtcgatgagccaccacattccccacgggtgaccgtggtggtggctgcgttggcggcctgcctatgggggaacccataggacgcttcaatacggacatggtgcgaagagtctattgagctagttggtaatcctccggcccctgaatgcggctaatcctaactgcggagcgcgtgcccccaaaccaggaggtggcgcgtcgtaatgggcaactccgcagcggaaccgactactttgggtgtccgtgtttccttttatatttttattggctgcttatggtgacaattgagaaattgttaccatatagctattggattggccatccggtgtctaacagagcgattatttatctttttgttggatttgtaccactcaacataacaaactatcagactttgtgttgcattattggattgaacacagcaaa

SEQ ID NO: 1040 - DNA, 743 bp, Enterovirus B
tgtgctcttccgatctggttgttcccacccacagggcccactgggcgccagcacactggtattacggtacccttgtgcgcctgttttatccacccccccccactgtaacttagaagataaccacacgcggtcaataggtgactcagtacgccaactgggtcgcgaccaagcacttctgttaccccggaccgagtatcaataagctgctcgcgcggctgaaggagaaaacgttcgttacccggccaattacttcgagaaacctagtaccaccatggaggttgcgcagcgtttcgctccgcacaaccccagtgtagatcaggtcgatgagtcaccgcaatccccacaggcgactgtggcggtggctgcgttggcggcctgcccatggggaaacccatgggacgcttcaatatcgacatggtgcgaagagtctattgagctaattggtagtcctccggcccctgaatgcggctaatcctaactgtggagcagatacccacactccagtgggcagtctgtcgtaatgggcaactctgcagcggaaccgactactttgggtgtccgtgtttccttttattcctatgctggctgcttatggtgacaattgacagattgttaccatatagctactggattggccatccggtgacaagcagagcgattgtttacttatttgttggtttcattccactcaattataaagtactaaacacccttaatttcattataactcttaacacgttaaa

SEQ ID NO: 1041 - DNA, 743 bp, Enterovirus B
ttaaaacagcctgtgggttgaacccatccacagggcccactgggcgcaagcacactggtatcacggtacctttgtgcgcctgttttatccacccttccccgaacgaaacttagaagtttgacttaaacggtcaatagaaagcccagtacaccaactgggtcgtgaccaagcacttctgtgaccccggactgagtatcaataagctactcacgtggctgaaggagaaaacgttcgttatccggccaattacttcgagaaacttagtaccaccatgaaggttgcgtagcgtttcgctccgcacaaccccagtgtagatcaggtcgatgagtcaccgcgttcctcacgggcgaccgtggcggtggctgcgttggcggcctgcccttggggcaacccaagggacgcttcaatactgacatggtgcgaagagtctattgagctaattggtagtcctccggcccctgaatgcggctaatcctaactgcggagcagatacccacatgccagtgggcagtctgtcgtaatgggcaactctgcagcggaaccgactactttgggtgtccgtgtttccttttattcttatactggctgcttatggtgacaattgagaaattgttaccatatagctattggattggccatccagtgtccaatagagcaatcatttaccttttcgttggatttattccacttgactacaaagcactcaaaacactcgaatacattgtagacctcaatacaacaaa

SEQ ID NO: 1042 - DNA, 743 bp, Enterovirus B
ttaaaacaaggctgtgggttgtacccacccacagggcccaccgggcgctagcacactggtatctaggtacccttgtgcgcctgttttattcgccccaccccatcgtaacttagaagttgatcaataatggtcgttaggtagcccagcacgccagctgggtcttgaccaagcacttctgttaccccggaccgagtatcaatacgctgctcacgcggctgaaggagaaaacgttcgttacccggccaattacttcgagaagcctagtaccaccatgaaggttgcgcagcgtttcgctccgcacaaccccagtgtagatcaggccgatgagtcaccgcactcctcacgggcgaccgtggcggtgactgcgttggcggcctgcccatggggtgacccatgggacgcttcaatactgacatggtgcgaagagcctattgagctaattggtagtcctccggcccctgaatgcggctaatcctaactgcggagcagatacccacacaccagtgggcagtctgtcgtaacgggcaactctgcagcggaaccgactactttgggtgtccgtgtttccttttattctaatattggctgcttatggtgacaattgaaaaattgttaccatatagctattggattggccatccggtgacaaatagagcgattgtttacctgtttgttggtttcataccattaaatcttaaagtcttaaaaacccttgattttatactagcactcaattcagcaaa

SEQ ID NO: 1043 - DNA, 743 bp, Unknown
  Description of Unknown: Human enterovirus 87 strain BAN01-10396, complete genome.1 sequence
ttaaaacagcctgtgggttgttcccacccacagggcccactgggcgctagcacactggtatcacggtacccttgtgcgcctgttttatacacccttcccctactgtgacttagaagcaaaacaatgatgaccaatagcaagcgcagcactccagctgtgtttcggtcaagcacttctgtttccccggactgagtatcaataggccactcacgtggccgaaggagaaaacgtccgttacccggccaattacttcgagaaacccagtaacaccatagaggttgcgcagcgtttcgctccgcactcccccagtgtagatcaggtcgatgagtcaccgcgttccccacgggcgaccgtggcggtggctgcgttggcggcctgcccatggggtaacccatgggacgcttcaatactgacatggtgcgaagagtctattgagctaattggtagtcctccggcccctgaatgcggctaatcctaactgcggagcagatacccacgctccagtgggcagtctgtcgtaacgggtaactctgcagcggaaccgactactttgggtgtccgtgtttccttttattcttatattggctgcttatggtgacaattgaaagattgttaccatatagctattggattggccatccggtgtctaatagagcaattatattcctgtttgttggttttataccactgaatatcacagtttacaagaccctcaattacatcctacgtttaaacaagacaaa

SEQ ID NO: 1044 - DNA, 743 bp, Enterovirus B
ttaaaacaggcctgtgggttggttccacccacagggcccactgggcgccagcacactggtattacggtacctttgtgcgcctgttttatccacccttccctgatgtaacttagaagtaaaacataggcggtcaataggtagcccaacacaccagttgggtttcgaccaaacacttctgttaccccggaccgagtatcaataggctgctcacgcggctgaaggagaaaacgttcgttacccgaccaattacttcgagaaacccagtaacaccatgaaagttgcgcagtgtttcgctccgcacaaccccagtgtagatcaggtcgatgagtcaccgcattccccacgggcgaccgtggcggtggctgcgttggcggcctgcccatgggctaacccatgggacgctacaataccgacatggtgcgaagagtctattgagctaattggtagtcctccggcccctgaatgcggctaatcctaactgcggagcagatacccacacaccagtgggcggtctgtcgtaacgggcaactctgcagcggaaccgactactttgggtgtccgtgtttccttttattcctatattggctgcttatggtgacaattgagagattgttaccatatagctattggattggccatccggtgacaaacagggcggtcatttacctatttgttggttttgtaccattgaattttaaggtattgaaaaccctcaaccttgttttagcactcaatacagcaaa

SEQ ID NO: 1045 - DNA, 743 bp, Enterovirus B
ttaaaacagcctgtgggttgttcccacccacagggcccattgggcgctagcactctggtattgcggtacctttgtgcgcctgttttatattccctccccctgaccgtaacttagaagtaacacacaccgatcaacagtaagcatggcacaccagccatgttttgatcaagcacttctgttatcccggactgagtatcaatagactgctcacgcggttgaaggagaaaacgttcgttacccggccaactacttcgaaaaacctagtaacaccatggaagttgcagagtgtttcgctcagcactaccccagtgtagatcaggtcgatgagtcaccgcattccccacgggcgaccgtggcggtggctgcgttggcggcctgcctatggggaaacccataggacgctctaatacagacatggtgcgaagagtctattgagctagttggtagtcctccggcccctgaatgcggctaatcctaactgcggagcacacaccctcaagccagggggcagtgtgtcgtaacgggcaactctgcagcggaaccgactactttgggtgtccgtgtttccccttactcttgtattggctgcttatggtgacaattttggaattgttgccatatagctattggattggccatccggtgacaaacagagcgattgtatacctattcgttggacttgtaccgctcaacgttacgagtctaacgactttatactacatcatctggttgaacacagcaaa

SEQ ID NO: 1046 - DNA, 743 bp, Enterovirus B
ttataacagcctgtgggttgtacccacccacagggcccacagggggccagcacactggtatctcggtacctttgtgggcctgttttatccacccttcccccattttatttagaagcatgcaccaaaacggtcaacagggagcccagtaagccacttgttcattgaccaagtacttctgttaccccggaccgagtatcaataggctgctcgcgcggctgaaggagaaaacgttcgttacccggccaattacttcgagaaacccagtagcgccatggaggttgcgcagcgtttcgctccgcacaaccccagtgtagatcaggtcgatgagccaccgcgttccccacgggcgaccgtggcggtggctgcgttggcggcctgcccatgggactacccatgggacgcttcaatactgacatggtgtgaaaagtctattgagctaattggtagtcctccggcccctgaatgcggctaatcctaactgcggagcagacgcccacacaccagtgggcgatctgtcgtaatgggcaactctgcagcggaaccgactactttgggtgtccgtgtttccttttattcttaccctggctgcttatggtgacaattgagaagttgttgccatatagctattggattggccatccggtgacgagcagggcgataatttatttgtttatcgggtttgtaccactgaactacaaggttttaaacactttggattttattctgatcctcaactcactaaa

SEQ ID NO: 1047 - DNA, 743 bp, Enterovirus B
ccagtgggccctgtgggttgtacccacccacagggcccactgggcgctagcactctggtatcacggtaccttagtgcgcctgttttatatcccccacccccacttgaaacttagaagcaaaacatactgaccaatagttgacatggcaagccagccgtgccttggtcaagcacctctgtttccccggaccgagtatcaatagactgctagcgcggttgaaggagaaagcgttcgttacccgactaactacttcgaaaaacctagtagcatcatgaaagttgcagagtgtttcgctcagcacaaccccagtgtagatcaggccgatgagtcaccgcattcctcacgggtgaccgtggcggtggctgcgctggcggcctgcctgtggggcaacccacaggacgctctaatacagacatggtgcgaagagtctattgagctagttagtagtcctccggcccctgaatgcggctaatcctaactgcggagcacgtgcctctaatccaagaggtagcgtgtcgtaacgggcaactctgcagcggaaccgactactttgggtgtccgtgtttccttttatttttatactggctgcttatggtgacaattgagagattgttaccatatagctattggattggccatccggtgactaatagagctattgtatacctctttattggttacgttccattaaaccgcaaggaattaaggaccctcaattacatcttgcttttgaattcagcaaa

SEQ ID NO: 1048 - DNA, 743 bp, Enterovirus B
ttaaaacagcttgtgggttgttcccacccacagggcccactgggcgccagtacactggtatcacggtacctttgtgcgcctgtttgactcaccttccccaaacgcaacttagaagcataacttaaatggtcattaggcggctcagtatgccaactgagtctcgatcaagcacttctgttaccccggactgagtaccaataggctgctcacgcggctgaaagggaaaccgttcgttacccgaccaactacttcgagaaacctagtaccaccatgaaagttgcgcggcgtttcgctccgcacaaccccagtgtagatcaggccgatgagtcaccgcaaaccccacgggcgaccgtggcggtggctgcgctggcggcctgcccatgggacaacccatgggacgccacaatactgacatgatgcgaagagtctattgagctagttggtagtcctccggcccctgaatgcggctaatcccaactgtggagcagatacccacgcaccagtgggcagtctgtcgtaatgggcaactctacagcggaaccgactactttgggtgtccgtgtttctttttattcctacgctggctacttatggtgacaattgagagactgtaaccatattgctatcgggttggccacctggtgaagaataaaacagttgctcactcgtttgtcagtcttgcaccgtcgtgccacaaagtcttaactgcccctcaacatcgtcataatactaaatacgctgaa

SEQ ID NO: 1049 - DNA, 743 bp, Enterovirus B
ttaaaacagcctgtgggttgtacccacccacagggcccactgggcgctagcactctggtaccgcggtacctttgtgcgcctgttttatatcccccctccccttaaccggaacttagaagttacacacactgatcaacagtgggcatagcatgccagctatgtcttgatcaagcacttctgtctccccggaccaagtatcaatagactgctcacgcggttgaaggagaaagcgttcgttacccgactaactacttcgagaaacccagtagcactatgaaagttgcgaggcgtttcgctcaacacttccccagtgtagatcaggtcgatgagtcaccgcattccccacggcgaccgtggcggtggctgcgttggcggcctgctacggggcaactcgtaggacgcttcaatacagacatggtgcgaagagtctattgagctagttagtagtcctccggcccctgaatgcggctaatcctaactgcggagcacataccctcaacccagggggcagtgtgtcgtaacgggtaactctgcagcggaaccgactactttgggtgtccgtgtttccttttatccttacattggctgcttatggtgacaattgaaagattgttaccatatagctattggattggccatccagtgtctaatagagctattatatacctctttgttggatttataccacttagcctaaaagaagttaagacactacagcttattgtacaattaaacacagcaaa

SEQ ID NO: 1050 - DNA, 743 bp, Unknown
  Description of Unknown: Coxsackievirus B5 isolate 3936/09, complete genome.1 sequence
ttaaaacagcctgtgggttgtacccacccacagggcccactgggcgctagcactctggtatcacggtacctttgtgcgcctgttttatgcccccttcccccaattgaaacttagaagttacacacaccgatcaacagcgggcgtggcataccagccgcgtcttgatcaagcactcctgtttccccggaccgagtatcaatagactgctcacgcggttgaaggagaaaacgttcgttacccggctaactacttcgagaaacctagtagcatcatgaaagttgcgaagcgtttcgctcagcacatccccagtgtagatcaggtcgatgagtcaccgcattccccacgggcgaccgtggcggtggctgcgttggcggcctgcctacggggcaacccgtaggacgcttcaatacagacatggtgcgaagagtcgattgagctagttagtagtcctccggcccctgaatccggctaatcctaactgcggagcacataccctcaacccagggggcattgtgtcgtaacgggtaactctgcagcggaaccgactactttgggtgtccgtgtttccttttattcttataatggctgcttatggtgacaattgaaagattgttaccatatagctattggattggccatccggtgtctaacagagctattatatacctctttgttggatttgtaccacttgatctaaaggaagtcaagacactacaattcatcatacaattgaacacagcaaa

SEQ ID NO: 1051 - DNA, 743 bp, Enterovirus B
ttaaaacagcctgtgggttgttcccacccacagggcccactgggcgctagcacactggtatcacggtacctttgtgcgcctgtttgacttaccctccccaaacgcaacttagaagcacaacttaaatggtcaatagacggctcagtatgccaactgagtctcgatcaagcacttctgttaccccggactgagtaccaataggctgctcacgcggctgaaggggaaaccgttcgttacccgactaactacttcgagaaacctagtaccaccatgaaagttgcgcagcgtttcgctccgcacaaccccagtgtagatcaggccgatgagtcaccgcaaaccccacgggcgaccgtggcggtggctgcgctggcggcctgcccatggggcaactcatgggatgcttcaatactgacatggtgcgaagagtctattgagctagttggtagtcctccggcccctgaatgcggctaatcctaactgcggagcagatacccacgcaccagtgggcagtctgtcgtaatgggcaactctgcagcggaaccgactactttgggtgtccgtgtttccttttatccttatactggctacttatggtgacaattgagagattgtaaccatattgctattggattggccacccggcgacgaatagaacagttgcttacctgtttgttagtctcgtgtcactgaactgcaaggccttaaacaccctttaatttcatcataacgctcaatacgttaaa

SEQ ID NO: 1052 - DNA, 743 bp, Enterovirus B
ttaaaacagcctgtgggttgatcccacccgcagggcccactgggcgtaagcacactggtattacggtacctttgtgcgcctgttttatacacccctcccccgatgtaacttagaagttcaatgcaagcggtcgatagccagcccaacacaccagttgggttcagatcaagcacttctgttaccccggactgagtatcaataagctgctcacgtggctgaaagagaaaacgttcgttacccggccagttacttcgggaagcctagtaccaccatgaaagttgcgcagtgtttcgttccgcacaaccccagtgtagatcaggtcgatgagtcaccgcattccccacaggcgactgtggcggtggctgcgttggcggcctgcccatggggttacccatgggacgctacaatactgacatggtgcgaagagcctactgagctaactggtattcctccggcccctgaatgcggctaatcctaactgcggagcaagtacctgcagaccagcaggcagcttgtcgtaacgggcaactctgcagcggaaccgactactttgggtgtccgtgtttccttttattcttgttatggctgcttatggtgacaatcacagaattgttaccatatagctattggattggccatccagtgactaacagagcaattatatacttgtttgtcggatttgtcaaattagattttaacaacctacgcacgctttgttatattattgaattaaatacagcaag

SEQ ID NO: 1053 - DNA, 743 bp, Enterovirus B
tttaaaacagcctgtgggttgttcccacccacagggcccaatgggcgctagcacactggtatcatggtacctttgtgcgcctgttttattcaccccatcacaataaaatggagaagcataacgtaataggtcaataggtggctcagtgcgccacttgggtttagaacaaacaattctgttttcccgcaccgagtatcaataaggtgctagcgtggatgaaggagaaaacgttagttacccgagtaattagttcgagaaagacagtaccaccatgaaggatgcgcagtgtttcgttcagcactaccccagtgtagatcaggtcgatgagtcaccgcgatccccacgggtgtccgtggcggtcctgtgttggcggcaaaaccatggggtaacccatagaacgataaaattaagacatggtgagaagagtttattgagctagttggtaatcatccggcccgggaatgcggctaatcttacatgcgcagcgggcacccacaaaccagtggaaacgtttgtcgtaacgggcaactctgcagcggaaccgactactgtggggggccgggttgccttgtattcatatattggctgcttatggggacgattgaaagattgttgccatatagctattggattggccatccggaaacaaacagagctattatttacctttttgttggctttgtgccgttgaatttcaaagttgtaaaaactataaacttcattttgacactcaatacagcaaa

SEQ ID NO: 1054 - DNA, 743 bp, Enterovirus B
ttaaaacagcctgtgggttgtacccacccacagggcccactgggcgctagcactctggtattgcggtacctttgtgcgcctgttttacccaccctcccccaacgtaacttagaagcctgacatatacggtcacaagccagcccagtacgccaactgggtaccgaccaagcacttctgttaccccggactgagtatcaataagctgccaaagcggctgaaggagaaaacgttcgttacccggccaattacttcgagaaacccagtaacaccatgaaagttgcgtagcgtttcattcagcacaatcccagtgtagatcaggtcgatgagtcaccgcattccccacaggcgactgtggcggtggctgcgttggcggcctgcccatggggcaaacccatgggacgcttcaatactgacatggtgcgaagagtctattgagctaattggtagtcctccggcccctgaatgcggctaatcctaactgcggagcaggcactcgcagaccagcgagcagcttgtcgtaatgggcaactccgcagcggaaccgactactttgggtgtccgtgtttcctatttcctttacactggctgcttatggtgacaattgagaaattgttaccatatagctattggagtggccatccggtgactaacagagcaataatatatttgtttgttggctttgtgccacttaatttgaaggttgttaagacgctcaatctgatactacttctaaataaagcaaa

SEQ ID NO: 1055 - DNA, 743 bp, Enterovirus B
ttaaaacagcctgtgggttgttcccacccacagggcccactgggcgttagcacactggtatcacggtacctttgtgcgcctgttttatactcccccccctaaggaaactttagaagcaaagcaattgtgatcaatagtgggtatggcacaccagtcatatcttgatcaagcacttctgttcccccggacttagtaccaatagactgctcaagcggttgaaggggaaaacgttcgttatccggccaactacttcgagaaacctagtagcaccatgaaagttgcggagtgtttcgctcagcacttcccccgtgtagatcaggctgatgagtcaccgtattccccacgggcgaccgtgacggtggctgcgttggcggcctgcccatggggtaacccatgggacgctctaaaacagacacggtgcgaagagtctattgagctagttggtagtcctccggcccctgaatgcggccaatcctaactgcggagcacatactcccaatccagggagcagtgtgtcgtaatgggtaactctgcagcggaaccgactactttgggtgtccgtgtttccttttattctcacattgactgcttatggtgacaattgaaagattgttaccatatagctattggattggtcatccggtgagcaatagagctattgtttatcaatttgttggatttgtaccactcaacttttctgttttgagaacactcaactacatcttactgctaaacacatcaaa

SEQ ID NO: 1056 - DNA, 743 bp, Enterovirus B
ttaaaacagcctgtgggttgttcccacccacagggcccacgtggcgttagcacactggtatcccggtacctttgtgcgcctgttttatacaccccaaaccccaatgtaaattagaagaaaataacaccgatcaatagtgggtgtggcacaacagccacatcatgatcaagcactactgttcccccggactgagtatcaataagctgctcgcgcggctgaaggagaaaacgttcgttatccggccaattacttcgagaaacctagtaccaccatgaaggttgcgcagtgtttcgctccacacaaccccagtgtagatcaggtcgatgagtcaccgcattccccacaggcgactgtggcggtggctgcgctggcggcctgcccatggggtgacccatgggacgcttcaatactgacatggtgtgaagagtctattgagctaattggtagtcctccggcccctgaatgcggctaatcctaactgcggagcagatacccacgcaccagtgggtagtctgtcgtaacgggtaactctgcagtggaaccgactactttgggtgtccgtgtttccttttattctcacattggctgcttatggtgacaattgaaagattgttaccatatagctactggattggccatccggtgacaaacagagcaattgtgttcctcttcgatgggttcatacctctcaacaagatcagctttcgaactttgtgctacatcatcaagctaaacacaacaaa

SEQ ID NO: 1057 - DNA, 743 bp, Enterovirus B
ttaaaacagcctgtgggttgttcccacccacagggcccattgggcgctagcacactggtatcacggtacccttgtgcgcctgttttatccaccccccccttaacgtaacttagaagcataaatcaaatggtcaatagataacccagtatgccaactgggtcccgaccaagtacttctgttaccccggactgagtatcaataagctgcttacgtggctgaaggagaaaacgttcgttacccgaccaattacttcgagaaacctagtaacaccatgaaggttgcgcagtgtttcgctcaacacaaccccagtgtagatcaggtcgatgagtcaccgcgttccccacaggcgaccgtggcggtggctgcgttggcggcctgctcatggggcaacccatgagacgcttcaatactgacatggtgcgaagagtctattgagctaactggtagtcctccggcccctgaatgcggctaatcctaactgcggagcaggcgctcgcaaaccagtgagtagcctgtcgtaacgggtaactctgcagcggaaccgactactttgggtgtccgtgtttccttttattcttatattggctgcttatggtgacaattgagagattgttaccatatagctattggattggccatccggtgtctaacagagcaatcatttacctctttgttggttacgtaccattaaatcttaaggtcgtagcaacgcttaagtttatcctacttctcaacaaagcaaa

SEQ ID NO: 1058 - DNA, 743 bp, Enterovirus B
ttaaaacagcctgtgggttgatcccacccacagggcccattgggcgctagcactctggtatcacggtacctttgtgcgcctgttttatatccctttcccttaattggaacttagaagttacacacaccgatcaacagcaggcgtggcatgccagctacgtcttgatcaagcacttctgtttccccggaccgagtatcaatagactgctcacgcggttgaaggagaaagtgttcgttacccggctaactacttcgagaaacccagtagcatcatgaaagttgcgaggtgtttcgctcagcacttccccagtgtagatcaggtcgatgagtcaccgcattccccacgggcgaccgtggcggtggctgcgttggcggcctgcctacggggcaacccgtaggacgcttcaatacagacatggtgcgaagagtcaattgagctagttagtattcctccggcccctgaatgcggctaatcctaactgcggagcacataccctcaatccagggggcattgtgtcgtaacgggtaactctgcagcggaaccgactactttgggtgtccgtgtttccttttgttcttatactggctgcttatggtgacaattgaaagattgttgccatatagctattggattggccatccattgtctaatagagctgttatatacctctttgttggttttgtaccgctcaatctaaaagaagttaagacactacaacttattatacagctgaacacagcaaa

SEQ ID NO: 1059 - DNA, 744 bp, Aichivirus A
tttgaaaagggggtgggggggcctcggccccctcaccctcttttccggtggtctggtcccggaccaccgttactccattcagcttcttcggaacctgttcggaggaattaaacgggcacccatactccccccaccccccttttgtaactaagtatgtgtgctcgtgatcttgactcccacggaacggaccgatccgttggtgaacaaacagctaggtccacatcctcccttcccctgggagggcccccgccctcccacatcctccccccagcctgacgtatcacaggctgtgtgaagcccccgcgaaagctgctcacgtggcaattgtgggtccccccttcatcaagacaccaggtctttcctccttaaggctagccccggcgtgtgaattcacgttgggcaactagtggtgtcactgtgcgctcccaatctcggccgcggagtgctgttccccaagccaaacccctggcccttcactatgtgcctggcaagcatatctgagaaggtgttccgctgtggctgccaacctggtgacaggtgccccagtgtgcgtaaccttcttccgtctccggacggtagtgattggttaagatttggtgtaaggttcatgtgccaacgccctgtgcgggatgaaacctctactgccctaggaatgccaggcaggtaccccacctccgggtgggatctgagcctgggctaattgtctacgggtagtttcatttccaatccttttatgtcggagtc

SEQ ID NO: 1060 - DNA, 744 bp, Enterovirus A
ttaaaacagcctgtgggttgtacccactcacagggcccactgggcgtcagcactctggtactgaggtacctttgtgcgcctgttttaactcccttcccctgaagtaacttagaagcaataaactaacgatcaacagtgggcatgacataccagtcatgtctcgatcaagcacttctgtttccccggactgagtatcaataggctgctcgcgcggctgaaagagaaaacgttcgttacccggccagctacttcgagaagcttagtaccatcatgaacgaagcagagcgtttcgctcagcacaatcccagtgtagatcaggctgatgagtcactgcgacccccatgggcgaccatggcagtggctgcgttggcggcctgcccatggagaaatccatgggacgctctaattctgacatggtgcgaagagcctattgagctagctggtagtcctccggcccctgaatgcggctaatcctaactgcggagcacgcacccacaaaccagtgggcagtgtgtcgtaacgggtaactctgcagcggaaccgactactttgggtgtccgtgtttccttttattcttatattggctgcttatggtgacaatcaaagagttgttaccatatagctattggattggccatccggtgtgcaacagagcaattgtttacctatttattgggtttgtaccactaacgttgaagtctgtgaccacactcaactttatcctgaacctcaatacagtaaaac

SEQ ID NO: 1061 - DNA, 744 bp, Enterovirus A
ttaaaacagcctgtgggttgcacccacccacagggcccactgggcgccagcactctggtacttaggtacctttgtgcgcctgttttatctcccttcccccgaagtaacttagaagctgtgagctaacgatcaacagtaggtgtgacataccagtcatatcttgatcaagcacttctgtttccccggactgagtatcaataggctgctcgcgcggctgaaagagaaaacgttcgtcacccggccaactacttcgagaagcttagtaccaccatgaacgaggcagagtgtttcgctcggcacaaccccagtgtagatcaggctgatgagtcactgcaatccccatgggcgaccatggcagtggctgcgttggcggcctgcccatggagaaatccatgggacgctctaattctgacatggtgcgaagagcctattgagctagctggtagtcctccggcccctgaatgcggctaatcctaactgcggagcacacacccacaagccagtgggcagtgtgtcgtaacgggcaactctgcagcggaaccgactactttgggtgtccgtgtttccttttattcttgtattggctgcttatggtgacaatcaaagagttgttaccatatagctattggattggccatccggtgtgcaacagagcaattatttacctatttattggttttgtaccattgacactgaagtctgtgattacccttaattttattttgaccctcaacacagtcaaac

SEQ ID NO: 1062 - DNA, 744 bp, Enterovirus A
ttaaaacagcctgtgggttgcacccactcacagggcccactgggcgctagcactctggtaccgtggtacctttgtgcgcctgttttatacccccttccccgtttgaacattagaagtaacgcacctcgatcagtagcaggcgcggcgcaccagccgtgtcttgatcaagcacttctgtttccccggaccgagtatcaatagactgctcacgcggttgaaggagaaaacgttcgttatccggctaactacttcgagaaacttagtagcaccatggaagttgcagagtgtttcgctcagcactccccccccagtgtagatcaggctgatggatcaccgcgttcctcacgggtgaccgtggcggtggtcgcgttggcggcctgcccatggggcaacccatgggacgctctaatatggacatggtgtgaagagtctattgagctagttagtagtcctccggcccctgaatgcggctaatcctaactgcggagcacgtgtccccaacccaggggatagcgtgtcgtaacgggtaactctgcagcggaaccgactactttgggtgtccgtgtttcctttattcttatcctggctgcttatggtgacaattgagagattgttaccatatagctattggattggccatccggtgtctaacagagctataatatatctttttgttgggttcgtacccctcaattttgaggttgttctcacattaaagtacatcttggtgttaaatatcagaag

SEQ ID NO: 1063 - DNA, 744 bp, Enterovirus A
ttaaaacagcctgtgggttgtccccacccacagggcccactgggcgctagcacactgattttgcgggatctttgtgcgcctgttttataacccctccctaaacggcaatttagaagttctgcacatccacgaccagtagtaagcgtgacgcgccagtcacgtcttggtcaagtacttctgtatccccggactgagtatcaatagactgctcacgcggttgaaggagaaaacgttcgttatccggctaactacttcgagaaacctagtaacaccgtgaaagttgcggagtgtttcgctcagcacttcccccgtgtagatcaggccgatgagtcactgtaaaccccacgggcgaccgtgacagtggctgcgttggcggcctgcccatgaggcaactcatgggacgctctaatacagacatggtgtgaagagtctattgagctagttagtagtcctccggcccctgaatgcggctaatcctaactgcggagcacgcaccctcaacccagggggcggcgtgtcgtaatgggtaactctgcagcggaaccgactactttgggtgtccgtgtttccttttattccttattggctgcttatggtgacaattgaaaagttgttaccatatagctattggattggccatccggtatctaatagagctattgtttacctgttcattggatacgtccctcttagtcttaaggtcattcaaactcttgattacatattactccttaaccacaagaa

SEQ ID NO: 1064 - DNA, 744 bp, Enterovirus A
ttaaaacaggctgtgggttgtacccactcacagggcctactgggcgctagcactctggcactaaggtacctttgtgcgcctgtttttacttccctttcccaaagaaacttagaagttgtgtaccaatgatcaatagcaggtgtgacgtacaaataacatcttgatcaatcacttctgtttccccggaccgagtatcaataggctgctcgcgcggctgaaggagaaaacgttcgttacccgaccagctatttcgagaagcttagtaccaccatgaacgaggcagagtgtttcgttcagcacaaccccagtgtagatcaggctgatgagtcactgcaacccccatgggcgaccatggcagtggctgcgttggcggcctgcccatggagaaatccatgggacgctctaattctgacatggtgtgaagagcctattgagctagctggtagtcctccggcccctgaatgcggctaatcctaactgcggagcacatgctcacgagccagtgggtggtgtgtcgtaatgggcaactctgcagcggaaccgactactttgggtgtccgtgtttccttttattcttatgttggctgcttatggtgacaatcaaagaattgttaccatatagctattggattggccatccggtgtgcaacagagcaattgtttatctatttattggtttcgtaccactatcactgaagtctgtgaccactctcgaattcattttgaccctcaactcaatcaaac

SEQ ID NO: 1065 - DNA, 744 bp, Enterovirus C
ttaaaacagctctggggttgttcccaccccagaggcccacgtggcggccagtacaccggtatcacggtacccttgtacgcctgttttatactccctaccccgtaacttagaagcatcaactcaagttcaatagtaggggtacaatccagtaccaccacgaacaagcacttctgtttccccggtgatattgtatagactgtgcccacggttgaagacaatagatccgttatccgcttttatacttcgagaagcccagtaccaccttggaatcttcgatgcgttgcgatcagcactcgaacccggagtgtagcttaggtcgatgagtctggacgctcctcaccggcgacggtggtccagactgcgttggcggcctacctgtggcccaaagtcacaggacgctagttgtgaacaaggtgtgaagagcctattgagctataaaagagtcctccggcccctgaatgcggctaatcccaaccacggagcaggtgatcacaaaccagtgactagcctgtcgtaacgcgcaagtctgtggcggaaccgactactttgggtgtccgtgtttccttttatttcatttatggctgcttatggtgacaatcatagattgttatcataaagcgaattggattggccatccggtgaaaatcaagcacatcatttatctgtttgttggatttacacctttagtttcttactccccgcgccttattcatattgtgttgttgattagacagtggtattacc

SEQ ID NO: 1066 - DNA, 744 bp, Enterovirus C
ttaaaacagctctggggttgttcccaccccagaggcccacgtggcggccagtacaccggtatcacggtacccttgtacgcctgttttatactccccgcccgtaacttagaagcaataactcaagttcaacagcagggggtacaaaccagtacctccacgaacaagcacttctgtttccccggtgacattgtatagactgtacccacggttgaaaacaatagatccgttatccgcttttgtacttcgagaagcccagtaccgtcttggaatcttcgatgcgttgcgctcagcactcgaacccggagtgtagcttaggtcgatgagtctggacagtcctcaccggcgacggtggtccaggctgcgttggcggcctacctgtggcccaaagccacaggacgctagttgtgaacaaggtgcgaagagcctattgagctacagaagagtcctccggcccctgaatgcggctaatcccaaccatggagcaggtgatcacgaaccagtgattagcctgtcgtaatgcgcaagtctgtggcggaaccgactactttgggtgtccgtgtttccttttatttcatttatggctgcttatggtgacaatcatagattgttgtcataaagcgaattggattggccatccggtgaaagtcaaacacattgtttatttgtttgttggcttcacgcctttaacttatcacaccttaaacctcattcacattaccttgttgatcagacagtggtatcacc

SEQ ID NO: 1067 - DNA, 744 bp, Enterovirus C
ttaaaacagctctggggttgttcccaccccagaggcccacgtggcggccagtactccggtattgcggtacccttgtacgcctgttttacactcccttccccgtaacttagacgcaataaaccaagttcactaggaggggtgcaaaccagcaccaccacgaacaagcacttctgtttccccggtgacattgtatagactgtatccacggttgaaaacgattgatccgttatccgctcttgtacttcgagaagcctagtatcatcttggaatcttcgacgcgttgcgctcagcattcaaccccagaatgtagcttaggtcgatgagtctggacattcctcaccggtgacggtggtccaggctgcgttggcggcctacctgtgacccaaagtcacaggacgctagttgtgaacaaggtgtgaagagcctattgagctacaagagagtcctccggcccctgaatgcggctaatcctaaccacggagcaagtgctcacgaaccagtgagtggcttgtcgtaacgagcaattctgtggcggaaccgactactttgggtgtccgtgtttcctttttaactttaaatggctgcttatggtgacaatcattgattgttatcataagccgaattggattggccatccggtgaaaatcaagttgatcatttatttgtttgttggattcactccattaactcatttttcaattgacctaatacgtattgtattattagttagaaacatacatcaca

SEQ ID NO: 1068 - DNA, 744 bp, Enterovirus C
ttaaaacagctctggggttgttcccaccccagaggcccacgcggcggccagtacaccggtatcacggtacccttgtacgcctgttttatactcccttccccgtaacttagaagccacaaaccaagttcgataggagggggtacaaaccagtaccaccgtgaacaagcacttctgtttccccggtgatgtcacatagactgtccccacggttgaaagtgattgatccgttacccgccttggtacttcgagaaacctagtatcatcttggaatcaatgacgcgttgcgctcagcactcaaacccggagtgtagcttaggctgatgagtctggacgtccctcactggcgacagtggtccaggctgcgctggcggcctacctgtggtggaagccacaggacgctaattgtgaacaaggtgtgaagagtctattgagctaccatggagtcctccggcccctgaatgcggctaatcccaaccacggagcaagtattcacaaaccagtgaaatgcttgtcgtaacgcgaaagtctgtggcggaaccgactactttgggtgtccgtgtttccttttattctttatatggctgcttatggtgacaatcatagattgttatcataaagcgcattggattggccatccggtgaaaatcaagcaaatcatttacttatttgttggatttactccaatcacaccatttacattgcatttaattactcttgtgttgacaatcagaagatactaccaca

SEQ ID NO: 1069 - DNA, 744 bp, Enterovirus C
ttaaaacagcctgtgggttgttcccaccccagaggcccacgtggcggctagtactctggtatcacggtacctttgtacgcctgttttataccccttccccaagtaaccttagaagcaactcaacaagttcaatagagggggtacaaaccagtaccaccacgaacaagcacttctgtttccccggtgattttgcataggctgtacccacggccaaaagtgaatgatccgttatccgcttgagtacttcgagaagcttagtaccaccttggaatcttcgatgcgttgcgctcagcactctaccccgagtgtagcttaggctgatgagtctgggcattccccaccggcgacggtggcccaggctgcgttggcggcctacccatggctaacgccatgggacgctagttgtgaacaaggtgtgaagagcctattgagctactcaagagtcctccggcccctgaatgcggctaatcctaaccatggagcaagtgccctcaacccagagggtggcttgtcgtaacgcgcaagtccgtggcggaaccgactactttgggtgtccgtgtttccttttatcttatatatggctgcttatggtgacaatcatagattgttatcataaagcgaattggattggccatccggtgaagtataaacatattatttacctgtttgtcggattcaccccgctcactttatacacacccaatatagtatctattgtactgctactgaggcactaccaccgca

SEQ ID NO: 1070 - DNA, 744 bp, Unknown
  Description of Unknown: Human enterovirus 88 strain BAN01-10398, complete genome.1 sequence
ttaaaacagcctgtgggttgatcccacccacagggcccactgggcgctagcacactggtattccggtacttttgtgcgcctgttttatacacccttccccttcatgtaacttagaagtaaaacacaaacggtcaataggtagctcagcaaaccagctgagcctcggccaagcacttctgttaccccggactgagtatcaataagctgttaacacggctgaaggagaaaacgttcgttatccggccaattacttcgagaaacctagtaacaccatgaaggttgcgtagcgtttcgctccacacaaccccagtgtagatcaggtcgatgagtcaccgctctccccacgggtgaccgtggcggtggctgcgttggcggcctgcccatggagcactccatgggacgcttcaatactgacatggtgtgaagagtctattgagctaattggtagtcctccggcccctgaatgcggctaatcctaactgcggagcagacacccacacgccagtgggcagtctgtcgtaatgggcaactctgcagcggaaccgactactttgggtgtccgtgtttccttttattcttacattggctgcttatggtgacaatcaaggaattgttaccatatagctattggattggccatccggtatctaacagagcaattgtttacctcttcaccggttttgtaccattgaattgcaatagtctcaacaccctttgctatatcattaaattgaactcagcaaa

SEQ ID NO: 1071 - DNA, 744 bp, Enterovirus B
ttaaaacagcctgtgggttgctcccacccacagggcccactgggcgctagcacactggtatcccggtacctttgtgcgcctgttttatccaccccacccccagctgtaatttagaagttcgacacacatggtcaatagatggctcagtgcaccaactgggtttagaccaagcacttctgttaccccgggccgagtatcaataagctgctcgcgcggctgaaggagaaaacgctcgttatccggccaattacttcgagaaacctagtaccaccatggaggttgcgcagcgtttcgctccgcacagccccagtgtagatcaggccgatgagtcaccgcgttcctcacgggcgaccgtggcggtggctgcgttggcggcctgcccatggggcaacccatgggacgcttcaatactaacatggtgtgaagagtctattgagctaattggtagtcctccggcccctgaatgcggctaatcctaactgcggagcagatactcacatgccagtgggcagtctgtcgtaacgggcaactctgcagcggaaccgactactttgggtgtccgtgtttccttttattcttatactggctgcttatggtgacaattgagaaattgttaccatatagctattggattggccatccagtgacaaacagagcgattgtttacctatttgtcggtttcataccgttgaactttagagttttgaagaccctcaacttgattatattattcaactctgtaaa

SEQ ID NO: 1072 - DNA, 744 bp, Enterovirus B
taaaacagcctgtgggttgttcccacccacagggcccactgggcgccagcactctggtattatggtaccttagtgcgcctgttttatacaccccttccccaaatgtaatttagatgcatgtaaacaaaggccaatagcaggcgcagcataccagctgtgtctcggtcaagcacttctgttaccccggactgagtatcaataggctactcacgtggctgaaggagaaaacgttcgttatccggccaattacttcgagaaacctagtaataccatgaaggttgcgaagtgtttcgctcagcacaaccccagtgtagatcaggtcgatgagtcaccgcattccccacgggtgaccgtggcggtggctgcgctggcggcctgcccatgggattacccatgggacgcttcaatattgacatggtgtgaagagtctattgagctaattggtattcctccggcccctgaatgcggctaatcccaactgcggagcaggtacccacatgccagtgggcagcctgtcgtaatgggcaactctgcagcggaaccgactactttgggtgtccgtgtttctctttattcttatactggctgcttatggtgacaattgagaaattgttgccatatagctattggattggccatccggtgacaaatagagcaattgtgcatccatttgttggttttatactaactcaatctcaaagttttaactaccctcaatctcattatatcattcaatacagcaaa

SEQ ID NO: 1073 - DNA, 744 bp, Enterovirus B
ttaaaacagcctgtgggttgttcccacccacagggcccactgggcgttagcactctggtatcacggtacctttgtgcgcctgttttatctaccctccctaaaaatgtaatttagaagcatgatccgaacggtcattaggtagctcagtgcaccaactgagcccagaccaagcacttctgttaccccggactgagtatcaataggctgctcgcgcggctgaaggagaaaacgttcgttatccggccaattacttcgagaaacccagtaccactatgaaagttgcgcagcgtttcgttccgcacaaccccagtgtagatcaggtcgatgagtcaccgcgttccccacgggcgaccgtggcggtggctgcgttggcggcctgctcatggggcaacccatgagacgcttcaatactgacatggtgcgaagagtctattgagctaattggtagccctccggcccctgaatgcggctaatcccaactgcggagcagatacccacaaaccagtgggcagtctgtcgtaatgggtaactctgcagcggaaccgactactttgggtgtccgtgtttccttttgttcttacactggctgcttatggtgacaattgagagattgttgccatatagctattggattggccatccggtgactaacagagcaattgtttacttatttgttggttttataccgttagattacaaagtcctaaacaccctgaatctcattataacacttaattcagcaaa

SEQ ID NO: 1074 - DNA, 744 bp, Enterovirus B
tttaaaacagcctgtgggttgtttccacccacagggcccacagggcgctagcactttggtatcacggtacctttgtgcgcctgttttataacccttcccccccacagaaacttagaagcaccacacaccgatcaatagaaagcgtggcgcaccagccatgtcttgatcaagcacttctgtttccccggaccgagtatcaatagactgctcgcgcggtcgaaggagaaaacgtccgttatccggctgactacttcgagaaacccagtaacaccatggaaattgcggagtgtttcgatcagcacatccccagtgtagatcaggtcgatgagtcaccgcattccccacgggtgaccgtggcggtggctgcgttggcggcctgcctacggggcatcccgtaggacgcttcaaaatggacatggtgcgaagagtctattgagctagtcagtagtcctccggcccctgaatgcggctaatcctaactgcggagcgcgcgcctccaacccagggggtagcgcgtcgtaacgggtaactctgcagcggaaccgactactttgggtgtccgtgtttctttttatcattacattggctgcttatggtgacaattgaaaggttgttaccatatagctattggattggccacccggtgtctaatagagcgattgtgtacctttttgttgggtttgtgccactttgtaaaacagcctatcagactttgtgctttatagtcaaactaaatacagcaaa

SEQ ID NO: 1075 - DNA, 744 bp, Enterovirus B
ttttaaaacaagctgtgggttgatcccacccacagggcccactgggcgctagtacactggtatcacggtacctttgtgcgcctgttttacctacccctccccgaaagaaacttagaagctcaacttatgtggtcaatagtaagctcagtacgccaactgagccacgaccaagcacttctgtcgccccggactgagtatcaataagctgctcacgtggctgaaggagaaaacgttcgttatccggccaattacttcgagaaacccagtaccaccatgaaagttgcgcggcgtttcgctccgcacaaccccagtgtagatcgggccgatgagtcaccgcgttccccacgggcgaccgtggcggtgactgcgttggcggcctgcccatggagcaatccatgggacgcttcaatactgacatggtgcgaagagtctattgagctaattggtagtcctccggcccctgaatgcggctaatcctaactgcggagcagatacccacacaccagtgggcagtctgtcgtaacgggcaacttcgcagcggaaccgactactttgggtgtccgtgtttccttttattttatactggctgcttatggtgacaattgagagattgttaccatatagctattggattggccatccggtgtccaacagagcgatcatttacttgtttgttggattcgtgcccttgaactacaaagcactcctaacacttaaatacattgtagacctcaacacagcaaa

SEQ ID NO: 1076 - DNA, 744 bp, Enterovirus B
ttaaaacagcctgtgggttgttcccacccacagggcccactgggcgctagcacactggtattacggtacctttgtgcgcctgttttatataccccccccaagtgcaacttagaagcaagacatgaccggtcagcaggtgattcagtaaaccaactgagtcttgaccaagcacttctgtttccccggaccgagtatcaataggctgcttacgcggctgaaggagaaagtgttcgttacccggccaattacttcgagaagcctagtaccaccatggaggttgcgcggcgtttcgctccgcacacccccagtgtagatcaggccgatgagccaccgcattccccacgggtgaccgtggcggtggctgcgttggcggcctgcccatggggtaacctatgggacgcttcaatactgacatggtgcgaagagcctattgagctaattggtagtcctccggcccctgaatgcggctaatcctaactgcggagcaggtacccacataccagtgggcagcctgtcgtaacgggtaactctgcagcggaaccgactactttgggtgaccgtgtttccttttattttttcctattggctgcttatggtgacaatcgaggaattgttgccatatagctattggattggccatccggtgtcaaatagagcgattatttacctgtttgttggatttgtaccactgaactttaaggcgctcatcactctcaactatattttatcccttaacgcaacaaa

SEQ ID NO: 1077 - DNA, 744 bp, Enterovirus B
ttaaaacagcctgtgggttgttcccacccacagggcccaccgggcgccagcacactggtatcacggtacccttgtgcgcctgttttatccaccccttcccacagtaacttagaagcacaccatgtatacggtcaataggcggctcagtacaccaactgggccacgaccaagcacttctgttaccccggactgagtatcaataagctgctcacgcggctgaaggagaaaacgttcgttacccggccaattacttcgagaaacccagtaccaccatgaaggttgcgcagcgtttcgttccgcacaaccccagtgtagatcaggtcgatgagtcaccgcgttcctcacgggtgaccgtggcggtggctgcgttggcggcctgcccatggggcaacccatgggacgcttcaatactgacatggtgcgaagagtctattgagctaattggtagtcctccggcccctgaatgcggctaatcctaactgcggagcagatacccacaaaccagtgggcagtctgtcgtaacgggcaactctgcagcggaaccgactactttgggtgtccgtgtttccttttatccttacactggctgcttatggtgacaattgagaaattgttaccatatagctattggattggccatccggtgacaaacagagcagttgtttacctatttgttggtttcgtaccgctgaaccttaaagttctaaagaccctcaattttatcttagcacttaacacagcaaa

SEQ ID NO: 1078 - DNA, 744 bp, Enterovirus C
ttaaaacagctctggggttgttcccaccccagaggcccacgtggcggccagtacaccggtattacggtacccttgtacgcctgttttatactcccttccccgcaacttagaagttaaacaaaccaagttcaatagaagggggtgcaaaccagtaccaccacgaacaagcacttctgtttccccggtgacgtcatataggttgtaaccacggccaaaagtgactgatccgttatccgctcttgtacttcgagaagcccagtaccatcttgggatcttcgatgcgttgcgctcagcactcgaacccggagtgtagcttaggccgatgagtctggacattccccaccggtgacggtggtccaggctgcgttggcggcctacctgtggtccaagccacaggacgctagatgtgaacaaggtgtgaagagcctattgagctacaagggaatcctccggcccctgaatgcggctaatcctaactacggagcagacggtcacaaaccagtgaatggtctgtcgtaatgcgcaagtctgtagcggaaccgactactttgggtgtccgtgtttccttttatctttttaatggctgcttatggtgacaatcctagattgttatcataaagcgatttggattggccatccagtgatatttgaaaccattactgtattgcctgctaaggctattttaaagacttaataaacacaacttcattcaactcaattacaccaactaacaactgtctcata

SEQ ID NO: 1079 - DNA, 744 bp, Unknown
  Description of Unknown: unclassified Enterovirus sequence
tttaaaacagcctgtgggttgttcccacccacagggcccactgggcgctagcactctggtattacggtacctttgtgcgcctgttttacatccctcccccagatgcaacttagaagcagtacaccaagaccaatagtaggcatggcataccagccatgtgtcggtcaagcacttctgttcccccgggctgagtatcaataaactgctcacgtggttgaaggagaaagcgcccgttacccggctaactacttcgagaagcctattaacaccatgaaagttgcggagtgtttcgctcagcacgatcccggtgtagatcaggccgatgagtcaccgcgttccccacaggtgactgtggcggtggctgcgttggcggcctgcccatggggcaacccatgggacgcttcaatatggacatggtgtgaagagcccattgagctagttagtagtcctccggcccctgaatgcggctaatcccaactgcggagcacagcgcccccgctccagggggtagtgtgtcgtaacgggcaactctgcagcggaaccgactactttgggtgtccgtgtttccttttttccttttcattggctgcttatggtgacaattgaaagattgttaccatatagctattggattggccatccagtgtcaagcagagctataatttaccaatttatagggtttgtcccgttggatctgaaagctttaaaaacccttaacttggtactactattaaacagtgtaaa

SEQ ID NO: 1080 - DNA, 744 bp, Enterovirus B
ttaaaacagcctgtgggttgttcccacccgcagggcccactgggcgctaccacactggtattaaggtacccttgtgcgcctgtttaatacacccctccccctaatgtaacttagaagcatgacttaagtggtcaatagatagctcagtaatccaactgagttccgaccaagtacttctgttaccccggaccgagtatcaataagctgttcacgcggcagaaggagaaagcgttcgttatccggccaattacttcgagaaacccagtatcaccatgaaagttgcgcagtgtttcgctccgcacaaccccagtgaagatcaggtcgatgagtcaccacagtcctcacgggcgaccgtggtggtggctgcgttggcggcctgcccatggggcaacccctgggacgcttcaatcctgacatggtgtgaagagtctattgagctggatggtatccctccggcccctgaatgcggctaatcctagctgcggagcagacgctcgcatgccaacgggtagtctgtcgtaccgggtaactctgcagcggaaccgactactttgggtgtccgtgtttccttttatccttatatcgcctgcttatggtgtcaattgaaagattgttaccatatagctaatggattggccatccgataacaaatagagtgattatctagttttttgttggatttgttccattgaactacaaggtattgaacacccttaatttcattttaacactcaacacaacaaa

SEQ ID NO: 1081 - DNA, 744 bp, Enterovirus B
tttaaaacagcctgtgggttgttcccacccacagggcccactgggcgctagcactctggtatcacggtacctttgtgcgcctgttttatagcccctcccttagataggaatttagaagcactgcacaccgatcaatagcaggcgcggcacgccagccacgtcttgatcaagcacttctgtttccccggaccgagtatcaatagactgttaacgcggtcgaaggagaaaacgttcgttatccggccaactacttcgagaaacctagtaacgccatggaagttgcggagtgtttcgctcagcacatccccagtgtagatcaggtcgatgagtcaccgcatccctcacgggtgaccgtggcggtggctgcgttggcggcctgcctacggggcaacccgtaggacgcttcaatatggacatggtgcgaagagtatattgagctagttggtagtcctccggcccctgaatgcggctaatcctaactgcggagcgctcgcccccaatccagggggtcgtgcgtcgtaacgggtaactctgcagcggaaccgactactttgggtgtccgtgtttccttttatctttatcacggctgcttatggtgacaattgaaagattgttaccatatagctattggattggccatcctgtgtctaacagagcaatcatatatctttttgttggatttgtgccacttgataaaataagttaccagactttgtgttttatcatcagactaaacacaacaaa

SEQ ID NO: 1082 - DNA, 744 bp, Enterovirus B
ttaaaacagcctgtgggttgtacccacccacagggcccaccgggcgctagcacactggtatcacggtacccttgtgcgcctgttttatcaacccctccccacattgaaacttagaagtaacacacaccgatcaatagtgggcgtggcaaaccagctacgtcgtgatcaagtatttctgtttccccggactgagtatcaatagactgctcgcgcggttgaaggagaaaacgttcgttacccggctaactacttcgagaaacctagtaatgccatgaaaattgcgtagcgtttcgttcagcacaaccccagtgtagatcaggtcgatgagtcactgcattcctcacgggcgaccgtggcagtggctgcgttggcggcctgcctatagggtaacctataggacgctacaatatggacatggtgtgaagagtctattgagctagttagtagtcctccggcccctgaatgcggctaatcctaactgcggagcgcgtgtttccaatccaggaagtggcgcgtcgtaatgggcaactctgcagcggaaccgactactttgggtgtccgtgtttctcttttatccttacactggctgcttatggtgacaattgaagaattgttaccatatagctattggattggccatccggtgtctaatagagcaattgtatacctctttgttggatttataccattaaacagaacaagttaccagaccctgtgctttattgttaaactaaacacgacgaa

SEQ ID NO: 1083 - DNA, 744 bp, Enterovirus B
tttaaaacaaagctgtgggttgttcccacccacagggcccactgggcgctggcacactggtattgcggtacctttgtgcgcctgttttatccgccctccccagtagtaacctagaagcatgaataatgtggtcaataggaagctcagtaaaccaactgggtcttgaccaagcacttctgttaccccggactgagtatcaagaagctgctcgcgtggctgaaggagaaaacgttcgttacccggccaattacttcgagaaacccagtaccaccatggaagttgcgcagcgtttcgctccgcacaaccccagtgtagatcaggtcgatgagtcaccgcaatcctcacgggtgaccgtggcggtggctgcgctggcggcctgcccatggggtaacccatgggacgcttcaatactgacatggtgcgaagagtccattgagctaattggtagtcctccggcccctgaatgcggctaatcctaactgcggagcagatatccacacaccagtggacagtctgtcgtaatgggtaactctgcagcggaaccgactactttgggtgtccgtgtttccttttatctttatattggctgcttatggtgacaattgagagattgttaccatatagctattggattggccatccggtgagcaacagagcaattgtattcctctttgtaggatttgtgccgttgaattacaacaactacaacaccttactctacattatccacttaaacacgcggaa

SEQ ID NO: 1084 - DNA, 744 bp, Enterovirus B
ttaaaacaaggctgtgggttgtacccgcccacagggcccactgggcgccagcactctggtattacggtacccttgtgcgcctgttttatatcccttccccaaggtaaacgttagaagcaatgcactcccgatcaatagaaggtgcgacgcgccagtcgtatctcgatcaagcacttctgtttccccggaccgagtatcaatagactgctagcgcggttgaaggagaaaacgttcgttacccgactaactacttcgagaagcccagtagcgccatgaaagttgcagagtgtttcgctcagcacttcccccgtgtagatcaggccgatgagtcaccgcaatccccacgggcgaccgtggcggtggctgcgttggcggcctgcctatggggaaacccataggacgctcaaatacagacatggtgcgaagagtctattgagctagttagtactcctccggcccctgaatgcggctaatcctaactgcggagcaagtactcacaatccagtgggcagcttgtcgtaacgggtaactctgcagcggaaccgactactttgggtgtccgtgtttccttttattcctacattggctgcttatggtgacaatcaaagagttgttaccatatagctattggattggccatccggtgactaataaagcaattatatttctttttgttgggtttgtaccccttaatacaaccagcttcaccacattgtgttacatcattagactgaacaaggcaaa

SEQ ID NO: 1085 - DNA, 744 bp, Enterovirus B
ttaaaacagcctgtgggttgttcccacccacagggcccactgggcgccagcacactggtatcacggtacttttgtgcgcctgttttatctacccccacccccagcgtaacttagaagcacatttcacacggtcaataggtgactcagcatgccagctgagttttggccaagcacttctgttaccccggaccgagtatcaataagctactcacgtggctgaaggagaaagcgttcgttaaccggccaattacttcgagaaacctagtatcaccatgaaggttgcgtggcgtttcgctccgcacaaccccagtgtagatcaggtcgatgagttaccgcgtccctcacgggcgaccgtggcggtagctgcgctggcggcctgcccatggggcaacccatgggacgcttcaatactgacatggtgtgaagagtctattgagctaattggtagtcctccggcccctgaatgcggctaatcctaactgcggagcagatacccacacgccagtgggcagtctgtcgtaatgggcaactctgcagcggaaccgactactttgggtgtccgtgtttccttttactcttatattggctgcttatggtgacaattaaaagattgttaccatatagctattggattggccatccagtgtctaatagagcgatcatttacctttttcttgggtttgttccactcaactataaagcacttgtaacgctcaaatatattataaacctcaacacaacaaa

SEQ ID NO: 1086 - DNA, 745 bp, Enterovirus A
ttaaacagctctagggttgttcccaccctagaggcccacgtggcggctagcactctggtatcacggtacctttgtgcgcctgttttatatccctttccccatgtaacttagaagttattaaacaaagttcaatagaagggggtacaaaccagtgccaccacgaacaagcacttctgtttccccggtgaagctgtatagactgtctccacggttgaaaatggcagatccgttacccgctttggtacttcgagaaacctagtatcaccttggaatcttcgatgcgttgcgctcagcactcaaccccagagtgtagcttaggtcgatgagtctggacgatcctcactggtgacagtggtccaggctgcgttggcggcctacctgtggtgaaaaccacaggacgctagttgtgaacaaggtgtgaagagtctattgagctaccaaagagtcctccggcccctgaatgcggctaatcctaaccacggagcaagtgccttcaaaccagtaggtagcttgtcgtaacgcgcaagtctgtggcggaaccgactactttgggtgtccgtgtttccttttattttatcatggctgcttatggtgacaatctaagattgttatcatatagctattggattggccatccggtgactaacagagatctcatatacctttttgttggttttactaaattaaatattaccacgttcaagacacttctccttatcatacaactaaatagtgagaagagaaa

SEQ ID NO: 1087 - DNA, 745 bp, Enterovirus A
ttaaaacagcctgtgggttgtacccacccacagggcccactgggcgttagcacactgatttcacggaatctttgtgcgcctgttttatatccctcccccaatacagtaacttagaagttagaaacctacacgaccaatagcaggcgtgacgcaccagtcatgtcttggtcaaacacttctgtttccccggactgagtatcaataagccgctcacgcggctgaaggagaaaacgttcgttatccggctaactacttcgagaaacctagtagcaccgtgaaagttgcagagtgtttcgctcagcactttccccgtgtagatcaggtcgatgagtcactgcatcccccacgggcgaccgtggcagtggctgcgttggcggcctgcctatggggcaacccatgggacgctctaatacagacatggtgtgaagagtctattgagctagttagtagtcctccggcccctgaatgcggctaatcctaactgcggagcacgcaccctcaatccagggggcggcgtgtcgtaacgggtaactctgcagcggaaccgactactttgggtgtccgtgtttccttttatcacttactggctgcttatggtgacaatcaaagaattgttaccatatagcttttggattggccatccggtgtctaacagagctattgtttacctgtttgttggatacattcctctcaactacaaagttcttcaaactctcaactttatattgctccttaatcataagaa

SEQ ID NO: 1088 - DNA, 745 bp, Enterovirus A
ttaaaacagcctgtgggttgcacccacccacagggcccactgggcgtcagcactctggtactgaggtacctttgtgcgcctgtttttacttccctttcccgaaagtaacttagaagctttgaaccagcgatcaacagtaggtgtgacataccagtcacatctcgatcaagcacttctgtatccccggactgagtatcaataggctgcttacgcggctgaaagagaaaacgttcgttacccggccaactacttcgagaagcttagtaccaccatgaacgaggcagagcgtttcgctcggcactaccccagtgtagatcaggctgatgagtcactgcaatccccatgggcgaccatggcagtggctgcgctggcggcctgcccatggagagatccatgggacgctctaattttgacacggtgcgaagagcctattgagctagttggtagtcctccggcccctgaatgcggctaatcctaactgcggagcgcacacccacataccagtgggtagtgtgtcgtaacgggcaactctgcagcggaaccgactactttgggtgtccgtgtttccttttattctcatgtcggctgcttatggtgacaatcgaagagttgttaccatatagctattggattggccatccggtgtgcaacagagcaattgtctaccagtttattggttttgtaccactgacattaaagtctgtaattaccctcaattttatcttgacccttaacacggtcaagc

SEQ ID NO: 1089 - DNA, 745 bp, Enterovirus A
ttaaaacagcctgtgggttgttcccacccacagggcccactgggcgctagcacactgattctgcgggatctttgtgcgcctgttttataacccttcccctaggtagcaactttgaaggtttggacaaaaacgaacaatagggggcgaaaagcgccagtcacgtcttggtcaaacacttctgtatccccggactgagtaccaataggctgctcacgcggttgaaggggaaaacgttcgttacccggctaactacttcgagaaacctagtaacaccatgaaagttgcggagtgtttcgctcagcacttcccccgtgtagatcaggtcgatgagtcactgtaaaccccacgggcgaccgtgacagtggctgcgttggcggcctgcccatggggtaacccatgggacgctctaatacagacatggtgcgaagagtctattgagctagttagcagtcctccggcccctgaatgcggctaatcctaactgcggagcgcgcaccctcaatccagggggcggcgtgtcgtaatggttaactctgcagcggaaccgactactttgggtgtccgtgtttccttttattctttattggctgcttatggtgacaattgaaaagttgttaccatatagctattggattggccatccggtgtctaacagagctattgtttacctatttattggatacgtccctctcaatctcaagtccattcaaactcttgattatatattgctccttaactgtaggaa

SEQ ID NO: 1090 - DNA, 745 bp, Enterovirus A
ttaaaacagcctgtgggttgttcccacccacagggcccattgggcgatagcacactgattttgcggaatctttgtgcgcctgttttataacccttcccccaagcagcaacttagaagtattgcacaatcgcggccagtagtgggcgtgacgcgccagtcacgtcttggtcaagcacttctgtatccccggactgagtatcaatagactgctcacgcggttgaaggagaaaacgttcgttatccggctaactacttcgggaaacctagtagcaccttgaaagttgcagagtgtttcgctcagcacttcccccgtgtagatcaggccgatgagccactgtaaaccccacgggcgaccgtgacagtggctgcgctggcggcctgcccatgggggaacccatgggacgctctaatacaaacatggggtgaaaagtctactgagctacttagtagtcctccggcccctgaatgcggctaatcctaactgcagagcacacaccctcaaccctcggggcagtgtgtcgtaatgggtaactctgcagaggaacccactactttgggtgaccgtgtttccttttattcgttattggctgcttagggcgacaattgaaaagttgttaccatatccctattgtattggccatccggtatctaacagagctattgtttacttatttgttggatacgtccctcttaatttcaaggctatccaaactcttgattatatatcgctccttaattataagaa

SEQ ID NO: 1091 - DNA, 745 bp, Enterovirus A
ttaaaacagcctgtgggttgttcccacccacagggcccactgggcgctagcactctgattttgcgggatctttgtgcgcctgttttataatcccttccctaagcagtaacttagaagttctacacaatcaggaccaacagtcagcgtggcacgccagccacgttttggtcaagcacctctgtttccccggactgagtatcaatagactgctcacgcggttgaaggagaaaacgttcgttacccggctaactacttcgagaaacctaatagcaccatgaaagttgcggagtgtttcgctcagcacttcccccgtgtagatcaggtcgatgagtcactgtaaaccccacgggcgaccgtgacagtggctgcgttggcggcctgcccatggggtaacccatgggacgctctaatacggacatggtgtgaagagtctattgagctagttagtagtcctccggcccctgaatgcggctaatcctaactgcggagcatgcgccctcaacccagggggtggcatgtcgtaatgggcaactctgcagcggaaccgactactttgggtgtccgtgtttccttttattcctcattggctgcttatggtgacaattgaaaggttgttaccatatagctattggattggccatccggtgtctaacagagctattgtttacctattcattgggtttgtccctcttaatcttaagaccatccaaactcttgattacatattgctcctcaattgtagaag

SEQ ID NO: 1092 - DNA, 745 bp, Enterovirus A
ttaaaacagcctgtgggttgtacccacccacagggcccactgggcgctagcactctggtactacggtacctttgtgtgcctgttttaagcccctaccccccactcgtaacttagaaggcttctcacactcgatcaatagtaggtgtggcacgccagtcacaccgtgatcaagcacttctgttaccccggtctgagtaccaataagctgctaacgcggctgaaggggaaaacgatcgttatccggctaactacttcgagaaacccagtaccaccatgaacgttgcagggtgtttcgctcggcacaaccccagtgtagatcaggtcgatgagtcaccgtattccccacgggcgaccgtggcggtggctgcgttggcggcctgcccatggggtgacccatgggacgctctaatactgacatggtgcgaagagtctattgagctagttagtagtcctccggcccctgaatgcggctaatcctaactgcggagcacatacccttaatccaaagggcagtgtgtcgtaacgggcaactctgcagcggaaccgactactttgggtgtccgtgtttccttttattcttacattggctgcttatggtgacaattgaaaagttgttaccatatagctattggattggccatccggtgacaaatagagctattgtatatctttttgttggttacgtaccccttaattacaaagtggtttcaactttgaaatacatcctaacactaaattgtagaaa

SEQ ID NO: 1093 - DNA, 745 bp, Enterovirus C
ttaaaacagcctgtgggttgttcccaccccagaggcccacgtggcggctagtacaccggtatcgcggtacccttgtacgcctgttttatactccctaccccgtaacttagaagcaataacttgagttcaacagcagggggtacaaaccagtaccaccacgaacaagcacttctgtttccccggtgacgttgtatagactgtacccacggtcgaaaacaatagatccgttatccgcttttgtacttcgaaaagcccagtaccatcttggaatcttcgatgcgttgcgttcagcactcgaacccggagtgtagcttaggtcgatgagtctggacagtccacaccggcgacggtggtccaggctgcgttggcggcctacctgtggcccaaagccacaggacgctagttgtgaacaaggtgtgaagagcctattgagctacaaaagactcctccggcccctgaatgcggctaatcccaaccacggagcaggcgatcacaaaccagtggttagcctgtcgtaatgcgcaagtctgtggcggaaccgactactttgggtgtccgtgtttccttttatttcatttatggctgcttatggtgacaatcgtagattgttatcataaagcgaattggattggccatccggtgaaattcaaatatactgtttatttatttgttggcttcgcgcctttaaattaccgcaccttagaactcattcacattatcttgctggttagacagtggtaccatc

SEQ ID NO: 1094 - DNA, 745 bp, Enterovirus C
ttaaaacagctctggggttgttcccaccccagaggcccacgtggcggctagtacaccggtatcacggtacccttgtacgcctgttttatacccccttcccccgtaacttagaagctacacaccaagttcaatagaagggggtacaaaccagtaccaccgcgaacaagcacttctgtttccccggtgaagttgcatagactgtgcccacggttgaaagcgaccgatccgttacccgccttggtacttcgagaaacccagtaccactttggaatcaatgatgcgttgcgctcagcgctcgaacccggagcgtagcttaggctgatgagtctggacattccccactggtgacagtggtccaggctgcgttggcggcctacctgtggtgaaagccacaggacgctagttgtgaacaaggtgcgaagagtctattgagctaccatggagtcctccggcccctgaatgcggctaatcccaaccacggagcaggcactcacaagccagtgagacgcttgtcgtaatgcgaaagtctgtggcggaaccgactactttgggtgtccgtgtttccttttattctttgtatggctgcttatggtgacaatcgaagattgttatcataaagcaagttggattggccatccggtgagaattaaaagcattatttacttgcttattggattcactccaatcacatcatttactccacatctaatcaatcttgtgttgatactcagaaggtgttatcaaa

SEQ ID NO: 1095 - DNA, 745 bp, Enterovirus C
ttaaaacagctctggggttgttcccaccccagaggcccacgtggcggccagtacactggtattacggtacccttgtacgcctgttttacaccccttcccccgtaacttagaagctttaaacccaagttcaatagtaggtggtacaacccagtaccaccacgaacaagcacttctgttatcccggtgagattgcataagctgtccccacggctaaaagcgattgatccgttacccgctcttgtacttcgagaagcctagtaaaaccttggaatcttcgacgcgttgcgttcgacactcaaccccagagtgtagcttaggctgatgagtctggacattcctcaccggcgacggtggtccaggctgcgttggcggcctacctgtggcctaaagccacaggacgctagttgtgaacaaggtgtgaagagcctattgagctacaagggagtcctccggcccctgaatgcggctaatcccaaccacggagcaggtggttgcaatccagcaactggcctgtcgtaacgcgcaagtctgtggcggaaccgactactttgggtgtccgtgtttccttttattttttaatggctgcttatggtgacaatcacagattgttgtcataaagcgaattggattggccatccagtgagagttaagataattatctacttgtttattggatttgttcctataaccgcccatacaccttgcttgattgaagtgatcctgtcaataagacatcactattaca

SEQ ID NO: 1096 - DNA, 745 bp, Enterovirus C
ttaaaacagctctggggttgttcccaccccagaggcccacgtggcggccagtactccggtattgcggtacccttgtacgcctgttttacactcccttccccggtaacttagaagtaaacaaaccaagttcaatagaagggggtacaaaccagtaccaccacgaacaagcacttctgtttccccggtgacgttgtatagactgtacccacggttgaaaacaactgatccgttatccgctcttgtacttcgagaagcccagtatcaccttggaatcttcgatgcgttgcgctcagcactcaaccccagagtgtagcttaggtcgatgagtctggacaatcctcaccggcgacggtggtccaggctgcgttggcggcctacctgtggcccaaagccacaggacgctagttgtgaacaaggtgtgaagagcctattgagctacgagagagtcctccggcccctgaatgcggctaatcccaaccacggagcaggtgatcacaagccagtgattagcctgtcgtaacgcgcaagtctgtggcggaaccgactactttgggtgtccgtgtttcctttattttattatggctgcttatggtgacaatcacagattgttatcataaagcgacttggattggccatccagtgaaaataaaacacatcatttacctgattgttggatttactccgctgactatctactcaccaggtcttattaaggttattctgttgattaggtcacaatttcaca

SEQ ID NO: 1097 - DNA, 745 bp, Enterovirus C
ttaaaacagctctcgggttgttccccccccagaggcccacgtggcggccagtactccggtattacggtacccttgtacgcctgttttgtatccccttcccccgcaacttagaagttataaaccaagttcaatagaagggggtacaagccagtaccaccacgaacaagcacttctgtttccccggtgatgttgtatagactgctaacgcggttgaaaacagctgatccgttatccgcttgtgtacttcgagaagcctagtatcatcttggaatcttcgatgcgttgcgttcagcgctctaccccagagcgtagcttaggctgatgagtctgggcattccccaccggcgacggtggcccaggctgcgttggcggcctacctatggctaacgccataggacgctagttgtgaacaaggtgtgaagagcctattgagctacacaagagtcctccggcccctgaatgcggctaatcctaaccatggagcaagtgatcacaatccagtgatattcttgtcgtaacgcgcaagtccgtggcggaaccgactactttgggtgtccgtgtttccttttacttttatcatggctgcttatggtgacaatcattgattgttatcataaagcgaattggattggccatccggtgaaagtgagacttatcatctacttgtttgttggattcactccattgaacacattcactcccagtatcatttcaatagtaatcagaattagacagttgtatcaca

SEQ ID NO: 1098 - DNA, 745 bp, Enterovirus C
ttaaaacagctctggggttgttcccaccccagaggcccacgtggcggctagtactccggtattacggtacccttgtacgcctgttttaaatccccttccccgtaacttagaagcttaaaccaataagttcaatagaagggggtacaaaccagtaccaccacgaacaagcacttctgtttccccggtgcggtggtatagactgtacccacggttaaaaaccaccaatccgttatccgctctggtacttcgagaagcctagtaccaccttggaatctttgacgcgttgcgctcaacactcaaccccagagtgtagcttaggctgatgagtctgggcagtccccaccggtgacggtggcccaggctgcgttggcggcctacccatggctaatgccatgggacgctagaagtgaacaaggtgtgaagagcctattgagctactagagagtcctccggcccctgaatgcggctaatcccaaccacggatcaagtgcgcgcaacccagtgcgtagcttgtcgtaatgcgcaagtctgtggcggaaccgactactttgggtgtccgtgtttccttttattcttattatggctgcttatggtgacaatcttagattgttatcatatagcaattggattggccatccagtgagagtgagagatatcatatacctatttgtagcttttactccacttagcacgaacacagttactttgattagaattgtgctattgatcagattgacacatcact

SEQ ID NO: 1099 - DNA, 745 bp, Enterovirus C
ttaaaacagctctggggttgttcccaccccagaggcccacgtggcggctagtactctggtatcacggtacctttgtacgcctgttttatatcccttcccccgtaacttagaagctttgtaccaacaagttcaatagaaggggtacaaaccagtaccaccacgaacaagcacttctgtttccccggtgcgatgacatagactgtacccacggtcaaaagtcaccaatccgttacccgctttggtacttcgagacgcctagtattgccttggaattctcgatgcgttgcgctcaacactcgaccctggagtgtagcttaggctgatgagtctgggcattccccaccggtgacggtggcccaggctgcgttggcggcctacccatagctattgctatgggatgctagagttgaacaaggtgtgaagagccaattgagctactaaagagtcctccggcccctgaatgcggctaatcccaaccacggatcaagtgcgtgcaacccagcacgtagcttgtcgtaatgcgcaagtctgtggcggaaccgactactttgggtgtccgtgtttccttttatttttatcatggctgcttatggtgacaatcttggattgttatcatatagcgattggattggccatccggtgagaataaaagatattgtttatctgtttgtggcttttactccattaaacaaaaacacactttccttaattaaagtggtactattgatcagatcagcataccaca

SEQ ID NO: 1100 - DNA, 745 bp, Enterovirus C
ttaaaacagctctggggttgttcccaccccagaggcccacgtggcggctagcactctggtattgcggtacctttgtgcgcctgttttatatccccgcccctacgtaactttagaagcaatacacagtgttcattaggaggggcacaaaccagtgtccttaagaacaagcacttctgtttccccggtgacctcgtataggctgtacccacggctaaaaacgagcgattcgttacccgcttaggtacttcgagaagcctagtaccgccttggaatcttcgacgcgttgcgctcagcactctaccccgagtgtagcttaggctgatgagtctgggcattccccaccggtgacggtggcccaggctgcgttggcggcctacccatggcctgcgccatgggacgctagttgtgaacaaggtgtgaagagcctattgagctacctaagaatcctccggcccctgaatgcggctaatcctaaccacggagcaagcaccctcaatccagggggtggcttgtcgtaacgcgcaagtctgtggcggaaccgactactttgggtgtccgtgtttccctttatttttattgtggctgcttatggtgacaatctttgattgccatcataaagcgaattggattggccatccggtgaaagttgaacacaccattcatctatttgttggattcacctcgttgactcagtttacacccaatttggtacatatagtgatagtgattagagaaaaataccaca

SEQ ID NO: 1101 - DNA, 745 bp, Enterovirus C
ttaaaacagctctggggttgttcccaccccagaggcccacgtggcggctagtactctggtattacggtacctttgtacgcctgttttatatcccctccccccagtaacttagaaacaaaaaacccaagttcaataggagggggtacaaaccagtaccaccacgaacaagcacttctgttttccccggtgaggttgtatagactgtccccacggtcgaaaatgactgatccgttacccgctcctgtacttcgagaagcccagtaacatcttggaatcttcgatgcgttgcgctcagcactcaaccccagagtgtagcttaggtcgatgagtctggacgctccccaccggcgacggtggtccaggctgcgttggcggcctacctgtggtccaaagccacaggacgttagttgtgaacaaggtgtgaagagcctattgagctacaagagagtcctccggcccctgaatgcggctaatcccaaccatggagcagatgattgcaaaccagcaattggtctgtcgtaatgcgtaagtctgtggcggaaccgactactttgggtgtccgtgtttcctttttactctttaatggctgcttatggtgacaatcacggattgttatcataaagcgaattggattggccatccggtgagaatcagaacgattatttcttcctcgtggatttgtaccaataacaccttacacaccgcacttaatcagagttatattgtgtgagatttcattaccata

SEQ ID NO: 1102 - DNA, 745 bp, Enterovirus C
ttaaaacagctctggggttgttcccaccccagaggcccacgtggcggctagcactctggtatcacggtacctttgtgcgcctgttttatgtccccgcccccatgtaactttagaagcaatacacggtgttcattaggaggggcacaagccagtgttcctatgaacaagcacttctgtttccccggtgacctcgtataggctgtgcccacggctaaaaacgtgcgatccgttacccgcttgggtacttcgagaagcccagtaccaccttggaatcttcgacgcgttgcgctcagcactctaccccgagtgtagcttaggctgatgagtctgggcattccccactggtgacagtggcccaggctgcgttggcggcctacccattgctcgcgcaatgggacgctagatgtgaacaaggtgtgaagagcctattgagctgcctaagagtcctccggcccctgaatgcggctaatcctaaccacggagcaagcgccttcaacccagggggtggcttgtcgtaacgcgcaagtctgtggcggaaccgactactttgggtgtccgtgtttccctttgtttttattatggctgcttatggtgacaatcattgattgccatcataaagcgaattggattggccatccggtggaagttacatacatcatccatctatttgttggatttgcttcactaacacagttcacaatcaacttggtatatataataatagtgattagagaaaaataccata

SEQ ID NO: 1103 - DNA, 745 bp, Enterovirus C
ttaaaacagctctggggttgttcccaccccagaggcccacgtggcggctagtactctggtatctcggtacctttgtacgcctgttttatacccccttccccatgtaactttagaagcaattcaacaagttcaatagagggggtacaaaccagtaccaccacgaacaagcacttctgtttccccggtgattttacataagctgtgcccacggctgaaagtgaatgatccgttacccgcttgagtacttcgagaagcctagtatcgccttggaatcttcgatgcgttgcgctcagcactctaccccgagtgtagcttaggctgatgagtctgggcattccccaccggtgacggtggcccaggctgcgttggcggcctacccatggctaacgccatgggacgctagttgtgaacaaggtgtgaagagcctattgagctacttaagagtcctccggcccctgaatgcggctaatcccaaccacggagcaggcgccaccaatccaggaggtagcctgtcgtaacgcgtaagtctgtggcggaaccgactactttgggtgtccgtgtttccttttatctctttaatggctgcttatggtgacaatcatagattgttatcataaagcgaattggattggccatccggtgaagtgtaaacacattatttatttgttcattggatttactccattcacccgatttactccaaatataatacatattgtattgttgataagacgttgctactaca

SEQ ID NO: 1104 - DNA, 745 bp, Enterovirus C
ttaaaacagctctggggttgttcccaccccagaggcccacgtggcggctagcactccggtattacggtacccttgtgcgcctgttttatactcccttcccccgcaatttagaagcatgaaacccggttcaatagtaaggggtacaaaccagtaccactatgaacaagcacttctgtctccccggtgatattgtatagactgctcacgcggttgaaagcgattgatccgttatccgcttgtgtacttcgagaagcctagtaccaccttcggaacttcgacgcgttgcgctcagcacccgaccccggggtgtagcttgggctgatgagtctggacgatcctcaccggcgacggtggtccaggctgcgttggcggcctacccgtggttcacaccacgggacgctacaagtgaacaaggtgtgaagagcctattgagctacacaagagtcctccggcccctgaatgcggctaatcccaaccacggagcaggcggtcacgaaccagtggctagcttgtcgtaacgcgcaagtctgtggcggaaccgactactttgggtgtccgtgtttcctgttatttttatcatggctgcttatggtgacaatcattgattgttatcataaagcgaattggattggccgtccggaaagtgttttatcacatatactgtttggtgaagctactacattaattctgcctctcactcggttagtcaaacagaactcagacagagtaaaacatcaccaacgca

SEQ ID NO: 1105 - DNA, 745 bp, Enterovirus C
ttaaaacagcctgtgggttgttcccaccccagaggcccacgcggcggctagtactctggtgctgcggtacctttgtacgcctgttttatacccccgtccccgcaatttagaagcaagaaaacaaagttcaatagtaggtggtgcaatccagcatcgctatgaacaagcacttttgttgccccggtgaggttgcatagactgttcccacggtcaaaagtgaccaatccgttacccgcttttgtacttcgagaagcctagtatcaccttggaatcttcgacgcgttgcgttccgcactcaaccccagggtgtagcttaggtcgatgagtctgggcggaccccaccggcgacggtggcccaggctgcgttggcggcctacctgtggtccaaagccacaggacgctagttgtgaacaaggtgtgaagagcctattgagctacaaaagagtcctccggcccctgaatgcggctaatcctaaccacggagcaggtggtcgcaaaccagtgattaacctgtcgtaatgcgcaagtctgtggcggaaccgactactttgggtgtccgtgtttctctttattttactatggctgcttatggtgacaatcgaggattgttatcataaagcgaattggattggccatccggtgaaagtgaaatacattatctattcaattgttgaattcatccagaacacacccgcaacactacatctgattaaactcgttttgataaccagagaacattaccaca

SEQ ID NO: 1106 - DNA, 745 bp, Enterovirus C
ttaaaacagcctgtgggttgttcccaccccagaggcccacgtggcggctagcactccggtattacggtacccttgtgcgcctgtttttatactcccttccccgtaacttagaagcacaaaaccaagttcaatagaagggggtacaaaccagtaccaccacgaacaagcacttctgtttccccggtgacgttgtatagactgctcacgcggttgaaagcgacgaatccgttatccgcttgtgtacttcgagaagcctagtaccaccttggaatcttcgacgcgttgcgctcggcactctaccccagagtgtagcttaggctgatgagtctgggcattcctcatcggcgacgatggcccaggctgcgttggcggcctacctatggctaacgccataggacgctagttgtgaacaaggtgtgaagagcctattgagctacacaagagtcctccggcccctgaatgcggctaatcctaaccatggagcaggagatcacaaaccagtggtattcctgtcgtaatgcgcaagtccgtggcggaaccgactactttgggtgtccgtgtttccttttatttttatcatggctgcttatggtgacaatcattgattgttatcataaagcgaattggattggccatccggtgaaaataagatttattatttacttgtttgttggattcactccgctaaacacattcactccaggtatcatctctatagtgattgaaattaggcaattacatcaca

SEQ ID NO: 1107 - DNA, 745 bp, Enterovirus C
ttaaaacagctctggggttgttcccaccccagaggcccacgtggcggctagtactctggtatcacggtacctttgtacgcctgttttacatcccctcccccacgtaactttagaagcaattcaacaagttcaatagagggggtacaaaccagtatcaccacgaacaagcacttctgtttccccggtgattttacataagctgtgcccacggctgaaagtgaatgatccgttacccgctcgagtacttcgaaaagcctagtatcgctttgggatcttcgacgcgttgcgctcagcactctaccccgagtgtagcttaggctgatgagtctgggcattccccatcggcgacgatggcccaggctgcgttggcggcctacccatggctaacgccatgggacgctagttgtgaacaaggtgtgaagagcctattgagctactcgagagtcctccggcccctgaatgcggctaatcccaaccacggatcaggtgcctccaacccaggaggtggcctgtcgtaacgcgcaagtctgtggcggaaccgactactttgggtgtccgtgtttccttttatcttttaaatggctgcttatggtgacaatcatagattgttatcataaagcgaattggattggccatccggtgaaatacaaacacattatttacttgtttgttggatttactccgctcacacagcttactcctaagataatatttattgtattgctggtaaggagacactattata

SEQ ID NO: 1108 - DNA, 745 bp, Enterovirus B
tttaaaacagcctgtgggttgttcccacccacagggcccactgggcgccagcactctggtattgcggtaccttagtgcgcctgttttatatacccatcccccaaacgtgatttagatgcatgttaacgaagaccaatagtaagcgcagcacaccagctgtgttccggtcaagcacttctgttaccccggactgagtatcaataagctactcacgtggctgaaggagaaaacgttcgttacccggccaattacttcgagaaacccagtaacaccatgaaggttgcgcagtgtttcgctccgcacaaccccagtgtagatcaggtcgatgagtcaccgcattccccacgggtgaccgtggcggtggctgcactggcggcctgcccatggggtaacccatgggacgcttcaatactgacatggtgcgaagagtctattgagctaattggtagtcctccggcccctgaatgcggctaatcctaactgcggagcagatacccacacgccagtgggcagtctgtcgtaacgggcaactctgcagcggaaccgactactttgggtgtccgtgtttctctttatccttatactggctgcttatggtgacaattgggagattgttaccatatagctattggattggccatccagtgacaaatagagcaatcgtgtatttgtttgttggtttcgtaccattaaattacaaggtcataaacaccctcaatcttattatagcattcaatacaacaaa

SEQ ID NO: 1109 - DNA, 745 bp, Enterovirus B
ttaaaacagcctgtgggttgtacccacccacagggcccactgggcgctagcacactggtatcccggtacctttgtgcgcctgttttataccccctcccccatatcgtaacatagaagcaatgcactcccggtcaatagctgacgtgacaaaccagttgcgttttgaccaagcacttctgtaaccccggaccgagtatcaataagctgcttgcgcggctaaaggagaaaccgtccgttacccggctaactacttcgagaaacctagtaccaccatgaacgttgcggagtgtttcgctcagcacttcccccgtgtagatcaggtcgatgagccaccgcattccccacgggcgaccgtggcggtggctgcgttggcggcctgcctgtggggcaacccacaggacgctctaatatagacatggtgtgaagagtctattgagctagttagtagtcctccggcccctgaatgcggctaatcctaactgcggagcacatacccctaatccaaggggcagtgtgtcgtaacgggcgactctgcagcggaaccgactactttgggtgtccgtgtttccttttatcttttatattggctgcttatggtgacaattgcagagttgttaccatatagcttttggattggccatccggtgagcaatagagctgttatttatcaatttgttggattcgtcgcactcaaccacacagtctttagaacactcggatttatcttgacccttaatacgagaaa

SEQ ID NO: 1110 - DNA, 745 bp, Enterovirus B
ttaaaacaagcctgtgggttgaacccactcacagggcccaatgggcgctagcacactggtatcacggtacctttgtgcgcctgttttatccaccctttccccgaacgaaacttagaagtttgaattaaacggtcaataggaaacccagtacaccaactgggctgtgaccaagcacttctgtgaccccggaccgagtatcaataagctactcacgtggctgaaggagaaaacgttcgttacccggccaattacttcgagaaacttagtaccaccatgaaagttgcgcagcgtttcgctccgcacgaccccagtgtagatcaggctgatgagtcaccgcgtaccccacgggtgaccgtggcggtggctgcgttggcggcctgcccttggggcaacccaagggacgcttcaatactgacatggtgcgaagagtctattgagctaattggtagtcctccggcccctgaatgcggctaatcccaactgcggagcagatacccacataccagtgggcagtctgtcgtaatgggcaactctgcagcggaaccgactactttgggtgtccgtgtttcctttatttcttacactggctgcttatggtgacaattgagagattgttgccatatagctattggattggccatccggtgtctaatagagcaattatctacctttttgttggatttattccacttaactataaagcactcaaaacacttatatacattgtagatctcaacacagcaaa

SEQ ID NO: 1111 - DNA, 745 bp, Enterovirus B
tttaaaacagcctgtgggttgttcccacccacagggcccactgggcgctagcacactggtatcacggtacctttgtgcgcctgttttatacacccccccctacatcgtaatttagaagtccaagccaaacggtcaatagacaacccagtatgccaactgggtcccgaccaagcacttctgttgccccggaccgagtatcaataagctgcttgcgcggctgaaggagaaagcgttcgttacccggccaattacttcgagaaacccagtaacaccatggaagttgcgtggcgtttcgctccgcacaaccccagtgtagatcaggtcgatgagtcaccgcaaccctcacgggcgaccgtggcggtggctgcgttggcggcctgcccatgggacaacccatgggacgcttcaataccgacatggtgcgaagagtctattgagctaattggtattcctccggcccctgaatgcggctaatcctaactgcggagcagacacccacatgccagtgggcagtctgtcgtaacgggaaactctgcagcggaaccgactactttgggtgaccgtgtttcctattatccttattctggctgcttatggtgacaattgaaagattgttaccatatagctattggattggccatccggtgtctaatagagctattatatacctctttgttggatttataccacttaacaaagtaaactaccagactctgtgctatatcattggattgaacacggtgaa

SEQ ID NO: 1112 - DNA, 745 bp, Enterovirus B
ttttaaaacaggctgtgggttgttcccacccacagggcccattgggcgccagcacactggtattacggtacctttgtgcgcctgttttatccaccccctccccaatgtaacgtagaagcacaaaccaagtggtcaatagatggctcagtacaccaactgggcttagaccaagcacttctgttaccccggactgagtatcaataggctgctcacgcggctgaaggagaaaacgttcgttacccgaccaactacttcgagaagcctagtaccatcatgaaggatgcgcagtgtttcgttcagcacaaccccagtgtagatcaggccgatgagtcaccgcaatccccacgggtgaccgtggcggtggctgcgctggcggcctgcccatggggcaacctatgggacgcttcaatttcgacatggtgcgaagagcctattgagctagttggtagtcctccggcccctgaatgcggctaatcccaactgcggagcagacacccacaaaccagtgggcagtttgtcgtaacgggcaactctgcagcggaaccgactactttgggtgtccgtgtttccttttatctatatattggctgcttatggtgacaattgagggattgttgccatatagctattggattggccatccggtaacaaacagagctattatttacctttttgttggcttcgtgccgttgaactttaaagttattaaaaccatatacttcatcttgacactcaacacagcaaa

SEQ ID NO: 1113 - DNA, 745 bp, Enterovirus B
aaaacaagcctgtgggttgctcccggccccacaggggcccactgggcgctagcacactggtattgcggtacccttgtgcgcctgttttatccaccctccccaaccgtaatttagaagcacgaacaacgtggtcaacaggcaacccagtataccaactgggtctcgaccaagcacttctgtcaccccggactgagtatcaataagctgctcgcgtggctgaaggagaaaacgttcgttacccggccaattacttcgagaaacctagtatcaccatggaagttgcgcagtgtttcgctccgcacaaccccagtgtagatcaggtcgatgagtcaccgcaaccctcacgggtgaccgtggcggtggctgcgctggcggcctgcccatggggcaacccatgggacgcttcaatactgacatggtgcgaagagtctattgagctaattggtaatcctccggcccctgaatgcggctaatcctaactgcggagcagatatccacacaccagtggacagtctgtcgtaatgggcaactctgcagcggaaccgactactttgggtgtccgtgtttccttttattctttttattggctgcttatggtgacaattgagagattgttaccatatagctattggattggccatccggtgagcaacaggtcaattgtattcctctttgttggatttgtgccattaaactataataactacaacaccctgctttacattatccatttaaacacacagaa

SEQ ID NO: 1114 - DNA, 745 bp, Enterovirus C
gctctggggttgttcccaccccagaggcccacgtggcggctagtactcccggtatcacggtacccttgtacgcctgttttatactccctttcccccgcaacttagaagattatgagaatccacgttcaacaggaagggggtacaaaccagtaccaccacgaacaagcacttctgtttccccggtgaggttgtatagactgtacccacggttgaagacgactgatccgttacccgctctagtacttcgagaagcttagtaacaccttggaatcatcgatgcgttgcgttcaacactcaaccccagagtgtagcttaggctgatgagtctggacaatcctcaccggtgacggtggtccaggctgcgctggcggcctacctgtggtccaaaaccacaggacgctagatgtgaacaaggtgcgaagagcctattgagctactagagagtcctccggcccctgaatgcggctaatcccaaccacgaagcaagtgctcacgatccagtgagtggcttgtcgtaacgcgtaagttcgtggcggaaccgactactttgggtgtccgtgtttcctttttaactttatatggctgcttatggtgacaatcattgattgttatcataaagcgatttggattggccatccagtgagagcgagaacaactacttatttgctcgttggatttgctccttcgacaagctacattttagatatcattctcattgtattcttgatcagaaagcaatatcata

SEQ ID NO: 1115 - DNA, 745 bp, Unknown
  Description of Unknown: unclassified Enterovirus sequence
ttaaaacagcttgggggtgtttcccacccacagggcccactgggcggtagcactctggtattacggtacctttgtgcgccttttttatatccccacccccgattgtaacttagaagaaataattcacgaccaatagtaggcgtggcgcgccagccatgttttggtcaagtacttctgtttccccggatcgagtatcaataggctgtccacacggctgaaggagaaagcgtccgttatccggccaattacttcgagaaacctagtaccaccatgaaagttgcgcagtgtttcgctccgcacaaccccagtgtagatcaggtcgatgagtcaccgcttccctcacgggcgaccgtggcggtggctgcgctggcggcctgcccatggggaaacctatgggacgctccaatactgacatggtgcgaagagtctattgagctaattggtagtcctccggcccctgaatgcggctaatcccaactgcggagcagatacccacatgccagtgggcagtctgtcgtaacgggcaactctgcagcggaaccgactactttgggtgaccgtgtttccttttattcctatactggctgctaatggtgacaattgaaagattgttaccatatagctattggattggccatccggtaactaacagagcgattgtttaccaatttgttggttttgtaccactagactacaaggtcttaaacaccttaaactatatcttgacactcaacacattgaaaag

SEQ ID NO: 1116 - DNA, 746 bp, Enterovirus A
gtgctcttccgatctgtgggttgcacccacccacagggcccactgggcgttagcactctggtaccatggtacccttgtgcgcctgttttatcaccctaacccaacttgaaacttagaagcaatacacaatcgaccaatagtaggtgtggcgcaccagccgcatcttggtcaagcacttctgtttccccgggttgagtatcaataagctgtccacacggctgaaggagaaaacgcccgttatccggccaactacttcgagaaacctagtaccactatgaacgttgcaaggcgtttcgctcagcacttcccccgtgtagatcaggtcgatgagtcaccgcattccccacgggcgaccgtggcggtggctgcgttggcggcctgcctatgggttaacccataggacgccttaatactgacatggtgcgaagagtctattgagctagttggtagtcctccggcccctgaatgcggctaatcctaactgcggagcacatactcacaacccagtgagcggtgtgtcgtaatgggtaaccctgcagcggaaccgactactttgggtgtccgtgtttccttttattcttacattggctgcttatggtgacaatcatagaattgttaccatatagctattggattggccatccgatttctaacagagctattatttacctgtttgttggatttactccgttgacatacaaatccctaaacactttgtgctttatcttgaacttgaacgcacgaaa

SEQ ID NO: 1117 - DNA, 746 bp, Enterovirus A
tgctcttccgatctgtgggttgtacccacccacagggcccattgggcgctagcactctggtaccatggtacccttgtgcgcctgttttatcaccccgcccctacctgaaacgtagaagctataatcaatcggccaatagtgggtgtggcataccagccacatcttggtcaagcacttctgtttccccgggttgagtatcaatatgctgttcacacggctgaaggagaaaacacccgttacccggccaactacttcgagaagcttagtaccgccatgaacattgcaaggcgtttcgctcagcactttccccgtgtagatcaggccgatgagtcaccgcattccccacgggcgaccgtggcggtggctgcgttggcggcctgcctgtgggttaacccacaggacgccttaatatagacatggtgcgaagagcctattgagctagttggtattcctccggcccctgaatgcggctaatcctaactgtggagcacatactcacaagccagtgggtggtgtgtcgtaacgggcaactctgcagcggaaccgactactttgggtgtccgtgtttcctttttatccttatattggctgcttatggtgacaatcagagaattgttaccatatagctattggattggccatccggtgtgcaacagagctattgtgtatttgtttgttggatttgtcccactatcgtatacacccctcaacaccttgtattttattttgagattgaacgcaagaaa

SEQ ID NO: 1118 - DNA, 746 bp, Enterovirus A
tttaaaacagcctgtgggttgtacccacttgcagggcccactgggcgctagcactctgattctgcgggatctttgtgcgcctgttttataaccccacccctactcgtaacttagaagtaacacacaccattgatcaacagcaagcgtggcgcaccagccacgtttagatcaagcacttctgtttccccggactgagtatcaatagactgctcacgcggttgaaggagaaatcgttcgttacccggctaactacttcgagaaacctagtagcaccattgaaactgcagagtgtttcgttcagcactttccccgtgtagatcaggccgatgagtcactgcaatccccacgggcgaccgtggcagtggctgcgttggcggcctgcctatgggctttcccataggacgctctaatgtggacatggtgtgaagagtctattgagctagttagtagtcctccggcccctgaatgcggctaatcctaactgcggagcgcataccctcaatccagggggtggtgcgtcgtaacgggcaactttgcagcggaaccgactactttgggtgtccgtgtttccttttattcttatattggctgcttatggtgacaattgagaaattgttaccatatagctattggattggccatccagtgtctaacagagcagttgtatacttatttgctggattcgttccactatcatacacatctattaataccttatattatattataagattgaacgcaaggaa

SEQ ID NO: 1119 - DNA, 746 bp, Enterovirus A
tttaaaacagcctgtgggttgtacccacctacagggcccactgggcgctagcactctgattccacggaatccttgtgcgcctgttttatatcccctccccaagttgcaacttagaagcattgcactacaatgatcagtagcaggcgtggcgctccagccatgtctcgatcaagcacttctgtttccccggaccgagtatcaatagactgctaacgcggttgaaggagaaaacgttcgttatccggctaactacttcgagaaacctagtagcaccatcgaagctgcggggcgtttcgctcagcacttcccccgtgtagatcaggtcgatgagtcactgcaatcctcacgggcgaccgtggcagtggctgcgttggcggcctgcctatggggcaacccataggacgcttcaaagtggacatggtgtgaagagtctattgagctagttagtagtcctccggcccctgaatgcggctaatcctaactgcggagcacataccttcaatccaggaggtagtgtgtcgtaacgggcaactctgcagcggaaccgactactttgggtgtccgtgtttccttttattctcttattggctgcttatggtgacaattgaagaattgttaccatatagctattggattggccatccagtgtctaacagagcaattgtgtacttatttgttggttttgttcctttgtctcacacgtcccttagtactttgtattacattataaaactgaattcggagag

SEQ ID NO: 1120 - DNA, 746 bp, Enterovirus A
tttaaaacagcctgtgggttgcacccacccacagggcccactgggcgctagcactctggtactgaggtacctttgtgcgcctgtttttactccccttcccccgaagtaacttagaagctgtaaatcaacgatcaatagcaggtgtggcacaccagtcataccttgatcaagcacttctgtttccccggactgagtatcaataggctgctcgcgcggctgaaggagaaaacgttcgttacccgaccaactacttcgagaagcttagtaccaccatgaacgaggcagggtgtttcgctcagcacaaccccagtgtagatcaggctgatgagtcactgcaacccccatgggcgaccatggcagtggctgcgttggcggcctgcccatggagaaatccatgggacgctctaattctgacatggtgtgaagagcctattgagctagctggtagtcctccggcccctgaatgcggctaatcctaactgcggagcacatgctcacaaaccagtgggtggtgtgtcgtaacgggcaactctgcagcggaaccgactactttgggtgtccgtgtttccttttattcctatattggctgcttatggtgacaatcaaagagttgttaccatatagctattggattggccatccggtgtgcaacagggcaattgtttacctatttattggttttgtaccattatcactgaagtctgtgatcactctcaaattcattttgaccctcaacgcaatcaaac

SEQ ID NO: 1121 - DNA, 746 bp, Enterovirus A
ttttaaaaaccagcctgtgggttgcacccactcacagggcctactgggcgcaagcactctggtacctcggtacctttgtgcgcctgttttacaccccccccctagtgaaacttagaagcagcaaaccacgatcaatagcaggcataacgctccagttatgtcttgatcaagcacttctgtttccccggactgagtatcaatagactgctcgcgcggttgaaggagaaaacgttcgttatccggctaactacttcggaaaacctagtaacaccatgaaagttgcggagagcttcgttcagcactcccccagtgtagatcaggtcgatgagtcaccgcattccccacgggcgaccgtggcggtggctgcgttggcggcctgcccatggggtaacccatggggcgctctaatacggacatggtgtgaagagtctactgagctagttagtagtcctccggcccctgaatgcggctaatcccaactgcggagcacacgcccacaagccagcgggtagtgtgtcgtaacgggtaactctgcagcggaaccgactactttgggtgtccgtgtttccttttatctttatattggctgcttatggtgacaattaaagaattgttaccatatagctattggattggccatccggtgtgtaatagagcaattatttacctatttattggttttgtaccattaaccttgaattctgtgaccacccttaattatattttgacccttaacacagctaaac

SEQ ID NO: 1122 - DNA, 746 bp, Enterovirus A
ttaaaacagcctgtgggttgttcccacccacagggcccactgggcgctagcacactgattctacggaaactttgtgcgcctgttttatgtccctccccctaatatgtaacttagaaatttagtacacccatgaccaatagtaggcgtgacgcaccagtcacgtcttggtcaagcacttttgtttccccgggctgagtatcaatagactgcttacgcggttgaaggagaaaacgttcgttacccggctaactacttcgagaaacctagtaacaccatgaaagttgcagggtgtttcgctcagcacttcccccgtgtagatcaggtcgatgagtcactgcaaaccccacgggcgaccgtggcagtggctgcgttggcggcctgcccatggggtaacccatgggacgctctgatactgacatggtgcgaagagtctattgagctagttagtagtcctccggcccctgaatgcggctaatcctaactgcggagcacacaccctcaacccagggggcggtgtgtcgtaacgggcaactctgcagcggaaccgactactttgggtgtccgtgtttccttttatctctattatggctgcttatggtgacaattgaagaattgttaccatatagctattggattggccatccggtgtttaacagagcaattgtatacctatttgttggatttgtccctttgtcacacacatctctcaataccttatactacattataaagttgaatacaggaac

SEQ ID NO: 1123 - DNA, 746 bp, Enterovirus A
ttaaaacagcccgtgggttgtacccactcacggggtccactggacgctagcactctggttccacggaacctttgtgcgcctgttttatacccctccccaacttgtaacgtagaagcagtacctaatatcgatcaatagtaggtgtggcgcaccagccatatcttgatcaagcacttctgtctccccggaccgagtatcaatagactgctcacgcggttgaaggagaaagcgttcgttacccggctaactacttcgagaaacctagtagcaccatggaagctgcggagtgtttcgctcagcacttcccccgtgtagatcaggtcgatgagtcactgcaatcctcacgggtgaccgtggcagtggctgcgttggcggcctgcctgtggggcaacccacaggacgctctaatgtggacatggtgcgaagagtctattgagctagttagtagtcctccggcccctgaatgcggctaatcctaactgcggagcgcatgccctcaatccagagggtagtgcgtcgtaacgggcaactctgcagcggaaccgactactttgggtgtccgtgtttccttttactcttatattggctgcttatggtgacaattacggaattgttaccatatagctattggattggccatccggtgtgcaatagagctatcatttacctatttgttggatttgtaccactgtcattaaagtccataaccacactcaattatatactcactctcaatataactaaac

SEQ ID NO: 1124 - DNA, 746 bp, Enterovirus A
ttaaaacagctgtgggttgttcccactcacagggcccactgggcgctagcactctgattttacgaaatccttgtgcgcctgttttatatcccttccctaattcgaaacgtagaagcaatgcgcaccactgatcaatagtaggcgtaacgcgccagttacgtcatgatcaagcatatctgttcccccggactgagtatcaatagactgcttacgcggttgaaggagaaaacgttcgttatccggctaactacttcgagaagcccagtaacaccatggaagctgcagggtgtttcgctcagcacttcccccgtgtagatcaggtcgatgagccactgcaatccccacaggtgattgtggcagtggctgcgttggcggcctgcctatggggagacccataggacgctctaatgtggacatggtgcgaagagcctattgagctagttagtagtcctccggcccctgaatgcggctaatcctaactgcggagcacatgccttcaacccagagggtagtgtgtcgtaatgggcaactctgcagcggaaccgactactttgggtgtccgtgtttctttttattcttatattggctgcttatggtgacaattacagaattgttaccatatagctattggattggccatccggtgtgtaatagagctgttatatacctatttgttggctttgtaccactaactttaaaatctataactaccctcaactttatattaaccctcaatacagttgaac

SEQ ID NO: 1125 - DNA, 746 bp, Enterovirus A
ttaaaacagcctgtgggttgttcccacccacagggcccattgggcgctagcacactgactttgcggagtctttgtgcgcctgttttataacccttcccccaagtagcaacttagaagtattgcacaaccgcggccagtagtgggcgtgacgcgccagtcacgtcttggtcaagcacttctgtatccccggactgagtatcaatagactgctcgcgcggttgaaggagaaaacgttcgttatccggctaactacttcgggaaacctagtagcaccttggaagttgcagagtgtttcgctcagcactttccccgtgtagatcaggtcgatgagccactgtaaaccccacgggcgaccgtgacagtggctgcgttggcggcctgcccatggggtaacccatgggacgctctaatacagacatggtgtgaagagtctactgagctagttagtagtcctccggcccctgaatgcggctaatcctaactgcggagcacacaccctcaatccagggggcggtgtgtcgtaatgggtaactctgcagcggaaccgactactttgggtgtccgtgtttccttttattcctttactggctgcttatggtgacaattgaaaagttgttaccatatagctattggattggccatccggtgtctaacagagctattgtctacttgtttattggatacgtccctcttaatctcaaggtcattcgaactcttgattatatattgctccttaattataggaa

SEQ ID NO: 1126 - DNA, 746 bp, Enterovirus A
tttaaaacagcctgtgggttgcacccacccacagggcccactgggcgccagcactctgattccgcggaatctttgtgtgcctgttttatcacccttcccccaaacttgcaacttagaagcagcacttcactgaccaatagcaggcgtggcgcaccagccatgtctaggtcaagcacttctgtttccccggactgagtatcaataggctgctcacgcggctgaaggagaaaacgttcgtcatccggctaactacttcgagaaacctagtagcaccggtgaagctgcagagtgtttcgctcagcacttcccccgtgtagatcaggtcgatgagtcactgcactccccacgggcgaccgtggcagtggctgcgctggcggcctgcctatgggtcaacccataggacgctctaatgtggacacggtgcgaagagtctattgagctagttagtagtcctccggcccctgaatgcggctaatcctaactgcggagcacatgcccccgaaccagggggtggtgtgtcgtaacgggcaactctgcagcggaaccgactactttgggtgaccgtgtttccttttgttcttattatggctgcttatggtgacaattgaagaattgttaccatatagctattggattggccatccagtgtctaacagagctatcatatacctatttgttggattcgttctattgtcatacacatcactcaatacattacattttattgtgagattaaatacaagaaa

SEQ ID NO: 1127 - DNA, 746 bp, Enterovirus A
tttaaaacagcctgtgggttgtacccacccatagggcccactgggcgccagcactctgattctgcggaatctttgtgcgcctgttttatcaccctctccctaaattcgtaacttagaagcaacactctactgaccaatagcgggcgtggcgcaccagccatgtctaggtcaagcacttctgtctccccggactgagtatcaataggctgctcacgcggctgaaggagaaaacgttcgtcatccggctaactacttcgagaagcctagtagcaccgttgaaactgcagagtgtttcgctcagcactttccccgtgtagatcaggtcgatgagtcactgcactccccacgggcgaccgtggcagtggctgcgttggcggcctgcctatgggtcaacccataggacgctctaatgtagacacggtgcgaagagtctatcgagctagttagtagtcctccggcccctgaatgcggctaatcctaactgcggagcacatgcccccgagccagagggtggtgtgtcgtaacgggtaactctgcagcggaaccgactactttgggtgtccgtgtttccttttattcttgatatggctgcttatggtgacaattgaagaattgttaccatatagctattggattggccatccggtgtctaacagagctattgtatacctgtttgttggatttgttccattatcacaaacatcactcaacacactacacttcattgtgagattgaacgcaagaaa

SEQ ID NO: 1128 - DNA, 746 bp, Enterovirus A
ttaaaacagctctggggttgtacccacccgcagggcccactgggcgctagcacactgattctacggaacctttgtgcgcctgttttatatccctcccccgaaacagcaacttagaagttgaacatttacacgaccaatagtgggcatggcgcgccagccatgtcttggtcaagcactcctgtttccccggactgagtatcaataggctgctcacgtggctgaaggagaaagagttcgttacccggctaactacttcgagaaacttagtaacaccatgaatgttgcagagtgtttcgctcagcacttcccccgtgtagatcaggctgatgagccactgcaaaccccacgggcgaccgtggcagtggctgcgttggcggcctgcctatggggcaacccataggacgctctaatacagacatggtgcgaagagtctattgagctagttagtattcctccggcccctgaatgcggctaatcccaactgcggagcacatgccctcaatccagagggtggtgtgtcgtaacgggcaactctgcagcggaaccgactactttgggtgtccgtgtttccttttattcttatattggctgcttatggtgacaattgaaagattgttaccatatagctattggattggccacccggtgactaacagagctttaatttaccaattcactgggtttgtacctttatcacctacagtttatcagactttggtgtatctgttatatctcaacagtaagaa

SEQ ID NO: 1129 - DNA, 746 bp, Unknown
  Description of Unknown: unclassified Enterovirus sequence
ttaaaacagctctggggttgttcccaccccagaggcccacgtggcggccagtacaccggtaccacggtacccttgtacgcctgttttatactcccctccccgtaaactagaagcacgaaacacaagttcaatagaagggggtacagaccagtaccaccacgaacaagcacttctgttcccccggtgaggtcacatagactgtccccacggtcaaaagtgactgatccgttatccgctcacgtacttcggaaagcctagtaccaccttggaatctacgatgcgttgcgctcagcactcgaccccggagtgtagcttaggctgatgagtctggacgttccccactggtgacagtggtccaggctgcgttggcggcctacctgtggtccaaaaccacaggacgctagtagtgaacaaggtgtgaagagcccactgagctacctgagaatcctccggcccctgaatgcggctaatcccaaccacggagcaggtaatcgcaaaccagcggtcagcctgtcgtaacgcgtaagtctgtggcggaaccgactactttgggtgtccgtgtttccttttatttttatggtggctgcttatggtgacaatcatagattgttatcataaagcaaattggattggccatccggagtgagctaaactatctatttctctgagtgttggattcgtttcacccacattctgaacaatcagcctcattagtgttaccctgttaataagacgatatcatcacg

SEQ ID NO: 1130 - DNA, 746 bp, Enterovirus C
ttaaaacagctctggggttgttcccaccccagaggcccacgtggcggccagtactccggtatcacggtacccttgtacgcctgttttatacccccttccccgcaacttagaagctttaaattcaagttcaatagaaggtggtacaaaccagtatcgccacgaacaagcacttctgttgccccggtgaaattgcataagctgtccccacggctgaaggcgattgatccgttacccgctcttgtacttcgagaagcctagtaccaccttggaattttcgatgcgttgcgctcagcactcaaccccagagtgtagcttaggctgatgagtctggacataccccaccggcgacggtggtccaggctgcgttggcggcctacctgtggcccaaagccacaggacgctagttatgaacaaggtgtgaagagcctattgagctacaagagagtcctccggcccctgaatgcggctaatcctaaccacggatcaggcgattgcaacccagcaattagcctgtcgtaatgcgcaagtctgtggcggaaccgactactttgggtgtccgtgtttctttttattcttacattggctgcttatggtgacaatcttagattgttatcataaagcaagttggattggccatccggtgaaagtcaaagttactatctatttatctgttggattttaccctaagaccactcatttacctgacttaattagaataattatactacttggaaattactatcaca

SEQ ID NO: 1131 - DNA, 746 bp, Enterovirus C
ttaaaacagctctggggttgttcccaccccagaggcccacgtggcggctagtacaccggtatcacggtacccttgtacgcctgttttatattcccttccccgtaacttagaagcaataaactcaagttcaatagaagggggtgcaaaccagcaccaccacgaacaagcacttctgtttccccggtgagattgcatagactgtccccacggttgaaagcgattgatccgttaaccgctcttgtacttcgagaagcctagtaccatcctggaatctacgatgcgttgcgctcagcactcaatcccagagtgtagcttaggtcgatgagtctggatactccccaccggcgacggtgatccaggctgcgttggcggcctacctgtggtccaaagccacaggacgctagtagtgaacagggtgtgaagagcctattgagctacatgagagtcctccggcccctgaatgcggctaatcccaaccacggagcaggtggctacaacccagtaactggcctgtcgtaacgcgcaagtctgtggcggaaccgactactttgggtgtccgtgtttccttttatttttataatggctgcttatggtgacaatcattgattgttatcataaagcgacttggattggccatccagcgagaatcagatcgattatttatttgtttgttggattcaccaccttatctacatacacaccaaacttaattagaatcactttattgattaggtatcattatcacg

SEQ ID NO: 1132 - DNA, 746 bp, Enterovirus C
ttaaaacagctgtggggttgttcccaccccagaggcccacgtggcggctagtactccggtatcacggtacccttgtacgcctgttttatactccctcccccgtaacttagaagcaatcaaatcaagttcaataggagggggtacaaaccagtaccaccacgaacgagcacttctgtttccccggtgaagttgcatagactgttaccacggttgaaagcgaccgatccgttatccgctcatgtacttcgagaagcctagtacctccttggaatcttcgatgcgttgcgctcagcactcaaccccggagtgtagcttaggctgatgagtctggacagccctcaccggcgacggtggtccaggctgcgttggcggcctacctgtggcccaaagccacaggacgctagttgtgaacaaggtgtgaagagcctattgagctacatgagagtcctccggcccctgaatgcggctaatcctaaccacggagcaggcgatcgcaaaccagcaattagcctgtcgtaacgcgaaagtctgtggcggaaccgactactttgggtgaccgtgtttctcttatttttattcatggctgcttatggtgacaatcatagattgttatcataaagcgagttggattggccatccggtaaaagtcaagtatatcatttacttgtttgtaggatttattcctttgaacgtccatttactcaatcttatcagagtcacattactagtaagatctcactatcaca

SEQ ID NO: 1133 - DNA, 746 bp, Enterovirus C
ttaaaacagcctgtgggttgttcccaccccagaggcccacgtggcggctagtactctggtatcacggtacctttgtacgcctgttttatatcccttcccccgtaacttagaagctttgtaccaacaagttcaatagaaggggtacaaaccagtaccaccacgaacaagcacttctgtttccccggtgcgatgacatagactgtacccacggtcaaaagtcaccaatccgttacccgctttggtacttcgagacgcctagtattgccttggaattctcgatgcgttgcgctcaacactcgaccctggagtgtagcttaggctgatgagtctgggcattccccaccggtgacggtggcccaggctgcgttggcggcctacccatagctattgctatgggatgctagagttgaacaaggtgtgaagagccaattgagctactaaagagtcctccggcccctgaatgcggctaatcccaaccacggatcaagtgcgtgcaacccagcacgtagcttgtcgtaatgcgcaagtctgtggcggaaccgactactttgggtgtccgtgtttccttttatttttatcgtggctgcttatggtgacaatcatagattgttatcataaagcgaattggattggccatccagtgagaatcaagtcgctgatatatttatttgttggatttaccaaaatcaaccacagaacaccagttttaattcgtattgtgttactaattagatttcactactaca

SEQ ID NO: 1134 - DNA, 746 bp, Enterovirus C
ttaaaacagcctgtgggttgttcccaccccagaggcccacgtggcggctagtactccggtattacggtacccttgtacgcctgttttatacccccttcccccgcaacttagattcaaacaaacacaagttcaataggagggggtacaaaccagtaccaccacgaacaagcacttctgtttccccggtgaggttgtatagactgttaccacggttgaaagcgactgatccgttatccgccttagtacttcgagaagcctagtatcaccttggaatctccgatgcgttgcgctcagcaatgtacccccattgtagcttaggccgatgagtctgggcattccccaccggcgacggtggcccaggctgcgttggcggcctacctatggtgaaaaccataggacgctagttgtgaacaaggtgcgaagagcctattgagctactaaggagtcctccggcccctgaatgcggctaatcccaaccacggagcaggtagttgcaaaccagcaaccagcctgtcgtaatgcgcaagtctgtggcggaaccgactactttgggtgtccgtgtttccttttattcttataatggctgcttatggtgacaatcatagattgttatcataaagcgaattggattggccatccggtgagaatcagatcgatcatttacctgtttgtcggatttaccccattggcatcgcacacgagtgacctaatcagaatagtgttgttgataaggtactactatcaca

SEQ ID NO: 1135 - DNA, 746 bp, Enterovirus C
ttaaaacagctctggggttgttcccaccccagaggcccacgtggcggccagtactctggtactacggtacctttgtacgcctgttttatactccctcccccatgcaacattagaagcaattcacaaagttcaatagagggggtacaaaccagtaccaccacgaacaagcacttctgtttccccggtgatctcgtataggccgtacccacggctgaaaacaagtgatccgttatccgcttaggtacttcgagaaacctagtatcaccttgggatcttcgacgcgttgcactcagcactctaccccgagtgtagcttaggctgatgagtctgggcattccccaccggtgacggtggcccaggctgcgttggcggcctacccatggctaacgccatgggacgctagttgtgaacaaggtgtgaagagcctattgagctacctaagagtcctccggcccctgaatgcggctaatcccaaccacggagcaagtgccttcaatccagagggtggcttgtcgtaacgcgcaagtctgtggcggaaccgactactttgggtgtccgtgtttccttttatttttattacggctgcttatggtgacaatcattgattgccatcataaagcgagttggattggccatccggtgaaagttaagtatctcgtccacttatctgttggacttactccattaactcaactcacgcctgatttgatatctatagtgttattgatttggaaaaagctatcata

SEQ ID NO: 1136 - DNA, 746 bp, Enterovirus C
ttaaaacagctctggggttgttcccaccccagaggcccacgtggcggctagtactccggtatcacggtacccttgtacgcctgttttatactcccttccccgtaacttagaagtatacaaaccaagttcaatagaagggggtacaaaccagtaccaccacgaacaagcacttctgtttccccggtgaagttgcatagattgtccccacggtcgaaagcgactgatccgttatccgctcttgtacttcgggaagcctagtatcaccttcggatcttcgatgcgttgcgctcagcactcaaccccagagtgtagcttaggtcgatgagtctggacgaacctcactggtgacagtggtccaggctgcgttggcggcctacctgtggcccaaagccacaggacgctagttgtgaacaaggtgtgaagagcctactgagctacatgagagtcctccggcccctgaatgcggctaatcccaaccacggagcaggtggtcacaaaccagtggtttgcctgtcgtaacgcgaaagtctgtggcggaaccgactactttgggtgtccgtgtttccttttattcttattatggctgcttatggtgacaatcttagattgttatcataaagcgaattggattggccatccggggaaaattaagcatatcatacacttgtttgttggattcacccctctgattacacatactcttggcttgattaggattgttgcattgataagacactattgttgca

SEQ ID NO: 1137 - DNA, 746 bp, Enterovirus C
ttaaaacagcctgtgggttgttcccaccccagaggcccacgtggcggccagtactccggtatcacggtacccttgtacgcctgttttatactcccttccccagtaatttagaagcaattaaaccaagttcaatagaagggggtacaaaccagtaccaccacgaacaagcactcctgtttccccggtgacgttgtatatactgtacccacggtagaaagcgaccgatccgttatccgctcttgtacttcgagaagcccagtaccatcttggaatcttcgatgcgttgcgctcagcactcaaccccagagtgtagcttaggtcgatgagtctggacaatcctcaccggcgacggtggtccaggctgcgttggcggcctacctgtggcccaaagccacaggacgctagttgtgaacaaggtgcgaagagcctattgagctacaagagagtcctccggcccctgaatgcggctaatcccaaccacggagctggtgaccacaaaccagtggttaacctgtcgtaatgcgcaagtctgtggcggaaccgactactttgggtgtccgtgtttcctttatttttattatggctgcttatggtgacaatcatagattgttatcataaagcgacttggattggccatccagtgaaagcaaaacaatttatctacttgtttgttgaattcactctattgaccacccacttactaagtcttattaaaattctcttgttgattagattaacacaccaca

SEQ ID NO: 1138 - DNA, 746 bp, Enterovirus C
ttaaaacagctctggggttgttcccaccccagaggcccacgtggcggctagtactccggtatcacggtacccttgtacgcctgttttatactcccttcccccgtaacttagaagaaataaaccaagttcaatagaagggggtacaaaccagtaccaccacgaacaagcacttctgtttccccggtgaagttgtataaactgtatccacggttgaaggcgactgatccgttatccgcttttgtacttcgagaagcctagtatcatcttggaatcttcgatgcgttgcgctcagcactcaaccccagagtgtagcttgggctgatgagtctggacacccctcaccggtgacggtggtccaggctgcgttggcggcctacctgtggcccaaagccacaggacgctagttgtgaacaaggtgtgaagagcctattgagctacgaaagagtcctccggcccctgaatgcggctaatcctaaccacggagcaagggtgcgcaaaccagtgcatgccttgtcgtaacgcgcaagtctgtggcggaaccgactactttgggtgtccgtgtttccttttattcttataatggctgcttatggtgacaatcatagattgttatcataaagcgaattggattggccatccggcgaaagtgaaatacattgtttatctttttgttggattcactccaaacacttccccttcttttaaactcatcactacggtcttgttgatcagagactcatatcaca

SEQ ID NO: 1139 - DNA, 746 bp, Enterovirus C
ttaaaacagctctggggttgttcccaacccagaggcccacgtggcggctagtactctggtatcatggtacccttgtacgcctgttttatactcccttaccccgtaacttagaagcaataaaccaagttcaatagaagggggtacaaaccagtaccaccgcgaacaagcacttctgttgccccggtgaagttgcatagactgtgcccacggttaaaagcgactgatccgttatccgctcttgtacttcgagaaacctagtatcatcttggaatcttcgatgcgttgcgctcaacactcgaccccagagtgtagcttaggtcgatgagtctggacactcctcactggtgacagtggtccaggctgcgttggcggcctacctgtggcccaaagccacaggacgctagtagtgaacaaggtgtgaagagtctattgagctacaagtgagtcctccggcccctgaatgcggctaatcccaaccacggagcaagtgctcacactccagtgagtagcttgtcgtaacgggtaactctgtggcggaaccgactactttgggtgtccgtgtttccttttattcttataatggctgcttatggtgacaatcatagattgttatcataaagcgaattggattggccatccggtgaaagtgaaatactttgcttaactttttgttggattcactccagtcactttcctttcttttaaactcatcaccacagtcttgttgttcagagactcatatcaca

SEQ ID NO: 1140 - DNA, 746 bp, Enterovirus C
ttaaaacagctctggggttgttcccaccccagaggcccacgtggcggccagtactctggtattacggtacctttgtacgcctgttttatactccctccctcgtaacttagaagaaacaaatcaagttcaacaggagggggtacaaaccagtaccaccacgaacaagcacttctgtctccccggtgacgttgcatagactgtacccacggtcgaaagcgattgatccgttatccgctcttgtacttcgagaagcctagtatcatcttggaatcttcgatgcgttgcgctcagcactcaaccccagagtgtagcttaggtcgatgagtctggacgttccccaccggcgacggtggtccaggctgcgttggcggcctacctgtggcccaaagccacaggacgctagttgtgaacaaggtgtgaagagcctattgagctacaggagagtcctccggcccctgaatgcggctaatcccaaccacggagcaggggtgcataaaccaatgcataccttgtcgtaacgcgcaagtctgtggcggaaccgactactttgggtgtccgtgtttccttttattttttcattggctgcttatggtgacaatcatagattgttatcataaagcgacttggattggccatccggtgagagtgaaatacattgtttacttgttcattggatttactccactcaactctttcgcttacaaactcattacaacaactctgttgattgaaacaacaatactaca

SEQ ID NO: 1141 - DNA, 746 bp, Enterovirus C
ttaaaacagctctggggttgttcccaccccagaggcccacgtggcggctagtacactggtatcacggtacccttgtacgcctgttttatactcccttccccgtaacttagaagtatacaagccaagttcaatagaagggggtacaaaccagtaccaccacgaacaagcacttctgtttccccggtgaagttgcatagattgttcccacggtcgaaagcgactgatccgttacccgctcatgtacttcgggaagcctagtatcacttcggactcttcgatgcgttgcgctcagcactcaaccccagagtgtagcttaggtcgatgagtctggacaaacctcactggcgacagtggtccaggctgcgttggcggcctacctgtggcccaaagccacaggacgctagttgtgaacaaggtgtgaagagcctactgagctacatgagagtcctccggcccctgaatgcggctaatctcaaccacggagcaggtagtcacaaaccagtgatttgcctgtcgtaacgcgaaagtctgtggcggaaccgactactttgggtgtccgtgtttccttttattctcattatggctgcttatggtgacaatcctagattgttatcataaagtgagctggattggccatccggtgaaaatcaagcacattatatatttgtttgttgggtttaaccctctgattgcacgcactcttggcttggttaggattattgtgtggaaaaggcaccatagttaca

SEQ ID NO: 1142 - DNA, 746 bp, Enterovirus B
ttaaaacagcctgtgggttgctcccacccacagggcccactgggcgtcagcacactggtatcaaggtacctttgtgcgcctgttttacaaaccctccccccccttgtaacaaacttagaagcaatgcacaccgatcaatagcgggcgcggcacgccagctgcgtcttgatcaagcacttctgtctccccggaccgagtatcaatagactgcttgcgtggttgaaggagaaagcgtccgttacccgaccaactacttcgagaagcccagtagcgccatggaagctgcgaagcgtttcgctcagcacacccccagtgtagatcaggtcgatgagtcaccgcattccccacgggcgaccgtggcggtggctgcgttggcggcctgcctacggggtaacccgtaggacgcttcaatgtagacatggtgcgaagagtcgattgagctagttggtaatcctccggcccctgaatgcggctaatcctaactgcggagcacgtgccttcaacccagagggtggcgtgtcgtaacgggcaactctgcagcggaaccgactactttgggtgtccgtgtttctttttattttgtactggctgcttatggtgacaattgaaggattgttaccatatagctattggattggccatccggtgcctaacagagcaattatttacctctttgttgggttcgtaccattcaataaggctaattaccaaatcttgtgttacatcctcagattgaacacatcgaa

SEQ ID NO: 1143 - DNA, 747 bp, Cosavirus D
tggcagtccttgaaacgtgtggtgcgacgtctaaccattatggcagtgggtggagtactgcaaagatgtcaccgtgctttacacggtttttgaaccccacaccggctgtttggcgcttgcaggacagtaggtatattttctttcatttctcttttctagccgcgtaggttctatctacgcgggcggagtgatactcccgctccttcttggacaggcggcctccacgctctttgtggatcttaaggctgccaagtcactggtgtttgaagtgaagaatggagagacactagggcgtttcatgtggctttgccagggattgtagcgatgctgtgtgtgtgtgcggatttcccctcgtggcgacacgagcctcacaggccaaaagccctgtccgaaaggacccacacagtggggttgccccgacccctcccttcaaagctttgtgtaaacaaacttttgtttagactttcttaagcttctctcacatcaggccccaaagatgtcctgaaggtaccctgtgtatctgaggatgagcaccaccaactacccggacttgtgggacgtgtcccacagacgcatgtggtattccagccccctccttttgaggagggggcttttgctcgctcagcacaggatctgatcaggagattcatctctggtgctttacaccagagcatggatttaaaaattgcccaaggcctggcaaacaacctaggggactaggttttctctattttaaaagatgtcaat

SEQ ID NO: 1144 - DNA, 747 bp, Enterovirus A
ttaaaacagcctgtgggttgcacccactcacaggacccacgtggtgctagcactctggttccacggaacctttgtgcgcctgttttacgtcccctccccaatttgtaacttagaagcaatttacaacactgatcaatagcaggcatggcgcaccagctatgtcttgatcaagcacttccgtttccccggaccgagtatcaatagactgttcacacggttgaaggagaaagcgtccgttatccggctaactacttcgagaaacccagtagcgccattgaaactgcagagtgtttcgctccacacttcccccgtgtagatcaggtcgatgagtcactgtaatccccacgggcgaccgtgacagtggctgcgttggcggcctgcctatggggcaacccataggacgctctaatgtggacatggtgcgaagagtctattgagctagttagtagtcctccggcccctgaatgcggctaatcctaactgcggagcacatgccttcaatccagagggtagtgtgtcgtaatgggcaactctgcagcggaaccgactactttgggtgtccgtgtttccttttattctcacattggctgcttatggtgacaattacagaattgttaccatatagctattggattggccatccggtgtgcaatagagctattatatacctatttgttggctttgtaccactaaccttaaaatctgcaaccactctcgagtatatattgacccttaatacaatcaaac

SEQ ID NO: 1145 - DNA, 747 bp, Enterovirus A
tttaaaacagcctgtgggttgtacccacccacagggcccactgggcgctagcactccgattctgcggaatctttgtgcgcctgttttataaccctcccccgaaacttgcaacttagaagttatgtacgttactgatcaacagcaggcgtggcacaccagccatgtcttgatcaagcacttctgtacccccggactgagtatcaatagactgctcacgtggtcgaaggagaaaacgttcgttatccggctaactacctcgagaaacctagtaacgccattgaaactgcggagtgtttcgctcagcacttcccccgtgtagatcaggtcgatgagtcactgcttaccccacgggcgaccgtggcagtggctgcgttggcggcctgcctatggggcaacccataggacgctctaaagtggacatggtgcgaagagtctattgagctagttagtagtcctccggcccctgaatgcggctaatcctaactgcggagcgcatgccttcaaaccagaaggtggtgcgtcgtaacgggtaactctgcagcggaaccgactactttgggtgtccgtgtttctcttattctcataatggctgcttatggtgacaatcgaggaattgttaccatatagctattggattggccatccggtgtgcaacagagctattatctacttgtttattggatacattccattaacacttaaatccttcaatacattgcactatattctaacactgaacgcaagaaa

SEQ ID NO: 1146 - DNA, 747 bp, Enterovirus A
tttaaaacagcctgtgggttgtacccacccacagggcccactgggcgccagcactctgattctacggaatctttgtgcgcctgttttacaacccttcccaaaatctgcaacttagaagttatgcacattattgatcaatagcaggcgtggcacaccagtcatgtcttgatcgagcacttctgtatccccggactgagtatcaatagactgctcacgtggtcgaaggagaaaacgttcgttatccggctaactacttcgagaagcctagtaacaccgttgaaactgcggagcgtttcgttcagcacttcccccgtgtagatcaggtcgatgagtcactgcttaccccacgggcgaccgtggcagtggctgcgttggcggcctgcctatggggcaacccataggacgctctaaagtggacatggtgcgaagagcctattgagctagttagtagtcctccggcccctgaatgcggctaatcctaactgcggagcgcatgccctcacgccagagggtggtgcgtcgtaacgggcaactctgcagcggaaccgactactttgggtgtccgtgtttctttttattctcattatggctgcttatggtgacaattaaggaattgttaccatatagctattggattggccatccggtgtgcaacagagctattatctacttatttgttggatacattccattaacacttaaatcccttaacacattgcaatacattctaacactgaacgcaagaaa

SEQ ID NO: 1147 - DNA, 747 bp, Enterovirus A
ttaaaacagcctgtgggttgtacccacccacagggcccaccgggcgctagcactctgattccacggaatctttgtgcgcctgttttataacccccctccccacctcgcaacttagaagcaacgcgcatcactgatcaacagcaggcatggcgcgccagccatgtcttgatcaagcacttctgtttccccggactgagtatcaatagactgcttacgcggttgaaggagaaaacgttcgttacccggctaactacttcgagaaacttagtaacaccatcgaagctgcagggtgtttcgctcagcacttcccccgtgtagatcaggccgatgagtcaccgcaatccccacgggcgaccgtggcggtggctgcgttggcggcctgcctatggggcaacccataggacgccctaaagtggacatggtgcgaagagtctattgagctagttagtagtcctccggcccctgaatgcggctaatcctaactgcggagcacataccctcaagccagagggtggtgtgtcgtaacgggtaactctgcagcggaaccgactactttgggtgtccgtgtttccttttattcttactgtggctgcttatggtgacaattcaagagttgttaccatatagctattggattggccatccggtgtctaacagagctattgtgtacttatttgttgggtacgttccattatcttacacatcccttgacacattacattttattgtgaagctaaatacaagaag

SEQ ID NO: 1148 - DNA, 747 bp, Enterovirus A
tttaaaacagcctgtgggttgtacccacccacagggcccactgggcgctagcactctggtactgcggtacctttgtgcgcctgttttatctccccagacccccgcaacgtcacattagaagatagacaatacgaccaatagtcagtggggcaacccagcctcactttggtcaagtacctctgtttccccgggcttagtaccaataggctgcttgcgcggctgaaggggaacgcgcccgttatccggctaactacttcgagaaacctagtaccaccatggaagttgccgagtgtttcgctcagcacaaccccagtgtagatcaggtcgatgagtcaccgtacaccccacgggcgaccgtgacggtggctgcgttggcggcctgcccatggtgcacaccatgggacgctctaatacagacatggtgcgaagagtctattgagctagttagtagtcctccggcccctgaatgcggctaatcctaactgtggagcatgcgctctcaacccagagagtagcgtgtcgtaacgggcaactctgcagcggaaccgactactttgggtgtccgtgtttccttttattcttatattggctgcttatggtgacaattgagagattgttaccatatagctattggattggccatccggtgtgcaatagagctattgtatattcttttgttggctttgtgccattagattatactgcaattgctactttaagatacatcttgtttctgaacacagcaaa

SEQ ID NO: 1149 - DNA, 747 bp, Enterovirus A
tttaaaacagcctgtgggttgtacccacccacagggcccactgggcgctagcacactggtattacggtacccttgtgcgcctgttttatcctccctggcccccgtaataatgtattagaagtcttgcaacgtgaccaatagctagtaaagcaacccagctttacttgggtcaagtacttctgttaccccggacctagtaccaataggctgctcgcgcggctgaaggggaaaacgttcgttatccggctaactacttcgggaaacccagtaccatcatgaatgttgcggagtgtttcgctcagcactaccccagtgtagatcaggccgatgagtcaccgtacaccccacgggcgaccgtgacggtggctgcgttggcggcctgcccatggcacctgccatgggacgctctaatacggacatggtgtgaagagtctactgagctagttagtagtcctccggcccctgaatgcggctaatcctaactgcggagcacgcgcccccaatccagagggtagcgtgtcgtaatgggcaactctgcagcggaaccgactactttgggtgtccgtgtttccttttattcttacactggctgcttatggtgacaattgagagattgttgccatatagctattggattggccatccggtgagcaatagagcgattatctattcttttgttggatttgtgccattagattacactgccatcatcacactgaagtacattttattgttaaacacaacaaa

SEQ ID NO: 1150 - DNA, 747 bp, Enterovirus A
ttttaaaacaggctgtgggttgtacccacccgcagggcccactgggcgctagcactctggtaccacggtacctttgtgcgcctgttttatctccccaaaccccgtaacgctacattagaagttaaacaatatgaccgatagtcagtggggcaacccagcctcactttggtcaagcacttctgttctcccgggcttagtaccaataagctgctcgcgcggctgaaggggaacgcgcccgttatccggctaactacttcgagaaacctagtaccaccatggaagttgcagagtgtttcgctcagcactaccccagtgtagatcaggctgatgagtcaccgtgcaccccacgggcgaccgtgacggtgactgcgttggcggcctgcccatggtgtataccatgggacgctctaatacagacatggtgcgaagagtctattgagctagttagtagtcctccggcccctgaatgcggctaatcctaactgcggagcacgcgctctcaacccagagagtagcgtgtcgtaacgggtaactctgcagcggaaccgactactttgggtgtccgtgtttctttttattcttacattggctgcttatggtgacaattgagagattgttaccatatagctattggattggccatccggtgtgtaacagagctatcatatattcttttgttggcttcgtgccactagattatactgcaattgttactttaaggtacatcttacttctgaatacggtaaa

SEQ ID NO: 1151 - DNA, 747 bp, Unknown
  Description of Unknown: unclassified Enterovirus sequence
tttaaaacagcctgtgggttgtacccacccacagggcccactgggcgttagcacactgattctacggaatctttgtgcgcctgttttatatccctcccctaaaatagtaatttagacgttgaacatttacacgaccaatagtgggcgtggcgcaccagtcacgtcttggtcaagcactcctgttcccccggaccgagtatcaataggctgctcacgtggctgaaggagaaagtgttcgttatccggctaactacttcgggaaacccagtaacaccatgaaagttgcagagtgtttcgttcagcacttcccccgtgtagatcaggctgatgagtcactgcaaaccccacgggcgaccgtggcagtggctgcgttggcggcctgcctatggggtaacccataggacgctctaatacagacatggtgcgaagagtctactgagctagttagtattcctccggcccctgaatgcggctaatcctaactgcggagcacatgccctcaatccagagggtggtgtgtcgtaatgggcaactctgcagcggaaccgactactttgggtgtccgtgtttccttttattcttatactggctgcttatggtgacaattgaaaagttgttaccatatagctattggattggccatccggtgaataacagagctttggtttatcagttcattgggttcgtgcccttatcatctacagcttacacaactttggtgtacttgttatatcttaatagtaagaa

SEQ ID NO: 1152 - DNA, 747 bp, Enterovirus A
ttaaaacagcctgtgggttgttcccactcacagggcccactgggcgctagcacactgattctccggtacctttgtgtgcttgttttagtatccctcccccaaactcgtaacttagaagaataacacgctatcgatcaatagcaggcatggcgcaccagccatgtctcgatcaagcacttctgtttccccggacagagtatcaatagactactcacgtggttgaaggagaaaacgtccgttatccggctaactacttcgagaaacctagtaacaccattgaagctgcagagcgtttcgttcagcacttaccccgtgtagatcaggtcgatgagtcactgcattccccacgggcgaccgtggcagtggctgcgttggcggcctgcctatggggtcacccataggacgctctaatgtggacatggtgcgaagagtctattgagctagttagtagtcctccggcccctgaatgcggctaatcctaactgcggagcgcataccctcaaaccagggggtagtgcgtcgtaacgggcaactctgcagcggaaccgactactttgggtgtccgtgtttccttttattttcttactggctgcttatggtgacaattgaagaattgttgccatatagctattggattggccatccggtgtgtaacagagcaatcatctatttgtttgccgggtacatcccattaacgctcaactcttttagtacattacagtatatactaatcctgaatacaagaaa

SEQ ID NO: 1153 - DNA, 747 bp, Enterovirus A
ttaaaacagcctgtgggttgttcccacccacagggcccactgggcgctagcactctggttctccggaacctttgtgcgcctgttttgaaaccccctcccccaactcgaaacgtagaagtaatgtacactactgatcagtagcaggcgtggcgcaccagccatgtctcgatcaagcacttctgtttccccggactgagtatcaatagactgctcacgcggttgaaggtgaaaacgtccgttacccggctaactacttcgagaaacctagtagcaccatagaaactgcagagtgtttcgctcagcacttcccccgtgtagatcaggtcgatgagtcactgcaatccccacgggtgaccgtggcagtggctgcgttggcggcctgcctatggggcaacccataggacgctctaaggtggacatggtgtgaagagtctattgagctagttagtagtcctccggcccctgaatgcggctaatcctaactgtggagcgcatactcccaaaccagggagcagtgcgtcgtaacgggcaactccgcagcggaaccgactactttgggtgtccgtgtttccttttattcctatactggctgcttatggtgacaattgagagattgttaccatatagctattggattggccatccagtgtgtaatagagcaatcatttaccaatttgttggatttactccattaacccacacgtctctcaacacactacatttcatcttactactgaacactagaaa

SEQ ID NO: 1154 - DNA, 747 bp, Enterovirus C
ttaaaacagctctggggttgttcccaccccagaggcccacgtggcggccagtacaccggtattacggtacccttgtacgcctgttttatactccctacccctgcaacttagaagcaaataatccaagttcaatagtagggggtacaaaccagtaccaccacgaacaagcacttctgtttccccggtgatgttgtatagactgtacccacggttgaaaacaattgatccgttacccgctcttgtacttcgagaagcctagtatcatcttggaaccttcgatgcgttgcgctcagcactcaaccccagagtgtagcttgggtcgatgagtctggacaatccacaccggcgacggtggtccaggctgcgttggcggcctacctgtggcccaaagccacaggacgctagttgtgaacaaggtgtgaagagcctattgagctacaagagagtcctccggcccctgaatgcggctaatcccaaccacggagcaggtgatcacaacccagtgattagcctgtcgtaatgcgtaagtctgtggcggaaccgactactttgggtgaccgtgtttccttttatttttattgtggctgcttatggtgacaatcttagattgttatcataaagcgatttggattggccatccggtgaaagttaaacacattatttacttgtttgttggattcactccgttgtcctctcgcactacgtatattattaacgctgtgctattaattaggtcaatacatcaca

SEQ ID NO: 1155 - DNA, 747 bp, Enterovirus C
ttaaaacagcctgtgggttgttcccaccccagaggcccacgtggcggccagtacaccggtattacggtacccttgtacgcctgttttatacttccttcccccgtaacttagaagtttacaaaccaagttcaatagaagggggtacaaaccagtaccaccacgaacaagcacttctgtttccccggtgagtttgcatagactgtatccacggttgaaagtgaacgatccgttacccgctcttgtacttcgagaagcctagtaaccccttggaatcttcgatgcgttgcgctcagcactcaaacccagagtgtagcttaggtcgatgagtctggacactcctcaccggtgacggtggtccaggctgcgttggcggcctacctgtggtccaaagccacaggacgctagttgtgaacaaggtgtgaagagcctattgagctacttgagagtcctccggcccctgaatgcggctaatcctaaccatggatcaggtggtcacaatccagtgactggcctgtcgtaatgcgcaagtccgtggcggaaccgactactttgggtgtccgtgtttccttttattcttataatggctgcttatggtgacaatcatagattgttatcatatagcgaattggattggccatccggtgtgaacaaaacacttgattcacttgttggttgaatttgtttcattaattgaacacataccagagctcatttgattggcatttttgcttagacaattgtaccaca

SEQ ID NO: 1156 - DNA, 747 bp, Enterovirus C
ttaaaacagctctggggttgttcccaccccagaggcccacgtggcggctagtacaccggtatcacggtacccttgtacgcctgttttatactcccttcccccagtaacttagaagtaataaaccaagttcaatagaagggggtacaaaccagtaccaccatgaacaagcacttctgttcccccggtgaggttgtatagactgtgcccacggttgaaagcgaccgatccgttatccgctcttgtacttcgagaagcctagtatcaccttggaatcttcgatgcattgcgttcagcacttgatcccggagtgtagcttaggccgatgagtctggacgttccccaccggtgacggtggtccaggctgcgttggcggcctacctgtggtccaaagccacaggacgctagttgtgaacaaggtgtgaagagcctattgagctacatgagagtcctccggcccctgaatgcggctaatcccaaccacggagcagatggttgcaatccagcggctagtctgtcgtaacgcgcaagtctgtggcggaaccgactactttgggtgtccgtgtttccttttatctttataatggctgcttatggtgacaatcattgattgttgccataaagcgacttggattggccatccggtgaaaatcagatcgattatctacttgtttattggattcacacccttatctatatacacgctaagtttgatcagagtcaccttgttaattagatattattaccacg

SEQ ID NO: 1157 - DNA, 747 bp, Enterovirus C
ttaaaacagctctggggttgttcccaccccagaggcccacgtggcggctagtactccggtatcacggtacccttgtacgcctgttttatactccctacccctgcaacttagaagctagtaactcaagttcaatagtagggggtacaaaccagtaccaccacgaacaagcacttctgtttccccggtgatgccgtatagactgtgcccacggttgaaaacgactgacccgttatccgctcttatacttcgagaagcctagtatcatcttggaatcttcgatgcgttgcgctcagcactcaaccctagagtgtagcttaggtcgatgagtctggacattcctcaccggcgacggtggtccaggctgcgttggcggcctacctgtggcccaaagccacaggacgctagttgtgaacaaggtgtgaagagcctattgagctacaagagagtcctccggcccctgaatgcggctaatcccaaccacggagcaagtgatcacgaaccagtgattggcttgtcgtaacgcgcaagtctgtggcggaacccgactactttgggtgtccgtgtttcctttatttcatatatggctgcttatggtgacaattatagattgtcatcatagagcgaattggattggccatccggtgaaagttagacatattgtttacctatttgttggctttacatccttcaacctccacaccccgtattttgttaaggttgtgttgtcgatcagatcactataccaca

SEQ ID NO: 1158 - DNA, 747 bp, Enterovirus C
ttaaaacagcctgtgggttgttcccaccccagaggcccacgtggcggccagtactccggtatcacggtacccttgtacgcctgttttatacccccttccccgtaacttagaagtaaacaaaaccaagttcaatagaaggcggtacaaaccagtgccaccatgaacaagcacttctgtttccccggtgatgttgtatagactgtttccacggttgaaagcgactgatccgttatccgctcaagtacttcgggaagcctagtatcatcttggaatcttcgatgcgttgcgttcagcactcaacccccgagtgtagcttaggtcgatgagtctggacattcctcaccggtgacggtggtccaggctgcgttggcggcctacctgtggcccaaaaccacaggacgctagttgtgaacaaggtgtgaagagcctactgagctacttgagagtcctccggcccctgaatgcggctaatcctaaccacggatcaggtgattgcaaaccagcagttggcctgtcgtaacgcgcaagtctgtggcggaaccgactactttgggtgtccgtgtttccttttatttttccattggctgcttatggtgacaatcgtagattgttgtcataaagcgaattggattggccatccggtgaaagtcaagtacattatttatttatttgtgggttttactcctataacagcaaatacccttcatcttatcaccatcacactactgattagatatcactaccaca

SEQ ID NO: 1159 - DNA, 747 bp, Enterovirus C
ttaaaacagctctggggttgttcccaccccagaggcccacgtggcggccagtacactggtattacggtacctttgtacgcctgttttatgctcccttcccctgcaacttagaagattacaaaccaagttcaatagaagggggtgcaaaccagtaccaccacgaacaagcacttctgtttccccggtgaacttgtatagactgtacccacggtcgaaaacgagtgatccgttatccgctcttgtacttcgagaagcccagtaccttcttgggatcattgatgcgttgcgctcagcactcgaccccggagtgtagcttaggctgatgagtctggacatccctcaccggcgacggtggtccaggctgcgttggcggcctacctgtggtccaaagccacaggacgctaaatgtgaacaaggtgtgaagagcctattgagctacatgagagtcctccggcccctgaatgcggctaatcctaaccacggagcaggtggttgcaaaccagcaattggcctgtcgtaatgcgtaagtctgtggcggaaccgactactttgggtgtccgtgtttctctttatttttacaatggctgcttatggtgacaatcttagattgttgtcataaagcgaattggattggccatccggtgaagataaagcatatcatttatctatttattggattcactccattaaactcttggacttatcatttaatacaagtagtgttattgataagaagtgttcaccaca

SEQ ID NO: 1160 - DNA, 747 bp, Enterovirus C
ttaaaacagcctgtgggttgttcccaccccagaggcccacgtggcggctagtactccggtattacggtacccttgtacgcctgttttatacccccttcccccagaaacttagacgctatgaaaccaagttcaataggagggggcacgaaccagtgtcaccacgaacaagcacttctgtttccccggtgattttacataagctgtacccacggctgaaagtgaatgatccgttatccgcttgggtacttcgagaagcctagtaccacctttggatcttcgatgcgttgcgctcagcactctaccccgagtgtagcttaggtcgatgagtctgggcataccccaccggtgacggtggcccaggctgcgttggcggcctacccatggttaacaccatgggacgctagttgtgaacaaggtgtgaagagcctattgagctactcaagagtcctccggcccctgaatgcggctaatcctaaccatggagcaggtgctttcaatccagaaagtggcctgtcgtaatgcgtaagtccgtggcggaaccgactactttgggtgtccgtgtttccttttttacttttgtatggctgtttatggtgacaatcatagattgttatcataaagcgaattggattggccatccggtaaaaattaaacacatcatttatctatttgttggattcgctccaatcacttctaaaacacttcagttgatacgtgtagtattaataatcaggctattgtatcaca

SEQ ID NO: 1161 - DNA, 747 bp, Enterovirus C
ttaaaacagcctgtgggttgttcccaccccagaggcccacgtggcggctagtacaccggtatcacggtacccttgtacgcctgttttatactcccttcccccgtaacttagaagtataacaaccaagttcaatagaagggggtacaaaccagtaccaccacgaacaagcacctctgtttccccggtgaacttgcatagactgtgcccacggttgaaagcgagcgatccgttacccgctcttgtacttcgagaagcctagtattatcttggaatcattgatgcgttgcgctcagcactcaaccccagagtgtagcttaggtcgatgagtctggacactcctcaccggtgacggtggtccaggctgcgttggcggcctacctgtggcccatggtcacaggacgctaaatgtgaacaaggtgtgaagagcctattgagctacatgagagtcctccggcccctgaatgcggttaatcctaaccacggagcaggcggttacaaaccagtaactagcctgtcgtaatgcgcaagtctgtggcggaaccgactactttgggtgaccgtgtttccttttatttttacaatggctgcttatggtgacaatctcagattgttatcataaagcgagttggattggccatccggtaaagataaagtgtattatctatctatttgttggatttactccgttaaataccagaacatatcacttgatacaagcggtattactaattaggaacttctatcaca

SEQ ID NO: 1162 - DNA, 747 bp, Enterovirus C
ttaaaacagctctggggttgttcccaccccagaggcccacgtggcggctagtactccggtattgcggtacccttgtacgcctgttttatactcccttcccccgtaacttagaagcaatcaaacaaagttcaatagaagggggtacaaaccagtaccaccacgaacaagcacttctgtttccccggtgaagttgtatagactgtacccacggttaaaagcaattgatccgttacccgctcttgtacttcgagaagcctagtactaccttggaatcttcgatgcgttgcgctcaacactcaaccccagagtgtagcttgggctgatgagtctggacgttccccaccggcgacggtggtccaggctgcgttggcggcctacctgtggcccaaagccacaggacgctagttgtgaacaaggtgcgaagagcctattgagctacaagagagtcctccggcccctgaatgcggctaatcccaaccacggagcaggtagttgcaagccagcaatcgacctgtcgtaacgcgtaagtctgtggcggaaccgactactttgggtgtccgtgtttccttttaattttaaactggctgcttatggtgacaatcattgattgttatcataaagcgaattggattggccatccggtgagaatcagatccattatctacttgttcattggatttactccattgacaacatacacatacgaccttattagagtcaatttactattgagacatctccaccata

SEQ ID NO: 1163 - DNA, 747 bp, Enterovirus C
ttaaaacagctctggggttgttcccaccccagaggcccacgtggcggccagtacactggtatcacggtacccttgtacgcctgttttatactcccttcccccgtaacttagaagccataaatccaagttcaacagaagggggcacaaaccagtgccaccacgaacaagcacttctgtctccccggtgaagttgcatagactgtaaccacggttaaaagcgattgatccgttatccgctcatgtacttcgagaagcctagtaccaccttggaaccttcgacgcgttgcgctcagcactcaaacccagagtgtagcttaggccgatgagtctggacgttccccaccggcgacggtggtccaggctgcgttggcggcctacctgtggctcaaagccacaggacgctagttgcgaacagggtgtgaagagcctattgagctacatgagattcctccggcccctgaatgcggctaatcctaaccgcggagcaggtagttgcaagccagcaactggcctgtcgtaacgcgtaagtctgcggcggaaccgactactttgggtgtccgtgtttcctttatttcttataatggctgcttatggtgacaatcatagattgttatcataaagcgaattggattggccatccagtgaaagtcagactgattatccttctgtttgttgggtttgttccactcaattcacacactttgcacttaatcagaattgtcttattgacacgacaatatcatcact

SEQ ID NO: 1164 - DNA, 747 bp, Enterovirus C
ttaaaacagctctggggttgttcccaccccagaggcccacgtggtggccagtactctggtattacggtacctttgtacgcctgttttatactcccttcccctgtaacttagaagcaatctaacctagttcaataggagggggtacaaaccagtaccactacgaacaagcacttctgttaccccggtgaagttgtatagactgtgcccacggtcgaaaatgactgatccgttatccgctcatgtacttcgggaagcctagtaccatcttcggatcttcgatgcgttgcgctcagcactcgaccccagagtgtagcttaggtcgatgagtctggacaatcctcactggcgacagtggtccaggctgcgttggcggcctacctgtggtccaaagccacaggacgctagttgtgaacaaggtgtgaagagcctactgagctacttgagagtcctccggcccctgaatgcggctaatcccaaccacggagcaagtagttgcaaaccagcaaccagcttgtcgtaacgcgtaagtctgtggcggaaccgactactttgggtgtccgtgtttccttttatttttacactggctgcttatggtgacaatcatagattgttatcataaggcgaattggattggccacccggtgtaagtcagatcaattgtctactcgtttgttggatatactccaataacgcactacactcttgagcttaacagagttgttctgctggcgagaagttgctatcgca

SEQ ID NO: 1165 - DNA, 747 bp, Enterovirus C
acagtaaaacagctctggggttgttcccaccccagaggcccacgtggcggctagtactctggtatcgcggtacctttgtacgcctgttttatacccctaccccatgtaactttagaagcagttcaacaagttcaatagggggggtgcaaaccagcaccaccacgaacaagcacttctgtaaccccggtgaccttgtataagctgtacccacggctgaaagcgagtgatccgttatccgcttaagtacttcgagaagcctagtatcaccttagaatcttcgatgcgttgcgctcagcactctatcccgagtgtagcttaggctgatgagtctgggcgttcctcaccggcgacggtggcccaggctgcgttggcggcctacccatggctaacgccatgggacgctagatgtgaacaaggtgtgaagagcctattgagctacttaagagtcctccggcccctgaatgcggctaatcccaaccacggagcaggtgccttcaacccagagggtggcctgtcgtaacgcgcaagtctgtggcggaaccgactactttgggtgtccgtgtttccttttatcttttatatggctgcttatggtgacaatcatagattgttatcataaagcgacttggattggccatccggtaaaatacaaacacatcatttacttgtttgttggatttactccactctcccaatttactcctagcataatatccattgttttgttaacaagacattactatcaca

SEQ ID NO: 1166 - DNA, 747 bp, Enterovirus C
ttaaaacagctctggggttgttcccaccccagaggcccacgtggcggccagtacactggtattgcggtacctttgtacgcctgttttatactcccttcccccgtaacttagaagcacaatgtccaagttcaataggagggggtacaaaccagtaccaccacgaacaagcacttctgttcccccggtgaggctgtataggctgtttccacggctaaaagcggctgatccgttatccgctcatgtacttcgagaagcctagtatcaccttggaatcttcgatgcgttgcgctcaacactcaaccccagagtgtagcttaggtcgatgagtctggacgttcctcaccggcgacggtggtccaggctgcgttggcggcctacctgtggcccaaagccacaggacgctagttgtgaacaaggtgtgaagagcctattgagctacctgagagtcctccggcccctgaatgcggctaatcctaaccacggagcaggcagtggcaatccagcgaccagcctgtcgtaacgcgcaagttcgtggcggaaccgactactttgggtgtccgtgtttccttttatttttacaatggctgcttatggtgacaatcattgattgttatcataaagcaaattggattggccatccggtgagaatttgattattaaattactctcttgttgggattgctcctttgaaatcttgtgcactcacacctattggaattacctcattgttaagatatcatcaccact

SEQ ID NO: 1167 - DNA, 747 bp, Enterovirus C
ttaaaacagcctgtgggttgttcccaccccagaggcccacgtggcggctagtactctggtacccggtacccttgtacgcctgttttatatcccccttcccatgtaactttagaagcaattcactaagttcaacagggggggtgcaaaccagtaccaccacgaacaagcacttctgtttccccggtgatttcacataagctgtgcccacggccgaaagtggatgatccgttacccgcttgggtacttcgagaagcctagtatcaccttggaatcttcgacgcgttgcgttcagcgctctaacccgagtgtagcttaggctgatgagtctgggcgatccccaccggtgacggtggcccaggctgcgttggcggcctacccatggttaacgccatgggacgctagttttgaacaaggtgtgaagagcctattgagctactcaagagtcctccggcccctgaatgcggctaatcccaaccacggagcaagtgtcctcaaaccagagggtggcttgtcgtaacgcgcaagtctgtggcggaaccgactactttgggtgaccgtgtttccttttatttcatatttggctgcttatggtgacaatcacggattgttatcataaagcgaattggattggccatccggtgaaatacaagcacattatttacctttttgtcggattcattccaatagaatattcttcgccaaagttgatccaaataatcttagtgattagaagttattatttcagca

SEQ ID NO: 1168 - DNA, 747 bp, Enterovirus C
ttaaaacagctctggggttgttcccaccccagaggcccacgtggcggccagtactccggtattacggtacccttgtacgcctgttttatactcccttcccctgtaacttagaagcatacaaaccaagttcaatagaagggggtacaaaccagtaccaccacgaacaagcactcctgtttccccggtgacattgcatagactgtacccacggttgaaagcgatcgatccgttacccgctcctgtacttcgagaagcctagtatcatcttggaatcttcgatgcgttgcgctcagcactcaaccccagagtgtagcttaggctgatgagtctggacgtcccccaccggcgacggtggtccaggctgcgttggcggcctacctgtggcccaaagccacaggacgctagttgtgaacaaggtgtgaagagcctattgagctacaagagagtcctccggcccctgaatgcggctaatcctaaccacggagcaggcagttgcaaaccagcaaccggcctgtcgtaacgcgcaagtctgtggcggaaccgactactttgggtgtccgtgtttccttttatttttacaatggctgcttatggtgacaatcatagattgttatcataaagcgacttggattggccatccggtgaaagtaaaacacattgtttacttgtttgttggattcactccaattaacacttttacttacaaactcattacaacaactctattaattagagataagcatcaca

SEQ ID NO: 1169 - DNA, 747 bp, Enterovirus C
ttaaaacagctctggggttgttcccaccccagaggcccacgtggcggctagtacactggtattacggtacccttgtacgcctgttttatactcccttccccgtaacttagaagctatgtaatccaagttcaatagaagggggtacaaaccagtaccaccacgaacgagcacttctgtttccccggtgagattgtataagctgttcccacggccgaaaacgatcgatccgttacccgctcttgcacttcgagaagcctagtatcatcttgggatcttcgatgcgttgcgctcagcactctaccccagagtgtagcttaggtcgatgagtctggacattcctcaccggcgacggtggtccaggctgcgttggcggcctacctgtggtccaaagccacaggacgctagttgtaaacaaggtgtgaagagcctattgagctgcaagagagtcctccggcccctgaatgcggctaatcccaaccacggagcaggtggttgcaacccagtaactggcctgtcgtaacgcgtaagtctgtggcggaaccgactactttgggtgtccgtgtttccttttatttctataatggctgcttatggtgacaatcatagattgttatcataaagcgaattggattggccatccggtgagagttaagacaattatccacttgtttgttggatttacccctctgactaattacacactcaactttattaggattgtcattctagtgagatattaccatcaca

SEQ ID NO: 1170 - DNA, 747 bp, Enterovirus C
ttaaaacagctctggggatgtacccaccccagaggcccacgtggcggctagcactccggtatcacggtacccttgtgcgcctgttttatactcccttcccgtaacttagaagcacgaaaccaagttcaatagaagggggtacaaaccagtaccaccacgaacaagcacttctgtttccccggtgatgttgcatagactgctcacgcggttgaaagcgactgatccgttatccgcttgtgtacttcgagaagcctagtatcaccttggaatcttcgtcgcgttgcgctcggcacccgaccccggggtgtggcttaggctgatgagtctggacattcctcaccggtgacggtggtctaggctgcgttggcggcctacctatggctaacgccataggacgctagatgtgaacaaggtgtgaagagcctattgagctacgcaagagtcctccggcccctgaatgcggctaatcccaaccacggagcaagcgatcgcaaaccagcgattggcttgtcgtaacgcgtaagtctgtggcggaaccgactactttgggtgtccgtgtttcctgttatttttatcatggctgcttatggtgacaatctgagattgttatcataaagcgaattggattggccatccggtgagtactgtctcaggtatactgctgcttaacggaaccgctaagttattcctactcctcatttagccaactcttccagaataatacgagggtaaaataacaatactata

SEQ ID NO: 1171 - DNA, 747 bp, Enterovirus C
ttaaaacagctctggggttgttcccaccccagaggcccacgtggcggctagtactccggtatcacggtacccttgtacgcctgttttacactcccttcccccgtaacttagaagaaacaaacaaagttcaatagaagggggtacaaaccagtaccaccacgaacaagcacttctgtttccccggtgacgttgtatagactgtacccacggtcgaaaacgattgatccgttatccgcttttgtacttcgagaagcctagtatcatcttggaatcttcgatgcgttgcgctcagcactcaatcccagagtgtagcttaggtcgatgagtctggacgttcctcaccggcgacggtggtccaggctgcgttggcggcctacctgtggcccaaagccacaggacgctagttgtgaacaaggtgtgaagagcctattgagctacaagagagtcctccggcccctgaatgcggctaatcctaaccacggagcaagggtgtgtgagccaacacataccttgtcgtaatgcgtaagttcgtggcggaaccgactactttgggtgtccgtgtttccttttattcttgtattggctgcttatggtgacaatcatagattgttatcataaagcgacttggattggccatccagtggaagtgaaataccttgtctacctgtctgttggttttactccatttgactaattcacttacaagcttattgctataatttttattgactaaacaacaatactaca

SEQ ID NO: 1172 - DNA, 747 bp, Enterovirus C
ttaaaacagctctggggttgttcccaccccagaggcccacgtggcggctagtactctggtatcgcggtacctttgtacgcctgttttatactccccttccctgtaacttagaagcaaacaagccaagttcaatagaagggggtacaaaccagtaccaccacgaacaagcacttctgttaccccggtgaagttgtataaactgtccccacggttgaaaacgactgatccgttacccgcttttgtacttcgagaagcctagtaccatcttggaatcttcgatgcgttgcgctccgcactcaatcccagagtgtagcttaggtcgatgagtctggacagtcctcaccggcgacggtggtccaggctgcgttggcggcctacctgtggcccaaagccacaggacgctagttgtgaacaaggtgtgaagagcctattgagctacaaaagagtcctccggcccctgaatgcggctaatcctaaccatggagcaggtggttacaaaccagtaattgacctgtcgtaacgcgtaagtccgtggcggaaccgactactttgggtgtccgtgtttccttttatttttaatgcggctgcttatggtgacaatcattgattgttatcataaagcgaattggattggccatccggtgtgaataaaacttattgtctacttgtttgttggatacactccactaaacgcattcacccctagcattatttctatagtgatcaaaatcagacaattacattaca

SEQ ID NO: 1173 - DNA, 747 bp, Enterovirus C
ttaaaacagctctggggttgttcccaccccagaggcccacgtggcggctagcactctggtatcacggtacccttgtgcgcctgttttacaccccctccctgcaatttagaagcacaaaactaagttcaatagaagggggtacaaaccagtaccaccacgaacaagcacttctgtttccccggtgacattacatagactgctcacgcggttgaaagtgatcgatccgttacccgcttgtgtacttcgagaagcctagtatcactttgggatcttcgacgcgttgcgcccagcactcaaacccagggtgtagcttaggccgatgagtctggacgctcctcaccggcgacggtggtccaggctgcgttggcggcctacctatggctgacgccataggacgctagatgtgaacaaggtgtgaagagcctattgagctacgcaagagtcctccggcccctgaatgcggctaatcccaaccacggagcaggcggtcacaaaccagtgactggcttgtcgtaacgcgcaagtctgtggcggaaccgactactttgggtgtccgtgtttcctgttatctttattatggctgcttatggtgacaatcagagattgttaccataaagcgaattggattggccatccggtgtgtattgcattggatatacaactgtttactaaaattactgtgttatctctactttccatttaactggttaatcaggaacgatacgagaataaaacaacaacatcacg

SEQ ID NO: 1174 - DNA, 747 bp, Enterovirus B
tttttaaaacagccctgtgggttgttcccacccacggggcccattgggcgctagcacactggtatcacggtacccttgtgcgcctgttttatccaccccctccccaatgtaacatagaagcacaaactaagtggtcaatagacggctcagtgcaccaactgggtttagaccaagcacttctgttaccccggactgagtatcaataggctgctcacgcggctgaaggagaaaacgttcgttacccggccaactacttcgagaagcccagtaccaccatgaaggttgcgcagtgtttcgttcagcacaaccccagtgtagatcaggtcgatgagtcaccgcaatccccacgggcgaccgtggcggtggctgcgctggcggcctgcccatggggtgacccatgggacgcttcaattccgacatggtgcgaagagcctattgagctagttggtagtcctccggcccctgaatgcggctaatcccaactgcggagcaagcacccacaaaccagtgggctgtttgtcgtaacgggcaactctgcagcggaaccgactactttgggtgtccgtgtttccttttattcctacactggctgcttatggtgacaattgaaagattgttgccatatagctattggattggccatccggtaacaaacagagctattattcacttatttgttggctttgtgccgttgaatttcaaagttataaaaaccataacctccatcttgacactcaacacagcaaa

SEQ ID NO: 1175 - DNA, 748 bp, Enterovirus A
ttaaaacagcctgtgggttgcacccactcacagggcccacgtggcgctagcactctggttctacggaacctttgtgcgcctgttttacgccccttcccccaatttgcaacttagaagcaatacacaacactggtcaacagtaggcatggcgcaccagccatgtcttgatcaagcacttctgtttccccggaccgagtatcaatagactgctcacgcggttgaaggagaaagcgtccgttatccggctaactacttcgagaaacttagtaacaccattgaagctgcagagtgtttcgctcggcacttcccccgtgtagatcaggtcgatgagtcactgcaatccccacgggtgaccgtggcagtggctgcgctggcggcctgcctatggggtaacccataggacgctctaatgcggacatggtgcgaagagtctattgagctagttagtggtcctccggcccctgaatgcggctaatcctaactgcggagcacatgccttcaatccagagggtagtgtgtcgtaatgggcaactctgcagcggaaccgactactttgggtgtccgtgtttccttttattcttatattggctgcttatggtgacaattacagaattgttaccatatagctattggattggccatccggtgtgcaatagagctattatatacctatttgttggctttgtgccactaaccttaaaatctataaccaccctcgactttatactaaccctcaatacagtcaaac

SEQ ID NO: 1176 - DNA, 748 bp, Enterovirus A
tttaaaaccaagctgtgggttgtacccactcacagggcccactgggcgctagcactctgattccgcggaatctttgtgcgcctgttttataacccctcccccgatttgtaatttagaagtaatgcacaccactgatcaacagcaagcgtggcgcgccagccatgttcagatcaaatacttctgttttcccggactgagtatcaatagactgctcacgcggttgaaggagaaaacgttcgttacccggctaactacttcgagaaacctagtagcaccatcgaaactgcagagtgtttcgctcagcactttccccgtgtagatcaggtcgatgagtcactgcaatccccacgggcgaccgtggcagtggctgcgttggcggcctgcctatgggcttgcccataggacgctctaatgtggacatggtgtgaagagtctattgagctagttggtagtcctccggcccctgaatgcggctaatcctaactgcagagcgcataccctcaatccagggggtggtgcgtcgtaacgggcaactctgcagcggaaccgactactttgggtgtccgtgtttccttttattcttatattggctgcttatggtgacaattgagagattgttgccatatagctattggattggccatccagtgtctaacagagcaattgtatacttgtttgttggattcgttccactgtcatatacatccactaacaccttatactatattacaaaattgaacacaagaaa

SEQ ID NO: 1177 - DNA, 748 bp, Enterovirus A
tttaaaacagctctagggttgttcccaccctagaggcccaagtggcggctagcactctggtattacggtacctttgtgcgcctgttttatatcccttcccccatgtaacttagaagatattaaacaaagttcaataggagggggtacaaaccagtgccaccacgaacaaacacttctgtttccccggtgaagctacatagactgttcccacggttgaaagtggcagatccgttatccgctttggtacttcgagaaacctagtaccaccttggaatcttcgatgcgttgcgctcagcactcaaccccagagtgtagcttaggtcgatgagtctggacgatcctcactggcgacagtggtccaggctgcgttggcggcctacctgtggcgaaagccacaggacgctagttgtgaacaaggtgtgaagagtctattgagctaccaaagagtcctccggcccctgaatgcggctaatcccaaccacggagcaagtgcccacaaaccagtgggtggcttgtcgtaatgcgtaagtctgtggcggaaccgactactttgggtgtccgtgtttccttttatttttatcatggctgcttatggtgacaatctaagattgttatcatatagctattggattggccatccggtgactaacagagatcttgcatacctgtttgttggttttactaaactagatatagttacatttaaaactcttctttatatcatacagttgaatagtagaaagagaaa

SEQ ID NO: 1178 - DNA, 748 bp, Enterovirus A
ttaaaacagcctgtgggttgcacccacccacagggcccactgggcgctagcaccctgattctgcggaatctttgtgcgcctgttttacaacccttcccccgatttgtaatttagaagcaacgaacctcaccgatcaatagtaggcgtggcgcgccagctacgtcttgatcaagcacttctgtttccccgggctgagtatcaatagactgcttgcgcggtcgaaggagaaaacgctcgttatccggctaactacttcgagaaacccagtaacaccattgaaactgcagagtgtttcgctcagcacttcccccgtgtagatcaggtcgatgagtcactgcaatccccacgggcgaccgtggcagtggctgcgttggcggcctgcctatggggcaacccataggacgctctaaggtggacatggtgtgaagagtctattgagctagttagtagtcctccggcccctgaatgcggctaatcctaactgcggagcgcatgccctcaaaccagagggtggtgcgtcgtaatgggcaactctgcagcggaaccgactactttgggtgtccgtgtttccttttattctcttaatggctgcttatggtgacaattaaggaattgttaccatatagctattggattggccatccggtgtgtagtagagctattatttatctatttgttggttttgtaccattaaacttaaggtctgtcaccactttacaatatatactgatcctcaatacggttaagc

SEQ ID NO: 1179 - DNA, 748 bp, Enterovirus A
gcgcccagtgggccctgtgggttgcacccacccacagggcccactgggcgctagcactctggcactaaggtacctttgtgcgcctgttttatttcccttcccccaaagtaatttagaagttatgcaccaacgatcaatagcaggtgtgacacaccagtcatatcttgatcaagtactcctgtttccccggaccgagtatcaataagctgctcgcgcggctgaaggagaaaacgttcgttacccgaccaactacttcgagaagcttagtaccaccatgaacgaggcagagtgtttcgttcagcacaaccccagtgtagatcaggctgatgagtcactgcaaaccccatgggcgaccatggcagtggctgcgttggcggcctgcccatggagaaatccatgggacgctctaattctgacatggtgtgaagagcctattgagctagttggtagtcctccggcccctgaatgcggctaatcctaactgcggagcacatgctcacaaaccagtgggtggtgtgtcgtaatgggtaactctgcagcggaaccgactactttgggtgtccgtgtttccttttattcttatgttggctgcttatggtgacaatcaaagaattgttaccatatagctattggattggccatccggtgtgcaacagagcaattgtttacctatttgttggttttgtaccactatcactgaagtctgtgatcactctcaaattcattctgaccctcaactcaatcaaac

SEQ ID NO: 1180 - DNA, 748 bp, Enterovirus C
ttaaaacagctctggggttgttcccaccccagaggcccacgtggcggccagtacaccggtatcacggtacccttgtacgcctgttttatactccctttcccccgtaacttagaagcaataaaaccaagttcaatagaaagggggtacaaaccagtaccaccacgaacaagcacttctgtttccccggtgatgttgtatagactgtttccacggttgaaaacgactgatccgttatccgctcttgtacttcgagaagcctagtatcatcttgggatcttcgatgcgttgcgctcaacactcgaccccggagtgtagcttaggccgatgagtctggacgttccccaccggcgacggtggtccaggctgcgttggcggcctacctgtggtccaaagccacaggacgctagttgtgaacaaggtgtgaagagcctattgagctacttgagagtcctccggcccctgaatgcggctaatcccaaccacggagcaggtggttgcaatccagcaactagcctgtcgtaacgcgcaagtctgtggcggaaccgactactttgggtgtccgtgtttccttttatttttcattggctgcttatggtgacaatctcagattgttatcataaagcgagttggattggccatccggtgaaaatcagatcgattatttacctttttgttggatttacacctttaacattacacactttgaaactcattgaaattgtactgttgatacggtattactatcaca

SEQ ID NO: 1181 - DNA, 748 bp, Unknown
  Description of Unknown: Human coxsackievirus A13 isolate CV-A13_67001, complete genome.1 sequence
ttaaaacagctctggggttgttcccaccccagaggcccacgtggcggccagtacaccggtatcgcggtacccttgtacgcctgttttatactccctttccccgtaacttagaagcaatgaaaccaagttcaatagaaagggggtacaaaccagtaccaccacgaacaagcacttctgtctccccggtgaggtcgtatagactgttcccacggttgaaaatgactgatccgttatccgctcttgtacttcgagaagcctagtaccaccttggaatcttcgatgcgttgcgctcagcactcaaccccggagtgtagcttgggctgatgagtctggacattccccaccggcgacggtggtccaggctgcgttggcggcctacctgtggcccaaagccacaggacgctagttgtgaacaaggtgtgaagagcctattgagctacatgagagtcctccggcccctgaatgcggctaatcccaaccacggagcaggcgattgcaatccagcaattagcctgtcgtaacgcgtaagtctgtggcggaaccgactactttgggtgaccgtgtttccttttattcttacattggctgcttatggtgacaatcatagattgttatcataaagcgagttggattggccatccagtgagaattagatcgatcatctacctttttgttggatttacacctttaaaaccacacagcttgaatctcatcaaaattgtattgttgatacgacattattatcatt

SEQ ID NO: 1182 - DNA, 748 bp, Enterovirus C
ttaaaacagctctggggttgttcccaccccagaggcccacgtggcggccagtacaccggtatcgcggtacccttgtacgcctgttttatactcccttccccccgtaacttagaagcatataacacaagttcaatagaagggggtgcaaaccagcaccaccacgaacaagcacttctgtttccccggtgagatcacatagattgttcccacggtcgaaagtgatcagtccgttatccgctcttgtacttcgagaagcctagtaccttcttggaatcttcgatgcgttgcgctcagcactcaaacccagagtgtagcttaggccgatgagtctggacattccccaccggtgacggtggtccaggctgcgttggcggcctacctgtgacccaaagtcacaggacgctagttgtgaacaaggtgagaagagcctattgagctacaagagattcctccggcccctgaatgcggctaatcccaaccatggagcaggtggctgcaaaccagcagacggcctgtcgtaacgcgcaagtccgtggcggaaccgactactttgggtgtccgtgtttcctttattttttattgtggctgcttatggtgacaatcattgattgttatcataaagcgaattggattggccatccagcgataattaaccagaccatttactagtttgttggatttactccactgacattctaaacactcaatctcatagaagtggtgaaattaattggataatttaactaca

SEQ ID NO: 1183 - DNA, 748 bp, Enterovirus C
ttaaaacagcctgtgggttgttcccaccccagaggcccacgtggcggctagtactccggtattacggtacccttgtacgcctgttttatactcccttcccccgcaacttagaagttttacaaaactcgttcaacagaagggggtacaaaccagtaccaccacgaacaagcacttctgtttccccggtgacgttgtatagactgttcccacggtcgaaagcgactgatccgttatccgctctggtacttcgggaagcctagtagcaccttgggatcttcgacgcgttgcgttcaacactcaaccccggagtgtagcttaggtcgatgagtctggacgctcctcaccggcgacggtggtccaggctgcgttggcggcctacctgtggtccaaagccacaggacgctagttgtgaacaaggtgtgaagagcctactgagctacctgagagtcctccggcccctgaatgcggctaatcctaaccacggatcaggtgattgcaaaccagcaattggcctgtcgtaatgcgcaagtctgtggcggaaccgactactttgggtgtccgtgtttccttttattttaaaaatggctgcttatggtgacaatcatagattgttatcataaagcgagttggattggccatccggtgaaagtaaagtatattatctacttgtttgtgggatttactcctataactgcatacacttatcatctcattacgatcacactattgattagatcctgttaccaca

SEQ ID NO: 1184 - DNA, 748 bp, Enterovirus C
ttaaaacagcctgtgggttgttcccaccccagaggcccacgtggcggctagtactctggtatcgcggtacctttgtacgcctgttttatactcccttccccatgtaactttagaagcaattcaccaagttcaatagagggggtacaagccagtaccaccacgaacaagcacttctgttaccccggtgagtttgcataagctgtgcccacggctgaaagtaaatgatccgttatccgcttgagtacttcgagaagcctagtatcaccttggaatcttcgacgcgttgcgctcaacactctaccccgagtgtagcttaggctgatgagtctgggcatcccccaccggcgacggtggcccaggctgcgttggcggcctacccatggccaacgccatgggacgctagttgtgaacaaggtgtgaagagcctattgagctactcaagagtcctccggcccctgaatgcggctaatcctaaccatggagcaagtggccccaacccaggggatggcttgtcgtaacgcgcaagtccgtggcggaaccgactactttgggtgtccgtgtttccttttattttatatatggctgcttatggtgacaatcacagattgttatcataaagcgaattggattggccatccggtgaaatataagcacattatttatatctttgctggattcgctccgttgacacattcttcaccaaagttgatttatacagtcttagtaattagaaatcaccacttcagtc

SEQ ID NO: 1185 - DNA, 748 bp, Enterovirus C
ttaaaacagcctgtgggttgttcccaccccagaggcccacgtggcggctagtactccggtattacggtacccttgtacgcctgttttatactcccttcccctgtaacttagaagcaccgaacacaagttcaatagaagggggtacaaaccagtaccaccacgaacaagcacttctgtttccccggtgaagttgtattaaactgttcccacggttgaaagcggctgatccgttatccgctcatgtacttcgggaagcctagtaccatcttggaatcttcgatgcgttgcgctcagcactcaaccccagagtgtagcttaggtcgatgagtctggacaaacctcactggcgacagtggtccaggctgcgttggcggcctacctgtggcccaaagccacaggacgctagttgtgaacaaggtgtgaagagcctactgagctacatgagagtcctccggcccctgaatgcggccaatcccaaccacggagcaggcgactacaagccagtggttagtctgtcgtaatgcgcaagtctgtggcggaaccgactactttgggtgtccgtgtttccttttattttgacattggctgcttatggtgacaatcatagattgttatcataaagcgaattggattggccatccggtgagagtcaaaactattatctacctttttattggatttactccactgaacgcttataccccagtccttattagacttgcattgttgattagatatcactattata

SEQ ID NO: 1186 - DNA, 748 bp, Enterovirus C
ttaaaacagctctggggttgtacccaccccagaggcccacgtggcggccagcactccggtattacggtacccttgtgcgcctgttttatactccctctcccgcaacttagaagcacgaaaccaagttcaatagaagggggtacaaaccagtaccaccacgaacaagcacctctgtttccccggtgacattgcatagactgctcacgcggttgaaagtgatcgatccgttacccgcttgtgtacttcgaaaagcctagtatcgccttggaatcttcgacgcgttgcgctcagcacccgaccccggggtgtagcttaggctgatgagtctggacattcctcaccggtgacggtggtccaggctgcgttggcggcctacctatggctaacgccataggacgctagttgtgaacaaggtgtgaagagcctattgagctacataagagtcctccggcccctgaatgcggctaatcctaaccacggagcaggcggtcgcgaaccagtgactggcttgtcgtaacgcgcaagtctgtggcggaaccgactactttgggtgtccgtgtttcctgttatttttatcatggctgcttatggtgacaatcagagattgttatcataaagcgaattggattggccatccggtgagtgttgtgtcaggtatacaaccgtttgttggaaccactgtgttagctttacttctcatttaaccagttaatcaaaaacaatacgaggacaaaacaacaatactaca

SEQ ID NO: 1187 - DNA, 748 bp, Enterovirus C
ttccgctcctctggggttgttcccaccccagaggcccacgtggcggctagtactccggtattacggtacccttgtacgcctgttttatactcccttccccgcaacttagaagaattaaaccaagttcaatagaagggggtacaagccagtaccaccacgaacaagcacttctgtttccccggtgacgccgtatagactgtacccacggttgaaaacgactgatccgttatccgctttcgtacttcgagaagcctagtatcatcttgggatcatcgatgcgttgcgctcagcactcaaccccggggtgtagcttaggccgatgagtctggacattcctcaccggtgacggtggtccaggctgcgttggcggcctacctgtggcccaaagccacaggacgctagttgtgaacaaggtgtgaagagcctattgagctacgaaagattcctccggcccctgaatgcggctaatcccaaccacggagcaagtgctcgcacaccagtgagtagcttgtcgtaacgggtaactctgtggcggaaccgactactttgggtgtccgtgtttcctgttatttttatcatggctgcttatggtgacaatcagagattgttatcataaagcgaattggattggccatccggtgagcgttgtgtcaggtatacaactgtttgttggaaccactgtgttagctttacttctcatttaaccaatttatcaaaaataatacgaggataaaacaacaatactaca

SEQ ID NO: 1188 - DNA, 748 bp, Enterovirus C
gttaaaacagctctggggttgttcccaccccagaggcccaagtggcggctagtactccggtatcacggtacccttgtacgcctgttttatactcccttcccccgtaacttagaagagttaaaccaagttcaatagaagggggtacaaaccagtaccaccacgaacaagcacttctgtttccccggtgatattgtatagactgtacccacggtcgaaaatgattgatccgttatccgctctcatacttcgagaagcctagtatcatcttggaatcttcgatgcgttgcgctcggcactcgatcccggagtgtagcttaggtcgatgagtctggacactcctcaccggtgacggtggtccagactgcgttggcggcctacctgtggtccaaagccacaggacgctagttgtgaacaaggtgtgaagagcctattgagctatgagagagtcctccggcccctgaatgcggctaatcccaaccacggagcgagagtgcgcaagccagcgtatatctcgtcgtaacgcgcaagtctgtggcggaaccgactactttgggtgtccgtgtttccttttatttttgtattggctgcttatggtgacaatcacagattgttatcataaagcgaattggattggccatccggtgaaagtgaaatacattatttgcttatttattggattcagtccacctaattgctatactcacgaacccaccacagccgttttgttaactgaaagccggtaccaata

SEQ ID NO: 1189 - DNA, 748 bp, Enterovirus C
tggggttaaaacagctctggggttgttcccaccccagaggcccacgtggcggctagtactctggtatcatggtacctttgtacgcctgttttatacccctaccccacgtaactttagaagcaactcaacaagttcaatagggggggtacaaaccagtaccaccacgaacaagcactcctgttaccccggtgatcttgcataagctgtgcccacggctgaaggcgagagatccgttatccgcttgagtacttcgagaagcctagtatcaccttgggatcttcgacgcgttgcgctcagcactccacccgagtgtagcttaggctgatgagcctgggcattccccaccggcgacggtggcccaggctgcgttggcggcctacccatggctaacaccatgggacgctagatgtgaacaaggtgtgaagagcctattgagctactcaagagtcctccggcccctgaatgcggctaatcccaaccacggagcaggtgtcttcaacccagaaggtagcctgtcgtaacgcgtaagtctgtggcggaaccgactactttgggtgtccgtgtttccttttatcttttatatggctgcttatggtgacaatcacagattgttatcataaagcgatttggattggccatccggtgaagtacaaacacattatctacttgtttgttggatttactccactcacacaccccacccccaatataacatctattgttttgttaacaagaaattactttcgaa

SEQ ID NO: 1190 - DNA, 749 bp, Cosavirus B
ttgccagttttttgaaacgtgtggtttgacgtctaaccattatggcagtgggtggagtactgcaaagatgtcaccgtgctttacacggtttttgaaccccacaccggctgtttggcgcttgcaggacagcaggtttattttcttttaactctctctttctagccacacacgatctatgtgtgtgggcggagtgatactcccgttccttcttggacaggcggcctccacgccctttgtggatcttaaggctaccaagtcactggtgttggaaagtgaagagaaaggagttccttgggaactacatgtggcattgacagaggttgtagcgatgctgtgtgtgtgtgcggattacccccgtggcgacacggaccccacaggccaaaagccctgtccgaaaggacccacacagtggagcaaccccagctcccctcttcaatgttttgtgttagcaaccttggtattattttctctcaagcttccaatacaccgggccccaaagatgtcctgaaggtaccccgtgtatctgaggatgagcaccatcaactacccggacttgttctttcgagaacagacgcatgtggtaacccagccccgatcctaaggggtcggggcttttgctcactcagcacaggatctgatcaggagacctcccccccctgctttacagggggcgggggtttaaaaattgcccaaggcctggcaaataacctaggggactaggttttcctttttattttaaagttgtcaat

SEQ ID NO: 1191 - DNA, 749 bp, Enterovirus A
ttaaaacagctcttagggttgttcccaccctagaggcccacgtggcggctagcactctggtatcacggtacctttgtgcgcctgttttatacccccctcccccatgtaacttagaagctattaaataaagttcaatagaagggggtacaaaccagtaccaccacgaacaagcacttctgtttccccggtgaagctacatagactgttcccacggttgaaagtggcagatccgttatccgctttggtacttcgagaaacctagtatcatcttggaatcttcgatgcgttgcgttcagcactcaaccccagagtgtagcttaggtcgatgagtctggacgatcctcactggcgacagtggtccaggctgcgttggcggcctacctgtggcgaaagctacaggacgctagttgtgaacaaggtgtgaagagtctattgagctatcaaagagtcctccggcccctgaatgcggctattcccaaccacggagcaagtgctcacaaaccagtgagtggcttgtcgtaacgcgcaagtctgtggcggaaccgactactttgggtgcccgtgtttccttttatttttatcatggctgcttatggtgacaatctaagattgttatcatatagctattggattggccatccggtgactaacagagatatcatatattcatttgttggttttgttaaactagactcaactacattcaagtctcttctcttcatcatacaattgaataatagaaagagaaa

SEQ ID NO: 1192 - DNA, 749 bp, Enterovirus A
ttaaaacagctctgggggttgttcccaccctagaggcccacgtggcggctagcactctggtatcacggtacctttgtgcgcctgttttatatccctttccccatgcaacttagaagttttttaaacaaagttcaatagaagggggtacaaaccagtgccaccacgaacaagcacttctgtttccccggtgaagctgcatagactgtccccacggttgaaagcggcagatccgtcatccgctttggtacttcgagaaacctagtatcaccttggaatcttcgatgcgttgcgctcagcactcaaccccagagtgtagcttaggttgatgagtctggacaatcctcactggcgacagtggtccaggctgcgttggcggcctacctgtggtgaaaaccacaggacgctagatgtgaacaaggtgtgaagagtctattgagctaccaaagagtcctccggcccctgaatgcggctaatcctaaccacggagcaagtacccacaaaccagtgggcagcttgtcgtaacgcgcaagtctgtggcggaaccgactactttgggtgtccgtgtttcctttttattttatcatggctgcttatggtgacaatctaagattgttatcatatagctattggattggccatccggtgactaacagagatattatatacctatttgttggttttgttagattaaatactatcacattcaaaactcttctttatatcatacaattgaacagtagaaagagaaa

SEQ ID NO: 1193 - DNA, 749 bp, Enterovirus A
ttaaaacagcctgtgggttgttcccacccacagggcccactgggcgctagcactctgatttcacgaaatccttgtgcgcctgttttatatcccttccccccagtctgaaacatagaagcaatgcgcatcactgatcaatagcaggcgtaacgcgccagttacgtcatgatcaagcacatctgtctccccggaccgagtatcaatagactgcttgcgcggttgaaggagaaacagttcgttacccggctaactacttcgagaagcccagtagcaccatggaagctgcagggtgtttcgctcagcacttcccccgtgtagatcaggtcgatgagtcactgcaacccccacaggcgactgtggcagtggctgcgttggcggcctgcctatggggagacccataggacgctctaatgtggacatggtgtgaagagcctattgagctagttagtagtcctccggcccctgaatgcggctaatcctaactgcggagcacacgccctcaacccagagggtagtgtgtcgtaacgggcaactctgcagcggaaccgactactttgggtgtccgtgtttcttattattcttatattggctgcttatggtgacaattacagaattgttaccatatagctattggattggccatccggtgtgcaatagagctgttatatacctatttgttggttttgtgccactgactttaaaatctatagttactcttaatttcatattggctctcaacacaattaaac

SEQ ID NO: 1194 - DNA, 749 bp, Enterovirus A
ttaaaacagcctgtgggttgttcccacccacagggcccactgggcgctagcactctggtattacggtacctttgtgcgcctgttttatgccccttaccccttaaattggtaacttagaagttttacatacctgcgaccaatagcgggcatgacgcaccagccatgtcttggtcaagcacttctgttcccccggactgagtatcaatagactgctcacgcggtcgaaggagaaaacgttcgttatccggctggctacttcgagaaacccagtaacaccatgaaagttgcagagtgtttcgctcagcactacccccgtgtagatcaggtcgatgagtcactgcgaaccccacgggcgaccgtggcagtggctgcgctggcggcctgcccatggggtgacccatgggacgctctaatacagacatggtgtgaagagtctattgagctagtcagtagtcctccggcccctgaatgcggctaatcctaactgcggagcacatgccctcaatccagggggtggtgtgtcgtaacgggtaactctgcagcggaaccgactactttgggtgtccgtgtttccttttattcctatcatggctgcttatggtgacaattgaaagattgttaccatatagctactggattggccacccggtgtctaacagagctattgtttatctatttgttgggtacgtccttcttgactataaggcccttcagactcttaagtacatcttgtacctcaatcaaaagag

SEQ ID NO: 1195 - DNA, 749 bp, Enterovirus A
ttaaaacagcctgtgggttgtacccacccacagggcccactgggcgccagcactctgattctacggaatctttgtgcgcctgttttataatcccctccccccaagtttgtaatttagaagcaaagtaccgtaacgatcaacagcaggcgtggcgcaccagccatgtctcgatcaagcacttctgttcccccggacagagtatcaatagactactcacgtggttgaaggagaaaacgtccgttatccggctaactacttcgagaaacctagtaacaccattgaaactgcagagcgtttcgctcagcacttaccccgtgtagatcaggtcgatgagtcactgcattccccacgggcgaccgtggcagtggctgcgttggcggcctgcctatggggtcacccataggacgctctaatgtggacatggtgcgaagagtctattgagctagttagtagtcctccggcccctgaatgcggctaatcctaactgcggagcgtatgccctcaaaccagggggtggtgcgtcgtaacgggtaactctgcagcggaaccgactactttgggtgtccgtgtttccttttatttccttactggctgcttatggtgacaattgaagaattgttgccatatagctattggattggccatccggtgtgtaacagagcaatcatctatttgttcgtcgggtatatcccactaacgctcaactcttttaacacattacaatacatactaatcctaaatacaagaaa

SEQ ID NO: 1196 - DNA, 749 bp, Enterovirus C
ttaaaacagcctgtgggttgttcccaccccagaggcccacgtggcggccagtactccggtattacggtacccttgtacgcctgttttatactccctttccctagtaacttagaagttgtacaattaagttcaatagaagggggtacaaaccagtaccaccacgaacaagcacttctgtttccccggtgaagttgcatagactgtccccacggttaaaagtgactgatccgttatccgctcatttacttcgggaagcctagtatcatcttgggatcttcgatgcgttgcgctcaacactcaaccccagagtgtagcttaggtcgatgagtctggacactccccactggtgacagtggtccaggctgcgttggcggcctacctgtggtccaaagccacaggacgctagtagtgaacaaggtgtgaagagcctactgagctaattgagagtcctccggcccctgaatgcggataatcctaaccacggagcaggtgatcacaatccagtgattggcctgtcgtaatgcgtgagtctgtggcggaaccgactactttgggtgtccgtgtttcctttttactcttattatggctgcttatggtgacaatcatagattgttatcataaagcgaattggattggccatccggtgagaattaaatcgctaatatatctatttgttggatttaccaaaatcaactacagaacactagccttaattcgaatcgtgttactgatcagattccaccatcaca

SEQ ID NO: 1197 - DNA, 749 bp, Enterovirus C
ttaaaacagctctggggttgttcccaccccagaggcccacgtggcggctagtactctggtattacggtacctttgtacgcctgttttatactcccttcccctccgtaacttagaagcatgagaatcaagttcaatagaagggggtacaaaccagtaccaccacgaacaagcacttctgtcaccccggtgaggttgtatagactgtccccacggttgaaagcgactgatccgttatccgctcaattacttcgggaagcctagtaccatcctggaatcttcgatgcgttgcgctcagcactcaaccccagagtgtagcttaggccgatgagtctggacaatcctcactggcgacagtggtccaggctgcgttggcggcctacctgtggtccaaagccacaggacgctagttgtgaacaaggtgcgaagagcctactgagctaattgagagtcctccggcccctgaatgcggctaatcccaaccacggagcaggcggttgcaaaccagcaactggcttgtcgtaacgcgaaagtctgtggcggaaccgactactttgggtgtccgtgtttccttttattcttatgatggctgcttatggtgacaatcgttgattgttatcataaagcgaattggattggccatccggtgaaaatcaaatctattgtttacctgttcattgggttcactccactaacttcacacactatatatctcattaaggtcgtattactagtaaggaattatcaccaaa

SEQ ID NO: 1198 - DNA, 749 bp, Enterovirus C
ttaaaacagctctggggttgttcccaccccagaggcccacgtggcggctagtactctggtattacggtacccttgtacgcctgttttatactcccttccccgtaacttagaagaaataaaccaagttcaatagaagggggcacaaaccagtgtcaccacgaacaagcacttctgtttccccggtgatattgtatagactgtacccacggttaaaagcgattgatccgttatccgctcttgtacttcgaaaagcctagtatcatcttggaatcttcgatgcgttgcgctcaacactcaaccccagagtgtagcttaggtcgatgagtctggacattccccaccggcgacggtggtccaggctgcgttggcggcctacctgtggcccaaagccacaggacgctagttgtgaacaaggtgtgaagagcctattgagctgcaagagagtcctccggcccctgaatgcggctaatcccaaccacggagcaagtgctcacacaccagtgagtggcttgtcgtaacgcgcaagtctgtggcggaaccgactactttgggtgtccgtgtttcctgttatttttatcatggctgcttatggtgacaatcagagattgttatcataaagcgaattggattggccatccggtgagtgttgtgtcaggtatacaactgtttgttggaaccactgtgttaactttacttctcatttaaccaattaatcaaaaacaatacgaggataaaacaacaatactaca

SEQ ID NO: 1199 - DNA, 749 bp, Enterovirus C
ttaaaacagctctggggttgttcccaccccagaggcccacgtggcggccagtacaccggtattacggtacccttgtacgcctgttttatactcccttccccctgtaacttagaagctcaagaatccaagttcaatagaagggggtacaaaccagtaccaccacgaacaagcacttctgtttccccggtgaagttgcatagactgttcccacggttgaaagtgactgatccgttatccgctcaactacttcgagaagcccagtatcatcttggaatcttcgatgcgttgcgctcagcactcgaccccggagtgtagcttaggctgatgagtctggacgttccccactggtgacagtggtccaggctgcgttggcggcctacctgtggtccaaagccacaggacgctagttgtgaacaaggtgtgaagagcctattgagctaattgagaatcctccggcccctgaatgcggctaatcccaaccacggagcaggtggttacaacccagtaactggcctgtcgtaacgcgtaagtctgtggcggaaccgactactttgggtgtccgtgtttccttttattcctataatggctgcttatggtgacaatcacagattgttatcataaagcgaattggattggccatccggtgagagttaagacaattatccacttgttcattggatttacccctctgactaattacacactcaaccttattagaattgtagttctagtgagatactactgtcata

SEQ ID NO: 1200 - DNA, 749 bp, Enterovirus C
ttaaaacagctctggggttgttcccaccccagaggcccacgtggcggctagtactccggtattacggtacccttgtacgcctgttttatactcccttccccgtaacttagaagcaataaatcaagttcaccaggagggggtacaaaccagtaccaccacgaacaagcacttctgtttccccggtgacgttgcatagactgtccccacggttgaaagcgactgatccgttatccgctcgtgtacttcgagaagcctagtatcatcttggaatcttcgatgcgttgcgctcagcactcgaccccggagtgtagcttaggctgatgagtctggacattcctcaccggcgacggtggtccaggctgcgttggcggcctacctgtggctcaaagccacaggacgctagttgtgaacaaggtgtgaagagcctattgagctacacgagaatcctccggcccctgaatgcggctaatcccaaccacggagcaagtgctcacaaaccagtgagtggcttgtcgtaacgggtaactctgtggcggaaccgactactttgggtgtccgtgtttcctttttatttttgtatggctgcttatggtgacaatcagagattgttatcataaagcgtattggattggccatccggtgagtgttgtgtcaggtatacaactgtttgttggaaccactgtgttagctttacttctcatttaaccaattaatcaaaaacaatacgaggataaaacaacaatactaca

SEQ ID NO: 1201 - DNA, 750 bp, Aichivirus E
ttccccttcccccttttcacggcccggccgcccgccgggtcgtcacccgttcagacacctacgggttatctgttcgggctataaatatgggcattcctcttcccccttccccttttgaagatgagtgcgcatattcttgactccgcctggattggccgcccaaggcgtgaacaagcagctaggccaccatgacactgcggtggtgtccgaacccgcgggtgccttcacgggcacctgtggtatgtaggactcccaccgtggtcttccctttccccctcaatctttccccctggttcgactaacgggaccagtgctggaacctgtccggtgaacggtatagcaggcccccccggcagaaacacccggtgcttaccccttaaggctagcccccttccatgaatttggttggggcaactagtgggtgtacagttggcgtgaaccctccggtctaggagtgctcttgcccaatcctctgtgtgtgccttgcagtagggactggcaatccttcgcgtaggtgatccgctgtgccatgccatcctggcgacaggaggcccagtgtgcgcaacctacgtcccttctgggtgctgcattgcattacctttggagtaagcttggtgtgccgaaaccccagggtttacgtaccactcgtggtgtgaggaatgtgccgcaggtaccccatccttgaggtgggatctgagcggtagctaattgtctagcaccactttcttccttttttctttgctggtcacg

SEQ ID NO: 1202 - DNA, 750 bp, Unknown
  Description of Unknown: Coxsackievirus A14 gene for polyprotein, polyprotein region, strain1 sequence
ttaaaacagctctggggttgtacccactcacagggcccactgggcgctagcactctgattctacggaatccttgtgcgcctgttttataaccccctcccaatatgtaacttagaagcagcacatactaccgatcaatagtgggcatggcgcaccagccatgtctcgatcaagcacttctgtttccccggactaagtatcaatagactgctcacgcggttgaaggagaaagcgtccgttacccggctaactacttcgagaaacccagtagcaccactgaagctgcagagtgtttcgctcagcacttcccccgtgtagatcaggtcgatgagtcaccgcaatccccacgggcgaccgtggcggtggctgcgtggcggcctgcctgtggggcaacccacaggacgctctaaagtggacatggtgcgaagagtctattgagctagttagtagtcctccggcccctgaatgcggctaatcctaactgcggagcgcatgccttcaaaccagatggtagtgcgtcgtaatgggcaactctgcagcggaaccgactactttgggtgtccgtgtttccttttattcttacattggctgcttatggtgacaatcacagaattgttaccatatagctattggattggccatccggtgtgtaatagagcaataatttactcttttgttgcttttgttccattgaccttcactacactgaacactttacagtacatacttcaactcaactccagaaagcaatc

SEQ ID NO: 1203 - DNA, 750 bp, Unknown
  Description of Unknown: Enterovirus A120 strain TRT/2013-23196, complete genome.1 sequence
ttaaaacagcctatgggttgcacccacccatagggcccactgggcgctagcactctgattctacggaatctttgtgtgcctgttttatagtccctccccccgacttgtaacttagaagtaatgcaaaccactggtcaatagcaggcatgacgcaccagtcatgtcttgatcaagcacttctgtccccccgggctgagtatcaatagactgctcacgcggttgaaggagaaaacgctcgttacccggctaactacttcgagaaacctagtagcaccattgaaactgcagagcgtttcgctcagcactccccccgtgtagatcaggtcgatgagtcactgcactcctcacgggcgaccgtggcagtggctgcgttggcggcctgcctatggggtaacccataggacgctttaatgtggacatggtgcgaagagtctattgagctagttagtagtcctccggcccctgaatgcggctaatcctaactgcggagcacacgcccttaatccaaggggtagtgtgtcgtaatgggcaactctgcagcggaaccgactactttgggtgtccgtgtttccttttatttttatactggctgcttatggtgacaattgagagattgttaccatatagctattggattggccatccggtgtgcaacagagctattatctacctgtttgttggatatataccactcacagctgacaaaacccttatcacattattgtacatcctacacttgaactcaagaaa

SEQ ID NO: 1204 - DNA, 750 bp, Enterovirus C
ttaaaacaagctgtggggttgttcccaccccagaggcccacgtggcggctagtactccggtattgcggtacccttgtacgcctgttttatactccctgcccccgtaacttagaagcacaaagaaatcaagttcaacagcagggggtacaaaccagtaccaccacgaacaagcacttctgttcccccggtgacgtcgcatagactgtgcccacggttgaaaacgattgatccgttaaccgctcttgtacttcgagaagcctagtatcacattggaatctacgatgcgttgcgctcagcactcaaccccagagtgtagcttaggctgatgagtctggacattcctcaccggtgacggtggtccaggctgcgttggcggcctacctgtggcccagagccacaggacgctagttgtgaacaaggtgtgaagagcctattgagctacaagagagtcctccggcccctgaatgcggctaatcccaaccatggagcaggtggtcacaatccagtgattggcctgtcgtaatgcgcaagtccgtggcggaaccgactactttgggtgtccgtgtttccttttattttacacttggctgcttatggtgacaatcatagattgttgtcataaagcaaattggattggccatccggtgaaaactaaatacgctatttacctgtttgttggatttataccttcaacttacaacacttattgtattatttgcattgtgttattgattagacaacaatactaca

SEQ ID NO: 1205 - DNA, 750 bp, Unknown
  Description of Unknown: Human poliovirus 2 strain NIE0711199, complete genome.1 sequence
ttaaaacagctctggggttgttcccaccccagaggcccacgtggcggccagtactccggtattacggtacccttgtacgcctgttttatactcccttcccctgtaacctagaagaagtaaattaagttcaataggagggggtacaaaccagtaccaccacgaacaagcacttctgtttccccggtgacgttgtatagactgtgtccacggtcgaaagcaattgatccgttatccgctcttgtacttcgagaagcctagtaccagcttggaatcttcgatgcgttgcgttcagcactcaatcccagagtgtagcttaggttgatgagtctggacatccctcaccggcgacggtggtccaggctgcgttggcggcctacctgtggcccaaagccacaggacgctagttgtgaacaaggtgtgaagagcctattgagctacaagagagtcctccggcccctgaatgcggctaatcccaaccacggagcaagggtgcatgaaccaatgcatgccttgtcgtaatgcgtaagtctgtggcggaaccgactactttgggtgtccgtgtttccttttatttttatattggctgcttatggtgacaatcagagattgttatcataaagcgaattggattggccatccggtgagtgttgtgtcgggtatacaactgtttgttggaaccactgtgttaactttgcttcttatttaaccaattaatcaaaaacaatacgaggataaaacaacaataccaca

SEQ ID NO: 1206 - DNA, 750 bp, Enterovirus C
ttaaaacagctctggggttgttcccaccccagaggcccacgtggcggctagtactccggtattccggtacccttgtacgcctgttttatactcccctcccccgtaacttagaagaaacaaaccaagttcactaggagggggtacaaaccagtaccaccacgaacaagcacttctgtttccccggtgatattgtatagactgtacccacggtcgaaaacgattgatccgttatccgcttctgtacttcgagaagcctagtaccactttggaatcttcgatgcgttgcgctcagcactcaaccccagagtgtagcttaggtcgatgagcctggactttcctcactggcgacagtggtccaggctgcgttggcggcctacctgtggcccaaagccacaggacgctagttgtgaacaaggtgtgaagagcctattgagctacaaaagagtcctccggcccctgaatgcggctaatcccaaccatggagcaagggtgtacgaaccagtacatatcttgtcgtaacgcgcaagtccgtggcggaaccgactactttgggtgtccgtgtttccttttattttcatactggctgcttatggtgacaatcatagattgttatcataaagcgaattggattggccatccggtgagtgttgtgtcaggtatacaattgtttgttggaaccactgtgtcagctttacttctcatttaaccaattaatcaaaaacaatacgaggataaaacaacaataccaca

SEQ ID NO: 1207 - DNA, 751 bp, Parechovirus B
cgcggccatgtttgtaagcatggccgtagggaccccccggtgggctgggtgcacttctcgccttttaggtgggggtgtggctcggctaccaccactgggtggcaaccagttttcatgtaatagccaaacaagtaacattaacacctaagcttctggtgcaccaccctgtctggttgaagccgcttggaataaaattggatagctaaggtggattgtcaaacatgcatttctgtctcctggatatccttaatatccaggtaagggctgtacccgggcggtcctactcttcacaggagtctgcataggtggctttcacctctggacagtgcactccctcccgctccctcacccaagttagctggaacacagaatgaaaaatgagcgaacactagaaccaggtgtagcgaccacacatatgccagcggatttcccctagtggtaacactagcctctgggcccaaaaggcacgtctttgaccatatgtgtgcacaatcccagtgatggttctatctagtagtttatttagtaattttgtgaactggctcactgaacgtgagttggaggcttaggaatggcgggctgaaggatgccctgaaggtacccgtaggtaacgataagctcactatggatctgatcaggggcccaccagcatatttgctgggtagaagtcttcggaccttgggttaaaaaacgtctaggcccgtcccccagagggatctggggtttccctaataaccccaatactgacatt

SEQ ID NO: 1208 - DNA, 752 bp, Unknown
  Description of Unknown: unclassified Rosavirus sequence
ggttcccgcccccacctccgtcacagcctttcgaggctgtgctggaacggcgacagggagtttagacttcttgccgctatgggttcttctgccccgtgttttggacgcccggcatggcgttaaactgtcattccccctaccctttccctatttgtaactaagttgtgcctcgcccagacaggctgctaagacgcttgttgctacagcatgtttggactagcgagctctccataagtaaacttttccacccccttgggtgtctttgcccttggggacggtctggagccccgttgtcttagacagagtgtgtcggtgcaggctttctgctctggacccatgccggccacaaactcccatcagtgttgtgaagacggtaggacacaagtgaacaggtacagggaactttcttggaatgtagcgattactgcaagtgagcggacctcccctggtggtaacaccagcctctcaggccaaaagccacggtgttaacagcacccttgcagtaggccactgccccgtggtctccaggatctttctctttactcctagtaatttgtgaatctagctgttctgaagcatactggtgcaaaggctaaggatgccctgaaggtacccacaggtaacgttaagacactgtggatctgatcaggggcctgaatactgaagctttacagaggtagttcaggttaaaaaacgtctatgcctttcccccacgggagtgggggttcccccacacttttatcacaggcact

SEQ ID NO: 1209 - DNA, 753 bp, Enterovirus A
tttaaaacaagctctggggttgtacccacccacagggcccactgggcgctagcactcttattctacggaatatttgtgcgcctgttttatagccctcccccattaagtaacttagaagtgatgtgcagcacagatcaatagcaggcatagcgcaccagctgtgtcttgatcaagcactcctgtttccccggactgagtatcaataaactgctcacgcggttgaaggagaaaacgttcgttacccggctaaccacttcgagaaacttagtaacaccattgaagctgtagagtgtttcgctcagcacttccccagtgtagatcaggctgatgagtcactgcgaccctcacgggcgaccgtggcagtggctgcgttggcggcctgcctatggggcaacccataggacgctctaaagtggacatggtgtgaagagtctattgagctggttagtagtcctccggcccctgaatgcggctaatcctaactgcggagcgcatgccctcaaaccagggggtggtgcgtcgtaacgggtaactctgcagcggaaccgactactttgggtgtccgtgtttccttttattctcatattggctgcttatggtgacaattgaagaattgttaccatatagctattggattggccatccggtgtgtaacagagcgattatcttctcttttattgcctttgtcccattgaccccaactgcgttaaacactctgcaatatatactctatcttaactctaggaagcgaac

SEQ ID NO: 1210 - DNA, 753 bp, Enterovirus C
ttaaaacagcctgtgggttgttcccaccccagaggcccacgtggcggctagtactctggtattacggtacccttgtacgcctgttttatactcccttcccatgtaacttagaagcaaataacacaagttcaatagaagggggtacaaaccagtaccaccacgaacaagcacttctgttaccccggtgaagttgcatagactgttcccacggttgaaagcgaccgatccgttatccgctcaagtacttcgagaagcctagtatcaccttggaatcttcgatgcgttgcgctcatcactcaaccccagagtgtagcttgggctgatgagtctggacgtccctcactggcgacagtggtccaggctgcgttggcggcctacctatggcccaaagccataggacgctagttgtgaacaaggtgtgaagagcctattgagctacttgagagtcctccggcccctgaatgcggctaatcccaaccacggatcaggtgattgcaaaccagcaattagcctgtcgtaacgcgcaagtctgtggcggaaccgactactttgggtgtccgtgtttccttttattttactattggctgcttatggtgacaatcattgattgttatcataaagcgaattggattggccatccggtgaaagtaaaacaggttatttacctttttgttggatttactgcattatctaagcacactccagatttaattcgtatcgttcttgcgattaggagagcacacttttccagca

SEQ ID NO: 1211 - DNA, 753 bp, Unknown
  Description of Unknown: unclassified Enterovirus sequence
ttgatcaaggcccagttggtgcactgggttgatcccacccacagggcccactgggcgcatgcactctggtatcacggtacctttgtgcgcctgttttatctcccctcccccccgtgtaatttagaagcataagcacaatgatcaatagacaacccagtgcaccaactgggccttgatcaagcacttctgttaccccgggccgactatcaataggctgctcacgtggctgaaggagaaaacgctcgttacccggccagttacttcgagaagcctagtaccaccatgaacgttgcgcagtgtttcgctccgcacaaccccagtgtagatcaggtcgatgagtcaccgcatcccccacgggtgaccgtggcggtggctgcgttggcggcctgcccatggggtaacccatgggacgctacaatactgacatggtgtgaagagtctattgagctaactggtagtcctccggcccctgaatgcggctaatcccaactgcggagcacgtgcttccaatccaggaggtagcgtgtcgtaacgggcaactctgcagcggaaccgactactttgggtgtccgtgtttcctttatctctttattggctgcttatggtgacaattgaaagattgttgccatatagctattggattggccatccggtatctaacagagcaatcatatacctgtttgttggatttgttccacttaacaaaacagagttccgtactttgtgttatattattaggttgaacacatcaaa

SEQ ID NO: 1212 - DNA, 753 bp, Unknown
  Description of Unknown: Human enterovirus C isolate V2-TOL cl1, complete genome.1 sequence
ttaaaacagctctggggttgttcccaccccagaggcccacgtggcggccagtacaccggtatcacggtacccttgtacgcctgttttatactccctctcccctgtaacttagaagcaaataaaccaagttcaatagaaagggggtacaaaccagtaccaccacgaacaaacacttctgtttccccggtgaggttgtataaactgtccccacggttgaaaacgactgatccgttacccgctcttgtacttcgagaagcctagtatcatcttggaatcttcgatgcgttgcgctcagcactcgaccccggagtgtagcttaggctgatgagtctggacgttccccaccggcgacggtggtccaggctgcgttggcggcctacctgtggcccaaagccacaggacgctagttgtgaacagggtgtgaagagcctattgagctacaagagagtcctccggcccctgaatgcggctaatcccaaccacggagcaggtggttgcaatccagcaactagcctgtcgtaacgcgcaagtctgtggcggaaccgactactttgggtgtccgtgtttccttttattcttacaatggctgcttatggtgacaatcatagattgttgtcataaagcgaattggattggccatccggtgaaagtcagatcaactatttatttgtttgttggagccactgtgttagctttacttctcatctaaccaattaatcaaaaacaatacgaggataaaacaacaacactaca

SEQ ID NO: 1213 - DNA, 753 bp, Enterovirus D
ttaaaacagctctggggttgttcccaccccagaggcccacgtggcggctagtactccggtattacggtacccttgtacgcctgttttatactcccttcccccgtaacttagaagtaacacaaatccaagttcaatagaagggggtacaaaccagtaccaccatgaacaagcacttctgtttccccggtgaaatcatagactgtacccacggttgaaagtgatcgatccgtcatccgctcttgtacttcgagaagcctagtatcaccttggaatcttcgatgcgttgcgctcaacactcaaccccagagtgtagcttaggctgatgagtctggacactccccaccggcgacggtggtccaggctgcgttggcggcctacctgtggtccaaagccacaggacgctagttgtgaacaaggtgtgaagagcctattgagctacaggagagtcctccggcccctgaatgcggctaatcccaaccacggagcaggtggtcataatccaatgattggcctgtcgtaacgcgcaagtctgtggcggaaccgactactttgggtgtccgtgtttccttttattttatcattggctgcttatggtgacaatctaagattgccatcatatagcttttggattggccatccggtgatacttcgagttatttagcttgctgcttacatttattttaaacaacatccagttaccagcattcctattttgtttttctttcattctgagttatctaataagtagttaga

SEQ ID NO: 1214 - DNA, 754 bp, Enterovirus A
gagttcagacgtgtgccttccgatgtgggttgcacccacccacagggcccactgggcgctagcactctgataccacggtacctttgtgcgcctgttttatcaccctaccccacacgaaacttagaagcaatacataactgaccaatagtaggtgtggcgcaccagccacatcttggtcaagcacttctgtctccccgggttgagtatcaataagctgttcacacggctgaaggagaaaacacccgttacccggccaactacttcgagaaacctagtatcaccatgaacgttgcgaggtgtttcgctcagcacttcccccgtgtagatcaggccgatgagtcaccgcattccccacgggtgaccgtggcggtggctgcgttggcggcctgcctatgggttagcccataggacgccttaatactgacatggtgcgaagagtctattgagctagttggtagtcctccggcccctgaatgcggctaatcctaactgcggagcacatacccacaaaccagtgggcggtgtgtcgtaacgggtaactctgcagcggaaccgactactttgggtgtccgtgtttccttttatctttatattggctgcttatggtgacaatcagagaattgttaccatatagctactggattggccatccggtgtccaatagagctattatatacctgtttgttggattcaccccattgacctacaaatccctaaatactttgtgttatattttgaacttaaatacacgaaa

SEQ ID NO: 1215 - DNA, 754 bp, Enterovirus C
ttaaaacagcctgtgggttgttcccaccccagaggcccacgtggcggctagtactccggtattacggtacccttgtacgcctgttttatatccccttcccctgtaacttagaagcagacaacacaagttcaatagaagggggtacaaaccagtaccaccacgaacaagcacttctgttaccccggtgacgttgcatagactgttcccacggtcaaaagcgatcgatccgttatccgctcaagtacttcgaaaagcctagtatcaccttggaatcttcgatgcgttgcgctcggcactcgatcccggagtgtagcttaggccgatgagtctggacgatcctcactggcgacagtggtccaggctgcgttggcggcctacctatggcccaaagccataggacgctagttgtgaacaaggtgtgaagagcctattgagctacttgagaatcctccggcccctgaatgcggctaatcccaaccacggatcaggtgattgcaatccagcaattggcctgtcgtaacgcgcaagtctgtggcggaaccgactactttgggtgtccgtgtttccttttaattttattgctggctgcttatggtgacaatcgtagattgttatcatagagcgaattggattggccatccggtgagattaaaacacattatttacctttttgttggatttaccacactatctacgtacactccagacttaatccgcatagtacttttaattagaagatcttatcattataaca

SEQ ID NO: 1216 - DNA, 754 bp, Enterovirus C
ttaaaacagctctggggttgttcccaccccagaggcccacgtggcggctagtactccggtatcgaggtacccttgtacgcctgttttatactcccttcccccgtaacttagaagccaaaaatacaagttcaatagaagggggtacaaaccagtaccaccacgaacaagcacttctgttaccccggtgatgttgcatagactgtccccacggtcgaaagcgattgatccgttatccgcttaggtacttcgagaagcctagtatcaccttggaatcttcgatgcgttgcgctcatcactcgaccccggagtgtagcttaggtcgatgagtctggacgatcctcactggcgacagtggtccaggctgcgttggcggcctacctatggcccaaagccataggacgctagttgtgaacaaggtgtgaagagcctattgagctacttaagagtcctccggcccctgaatgcggctaatcccaaccacggatcaggtgattgcaatccagcgattggcctgtcgtaacgcgcaagtctgtggcggaaccgactactttgggtgtccgtgtttccttttaattttattattggctgcttatggtgacaatcatagattgttatcataaagcgaattggattggccatccggtgaaaataaaacacattatctacctttttgttggatttactacactgtctacacacactccagatataatttatatagttcttttaatcaggagatcttatcattataaca

SEQ ID NO: 1217 - DNA, 754 bp, Enterovirus C
tggggacaaagttaacagctctggggttgttcccaccccagaggcctacgtggcggctagtactccggtattacggtacccttgtacgcctgttttatactccccaccccgcaacttagaagaagctaatcaagttcaataggagggggtacaaaccagtaccaccacgaacaagcacttctgtctccccggtgacattgcatagactgtccccacggttgaaagcgatcgatccgttatccgctcttgtacttcgagaagcctagtaccatcttggaatcagcgatgcgttgcgctccgcactcaatcccagagtgtagcttaggctgatgagtctggacattcctcaccggcgacggtggtccaggctgcgttggcggcctacctgtggcccaaagccacaggacgctagttgtgaacaaggtgtgaagagcctattgagctataagagagtcctccggcccctgaatgcggctaatcccaaccacggatcaagggtgcacgaaccagtgtataccttgtcgtaacgcgcaagtctgtggcggaaccgactactttgggtgtccgtgtttccttttattgtttcaatggctgcttatggtgacaatcattgattgttatcataaagcgaattggattggccatccggtgaaagtgaaacatattgtttgcctccttattgggtctactccaatcgacctctttacctacaatcttattgccacagttttactggttagaagtgtgtttcaca

SEQ ID NO: 1218 - DNA, 755 bp, Aichivirus B
cgcacgttcgcgtcgtcgtaagtctggattcccaaggccaacttggtttaacttcggtttctggacaaatacaaagaacctcagtcctcttggtactttctcgcctgagtcaacaaagcgagaaacctgcccctctaacgccagacgagcggcataaaacttgaacttctggcacgctccactcttccctctcccaatcccatccccatcgcgctctcaaggtcgcgcaattctgggactagcccagatttaaaagttcctggcaccctttgcccctttaggcccttaaggcaggaactgaccttgtgctgtgacctcggtgcggaagtgctactgcgtagtgattgtaagctcctcttatggttctgccctggcaaggctatagagtactgtgatccgctgcggatgccatcctggtaacaggacccccagtgtgcgtaacagtatgttcacggctcaccgtgttcaccatgactggaacactgctttcgtgaaacagtgtgtgtccaatccctgtgatcagtatcaaccacaccacctaggaatgctaggaaggtaccccggttcgccgggatctgatcctaggctaattgtctacagtggtgctcctttattttctctccaaccatttattgttcacaactgcttgatcttgtgtttgctgcctttctctgctctcactgccattctcaagtgttcacactgtccaagctcctttggttgttttcatccacttgccattgtcaactcttgtc

SEQ ID NO: 1219 - DNA, 755 bp, Enterovirus A
ttaaaacagcctgtgggttgtacccacccacagggcccactgggcgctagcacactgattctgcgggatctttgtgcgcctgttttatatcccctccccccaaactaggtaacttagaagattagcacttgtatgaccaatagtaggcgtgacgcgccagtcatgtcttggtcaagcacttctgtttccccggactgagtatcaataagctgcttgcgcggctgaaggagaaaacgttcgttacccggctaactacttcgagaaacctagtaacaccatgaaagttgcggagtgtttcgctcagcacttcccccgtgtagatcaggtcgatgagtcactgcaaaccccacgggtgaccgtggcagtggctgcgttggcggcctgcctatgggtcaacccataggacgctctaatacagacatggtgtgaagagtctattgagctagttagtagtcctccggcccctgaatgcggctaatcctaactgcggagcacacgcttgcaaaccagtgagtagtgtgtcgtaatgggcaactctgcagcggaaccgactactttgggtgtccgtgtttccttttattctcatactggctgcttatggtgacaattgaagaattgttactatatagctattggattggccatccggtgtgtaacagagcgataatctactcctttgttgcatttgttccactaacccttactacattagacattctacaatacatactttatctcaactccaagaaacgaac

SEQ ID NO: 1220 - DNA, 758 bp, Enterovirus A
aacacataaccgaccaataaaacagcctgtgggttgcacccacccacagggcccattgggcgctagcactctggtaccacggtacctttgtgcgcctgttttatcaccctaacccccacgaaacttagaagtaacacataaccgaccaatagtaggtgtggcgcaccagccgcatcttggtcaagcacttctgtttccccgggttgagtatcaataagctgttcacacggctgaaggagaaaacacccgttacccgaccaactacttcgagaaacctagtaccaccatgaacgttgcaaggcgtttcgctcagcacttcccccgtgtagatcaggccgatgagtcaccgcattccccacgggtgaccgtggcggtggctgcgttggcggcctgcctatgggttagcccataggacgccttaatactgacatggtgcgaagagtctattgagctagttggtagtcctccggcccctgaatgcggataatcctaactgcggagcacatactcacaaaccagtgagctgtgtgtcgtaacgggcaactctgcagcggaaccgactactttgggagaccgtgtttccttttatctttatattggctgcttatggtgacaatcagagaattgttgccatatagctattggattggccatccggtgtctaatagagctattatatacctgtttgttggattcactccgctgacacataaatcccttaatactttgtgttatatcttgaacttaaacacacgaaa

SEQ ID NO: 1221 - DNA, 758 bp, Enterovirus B
tacaaaaaagcaggctttaaaacagctctggggttgttcccacccacagggcccactgggcgctagcactctggtatcacggtacctttgtgcgcctgtttttccacccctccccatacgcaacttagaagagagactcaaccggtcaatagacagcctagtacaccaactaggttctgaccaagaacttctgtttccccggaccgagtatcaataggctgcttacgcggctgaaggagaaaacgttcgttacccggccaattacttcgagaaacctagtatcaccatggaagttgcgcagtgtttcgctccgcacaaccccagtgtagatcaggtcgatgagtcaccgcattccccacaggcgactgtggcggtggctgcgttggcggcctgcccgtggggcaacccacgggacgcttcaataccgacatggtgcgaagagtctattgagctaattggtagtcctccggcccctgaatgcggctaatcctaactgtggagcagatacccacgcgccagtgggcagtctgtcgtaatgggcaactccgcagcggaaccgactactttgggtgtccgtgtttccttttatcctcataatggctgcttatggtgacaattgaaagattgttgccatatagctattggattggccatccggtgactaacagagcaattatttacttgtttgttgggtttgtaccattgaactacaaggtccttaatactctaaactacattataagtctcaatacagtgca

SEQ ID NO: 1222 - DNA, 759 bp, Unknown
  Description of Unknown: unclassified Cosavirus sequence
acatgggggagactgcatgtggcagtcttgaaacgtgtggtttgacgtctaccttatatggcagtgggtggagtactgcaaagatgtcaccgtgctttacacggtttttgaaccccacaccggctgtttgacgctcgtagggcagcaggtttattttcattaaaattcttactttctagctgcatgagttctattcatgcagacggagtgatactcccgttccttcttggacaggttgcctccacgccctttgtggatcttaaggtgaccaagtcactggtgttggaggtgaagatagagagtcctcttgggaatgtcatgtggctgtgccaggggttgtagcgatgccattcgtgtgtgcggatttcctctcgtggtgacacgagcctcacaggccaaaagccccgtccgaaaggacccgaatggtggagtgaccctgactcccccctgcatagttttgtgattaggaacttgaggaatttctgtcataaatctctatcacatcaggccccaaagatgtcctgaaggtaccctgtgtatctgaggatgagcaccaccgactacccggacttgcattagcagacacatgtggttgcccagccccacctcttcagaggtggggctttgctcactcagcacaggatctgatcaggagccccgctcgtgtgctttacactcgacgcggggttaaaaattgcccaaggcctggcacaacaacctaggggactaggttttcctatttttgtaaattatgtcaat

SEQ ID NO: 1223 - DNA, 759 bp, Enterovirus A
attggctcgagttacttaaaacagcctgtgggttgtacccacccacagggcccactgggcgctagcacactggttctgcgggacctttgtgcgcctgttttataacccttccctaagcagtaacttagaagctttgtacaatcatggccaatagtgggcgtggcgcgccagtcacgtcttggtcaagcacttctgtatccccggactgagtatcaatagactgctcacgtggttgaaggagaaaacgtccgttacccggctaactacttcgagaaacctagtagcaccatgaaagttgcggagtgtttcgttcagcacttcccccgtgtagatcaggtcgatgagtcactgtaaaccccacgggcgaccgtgacagtggctgcgttggcggcctgcccatggggtaacccatgggacgctctaatacagacatggtgcgaagagtctattgagctagttagcagtcctccggcccctgaatgcggctaatcctaactgcggagcgcgcaccctcaacccagggggcggcgcgtcgtaatgggcaactctgcagcggaaccgactactttgggtgtccgtgtttccttttattctttattggctgcttatggtgacaattgaaaagttgttaccatatagctattggattggccatccggtgtctaacagagctattgtttacctattcattggattcgtccctcttaatctcaaggtcattcaaactctcgattgcatattgctccttaactgtaagaa

SEQ ID NO: 1224 - DNA, 761 bp, Gallivirus A
tccctacccaagccccagtacaccactatggagttctttatatcccagcgcgtggtggacgcactgtgaggtattccgataccaccccactcgcacttcctggatagtgcgttagatatgcccgacatatcgcttccaggaccaaagccccccttttctctttcccaaccagcttcgccactcaagctgtaattccatgtccggtctttccggccttagtatcatggaaatgtggtcgtgctcaaatgaaattgagttgacattgatcaatgaaagttgcactgaactttgctaaactggctagcgccacctggtgtgtgccgttggtctcctcacatggtaacatgtgccaacgggcccgaaaggctagtgggcaattaccgctccaagggaggggtacccaccccgacctgaacagcggtaatgaagctcacctcccaggctctgaccccgagaagtttagttatttagtaggtgtaattagtacttgtgattggtcaatttgatagtagtttgaaacgttatggatgaatgagtagaccccctgaaggtaccccattacatgggatctgatcagggccacattctgcgtgtctccccgcacttgtggttaaaaccatgaaagttcatcccaaacaatcttttcctcttctttttcttttagtggtgacaacctactggattggtgattaccaatctgtactagtgttgtattaagacttgttgtgtggagaaaatggactctttcaagaagatttttg

SEQ ID NO: 1225 - DNA, 762 bp, Parechovirus B
ttgaaaggggggccctgtggccaattttggccacagggttcccctggtggggtgggtacacttctcgctcgatgagtgggggtgtggctcattgcccacacctggttggttcccaggttcatacaataaccatcaataaacttttaacatctaagatagtattatcccatactagactggacgaagccgcttggaataagtctagtcttatcttgtatgtgtcctgcactgaacttgtttctgtctctggagtgctttacacttcagtaggggctgtacccgggcggtcccactcttcacaggaatctgcacaggtggctttcacctctggacagtgcattccacacccgctccacggtagaagatgatgtgtgtctttgcttgtgaaaagcttgtgaaaatcgtgtgtaggcgtagcggctacttgagtgccagcggattacccctagtggtaacactagcctctgggcccaaaaggcatgtcatttgaccactcaggtacacaaccccagtgatgcacacgcttagtaatggcttagtaacaaacattgattgatcatttgaaagctgttaggaggtttaggtatgacgggctgaaggatgccctgaaggtacccataggtaaccttaagcgactatggatctgatcaggggcccaccatgtaacacatgggtagaagtcttcggaccttgggttaaaaaacgtctaggcccgccccccacagggatgtggggtttcccttataaccccaatattgtata

SEQ ID NO: 1226 - DNA, 762 bp, Enterovirus A
tacaaaaaagcaggctttaaaacagcctgtgggttgttcccacccacagggcccactgggcgctagcacactgattctgcgggatctttgtgcgcctgttttataacccctcccctaagcagtaacttagaagcttcacactattacgaccaatagtaggcgtggcgcgccagtcacgttttggtcaagcacttctgtctccccggactgagtatcaatagactgctcacgcggttgaaggagaaaacgttcgttatccggctaactacttcgagaaacctagtagcaccgtgaaagttgcggagtgtttcgctcagcacttcccccgtgtagatcaggtcgatgagtcactgtgaaccccacgggtgaccgtgacagtggctgcgttggcggcctgcccatggggtgacccatgggacgctctaatacagacacggtgtgaagagtctattgagctagttagtagtcctccggcccctgaatgcggctaatcctaactgcggagcgcgcaccctcaatccagggggccagcgcgtcgtaatgggtaactctgcagcggaaccgactactttgggtgtccgtgtttccttttattccttattggctgcttatggtgacaattgaaaagttgttaccatatagctattggattggccatccggtgaccaacagagctattgtttacctgtttattggatacgtccctctcaatctcaaagccattcaaactcttgattacatattacttcttaactgtaagaa

SEQ ID NO: 1227 - DNA, 766 bp, Aichivirus A
tttcacaccctcttttccggtggtccggacccagaccaccgttactccattcagctacttcggtacctgttcggaggaattaaacgggcaccctacccaagggttacatgggaccatattcctcctcccctgtaactttaagttttgtgcccgtattcttgactccaggcggatgttgtgtcgcccgtcctgtgaacaaacagctagacactttcctcccctccctctgggctgctccggcagtccactccctccccccagcgtaacatgccccgctggagtgatgcacctggaagtcgtggacgtgggttagtaacttcggtgaaaacccactataatgacaactggttgacccccacactcaaaggactcgagtctttctcccttaaggctagcccggccacatgaatttgcagctggcaactagtgagtccaccatgtcccgcaacctcggctgcggagtgctgttccccaagcgtatgccttccttctgtaagagtgcgcctggcaagcacatctgagaagtcgttccgctgcgtcgtgccaacctggcgacaggtgacccagtgtgcgtagacttcttccggattcgtccggctcttctctaggaaacatgcgtgtaaggttcatgtgccaaagccctgcgcgcggtgttcttctactgccctaggaatgtgccgcaggtacccctacttcggtagggatctgagcggtagctaattgtctacgggtagtttcatttccatcttctcttcaggtcgacatc

SEQ ID NO: 1228 - DNA, 768 bp, Unknown
  Description of Unknown: unclassified environmental samples sequence
tatttgtttatttatcacaataagcattacatgagtttgtttaataacatactctgcaaatttattgtaggtgtttagagattaaaccaatctcttttcatttacaaaaccaataagtttgtaaaatagtaaaatttttagccattctgattcaggaatcaaaactgatgtaccactatctgtattttgtgaaaaatcaaaacgacagtagactagaaattactttgtatctaggaatctgtgtctaacgacgatagttaggaacgtgttgcacatttcatgtgcaggcctttatcactaggtctttattaaaaaagtggttgcaagttgtaattgacaacatgtgtttagttaagtttacttctattcatgattatcagggatctccttatcccgctattattagcaaaaggagccttgcaggttataccgacctgcatatgaagcctctacattaatttgtaatttttgtaggaaactgagagggaaagtggcataaccctcgtcctcgcggcgtataatgattcttcggaagaatacgacgtaacccagccgtcacaggtgcccattctctgggattgcatgcttgcatgtcgttctaggatttttcaggaacatttttgagctatagtagtttagatacgctatttgcaatgatgaaactacctagggtgggattatgagaaattcaactttgatctatttttcacaataggttgaggttggattttctcgtatttgggtttggggggtatactatttcaaatc

SEQ ID NO: 1229 - DNA, 769 bp, Unknown
  Description of Unknown: unclassified Gallivirus sequence
ttgaccccggtatttctccgtctaaattagacggttcttttatatcccagtgcctgaagctggcactgtgaggttagtctactaaccaaggcttccgtgcagggcttgcacgttaggagttcatgttgattcatgctccaatgcccaaaactttgtgtgtttgtctgtgtctttcccaaagttcttcctaaggtttcggtactcaagccttaatctctggtcccagcttttgggccttagtatccagagaatgtacccgtgcttcgatgaacgtaagaaagctgtcttttaccgaaaaattttaatgaaataagtataactggctcgcgccacctggtgtgtgccgttggaattcccccatggtaacatggtccaacgggcccgaaaggctagtgggcaatcggtcctccaaggaaggggttcccaccccgacctgaacaggattcgatgaagctcacctcccaggctcctaaccccaaggaagtttacttaaagtaattaagatctagtacgtaattgctggcaattttgctagtagttgggaacgttatgacctaatgagtagacccccagaaggtaccccattttatgggatctgatctgggccctatactgtgtgtctccccacatatagggttaaaacaatgaaagttaggtccaaaatattcttttctttttattctttctttagtggtgacgccattatatcagcaatttgctgatgttttatagcgtacgcggcgatacgaacgattcatcactagagaaa

SEQ ID NO: 1230 - DNA, 770 bp, Aichivirus B
cacccacttttccggcggcgcacgttcgcgtcgtcgtaagtctggactcccaaggccaactcggttcaacttcggtttccggacaaatacaagaacctcagtcctcttggtactttctcgcctgagtcaacaaagcgagaaacctgcccctctaacgccagacgagcggcatgaaacttgaacttctggcatgttccactttccctctccctcaccccaccccaccgcgctctcaaggtcgcgctcttccgggactagcccggttttaaaagttcctggcaccctttgcccctctaggcccttaaggtaggaactgaccttgtgctgtgatctcggtgcggaagtgctactgcgtagtgattgtaagatccctttgtggttctgccctggcaaggctacagagtactgtgatccgctgcggacgccatcctggtaacaggacccccagtgtgcgcaacagtatgtccacggtcttccgtgttcaccacattcggaacactgctctcgtgaaacagtgtgtgtccaatccctgtgaccagtattaaccacaccacctaggaatgctaggaaggtaccccggttcgccgggatctgatcctaggctaattgtctacagtggtgctccttttattttcccctcacttcattgactacaactgcttgatttccgtgtttgctgctcttcttagctctcactgccattctcaagtgttcacactgtccaagctcctttggttgtttgcctccacttgccactgtcaactcttgtc

SEQ ID NO: 1231 - DNA, 770 bp, Unknown
  Description of Unknown: Coxsackievirus A10 strain 15-2711-1, complete genome.1 sequence
cacgtgagtgttgctcttacgtgtgctattccattctgtgggttgttcccacccacagggcccactgggcgccagcactctgattccacggaatctttgtgcgcctgttttataacccttccccaacttgtaacgtagaagtaatacacactacagatcaatagtaggcatggcgcgccagtcatgtctcgatcaagcacttctgtttccccgggctgagtatcaatagactgctcacgcggttgaaggagaaaacgtccgttacccggctaactacttcgagaaacctagtagcaccatagaagctgcagagtgtttcgctcagcacttcccccgtgtagatcaggctgatgagtcactgcaacccccacgggcgaccgtggcagtggctgcgctggcggcctgcctatggggcaacccataggacgctctaatgtggacatggtgcgaagagtctattgagctagttagtagtcctccggcccctgaatgcggctaatcctaactgcggagcacatgcctccaatccaggaggtggtgtgtcgtaacgggtaactctgcagcggaaccgactactttgggtgtccgtgtttctttttatctttatattggctgcttatggtgacaatcacggaattgttgccatatagctattggattggccatccggtgtctaatagagctattgtgtacctatttgttggatttactccactgtcatataaatctttgaacactttgtgctttatattgaacttaaacacacgaaa

SEQ ID NO: 1232 - DNA, 773 bp, Unknown
  Description of Unknown: unclassified Sapelovirus sequence
gtggggtacatgcgttttaaggaacgcatgtatctcacactcatttctccccctcgcccccacaggcaacccccaccccttctcttacgggagttagggttaaggatctagtggtcaggcgttgtatcctcttacctttacccaccccacccacacggactggttaatggttttagactgaggttgtggatctgatttcaaatctgttacccattcagaggaaaaatggagtcatacattctggatttgacttgatatgaccaagagttaacaccttgcgtgttggccgtatggaatgttttaaggctactctatggattatgatttcagggttggccgcccaggataaaaggcaattgtggtaagtgatgttagtcattggtagttgaaagctgcccaagacatccgaggtctacgctttgcgggccggagtaagcttgggaacaacagtgagtatgctattttttgctttcacccaacacgaccgtgcatgaaagagctagaggcatctggaggcaaagggaaaagaatttcttatcccgaatgttcattcgagtccttgacgagtgcatccctactgtcccgtaggtgaggtgtatggcgcatgctcatggcattactccaaggtgtatctgtgaggggggggcccctcacacttagtctagtgctacctgacagggttgcggctggtcatttatgcatggtataaccagtagtaatcccccatggattgctttaactccccctccccccttacaaagacattctctaag

SEQ ID NO: 1233 - DNA, 773 bp, Unknown
  Description of Unknown: unclassified Enterovirus sequence
ggcgtcagtacactggtacgtcagtacctttgtacgcctgtttttccctcccttaaataaattaagatcaccactactgaggggagtagtccgactccgctccggtaccgccgcaccagtattccggtacgcctagtaccctaatacggagtagatggtgtccctcacccgaaacttagaagaaagtaaactacccgaccaataggagcgcggcatccagtcgcgtatcggtcaagcacttctgtttccccggtctgcatagatcgttacccgcccgacccactgcgagaagcctagtagctggccaagcgaatgcgaggttgcgctcaaccacaaccccagtggtagctctggaagatggggctcgcaaactcccccgtggtaacacggttgcttgcccgcgcgtgcttccgggttcggtctcacgccgttcacctcaacctcgcgtaaccagtcaagagcttattgcgctggggcggttctcctccggggccgtgaatgctgctaatcctaacctctgagcgtgtgcgcacaaaccagtgttgctacgtcgtaatgcgcaagttggaggcggaacagactactttcggtaccccgtgtttcctttaattttatatttcaatttatggtgacattgactgacatttgccaagttgctcggttacctctgaacattgctttgtattatctgatagctttctacaaaaccacccagctttcacttgaactcattgagtttgtagtttatttgaaccaagcacacaaattctacg

SEQ ID NO: 1234 - DNA, 774 bp, Unknown
  Description of Unknown: unclassified Enterovirus sequence
tattttccaggtggaatggggatgcaggcctgagttgtttttgcccccaaggaataaatcaatattcccagagccgaggggagtagtccgactccgctccactacggtgctccagtagattgctattgcggtagctctctacggggtggctggtattcctcaccctgaaacttagaagtttgtacacaccgaccaatagcggtctggcagccagccaggcaacggtcaagcacttctgtttccccggtccgcaaggatcgttacccgcccgaattgctacgaaaagcctagtaagtacccaagtttgtgcgaggttgcgttcagccacaatcccagtggtagctctgagtgatggggctcgtgattacccctctggtgacagagacacttgcccgcgcgtgcacttgggttcaccagaaatggtgttcacctcaatcaagcgcaagtactgaagagccaattgtgccaatttggtctcctccggggccgtgaatgctgctaatcctaacctccgagcgtgtgcgcacaatccagtgttgctacgtcgtaacgcgtaagttggaggcggaacagactactttcggtaccccgtgtttccttattttattcatttaaatttatggtgacaattgttgagatttgtgagctagcaaaattaccattgaatttggcattgtactgtctcattgcttttcacaaaacctcagatatcccacccagttacattgatcttttagttcatttgaatttacagttcaaactgagacaagtaaa

SEQ ID NO: 1235 - DNA, 775 bp, Unknown
  Description of Unknown: unclassified Hepatovirus sequence
ttgaaaggtggccggagggtttcttgaagccctccgacgcctttcagcgcccggttcacaggggtgtaagtactgtgggcccgtttgccgtgggatacggctgcctgtgtctcaggggtaagtactggggccgtgttaaccgtgcgttacggttttgcttttagattaggatgtccgactgtccggcactctcttttgcttaaaatggccttaaatccatgggaggcgtaaccatgggccctttgttacctagacatgattgcattgggggccgtccttggggcttcggccccagccaatttcccttgactcgtctaagagtttgtttcatccttttcttttcttttattttccaggctctcggcatgccaacggctctgaccactgcgcccggtggggttaaccacacgactagcgtgtggctgtaggagttaaaagtgccgacaggccaattctgacgtaagttcattctatgttaacttgaccacgtaaggttgactgatctttgtgagagggtaggctacgggtgaaaccctctaggttaatactcatattgagagatacctccagaaggtgaaggttggcggatattggtgagttcttttaggacaaaaacctttcaacgcctgtgggcccacctcactggcacaatgctttcatccccaattgtgatgggtagtttggactgaaatcaggagtaacctgccctacgagtttaggggtagttcaggggtatttaggcttccacatttgatagagtttatgagagtgagcc

SEQ ID NO: 1236 - DNA, 775 bp, Unknown
  Description of Unknown: Coxsackievirus A4 isolate 06/Taian/SD/2017, complete genome.1 sequence
tttcaaaagaatattaggaggggggggttttaaaacagcctgtgggttgtacccactcacagggcccactgggtgctagcactctgattctgcggaacctttgtgcgcctgttttaaaacccccccctcaattcgtgatttagaagtaatgcacaccattgatcaacagcaagcgtggcgcaccagccatgttcagatcaaacacttctgtttccccgggctgagtatcaatagactgctcgcgcggttgaaggagaaaacgctcgttacccggctaactacttcgagaaacctagtagcaccattgaaactacagagtgtttcgctcagcactttccccgtgtagatcaggtcgatgagtcactgcaatccccacgggcgaccgtggcagtggctgcgttggcggcctgcctatgggcttgcccataggacgctctaaagtggacatggtgtgaagagtctattgagctagttagtagtcctccggcccctgaatgcggctaatcctaactgcggagcgcatgccctcaatccagggggtggtgcgtcgtaacgggcaactctgcagcggaaccgactactttgggtgaccgtgtttccttttattcttatattggctgcttatggtgacaattgagagattgttaccatatagctattggattggccatccagtgtctaacagagcaatcgtatacttatttgttggattcatcccactatcatacatatccattaacaccttatactatattataagattgaacacaagaaa

SEQ ID NO: 1237 - DNA, 776 bp, Cadicivirus B
agaaaaggccccccggggggataccgtctatggtatctctacgaggtcttttcgaacactccacatcatgagtgtataataaactgatgacctttaaatttcaccaacccttgacctgtaatgtcagtggacagagtgctcctctgttcccggttaccgtgttccaggacacgattgtaatcctgcgcctcaccagcgctgcgtgcacgtctgcataaggaaacgtgccttccccatgtctctatcaattctttggtgagtgaccgccctagttgctcatcctatgggattcttctctcatgggttctttgtggcatgcgaatgtcaccttaattggaggtctttaattagatatcctttcttcatctttgatatgagtgtcggaatttgattcctagtctctgcaaaacaaccccacttgatgaattcaacttttcaaccgcacaaacataatcaggtttttaaattgaatgtttctaaattctaaatttagtttatttaagtagtttgccatcttgactcgatgtaaaattgtcatacaagtcttcttttcttttctttacactttgaagtttgcacttagcagtcgttctgcacagctttcgagttttgtttgatcgacatcgcaacttccacccacctctctttttctagtgttgaatgcggctaatcctaacccgagagcaataaacccaggtttattgtcgtaacgcgcaagtcttggacggaaccgactatacacacacctctttaccctttagtacacccttggtacg

SEQ ID NO: 1238 - DNA, 776 bp, Unknown
  Description of Unknown: unclassified Picornaviridae sequence
tgaaatggcctgggggtagcatgtacgctaaggcgtgcatgttactcccagaccatttctccccaccccctcaccttgccttttccccctcatttaatttttgtcgtaagtggcatcgacaaccacacaatttaaggagaggggcagccgtggaaactaaaagaccctaattggtatcttaatgtgctaaagccttgttctgaagaggggttccccaggccccatagtaggatcttggtgttccacattaagctctaccgaccacacatccaaacgataggcggtgtaagggctctctagctaagtgtttactcattgctagggaagtgttgcgacccgttatcaatagggatacaggaggtcttagttgcctaaccagataaagtggtgctgaaatattgcaagctcaatgtctggcgaacgacggactaccgttgaactgttgttaacgcccatatgtgtaggcaacatatgggttagtaggtcacttacattgacatccgtgccgggaaagcggatctgagctatcgattgcctgatagggtgccggcgggcgcggtacgtgtggtatagtccgctgttttggggtatggcgtctactcggttttgttgtcgtttcggaatgtcccatgtcggagatgtcgttaccggtgtttgttttacttgtgcacggataaggaagcaaagtttggagttctggaagctaatggataacattaagtttccgttgcgttcttcgtgcattttgggccagaaaatcgaccacaaaatcgaga

SEQ ID NO: 1239 - DNA, 779 bp, Unknown
  Description of Unknown: unclassified environmental samples sequence
aataaggtatgctgtttatttattaaacagtgtatcttattttgccctcatcgagagttggaggttaactaacatcctttgccacatggagtctctgtggttggttccctggccatgtatttttacaaaacagatgtgccctttgcagcttatgcaattttcggttgtttccccttttgttcgcaagattgtctcttcatttgagattttgacgttttcactcgtagtactatatgagagtgatttattacattttattttgttagcaagattggtttagttccgtcttttcttagcggagttgcacacttttctttattgctaattgcattcaccctttactggtttttcctactagttcagatcattgcaatttgttaatttccttgtctgtttggcgacccccttagtagagaggttatgatgcatcaagtgaattatgaaacagggtgtctatttaagcatttgttcttaattacgttttctttgaaaaccatttcggtggtttggcttgaattggtccctagtcacgtagttggaatgtattaagtttatttatagtcccagtgttcacggtgtttttgatcctttttgaacgggattgtacccgttcagataattcagaatttagcaaagggatttgtaatttgttccctttattggttttacaccgagacaactaccggtgacctggacatcgacaacacatcctaggggaatggcatcaccttacgagccaccacaactaaaacacaaatatacattacaatttaattatt

SEQ ID NO: 1240 - DNA, 787 bp, Enterovirus A
gtcaacacggtgttgtcggtattgtgtctaccggtggtaatgggcttgttggcttcgcagtgttcccacccacagggcccactgggcgccagcactctgattccacggaatctttgtgtgcctgttttacaaccctttcctaatttgtaacgtagaagcaatatacactactgatcaatagcaggcatggcgcgccagtcatgtctcgatcaagcacttctgtttccccggactgagtatcaatagactgctcacgcggttgaaggagaaaacgttcgttatccggctaactacttcgagaaacctagtagcaccatagaagctgcagagtgtttcgctcagcacttcccccgtgtagatcaggctgatgagtcactgcaatccccacgggcgaccgtggcagtggctgcgctggcggcctgcctatggggcaacccataggacgctctaatgtggacatggtgcgaagagtctattgagctagttagtagtcctccggcccctgaatgcggctaatcttaactgcggagcacatgccttcaacccaggaggtggtgtgtcgtaacgggcaactctgcagcggaaccgactactttgggtgtccgtgtttctctttatccttatattggctgcttatggtgacaattacggaattgttaccatatagctattggattggccatccggtgtctaatagagctattgtgtacctatttgttggatttactccgctatcatataaatctctgaacactttgtgctttatattgaacttaaacacacgaaa

SEQ ID NO: 1241 - DNA, 797 bp, Unknown
  Description of Unknown: Kobuvirus sheep/TB3/HUN/2009, complete genome.1 sequence
tttgaaaagggggtgggggggcttcggccccctcaccctcttttccggcggcgcaagttcgcgtcgtcgtaagcctggacacccatgttcgcatcggtctccgggcaaatacaagaaccccagaccttctggtacttcttcgcctgggtcacaaaagcgaagaacctgcctctctaacgccagacgagcggcattaaacttgaacttctggcactctccactctcccttttccctgtccctttccccactgcgctctcaaggtcgcgcaatcctgggactagcccagttttaaaagttcctggcaccctttgcccctctaggcccttaaggtaggaactgaccttgtgctgtgatctcggtgcgggagtgctaccacgtagtcatcgtaagcctcgtttctggttctgccctggcaaggctacagagtaccgtgttccgctgtggatgccatccgggtaaccggacccccagtgtgtgtagcggtatgttcacggtccgccgtgttcaccagattcctgacctggctttgctagaaatggtgtgtgcccaatccctgtgaccagtatcaattacatcacctaggaatgctaggaaggtaccccagtcctgagctgggatctgatcctaggctaattgtctacggtgatgctccttttattttcttacaactgctattgactgtctgattgctgattctgctcttgtgctcttctgctctggctcattctcaagggttctctttgtccaagatcctttggttctctccttgttccacttgccactgccaacgcttgtc

SEQ ID NO: 1242 - DNA, 798 bp, Unknown
  Description of Unknown: unclassified Enterovirus sequence
gggttgttcccaccccagggcccactgggcgccagtacactggtacgctagtaccttggtattacggtaccattgtacgccagtacctttgtacgcctgttttatattccctacccccacatgtaactttagaagtttaagtaacaaagaccaataggagtccaacatccagttggattgcggtcaagcacttctgtttccccggacctagtagtgataggctgtacccacggccgaagatgaacccgtccgttatccggccagctacttcgagaagcctagtagcatcaaagatctgtcttggcgtttcgctcagcgcgttccccccgcgtagatcgggctgatgggtctccgcattccccacgggcgaccgtggcggaggccgcgtggcggcccgcctatggcgaaagccataggacgccatttcagtgacagggtgtgaagagcctattgagctagttggtagtcctccggcccctgaatgcggctaatcctaaccactgagcgtccaccagcaaaccagctgggagggcgtcgtaacgggtaactcggtggcggaaccgactactttgggtgtccgtgtttccttttgatcctattgtggctgcttatggtgacaacttacagttgttatcataaagcttttggattggccatccggaaaaagttatcagtgtttgatattgttcggctttcacgcctaccaataagacaatcactttacttgttagttgcattttatcccactaaggatatcactgagttacatcttcaattgctcctaacattatcagcaca

SEQ ID NO: 1243 - DNA, 798 bp, Unknown
  Description of Unknown: unclassified Enterovirus sequence
gggttgttcccacccgcggggcccactgggcgctagtacactggtacgccagtaccttggtattacggtaccattgtacgtcagtacctttgtacgcctgttttatatcccttcccccacatgtaacattagaagtcaagtaaacaaagaccaataggagcccaacaaccagttgggttgcggtcaagcacttctgtctccccggacctagtagtgataggctgtacccacggccgaagatgaacccgtccgttatccggccagctacttcgagaagcctagtaacatcaaagatctgtcttggcgtttcgctcagcgcgttccccccgcgtagatcgggctgatgggtctccgcataccccacgggcgaccgtggcggaggccgcgtggcggcccgcctatggcgaaagccataggacgccatttcagtgacagggtgtgaagagcctattgagctagttggtagtcctccggcccctgaatgcggctaatcctaaccacggagcatccaccagcaaaccagctgggagggtgtcgtaacgggtaactctgtggcggaaccgactactttgggtgtccgtgtttccttttgatcctattttggctgcttatggtgacaacgataagttgttatcataaagcttttgggttggccacctggaaaaaattgtcagtgtttgatatcgctcggctttcacgcctaccagtcaaacaagctctttatctccttgttggattctactcaataaaggacataactcagtttcacataaatctgttgctttcattgtcagcaaa

SEQ ID NO: 1244 - DNA, 800 bp, Unknown
  Description of Unknown: unclassified Enterovirus sequence
ggggttgtacccacccctggggcccacgtggcgccagtaccctggtacgttagtacctttgtacgcctgttttccccccccttaaacaaattaagatcgctggtcctgtggggagtagtccgactccgcaccgatacgtcgcaccagcactccggtacgcctagtaccctagtgcggaggtaccagtgtccccccccctcgaaacttagaagcaatgaaccaaaccgacccaaaaggatgcgttgcacccagcagcgtaatggtcaagcacttctgtttccccggccgcaaggtcgttatccgcccgcaccactacgagaagcctattaggcagccaagcttgcaaagcgttgcgttcagccacaaccccagtggtagctctgagagatgggactcgttgttcccccatggtaacatggtgacttgtccgcgtgtgctctcgggttcgccatcaggcgttcacgctgcacaagtgtaactgctgaagagcctattgtgctggagcggttttcctccggaaccgtgaatgctgctaatcctaacctctgagcgtgtgcgcacaaaccagtgttgctacgtcgtaacgcgtaagtcggaggcggaacagactactttcggtactccgtgtttccttattttatatcgtttcatttatggtaacaattactgagattttaaagattgccaagctgcccttaaacattggtttgtattatctagttgcattttataaaacctctgagctttcacttgaattgattgatttcttagtctttctaaacaagcataaattgaggaca

SEQ ID NO: 1245 - DNA, 801 bp, Unknown
  Description of Unknown: unclassified Enterovirus sequence
cctgtgggttgtacccacccacagggcccaccgggcgccagtacactggtacgccagtaccatggtattacggtaccatgttacgtcagtacctttgtacgcctgttttatatcccctccccgaagtaaccttagaagtttaagtaacaaagaccaataggagtccagcaaccagctggattgcggtcaagcacttctgtttccccggacctagtagtgataggctgtacccacggccgaagatgaacccgtccgttatccggccagctacttcgagaagcctagtagcatcaaagatctgtcttggcgtttcgctcagcgcgtttcccccgcgtagatcgggctgatgggtctccgcataccccacgggcgaccgtggcggaggccgcgtggcggcccgcctatggcgaaagccataggacgccatttcagtgacagggtgtgaagagcctattgagctagttggtagtcctccggcccctgaatgcggctaatcctaaccacggagcgtccaccagcaaaccagctggcggggcgtcgtaacgggtaactctgtggcggaaccgactactttgggtgtccgtgtttccttttgatcctattttggctgcttatggtgacaacaataagttgttatcataaagcttttgggttggccacctggaaaaagttatcagtgtttgatattgttcggctttcacgcctaccaacaaaacaagccttatatttattggttgccttttgtcccttggcggaaattactgattttcacctaaagcttctgattacattgacggcaaa

SEQ ID NO: 1246 - DNA, 803 bp, Unknown
  Description of Unknown: unclassified Kobuvirus sequence
ttgaaaagggtgtggggggggataccctccccctccacactcttttcgacggcgcgcctcggcaaggccgccgataccgcactgtgctacttcggtaccactctgcgggaatgacaatatgcccggtgtatagtttgcctgtttctcgcaccgttaccgctcgttcgggaatgtgaaactggcacccctcctctcccctaccaccctttctccttcgcccccattcataatttacaacgccgcacacagcggcggccgccaagggctagcctggcggttataaaaggaacctgggtctttccctcttcaagccaaaaggtaggttccctgtgtccctgaatgctcggtgaggaatgctgcaccgtaacgctttgtgaagtgtttgcaagttctggcccggcaagcctacagagtgctgtgatccgctgcggacgccatcctggtaacaggacccccagtgtgcgcaacagtatgttcagacttcggtttgttcacttgctttcatggaccattgcgcgaaagtgcgtgcgccatatccctgtacttcaggtgtgcttctctggaccctaggaatgctgcgaaggtaccccgtttcggcgggatctgatcgcaggctaattgtctatgggttcagtttcctttttctttactccacaattgactgcttaactgactctggatcttgtgcttccactgctctttctgctctcaaaacggcttcacttaccaactctcacctttcgaccaacaccatttacacactaacttttttcgactcttctgactcctggcttggtgaagac

SEQ ID NO: 1247 - DNA, 804 bp, Unknown
  Description of Unknown: unclassified Enterovirus sequence
ctgtgggttgttcccacccacagggcccactgggcgctagtacactggtatgcctaacctcggtattacggtaccgttgtttacagtacctttgtacgcctgttttatatcccctccccacaagcaactttagaagtatcaagcaaataaggaccaataggagtccaacacccagttggatcatggtcaagcacttctgtctccccggacctagtagtgataggctgtacccacggccgaagatgaaaccgtccgttatccggccagctacttcgagaagcctagtagcatcaaagatctgtcttggcgtttcgctcagcgcgttttcccccgcgtagatcgggctgatgggtctccgcataccccacgggcgaccgtggcggaggccgcgtggcggcccgcctatggcgaaagccataggacgccatttcagtgacagggtgtgaagagcctattgagctagttggtagtcctccggcccctgaatgcggctaatcctaaccacggagcgtttaccagcaaaccagctggcggaacgtcgtaacgggtaactctgtggcggaaccgactactttgggtgtccgtgtttccttttgatcctattgtggctgcttatggtgacaacttacggttgttatcataaagcttttggattggccatccggaaagagttatcagtgtttgatattgttcggctttcacgcctaccattaagacaatcactttatttgttagttgcattttatcctgccaaggacattactgagtttcacctacaactttactcatacaattacatcaagt

SEQ ID NO: 1248 - DNA, 808 bp, Unknown
  Description of Unknown: unclassified Kobuvirus sequence
tttgaaaagggggtgggggggcttcggccccctcaccctcttttccggcggcgcatgttcgcgtcgtcgtaagtctggattcccaaggcccactcggttcaacttcggtttccggacaaatacaaagaacctcagtcctcttggtactttctcgcctgagtctacaaagcgagaaacctgcccctctaacgccagacgagcggcataaaactcgaacttctggcacgttccaccaccccttctcctatcccaacccccattgcgctctcaaggtcgcgcttttccgagactagctcggattcaaaaagttcctggcaccctttaccccttcaggcccttaaggtaggaactgaccttgtgctgtgatctcggtgcggaagtgctactgcgtagtgattgtaagatccttttgtggttctgccctggcaaggctacagagtgctgtgatccgctgcggatgccatcctggtaacaggacccccagtgtgcgcaacagtatgttcacggtcttccgtgttcaccacattcggaacactgctttcgtgaaacagtgtgtgtccaatccctgtgatcagtatcaaccacaccacctaggaatgctaggaaggtaccccggttcgccgggatctgatcctaggctaattgtctacggtggtgctcctttttattttccacttcaactcactggttacaactgcttgatttctgtgtttgctgcttttctctgctctcactgccattctcaagtgttcacactgtccaagctcctttggttgttcgcttccacttgccactgtcaactcttgtc

SEQ ID NO: 1249 - DNA, 809 bp, Enterovirus G
ttaaaacagcctgtgggttgttcccacccacagggcccactgggcgctagtacactggtatgccttacctcggtattacggtaccgatgtatatagtacctttgtacgcctgttttatatccctcccccacatgtaaccttagaagtttacacaaacaaagaccaataggagtccaacacccagttggattgcggtcaagcacttctgtttccccggacctagtagtgataggctgtacccacggccgaagatgaacccgtccgttatccggctacctacttcgggaagcctagtaacattctgaagtctctgaggcgtttcgctcagcacgaccccggtgtagatcgggctgatgggtctccgcataccccacgggcgaccgtggcggaggccgcgttggcggcccgcctatggcgaaagccataggacgcctcttagatgacagggtgtgaagagcctactgagctgggtagtagtcctccggcccctgaatgcggctaatcctaaccacggagcgtccaccagcaatccagctggcagggcgtcgtaacgggcaactctgtggcggaaccgactactttgggtgtccgtgtttccttttgatcctattttggctgcttatggtgacaacgataagttgttatcataaagctcttgggttggccacctggaaaaagttatcagtgtttgatattgttcggctctcacgcctaccaataagacaagccctatatttacttgttgcattttactcgtcagaagaaatcacagagtatcatttggatttgttactcacattaaggacaag

SEQ ID NO: 1250 - DNA, 809 bp, Unknown
  Description of Unknown: unclassified Enterovirus sequence
gggggttgttcccacccctggggcccacgtggcgccagtactctggtacgttagtacctttgtacgcctgttttcccctcccttaaacaaattaagattaccactactgaggggagtagtccgactccgctccagcactgctgcaccagtgaattggtacgctagtacctctgcacggagtagatggtatcccccccccgaaacttagaagtttgcaacaaacccgaccaataggtgcgtggcatccagctgcgtaaaggtcaagcacttctgtttccccggtccacaaggatcgttacccgcccaacccactgcgagaagcctattaactggccaaacaactgaagagttgcgctccgccacgacccctgtggtagctctggaagatggggctcgcacttcccccgtggtaacacggttgcctgcccgcgcgtgcttccgggttcgacctagtgtcgttcactccaaagttgcgtaaccagccaagagcctattgcgctgggatggttttcctccggggccgtgaatgctgctaatcctaacctccgagcgtgtgcgcacaaaccagtgttgctacgtcgtaacgcgtaagttggaggcggaacagactactttcggtaccccgtgtttcctcttatttttatataatattttatggtgacaattgctgagatttgtgatttggccaccctaccattgaatattgctttgtattatctggttgcatttcataaagcttcagaaatacctgcttcctatatcgatctacttgtattcctcaatttaaagcacaaattagagaacataag

SEQ ID NO: 1251 - DNA, 811 bp, Enterovirus G
ttaaaacagcctgtgggttgttcccacccacagggcccactgggcgctagtacactggtatacttagcctcggtattgcggtaccggtgtatatagtacctttgtacgcctgttttatgtcccctcccccttaagtaacattagaagtttgaacaaacaaagaccaatagaggtccaacatccagttggattgcggtcaagcacttctgtctccccggacctagtagtgataggctgtacccacggccgaagatgaactcgtccgttatccggctatccacttcgggaagcctagtagcatcaaagctctgtcgaggcgtttcgctcagcacgtaaccccagtgtagatcgggctgatgggcctccgcataccccacgggtgaccgtggcggaggccgcgtggcggcccgcctatggcgaaagccatgggacgcctcttggatgacagggtgtgaagagcctactgagctgggtagtagtcctccggcccctgaatgcggctaatcctaaccacggagcgtccaccaacaaaccagttggcagggcgtcgtaacgggtaactctgtggcggaaccgactactttgggtgtccgtgtttccttttgatcctatgttggctgcttatggtgacaacgataagttgttatcataaagcttttgggttggccacctggaaaacgatatcagtgtttgacattgttcggctttcacgcctaccaacgagaaaagctctttattgctgagttgcattttatccaaaagaggtaataaccaccttccatttacaactcttactcacattatcatcaag

SEQ ID NO: 1252 - DNA, 812 bp, Unknown
  Description of Unknown: unclassified Enterovirus sequence
ttaaaacagcctgggggttgtacccacccctggggcccacgcggcgccagtactctggttcgattagaacctttgtacgcctgttttcccctcccttaaacaaattaagatctctgccaatgtggggagtagtccgactccgcaccgatacgtcgcaccagcagaccggttcgcttaggacccttctgcggattggtatgagtccctctcccgaaacttagaagtttggacaaaccgaccaataggtgcgtggcatccagccatgttacggtcaagcacctctgtttccccggtcagaaatgatcgttacccgccctacccactacgaaaagcctattaaccattgaaagtgatgaggagttgcgctcagccatgaccccgatggtagctctgagggatggagctcgcagttcccccgtggtaacacggttgcttgctcgcgtgtgcccttgggttcgaccatttggtcgttcactccaaatcatcgtaaatggccaagagccaattgtgctggggaggttttcctccggagccgtgaatgctgctaatcccaacctccgagcgtgtgcgcacaatccagtgttgctacgtcgtaacgcgtaagttggaggcggaacagactactttcggtactccgtgtttccttttattttattattatattaatggtgacactgtttgagatttgcgagattgccaaattgccactcaacattgcactctattatttggtatcattctacaatacctcagaacttacggttgagctcattgatttcctcgtctttttgaataaaaataaattaaagaca

SEQ ID NO: 1253 - DNA, 813 bp, Unknown
  Description of Unknown: unclassified Enterovirus sequence
taataacagtctatgggttgttcccacccacagggcccactgggcgtcagtacactggtatgccagtaccttggtatcacggtaccattgtacgccagtacctttgtacgcctgttttatattcccttccccatacgtaactttagaagtttaagcaaattaagaccaataggagtccaacaaccagttggattgcggtcaagcacttctgtttccccggacctagtagtgataggctgtacccacggccgaagatgaacccgtccgttatccggccagctacttcgagaagcctagtagcatcaaagatctgtcttggcgtttcgctcagcgcgttccccccgcgtagatcgggctgatgggtctccgcataccccacgggcgaccgtggcggaggccgcgtggcggcccgcctatggcgaaagccataggacgccatttcagtgacagggtgtgaagagcctattgagctagttggtagtcctccggcccctgaatgcggctaatcctaaccactgagcgtccaccaacaaaccagttgggagggcgtcgtaacgggtaactcggtggcggaaccgactactttgggtgtccgtgtttccttttgatcctattttggctgcttatggtgacaacgataagttgttatcataaagcttttgggttggccacctggaaaaagttatcagtgtttgatattgttcggctttcacgcctaccattcagactaactctttatttgcttattgcattttacccatcggaggatattacagacttccatctacaactcttattcacattatcaacaca

SEQ ID NO: 1254 - DNA, 814 bp, Unknown
  Description of Unknown: unclassified Enterovirus sequence
ttaaaacaggctgggggttgtacccacccccggggcccacgcggcgccagtactctggttcgattagaacctttgtacgcctgttttccccacccttaaataaatcaagatctctgccaatgtggggagtagtccgactccgcaccgatacgtcgcaccagcagaccggttcgcttaggacccttctgcggattggtatgagttcccacccttgtaacttagaagttctcacaaaccgaccaatagcggcgttgcatccagcagcgcaacggtcaagcacttctgtttccccggcgcgtcgcgtcgttacccgcccggtctactacgggaagcccagtatggtcccaattgattgcgcagttgcgttcggccacaaccccagtggtagctctgaggaatggggctcgcccttcccccacagtaatgtggtggcctgcccgcgcgtgtcctcgggttcactcctagagtgttcactgcaattttgagtaagatctgaagagcctactgtgctaggttggttttcctccggagccgtgaatgctgctaatcccaacctccgagcgtgtgcgcacaatccagtgttgctacgtcgtaacgcgtaagttggaggcggaacagactactttcggtactccgtgtttccttattttattcacttattttatggtgacactgactgatatttgtgagtttgctcggctgcccttgaatattgctttgtactatttaatagcatttcatagaaccactcaactttcaattgagcttattgacttcgccgtctttctcaatcagatacacaaaaccacacata

SEQ ID NO: 1255 - DNA, 814 bp, Enterovirus G
ctaaaacagcctgcgggttgtacccgcccgcagggcccactgggcgctagtactctggtacgctagtacactagcacgttagtgcttttgtacgccagtacctttgtacgcctgttttattttcccttccccacatgtaactttagaagtttagaaacaaacaatgaccaataggagtccagcatccagttggattgcggtcaagtacttctgtttccccggacctagtagtgataggctgtacccacggccgaagatgaacccgtccgttatccggctacctacttcgggaagcctagtaacattctgaagtctctgaggcgtttcgctcagcacgaccccggtgtagatcgggctgatgggtctccgcataccccacgggtgaccgtggcggaggccgcgttggcggcccgcctatggcgaaagccataggacgcctcttagatgacagggtgtgaagagcctactgagctgggtagtagtcctccggcccctgaatgcggctaatcctaaccacggagcgtccaccggcaaaccggtcgggagggcgtcgtaacgggtaactctgtggcggaaccgactactttgggtgtccgtgtttccttttgatcctattttggctgcttatggtgacaacgataagttgttatcataaagcttttgggttggccacctggaaaaagttatcagtgtttgatattgttcggctctcacgccttccaacaaaacaggccttacttcttttaattgcattttatccatcggaggttattacagatttccatctgaagcttcttctcacagtagcagtaaa

SEQ ID NO: 1256 - DNA, 814 bp, Unknown
  Description of Unknown: unclassified Enterovirus sequence
aaaccagtctgtgggttgttcccacccacggggcctactgggcgccagtggactggtacgccagtaccttggtatcacggtaccactgtacgctagtacctttacacgcctgttttataccccttccccaaacgtaacattagaagtttaacaagcaaagaccaataggagtccaacacccagttggattgcggtcaagtacttctgtctccccggacctagtagtgataggctgtacccacggccgaagatgaaaccgtccgttatccggccagctacttcgagaagcctagtagcatcaaagatctgtcttggcgtttcgctcagcgcgttttcccccgcgtagatcgggctgatgggtctccgcataccccacgggcgaccgtggcggaggccgcgtggcggcccgcctatggcgaaagccataggacgccatttcagtgacagggtgtgaagagcctattgagctagttggtagtcctccggcccctgaatgcggctaatcctaaccacggagcgtttaccagcaaaccagctggcggaacgtcgtaacgggtaactctgtggcggaaccgactactttgggtgtccgtgtttcctgttgatcctattttggctgcttatggtgacaacgataagttgttatcataaagcttttgggttggccacctggaaaaaagttatcagtgtttgatattgttcggctttcacgcctaccattaagacaatcactttatttgttagttgcattttatcctgccaaggacattactgagtttcacctacaacttttactcatacaattacatcaagt

SEQ ID NO: 1257 - DNA, 814 bp, Unknown
  Description of Unknown: unclassified Enterovirus sequence
ttcaaacagcctgggggttgtacccacccctggggcccacgtggcgctagcactctggtatgcttagtacctttgtgcgcctgttttcccctcccttaaacaaattaagattgccactactgaggggagtagtccgactccgctccggtacagccgcaccagtactccggtgcgcatagcaccctagtacggagtaggtggtatcccttcccgaaacttagaagttatgaaccaaaccgaccaataggagcgtggcatccagccatgttgtggtcaagcacttctgtttccccggtccgcaaggatcgttacccgcccgacccactacgagaagcctattaactggccaagcgattgcgaagttgcgctcagccacaatcccagtggtagctctggaagatggggctcgcactccccccgtggtaacacggttgcttgcccgcgtgtgcttccgggttcggtcaccgaccgttcacttcaatctcgcgtaaccagccaagagccgattgtgctgggacggttttcctccggggccgtgaatgctgctaatcctaacctccgagcgtgtgcgcacaaaccagtgttgctacgtcgtaacgcgtaagttggaggcggaacagactactttcggtaccccgtgtttcttttgatttattttgtattttaatggtgacactgactgacatttgtgagtttgctcgattgcctttgaatattgctctgtattatctaatagcatttcacaagactacccaactttcactcgagcttattgactttgctgtttacttgaaccgcatacacaaactcaaca

SEQ ID NO: 1258 - DNA, 815 bp, Enterovirus G
taaacagtcagggggttgtacccacctccggggcccacgtggcgtcagtgctctggtgcgttagtacctttgcacgcctgttttcccttcccttaaacaaattaagatcgccagcgccgaggggagtagtccgactccgctccactacggtgctccagtggattgctattacggtagctcttcacggggtggctggtgtccccaaccccgcaacttagaagccagcacagatcgaccaatagcggctcggcagccagtcgggcaacggtcaagcacttctgtttccccggtccgtaaggatcgttacccgcccaggatgctacgagaaacttagtaaacacccaagcttgtgagaggttgcgctcagccacaaccccagtggtagctctgagtgatggggctcgtgactacccctctggtaacagagacacttgcccgcgtgtgcactcgggttcatcagaaatggtgttcacctcgaccaagcgtaagtgttgaagagtctattgtgccagcctggtttcctccggggccgtgaatgctgctaatcctaacctccgagcgtgtgcgcacaatccagtgttgctacgtcgtaacgcgtaagttggaggcggaacagactactttcggtaccccgtgtttcctcattcattatttcaatttatggtgacaattacagagatttgtgaattggcgaaactaccactgaatttggccttgtattgtcttattgccttccacaaaacttctgatattccacccagttatatcgatctcctggtttatctaaatttacaatataaattgaaccagataca

SEQ ID NO: 1259 - DNA, 816 bp, Unknown
  Description of Unknown: unclassified Enterovirus sequence
ttaaaacagcctaggggttgttcccacccctggggcccacgcggcgctagtactctggtacgtcagcacccttgtacccccgtttttccctcccttaaacaaattaagattaccactactgaggggagtagtccgactccgctccggtactgccgcaccagtactccggtacgtttagtactctagtacggagtagatggtatcccccacccttgcaacttagaaggaatcaaactacccgaccaataggcgcgcggcatccagccgcgttacggtcaagcacttctgtttccccggtccgcaagggtcgttatccgcccgctccactacgaaaagcctagtagccaaccaaacgactgcgaagttgcgttcagccacaaccccagtggtagctctggaagatggggctcgcaatacccccgtggtgacacggttgcttgcccgcgcgtgcttccgggttcggtcatgtaccgttcactttaatgtcgtgtaattggtcaagagcctattgtgctggagcggttttcctccggggccgtgaatgctgctaatcccaacctctgagcgtgtgcgcacaaaccagtgttgctacgtcgtaacgcgtaagtcggaggcggaacagactactttcggtaccccgtgtttcacttatttttactttatattttatggtgacacttgctgatatttgtgaatttgctcgcttgccgttgaacatagccttgtattatttagtagcattttacaacacaagccagctttcagttgaactcattgattttgctgtttacctcaattacatacacaaacacaaca

SEQ ID NO: 1260 - DNA, 816 bp, Unknown
  Description of Unknown: unclassified Enterovirus sequence
tttaaacagtctgggggttgttcccacccctggggcccacgtggcgctagcactctggtacgctagtacctttgtacgcctgttttccccacccttaaataaattaagattaccactaccgaggggagtagtccgactccgctccggcacagccgcaccagtgcactggtacgctagtaccttttcacggggtagtcggtatccccccccgtaacttagaagcatgtaacaaaccgaccaataggtgcgcggcagccagctgcgttgcggtcaagcacttctgtctccccggtccgcaaggatcgttacccgcccactccactacgaggagcctagtaactggccaagtgattgcggagttgcgttcagccacaaccccagtggtagctctggaagatggggctcgcacatcccccgtggtaacacggttgcttgcccgcgtgtgcttccgggttcagtctccgactgttcacttcaacatcacgcaaccagccaagagccgattgtgctggagtggtcttcctccggggccgtgaatgctgctaatcctaacctccgagcgtgtgcgcacaatccagtgttgctacgtcgtaacgcgtaagttggaggcggaacagactactttcggcaccccgtgtttcctttattttattcttattttatggtgacaattgcagagatttgtgatattgcgactttaccgttaaacatagcactgcattacctggttgcattccacaaaacttcagagattcctagttcctacattgacctacttgtttatttgaatcttaaatacaaacttgagcaagtgaa

SEQ ID NO: 1261 - DNA, 816 bp, Unknown
  Description of Unknown: unclassified Enterovirus sequence
ttcaaacagcctgggggttgtacccacccctggggcccacgcggcgccagtactctggtacgctagtacctttgtacgcctgttttcccctcccttaaacaaattaagattgccactactgaggggagtagtccgactccgctccgacactgtcgcaccagtactccggtacgcttagtaccctagtacggagtaggtggcatccccaccccgaaacttagaagtatgcaaacaaaccgaccaataggcgcgcggtatccagccgtgtgaaggtcaagcacttctgtctccccggtccgtaaggatcgttacccgcccgacctactacgaaaagcctagtagttggccaagcgagcacgaggttgcactcaaccacaaccccagtggtagctctggaagatggggctcgcagttcccccgtggcaacacggttgcttgcccgcgtgcgcttccgggttcggacttgtgccgttcacctcaaactcgcgtaaccagcgaagagccgattgtgctaggacggttttcctccggggccgtgaatgctgctaatcccaacctccgagcgtgtgcgcacattccagtgttgctacgtcgtaatgcgtaagtcggaggcggaacagactactttcggtaccccgtgtttcctcttattttatttacattttatggtgacactgactgacattcgtgagctagcccgcttgcctctcaatattgcactttattatttggtagcattttacaatactctcgaacttacccttgagcttgttgatttcatcgtttacctaaatcggcttgacaaaggatacaata

SEQ ID NO: 1262 - DNA, 817 bp, Unknown
  Description of Unknown: Enterovirus E3 polyprotein gene, partial cds.1 sequence
ttaaaacagcctgggggttgtacccacccctggggcccacgtggcgccagtactctggtacgctagtacctttgtacgcctgttttccccacccttaaataaattaagattaccactactgaggggagtagtccgactccgctccgacactgccgcaccagtattccggtacgcttagtaccctaatacggagtagatggtatccccaccccgcaacttagaagcatgcaaacaacccgaccgataggagcgcggcatccagtcgcgtataggtcaagcacttctgtttccccggtccgaaaggatcgttacccgcccaacccactacgagaagcctagtaactggccaaacaaccgcaaagttgcgctcagccacaaccccagtggtagctctggaagatggggctcgcacctcccccgtggtaacacggttgcttgcccgcgtgtgcttccgggttcggcctagtgccgttcactttaaagttgtgtaaccagcaaagagcctattgtgctgggatggttttcctccggggccgtgaatgctgctaatcccaacctccgagcgtgtgcgcacaaaccagtgttgctacgtcgtaatgcgtaagttggaggcggaacagactactttcggtaccccgtgtttccttttattgttatttacattttatggtgacactgactgacatttgtgaatttgctcgcttgcctctcaatattgcactatattacctgattgcatttcacaacactagtaaactaacccttgaacttatcgactttgctgtttacctaagtcacttaaatcacaagtacaata

SEQ ID NO: 1263 - DNA, 817 bp, Unknown
  Description of Unknown: unclassified Enterovirus sequence
ttcaaacagcctgggggttgtacccacccctggggcccacgtggcgccagtactctggtacgttagtacctttgtacgcctgttttcccctcccttaaataaattaagattgccactactgaggggagtagtccgactccgctccggcactgccgcaccagtactccggtacgcctagtaccctagtacggagtagatggtatcccccccccgaaacttagaagtaatgagtctaaccgaccaataggcgcgcggcatccagccgtgttacggtcaagcacttctgtttccccggtccgcaaggatcgttacccgcccgacccactacgagaagcctattaactggccaagcgtcagtgaagttgcactcagccacaaccccagtggtagctctggaagatggggctcgcatctcccccgtggtaacacggttgcttgcccgcgcgtgcttccgggttcagcctcgcgctgttcacttcaatgacacgtaaccagccaagagccgattgtgctgggacggttttcctccggggccgtgaatgctgctaatcctaacctccgagcgtgtgcgcacaatccagtgttgctacgtcgtaacgcgtaagttggaggcggaacagactactttcggtaccccgtgtttcccttaaatttttccttaaatatatggtgacattgactgacatttgtgagtttgctcgcttgccaatcaacattgcactctattacctaatagcatttcacaatacttgtgaactcacccttgaacttgtcaatttctccgcctatttgaactacttaaatagaaagtataaca

SEQ ID NO: 1264 - DNA, 818 bp, Enterovirus E
tttaaaacagctcgggggttgttcccactcccggggcccacgtggcgctagtactctggtacgttagtaccttgtacgcctgttttcccctccttaaacaaattaagattaccactactgaggggagtagtccgactccgctccagcactgctgcaccagtgaattggtatgattagtacctcttcacggagtagatggtattcctaccccgcaacttagaagtttattaacaaaccgaccaataggtgcacagtatccagctgtgtaacggtcaagcacttctgtttccccggtccaccaggatcgttacccgcccgacccactacgagaagcctagtaactagccaagtgactgcgaagttgcgctcaaccacaaccccagtggtagctctggaagatggggctcgcacctcccccgtggtaacacggttgcctgcccgcgtgtgcttccgggttcggccttgtgccgttcacttctacgtcatgtaactagccaagagcctattgtgctgggacggttttcctccgggaccgtgaatgctgctaatcctaacctccgagcgtgtgcgcacaatccagtgttgctacgtcgtaacgcgtaagttggaggcggaacagactactttcggtaccccgtgtttcctcttttattatattatttaatggtgacaattgcagaaatttgtgatttagcgactttaccattgcacatagcattatattgtttgattgctttccacaaaacatctgatatacccaactcttatatcgatctacttatctttctttgcttgaagaataaattaaagaaagcacg

SEQ ID NO: 1265 - DNA, 818 bp, Unknown
  Description of Unknown: unclassified Enterovirus sequence
ttaaaacagcctgggggttgtacccacccctggggcccacgtggcgctagtactctggttcgttagaacctttgtacgcctgttttcccctccttaaacaaattaagatctctgccaatgtggggagtagtccgactccgcaccgatacgtcgcaccagtagaccggttcgcttaggacccttctacggattggtatgagttccccaccccgtaacttagaagtactagcaaaaccgaccaataggagcgtggcacccagctgcgttaaggtcaagcacttctgtctccccggccagaaatggtcgtcacccgccctctctactacgagaagcctattaaccattgaaggcgatgaggagttgcgctccaccacaaccccagtggtagctctgagagatggggctcgcagtcacccccgtggtaacacggttgcttgcccgcgtgtgctctcgggttcggccacttggccgttcactccaactcgttgtaagtggccaagagcctattgtgctagagaggttttcctccggagccgtgaatgctgctaatcccaacctccgagcgtgtgcgcacaatccagtgttgctacgtcgtaacgcgcaagttggaggcggaacagactactttcggtactccgtgtttccttattattttatacaacaatttatggtgacattgactgatactattgagttcgcccgcttgccattgaatattgccttgtattaccttatagcatttcaaaaagccacagatctcaccctcgagctcattcactttgcagtttgtttgaatcgcatacacaagacatttgaac

SEQ ID NO: 1266 - DNA, 818 bp, Unknown
  Description of Unknown: unclassified Enterovirus sequence
ttaaaacagcctgggggttgtacccacccccggggcccacgtggcgccagtactctggtttgcttagaacctttgtacgcctgttttcccccccctttaaataaattaagatctctgccaatgtggggagtagtccgactccgcaccgatacgtcgcaccagcagaccggttcgcctagaacccttctgcggattggtatgagttcctccccgaaacttagaagcaccgcaccaaccgaccaataggagcgtggcacccagccatgttacggtcaagcacttctgtttccccggtcagaaatgatcgttatccgccctctcccctacgagaagcctattaaccaccgaacgtggtgaagagttgcgctcagccacaatcccagtggtagctctgagagatggggctcgcatttcccccgtggtaacacggttgcttgcccgcgcgtgctctcgggttcagtcttctgactgttcactctgaaccacggtaagtggccaagagcctattgtgctggagaggttctcctccggagccgtgaatgctgctaatcccaacctctgagcgtgtgcgcacaatccagtgttgctacgtcgtaacgcgtaagtcggaggcggaacagactactttcggtactccgtgtttccttattatctattaatcaatttatggtgacactgactgatattgttgagtttgctcgattgcccttgaacattgccttatactatcttattgcattttaatagagccacagagcttactgttgagcttattgactttgctgtttacttgaatcaaatatacgcattagataaac

SEQ ID NO: 1267 - DNA, 819 bp, Unknown
  Description of Unknown: unclassified Enterovirus sequence
tttaaaacagcctgggggttgtacccacccctggggcccacgcggcgctagtactctggtacgttagtacctttgtacgcctgttttcccctcccttaaataaattaagattaccactactgaggggagtagtccgactccgctccgacaatgtcgcaccagtgcactggtacgctagtaccttttcacggagtagctggtattccctcccgaaacttagaagcacttaaatcaaccgaccaataggcgcgcggtagccagccgcgttacggtcaagcactcctgtttccccggtccacaaggatcgttacccgcccgacccactgcgagaaacctagtagttggccaagtggtaacgaggttgcgctcagccacaaccccagtggtagctccggaagatggggctcgcaccacccccgcggtaacgcggttgcttgcccgcgcgtgcttccgggtccggtctcgtaccgttcacctcaataccacgtaaccagcaaagagtctattgcgctgggacggttttcctccggggccgtgaatgctgctaatcccaacctccgagcgtgtgcgcacaatccagtgttgctacgtcgtaacgcgtaagttggaggcggaacagactactttcggtaccccgtgtttccctatcattccatttcattttatggtgacaattgctgagatctgtgatttggcgaccttaccactgaatattgccttatattacttggttgcattccacaaaacctctgacatacctgcttcctatatcgacctacttgttttcctcaatttaaagtatagactacaaatagcaga

SEQ ID NO: 1268 - DNA, 819 bp, Enterovirus F
ttaaaacagcctgggggttgtacccacccctggggcccacgtggcgctagtactctggttcgtttagaacccttgtacgcctgttttcccctcccttaaacaaattaagatctctgccaatgtggggagtagtccgactccgcaccgatacgtcgcaccagcagaccggttcgcttagaacccttctgcggattggtatgagttccccccccttgcaacttagaagcatgagaacaaccgaccaataggagcatggcatccagccgtgtcacggtcaagcacttctgtttccccggccagagatggtcgttacccgccctacccactacgagaagcctattaactaccgaaatcagcgaagagttgcactcagccacaaccccggtggtagctctgagagatggggctcgcaacaacccccgtggtaacacggttgcttgcccgcgcgtgctctcgggttcagtctttgactgttcactccgacctgacgtaagtagccaagagcctattgtgctgggaaggttttcctccggagccgtgaatgctgctaatcctaacctccgagcgtgtgcgcacaaaccagtgttgctacgtcgtaacgcgcaagttggaggcggaacagactactttcggtactccgtgtttccttattttattaactccaatttatggtgacattgactgatattgttgtatttgcccgcctaccgttgaacatagctttatatcatctcattgcattcaagaaatccacagagcttaccctggaactccttgactttgcagttttcttaaatcggatacataaactcagtaaga

SEQ ID NO: 1269 - DNA, 819 bp, Unknown
  Description of Unknown: unclassified Enterovirus sequence
ttcaaacagcctgggggttgtacccacccccggggcccacggggcgccagtactctggtatgcttaatacctttgtacgcctgtttttccctcccttaaataaattaagattaccactactgaggggagtagtccgactccgctccggtaccgccgcaccagtactccggtacgctcagtaccctagtacggagtagttggtattccctccctgtaatttagaagtatgaaattaaaccgaccaataggaggcgtggcatccagtcgcgttacggtcaagcacttctgtttccccggtccgtaaggatcgttacccgcccgacccactacggaaagcctagtaactggccaactggatgagaggttgcactcagccacaaccccagtggtagctctggaagatggggctcgcaccttcccccgtggtaacacggttgcttgcccgcgtgtgctcccgggttcggtccccgaccgttcacttcgattccaggtaaccagccaagagccaactgtgctgggacggttttcctccggggccgtgaatgctgctaatcctaacctccgagcgtgtgcgcgcaaaccagcgttgctacgtcgtaacgcgtaagttggaggcggaacagactactttcggtaccccgtgtttccttttattttacttattgtttatggttacactgactgatatttgtgagtttgctcgtttgcctttgaatattgctttgtattactttgttgcttttcacaaaacgacccagctcaccgttgaacttgtcgattttgctgtttttcttaatctaacctacaagaaacttaaca

SEQ ID NO: 1270 - DNA, 820 bp, Unknown
  Description of Unknown: unclassified Enterovirus sequence
agtattaatgttgccgaattggactgacacaagttgaggagcacatagggcatggttgtaagaccactagcttgtacattccatgggcgatgctgggggtccacgtagccctcaggggaggcggtgacaagcagcgccccggccagtggcagacttgcaaaatttcctaccaaaccaccatctcactcctattaccccttccctctatacctttcgttatggtggttaccactgtttcattgccttggctgaaaatggccaccctctcgacacatgccccttgctgccccatcgtgcgactttccatttgtccactcagttagaaaagcacgggggtcctgtctgcgtcccgagcccggttggtgatcttcctcccccccgcccgattgatggcccggaggggtttgctgatgcgctttatgatgcttgcctgtccttcctccgtcggcgcgaacatgcgctcgttgagcttgcggaaatacagccttgcttccgtttctcccaccccgcataccctggccgcctcccgcttgaaattcgcttcgtccggcatcctggtgtgcctcccccgctgcgtgactttacccgtggcattcgacgccctggcattcagtacattccgctacctaacctaggcggtctcccccagtcccccgctcccccaattgcacacgtgatatccgccgctgtcaatgccgtgcgccgcggtagccactggcattgtcctctgcttcgtcaagtgtccactcacggctggctatttacctattctggctattggtgctctatcctgttgcatgaggggcgacatgaccacgac

SEQ ID NO: 1271 - DNA, 820 bp, Sicinivirus A
tttaaaagagtcagggggttgtacccacccctggggcccacgtggcgctagtactctggtacgccagtacctttgtacgcctgttttcccctccctaaataaattaagattaccactactgaggggagtagtccgactccgctccggcaatgccgcaccagtgcactggtacgctagtaccttttcacggagtagatggtattcctcaccccgaaacttagaagcacgaaaacaaaccgaccaataggtgcatggcatccagccgtgttatggtcaagcacttctgtttccccggtccgcaaggatcgttacccgcccgacccactacgagaagcctagtaactgaccaagtagttgagaggttgcgctcagccacaaccccagtggtagctctggaagatggggctcgcacttcccccgtggtaacacggttgcttgcccgcgcgtgcttccgggttcggcctctgccgttcacctcgattctgcgtaatcagccaagagcctattgtgctgggacggtttcctccggggccgtgaatgctgctaatcccaacctccgagcgtgtgcgcacaatccagtgttgctacgtcgtaacgcgtaagttggaggcggaacagactactttcggaaccccgtgtttcctttgttttaattttaatgctttatggtgacaattgttgagatctgcgatctagcgaccttgccattgaacattgctttgtattatttggttgcattccacaaaacctctgacatacccagctcctatattgatcttttggtttatctaaacttaaaacacaaactcgaaggattgcg

SEQ ID NO: 1272 - DNA, 820 bp, Enterovirus F
ttcaaacagcctgggggttgtacccacccctggggcccacgcggcgccagtactctggtacgcttagtacctttgtacgcctgttttccctttcccttaaacaaattaagattaccactgttgaggggagtagtccgactccgctccggcactgccgcaccagtactccggtatgcctagtaccctagtacggagcagatggtatccccctttccctgaaacttagaagtctgacgcaaacccgaccaataggagcgcggtatccaaccgcgtaacggtcaagcacttctgtttccccggtccgcaaggatcgttacccgcccgtcccactacgggaagcctagtaactggccaactgagtgagaggttgcgctcagccacatacccagtggtagctctggaagatggggctcgcactccccccgtggtaacacggttgcttgcccgcgtgtgcttccgggttcggtttcgaccgttcacctcaaccccaggtaaccagccaagagcctactgtgctggagcggttttcctccggagccgtgaatgctgctaatcccaacctccgagcgtgtgcgcacaaaccagtgttgctacgtcgtaacgcgtaagttggaggcggaacagactactttcggtactccgtgtttccttttgttttatctattgtttatggtgacactgtctgacatttgtgaatttgctcgcttacccttgaatattgcattgtattatctggttgcatttcacaacacaacccaactctccattgaactcatcaactttgctgtatttcttaacacaatacaaagaaagcgagata

SEQ ID NO: 1273 - DNA, 820 bp, Unknown
  Description of Unknown: unclassified Enterovirus sequence
ttaaaacagcctgggggttgtacccacccccggggcccacgcggcgctagtactctggttcgtttagaacccttgtacgcctgtttttcccccccttaaataaattaagatctctgccaatgtggggagtagtccgactccgcaccgatacgtcgcaccaacagaccggttcgcctaggacccttctgcggattggtatgagtcccccccccgaaacttagaagcacattacaaactggccaataggagcgtggtatccaaccgcgttgcggtcaagcacttctgtttccccggtcagaaatgatcgttacccgccctccccactacgagaagcctattaaccactgaaagtgatgatgagttgcgctcagccacaaccccggtggtagctctgagagatggggctcgcaccacccccgtggtgacacggttgcttgcccgcgtgtgctctcgggttcagtcgcgagactgttcactctgactcattgtaggtggccaagagcctattgtgctggggaggttttcctccggagccgtgaatgctgctaatcccaacctccgagcgtgtgcgcacaatccagtgttgctacgtcgtaacgcgtaagttggaggcggaacagactactttcggtactccgtgtttccttaattttattgttcaaatttatggtgacattgtctgacatttgtgaattcgctcgcctgccacttaatatcgctttatatcatctgatagcattccataagactacagaactcactttggaactcatcgactttgctgttttcctgaatactgttcacaaccaaacaaaacaaa

SEQ ID NO: 1274 - DNA, 821 bp, Unknown
  Description of Unknown: unclassified Enterovirus sequence
ttaaaacagcctgggggttgttcccacccccggggcccacgtggcgccagtactctggcacgttagtgcccttgtacgcctgttttcccctccttaaacaaattaagattgccactactgaggggagtagtccgactccgctccagtaccgctgcaccagtgagctggtacgctagtaccttcgcacggagtagatggcatcccccaccccgtaacttagaagcaaagtacacatctggccaatagtggcgctgcatccagccgcgcaacggtcaagcacttctgtttccccggtccgcaagggtcgttatccgcccagtccactacggaaagcctactaaccattgaagctatcgagaggttgcgctcggccacgaccccggtggtagctctgagtgatggggctcgcaaacacccccgtggtaacacggatgcttgcccgcgcgtgcactcgggttcagcctattggttgttcacctcaacatagtgtaaatggccaagagcctactgtgctggattggttttcctccggagccgtgaatgctgctaatcccaacctccgagcgtgtgcgcacaatccagtgttgctacgtcgtaacgcgtaagttggaggcggaacagactactttcggtactccgtgtttcttttgttttattttgaattttatggtgacaattgctgagatttgcgaattagcgactctaccgctgaacattgccctgtactacctaatcgcatttcacaaaacctcagagataccaagctcttacattgatctgcttgttttcctgaatctcaaatataaattggaacaagcaaa

SEQ ID NO: 1275 - DNA, 821 bp, Unknown
  Description of Unknown: unclassified Enterovirus sequence
ttcaaacagcctgggggttgtacccacccctggggcccacgtggcgctagtactctggtacgttagtacctttgtacgcctgttttcccctcccttaaacaaattaagattaccactactgaggggagtagtccgactccgctccggtactgccgcaccagtactccggtacacttagtaccctagtacggagtagatggtatccccaccccgcaacttagaagcatgcaaacaaaccgaccaataggcgcacgatatccagtcgtgtttcggtcaagcacttctgtctccccggtccgaaaggatcgttacccgcccgacccactacgagaagcccagtaactggccaagtgattgcgaagttgcgctcagccacaaccccagtggtagctctggaagatggggctcgcgtctcccccgtggtgacacggtcgcttgcccgcgtgtgcttccgggttcggcctacgccgttcacttcaatgtcacgtaaccagccaagagcctattgtgctgggacggttttcctccggggccgtgaatgctgctaatcccaacctccgagcgtgtgcgcacaacccagtgttgctacgtcgtaatgcgtaagttggaggcggaacagactactttcggtaccccgtgtttcctttaaattttattcattattttatggtgacaattgctgagatctgcgaattagcgactctgccgttgaatattgctctgtactatttggttgcattccacaaaacctctgacatccccagtacatacattactttacttgtttacctcaatctaaagcacaagctagataatacaaa

SEQ ID NO: 1276 - DNA, 822 bp, Unknown
  Description of Unknown: unclassified Enterovirus sequence
tttaaaagagcctgggggttgttcccacccccaggatgcccactcgtgggcatgtggtactgtggtatcgcggtaccacagtacgcctctttgaccgccctgacccaagaatcttttcctttaacagatctcttcgtaacaagggcctcagcctgacgcaagtgcctccattggagtctctccaagccctccggggcttggagggcgccgaccccctgcctagggggagcccacgacacggctggagtccattggcacaccgcagccacgattcaagccagaattgaaagcgggaagcacttctgtctccccggtgtggatcatacgctgtacccacggcgaaaagtgaagcatcgttacccgactcggtacttcgagaagcccagtacagttgtggatctctgcagggtatacgctcagcgtgacccctacgtagttccttgagatggctgagagaacaccccacgggcgaccgtgtctctcggcgcgtggctcaaggccgggccttcagtggctcggtgccttgcagagtgaagcctccgaacagcctattgagctaccgtttagcctccgccctcttgaatgcggctaatcctaaccatggagcgcccgcccacagtccagtgggtagagcgtcgtaacgcgcaagtccgtggcggaaccgactactttagagtggcgtgtttccaatttatcctttataaagttgcttatggtgacaccacaagagatccacgatttcttgtttcttatcactgagacacaagtcatattcatcaatctttattgcggaattaacttggtgcgtccaaacacatcagc

SEQ ID NO: 1277 - DNA, 822 bp, Unknown
  Description of Unknown: unclassified Enterovirus sequence
tttaaaacagcctgggggttgtacccacccccggggcccacgtggcgccagtactctggtacgctagtacccttgtacgcctgtttttcccccccttaaataaattaagactgccactactgaggggagtagtccgactccgctccggcactgccgcaccagtacactggtatgttagtacctttgtacggagtaagtggtatccccaccctgaaacttagaagtatgcaaacaaaccgaccaataggtgcgcggtatccaaccgcgtaacggtcaagcacttctgtctccccggtccgaaaggatcgttatccgcccgacccactacgagaagcccagtagctggccaagtgaacgcgaggttgcgctcagccacaaaccccagtggtagctctggaagatggggctcgcacttcccccgtggtgacacggttgcttgcccgcgtgtgcttccgggttcggactcgtgccgatcacctcaaattcacgcaaccagtcaagagcctattgtgctgggacggttttcctccggagccgtgaatgctgctaatcctaacctccgagcgtgtgcgcacaatccagtgttgctacgtcgtaacgcgtaagttggaggcggaacagactactttcggtactccgtgtttcctttgaattttatcattattttatggtgacaattgctgaaatctgtgatttggcaactctcccactgaacatcgcactatactacctgattgcatttcacaaaacctccgatatccccagttcctatatcgacctacttgtttatctcaatttgaaacataaactaggacggttgaa

SEQ ID NO: 1278 - DNA, 822 bp, Unknown
  Description of Unknown: unclassified Enterovirus sequence
tttaaaagagcctgggggttgtacccacccctggggcccacgtggcgctagtactctggtacgccagtacctttgtacgcctgttttcccctcccttaaataaattaagattgccactactgaggggagtagtccgactccgctccagcaatgctgcaccagtgcactggtacgccagtaccttttcacggagtagatggcatccccaccccgaaacgtagaagcatgcaaacaaaccgaccaccaggcgcgcggcatccaaccgcgttacggtcaagcacttctgtttccccggtccgcaaggatcgttacccgcccgacccactacgagaagcccagtaactggccaagtggtcgcgaggttgcactcagccacaaccccagtggtagctctggaagatggggctcgcagttcccccgtggtaacacggttgcctgcccgcgcgtgcttccgggttcggctctcgccgttcacctcaaccccacgtaaccagccaagagcctattgtgctgggacggtattcctccggggccgtgaatgctgctaatcccaacctccgagcgtgtgcgcacaatccagtgttgctacgtcgtaatgcgtaagttggaggcggaacagactactttcggtaccccgtgtttcctttatttttccttcaaaaattttatggtgacaattgttgagatttgcgatttggccactttaccattgaatattgccttgtattacttggttgcttttcacagaacctctgacatacccagttcgtatattgatcttcttgtttatttaaacctaaaacacaaacttagaaagctaag

SEQ ID NO: 1279 - DNA, 822 bp, Enterovirus F
tttaaacagcctgggggttgttcccacccctggggcccacgtggcgctagtactctggtacgctagtacctttgtacgcctgtttttcccctcccttaaataaatcaaggttgccactactgaggggagtagtccgactccgctccagcaatgctgcaccagtgcactggtacgctagtaccttttcacggagtagatggtatcccttaccccggaacctagaagattgcacacaaaccgaccaataggcgcaccgcatccagccgtgcagcggtcaagcacttctgtctccccggtctgtaaagatcgttatccgcccgacccactacgaaaagcctagtaactggccaagtgaacgcgaagttgcgctccgccacaaccccagtggtagctctggaagatggggctcgcaccacccccgtggtaacacggttgcctgcccgcgtgtgcttccgggttcggtctcgtgccgttcacttcaacttcacgcaaccagccaagagcctattgtgctgggacggttttcctccggggccgtgaatgctgctaatcccaacctccgagcgtgtgcgcacaatccagtgttgctacgtcgtaacgcgtaagttggaggcggaacagactactttcggtaccccgtgtttcctctcattttatttaatattttatggtgacaattgttgagatttgcgctcttgcaacgttgccattgaatattggcttatactatttggttgccttttacaaaacctctgatatacccagttcttacattgatctgcttgtttttctcaatttgaagtatagactacaaatagcaaa

SEQ ID NO: 1280 - DNA, 822 bp, Enterovirus F
tttaaaacagcctgggggttgtacccacccctagggcccacgtggcgccagtactctggtacattagtacctttgtacgcctgttttcccctcccttaaataaatcaagattaccactactgaggggagtagtccgactccgctccagcaatgctgcaccagtgcactggtacgctagtaccttttcacggagtagatggtatccccaccccgaaacttagaagcatgtgatcaaatcgaccaataggcgcgcggttgccagccgcgtttcggtcaagcacttctgtttccccggtccgcaaggatcgttacccgcccgacccactgcgagaagcccagtaactggccaagcggtagcgaggttgcactcagccacaaccccagtggtagctctggaagatggggctcgcagttcccccgtggtaacacggatgcctgcccgcgtgtgcttccgggttcggtctcgtgccgttcacctcaataccgcgtaaccagtgaagagcctattgcgctgggacggttttcctccggggccgtgaatgctgctaatcctaacctctgagcgtgtgcgcacaatccagtgttgctacgtcgtaacgcgtaagtcaggggcggaacagactactttcggtaccccgtgtttccttttattttatatttatcattttatggtgacaattgctgagatttgcgatttagcggttttgccattgaacattgctttgtactacttggttgcatttcacaaaacctccgacatacccagctcctacatcgacttgcttgtttttcttaattaagacataaactagagaacacaaa

SEQ ID NO: 1281 - DNA, 822 bp, Unknown
  Description of Unknown: unclassified Enterovirus sequence
ttaaaacagcctgggggttgtacccacccctggggcccacgtggcgccagtactctggttcgcttagaacctttgtacgcctgttttcccctcccttaaacaaattaagattgccactactgaggggagtagtccgactccgctccagcactgctgcaccagtgaattggtacgctagtacctctccacggagtagataggaatccctacccgaaacttagaagcatgtaaataacccgaccaataggagcgtggtatccaaccatgttaaggtcaagcacttctgtttccccggccagaaatggtcgttacccgccctacccactacgagaagcccagtaactacccaaacaagtgagaagttgcactcatccacaaccccagtggtagctctgagagatggggctcgcatcttcccccgtggtaacacggttgcttgcccgcgtgtgctctcgggttcgaccccgtgtcgatcacctccgatctgacgtaaccagccaagagcctattgtgctgggaaggttttcctccggagccgtgaatgctgctaatcccaacctccgagcgcgtgcgcacaatccagtgttgctgcgtcgtaatgcgtaagttggaggcggaacagactactttcggtactccgtgtttccttttattcatttattgattttatggtgacattgctgagatttgtgatttggctgttttaccactgaacattgccctgtattacctgattgcattccacaaaacttctgagatacctacatcttatattgatttacttgtcttccttaacctgaggcacaaactagagaacacaaa

SEQ ID NO: 1282 - DNA, 823 bp, Enterovirus F
tttaaaagagtcagggggttgtacccacccctggggcccacgtggcgctagtactctggtacgttagtacccttgtacgcctgtttttccctcccttaaataaattaagactaccactactgaggggagtagtccgactccgctccggcactgccgcaccagtacaccggtacgctagtacccttgtacggagtagatggtatccccacccccgaaacttagaagcaagcacacaaaccgaccattaggcgcgcggcatccagtcgcgtaacggtcaagcacttctgtttccccggtccgcaaggatcgttacccgcccgacccactacgagaagcctagtagttggccaagtgaacgcgaggttgcgctcagccacaaccccagtggtagctctggaagatggggctcgcacttcccccgtggtaacacggttgcttgcccgcgcgtgcttccgggttcggcttcgtgccgttcacctcaacttcacgtaaccagcaaagagcctattgtgctgggacggttttcctccggggccgtgaatgctgctaatcccaacctccgagcgtgtgcgcacaatccagtgttgctacgtcgtaacgcgtaagttggaggcggaacagactactttcggtaccccgtgtttccttttaattttattcattattttatggtgacaattgctgagatttgtgatttggcgactttaccattgaatattgcattctattaccttatagcatttcacaaaacttctgatattccaccctcctacatcgacctgcttgttttcctgaatctcaaatataaatttgaagagacaaa

SEQ ID NO: 1283 - DNA, 828 bp, Rosavirus A
ttttcaaagccggggttgggggggctgcaccccatccccccttcttcccctcttcctccgttgcgcgcgttcctgacgcccgccgcggagttcctagctggctaacacccagttgggagggctctcactccctcacacctcgcgctttggacgccaggcatggcgttaaacatgcattcccttcccctagtaacctcccttcgccccttccccacgttgtaccccctccgagatggctgctaaggcgcttgctgctacagcagtctcgtgtttcgggtgttataagtgctttcttttccactccactccctgcctatggggagcggaacggccttgtctcggtcgttgcttcttgcagatcttcacccctccaggctttctggactcgccaggggtggagtagtaggcgcactgtctaagtgaaggtagcagtgttgttggcgaagagttgtggacctactttgagtttgtagcgatcatccagagctagcggatctccccacgcggtaacgcgtgcctctaggcccaaaaggcacggtgttcacagcaccctttggatggcgggggtgcccccctccgcacttaaagtagaaaaacagcttagtagtcaaataacatggctttcctcaagcattcagtgctacatgggactgaaggatgcccagaaggtacccgcaggcaacgataagctcactgtggatctgatctggggccctgggccaggtgctatacacctggttaaaaccaaatctggtagtcagggttaaaaaacgtctaagtcccacccccccggggacggggggttcccttaaaccctcaactgacacc

SEQ ID NO: 1284 - DNA, 830 bp, Unknown
  Description of Unknown: unclassified Hunnivirus sequence
cccccctcccccccttcccttccctttgcaacgcaacaattgtaagtgccctcacctgtcaattgggaccaccactttcagtgaccccatgcgaagtgctgagagaaaggaagctttcttacccttcatttgtgaacccactggtctaagccgcttggaatacgatgagtggaaaagttcattcttaatggagtgaaacatgcttaaatttccagctcgtgctggtctttccagtacggggcggccctgtctggccgtaattcttcagagtgtcacgccacacttgtggatctcacgtgccacatgacagcgctacagctggaactgggtgcttggtgcccatggagtaacagcgaaaagtgttagatcaagccttgcttgggctatgagcctgcggaacaacaactggtaacagttgcctcaggggccgaaagccacggtgttaacagcaccctcatagtttgatccacctcagggtggtgatgtttagcagttagtagttgccaatctgtgttcactgaaatctcggcataccgtgtagtgtacaggggtgaaggatgcccagaaggtacccgtaggtaaccttaagagactatggatctgatctggggccttgtccggagtgctttacacacggctcaaggttaaaaaacgtctagccccacagagcccgagggattcgggttttccctttaaaaacccgactagagcttatggtgacaattattgctgttcagacgaacagtgtaattgttgtctattcacagcagttctatcagagcttttcccacaacggatcttcttggcaagcaaatacagcaggagtcaat

SEQ ID NO: 1285 - DNA, 837 bp, Unknown
  Description of Unknown: unclassified Enterovirus sequence
atttaaggaggggaaaacagcctgggggttgtacccacccctggggcccacgtggcgctagtactctggtacgttagtacctttgtacgcctgttttcccctccttaaataaattaagattaccactactgaggggagtagtccgactccgctccagcaatgctgcaccagtgaattggtacgctagtacctctgcacggagtagatggtatccctttccccgaaacttagaagaaagcaaacaaaccgaccaataggagcgcggcaaccagccgtgttgcggtcaagcacttctgtttccccggtccgcaaggatcgttatccgcccgacccactacggaaagcctagtaactggccaaacagcaaagaagttgcgctcggccacaaccccagtggtagctctggaggatggggctcgcatctcccccgtggtaacacggttgcttgcccgcgtgtgcctccgggttcagtcatcgactgttcacttcaatgctgtgtaaccagccaagagcctactgtgctgggacggttttcctccggggccgtgaatgctgctaatcccaacctccgagcgtgtgcgcacaaaccagtgttgctacgtcgtaacgcgtaagtcggaggcggaacagactactttcggtaccccgtgtttcctttgatttttatttaatattttatggtgacaattactgagatttgtgatttggctgctttaccattgaatattgctctgtactatttagtcgcatttcacaaaacttctgagatccctgcgtcttttattgacttgcttgttttcctcaatttgaagtgcaaactagaaggcataaaaagag

SEQ ID NO: 1286 - DNA, 843 bp, Unknown
  Description of Unknown: unclassified Picornaviridae sequence
cctatcgacagagtttgttgccgttaaaaagaggtcccaggggtgtttcccctggggcccctttttaacggcaacaaactctgtcgataggctaacgccgagcgttcacttagtgagggcgatttacatcacataacaccgccttgtttgacatgtttcactcaaggacaagatatggtaaatctgtgcactacttgaaaattctcgacgttagcggagctaaaacaacaccacaacacaacacaacaattaacaacacattagaaattcgaatttagaagttagaccccaatttttgatttaacatctgttattttgactttgggcaatccactgatctttgaatttcacacgacagccgtggagagacggcacacgctacttcagcatagatccaaggatagctggtagcggcgacgaagtccacaatcactctatattttcaggcttctgaaagtgctgataaattgattaagttcggtttatcggaattgccgaggtccctcgaagaaacccgcggaaatgagaatatagatgttggtatggcagccagaagacatgaactatgacaagtacgtacgagcgtgtgttcggacctggttccccgccttaggatcagcgccctgtgaggggaccctttggaaagatgatcactacatagactactcgaacgagaaactatgcaaataacagggaacgtttggccacccggatgaatccagtagtacggaaaagcttaggaattcgattttggatcttttacctgtgttttaataagaaatgcaggagttgataaatagggctcgactgggagcgagactgcagcggctaaagcagcagtaa

SEQ ID NO: 1287 - DNA, 847 bp, Enterovirus I
ttaaaacagcctgggggttgttcccacccccagggcccacgtggcgcaagtactctgcttcgttagaagccttgtacgcctgttttcccctccttaaataaattaagattaccacttccgaggggagtagtccgactccgctccgatacgtcgctccagtgcgctagtacgcttagtactttctcacggggatagtggtacccctccctagtaatttagaagacttgaaaaaccgaccaataggcacctcgcatccagcggggtaaaggtcaagcacttctgtttccccgggtcgagtagcgatagactgtgcccacggtcgaaggtgaaacaacccgttatccgactttgtacttcgggaagcctagtaccaccaaagattatgcttggggtttcgctcagcacgaccctggtgtagatcaggctgatggatcaccgcgttcctcacaggcgactgtggcggtggtcgcgtggcagcctgccgatggggcaacccatcggacgccaagcatatgacagggtgtgaagagcctactgagctacaaagtattcctccggcccctgaatgcggctaatcccaaccacggagcatttgctaccaaaccaggtagtggaatgtcgtaacgggtaactctgtggcggaaccgactactttgggtgtccgtgtttccttttaatttatcattctgtgtatggtgacaactatagtgctatctcgatttgcattactattgttgagattgacactttattacattgttgcattttaccctttgagtgagttttcacctgaacagattaatttacttatcctgtttatatatcacaagcagaaatacttgcaaag

SEQ ID NO: 1288 - DNA, 867 bp, Unknown
  Description of Unknown: unclassified Picornaviridae sequence
tttgcgcgcgggacctctgctacggccgggctcatattatcctccggggttttatgggtcgggcctagcccctttctgtaacggtctgtgtgagacctaaaaccacacataatatcgtgcctgatggttaacgcttgttagccgtctgtaaactaagaacctaccaacacactatgcacctcttggcgaagccgcttggaataagttgagaggaattatgcatgctagttgtgtttgtttacaactaattgttctaatccaagtgaagctcttcgcttggggcggcacgacacttgccgtaattcttctaccgtccctccacaccttgtggatgaagggccggatgtgtggcctctggctaacccctctctctggggtgatgctactggatgttttactcctagaccaaatcacatgaactcctcttgatccacttcggtggggctatgagcctgcggattaatagctggcgacagctaccccaggggccaaaagccacggtgttagcagcaccctcatagtctgatgcccaagggctgatgttgggagctagtagtgtgtgtctggcctatgtttaggacttctggccaagcgcagaggagtggggctgaaggatgcccagaaggtacccgtaggtaaccttaagagactatggatctgatctggggccccctcacgtggctttaccacgtgttgggggttaaaaaacgtctaggccccaccagcccacgggagtgggctttcccttaaaaagcccaacaatatttatggtgacaattcactgtttcttctttgcaatttttgtattcttggactccttattttttgtttgcttgattttagtggacattcagattcaaatacaaa

SEQ ID NO: 1289 - DNA, 891 bp, Unknown
  Description of Unknown: unclassified environmental samples sequence
aagttgcattattaggtgcaaccataattgtttattttttcccgtgtgagacggaattctcatgacagggcagtcgagagagagcgatctctctctttgcctctaatagcaatattagcgttaccctttttcgataaaagagaaatatcaaaacgatagtagacgaaagttaatctatgtcctacatttgtagggaatgaaatactgattagttgtcattgacgacagatctaagctgtaatcaacagccggacttgtgcaaagttcgataagtagaataagtactagagattagtggatttgtgacccacaacttgaattaaaggcttgtatgtgcggaaatgctgtacaagaaaagagctaaaatgcgttttcctacgtgacgatataaacgatggaggtggggttcacttatttggagaaccgacctagacggctgtttttaacagcacccccagttgcctttctgggcttagtttcgggaataggaccccgaaacggcgtacgccactaaaaaggagaagacgtcaagcagcatgcgattaggacatgtatgtgtttttatccgattatggaaccaggtggttccgtaattgagacatatacccctatatttaaggtgtcgaaagatacccattatatgcaattactggagtattttgtatatatgtgctgtgagggcactatcctaggttaccgtgggatcgcaagatcaccttacggactgagcagtaaaagccattttggccgtctcttagcgtagagcacacactcatgcgaaacccaaactcgaaagagcgggctagtaggacttagggcagattgatgatcaaagaccccccaaaaggtctttttctctttctgcgtcttcatcttcctcatatgttttag

SEQ ID NO: 1290 - DNA, 899 bp, Unknown
  Description of Unknown: unclassified Erbovirus sequence
ttttgtaactgaggttttaacatctcattgtttttgagccccaacgtcttggtggatgctcaaaagagattactcttgatgcttggctctcagaaagaatggcacctcaacgtgttgagacccgattcttttgagtcgagaccacttcccctcacccttaagattgcttttcttccaactaaacccctattgatgtgttggtcgtttgccaatcggagggcgacagatgcaggtcgctctgaggtctagtagtgtgggaacttgtcgctactaatgaaacgaggtagtgacacttagtacctacgaacaaatcttggagcaactccctttgcttccttcacccatctttcacttttcgttccgctttagcaggggtcttctttctgtccccctggcggcattggaactagccgtcgcgccttagcgcgcagccctgaaggccccacatcttgtggatctcgccgtgggcatgtttccggcatgtgtttctcaagcctgcaaccgaagaccgaacagccacttgaacggtttgagcgtggtagcgctgtgcgagttggcggtggactcccctcgtggcgacacgagcccccgcggccaaaagcccagtgtttgcagcacctctcgcatccaggacaaccccatcctggcgctcactcttagtagtgtggcttagtacgtattaggtggtaagccgagctctccctcggtcttgttctgaatgcacacatgtctaggggctaaggatgtcctacaggtacccgcacgtaaccttaagagagtgtggatctgagtaggagaccgtggtgcactgctttacagttgtagcccggtttaaaaaacgtctatgcccctacagggtagcggtgggccgcgccctttcctttaaaaatatttgtttt

SEQ ID NO: 1291 - DNA, 899 bp, Unknown
  Description of Unknown: unclassified Sicinivirus sequence
ttacacgcgagttttgcctcgcgcgcccgtaagggcacaaacccccctaggacgtgcacttgcccattggtacgtccggaaaccgtctgcctcggcacgcggcttctccacggtcgcaagcgacccacaatgcttcctggccatggtgtcccccaggaagagcgaacttgtggtgcggcgacccgggagtcgcgtcggcagctcaagtttctctggcagcacaccattttcccctttgtaacctcccgaaaatggcccgggggtagtccgccccctcaaaatggaccgtgtgcacccctccccacgcgttaaagcgggaagggccctcagtcggcgcagggaagcgcgctgaccctgttaagtggataggtcaggaaaaacatgtccacatcataaccccaattcccacggtcgctgatggtctgaccgttaggggcggcccaccggcgctctttgccgggcgtggcttaaccacaccatctcctctagtggattcctagagttctcccacttagtaagctcattccccccactgctgatcccgcaagggagtacaagtgcccagtgagcccacctggtaacaggtgcactggggcccaaaaggctagtggacagggggaagaccccgaatgccgtgggttcccacctgcggtgaagggtttcccccgaagtccacctttgtacttggctatggcctgttggtagtgtggagagtggcgccgaaaggtctggatgtactctctgaggaaactagtaggatcggagaacgttagtagacccccactaggtacccgcgcaagcggatctgaggtgggcccggtgactatgccgttccggtaagtccgggttaaaacaatgaacgcgttctccacaaatcactttcctctctttcttattca

SEQ ID NO: 1292 - DNA, 900 bp, Unknown
  Description of Unknown: unclassified Erbovirus sequence
ttttgtaactgaggttttgacatctcattgtttttgagccccaacgtcttggtggatgctcaaagaagattactcttgatgcttggctctcagaaagaatggcacctcaatgacttgagacccgattcttttgagtcgagacctttttccctctccccttttgaagattgctttcttccaactaaacccctattgatgtgttggtcgtttgccaatcggagggcgacaggcacaggtcgctcctgagctcagtagtgtgggaacttgttgctactaatgaaacgaggtagtgacacttagtacctgcgaacgactcaggtgcaatccctgtacttctttcaccaaccttccactttccgttccactttagcaggggtcttctttctgtccccctggcggcattggaactagccgttgcgccttagcgcacagccctgaaggccccacaccttgtggatcttgccgtgggcatgtttctggcatgtgtttctcaagcctgtaaccgacgaccgaacggtcacgtgaacagtttgagcgtggtagcgctgtgtgagttggcggtggactcccctcgtggcaacacgagcccccgtggccaaaagcccagtgtttgcagcacctctcacatccagggaaaccccaccctggcgctcactcttagtaacgtggcttagtacgtattaggtggtaagccgagctctccctcggtcttgtactgaatgcacacatgtctaggggctaaggatgtcctacaggtacccgtacgtaacctttagagagtatggatctgagtaggagaccgtggtgcactgctatacagatgtagcccggtttaaaaagcgtctatgcccctacagggtagcggtgggccgcgccctttcctttttaaaacttgttttt

SEQ ID NO: 1293 - DNA, 904 bp, Erbovirus A
tatccccttgatgcaactgaggttttaacatctcattgtttttgagccccaacgtcttggtggatgctcaaagaagattactcttgatgcttggctctcagaaagaatggcacctcaacacttttgagacccgattcttttgagtcgagaccacttcccttcccctcaaggattgcttttcttccaactaaacccctattgatgtgttggtcgtttgccaatcggagggcgacagatacaggtcgctttggcgcttggtagtgtgggaacttgtcgctgctgatgaaacgaggtagtgacacttagtacctacgagaggcaacaaggcaataccccatcttccttcaccaactttttcttttcgttccactttagcggaggtcttctttctgtccctccggcggcattggaactagccgttgtgcctcagcacacagccctgaaggctccacaccttgtggatcttgccgtgggcatgtttctggcatgtgtttctcaagcctgcaaccgaagaccgaaccgttgcatgaacagtttgagcgtggtagcgctgtgcgagttggcggtggattcccctcgcggcaacacgagcccccgcggccaaaagcccagtgttcacagcacctctcgcatccaggaaaaccccctcctggcgctcactcttagtagtgtgacctagtacgtactaggtggtaagccgagctctccctcggtcttgttctgaatgcacacatgtctaggggctaaggatgtcctacaggtacccgtacgtaaccttcagagagtatggatctgagtaggagaccgtggtgcgctgctttacagtcgtagcccggtttaaaaagcgtctatgcccctacagggtagcggtgggccgcaccctttcctttgaaactattgtttt

SEQ ID NO: 1294 - DNA, 905 bp, Erbovirus A
tatccccttgatgcaactgaggttttaacatctcattgtttttgagccccaacgccttggtggatgctcaaagaagattactcttgatgcttggctctcagaaagaatggcacctcaaagttttgagacccgattcttttgagtcgagaaccttacccccaacccttgagattgcttttcttccaactaaacccctattgatgtgttggtcgtttgccaatcggagggcgacaggcgcaggtcgccccaacagctagtattgtgggaacttgccactgctgatgaaacgaggtagtggcatttagtacctgagaacgctggaggagcatctccccctcttccttcattaatctttcacttttcgttcctctttagcgggggtcttcttgctatccccccggcggcattggaactagccgttgcgccttagcgcacagtcctgaaggccccacatcttgtggatcttgccgtggacatgtttctggcatgtgtttctcaagcctgcaaccgacgactgaacagacgtgtgaacagtttgagtgtggtagcgctgtgtgagttggcggtggaaccccctcgtggtgacacgagcccccgtggccaaaagcccagtgtttacagcacctctcacatccagggaaaccccaccctggcgctcactcttagtaacacttcctagtaggtattaggtggtaagccgagctcttcctcggtcttgttctgaatgcacacatgtctaggggctaaggatgtcctacaggtacccgcacgtaaccttcagagagtgtggatctgagtaggagactgtggtgcgctgctttacagacgtagcccagtttaaaaaacgtctatgcccctacagggtcgcggtgggccgcaccctttccttttacaaacttggtttt

SEQ ID NO: 1295 - DNA, 906 bp, Unknown
  Description of Unknown: unclassified Sicinivirus sequence
gttgcgtgcctgcagccgctcagcgtccatccttcctgttacccacctaatttggtggtaccccccggtcccttccctatccccccatacagccggaacggaccacacacctccgggtctgtggcccaaccccgactcggggttgtggcggtggtcacagctccggctgtgacttcctaaccactcctttcacccacccctttcttacatctacttaagtttatgtttgccctctcatcccaaggccttggctcatgtcctttgaggctatctggcacaaacactctttgtttggcgtctggagacccactgagccaccacttatccatgctcaatgcaacccccattagtaaccacgcaaatctaatagtggttctgcctcggcagcacctaagtgcccagggagttcaactggcgacagttgccctggggcccaaaaggctaggtggtaagggtctggccaagcaaggggtccccaccccaagctgaacccatggccccgaagccaccctttaggtggaggttatgtacccgatcgctattctatttgtttggcgaacctggccggaaacatttagtttgtggattcgttggtttgtggtgattagtagaccccctggaggtacccgttttggatctgaccagggacccgtgactataccgctccggtaattcgggtttaaaaccatgaacgtcaccacttgtcttcttttcccattttattcttcttatagtggtctgtttaaatgctcttagaatttctgttggtgactacggcacttaccatagtggttctttcccccagtgagttgcatcagctgcttgctatttgcgtgtataattttgcattaattttcctctggttgctcggaattttggagttgcctagttaccccgctatacagc

SEQ ID NO: 1296 - DNA, 915 bp, Enterovirus A
caggaacattcattagacgccatcagatccgtctcagggaaaagatcggtcgttgatctcctttctatgagacttcatgaagcgagggtttgtagttcgaagtggcatcagacacctcatggggttccgagaacttaattgggggacaaaagtgtacaaaaaagcaggctttaaaacagctctggggttgttcccacccacagggcccactgggcgctagcacactgattctgcgggatctttgtgcgcctgttttataaccctccccctaagcagcaacttagaagctctgtacaatcacgaccagtagtgggcgtggcgcgccagccatgtcttggtcaagcacttctgtatccccggactgagtatcaatagactgcttacgtggtcgaaggagaaaacgttcgttacccggctaactacttcgagaaacccagtagcactatgaaagttgcggagtgtttcgctcagcacttcccccgtgtagatcaggtcgatgagtcactgtaaaccccacgggcaaccgtgacagtggctgcgttggcggcctgcccatggggtaacccatgggacgctctaatacagacatggtgtgaagagtctattgagctagttagtagtcctccggcccctgaatgcggctaatcctaactgcggagcgcgcaccctcaacccagggggcggcgcgtcgtaatgggtaactctgcagcggaaccgactactttgggtgtccgtgtttccttttattccttattggctgcttatggtgacaattgagaagttgttaccatatagctattggattggccatccggtgtctaacagagccattgtttacctattcattggatacgtccctcttgatctcaaggccattcaaactcttgactatatattgctccttaactgcaagaa

SEQ ID NO: 1297 - DNA, 934 bp, Unknown
  Description of Unknown: unclassified Picornaviridae sequence
ccgtgggaccggagatgtgtgtccgaaaggtggcccgtttcgtgggccagacgttgaaagggggatgcagggtatgctgttttaatacagcaaagacccacacatccccgctttcaacgtctggcccacgaaacgggccacctttcggactgaccattggtttattattgaaattggcttggaaatgctgacactgtaagctggtttgtgatttaaacaatggttgttctggactctctttgagagatttacctggtggcttggcacagcctccttaaggacgtctggtccagaaaggcccggtcaagacttatattggactggtcccctgtccactgagtattctgttctgaaccgtgtaggcagggctagcgccaccatgattgccaagggactgcctccctggtgacagggacccttgggcccaaaaggctaggtggcaactctcatgtcaagagaggggtatccaccccaatctgaatcatgtggagtgaagccactcgtcatggctctgaccccgagactgtctacatttagtaagatggatgaaaactggatttggagaccactttgattgtcttgatgagaaagtccgctatttgactgagtagatgccctccagctacccttacggatgtgaggaggggaccgtgactatagcgttccgctaaaccggtttaaaaaacatgaaaggtcaaatatgtggcgccattttccatttttactaataaccatatgcctgacgaagttgattgtgctgagtgctctaagccctcctggactgtcagattaaaattggcttttctgcaatattttggctgccagtttgtatgggtttatcactcaggaaagaatcaagagaaagattgaaaatcttggattgtgcaaccaaggctcatttttgtccttgtgaaggcaaccagagattgcagtc

SEQ ID NO: 1298 - DNA, 944 bp, Unknown
  Description of Unknown: Mus musculus picornavirus strain Wencheng-Mm283 polyprotein gene,1 sequence
accccggtaaaggtcagggtgtacttgcccacgttggtcggcttgtcaacactggttccggctttatcctgatacgtcaccgtgtactcgctgccatcgatcacaaacccctcatcgtccttgacagtgaccgcaggctcctgcttctctccgttgaacgtcaccgagggcggcgtcacctggatggtgggcgcggtcacggtgttgctgatgatggacgcatctaccgaagcaggtgtgctgtcattgtggttgctgtcgccctgggccttgtaccagacagtgtaattgtccacagctttcccggtgggaatggttggagtatacgggccgtcctcagccagagcgtagaccatcgtgccgtcggaagcggtgcccgcctcaatcagcgcctgctcggtgccgttgtagggcagattttccaaacccttcggagccgttgccaccgatgcagcacccttcgcaatcacaaaggtccccgtaccgtttacgatgtagttgccgccgttggcgttggtgatgatgaccgtcgccgtaccggcgttgatgttgtcgcggtaggacagggtgtactcgtcgctggggatggtgttgccgccgtcctccaccttactgcgagactcctagtagggagtggacgtattttgtgtgtgacccggagtttcccccgctccagaaacctgtgatgagctatcctcacgcccacctggcaacaggcgaggacgctgcgttggcacaggacctcattgaggctcacaacttgctgaagcaaacgaagagacgattgcgctaaggtggtttcctccggcctcctgaatgcggctaatcccatcccttggtcatccgcccactagccagtgggtagggtgtcgtaacgcgcaagccgagggcggaaccgactactttggagtgtccgtgtttctattttattttatacggcagtc

SEQ ID NO: 1299 - DNA, 957 bp, Foot-and-mouth disease virus
ctgtctgcctaatggaggtacgacagccagaggtctagccccagcgtcgcgtaacgaccgtccccggttgaaacgccactactcagacctctggctgtcgtacctccattaggcagacaggaaccacccttctggggcctacgctactgtgcccttttggggcccgcggtcgtcatcaccgcgcctccattaggctcgcagtcgtacctcctctaggctgacaactgtcgcccttttagggcctacgaccttcaagttacggttttggcgtccctcccgcggccgactcgcctacgtgaacgctagctcttcacccgaaggcccgcctttacgttaccgtcttttccgacgttaaaggattgcaaccacacgatttgccttcttttccgaagtaaaaggatacaagcacacagttttgcccgttttcatgagaaatgggacgtctgcgcacgaaacgcgctgttgctcttcgcattcttgtacaaacacgatcttgacgcaggaatcttagaccaacccaacccgtgcacctgcaagtttcgcccggtccttccgggtcttgagagacaaacagatgtactgagatcaactccacgattggtctactagcgggtactagtaacactcactttgcttcgtagcggagcacatgagcggtgggacctcccccatggtaacatggacccaccgggccaaaagccacgcctcacggcctcatgtgtgtgcaaccccagcacggcaacttgtttgtgaaacacaccttaaggtaacactgagactggtacttgatttctggagacaggctaaggatgcccttcaggtaccccgaggtaacaagagacactcgggatctgagaaggggaccaggagttctatcaaactgcccggtttaaaaagcttctatgcctggataggtgaccggaggccggcaccttttcctttatttaaactcacttt

SEQ ID NO: 1300 - DNA, 966 bp, Unknown
  Description of Unknown: Canine picornavirus isolate A128thr polyprotein gene, complete cds.1 sequence
gggcctcctttcaccggggttcgcgtgacccggttataaaccacgtgacgtctttccagcgctgggttttgacgataaaataacccaggcactatagacagcgatgtctttaaacatccagacagaacagtctttaaaattacaagcttattcaattacaactagtggtgactcactttaaaatgtccaaatttaaggttggcagcttaactgcccgtgattgggctcacgtataaatggtcctggctggccgactacggccacacaatcaccgaatgatttaaacttcgggtgtgagctactaagctccttgtgtaagggtgacaccttgcccaagtatcttgtccccggtctgttgccgcttggaggcagatagggttattttccttgttactttctactcattggggatctatcccagtgaagggtcaagtggcaacccctctcttcttgaggagtggcatggcggtctttccgcatctcgaaccatgccacgcgccatgcacatatgtgacttataagtctgaagattttgaaacactttggttgacaagttgatgactgtagcgactccagtgtgcgagcggacttcccctcatggtaacatgagcctctcggaccaaaagtcaagcgttcatagcgccacactggacgggactttcctagtccctcatcaatgaaacacaatttgtgaatctttctttggacgaaagagtctgatgtgtaggatggagtgaagatggcctgaaggtaccccgtatacgggatctgatcaggtgcccctctcttggggttaaaaattactcggctcctcccacaaactggtggtccagtttttctctttaatttttactgcttatatggtgacagttattgacattctagtgttgattgcctattgttactttatattgttgttgtttttcctgaattgctttttacaaccttatactattacctttgaac

SEQ ID NO: 1301 - DNA, 970 bp, Ampivirus A
ttaaaatgaaaatgtgcgagcatttagctcgcacttttcattttaaatatgtccacagccctcaagggacttagtcccttgtccgcctcggcgacttaatatttaacttgtagttacttatataaagcccgtaatttatacgatacatacaaaactccagcatccactctgactgccatagtggaataaaccaagaccactctctacatccggagagtcaaatccattggacgaccatttgatactattctacaaaatctattttgatcatattatattaagcattaagcgtcattgacttggttgattaattagtttcactgattaatcgagtcaacaaacaacttcctaaattaatataattttgctcaaacgagaatttcagaatattatgcgaccatttaactatgtttacttaagcatcattgacttttgagtcaacaaataccttaagtttccgctcatctccttaccttcatacgcaggcccataagcctatattatttacctctatttataattttaatcattaatctgcacaattccaccgtttagacattattagggtttataacaacactaataattattgtatgaaaaccagtagttccagcgcgtcgtggcctattgacccccatacaaagttcataagaatagttttgctgttttcagtcattcattctttcccttaaaaggtttggtcacctataagtccagctcattacatcgagtatggcaagtctgcccaacatttgttatatctgactctggtgataataaatgtggcgggataaagttacaagtctagttatatagacagctttagctcaaaaccccaatttccccccttgtgtattattattgtattattaattgtaattatgtatttaatgtaaattgtacttttatctatccaacttcttatttcaattttctatcaagacttttttcttgtcgaaactcaatatct

SEQ ID NO: 1302 - DNA, 975 bp, Unknown
  Description of Unknown: Carfax virus polyprotein gene, partial cds.1 sequence
cacggggttaacacctcgtgcgatcttttcaaccacatatatatatattctgggcggaatattagaaaatcttgggattatatatatgtaattgatatattgggcggaatatttgaaaatcttgatatatctcttacaaaattttgaaaccaaccattttagaataggtttattagcgtgacaaactatgcgacctgtagagaaaaatgtcaaaatcaatacaaaattttaaaatgttaaaaatgtttatatatttagtaaactcaagttgaattgtgatagagaaggcaagtaactaccagatgactcttctcgcaacaggattatcccagactgttgttccagcaaattgatggatgtaaactaaatttataatgataaatagttaagtaggagacccttatggtactcaagcttgtattaaaatttttaactatagatatgtattattgaaatgtgttctgtctcttatatgtacacccacgtagtcgtggtaccgctataacgccaatcggactaaataacaagaatgtgaggttcctattgagatttcaaaatttatcatattgtcacgaccaatctctttgggtaaggacttgcatggtatgcgaaaggtcggattgccagaatctgcttgctgctttctggatgtgtacacattttaattttaagatttatgatagttaatttgataatacaaggacagtgcgttttgtgacgtgcttgtttgcatctctgtcttagatgacaggtttctacactaggcgatgtgtagaagtgtagacctctaatggtttggtgcatcgtgccccggttctttttcaaggcttctccggttcaaagatagcggaggacccccctttgtaatgcagacaccattgtggataatttatctacaattcgaagcgataatttttccattcatttttgtatctttaaaacttcttacggagattttcaatattaactagaaaa

SEQ ID NO: 1303 - DNA, 723 bp, Unknown
  Description of Unknown: unclassified vectors sequence
cctcggccccctcaccctcttttccggtggtctggtcccggaccaccgttactccattcagcttcttcggaacctgttcggaggaattaaacgggcacccatactccccccaccccccttttgtaactaagtatgtgtgctcgtgatcttgactcccacggaacggaccgatccgttggtgaacaaacagctaggtccacatcctcccttcccctgggagggcccccgccctcccacatcctccccccagcctgacgtatcacaggctgtgtgaagcccccgcgaaagctgctcacgtggcaattgtgggtccccccttcatcaagacaccaggtctttcctccttaaggctagccccggcgtgtgaattcacgttgggcaactagtggtgtcactgtgcgctcccaatctcggccgcggagtgctgttccccaagccaaacccctggcccttcactatgtgcctggcaagcatatctgagaaggtgttccgctgtggctgccaacctggtgacaggtgccccagtgtgcgtaaccttcttccgtctccggacggtagtgattggttaagatttggtgtaaggttcatgtgccaacgccctgtgcgggatgaaacctctactgccctaggaatgccaggcaggtaccccacctccgggtgggatctgagcctgggctaattgtctacgggtagtttcatttccaatccttttatgtcggagtc

SEQ ID NO: 1304 - DNA, 712 bp, Aichivirus A
tcaccctctttcccggtggtctggtcccggaccaccgttactccattcagcttcttcggaacctgttcggaggaattaaacgggcacccatactccccccacccccctttggtaactaagtatgtgtgctcgtgatcttggctcccacggagcggaccgatccgttggtgaacaaacagctaggtccacatcctcccttcccctgggagggcccccgccctcccacatcctccccccagcctgacgtatcacaggctgtgtgaagcccccgcgaaagctgctcacgtggcaattgtgggtccccccttcatcaagacaccaggtctttcctccttaaggctagccccggcgtgtgaattcacgttgggcaactagtggtgtcactgtgcgctcccaatctcggccgcggagtgctgttccccaagccaaacccctggcccttcactatgtgcctggcaagcatatctgagaaggtgttccgctgtggctgccaacctggtaacaggtgccccagtgtgcgtaaccttcttccgtctccggacggtagtgattggttaagatttggtgtaaggttcatgtgccaacgccctgtgcgggatgaaacctctactgccctaggaatgccaggcaggtaccccacctccgggtgggatctgagcctgggctaattgtctacgggtagtttcatttccaatccttttatgtcggagtc

SEQ ID NO: 1305 - DNA, 712 bp, Unknown
  Description of Unknown: unclassified Kobuvirus sequence
tcaccctcttttccggtggtctggtcccggaccaccgttactccattcagcttcttcggaacctgttcggaggaattaaacgggcacccatacacccccatcccctttctgcaacttaagtatgtgtgctcgtgatcttgactcccacggaatggatcgatccgctggagaacaaactgctagatccacatcctcccttcccctgggaggaccttggtcctcccacatcctccccccagcctgacgtaccacaggctgtgtgaagcccccgcgaaagctgctcacgtggcaattgtgggtccccccttcatcaagacaccaggtctttcctccttaaggctagccccgatgtgtgaattcacattgggcaactagtggtgtcactgtgcgctcccaatctcggccgcggagtgctgttccccaagccaaacccctggcccttcactatgtgcctggcaagcatacctgagaaggtgttccgctgtggctgccagcctggtaacaggtgccccagtgtgcgtaaccttcttccgtcttcggacggtagtgattggttaagatttggtgtaaggtccatgtgccaacgccctgtgcgggatgaaacctctactgccctaggaatgccaggcaggtaccccacccccgggtgggatctgagcctgggctaattgtctacgggtagtttcatttccaattcttttatgtcggagtc

SEQ ID NO: 1306 - DNA, 712 bp, Aichivirus A
tcaccctctttcccggtggtctggtcccggaccaccgttactccattcagcttcttcggaacctgttcggaggaattaaacgggcacccatacatccccatcccctttctgtaacttaagtatgtgtgcttgtaatcttgactcccacggaatggatcgatccgctggagaacaaactgctagatccacatcctcccttcccctgggaggaccttggtcctcccacatcctccccccagcctgacgtaccacaggctgtgtgaagcccccgcgaaagctgctcacgtggcaattgtgggtccccccttcatcaagacaccaggtctttcctccttaaggctagccccgatgtgtgaattcacattgggcaactagtggtgtcactgtgcgctcccaatctcggccgcggagtgctgttccccaagccaaacccctggcccttcactatgtgcctggcaagcatatctgagaaggtgttccgctgtggctgccagcctggtaacaggtgccccagtgtgcgtaaccttcttccgtctccggacggtagtgattggttaagatttggtgtaaggttcatgtgccaacgccctgtgcgggatgaaatctctactgccctaggaatgccaggcaggtaccccaccctcgggtgggatctgagcctgggctaattgtctacgggtagtttcatttccaatccttttatgtcggagtc

SEQ ID NO: 1307 - DNA, 679 bp, Aichivirus A
gtgttactccattcagcttcttcggaacctgttcggaggaattaaacgggcacccatactcccccccaccccccttttgtaactaagtatgtgtgctcgtgaccttgactcccacggaacggaccgatccgttggtgaacaaacagctaggtccacatcctcctttcccctgggagggtccccgccctcccacatcccccccccagcctgacgtgtcacaggctgtgtgaagcccccgcgaaagctgctcacgtggcaattgtgggtccccccttcatcaagacaccaggtctttcctccttaaggctagccccggcgtgtgaactcacgttgggcaactagtggtgtcactgtgcgctcccaatctcggccgcggagtgctgttccccaagccaaacccctggcccttcactatgtgcctggcaagcacacctgagaaggtgttccgctgtggctgccagcctggtaacaggtgccccagtgtgcgtaaccttcttccgtcttcggacggtggtgattggttaagatttggtgtaaggttcatgtgccaacgccctgtgcgggatgaaacctctactgccctaggaatgccaggcaggtaccccaccttcgggtgggatctgagcctgggctaattgtctacgggtggtttcatttccaattctttcatgtcggagtc

SEQ ID NO: 1308 - DNA, 727 bp, Aichivirus A
ggcttcggccccctcaccctcttttccggtggtctggtcccggaccaccgttactccattcagcttcttcggaacctgttcggaggaattaaacgggcacccatacacccccatccccttttttgcaacttaagtatgtgtgctcgtaatcttgactcccacggaatggatcgatccgctggagaacaaactgctagatccacatcctccctcccccctgggaggacctcggtcctcccacatcctccccccagcctgacgtatcacaggctgtgtgaagcccccgcgaaagctgctcacgtggcaattgtgggtccccccttcatcaagacaccaggtctttcctccttaaggctagtcccgatgtgtgaattcacatcgggcaactagtggtgtcactgtgcgctcccaatctcggccgcggagtgctgttccccaagccaaacccctggcccttcactatgtgcctggcaagcatatctgagaaggcgttccgctgtggctgccagcctggtaacaggtgccccagtgtgcgtaaccttcttccgtccccggacggtagtgattggttaagacttggcgtaaggttcatgtgccaacgccctgtgcgggatgaaacctctactgccctaggaatgccaggcaggtaccccaccttcgggtgggatctgagcctgggctaattgtctacgggtagtttcatttctaattctttcatgtcggagtc

SEQ ID NO: 1309 - DNA, 710 bp, Aichivirus A
accctcttttccggtggtctggccccggaccaccgttactccattcagcttcttcggaacctgttcggaggaattaaacgggcacccatacacccccaccccctttctgcaacttaagtatgtgtgctcgtgatcttgactcccacggaatggatcgatccgctggagaacaaactgctagatccacatcctcccttcccttgggtggacctcggtcctcccacatcctccccccagcctgacgtatcacaggctgtgtgaagcccccgcgaaagctgctcacgtggcaattgtgggtccccccttcatcaagacaccaggtctttcctccttaaggctagccccgatgtgtgaattcacattgggcaactagtggtgtcactgtgcgctcccaatctcggccgcggagtgctgttccccaagccgaacccctggcccttcactatgtgcctggcaagcatatctgagaaggtgttccgctgtggctgccagcctggtaacaggtgccccagtgtgcgtaaccttcttccgtcctcggacggtagtgattggttaagatttggtgtaaggttcatgtgccaacgccctgtgcgggatgaaacctctactgccctaggaatgccaggcaggtaccccaccctcgggtgggatctgagcctgggctaattgtctacgggtagtttcatttccaattctttcatgtcggagtc

SEQ ID NO: 1310 - DNA, 710 bp, Aichivirus A
accctcttttccggtggtctggtcccggaccaccgttactccattcagcttcttcggaacctgttcggaggaattaaacgggcacccatacacccccaccccctttttgcaacttaagtatgtgtgctcgtgatcttgactcccacggaatggatcgatccgctggagaacaaactgctagatccacatcctcccttcccttgggaggacctcggtcctcccacatcctccccccagcctgacgtaccacaggctgtgtgaagcccccgcgaaagccgctcacgtggcaattgtgggtccccccttcattaagacaccaggtctttcctccttaaggctagtcccgatgtgtgaattcacattgggcaactagtggtgtcactgtgcgctcccaatctcggccgcggagtgctgttccccaagccaaacccctggcccttcactatgtgcctggcaagcatatctgagaaggtgttccgctgtggctgccagcctggtaacaggtgccccagtgtgcgtaaccttcttccgtcttcggacggtagtgattggttaagatttggcgtaaggttcatgtgccaacgccctgtgcgggatgaaacctctactaccctaggaatgccaggcaggtaccccaccctcgggtgggatctgagcctgggctaattgtctacgggtagtttcatttccaattcttctatgtcggagtc

SEQ ID NO: 1311 - DNA, 710 bp, Aichivirus A
accctctttcccggtggtctggtcccggaccaccgttactccattcagcttcttcggaacctgttcggaggaattaaacgggcacccatacactcccatcccctttctgcaacttaagtatgtgtgctcgtgatcttgactcccacggaatggatcgatccgctggagaacaaactgctagatccacatcctcccttcccttgggtggacctcggtcctcccacatcctccccccagcctgacgtatcacaggctgtgtgaagcccccgcgaaagctgctcacgtggcaattgtgggtccccccttcatcaagacaccaggtctttcctccttaaggctagccccgatgtgtgaattcacattgggcaactagtggtgtcactgtgcgctcccaatctcggccgcggagtgctgttccccaagccgaacccctggcccttcactatgtgcctggcaagcatatctgagaaggtgttccgctgtggctgccagcctggtaacaggtgccccagtgtgcgtaaccttcttccgtcctcggacggtagtgattggttaagatttggtgtaaggttcatgtgccaacgccctgtgcgggatgaaacctctactgccctaggaatgccaggcaggtaccccaccctcgggtgggatctgagcctgggctaattgtctacgggtagtttcatttccaattctttcatgtcggagtc

SEQ ID NO: 1312 - DNA, 677 bp, Aichivirus A
gttactccattcagcttcttcggaacctgttcggaggaattaaacgggcacccatacacccccacccccttttctgcaacttaagtatgtgtgctcgtaatcttgactcccacggaatggatcgatccgctggagaacaaactgctagatccacatcctcccttcccctgggaggaccccggtcctcccacatcctccccccagcctgacgtatcacaggctgtgtgaagtccccgcgaaagctgctcacgtggcaattgtgggtccccccttcatcaagacaccaggtctttcctccttaaggctagccccgatgtgtgaattcacattgggcaactagtggtgtcactgtgcgctcccaatctcggccgcggagtgctgttccccaagccaaacccctggcccttcactatgtgcctggcaagcatatctgagaaggtgttccgctgtggctgccagcctggtaacaggtgccccagtgtgcgtaaccttcttccgtctccggacggtagtgattggttaagatttggtgtaaggttcatgtgccaacgccctgtgcgggatgaaacctctactgccctaggaatgccaggcaggtaccccaccttcgggtgggatctgagcctgggctaattgtctacgggtagtttcatttccaattcttttatgtcggagtc

SEQ ID NO: 1313 - DNA, 677 bp, Aichivirus A
gttactccattcagcttcttcggaacctgttcggaggaattaaacgggcacccatacacccccacccccttttctgcaacttaagtatgtgtgctcgtaatcttgactcccacggaacggatcgatccgctggagaacaaactgctagatccacatcctcccttcccctgggaggaccccggtcctcccacatcctccccccagcctgacgtaacacaggctgtgtgaagtccccgcgaaagctgctcacgtggcaattgtgggtccccccttcaccaagacaccaggtctttcctccttaaggctagccccgatgtgtgaattcacattgggcaactagtggtgtcactgtgcgctcccaatctcggccgcggagtgctgttccccaagccaaacccctggcccttcactatgtgcctggcaagcatatctgagaaggtgttccgctgtggctgccagcctggtaacaggtgccccagtgtgcgtaaccttcttccgtctccggacggtagtgattggttaagatttggtgtaaggttcatgtgccaacgccctgtgcgggatgaaacctctactgccctaggaatgccaggcaggtaccccaccttcgggtgggatctgagcctgggctaattgtctacgggtagtttcatttccaattcttttatgtcggagtc

SEQ ID NO: 1314 - DNA, 677 bp, Aichivirus A
gttactccattcagcttcttcggaacctgttcggaggaattaaacgggcacccatacacccccacccccttttctgcaacttaagtatgtgtgctcgtaatcttgactcccacggaatggatcgatccgctggagaacaaactgctagatccacatcctcccttcccctgggaggaccccggtcctcccacatcctccccccagcctgacgtatcacaggctgtgtgaagtccccgcgaaagctgctcacgtggcaattgtgggtccccccttcatcaagacaccaggtctttcctccttaaggctagccccgatgtgtgaattcacattgggcaactagtggtgtcactgtgcgctcccaatctcggccgcggagtgctgttccccaagccaaacccctggcccttcactatgtgcctggcaagcatatctgagaaggtgttccgctgtggctgccagcctggtaacaggtgccccagtgtgcgtaaccttcttccgtctccggacggtagtgattggttaagatttggtgtaaggttcatgtgccaacgccctgtgcgggatgaaacctctactgccctaggaatgccaggcaggtaccccaccttcgggtgggatctgagcctgggctaattgtctacgggtagttccatttccaattcttttatgtcggagtc

SEQ ID NO: 1315 - DNA, 677 bp, Aichivirus A
gttactccattcagcttcttcggaacctgttcggaggaattaaacgggcacccatacacccccacccccttttctgcaacttaagtatgtgtgctcgtaatcttgactcccacggaatggatcgatccgctggagaacaaactgctagatccacatcctcccttcccctgggaggaccccggtcctcccacatcctccccccagcctgacgtatcacaggctgtatgaagtccccgcgaaagctgctcacgtggcaattgtgggtccccccttcatcaagacaccaggtctttcctccttaaggctagccccgatgtgtgaattcacattgggcaactagtggtgtcactgtgcgctcccaatctcggccgcggagtgctgttccccaagccaaacccctggcccttcactatgtgcctggcaagcatatctgagaaggtgttccgctgtggctgccagcctggtaacaggtgccccagtgtgcgtaaccttcttccgtctccggacggtagtgattggttaagatttggtgtaaggttcatgtgccaacgccctgtgcgggatgaaacctctactgccctaggaatgccaggcaggtaccccaccttcgggtgggatctgagcctgggctaattgtctatgggtagtttcatttccaattcttttatgtcggagtc

SEQ ID NO: 1316 - DNA, 664 bp, Aichivirus A
gcttcttcggaacctgttcggaggaattaaacgggcacccatacacccccacccccttttctgcaacttaagtatgtgtgctcgtaatcttgactcccacggaatggatcgatccgctggagaacaaactgctagatccacatcctcccttcccctgggaggaccccggtcctcccacatcctccccccagcctgacgtatcacaggctgtgtgaagtccccgcgaaagctgctcacgtggcaattgtgggtccccccttcatcaagacaccaggtctttcctccttaaggctagccccgatgtgtgaattcacattgggcaactagtggtgtcactgtgcgctcccaatctcggccgcggagtgctgttccccaagccaaacccctggcccttcactatgtgcctggcaagcatatctgagaaggtgttccgctgtggctgccagcctggtaacaggtgccccagtgtgcgtaaccttcttccgtctccggacggtagtgattggttaagatttggtgtaaggttcatgtgccaacgccctgtgcgggatgaaacctctactgccctaggaatgccaggcaggtaccccaccttcgggtgggatctgagcctgggctaattgtctacgggtagtttcatttccaattcttttatgtcggagtc

SEQ ID NO: 1317 - DNA, 629 bp, Unknown
  Description of Unknown: unclassified Kobuvirus sequence
cacccatacacccccacccccttttctgtaactcaagtatgtgtgctcgtaatcttgactcccacggaatggatcgatccgctggagaacaaactgctagatccacatcctccctccccttgggaggacctcggtcctcccacatcctccctccagcctgacgtatcacaggctgtgtgaagcccccgcgaaagctgctcacgtggcaattgtgggtccccccttcatcaagacaccaggtctttcctccttaaggctagccccgatgtgtgaattcacattgggcaactagtggtgtcactgtgcgctcccaatctcggccgcggagtgctgttccccaagccaaacccctggcccttcactatgtgcctggcaagcatatctgagaaggtgttccgctgtggctgccagcctggtaacaggtgccccagtgtgcgtaaccttcttccgtctccggacggtagtgattggttaagatttggtgtaaggttcatgtgccaacgccctgtgcgggatgaaacctctactgccctaggaatgccaggcaggtaccccaccttcgggtgggatctgagcctgggctaattgtctacgggtagtttcatttccaattcttttatgctggagtc

SEQ ID NO: 1318 - DNA, 487 bp, Aichivirus A
catcctccccccagcctgacgtaccacaggctgtgtgaagcccccgcgaaagctgctcacgtggcaattgtgggtccccccttcattaagacaccaggtctttcctccttaaggctagtcccgatgtgtgaattcacattgggcaactagtggtgtcactgtgcgctcccaatctcggccgcggagtgctgttccccaagccaaacccctggcccttcactatgtgcctggcaagcatatctgagaaggtgttccgctgtggctgccagcctggtaacaggtgccccagtgtgcgtaaccttcttccgtcttcggacggtagtgactggttaagatttggcgtaaggttcatgtgccaacgccctgtgcgggatgaaacctctactaccctaggaatgccaggcaggtaccccaccctcgggtgggatctgagcctgggctaattgtctacgggtagtttcatttccaattcttctatgtcggagtc

SEQ ID NO: 1319 - DNA, 438 bp, Unknown
  Description of Unknown: Aichi virus 1 isolate C1_Kwanak_06 polyprotein gene, partial cds.1 sequence
aagctgctcacgtggcaattgtgggtccccccttcatcaagacaccaggtctttcctccttaaggctagccccggcgtgtgaattcacgttgggcaactagtggtgtcactgtgcgctcccaatctcggccgcggagtgctgtcccccaagccaaacccctggcccttcactatgtgcctggcaagcatatctgagaaggtgttccgctgtggctgccagcctggtaacaggtgccccagtgtacgtaaccttcttccgtctccggacggtagtgattggttaagatttggtgtaaggttcatgtgccaacgccctgtgcgggatgaaacctctactgccctgggaatgccaggcaggtaccccacctccgggtgggatctgagcctgggctaattgtctacgggtagtttcatttccaatccttttatgtcggagtc

SEQ ID NO: 1320 - DNA, 724 bp, Unknown
  Description of Unknown: unclassified Kobuvirus sequence
tgtcggccccctcaccctcttttccggtggtctggacccggaccaccgttactccattcagcttcttcggaacctgttcggaggaattaaacgggcacccactttcctgtcctctccccttttctgtaactccaagtgtgtgctcgtaatcttgactcccgcggattgaccgctccgctggtgaacaaactgctaggtcatctcctccccacccttgggcgtccttccgggcgtccacaccctccccccagcctgacgtgtcacaggctgtacaaagaccccgcgaaagctgctaacgtggcaattgtgggtcccccctttgtaaaggaaccgagtctttctcccttaaggctagacccctgtgtgaattcacaggtggcaactagtggttccactgcatgctcccgacctcggccgcggagtgctgttccccaagtcgtaacactgaccttcacttatgtgcctggcaagcatatctgagaagatgttccgctgtggctgccaaacctggtaacaggtgccccagtgtgcgtagtcttcttccgtcttcggacggtaggtgttaggtaaagatgcggcgtaaggttcaagtgccaacgccctggaagggatgacccttctactgccctaggaatgccgcgcaggtaccccaggttcgcctgggatctgagcgcgggctaattgtctacgggtagtttcatttccctcttcttccactggcatc

SEQ ID NO: 1321 - DNA, 438 bp, Aichivirus A
aagctgctcacgtggcaattgtgggtccccccttcatcaagacaccaggtctttcctccttaaggctagccccgacgtgtgaactcacgttgggcaactagtggtgtcactgtgcgctcccaatctcggccgcggagtgctgttccccaagccaaacccctggcccttcactatgtgcctggcaagcatatctgagaaggtgttccgctgtggctgccagcctggtaacaggtgccccagtgtgcgtaaccttcttccgtcttcggacggtagtgattggttaagatttggtgtaaggttcatgtgccaacgccctgtgcgggatgaaacctctactgccctaggaatgccaggcaggtaccccaccttcgggtgggatctgagcctgggctaattgtctacgggtagtttcatttccaattcttttatgtcggagtc

SEQ ID NO: 1322 - DNA, 438 bp, Unknown
  Description of Unknown: Aichi virus 1 isolate C3_Seongbuk_09 polyprotein gene, partial cds.1 sequence
aagctgctcacgtggcaattgtgggtccccccttcatcaagacaccaggtctttcctccttaaggctagccccggcgtgtgaactcacgttgggcaactagtggtgtcactgtgcgctcccaatctcggccgcggagtgctgttccccaagccaaacccctggcccttcactatgtgcctggcaagcatatctgagaaggtgttccgctgtggctgccagcctggtaacaggtgccccagtgtgcgtaaccttcttccgtcttcggacggtagtgattggttaagatttggtgtaaggttcatgtgccaacgccctgtgcgggatgaaacctctactgccctaggaatgccaggcaggtaccccaccttcgggtgggatctgagcctgggctaattgtctacgggtagtttcatttccaattctttcatgtcggagtc

SEQ ID NO: 1323 - DNA, 438 bp, Unknown
  Description of Unknown: Aichi virus 1 isolate Inlet_2011JAN_Aichi_B leader protein gene,1 sequence
aagctgctcacgtggcaattgtgggtccccccttcatcaagacaccaggtctttcctccttaaggctagccccgatgtgtgaattcacattgggcaactagtggtgtcactgtgcgctcccaatctcggccgcggagtgctgttccccaagccaaacccctggcccttcactatgtgcctggcaagcatatctgagaaggtgttccgctgcggctgccaccctggtaacaggtgccccagtgtgcgtaaccttcttccgtctccggacggtagtgattggttaagatttggtgtaaggttcatgtgccaacgccctgtgcgggatgaaacctctactgccctaggaatgccaggcaggtaccccacccccgggtgggatctgagcctgggctaattgtctacgggtagtttcatttccaattcttttatgtcggagtc

SEQ ID NO: 1324 - DNA, 438 bp, Unknown
  Description of Unknown: Aichi virus 1 isolate C4_Yongdeongpo_07 polyprotein gene, partial1 sequence
aagctgctcacgtggcaattgtgggtccccccttcatcaagacaccaggtctttcctccttaaggctagccccgatgtgtgaattcacattgggcaactagtggtgtcactgtgcgctcccaatctcggccgcggagtgctgttccccaagccaaacccctggcccttcactatgtgcctggcaagcatatctgagaaggtgttccgctgtggctgccagcctggtaacaggtgccccggtgtgcgtaaccttcttccgtctccggacggtagtgattggttaagatttggtgtaaggttcatgtgccaacgccctgtgcgggatgaaacctctactgccctaggaatgccaggcaggtaccccacccccgggtgggatctgagcctgggctaattgtctacgggtagtttcatttccaattcttttatgtcggagtc

SEQ ID NO: 1325 - DNA, 438 bp, Unknown
  Description of Unknown: Aichi virus 1 isolate Inlet_2011JAN_Aichi_A leader protein gene,1 sequence
aagctgctcacgtggcaattgtgggtccccccttcatcaagacaccaggtctttcctccttaaggctagccccggcgcgtgaactcacgttgggcaactagtggtgtcactgtgcgctcccaacctcggccgcggagtgctgttccccaagccaaacccctggcccttcactatgtgcctggcaagcatatctgagaaggtgttccgctgtggctgccagcctggtaacaggtgccccagtgtgcgtaaccttcttccgtcttcggacggtagtgattggttaagatttggtgtaaggttcatgtgccaacgccctgtgcgggatgaaacctctactgccctaggaatgccaggcaggtaccccaccctcgggtgggatctgagcctgggctaattgtctacgggtagtttcatttccaattcttttatgtcggagtc

SEQ ID NO: 1326 - DNA, 438 bp, Unknown
  Description of Unknown: Aichi virus 1 isolate C2_Kangdong_01 polyprotein gene, partial cds.1 sequence
aagctgctcacgtggcaattgtgggtccccccttcatcaagacaccaggtctttcctccttaaggctagccccgatgtgtgaattcacattgggcaactagtggtgtcactgtgcgctcccaatctcggccgcggagtgctgttccccaagccaaacccctggcccttcactatgtgcctggcaagcatatctgagaaggtgttccgctgtggctgccagcctggtaacaggtgccccagtgtgcgtaaccttcttccgtctccggacggtagtgattggttaagatttggcgtaaggttcatgtgccaacgccctgtgcgggatgaaacctctactgccctaggaatgccaggcaggtaccccaccctcgggtgggatctgagcctgggctaattgtctacgggtagtttcatttccaattcttttatgtcggagtc

SEQ ID NO: 1327 - DNA, 438 bp, Aichivirus A
aagctgctcacgtggcaattgtgggtccccccttcatcaagacaccaggtctttcctccttaaggctagccccggcgtgtgaactcacgttgggcaactagtggtgtcactgtgcgctcccaatctcggccgcagagtgctgttccccaagccaaacccctggcccttcactatgtgcctggcaagcatatctgagaaggtgttccgctgtggctgccagcctggtaacaggtgccccagtgtgcgtaaccttcttccgtcttcggacggtagtgattggttaagatttggtgtaaggttcgtgtgccaacgccctgtgcgggatgaaacctctactgccctaggaatgccaggcaggtaccccaccttcgggtgggatctgagcctgggctaattgtctacgggtagtttcatttccaattctttcatgtcggagtc

SEQ ID NO: 1328 - DNA, 438 bp, Unknown
  Description of Unknown: Aichi virus 1 isolate C6_Mapo_22 polyprotein gene, partial cds.1 sequence
aagctgctcacgtggcaattgtgggtccccccttcatcaagacaccaggtctttcctccttaaggctagccccggcgtgtgaactcgcgttgggcaactagtggtgtcactgtgcgctcccaatctcggccgcggagtgctgttccccaagccaaacccctggcccttcactatgtgcctggcaagcatatctgagaaggtgttccgctgtggctgccagcctggtaacaggtgccccagtgtgcgtaaccttcttccgtcttcggacggtagtgattggttaagatttggtgtaaggttcgtgtgccaacgccctgtgcgggatgaaacctctactgccctaggaatgccaggcaggtaccccaccttcgggtgggatctgagcctgggctaattgtctacgggtagtttcatttccaattccttcatgtcggagtc

SEQ ID NO: 1329 - DNA, 438 bp, Unknown
  Description of Unknown: Aichi virus 1 isolate C4_Yongdeongpo_16 polyprotein gene, partial1 sequence
aagctgctcacgtggcaattgtgggtccccccttcatcaagacaccaggtctttcctccttaaggctagccccgatgtgtgaattcacattgggcaactagtggtgtcactgtgcgctcccaatctcggccgcggagtgctgttccccaagccaaacccctggcccttcactatgtgcctggcaagcatatctgagaaggtgttccgctgtggctgccagcctggtaacaggtgccccggtgtgcgtaaccttcttccgtctccggacggtagtgattggttaagatttggtgtaaggttcatgtgccaacgccctgtgcgggatgaaacctctactgccctaggaatgccaggcaggtaccccaccctcgggtgggatctgagcctgggctaattgtctacgggtagtttcatttccaattctttcatgtcggagtc

SEQ ID NO: 1330 - DNA, 725 bp, Unknown
  Description of Unknown: unclassified Kobuvirus sequence
cctcggccccctcaccctcttttccggtggtctggacccggaccaccgttactccattcagcttcttcggaacctgttcggaggaattaaacgggcacccactttcctgtcctctccccctttctgcaactcaagtgtgtgctcgtaatcctgactcccacgggttgaccgccccgttggtgaacaaacagctaggtcattccctccctacccctgggcgccatttcagtggcgttcatatcctccccccagcctgacgtgtcacaggctgtgcaaagtccccgcgaaagctgctcacgtggcaattgtgggtcccccctttgtgaaggaaccgagtctttctcccttaaggctagacccctgtgtgaactcacaggtggcaactagtggttccactgcatgctcccgacctcggccgcggagtgctgttccccaagtcgtgacactgacctccacttatgtgcctggcaagcatatctgagaagatgttccgctgtggctgccaaacctggtaacaggtgccccagtgcgtgtagtcttcttccgtctccggacggtaagtgtgtggtaaagatgcggcgtaaggttcaagtgccaacgccctggaagggatgacccttctactgccctaggaatgccgcgcaggtaccccaggttcgcctgggatctgagcgcgggctaattgtctacgggtagtttcatttccctctcttttcactggcatc

SEQ ID NO: 1331 - DNA, 438 bp, Unknown
  Description of Unknown: Aichi virus 1 isolate C5_Mapo_01 polyprotein gene, partial cds.1 sequence
aagctgctcacgtggcaattgtgggtccccccttcatcaagacaccaggtctttcctccttaaggctagccccggcgtgtgaactcacgttgggcaactagtggtgtcactgtgcgctcccaatctcggccgcggagtgctgttccccaagccaaacccctggcccttcactatgtgcctggcaagcatatctgagaaggtgttccgctgtggctgccagcctggtaacaggtgcccccgtgtgcgtaaccttcctccgtcttcggtcggtagtgattggttaagatttggtgtaaggttcgtgtgccaacgccctgtgcgggatgaaacctctactgccctaggaatgccaggcaggtaccccaccttcgggtgggatctgagcctgggctaattgtctacgggtagtttcatttccaattccttcatgtcggagtc

SEQ ID NO: 1332 - DNA, 395 bp, Unknown; identical to SEQ ID NO: 431
  Description of Unknown: Kobuvirus sp. strain 16806x8 polyprotein gene, partial cds.1 sequence

SEQ ID NO: 1333 - DNA, 733 bp, Unknown
  Description of Unknown: unclassified Kobuvirus sequence
cttcggccctcacaccctcttttccgatggtctggtcccggaccaccgtcactccattcagcttcttcggaacctgttcggaggaattaaacgggcaccccacttcccccccccaccctcgcaacttcaagtgtgtgtgcccataaccttgacccctgccggtatgccgcccggttcagtggacaaactgctaggcaaattcccccctccccctgtggctggtccttcaaccagccactctcttccccccagccggacgtgctacaggctgtgcaaagcccccgcgaaagctgctcacgtggcaattgtgggtcccccctttgtcaaggcttcgagtctttctcccttaaggctagtcccgtactgtgaaatcagtgtgggcaactagtgaagccactgcacgctcccgaccacggacgcggagtgctgtcccccaagtcatgacactaacaccaagctgtgctgcctggcaagcatagcctgggaaggtgttccgctgtggctgccaaacctggtaacaggtgccccagtgtgtgtaaccttcctccagtcttcggactggcagctttgtgtgaagacgtgacgtaaggttcaagtgccaactccctggaagggatgacccctctactgccctaggaatgctacgcaggtacccctggttcgccagggatctgagcgtaggctaattgtctacgggtagtttcatttcccacctttttatttctttagcatc

SEQ ID NO: 1334 - DNA, 729 bp, Aichivirus A
cctcggccccctcaccctcttttccggtggtctggtcccggaccaccgttactccattcagcttcttcggaacctgttcggaggaattaaacgggcacccactcatccctacctccccctgtaacttgaagtgtgtgctcgtgaccttgactcctgcgggcttcaccgacccgtccagtgaacaaactgctaggtgatttcttcccctcccctgacctggatgttccacatccaggtcttcctcccccagcccgacatgtcatgggctgtttggaatccccgcgaaagctgctaacgtggcaattgtgggtcccccttccaacaagacaccgagtctttctcccttaaggctagccccgtgtggtgaattccaccgggcaactagtgatgtcaatgcatgcctccgacctcggccgcggagtgctgccccccaagttgcgaaactgaccaaggattgtgctgcctggcaagcatagtctgaggagatgttccgctgtggctgccaaacctggtaacaggtgccccagtgcgcgtagtctccttccggttcgtccggctgtcctttggtaaagacacaatgtaaggggcgtgtgccaacgccctggaaagagtgaacttctactgccctaggaatgccacgcaggtacccctggtctcctaccagggatctgagcgtgggctaattgtctaacgggtagtttcatttctctcctcccttttgttgacacc

SEQ ID NO: 1335 - DNA, 729 bp, Aichivirus A
cctcggccccctcaccctcttttccggtggtctggtcccggaccaccgttactccattcagcttcttcggaacctgttcggaggaattaaacgggcacccactcacccccatctccccctgtaacttgaagtgtgtgctcgtgaccttgactcctgcgggcttcaccgacccgtccagtgaacaaactgctaggtgatttcttcccctcccctagcctggatgttccacatccaggtcttcttcccccagcccgacatgtcatgggctgtttggaatccccgcgaaagctgctaacgtggcaattgtgggtcccccttccaacaagacaccgagtctttctcccttaaggctagccccgtgtggtgaattccaccgggcaactagtggtgtcaatgcatgcctccgacctcggccgcggagtgctgccccccaagttgcgaaactgaccaaggattgtgctgcctggcaagcatagtctgaggagatgttccgctgtggttgccaaacctggtaacaggtgccccagtgcgcgtagtctccttccggttcgtccggctgtcctttggtaaagacacaatgtaaggggcgtgtgccaacgccctggaaagagtgaacttctactgccctaggaatgccacgcaggtacccctggtttcttaccagggatctgagcgtgggctaattgtctaacgggtagtttcatttccctcccttcttttgttgacatc

SEQ ID NO: 1336 - DNA, 717 bp, Aichivirus A
tcaccctcttttccggtggtccggtcccagaccaccgttactccactcagcttcttcggaacctgtctggaggaattaaacgggcacccactcatccccaccccccttgtaacttaaagtgtgtgctcgtgaccttgactcctgcgggcttcaccgacccgttcagtgaacagactgctaggtgatttcttccccttccctggcctggatggcccacatccaggtccccttcccccagcccgacatgtcatgggctgtttggaatccccgcgaaagctgctaacgtggcaattgtgggtcccccttccaacaagacaccgagtctttctcccttaaggctagccccgtgtggtgaattccaccgggcaactagtgacgccactgcatgcctccgacctcggccgcggagtgctgccccccaagttgtgaaactggccaaggactgtgctgcctggcaagcatagtctgaggagatgttccgctgtggctgccaaacctggtaacaggtgccccagtgtgcgtagtctccttccggttcgtccggctgtcctttggtaaagacacaatgtaaggggcgtgtgccaacgccctggaaagagtgaacttctgctgccctaggaatgccacgcaggtacccctggtttcccaccagggatctgagcgtgggctaattgtctaacgggtagtttcatttccctcctctcttttgttgacatc

SEQ ID NO: 1337 - DNA, 523 bp, Unknown
  Description of Unknown: unclassified Kobuvirus sequence
cctccccacccctgggcgccgcctaggcgacgtccacatcctccccccagcctgacgtgtcacaggctgtgcaaagaccccgcgaaagctgctcacgtggcaattgtgggtcccccctttgtgaaggaaccgagtctttctcccttaaggctagacccctgtgtgaattcacaggtggcaactagtggttccactgcatgctcccgacctcggccgcggagtgctgttccccaagtcgtaacactgacctccacttatgtgcctggcaagcatatctgagaagatgttccgctgtggctgccaaacctggtaacaggtgccccagtgtgcgtagtcttcttccgtctccggacggtaagtgtgtggtaaagatgcggcgtaaggttcaagtgccaacgccctggaagggatgacccttctactgccctaggaatgccgcgcaggtaccccaggttcgcctgggatctgagcgcgggctaattgtctacgggtagtttcatttccctctttcttcactggcatc

SEQ ID NO: 1338 - DNA, 534 bp, Unknown
  Description of Unknown: unclassified Kobuvirus sequence
ctaggtcattccctccccacccctgggcgccgcttcggcggtgtccacatcctccccccagcctgacgtgtcacaggctgtgcaaagaccccgcgaaagctgctcacgtggcaattgtgggtcccccctttgtgaaggaaccgagtctttctcccttaaggctagacccctgtgtgaattcacaggtggcaactagtggttccactgcatgctcccgacctcggccgcggagtgctgttccccaagtcgtaacactgacctccacttatgtgcctggcaagcatatctgaaaagatgttccgctgtggctgccaaacctggtaacaggtgccccagtgtgcgtagtcttcttccgtcttcggacggtaagtgtgtggtaaagatgcggcgtaaggttcaagtgccaacgccctggaagggatgacccttctactgccctaggaatgccgcgcaggtaccccaggttcgcctgggatctgagcgcgggctaattgtctacgggtagtttcatttccctctttcttcactggcatc

SEQ ID NO: 1339 - DNA, 306 bp, Unknown
  Description of Unknown: Aichi virus 1 isolate ETH/2016/P24 polyprotein gene, partial cds.1 sequence
cggagtgctgttccccaagccaaacccctggcccttcactatgtgcctggcaagcatatctgagaaggtgttccgctgtggctgccagcctggtaacaggtgccccagtgtgcgtaaccttcttccgtcttcggacggtagtgattggttaagatttggcgtaaggttcatgtgccaacgccctgtgcgggatgaaacctctactaccctaggaatgccaggcaggtaccccaccctcgggtgggatctgagcctgggctaattgtctacgggtagtttcatttccaattcttctatgtcggagtc

SEQ ID NO: 1340 - DNA, 301 bp, Unknown
  Description of Unknown: Aichi virus 1 isolate ETH/2016/P6 polyprotein gene, partial cds.1 sequence
gtgctgttccccaagccaaacccctggccctccactatgtgcctggcaagcatacctgagagggtgttccgctgtggctgccagcctggtaacaggtgccccagtgtgcgtaaccttcttccgtcttcggacggtagtgatcggttaagatttggtgtaaggttcatgtgccaacgccctgtgcgggatgaacctctactgccctaggaatgccaggcaggtaccccaccctcgggtgggatctgagcctgggctaattgtctacgggtagtttcatttccaatccttttatgtcggagtc

SEQ ID NO: 1341 - DNA, 610 bp, Unknown; identical to SEQ ID NO: 665
  Description of Unknown: unclassified Kobuvirus sequence

SEQ ID NO: 1342 - DNA, 711 bp, Unknown
  Description of Unknown: unclassified Kobuvirus sequence
tcaccctcttttccggtggtccggacccagaccaccgttactccattcagcttcttcggaacctgttcggaggaattaaacgggcacccactcaccccctctccctcctcgtaactaagtgtgtgcccagtctctttactcctgctggcttcaccgaccagtagtggccaaaatgctaggtgaacctcctccctcccccactgggctcccgcccagtttcctccccccagcctgacgtgtcacaggctgtgcaaagaccccgcgaaagctgccaaaagtggcaattgtgggtcccccctttgtcaaggcgtcgagtctttctcccttaaggctagccccgtcagtgaattctgtcgggcaactagtgacgccactgcatgcctccgacctcggccgcggagtgctgccccccaagtcatgcccctgaccacaagttgtgctgtctggcaaacattgtctgtgagaatgttccgctgtggctgccaagcctggtaacaggctgccccagtgtgtgtagttctcatccggacttcggtctggcaacttgctgttaagacatggcgtaaggggcgtgtgccaacgccctggaacgagtgtccactctaataccccgaggaatgctacgcaggtacccctggcctgccagggatctgagcgtaggctaattgtctaagggtattttcatttcccactctttctttcttgttcata

SEQ ID NO: 1343 - DNA, 713 bp, Unknown; identical to SEQ ID NO: 871
  Description of Unknown: unclassified Kobuvirus sequence

SEQ ID NO: 1344 - DNA, 712 bp, Aichivirus A; identical to SEQ ID NO: 867

SEQ ID NO: 1345 - DNA, 712 bp, Aichivirus A; identical to SEQ ID NO: 866

SEQ ID NO: 1346 - DNA, 711 bp, Unknown
  Description of Unknown: unclassified Kobuvirus sequence
tcaccctcttttccggtggtccggacccagaccaccgttactccattcagcttcttcggaacctgtttggaggaattaaacgggcacccacccaccttcacccccttttcgtaactaagtgtgtgcccaatctcatgactcctgctgacttcaccgaccagcagtgtccaaaacgctaggtgaatttccttcctccccctctgggcttctgcccagctccctccctccagcctgacgtgccacaggctgtgcaaagaccccgcgaaagctgccaaaagtggcaattgtgggtcccccctttgtaaaggcgtcgagtctttctcccttaaggctagacccgtcagtgaattctgtcgggcaactagtgacgccactgcatgcctccgacctcggccgcggagtgctgccccccaagtcgtgcccctgactacaagttgtgctgtctggcaaacattgtctgtgagaatgttccgctgtggctgccaagcctggtaacaggctgccccagtgtgcgtagttctcatccagacttcggtctggcaacttgctgttaagacacggcgtaaggggcgtgtgccaacgccctggaacgagtgtccactctaataccccgaggaatgctacgcaggtacccctggctccccagggatctgagcgtaggctaattgtctaagggtattttcatttcccactctttctttcttgttcata

SEQ ID NO: 1347 - DNA, 646 bp, Aichivirus A
ggaattaaacgggcacccactcacccccatccccccctgtaacttaaagtgtgtgctcgtgaccttgactcctgcgggcttcaccgacccgtccagtgaacaaactgctaggtgactccttccccccccctggcctggatggcccacatccaggtcttcttcccccagcccgacatgtcatgggctgtttggaatccccgcgaaagctgctaacgtggcaattgtgggtcccccttccaacaagacaccgagtctttctcccttaaggctagccccgtgtggtgaattccaccgggcaactagtggtgtcaatgcatgcctccgacctcggccgcggagtgctgccccccaagttgcgaaactgaccaagactgtgctgcctggcaagcatagtctgaggagatgttccgctgtggttgccaaacctggtaacaggtgccccagtgtgcgtagtctccttccggttcgtccggctgtcctttggtaaagacacaatgtaaggggcgtgtgccaacgccctggaaagagtgaacttctactgccctaggaatgccacgcaggtacccctggtttcccaccagggatctgagcgtgggctaattgtctaacgggtagtttcatttccctcctctcttttgttgacatc

SEQ ID NO: 1348 - DNA, 712 bp, Unknown
  Description of Unknown: Canine kobuvirus 1 isolate 75 polyprotein mRNA, complete cds.1 sequence
tcaccctcttttccggtggtccggacccagaccaccgttactccattcagcttcttcggaacctgttcggaggaattaaacgggcacccactcaccccctctccctcctcgtaactaagtgtgtgcccagtctctttactcctgctggcttcaccgaccagtagtggccaaaatgctaggtgaacctcctccctcccccactgggctcccgcccagtttcctccccccagcctgacgtgtcacaggctgtgcaaagaccccgcgaaagctgccaaaagtggcaattgtgggtcccccctttgtcaaggcgtcgagtctttctcccttaaggctagacctgtcagtgaattctgccgggcaactagtgacgccactgcatgcctccgacctcggctgcggggtgctgccccccaagttgtgcccctgagccacaagttgtgctgtctggcaaacattgtctgtgagaatgttccgctgcggctgccaagcctggtgacaggctgccccagtgtgtgtagttctcatccagacctcggtctggcaacttgctgttaagacacggcgtaaggggcgtgtgccaacgccctggaacgagtgtccattctaataccccgaggaatgctacgcaggtacccctggttcaccagggatctgagcgtaggctaattgtctaagggtattttcatttcccactctttctttcttgttcata

SEQ ID NO: 1349 - DNA, 712 bp, Unknown
  Description of Unknown: Canine kobuvirus 1 isolate B103 polyprotein mRNA, complete cds.1 sequence
tcaccctcttttccggtggtccggacccagaccaccgttactccattcagcttcttcggaacctgttcggaggaattaaacgggcacccactcaccctctctccctcctcgtaactaagtgtgtgcccagtctctttactcctgctggcttcaccgaccagtagtgaccaaaatgctaggtgaacctcctcccacgccctctgggcccccgcccagtttcctccccccagcctgacgtgtcacaggctgtacaaagaccccgcgaaagctgccaaaagtggcaattgtgggtcccccctttgtcaaggcgtcgagtctttctcccttaaggctagacccgtcagtgaattctgccgggcaactagtgacgccactgcatgcctccgacctcggctgcggagtgctgccccccaagtcgtgcccctgagccacaagttgtgctgtctggcaaacattgtctgtgagaatgttccgctgcggctgccaggcctggtaacaggctgccccagtgtgtgtagttctcatccagatctcggtctggcaacttgctgttaagacacggcgtaaggggcgtgtgccaacgccctggaacgagtgtccattctaataccccgaggaatgctacgcaggtacccctggtgaaccaggggtctgagcgtaggctaattgtctaagggtattttcatttcccactctttctttcttgttcata

SEQ ID NO: 1350 - DNA, 646 bp, Aichivirus A
ggaattaaacgggcacccactcacccccatccccccctgtaacttaaagtgtgtgctcgtgaccttgactcctgcgggcttcaccgacccgtccagtgaacaaactgctaggtgatttcttcccctccctcagcctgggtgttccacatccaggtctttttcccccagcccgacatgtcatgggctgtttggaatccccgcgaaagctgctaacgtggcaattgtgggtcccccttccaacaagacaccgagtctttctcccttaaggctagccccgtgtggtgaactccaccgggcaactagtggtgtcaatgcatgcctccgacctcggccgcggagtgctgccccccaagttgtgaaactgaccaaggatgtgctgcctggcaagcatagtctgaggagatgttccgctgtggctggcaagcctggtaacaggtgccccagtgtgcgtagtctccttccggttcgtccggctgtcctttggtaaagacacaatgtaaggggcgtgtgccaacgccctggaaagagtgaacttttactgccctaggaatgccacgcaggtacccctggtttcccaccagggatctgagcgtgggctaattgtctaacgggtagtttcatttccctcctctcttttgttgacatc

SEQ ID NO: 1351 - DNA, 647 bp, Aichivirus A
ggaattaaacgggcacccactcatccctacctccccctgtaacttgaagtgtgtgctcgtgaccttgactcctgcgggcttcaccgacccgtccagtgaacaaactgctaggtgatttcttccccttcccccacctggatgttctacatccaggtcttcctcccccagcccgacatgtcatgggctgtttggaacccccgcgaaagctgctaacgtggcaattgtgggtcccccttccaacaagacaccgagtctttctcccttaaggctagccccgtgtggtgaattccaccgggcaactagtggtgtcaatgcatgcctccgacctcggccgcggagtgctgccccccaagttgtgaaactgaccaaggattgtgctgcctggcaagcatagtctgaggagatgttccgctgtggctgccaaacctggtaacaggtgccccagtgcgcgtagtctccttccggttcgtccggctgtcctctggtaaagacacaatgtaaggggtgtgtgccaacgccctggaaagagtgaacttctactgccctaggaatgccacgcaggtacccctggtcccccaccagggatctgagcgtgggctaattgtctaacgggtagtttcatttctctcctctcctttgttgacatc

SEQ ID NO: 1352 - DNA, 579 bp, Unknown
  Description of Unknown: Murine kobuvirus 1 isolate MKV1/NYC/2014/M014/0146, partial genome.1 sequence
gccaggtcgcatcgcctggttggtgaccaaactgctagatgctcctccctttccctcggggttggcgcaccgccatccctgcatcctccccccagcctgacatgctacaggctgtgcaagaaccccgcgaaagctgccaccgtggcaattgtgggtccccctcttgtcaaggcacagagtctttctcccttaaggctagacccctctgtgaattcagaggcggcaactagttgtgccactacatgcctcagacctcggtcgcggagtgctgttccccaaaccctgacactgccgcgtgagtatgctgcttggcaagcattgcctggatggtcgttccgctggggctgccaggtctggtaacagaccgctccagtgtgcgtagaccatctccagcttcggctggtgctcacaaggtaagactcggtgtaaggttcatgtgccaacaccctggaatgagtgaaaactctactgccctaggaatgctacgcaggtacccctgctcccttgggagccagggatctgagcgtaggctaattgtctgtcgggtagtttcatttcccacctcctagactgttcacc

SEQ ID NO: 1353 - DNA, 601 bp, Aichivirus A
tttaagtgttgtgcccaatctcttgactcctgctggaaccaccgaccagtagtgtccaaaatgctaggtggaaaatcctcccttcccctctgggctccatgcccagcatcctccccccagcctgacgtgtcacaggctgtgcaaagaccccgcgaaagctgccaaaagtggcaattgtgggtcccccctttgtcaaggcgtcgagtctttctcccttaaggctagccccgtcagtgaattctgacgggcaactagtgacgccactgcatgcctccgacctcggccgcggagtgctgccccccaagtcatgcccctgaccacaagttgtgctgtctggcaaacactgtctgtgagaatgttccgctgtggctgccaagcctggtaacaggctgccccagtgtgcgtagttctcatccagacctcggtctggcaacttgctgttaagacatggcgtaaggggcgtgtgccaacgccctggaacgagtgtccactctaataccccgaggaatgctacgcaggtacccctggttcgccagggatctgagcgtaggctaattgtctaagggtattttcatttcccactctctctttcttgttcata

SEQ ID NO: 1354 - DNA, 601 bp, Unknown
  Description of Unknown: unclassified Kobuvirus sequence
tttaagtgttgtgcccaatctcttgactcctgctggaaccaccgaccagtagtgtccaaaatgccaggtggaaaatcctcccttcccctctgggcttcatgcccggcatcctccccccagcctgacgtgccacaggctgtgcaaagaccccgcgaaagctgccaaaagtggcaattgtgggtcccccctttgtcaaggcgtcgagtctttctcccttaaggctagtcctgtcagtgaactctgtcgggcaactagtgacgccactgcatgcctccgacctcggccgcggagtgctgccccccaagtcatgcccctgaccacaagttgtgctgtctggcaaacattgtctgtgagaatgttccgctgtggctgccaagcctggtaacaggctgccccagtgtgcgtaattctcatccagacttcggtctggcaacttgctgttaagacatggcgtaaggggcgtgtgccaacgccctggaacgagtgtccactctaataccccgaggaatgctacgcaggtacccctggctcgccagggatctgagcgtaggctaattgtctaagggtattttcatttcccaccctcttcttcttgttcata

SEQ ID NO: 1355 - DNA, 493 bp, Unknown
  Description of Unknown: unclassified Kobuvirus sequence
tcctccccccagcctgacgtgtcacaggctgtgcaaagaccccgcgaaagctgccaaaagtggcaattgtgggtcccccctttgtcaaggcgtcgagtctttctcccttaaggctagccccgacagtgaattctgtcgggcaactagtgacgccactgcatgcctccgacctcggccgcggagtgctgccccccaagtcgtgcccctgactacaagttgtgctgtctggcaaacattgtctgtgagaatgttccgctgtggctgccaagcctggtaacaggctgccccagtgtgcgtagttctcatccagacttcggtctggcaacttgctgttaagacgcggcgtaaggggcgtgtgccaacgccctggaacgagtgtccactctaataccccgaggaatgctacgcaggtacccctggctcgccagggatctgagcgtaggctaattgtctaagggtattttcatttcccactctttctctctcgttcata

SEQ ID NO: 1356 - DNA, 612 bp, Unknown; identical to SEQ ID NO: 680
  Description of Unknown: unclassified Kobuvirus sequence

SEQ ID NO: 1357 - DNA, 766 bp, Aichivirus A; identical to SEQ ID NO: 1227

SEQ ID NO: 1358 - DNA, 561 bp, Aichivirus A
ccgaccagtagtgtccgaaatgctagagtggacttcctcccttcccctctgggtatcttgcccagtttcctccccccaacctgacgtgccacaggctgtgaaaacaccccgcgaaagctgccaaaagtgggaattgtgggtccccccctttgccaaggagtcgagtctttctcccttaaggctagccccatcagtgaattctgttgggcaactagtgacgccactgcatgcctccgacctcggccgcggagtgctgccccccaagtcgtgcccctgaccacaagttgtgctgtctggcaaacattgtctgtgagaatgttccgctgtggctgccaagcctggtaacaggctgccccagtgtgcgtagttctcatccagacttcggtctggcaacttgctgttaagacacggcgtaaggggcgtgtgccaacgccctggaacgagtgtccactctaataccccgaggaatgctacgtaggtacccctggttcgccagggatctgagcgtaggctaattgtctaagggtattttcatttcccactctctctttcttgttcata

SEQ ID NO: 1359 - DNA, 699 bp, Unknown
  Description of Unknown: unclassified Salivirus sequence
tatggcaggcgggcttgtggacggtttcggcccacccacagcaagaatgccatcatctgtcctcacccccaattttccctttcttcccctgcaatcatcacgcttactcgcatgtgcattgagtggtgcatgtgttgaacaaacagctacactcacatgggggcgggttttcccgccctacggcctctcgcgaggcccacccttcccctccccttataactacagtgctttggcaggtaagcatcctgatcccccgcggaagctgctcacgtggcaactgtggggacccagacaggttatcaaaggcacccggtctttccgccttcaggagcatccccactagtgaattctagtggggctctgcttggtgccaacctcccccaaatgcgcgctgcgggagtgctcttccccaacccatcctagtatcctctcatgtgtgtgcttggtcagcatatctgagacgacgttccgctgtcccagaccagtccagtaatggacgggccagtgtgcgtagtcgtcttccggcttgtccggcgcatgtttggtgaaccggtggggtaaggttggtgtgcccaacgcccgtactttggtgacacctcaagaccacccaggaatgccagggaggtaccccgcctcacggcgggatctgaccctgggctaattgtctacggtggttcttcttgcttccacttctttctt

SEQ ID NO: 1360 - DNA, 709 bp, Salivirus A
tatggcaggcgggcttgtggacggcttcggcccacccacagcaagaatgccatcatctgtcctcacccccaattttcccttttcttcccctgcaaccattacgcttactcgcatgtgcattgagtggtgcatgtgttgaacaaacagctacactcacatgggggcgggttttcccgccctacggcctctcgcgaggcccaccccttccctccccttataactacagtgctttggtaggtaagcatcctgatcccccgcggaagctgctcacgtggcaactgtggggacccagacaggttatcaaaggcacccggtctttccgccttcaggagtatccctactagtgaattctagcggggctctgcttggtgccaacctcccccaaatgcgcgctgcgggagtgctcttccccaactcaccctagtatcctctcatgtgtgtgcttggtcagcatatctgagacgatgttccgctgtcccagaccagtccagtaatggacgggccagtgcgtgtagtcgtcttccggcttgtccggggcatgtttggtgaaccggtggggtaaggttggtgtgcccaacgcccgtactttggtgacacctcaagaccacccaggaatgccagggaggtaccccacctcacggtgggatctgaccctgggctaattgtctacggtggttcttcttgcttccacttctttcttctgttcacg

SEQ ID NO: 1361 - DNA, 720 bp, Unknown
  Description of Unknown: unclassified Salivirus sequence
cccctttcgaccgacctatggcaggcgggcttgtggacggcttcggcccacccacagcaagaatgccatcatctgtcctcacccccatcttcccctttcttccctgcaaccgtcacgcttactcgcatgtgcattgagtggtgcacgtgtcgaacaaacagctacactcacatggggcgggttttcccgccttgcggcctctcgcgaggcccacccctccctctcctcccataactacagtgctttggtaggtaagcatcctgatcccccgcggaagctgctcacgtggcaactgtggggacccagacaggttatcaaaggcacccggtctttccgccttcaggagtatccctgctagtgaattctagtagggctctgcttggtgccaacctcccccaaatgcgcgctgcaggagtgctcttccccaactcaccctagtatcctctcatgtgtgtgcttggtcagcatatctgagacgatgttccgctgtcccagaccagtccagtaatggacgggccagtgtgcgtagtcgtcttccggcttgcccggcgcatgtttggtgaaccggtggggtaaggttggtgtgcccaacgcccgtactttggtgatacctcaagaccacccaggaatgccagggaggtaccccgcttcacagcgggatctgaccctgggctaattgtctacggtggttcttcttgcttccacttctttctactgttt

SEQ ID NO: 1362 - DNA, 724 bp, Unknown
  Description of Unknown: unclassified Salivirus sequence
cttccccctttcgaccgccctatggcaggcgggcttgtggacggcttcggcccacccacagcaagaatgccatcatctgtcctcacccccatcttcccctttcttccctgcaaccgtcacgcttactcgcatgtgcattgagtggtgcacgtgtcgaacaaacagctacactcacatggggcgggttttcccgccttgcggcctctcgcgaggcccacccctcccccccctcccataactacagtgctttggtaggtaagcatcctgatcccccgcggaagctgctcacgtggcaactgtggggacccagacaggttatcaaaggcacccggtctttccgccttcaggagtatccctgctagtgaattctagtagggctctgcttggtgccaacctcccccaaatgcgcgctgcaggagtgctcttccccaactcaccctagtatcctctcatgtgtgtgcttggtcagcatatctgagacgatgttccgctgtcccagaccagtccagtaatggacgggccagtgtgcgtagtcgtcttccggcttgcccggcgcatgtttggtgaaccggtggggtaaggttggtgtgcccaacgcccgtactttggtgatacctcaagaccacccaggaatgccagggaggtaccccgcttcacagcgggatctgaccctgggctaattgtctacggtggttcttcttgcttccacttctttctactgttt

SEQ ID NO: 1363 - DNA, 731 bp, Unknown; identical to SEQ ID NO: 931
  Description of Unknown: unclassified Salivirus sequence

SEQ ID NO: 1364 - DNA, 650 bp, Salivirus A
tctgtcctcaccccatcttcccttctttcctgcaccgttacgcttactcgcatgtgcattgagtggtgcacgtgcttgaacaaacagctacactcacatgggggcgggttttcccgccctgcggcctctcgcgaggcccacccctccccttcctcccataactacagtgctttggtaggtaagcatcctgatcccccgcggaagctgctcacgtggcaactgtggggacccagacaggttatcaaaggcacccggtctttccgccttcaggagtatccctgctagtgaattctagtagggctctgcttggtgccaacctcccccaaatgcgcgctgcgggagtgctcttccccaactcaccctagtatcctctcatgtgtgtgcttggtcagcatatctgagacgatgttccgctgtcccagaccagtccagtaatggacgggccagtgtgcgtagtcgtcttccggcttgtccggcgcatgtttggtgaaccggtggggtaaggttggtgtgcccaacgcccgtactttggtgatacctcaagaccacccaggaatgccagggaggtaccccgcttcacagcgggatctgaccctgggctaattgtctacggtggttcttcttgcttccacttctttctactgttcatg

SEQ ID NO: 1365 - DNA, 708 bp, Unknown
  Description of Unknown: Salivirus A isolate BN-2, complete genome.1 sequence
tatggcaggcgggcttgtggacggcttcggcccacccacagcaagaatgccatcatctgtcctcacccccatgtttcccctttctttccctgcaaccgttacgcttactcgcaggtgcatttgagtggtgcacgtgttgaataaacagctacactcacatgggggcgggttttcccgccctgcggcctctcgcgaggcccacccctccccttcctcccataactacagtgctttggtaggtaagcatcctgatcccccgcggaagctgctcacgtggcaactgtggggacccagacaggttatcaaaggcacccggtctttccgccttcaggagtatccctgctagtgaattctagtagggctctgcttggtgccaacctcccccaaatgcgcgctgcgggagtgctcttccccaactcaccctagtatcctctcatgtgtgtgcttggtcagcatatctgagacgatgttccgctgtcccagaccagtccagtaatggacgggccagtgtgcgtagtcgtcttccggcttttccggcgcatgtttggtgaaccggtggggtaaggttggtgtgcccaacgcccgtactttggtgatacctcaagaccacccaggaatgccagggaggtaccccgcttcacagcgggatctgaccctgggctaattgtctacggtggttcttcttgcttccacttctttctactgttc

SEQ ID NO: 1366 - DNA, 484 bp, Unknown
  Description of Unknown: Salivirus sp. isolate ETH_P14_2016 polyprotein gene, complete cds.1 sequence
gtgctttggcaggtaagcatcctgatcccccgcggaagctgctcacgtggcaactgtggggacccagacaggttatcaaaggcacccggtctttccgccttcaggagtaccctcactagtgaattctagtggggctctgcttggtgccaacctcccccaaatgcgcgctgcgggagtgctcttccccaacccatcctagtaccctctcatgtgtgtgcttggtcagcacatctgagacgacgttccgctgtcccagaccagtccagtaatggacgggccagtgtgcgtagtcgtcttccggcttgtccggcgcatgtttggtgaaccggtggggtaaggttggtgtgcccaatgcccgtactttggtgatacctcaagaccacccaggaatgccagggaggtaccccgcctctcggcgggatctgaccctgggctaattgtctacggtggttcttcttgcttccactcttttcttctgttcacg

SEQ ID NO: 1367 - DNA, 718 bp, Unknown
  Description of Unknown: unclassified Salivirus sequence
tttcgaccgccttatggcaggcgggcttgtggacggcttcggcccacccacagcaagaatgccatcatctgtcctcacccccatttctcccctccttcccctgcaaccattacgcttactcgcatgtgcattgagtggtgcacgtgttgaacaaacagctacactcacgtgggggcgggttttcccgcccttcggcctctcgcgaggcccacccttccccttcctcccataactacagtgctttggtaggtaagcatcctgatcccccgcggaagctgctcgcgtggcaactgtggggacccagacaggttatcaaaggcacccggtctttccgcctccaggagtatccctgctagtgaattctagtggggctctgcttggtgccaacctcccccaaatgcgcgctgcgggagtgctcttccccaactcaccctagtatcctctcatgtgtgtgcttggtcagcatatctgagacgatgttccgctgtcccagaccagtccagcaatggacgggccagtgtgcgtagtcgtcttccggcttgtccggcgcatgtttggtgaaccggtggggtaaggttggtgtgcccaacgcccgtactttggtgacaactcaagaccacccaggaatgccagggaggtaccccgcctcacggcgggatctgaccctgggctaattgtctacggtggttcttcttgcttccatttctttcttctgttc

SEQ ID NO: 1368 - DNA, 624 bp, Salivirus A
ttctcctgcaaccattacgcttaatcgcatgtgcattgagtggtgcatgtgttgaacaaacagctacaatcacatgggggcgggttttcccgccccacggcttctcgcgaggcccatccctcccttttctcccataactacagtgctttggtaggtaagcatcccgatctcccgcggaagctgctcacgtggcaactgtggggacccagacaggttatcaaaggcacccggtctttccgccttcaggagtatccctgctagcgaattctagtagggctctgcttggtgccaacctctcccaaatgcgcgctgcgggagtgctcttccccaaatcaccccagtatcctctcatgtgtgtgcctggtcagcatatctgagacgatgttccgctgtcccagaccagtccagtaatggacgggccagtgtgcgtagtcgtcctccggcttgtccggcgcatgtttggtgaaccggtggggtaaggttggtgtgcccaacgcccgtaatcaggggatacctcaaggcacccaggaatgccagggaggtatcccgcctcacagcgggatctgaccctggggtaaatgtctgcggggggtcctcttggcccaattctcagtaattttcagg

SEQ ID NO: 1369 - DNA, 624 bp, Unknown; identical to SEQ ID NO: 736
  Description of Unknown: Salivirus A strain SH1 polyprotein gene, complete cds.1 sequence

SEQ ID NO: 1370 - DNA, 730 bp, Unknown
  Description of Unknown: unclassified Salivirus sequence
acatggggggtctgcggacggcttcggcccacccgcgacaagaatgccgtcatctgtcctcattacccgtattccttcccttcccccgcaaccaccacgcttactcgcgcacgtgttgagtggcacgtgcgttgtccaaacagctacacccacacccttcggggcgggtttgtcccgccctcgggttcctcgcggaacccccccctccctctctctctttctatccgccctcacttcccataactacagtgctttggtaggtgagcaccctgaccccccgcggaagctgctaacgtggcaactgtggggatccaggcaggttatcaaaggcacccggtctttccgccttcaggagtatctctgccggtgaattccggtagggctctgcttggtgccaacctcccccaaatgcgcgctgcgggagtgctcttccccaactcatcttagtaacctctcatgtgtgtgcttggtcagcatatctgaggcgacgttccgctgtcccagaccagtccagcaatggacgggccagtgtgcgtagtcgctttccggttttccggcgcatgtttggcgaaacgctgaggtaaggttggtgtgcccaacgcccgtaatttggtgatacctcaagaccacccaggaatgccagggaggtaccccacttcggtgggatctgaccctgggctaattgtctacggtggttcttcttgcttccacttctcttttttctggcatg

SEQ ID NO: 1371 - DNA, 752 bp, Unknown; identical to SEQ ID NO: 128
  Description of Unknown: unclassified Salivirus sequence

SEQ ID NO: 1372 - DNA, 471 bp, Unknown; identical to SEQ ID NO: 12
  Description of Unknown: Kobuvirus cattle/Kagoshima-1-22-KoV/2014/JPN genomic RNA, nearly1 sequence

SEQ ID NO: 1373 - DNA, 750 bp, Aichivirus E; identical to SEQ ID NO: 1201

SEQ ID NO: 1374 - DNA, 555 bp, Aichivirus C
cctcggccccctcaccctcttttccggtggccattcgcccgggccaccgttactccactccactccttcgggactggtttggaggaacacaacagggcttcccatccctgtttaccctttattccatcatcctttccccaagtttaccctatccacaccccactgactgactcctttggattttgacctcagaatgcctatttgacctcccactcgcctctcccttttcggattgccggtggtgcctggcggaaaaagcacaagtgtgttgcaggctaccaaactcctacccgacaaaggtgcgtgtccgcgtgctgagtaatgggataggagatgcctacaacaggctcgcccatgagtagagcatggactgcggtgcatgtgacttcggtcaccacgggcatagcattgctcacccgtgaatcaagtcatcgagatttctctgacctctgaagtgcactgtggttgcgtggctgggaatccacgcttgaccatgtactgcttgatagagtcgcggctggccgactcatgggttaaagtcagttgacaagacac

SEQ ID NO: 1375 - DNA, 555 bp, Aichivirus C
cctcggccctctcaccctcttttccggtggccactcgcccgggccaccgttactccattccactccttcgggactggtttggaggaacataacagggcttcccatccctgtttatcctaattccacttacctttctccataattaaccctatccacaccccactgaccgatccctttggattttgacctcagaatgcctacctgacctcccacttgcctttcccttttcggattgccggtggtgcctggcggaaaaagcacaagtgtgttgatggctaccaaactcctacccgacaaaggtgcgtgtccgcgtgctgagtaatgggataggagatgccattgacaggctcgcccatgagtagagcatggactgcggtgcatgtgacttcggtcaccaggggcatagcattgctcacccctgaatcaagtcatcgagatttctctgacctctgaagtgcactgtggttgcgtggctgggaatccacgcttgaccatgtactgcttgatagagtcgcggctggccgactcatgggttaaagtcagttgacaagacac

SEQ ID NO: 1376 - DNA, 556 bp, Aichivirus C
cctcggccccctcaccctcttttccggtggccactcgcccgggccaccgttactccactccactccttcgggactggtttggaggaacataacagggcttcccatccctgtttacccttaattccatttaccttctcccccaactaaccctatccacaccccactgactgactcctttggattttgacctcagaatgcctacttgacctcccacttgcctctcccttctcggattgccggtggtgcctggcggaaaaagcacaagtgtgttgcaggctaccaaactcctacccgacaaaggtgcgtgtccgcgtgctgagtaatgggataggagatgcctacaacaggctcgcccatgagtagagcatggactgcggtgcatgtgacttcggtcaccacgggcatagcattgctcacccgtgaatcaagtcatcgagatttctctgacctctgaagtgcactgtggttgcgtggctgggaatccacgcttgaccatgtactgcttgatagagtcgcggctggccgactcatgggttaaagtcagttgacaagacac

SEQ ID NO: 1377 - DNA, 556 bp, Unknown
  Description of Unknown: Porcine kobuvirus strain WUH1, complete genome.1 sequence
cctcggccccctcaccctcttttccggtggccactcgcccgggccaccgttactccactccactccttcgggactggtttggaggaacacaacagggcttcccatccctgttcaccctacactccacataccctttccctcaaccaaccctatccaaaccccactgaccgactcccttggattttgacctcagaatgcctacttgacctcccacttgcctctcccttctcggattgccggtggtgcctggcggaaaaagcacaagtgtgttgcaggctatcaaacttctacccgacaaaggcgcgtgtccgcgtgctgagtaatgggataggagatgcctacaacaggctcgcccatgagtagagcatggactgcggtgcatgtgacttcggtcaccacgggcatagcattgctcacccgtgaatcaagtcatcgagatttctctgacctctgaagtgcactgtggttgcgtggctgggaatccatgcttgaccatgtactgcttgatagagtcgcggctggccgactcatgggttaaagtcagttgacaagacac

SEQ ID NO: 1378 - DNA, 555 bp, Unknown
  Description of Unknown: Porcine kobuvirus isolate K-11/2012/CH, complete genome.1 sequence
cctcggccccctcaccctcttttccggtggccacccgcccgggccaccgttactccactccactccttcgggactggtttggaggaacataacagggcttcccatccctgtttacccttattccacttaccctttcccttaaccaaccctatccacaccccactgactgattcctttggattttgacctcagaatgcctacttgacctcccacttgtctctcccttctcggattgccggtggtgcctggcggaaaaagcacaagtgtgttgcaggctaccaaactcctacccgacaaaggtgcgtgtccgcgtgctgagtaatgggataggagatgcctacaacaggctcgcccatgagtagagcatggactgcggtgcatgtgacttcggtcaccacgggcatagcattgctcacccgtgaatcaagtcatcgagatttctctgacctctgaagtgcactgtggttgcgtggctgggaatccacgcttgaccatgtactgcttgatagagtcgcggctggccgactcatgggttaaagtcagttgacaagacac

SEQ ID NO: 1379 - DNA, 555 bp, Aichivirus C
cctcggccccctcaccctcttttccggtggccacacgcccgggccaccgttactccactccactccttcgggactggtttggaggaacacaacagggcttcccatccctgtttaccctttattccatcatcctttccccaagtttaccctatccacaccccactgactgactcctttggattttgacctcagaatgcctatttgacctcccactcgcctctcccttttcggattgccggtggtgcctggcggaaaaagcacaagtgtgttgcaggctaccaaactcctacccgacaaaggtgcgtgtccgcgtgctgagtaatgggataggagatgcctacaacaggctcgcccatgagtagagcatggactgcggtgcatgtgacttcggtcaccacgggcatagcattgctcacccgtgaatcaagtcatcgagatttctctgacctctgaagtgcactgtggttgcgtggctgggaatccacgcttgaccatgtactgcttgatagagtcgcggctggccgactcatgggttaaagtcagttgacaagacac

SEQ ID NO: 1380 - DNA, 555 bp, Aichivirus C
cctcggccccctcaccctcttttccggtggccacccgcccgggccaccgttactccactccactccttcgggactggtttggaggaacataacagggcttcccatccctgtttacccttactccactcacccttctccttgaccaaccctatccacaccccactgactgactcctttggattttgacctcagaatgcctacctgacctcccacttgcctctcccatctcggactgccggtggtgcctggcggaaaaagcacaagtgtgttgatggctaccaaactcctacccgacaaaggtgcgtgtccgcgtgctgagtaatgggataggagatgccattgacaggctcgcccatgagtagagcatggactgcggtgcatgtgacttcggtcaccaggggcatagcattgctcacccctgaatcaagtcatcgagatttctctgacctctgaagtgcactgtggttgcgtggctgggaatccacgcttgaccatgtactgcttgatagagtcgcggctggccgactcatgggttaaagtcagttgacaagacac

SEQ ID NO: 1381 - DNA, 555 bp, Unknown
  Description of Unknown: Porcine kobuvirus swine/K-30-HUN/2008/HUN, complete genome.1 sequence
cctcggccccctcaccctcttttccggtggccacccgcccgggccaccgttactccactccactccttcgggactggtttggaggaacataacagggcttcccatccctgtttacccttactccactcacccctccccttgaccaaccctatccacaccccactgactgactcctttggatcttgacctcggaatgcctacttgacctcccacttgcctctcccttttcggattgccggtggtgcctggcggaaaaagcacaagtgtgttgttggctaccaaactcctacccgacaaaggtgcgtgtccgcgtgctgagtaatgggataggagatgccaataacaggctcgcccatgagtagagcatggactgcggtgcatgtgacttcggtcaccaggggcatagcattgctcacccctgaatcaagtcatcgagatttctctgacctctgaagtgcactgtggttgcgtggctgggaatccacgcttgaccatgtactgcttgatagagtcgcggctggccgactcatgggttaaagtcagttgacaagacac

SEQ ID NO: 1382 - DNA, 555 bp, Unknown
  Description of Unknown: Porcine kobuvirus swine/S-1-HUN/2007/Hungary, complete genome.1 sequence
cctcggccccctcaccctcttttccggtggccacccgcccgggccaccgttactccactccactccttcgggactggtttggaggaacataacagggcttcccatccctgtttacccttactccactcacccttccccttgaccaaccctatccacaccccactgactgactcctttggatcttgacctcggaatgcctacttgacctcccacttgcctctcccttttcggattgccggtggtgcctggcggaaaaagcacaagtgtgttgttggctaccaaactcctacccgacaaaggtgcgtgtccgcgtgctgagtaatgggataggagatgccaataacaggctcgcccatgagtagagcatggactgcggtgcatgtgacttcggtcaccaggggcatagcattgctcacccctgaatcaagtcatcgagatttctctgacctctgaagtgcactgtggttgcgtggctgggaatccacgcttgaccatgtactgcttgatagagtcgcggctggccgactcatgggttaaagtcagttgacaagacac

SEQ ID NO: 1383 - DNA, 555 bp, Aichivirus C
cctcggccctctcaccctcttttccggtggccactcgcccgggccaccgttactccactccactccttcgggactggtttggaggaacataacagggcttcccacccctgtttaccctcactccacttatccttctcctcaactaaccctatccacaccccactgattgattcctttggatttcgacctcagaatgcctacttgacctcccacttgcctctcccctctcggattgccggtggtgcctggcggaaaaagcacaagtgtgttgttggctaccaaactcctacccgacaaaggtgcgtgtccgcgtgctgagtaatgggatgggagatgccaataacaggctcgcccatgagtagagcatggactgcggtgcatgtgacttcggtcaccaggggcatagcattgctcacccctgaatcaagtcatcgagatttctctgacctctgaagtgcactgtggttgcgtggctgggaatccacgcttgaccatgtactgcttgatagagtcgcggctggccgactcatgggttaaagtcagttgacaagacac

SEQ ID NO: 1384 - DNA, 555 bp, Aichivirus C
cctcggccctctcaccctcttttccggtggccactcgcccgggccaccgttactccactccactccttcgggactggtttggaggaacataacagggcttcccacccctgttcacccttactccactcacccttatccttaaccaaccctatccacaccccactgactgattcctttggattttgacctcagaatgcccacctgacctcccacttgcttctcccttctcggattgccggtggtgcctggcggaaaaagcacaagtgtgttgttggctaccaaactcctacccgacaaaggtgcgtgtccgcgtgctgagtaatgggataggagatgccaatgacaggctcgcccatgagtagagcatggactgcggtgcatgtgacttcggtcaccaggggcatagcattgctcacccctgaatcaagtcatcgagacttctctgacctctgaagtgcactgtggttgcgtggctgggaatccacgcttgaccatgtactgcttgatagagtcgcggctgaccgactcatgggttaaagtcagttgacaagacac

SEQ ID NO: 1385 - DNA, 555 bp, Aichivirus C
cctcggccctctcaccctcttttccggtggccactcgcccgggccaccgttactccactccactccttcgggactggtttggaggaacataacagggcttcccatccctgtttacccttattccacttacccttctcctcaaccaaccctatccacaccccactgactgattcctttggattttgacctcagaatgcctacctgacctcccacttgcctctcccctctcggattgccggtggtgcctggcggaaaaagcacaagtgtgttgttggctaccaaactcctacccgacaaaggtgcgtgtccgcgtgctgagtaatgggataggagatgccaataacaggctcgcccatgagtagagcatggactgcggtgcatgtgacttcggtcaccaggggcatagcattgctcacccctgaatcaagtcatcgagatttctctgacctctgaagtgcactgtggttgcgtggctgggaatccacgcttgaccatgtactgcttgatagagtcgcggctggccgactcatgggttaaagtcagttgacaagacac

SEQ ID NO: 1386 - DNA, 555 bp, Aichivirus C
cctcggccctctcaccctcttttccggtggccactcgcccgggccaccgttactccactccactccttcgggactggtttggaggaacataacagggcttcccatccctgtttaccctcattccacttacccttccccttaaccaaccctatccacaccccactgactgattcctttggattttgacctcagaatgcctacctgacctcccacttgcttctcccctctcggattgccggtggtgcctggcggaaaaagcacaagtgtgttgttggctaccaaactcctacccgacaaaggtgcgtgtccgcgtgctgagtaatgggataggagatgccaataacaggctcgcccatgagtagagcatggactgcggtgtatgtgacttcggtcaccaggggcatagcattgctcacccctgaatcaagtcatcgagatttctctgacctctgaagtgcactgtggttgcgtggctgggaatccacgcttgaccatgtactgcttgatagagtcgcggctggccgactcatgggttaaagtcagttgacaagacac

SEQ ID NO: 1387 - DNA, 555 bp, Aichivirus C
cctcggccctctcaccctcttttccggtggccactcgcccgggccaccgttactccactccactccttcgggactggtttggaggaacataacagggcttcccacccctgttcaccctaactccacttaccctttcccttaaccaaccctatccacaccccactgattgactcccttggattttgacctcggaatgcctacttgacctcccacttgcctttcccttcccggattgccggtggtgcctggcggaaaaagcacaagtgtgttgttggctaccaaactcctacccgacaaaggtgcgtgtccgcgtgctgagtaatgggataggagatgccaatgacaggctcgcccatgagtagagcatggactgcggtgcatgtgacttcggtcaccaggggcatagcattgctcacccctgaatcaagtcatcgagatttctctgacctctgaagtgcactgtggttgcgtggctgggaatccacgcttgaccatgtactgcttgatagagtcgcggctggccgactcatgggttaaagtcagttgacaagacac

SEQ ID NO: 1388 - DNA, 555 bp, Aichivirus C
cctcggccctctcaccctcttttccggtggccactcgcccgggccaccgttactccactccactccttcgggactggtttggaggaacacaacagggcttcccacccctgtttacccttactccactcacccttccccataaccaaccctatccacaccccactgactgactcctttggattttgacctcagaatgcctatttaacctcccacttgcctctcccctctcggattgccggtggtgcctggcggaaaaagcacaagtgtgttgttggctaccaaactcctacccgacaaaggtgcgtgtccgcgtgctgagtaatgggataggagatgccaatgacaggctcgcccatgagtagagcatggactgtggtgcatgtgacctcggtcaccaggggcatagcattgctcacccctgaatcaagtcatcgagatttctctgacctctgaagtgcactgtggttgcgtggctgggaatccacgcttgaccatgtactgcttgatagagtcgcggctggccgactcatgggttaaagtcagttgacaagacac

SEQ ID NO: 1389 - DNA, 555 bp, Unknown
  Description of Unknown: Porcine kobuvirus strain KobuV/Pig-wt/ESP/VC20B/2017, complete1 sequence
cctcggccctctcaccctcttttccggtggccactcgcccgggccaccgttactccactccactccttcgggactggtttggaggaacataacagggcttcccatccctgtttaccctcattccacttacccttttccttaaccaaccctatccacaccccactgactgattcctttggattttgacctcagaacgcctacttgacctcccacttgcttctcccttcccggattgccggtggtgcctggcggaaaaagcacaagtgtgttgttggctaccaaactcctacccgacaaaggtgcgtgtccgcgtgctgagtaatgggataggagatgccaataacaggctcgcccatgagtagagcatggactgcggtgcatgtgactccggtcaccgggggcatagcattgctcacccccgaatcaagtcatcgagatttctctgacctctgaagtgcactgtggttgtgtggctgggaatccacacttgaccatgtactgcttgatagagtcgcggctggccgactcatgggttaaagtcagttgacaagacac

SEQ ID NO: 1390 - DNA, 558 bp, Aichivirus C
cctcggccccctcaccctcttttccggtggccactcgcccgggccaccgttactccactccactccctcgggactggtttggaggaacataacagggcttcccatccctgtttttacccttatttccatctaccctttcccttaaccaaccctatccacaccccactgactgactcctttggattttgacctcagaatgcctacttgacctcccacttgcctctcccttatcggattgccggtggtgcctggtggaaaaagcacaagtgtgttgttggctaccaaactcctacccgacaaaggtgcgtgtccgcgtgctgagtaatgggataggagatgccaatgacaggctcgcccatgagtagagcatggactgcggtgcatgtgacttcggtcaccaggggcatagcattgctcacccctgaatcaagtcatcgagatttctctgacctctgaagtgcactgtggttgcgtggctgggaatccacgcttgaccatgtactgcttgatagagtcgcggctggccgactcatgggttaaagtcagttgacaagacac

SEQ ID NO: 1391 - DNA, 555 bp, Unknown
  Description of Unknown: Porcine kobuvirus isolate JXAT2015, complete genome.1 sequence
cctcggccccctcaccctcttttccggtggccactcgcccgggccaccgttacttcactccactccttcgggactggtttggaggaacataacagggcttcccatccctgtttacccttatttccacttaactttttcccaatctactctaaccacaccccactgactgactcctttggattttgacctcagaatgcctacctggcctcccactcgcctcatccttttcggattgccggtggtgcctggcggaaaaagcacaagtgtgttgcaggctaccaaactcctacccgacaaaggtgcgtgtccgcgtgctgagtaatgggataggagatgcctacaacaggctcgcccatgagtagagcatggactgcggtgcatgtgacttcggtcaccacgggcatagcattgctcacccgtgaatcaagtcatcgagatttctctgacctctgaagtgcactgtggttgcgtggctgggaatccacgcttgaccatgtactgcttgatagagtcgcggctggccgactcatgggttaaagtcagttgacaagacac

SEQ ID NO: 1392 - DNA, 555 bp, Aichivirus C
cctcggccccctcaccctcttttccggtggccactcgcccgggccaccgttacttcactccactccttcgggactggtttggaggaacacaacagggcttcccaacccctgttacccttactctaattcccttttccctcaaccaaccctttccactccccactgactgactcccttggattttgacctcagaatgcctacttgacctcccacttgcctttcccttctcggattgccggtggtgcctggcggaaaaagcacaagtgtgttgcaggctaccaaactcctacccgacaaaggtgcgtgtccgcgtgctgagtaatgggataggagatgcctacaacaggctcgcccatgagtagagcatggactgcggtgcatgtgacttcggtcaccacgggcatagcattgctcacccgtgaatcaagtcatcgagatttctctgacctctgaagtgcactgtggttgcgtggctgggaatccacgcttgaccatgtactgcttgatagagtcgcggctggccgactcatgggttaaagtcagttgacaagacac

SEQ ID NO: 1393 - DNA, 555 bp, Unknown
  Description of Unknown: Porcine kobuvirus SH-W-CHN/2010/China, complete genome.1 sequence
cctcggccccctcaccctcttttccggtggccactcgcccgggccaccgttacttcactccactccttcgggactggtttggaggaacataacagggcttcccatccctgtttaccctcattccactcaccccttccctaaaccaaccctatccacaccccactgactgactcctttggattttgacctcagaatgcctacctgacctcccacttgcctctcccttctcggattgccggtggtgcctggcggaaaaagcacaagtgtgttgcaggctaccaaactcctacccgacaaaggtgcgtgtccgcgtgctgagtaatgggataggagatgtctacaacaggctcgcccatgagtagagcatggactgcggtgcatgtgacttcggtcaccacgggcatagcattgctcacccgtgaatcaagtcatcgagatttctctgacctctgaagtgcactgtggttgcgtggctgggaatccacgcttgaccatgtactgcttgatagagtcgcggctggccgactcatgggttaaagtcagttgacaagacac

SEQ ID NO: 1394 - DNA, 555 bp, Unknown
  Description of Unknown: Porcine kobuvirus isolate EdoMex/2018/205, complete genome.1 sequence
cttcggccctctcaccctcttttccggtggccactcgcccgggccaccgttactccactccactccttcgggactggtttggaggaacataacagggcttcccatccctgtttaccctcattccactcaccccttcccttgaccaaccccatccacaccccactgactgattcctttggattttgacctcagaatgcctacctgacctcccactcgcctctccctcttcggattgccggtggtgcctggcggaaaaagcacaagtgtgttgctggctaccaaactcctacccgacaaaggtgcgtgtccgcgtgctgagtaatgggataggagatgctaacaacaggctcgcccatgagtagagcatggactgcggtgcatgtgacttcggtcaccacgggcatagcattgctcacccgtgaatcaagtcatcgagatttctctgacctctgaagtgcactgtggttgcgtggctgggaatccacgcttgaccatgtactgcttgatagagtcgcggctggccgactcatgggttaaagtcagttgacaagacac

SEQ ID NO: 1395 - DNA, 555 bp, Unknown
  Description of Unknown: Porcine kobuvirus strain KobuV/Pig-wt/ESP/VC8/2017, complete1 sequence
cctcggccccctcaccctcttttccggtggccacacgcccgggccaccgttactccactccactccctcgggactggtttggaggaacacaacagggcttcccatccctgtttaccctcactccacccatccttctccttaaccaaccctatccacaccccactgactgactccattggattttgacctcagaatgcctacctgacctcccacttgcctctcccttctcggattgccggtggtgcctggcggaaaaagcacaagtgtgttgttggctaccaaactcctacccgacaaaggtgcgtgtccgcgtgctgagtaatgggataggagatgccaatgacaggctcgcccatgagtagagcatggactgcggtgcatgtgactttggtcaccaggggcatagcattgctcacccctgaatcaagtcatcgagatttctctgacctctgaagtgcgctgtggttgcgtggctgggaatccacgcttgaccatgtactgcttgatagagtcgcggctggccgactcatgggttaaagtcagttgacaagacac

SEQ ID NO: 1396 - DNA, 555 bp, Unknown
  Description of Unknown: Porcine kobuvirus strain KobuV/Pig-wt/ESP/P452/2017, complete1 sequence
cctcggccccctcaccctcttttccggtggccacacgcccgggccaccgttactccactccactccctcgggactggtttggaggaacacaacagggcttcccatccctgtttaccctcactccacttacccttctccttaaccaaccctatccacacctcactgactgattcctttggattttgacctcagaatgcctacttgacctcccacttgcctttcccttctcggattgccggtggtgcctggcggaaaaagcacaagtgtgttgttggctactaaactcctacccgacaaaggtgcgtgtccgcgcgctgagtaatgggataggagatgccaataacaggctcgcccatgagtagagcatggactgcggtgcatgtgacttcggtcaccaggggcatagcattgctcacccctgaatcaagtcatcgagacttctctgacctctgaagtgcactgtggttgcgtggctgggaatccacgcttgaccatgtactgcttgatagagtcgcggctggccgactcatgggttaaagtcagttgacaagacac

SEQ ID NO: 1397 - DNA, 556 bp, Aichivirus C
ccctcggccccctcaccctcttttccggtgcccacccgcccgggccaccgttactccactccactccttcgggactggtttggaggaacataacagggcttcccacccctgtttacccttattccactcacccttctccttaatcaaccctatccacaccccattgactgactcctttggattttgacctcagaatgcctacctgacctcccacttgcctctcccttctcggactgccggtggtgcctggcggaaaaagcacaagtgtgttgatggctaccaaactcttacccgacaaaggtgcgtgtccgcgtgctgagtaatgggataagagatgccattgacaggctcgcccatgagtagagcatggactgcggtgcatgtgacttcggtcaccaggggcatagcattgctcacccctgaatcaagtcatcgagatttctctgacctctgaagtgcactgtggttgcgtggctgggaatccacgcttgaccatgtactgcttgatagagtcgcggctggccgactcatgggttaaagtcagttgacaagacac

SEQ ID NO: 1398 - DNA, 555 bp, Aichivirus C
cctcggccctctcaccctcttttccggtggccacccgcccgggccaccgttactccactccactccttcgggactggtttggaggaacataacagggcttcccacccctgtttacccttattccactcacccttccccttaatcaaccctatccacaccccactgactgactcctttggtttttgacctcagaatgcctacctgacctcccacttacctctcccttttcggattgccggtggtgcctggtggaaaaagcacaagtgtgttgttggctactaaactcctacccgacaaaggtgcgtgtccgcgtgctgagtaatgggataggagatgccaataacaggctcgcccatgagtagagcatggactgcggtgcgtgtgacttcggtcaccaggggcatagcattgctcacccctgaatcaagtcatcgagatttctctgacctctgaagtgcactgtggttgcgtggctgggaatccacgcttgaccatgtactgcttgatagagtcgcggctggccgactcatgggttaaagtcagttgacaagacac

SEQ ID NO: 1399 - DNA, 555 bp, Aichivirus C
cctcggccctctcaccctcttttccggtggccacccgcccgggccaccgttactccactccactccttcgggactggtttggaggaacacaacagggcttcccacccctgtttacctttactccacttacctttctcctaaaccaatcctatccacaccccactgactgattcctttggattttgacctcagaatgcctacatgacctcccactcgtctctcccttcccggattgccggtggtgcctggcggaaaaagcacaagtgtgttgatggctaccaaactcctacccgacaaaggtgcgtgtccgcgtgctgagtaatgggataggagatgccattgacaggctcgcccatgagtagagcatggactgcggtgcatgtgacttcagtcaccaggggcatagcattgctcacccctgaatcaagtcatcgagatttctctgacctctgaagtgcactgtggttgcgtggctgggaatccacgcttgaccatgtactgcttgatagagtcgcggctggccgactcatgggttaaagtcagttgataagacac

SEQ ID NO: 1400 - DNA, 555 bp, Aichivirus C
cctcggccctctcaccctcttttccggtggccattcgcccgggccaccgttactccactccactccctcgggactggtttggaggaacacaacagggcttcccacccctgtttacccttactccacttaccaccccccttaaccaatcctatccacaccccactgactgattcctttggattttgatctcagaatgcctacttgacctcccacttgcctctcccttctcggattgccggtggtgcctggcggaaaaagcacaagtgtgttgttggctaccaaactcctacccgacaaaggtgcgtgtccgcgtgctgagtaatgggataggagatgccaatgacaggctcgcccatgagtagagcatggactgcggtgcatgtgacttcggtcaccaggggcatagcattgctcacccctgaatcaagtcatcgagatttctctgacctctgaagtgcactgtggttgcgtggctgggaatccacgcttgaccatgtactgcttgatagagtcgcggctggccgactcatgggttaaagtcagttgacaagacac

SEQ ID NO: 1401 - DNA, 555 bp, Aichivirus C
cctcggccccctcaccctcttttccggtggccacacgcccgggccaccgttactccactccactccctcgggactggtttggaggaacacaacagggcttcccatccctgtttaccctaacttcactcacccttatccttaaccaaccctatccacaccccactgactgattcctttggattttgacctcagaatgcctacctgacctcccacttgcctctcccttttcggattgccggtggtgcctggcggaaaaagcacaagtgtgttgatggctaccaaactcctacccgacaaaggtgcgtgtccgcgtgctgagtaatgggataggagatgccattgacaggctcgcccatgagtagagcatggactgcggtgcatgtgacttcggtcaccaggggcatagcattgctcacccctgaatcaagtcatcgagatttctctgacctctgaagtgcactgtggttgcgtggctgggaatccacgcttgaccatgtactgcttgatagagtcgcggctggccgactcatgggttaaagtcagttgataagacac

SEQ ID NO: 1402 - DNA, 558 bp, Aichivirus C
ggcttcggccctctcaccctcttttccggtggccactcgcccgggccaccgttactccactccactccttcgggactggtttggaggaacataacagggcttcccacccctgtttacccttaactccaccaaccctttccttgaattaaccctatccacaccccactgactgactcccttggattttgacctcagaatgcctacctgacctcccacttgcctctccctcctcggattgccggtggtgcctggcggaaaaagcacaagtgtgttgttggctaccaaactcctacccgacaaaggtgcgtgtccgcgtgctgagtaatgggataggagatgccaatgacaggctcgcccatgagtagagcatggactgcggtgcatgtgacttcggtcaccaggggcatagcattgctcacccctgaatcaagtcatcgagatttctctgacctctgaagtgcactgtggttgcgtggctgggaatccacgcttgaccatgtactgcttgatagagtcgcggctggccgactcatgggttaaagtcagttgacaagacac

SEQ ID NO: 1403 - DNA, 556 bp, Aichivirus C
cttcggccctctcaccctcttttccggtggccactcgcccgggccaccgttactccactccactccttcgggactggtttggaggaacataacagggcttcccatccctgtttacccttattccactcacccttcccctacaaccaaccctatccacaccccactgactgattcctttggattttgacctcagaatgcctacctgacctcccacttgcctctcccttctcggattgccggtggtgcctggcggaaaaagcacaagtgtgttgttggctaccaaactcctacccgacaaaggtgcgtgtccgcgtgctgagtaatgggataggagatgccaatgacaggctcgcccatgagtagagcatggactgcggtgcatgtgacctcggtcaccaggggcatagcattgctcacccctgaatcaagtcatcgagatttctctgacctctgaagtgcactgtggttgcgtggctgggaatccacgcttgaccatgtactgcttgatagagtcgcggctggccgactcatgggttaaagtcagttgacaagacac

SEQ ID NO: 1404 - DNA, 556 bp, Unknown
  Description of Unknown: Porcine kobuvirus isolate swKoV CH441, complete genome.1 sequence
cctcggccccctcaccctcttttccggtggccacccgcccgggccaccgttacttcactccactccttcgggactggtttggaggaacataacagggcttcccaatcccctgttatccttattccaattaccctttcccttaaccaaccctatccacaccccactgactgactcctttggattttgacctcagaatgcctacctgacctcccacttgcctctcccctctcggattgccggtggtgcctggcggaaaaagcacaagtgtgttgcaggctaccaaactcctacccgacaaaggtgcgtgtccgcgtgctgagtaatgggataggagatgcctacaacaggctcgcccatgagtagagcatggactgcggtgcatgtgacttcggtcaccacgggcatagcattgctcacccgtgaatcaagtcatcgagatttctctgacctctgaagtgcactgtggttgcgtggctgggaatccacgcttgaccatgtactgcttgatagagtcgcggctggccgactcatgggttaaagtcagttgacaagacac

SEQ ID NO: 1405 - DNA, 555 bp, Aichivirus C
cctcggccccctcaccctcttttccggcggccactcgcccgggccaccgttacttcactccactccttcgggactggtttggaggaacataacagggcttcccatccctgtttacccttcactccaattacccttcccccaatcaaccctatccacaccccattgactgattcctttggattttgacctcagaatgcctacttgacctcccacttgccttccccttctcggactgccggtggtgcctggcggaaaaagcacaagtgtgttgcaggctaccaaactcctacccgacaaaggtgcgtgtccgcgtgctgagtaatgggataggagatgcctacaacaggctcgcccatgagtagagcatggactgcggtgcatgtgacttcggtcaccacgggcatagcattgctcacccgtgaatcaagtcatcgagatttctctgacctctgaagtgcactgtggttgcgtggctgggaatccacgcttgaccatgtactgcttgatagagtcgcggctggccgactcatgggttaaagtcagttgacaagacac

SEQ ID NO: 1406 - DNA, 661 bp, Unknown
  Description of Unknown: unclassified Kobuvirus sequence
cctcggccccctcaccctcttttccggtggccacgcccgggccaccgatacttcccttcactccttcgggactgttggggaggaacacaacagggctcccctgttttcccattccttcccccttttcccaaccccaaccgccgtatctggtggcggcaagacacacgggtctttccctctaaagcacaattgtgtgtgtgtcccaggtcctcctgcgtacggtgcgggagtgctcccacccaactgttgtaagcctgtccaacgcgtcgtcctggcaagactatgacgtcgcatgttccgctgcggatgccgaccgggtaaccggttccccagtgtgtgtagtgcgatcttccaggtcctcctggttggcgttgtccagaaactgcttcaggtaagtggggtgtgcccaatccctacaaaggttgattctttcaccaccttaggaatgctccggaggtaccccagcaacagctgggatctgaccggaggctaattgtctacgggtggtgtttcctttttcttttcacacaactctactgctgacaactcactgactatccacttgctctcttgtgcctttctgctctggttcaagttccttgattgtttttgactgcttttcactgcttttcttctcacaatccttgctcagttcaaagtc

SEQ ID NO: 1407 - DNA, 556 bp, Aichivirus C
cttcggccctctcaccctcttttccggtggccattcgcccgggccaccgttactccactccactccctcgggactggtttggaggaacacaacagggcttcccatccctgtttacccttaactccactcaccctttcctacaccaaccctatccacaccctactgattgattcctttggattttgacctcagaatgcctacccgacctcccactcgttttcctccttctcggattgccggtggtgcctggcggaaaaagcacaagtgtgttgttggctaccaaactcctacccgacaaaggtgcgtgtccgcgtgctgagtaatgggataggagatgccaataacaggctcgcccatgagtagagcatggactgcggtgcatgtgacttcggtcaccaggggcatagcattgctcacccctgaatcaagtcatcgagatttctctgacctctgaagtgcactgtggttgcgtggctgggaatccacgcttgaccatgtactgcttgatagagtcgcggctggccgactcatgggttaaagtcagttgacaagacac

SEQ ID NO: 1408 - DNA, 554 bp, Unknown
  Description of Unknown: Porcine kobuvirus gene for polyprotein, complete cds, strain:1 sequence
cttcggccctctcaccctcttttccggtggccacccgcccgggccaccgttactccactccactccttcgggactggtttggaggaacacaacagggcttcccacccctgtttaccccgatttcatctacccttctcccgaactgaccctatccacaccccactgactaactcctttggattagacctcggaatgcctacttgacctcccacttgcctctccctttctggattgccggtggtgcctggcggaaaaagcacaagtgtgttgcaggctaccaaactcctacccgacaaaggtgcgtgtccgcgtgctgagtaatgggataggagatgcctacaacaggctcgcccatgagtagagcatggactgcggtgcatgcgacttcggtcgccacgggcatagcattgctcacccgtgaatcaagtcatcgagatttctctgacctctgaagtgcactgtggttgcgtggctgggaatccacgcttgaccatgtactgcttgatagagtcgcggctggccgactcatgggttaaagtcagttgacaagacac

SEQ ID NO: 1409 - DNA, 556 bp, Aichivirus C
cttcggccctctcaccctcttttccggtggccacccgcccgggccaccgttactccactccactccttcgggactggtttggaggaacataacagggcttcccaatccctgttaccctttactccatttccccatcccccaaacttaccctatccacaccccactgactgattcctttggattttgacctcagaatgcctacttgacctcccactcgcctctccctctccggactgccggtggtgcctggcggaaaaagcacaagtgtgttgcaggctactaaactcctacccgacaaaggtgcgtgtccgcgtgctgagtaatgggataggagatgcctacaacaggctcgcccatgagtagagcatggactgcggtgcatgtgacttcggtcaccacgggcatagcattgctcacccgtgaatcaagtcatcgagaattctctgacctctgaagtgcactgtggttgcgtggctgggaatccacgcttgaccatgtactgcttgatagagtcgcggctggccgactcatgggttaaagtcagttgacaagacac

SEQ ID NO: 1410 - DNA, 557 bp, Aichivirus C
cttcggccctctcaccctcttttccggtggccactcgcccgggccaccgttactccactccactccctcgggactggtttggaggaacataacagggcttcctacccctgttcttccctcaattccactcacccttcccctcaaccacccctatccacaccccactgactgattcctttggattttgacctcagaatgcctacttgacctcccacttgcctctcccttttcggactgccggtggtgcctggtggaaaaagcacaagtgtgttgttggctaccaaactcctacccgacaaaggtgcgtgtccgcgtgctgagtaatgggataggagatgcctacaacaggctcgcccatgagtagagcatggactgcggtgcatgtgacttcggtcaccacgggcatagcattgctcacccgtgaatcaagtcatcgagatttctctgacctctgaagtgcactgtggttgcgtggctgggaatccacgcttgaccatgtactgcttgatagagtcgcggctggccgactcatgggttaaagtcagttgataagacac

SEQ ID NO: 1411 - DNA, 556 bp, Aichivirus C
cttcggccctctcaccctcttttccggtggccactcgcccgggccaccgttactccactccactccctcgggactggtttggaggaacataacagggcttcccatccctgtttacccttaattctgcttaccctctccttttaccaaccctgtccacaccccactgactgattcctttggattttgacctcagaatacctacctgacctcccacttgcctctcccttctcggattgccggtggtgcctggcggaaaaagcacaagtgtgttgttggctaccaaactcttacccgacaaaggtgcgtgtccgcgtgctgagtaatgggataggagatgccaatgacaggctcgcccatgagtagagcatggactgcggtgcatgtgacttcggtcaccaggggcatagcgttgctcacccctgaatcaagtcatcgagatttctctgacctctgaagtgcactgtggttgcgtggttgggaatccacgcttgaccatgtactgcttgatagagtcgcggctggccgactcatgggttaaagtcagttgacaagacac

SEQ ID NO: 1412 - DNA, 556 bp, Aichivirus C
cttcggccctctcaccctcttttccggtggccactcgcccgggccaccgttactccactccactccctcgggactggtttggaggaacataacagggcttcccatccctgtttacccttaattccacttaccctctccttttaccaaccctatccatacctcactgactgattcctttggattttgacctcagaatgcctacctgacctcccacttgcctctcccttctcggattgccggtggtgcctggcggaaaaagcacaagtgtgttgttggctaccaaactcctacccgacaaaggtgcgtgtccgcgtgctgagtaatgggataggagatgcctacaacaggctcgcccatgagtagagcatggactgcggtgcatgtgacttcggtcaccacgggcatagcattgctcacccgtgaatcaagtcatcgagatttctctgacctctgaagtgcactgtggttgcgtggctgggaatccacgcttgaccatgtactgcttgatagagtcgcggctggccgactcatgggttaaagtcagttgacaagacac

SEQ ID NO: 1413 - DNA, 556 bp, Aichivirus C
cttcggccctctcaccctcttttccggtggctactcgcccgggccaccgttactccactccactccctcgggactggtttggaggaacataacagggcttcccatccctgtttacccttaattctgcttaccctctccttttaccaaccctgtccacaccccactgactgattcctttggattttgacctcagaatacctacctgacctcccacttgcctctcccttctcggattgccggtggtgcctggcggaaaaagcacaagtgtgttgttggctaccaaactcttacccgacaaaggtgcgtgtccgcgtgctgagtaatgggataggagatgccaatgacaggctcgcccatgagtagagcatggactgcggtgcatgtgacttcggtcaccaggggcatagcgttgctcacccctgaatcaagtcatcgagatttctctgacctctgaagtgcactgtggttgcgtggttgggaatccacgcttgaccatgtactgcttgatagagtcgcggctggccgactcatgggttaaagtcagttgacaagacac

SEQ ID NO: 1414 - DNA, 556 bp, Aichivirus C
cttcggccctctcaccctcttttccggtggccactcgcccgggccaccgttactccactccactccctcgggactggtttggaggaacataacagggcttcccatccctgtttacccttggttccactcaccctttcccctcaccaaccttatccacaccccactgactgactcctttggattttgacctcagaatgcctacttgacctcccactcgcctctcccttctcggactgccggtggtgcctggcggaaaaagcacaagtgtgttgttggctaccaaactcctacccgacaaaggtgcgtgtccgcgtgccgagtaatgggataggagatgccaataacaggctcgcccatgagtagagcatggactgcggtgcatgtgacttcggtcaccagggacatagcattgctcacccctgaatcaagtcatcgagaattctctgacctctgaagtgcactgtggttgcgtggctgggaatccacgcttgaccatgtactgcttgatagagtcgcggctggccgactcatgggttaaagtcagttgacaagacac

SEQ ID NO: 1415 - DNA, 558 bp, Aichivirus C
cttcggccctctcaccctcttttccggtggccactcgcccgggccaccgttactccactccactccctcgggactggtttggaggaacacaacagggcttcccacccctgttctttccttaattccactcaccctttccctttaccaaccctatccacaccccactgactgattcctttggattttgacctcagaatacccatttgacctcccacttgcctctccctttttcggattgccggtggtgcctggcggaaaaagcacaagtgtgttgttggctaccaaactcctacccgacaaaggtgcgtgtccgcgtgccgagtaatgggataggagatgcctacaacaggctcgcccatgagtagagcatggactgcggtgcatgtgacttcggtcaccacgggcatagcattgctcacccgtgaatcaagtcatcgagatttctctgacctctgaagtgcactgtggttgcgtggctgggaatccacgcttgaccatgtactgcttgatagagtcgcggctggccgactcatgggttaaagtcagttgataagacac

SEQ ID NO: 1416 - DNA, 555 bp, Aichivirus C
cctcggccccctcaccctcttttccggtggccacccgcccgggccaccgttacttcactccactccctcgggactggtttggaggaacataacagggcttcccatccctgtttacccttatttccaattaccctttcctaaaccaaccctatccacaccccactgactgactcctttggattttgacttcagaatgcctacctgacctcccacttgcctctcccttctcggactgccggtggtgcctggcggaaaaagcacaagtgtgttgttggctaccaaactcctacccgacaaaggtgcgtgtccgcgtgctgagtaatgggataggagataccaataacaggctcgcccatgagtagagcatggactgcggcgcatgtgacctcggtcaccaggggcatagcattgctcacccctgaatcaagtcatcgagacttctctgacctctgaagtgcgctgtggttgcgtggctgggaatccacgcttgaccatgtactgcttgatagagtcgcggctggccgactcatgggttaaagtcagttgacaagacac

SEQ ID NO: 1417 - DNA, 557 bp, Aichivirus C
cttacggccctctcaccctcttttccggtggccattcgcccgggccaccgttactccactccactccctcgggactggtttggaggaacacaacagggcttcccatccctgtttatcctaattctacttaccttttcccttttaccgaccctatccacaccccactgactgattcctttggattttgacctcggaatgcctactagatctcccacttgcctctcccttcccggattgccggtggtgcctggcggaaaaagcacaagtgtgttgcaggctaccaaactcctacccgacaaaggtgcgtgtccgcgtgctgagtaatgggataggagatgcctacaacaggctcgcccatgagtagagcatggactgcggtgcatgtgacttcggtcaccacgggcatagcattgctcacccgtgaatcaagtcatcgagatttctctgacctctgaagtgcactgtggttgcgtggctgggaatccacgcttgaccatgtactgcttgatagagtcgcggctggccgactcatgggttaaagtcagttgacaagacac

SEQ ID NO: 1418 - DNA, 555 bp, Aichivirus C
cctcggccccctcaccctcttttccggcggccactcgcccgggccaccgttacttcactccactccctcgggactggtttggaggaacataacagggcttcccatccctgtttacccttactctgacaacccttccccttaatcaaccctatccacaccccactgactgactcctttggattttgacctcagaatgcctacttgacctcccacttgcctctccctcctcggattgccggtggtgcctggcggaaaaagcacaagtgtgttgcaggctaccaaactcctacccgacaaaggtgcgtgtccgcgtgctgagtaatgggataggagatgcctacaacaggctcgcccatgggtagagcatggactgcggtgcatgtgacttcggtcaccacgggcatagcattgctcacccgtgaatcaagtcatcgagatttctctgacctctgaagtgcactgtggttgcgtggctgggaatccacgcttgaccatgtactgcttgatagagtcgcggctggccgactcatgggttaaagtcagttgacaagacac

SEQ ID NO: 1419 - DNA, 420 bp, Unknown; identical to SEQ ID NO: 460
  Description of Unknown: Bovine kobuvirus polyprotein gene, complete cds.1 sequence

SEQ ID NO: 1420 - DNA, 555 bp, Aichivirus C
cttcggccctctcaccctcttttccggtggccacccgcccgggccaccgttactccactccactccctcgggactggtttggaggaacacaacagggcttctcatccctgtttacccttattccacttacccttctccccgaactacccaacccactccccactgattgactcccttggattaagacctcggaatgtcttcctgaccttcttcttggttttcccttttcggattgccggtggtgcctggtggaaaaagcacaagtgtgttgttggctaccaaactcctacccgacaaaggtgcgtgtccgcgtgctgagtaatgggataggagatgccaataacaggctcgcccatgagtagagcatggactgcggtgcatgtgacttcggtcaccaggggcatagcattgctcacccctgaatcaagtcatcgagatttctctgacctctgaagtgcactgtggttgcgtggctgggaatccacgcttgaccatgtactgcttgatagagtcgcggctggccgactcatgggttaaagtcagttgacaagacac

SEQ ID NO: 1421 - DNA, 557 bp, Aichivirus C
cttcggccctctcaccctcttttccggtggccacacgcccgggccaccgttactccactccactccctcgggactggtttggaggaacacaacagggcttcccatccctgttcctccctcaactccacttaccctttccccttaccaaccttatccacaccctattgactgattcctttggattttgacctcagaatgcctatctgacctcccacctgcctcccccttctcggattgccggtggtgcctggcggaaaaagcacaagtgtgttgttggctaccaaactcctacccgacaaaggtgcgtgtccgcgtgctgagtaatgggataggagatgccaataacaggctcgcccatgagtagagcatggactgcggtgcatgtgacttcagtcaccaggggcatagcattgctcacccctgaatcaagtcatcgagatttctctgacctctgaagtgcactgtggttgcgtggctgggaatccacgcttgaccatgtactgcttgatagagtcgcggctggccgactcatgggttaaagtcagttgacaagacac

SEQ ID NO: 1422 - DNA, 557 bp, Aichivirus C
cttcggccctctcaccctcttttccggtggccacacgcccgggccaccgttactccactccactccctcgggactggtttggaggaacacaacagggcttcccatccctgttcctccctcaactccacttaccctttccccttaccaacctcatccacacctcattgactgattcctttggattttgacttcagaatgcctatctgacctcccacttgcctcccccttctcggattgccggtggtgcctggcggaaaaagcacaagtgtgttgttggctaccaaactcctacccgacaaaggtgcgtgtccgcgtgctgagtaatgggataggagatgccaataacaggctcgcccatgagtagagcatggactgcggtgcatgtgacttcagtcaccaggggcatagcattgctcacccctgaatcaagtcatcgagatttctctgacctctgaagtgcactgtggttgcgtggctgggaatccacgcttgaccatgtactgcttgatagagtcgcggctggccgactcatgggttaaagtcagttgacaagacac

SEQ ID NO: 1423 - DNA, 556 bp, Aichivirus C
ttcggccctctcaccctcttttccggtggccacacgcccgggccaccgttactccactccactccctcgggactggtttggaggaacacaacagggcttcccatccctgttcctccctcaactccacttaccctttccccttaccaacctcatccacacctcattgactgattcctttggattttgacttcagaatgcctatctgacctcccacttgcctcccccttctcggattgccggtggtgcctggcggaaaaagcacaagtgtgttgttggctaccaaactcctacccgacaaaggtgcgtgtccgcgtgctgagtaatgggataggagatgccaataacaggctcgcccatgagtagagcatggactgcggtgcatgtgacttcagtcaccaggggcatagcattgctcacccctgaatcaagtcatcgagatttctctgacctctgaagtgcactgtggttgcgtggctgggaatccacgcttgaccatgtactgcttgatagagtcgcggctggccgactcatgggttaaagtcagttgacaagacac

SEQ ID NO: 1424 - DNA, 557 bp, Aichivirus C
cttcggccctctcaccctcttttccggtggccacccgcccgggccaccgttacttcactccactccttcgggactggtttggaggaacataacagggcttcccaatcccctgttatcctttatcccaaacaccttttcccttaaccaaccctatccacaccccactgactgattcctttggattttgacctcagaatgcctacctgacctcccactcgcctctcccttctcggattgccggtggtgcctggcggaaaaagcacaagtgtgttgcaggctaccaaactcctacccgacaaaggtgcgtgtccgcgtgctgagtaatgggataggagatgcctacaacaggctcgcccatgagtagagcatggactgcggtgcatgtgacttcggtcaccacgggcatagcattgctcacccgtgaatcaagtcatcgagatttctctgacctctgaagtgcactgtggttgcgtggctgggaatccacgcttgaccatgtactgcttgatagagtcgcggctggccgactcatgggttaaagtcagttgacaagacac

SEQ ID NO: 1425 - DNA, 557 bp, Aichivirus C
cttcggccctctcaccctcttttccggtggccactcgcccgggccaccgttactccactccactccctcgggactggtctggaggaacacaacagggcttcccatccctgtttaccctcattccaatttacccttcccttacaaccaaccctatccacaccccactgaatgattcctttggattttgacctcagaatgcctacctgaccccccacttgcttctccctcctcggattgccggtggtgcctggcggaaaaagcacaagtgtgttgttggctaccaaactcctacccgacaaaggtgcgtgtccgcgtgctgagtaatgggataggagatgccaataacaggctcgcccatgagtagagcatggactgcggtgcatgtgacttcggtcaccagggacatagcattgctcacccctgaatcaagttattgagatttctctgacctctgaagtgcactgtggttgcgtggccgggaatccacgcttgaccatgtactgcttgatagagtcgcggctggccgactcatgggttaaagtcagttgacaagacac

SEQ ID NO: 1426 - DNA, 559 bp, Aichivirus C
cggcctcggcccactcaccctctttaccggtggccacccgcccgggccaccgttacttcactccactccttcgggactggtttggaggaacataacagggcttcccatccctgttcaccccttattccaattaccctcacccttgattaaccctacccacaccccactgactgattcctttggattttgacctcagaatgcctacttgacctcctacttgcttctcccttctcggattgccggtggtgcctggcggaaaaagcacaagtgtgttgcaggctaccaaactcctacccgacaaaggtgcgtgtccgcgtgctgagtaatgggataggagatgcctacaacaggctcgcccatgagtagagcatggactgcggtgcatgtgacttcggtcaccacgggcatagcattgctcacccgtgaatcaagtcatcgagatttctctgacctctgaagtgcactgtggttgcgtggctgggaatccacgcttgaccatgtactgcttgatagagtcgcggctggccgactcatgggttaaagtcagttgacaagacac

SEQ ID NO: 1427 - DNA, 556 bp, Unknown
  Description of Unknown: Porcine kobuvirus isolate CH/DX/2012, complete genome.1 sequence
cttcggccctctcaccctcttttccggtggccactcgcccgggccaccgttacttcactccactccctcgggactggtttggaggaacataacagggcttcccacccctgtttacccttaattccacttacccttccccttaaccaaccctatccacaccccactgactgattcctttggattttgacctcagaatgcctacttgacctcccacttgcctctcccttctcggattgccggtggtgcctggcggaaaaagcacaagtgtgttgcaggctaccaaactcctacccgacaaaggtgcgtgtccgcgtgctgagtaatgggataggagatgcctacaacaggctcgcccatgagtagagcatggactgcggtgcatgtgacttcggtcaccacgggcatagcattgctcacccgtgaatcaagtcatcgagatttctctgacctctgaagtgcactgtggttgcgtggctgggaatccacgcttgaccatgtactgcttgatagagtcgcggctggccgactcatgggttaaagtcagttgacaagacac

SEQ ID NO: 1428 - DNA, 556 bp, Unknown
  Description of Unknown: Porcine kobuvirus isolate CH/HZ/2011 polyprotein gene, complete1 sequence
cttcggccctctcaccctcttttccggtggccactcgcccgggccaccgttacttcactccactccctcgggactggtttggaggaacataacagggcttcccacccctgtttacccttaattccacttacccttccccttaaccaaccctatccacaccccactgactgattcctttggattttgacctcagaacgcctacttgacctcccacttgcctctcccttctcggattgccggtggtgcctggcggaaaaagcacaagtgtgttgcaggctaccaaactcctacccgacaaaggtgcgtgtccgcgtgctgagtaatgggataggagatgcctacaacaggctcgcccatgagtagagcatggactgcggtgcatgtgacttcggtcaccacgggcatagcattgctcacccgtgaatcaagtcatcgagatttctctgacctctgaagtgcactgtggttgcgtggctgggaatccacgcttgaccatgtactgcttgatagagtcgcggctggccgactcatgggttaaagtcagttgacaagacac

SEQ ID NO: 1429 - DNA, 556 bp, Aichivirus C
cctcggccctctcaccctcttttccggtggccactcgcccgggccaccgttacttcactccactcccttgggactggtttggaggaacacaacagggcttcccacccctgtttaccctacactccactcaccctctcccttaaccaaccctatccacatcccactgactgattcctttggattttgacttcagaatgcctacttgacctcccacttgcttctcccttcccggattgccggtggtgcctggcggaaaaagcacaagtgtgttgttggctaccaaacccctacccgacaaaagcgcgtgtccgcgtgctgagtaatgggataggggatgccaatgacaggctcgcccatgagtagagcatggactgcggtgcatgtgactttggtcaccaggggcatagcattgctcacccctgaatcaagtcatcgagatttctctgacctctgaagtgcactgtggttgcgtggctgggaatccacgcttgaccatgtactgcttgatagagtcgcggctggccgactcatgggttaaagtcagttgacaagacac

SEQ ID NO: 1430 - DNA, 557 bp, Aichivirus C
cttacggggctctcaccctcttttccggtggccactcgcccgggccaccgttactccactccactccttcgggactggtttggaggaacacaacagggcttcccacccctgtttacccttaactccactcacccctcccttgaaccaaccctatccacaccccactgactgactcctttggattttgacttcggaatgcctacctaacctcccacttgcctttccctttacggattgccggtggtgcctggcggaaaaagcacaagtgtgttgttggctaccaaactcctacccgacaaaggtgcgtgtccgcgtgctgagtaatgggataggagatgccaatgacaggctcgcccatgagtagagcatggactgcggtgcatgtgacttcggtcaccaggggcatagcattgctcacccctgaatcaagtcatcgagatttctctgacctctgaagtgcactgtggttgcgtggctgggaatccacgcttgaccatgtactgcttgatagagtcgcggctggccgactcatgggttaaagtcagttgacaagacac

SEQ ID NO: 1431 - DNA, 776 bp, Aichivirus B
cttcggccccctcaccctcttttccggcggcgcaagttcgcgtcgtcgtaagcctggacacccatgttcgcatcggtctccgggcaaatacaagaaccccagaccttctggtacttcttcgcctgggtcacaaaagcgaagaacctgcctctctaacgccagacgagcggcattaaacttgaacttctggcactctccactctcccttttccctgtccctttccccactgcgctctcaaggtcgcgcaatcctgggactagcccagttttaaaagttcctggcaccctttgcccctctaggcccttaaggtaggaactgaccttgtgctgtgatctcggtgcgggagtgctaccacgtagtcatcgtaagcctcgtttctggttctgccctggcaaggctacagagtaccgtgttccgctgtggatgccatccgggtaaccggacccccagtgtgtgtagcggtatgttcacggtccgccgtgttcaccagattcctgacctggctttgctagaaatggtgtgtgcccaatccctgtgaccagtatcaattacatcacctaggaatgctaggaaggtaccccagtcctgagctgggatctgatcctaggctaattgtctacggtgatgctccttttattttcttacaactgctattgactgtctgattgctgattctgctcttgtgctcttctgctctggctcattctcaagggttctctttgtccaagatcctttggttctctccttgttccacttgccactgccaacgcttgtc

SEQ ID NO: 1432 - DNA, 665 bp, Unknown
  Description of Unknown: unclassified Kobuvirus sequence
gcccgtccccctcaccctcttttccggtggccacgcccgggccaccgatacttcccttcactccctcgggactgttggggaggaacacaacagggctcccctgtatttcctcttcccattccccctttcctaaccccaaccgccgtatctggtggcggtaagacacacgggtctttccctctaaagcacaattgtgtgtgtgtcccaggtcctcctgcgttcggtgcgggagtgctcccacccaactgttgtaagcctgtccaacgtgtcgtcctggcaagactatgacgtcgcatgttccgctgtggatgccgaccgggtaaccggttccccagtgtgtgtagtgcgatcttccaggttctcctggttggcgttgtccagaaactgcttcgggtaagtggggtgtgcccaatccctacaagggttgattctttcaccaccttaggaatgctccggaggtaccccagcaacagctgggatctgaccggaggctaattgtctacgggtggtgtttccattttctttttcacacaacttcattgctgacaactcactgactaatcacttgctctcttgtgcctttctgctctggttcaagttccttgattgtttgtttgattgcttttcactgctttcttcccacaatccttgctcagttcaaagtc

SEQ ID NO: 1433 - DNA, 556 bp, Unknown
  Description of Unknown: Porcine kobuvirus gene for polyprotein, complete cds, strain:1 sequence
cttcggccctctcaccctcttttccggtggccgcccgcccgggccaccgttacttcactccactccctcgggactggtttggaggaacacaacagggcttcccatccctgttttcccttaataccacttaccttttccctaattaaccctacccaccacccaccgactgactccctttggattttgacctcagaatgcccacttgacctcccacttgcctcttcctttttggattgccggtggtgcctggcggaaaaagcacaagtgtgttgcaggctaccaaactcctacccgacaaaggtgcgtgtccgcgtgctgagtaatgggataggagatgcctacaacaggctcgcccatgagtagagcatggactgcggtgcatgtgacctcggtcaccacgggcatagcattgctcacccgtgaatcaagtcatcgagatctctctgacctctgaagtgcactgtggttgcgtggctgggaatccacgcttgaccatgtactgcttgatagagtcgcggctggccgactcatgggttaaagtcagttgacaagacac

SEQ ID NO: 1434 - DNA, 549 bp, Aichivirus C
cctctcaccctcttttccggtggccacccgcccgggccaccgttactccactccactccttcgggactggtttggaggaacataacagggcttcccacccctgtttacccttattccactcaccctttccccacaaccaaccctatccacaccccactgactgattcctttggattttgacctcagaatgcctacctgacctcccacttgcctctcccttctcggattgccggtggtgcctggcggaaaaagcacaagtgtgttgttggctaccaaactcctacccgacaaaggtgcgtgtccgcgtgctgagtaatgggataggagatgccaatgacaggctcgcccatgagtagagcatggactgcggtgcatgtgacctcggtcaccaggggcatagcattgctcacccctgaatcaagtcatcgagatttctctgacctctgaagtgcactgtggttgcgtggctgggaatccacgcttgaccatgtactgcttgatagagtcgcggctggccgactcatgggttaaagtcagttgacaagacac

SEQ ID NO: 1435 - DNA, 546 bp, Aichivirus C
ctcaccctcttttccggtggccactcgcccgggccaccgttactccactccactccctcgggactggtttggaggaacacaacagggcttcccatccctgtttacccttcactccactcaccccttcccttaatcaaccctgtccacaccccactgactgattcctttggattatgacctcagaatgcctacccgatctcccactcgcctctcctttcttggattgccggtggtgcctggcggaaaaagcacaagtgtgttgcaggctaccaaactcctacccgacaaaggtgcgtgtccgcgtgctgagtaatgggataggagatgcctacaacaggctcgcccatgagtagagcatggactgcggtgcatgtgacttcggtcaccacgggcatagcattgctcacccgtgaatcaagtcatcgagatttctctgacctctgaagtgcactgtggttgcgtggctgggaatccacgcttgaccatgtactgcttgatagagtcgcggctggccgactcatgggttaaagtcagttgacaagacac

SEQ ID NO: 1436 - DNA, 755 bp, Aichivirus B; identical to SEQ ID NO: 1218

SEQ ID NO: 1437 - DNA, 729 bp, Aichivirus B; identical to SEQ ID NO: 922

SEQ ID NO: 1438 - DNA, 787 bp, Unknown
  Description of Unknown: unclassified Kobuvirus sequence
cttcggccccctcaccctcttttccggcggcgcatgttcgcgtcgtcgtaagtctggattcccaaggcccactcggttcaacttcggtttccggacaaatacaaagaacctcagtcctcttggtactttctcgcctgagtctacaaagcgagaaacctgcccctctaacgccagacgagcggcataaaactcgaacttctggcacgttccaccaccccttctcctatcccaacccccattgcgctctcaaggtcgcgcttttccgagactagctcggattcaaaaagttcctggcaccctttaccccttcaggcccttaaggtaggaactgaccttgtgctgtgatctcggtgcggaagtgctactgcgtagtgattgtaagatccttttgtggttctgccctggcaaggctacagagtgctgtgatccgctgcggatgccatcctggtaacaggacccccagtgtgcgcaacagtatgttcacggtcttccgtgttcaccacattcggaacactgctttcgtgaaacagtgtgtgtccaatccctgtgatcagtatcaaccacaccacctaggaatgctaggaaggtaccccggttcgccgggatctgatcctaggctaattgtctacggtggtgctcctttttattttccacttcaactcactggttacaactgcttgatttctgtgtttgctgcttttctctgctctcactgccattctcaagtgttcacactgtccaagctcctttggttgttcgcttccacttgccactgtcaactcttgtc

SEQ ID NO: 1439 - DNA, 770 bp, Aichivirus B; identical to SEQ ID NO: 1230

SEQ ID NO: 1440 - DNA, 545 bp, Unknown
  Description of Unknown: unclassified Kobuvirus sequence
cccccttttccctaaccccaaccgccgtatctggtggcggcaagacacacgggtctttccctctaaagcacaaatgtgtgtgtgtcccaggtcctcctgcgctcggtgcgggagtgctcccacccaactgttgtaagcctgtccaacgtgtcgtcctggcaagactatgacgtcgcatgttccgctgcggatgccgaccgggtaaccggttccccagtgtgtgtagtgcgatcttccaggttcccctggttggcgttgtccagaaactgcttcaggtaagtggggtgtgcccaatccctgcaaaggttgattctctcaccaccttaggaatgctccggaggtaccccagcaacagctgggatctgaccggaggctaattgtctacgggtggtgtttcctttttctttttccacaacttcattgctgacaactcactgactacccatttgctctcttgtgcctttctgctctggttcaagctccttgattgtttttgattgctttctattgctttcttccactcaacccttgctcagttcaaagtc

SEQ ID NO: 1441 - DNA, 782 bp, Unknown
  Description of Unknown: unclassified Kobuvirus sequence
ataccctccccctccacactcttttcgacggcgcgcctcggcaaggccgccgataccgcactgtgctacttcggtaccactctgcgggaatgacaatatgcccggtgtatagtttgcctgtttctcgcaccgttaccgctcgttcgggaatgtgaaactggcacccctcctctcccctaccaccctttctccttcgcccccattcataatttacaacgccgcacacagcggcggccgccaagggctagcctggcggttataaaaggaacctgggtctttccctcttcaagccaaaaggtaggttccctgtgtccctgaatgctcggtgaggaatgctgcaccgtaacgctttgtgaagtgtttgcaagttctggcccggcaagcctacagagtgctgtgatccgctgcggacgccatcctggtaacaggacccccagtgtgcgcaacagtatgttcagacttcggtttgttcacttgctttcatggaccattgcgcgaaagtgcgtgcgccatatccctgtacttcaggtgtgcttctctggaccctaggaatgctgcgaaggtaccccgtttcggcgggatctgatcgcaggctaattgtctatgggttcagtttcctttttctttactccacaattgactgcttaactgactctggatcttgtgcttccactgctctttctgctctcaaaacggcttcacttaccaactctcacctttcgaccaacaccatttacacactaacttttttcgactcttctgactcctggcttggtgaagac

SEQ ID NO: 1442 - DNA, 537 bp, Aichivirus C
ttttccggtggccacacgcccgggccaccgttactccactccactccttcgggactggtttggaggaacacaacagggcttcccacccctgtttaccctttctccactcatccactccctttaaccaaccctgtccacaccccactgactgactcctttggattttgacctcggaatgcctacttgaccttccactcgcctttcccttttcggattgccggtggtgcctggcggaaaaagcacaagtgtgttgcaggctaccaaactcctacccgacaaaggtgcgtgtccgcgtgctgagtaatgggataggagatgcctacaacaggctcgcccatgagtagagcatggactgcggtgcatgtgacttcggtcaccacgggcatagcattgctcacccgtgaatcaagtcatcgagatttctctgacctctgaagtgcactgtggttgcgtggctgggaatccacgcttgaccatgtactgcttgatagagtcgcggctggccgactcatgggttaaagtcagttgacaagacac

SEQ ID NO: 1443 - DNA, 528 bp, Aichivirus C
gccacacgcccgggccaccgttactccactccactccctcgggactggtttggaggaacacaacagggcttcccatccctgttcctccctcaactccacttaccctttccccttaccaaccttatccacaccctattgactgattcctttggattttgacctcagaatgcctatctgacctcccacctgcctcccccttctcggattgccggtggtgcctggcggaaaaagcacaagtgtgttgttggctaccaaactcctacccgacaaaggtgcgtgtccgcgtgctgagtaatgggataggagatgccaataacaggctcgcccatgagtagagcatggactgcggtgcatgtgacttcagtcaccaggggcatagcattgctcacccctgaatcaagtcatcgagatttctctgacctctgaagtgcactgtggttgcgtggctgggaatccacgcttgaccatgtactgcttgatagagtcgcggctggccgactcatgggttaaagtcagttgacaagacac

SEQ ID NO: 1444 - DNA, 532 bp, Unknown
  Description of Unknown: Porcine kobuvirus gene for polyprotein, complete cds, strain:1 sequence
ccggtggccacccgcccgggccaccgttactccactccactccctcgggactggtttggaggaacataacagggcctcccacccctgttcaccttaattccacttaccctttccctcaaccaaccctatccacaccccattgactgattcctttggattttgacctcagaatgcctacttgacctcccacttgcctttcccttctcggattgccggtggtgcctggcggaaaaagcacaagtgtgttgcaggctatcaaactcctacccgacaaaggtgcgtgtccgcgtgctgagtaatgggataggagatgcctacaacaggctcgcccatgagtagagcatggactgcggtgcatgtgacttcggtcaccacgggcatagcattgctcacccgtgaatcaagtcatcgagatttctctgacctctgaagtgcactgtggttgcgtggctgggaatccacgcttgaccatgtactgcttgatagagtcgcggctggccgactcatgggttaaagtcagttgacaagacac

SEQ ID NO: 1445 - DNA, 510 bp, Aichivirus C
cgttactccactccactccctcgggactggtttggaggaacataacagggcttcccacccctgtttacccttaattccactcaccctttccctataaccaaccctatccacaccccactgactgattcctttggattttgacctcagaatgcccacctgacctcccacttgcctctcccttcccggattgccggtggtgcctggcggaaaaagcacaagtgtgttgttggctaccaaactcctacccgacaaaggtgcgtgtccgcgtgctgagtaatgggataggagatgccaataacaggctcgcccatgagtagagcatggactgcggtgcatgtgactttggtcaccaggggcatagcattgctcacccctgaatcaagtcatcgagatttctctgacctctgaagtgcactgtggttgcgtggctgggaatccacgcttgaccatgtactgcttgatagagtcgcggctggccgactcatgggttaaagtcagttgacaagacac

SEQ ID NO: 1446 - DNA, 513 bp, Aichivirus C
ccaccgttacttcactccactccctcgggactggtttggaggagcataacagggcttcccatccctgttcaccctcaataccacccaccctttccctcaaccatccctatccacaccccactgactgattcccttggattttgacctcagaacgcctacttgacctcccacttgcctttcccttctcggattgccggtggtgcctggcggaaaaagcacaagtgtgttgcaggctaccaaactcctacccgacaaaggtacgtgtccgcgtgctgagtaatgggataggagatgcctacaacaggctcgcccatgagtagagcatggactgcggtgcatgtgacttcggtcaccacgggcatagcattgctcacccgtgaatcaagtcattgagattcctctgacctctgaagtgcactgtggttgcgtggctgggaatccacgcttgaccatgtactgcttgatagagtcgcggctggccgactcatgggttaaagtcagttgataagacac

SEQ ID NO: 1447 - DNA, 509 bp, Aichivirus C
cgttactccactccactccctcgggactggtttggaggaacataacagggcttcccacccctgtttacccttaattccactcaccctttcccttaaccaaccctatccacaccccactgactgattcctttggattttgacctcagaatgcccacttgacctcccacttgcctctcccttcccggattgccggtggtgcctggcggaaaaagcacaagtgtgttgttggctaccaaactcctacccgacaaaggtgcgtgtccgcgtgctgagtaatgggataggagatgccaataacaggctcgcccatgagtagagcatggactgcggtgcatgtgactttggtcaccaggggcatagcattgctcacccctgaatcaagtcatcgagatttctctgacctctgaagtgcactgtggttgcgtggctgggaatccacgcttgaccatgtactgcttgatagagtcgcggctggccgactcatgggttaaagtcagttgacaagacac

SEQ ID NO: 1448 - DNA, 509 bp, Aichivirus C
cgttactccactccactccttcgggactggtttggaggaacataacagggcttcccatccctgtttaccctttattccacttaccctttctcctaatcaaccctatccacaccccactgactgactcctttggattttgacctcagaatgcctacttgacctcccacttgcctctcccttctcggattgccggtggtgcctggcggaaaaagcacaagtgtgttgcaggctaccaaactcctacccgacaaaggtgcgtgtccgcgtgctgagtaatgggataggagatgcctacaacaggctcgcccatgagtagagcatggactgcggtgcatgtgacttcggtcaccacgggcatagcattgctcacccgtgaatcaagtcatcgagatttctctgacctctgaagtgcactgtggttgcgtggctgggaatccacgcttgaccatgtactgcttgatagagtcgcggctggccgactcatgggttaaagtcagttgataagacac

SEQ ID NO: 1449 - DNA, 641 bp, Unknown; identical to SEQ ID NO: 770
  Description of Unknown: unclassified Kobuvirus sequence

SEQ ID NO: 1450 - DNA, 510 bp, Aichivirus C
cgttactccactccactccctcgggactggtttggaggaacataacagggcttcccacccctgtttacccttaactccactcaccctttccctacaaccaaccctatccacaccccactgactgattccttcggattttgacctcagaatgcctacctgacctcccacttgcctttcccttcccggattgccggtggtgcctggcggaaaaagcacaagtgtgttgttggctaccaaactcctacccgacaaaggtgcgtgtccgcgtgctgagtaatgggataggagatgccaataacaggctcgcccatgagtagagcatggactgcggtgcatgtgacttcggtcaccaggggcatagcattgctcacccctgaatcaagtcatcgagatttctctgacctctgaagtgcactgtggttgcgcggctgggaatccacgcttgaccatgtactgcttgatagagtcgcggctggccgactcatgggttaaagtcagttgacaagacac

SEQ ID NO: 1451 - DNA, 509 bp, Aichivirus C
cgttactccactccactccctcgggactggtttggaggaacataacagggcttcccatccctgtttaccctaaattccacttaccctttccctagaccaaccctatccacaccccactgactgattcctttggattttgacctcagaatgcctacctgacctcccatctgcttttccctttccggattgccggtggtgcctggcggaaaaagcacaagtgtgttgttggctaccaaactcctacccgacaaaggtgcgtgtccgcgtgctgagtaatgggataggagatgccaataacaggctcgcccatgagtagagcatggactgcggtgcatgtgacttcggtcaccaggggcatagcattgctcacccctgaatcaagtcatcgagatttctctgacctctgaagtgcactgtggttgcgtggctgggaatccacgcttgaccatgtactgcttgatagagtcgcggctggccgactcatgggttaaagtcagttgacaagacac

SEQ ID NO: 1452 - DNA, 1000 bp, Unknown; identical to SEQ ID NO: 138
  Description of Unknown: unclassified Cardiovirus sequence

SEQ ID NO: 1453 - DNA, 977 bp, Cardiovirus B
caccccctttggacgcggggcctgcgatagtgccaccccccgtcctccctattccaactacccgaccctaacccagggtccaggaaactggatcaatacaagtcatcccctgaatgctggctaatcagaggaaagtcagcattttccggcccaggctaagagaaacacaataagttagaatctaaattaatccccttgacgaattcgcaacgataagtcctccctcccttgccgctcgttcacacccagaactaacaattcggccccttgtgacgagccccttggtgaaaggacctctttcaatgcgacgtggttggagattaaaccgactccgacgaaagtgctatcatgcctccccgattatgtgatgttttctgccctgctgggcggagcattctcgggttgatacaccttgaatccttcatccttggacctcaggtcccccggtctaagccgcttggaatacgacagggttattttccaatcttctcctttctactttcatgagtcctattcatgaaaagggtctgtgctgccccttccttcttggagaatctgcgcggcggtctttccgtctctcgaaaagcgcagatgcagcatgctggaaccggtgaagaaaacagttctttgtggaaacttagagcagacatcgaaacagctgtagtgacctcacagtagcagcggaaccccctcctggtaacaggagcctctgcggccaaaagccccgtggataagatccactgctgtgagcggtgcaaccccagcaccctggttcgatggttgttctctgtggaaccagagaatggtctttctcaagccctccagtagagaagccaagaatgtcctgaaggtaccccgcatgcgggatctgatcaggagaccaatcgtcagtgctttacactggcgctttggtttaaaaactgtcacagcttctccaaaccaagtggtcttggttttcacttttatcaaactgtttc

SEQ ID NO: 1454 - DNA, 1000 bp, Pestivirus A
ggagggaaggcgattcgtcgccagcttatttatctccgctctggcaacctacacatacaagacttggaattaccacaacctctccaaggtagtagaaccagccttggcatacctcccctacgctaccagtgcactaaaaatgttcaccccaactaggctggagagcgtagtcatacttagcaccacaatatacaaaacttacctctcaataaggaaaggaaaaagtgatggacttctgggtacagggattagtgcagcaatggagattctgtcacagaacccggtgtcagtaggtatatctgtcatgctgggggtgggggcaattgccgctcacaatgcaatcgagtctagtgagcaaaaaaggaccctattgatgaaagtgtttgtaaaaaacttcctggaccaggcggcaacagatgagttggtgaaggaaaatccagagaaaataataatggccttatttgaagcagtacagacaattggcaacccattgaggcttatatatcatctgtatggggtttactacaaaggctgggaagcgaaagaactatccgagaggacagctggcaggaacctgttcactttgataatgttcgaagctttcgaactattagggatggactctgaagggaagataaggaacctatctgggaattacatcttggatttgatctacagtttacataaacagataaacagaggcttgaagaagatagtcttggggtgggctcctgcacccttcagttgtgactggactcctagtgatgggagaatcaggttacccacagacaactatctgagagtagagactaagtgcccatgtggttatgagatgaaagcactaaggaatttcagtggcagtctcacaaaagtggaagagaaagggcctttcctctgtaggaacgggcctggtagggggccagttaactatagagtcacaaagtactatgatgacaacctcacagagataaaaccagttgcaaaactagaaggactgcac

SEQ ID NO: 1455 - DNA, 1000 bp, Cardiovirus C
ggtttggatcttggatctctctccttccttcccccgtcttcaatttagcttcgtgattgaagcatctcactgtctctagtatttatgtcggactgacgattgagtacgttcagattgtgtttgggaggcccaagggatcgatggacaacacttcgaaagagtcacttgtccaccgctcctttcccctaccctagcaactctggatttgctcacgtggagttcgaggtctgtactttaactctgacttgcttttcttaccttgctatcttgctgacgtggattggttgtagactgattcacgttctcgttagatgctgacgtggagtacgatcgctgtacattccactactgccaattagctcccccttcccgttgctcccctctataaggagagccttctcttgcaaaggtgaagccttcacccccggtcgaagccgcttggaataagacagggttattttctcctctcctcggcgcttgcctcttctaagctgaataggttctatctattcaggcggatggtctggtccgttccttcttggacagagtgtgtatctgggttttccggatctcgaccacacactcaccagagctcaggagtgattaagtcaaggcccgatctgcggcgaaaaggaaatgaagtattttgcagctgtagcgacctctcaaggccagcggatttccccacctggtgacaggtgcctctggggccaaaagccacgtgttaatagcacccttgagagcggtggtaccccaccaccctgcaaattatggatttgacttagtaactaaaagattgacttggcatacctcaacctgagcggcggctaaggatgccctgaaggtacccgtgttgaaatcgcttcggcgaccatggatctgatcaggggccctgcctggagtggttctatcccacacagcgtagggttaaaaaacgtctaaccgccccacaaagaccccggcagggatgccggtttcctttttaccaattcttgacact

SEQ ID NO: 1456 - DNA, 1000 bp, Mischivirus A
atcacctgcttagggcgaattgtcgagacgtcattgatgttccggcccaggataacaacgaagtgttccaaggtgatttactccgcccttttaacaacgcacttgggcgaactgcactggtgtactggtaattcctgtcttggattgtgtagtggatataaactgtacccacggttgaaacccactactcacctcacagattgtgtttacctttatatctttgtacgcggtaagtgcggcgttgagagcgccttgtaagttcctaagcattagttggtcctccccgattatgtcatcaatggggttgtcggcacgcggttaagcggttgtcgacccgttgcttggtttaagcatgaggtggattcccccgattatgtctacccgttactatggcgggcggtcgtttcagggtgtttctactgaggactgcaccaagtctttatcttttattctcagatctccggctgtttgacgcttgtaggacagcaggactattttctcttaatctttttctacccactagggtcctatcctagtggagggagggtgccaccccttctctctttagagagtgcgcctggcggtctttccgtctctggaaaaaggagcacatggcatgctacaattggcacaagaaaacaagctttgcggattctttctttgtactagaggaagctgtagcgaccctgtatggcgagcggactcccctctcggcgacgagagcctctcgggccaaaagccaagtgttaatagcacccatacaggcggcagtaccccactgccctttctcaacatacaatgactgatgaaccactgttggtttttctgacacctttgtagtaggattccaaggaatgtcctgaaggtaccctgttagcttacgcgcaggatctgatcaggagtctctttacagtgctgtacactgtgcaagggattaaaaattgtttgaggaatccccgagatagtggtctatctcttcctattttgttttacagacacg

SEQ ID NO: 1457 - DNA, 1000 bp, Unknown
  Description of Unknown: Rodent cardiovirus isolate AMzj-2018, complete genome.1 sequence
cagtacccgcgtccaaagggggttgcctggggtggtctcaaccgcgaacacactagcgtgtatccgcggtgaagaccccagggccccctttggacgcgggtactgcgacagtgccaaaccccgtccttccctactccacctaccccggccctaacccagggtccaggaaactggatcaatacaaatcatcccctgaatgctggctaatcagaggaaagtcagcattttccggcccaggctaagagaaatacataagttagactcaatcttgatccccttgacgaattcgcaacgaaaagttctccctcccttgccgcttgttcacacccagaactaataattcggcccctcgtgacaagcccctcggtgaaagaacctctttcaatgcgacgtggttggagattaaatccgactccgacgaaagtactatcatgcctccccgattatgtgatgttttctgccctgctgggcggagcattctcgggttgatatactttgaatccttcctccttggacctccggtcccccggtctaagccgcttggaatacgacagggttattttccaaatctttctccttctactttcatgagctctattcatgaaaagggcatgtgctgccccttccttcttggagaatccgcgcggcggtctttccgtctctcaaaaagcgtggatgcagcatgctggaaccggtgaagaatgtagttctttgtggaaacctagagcagacatcgaaccggctgtagcgacctcacagtaccactgctgtgagcggtgcgaccccagcaccctggttcgatggttgttctctgtggaaccagagaatggccttctcaagccatccagtagagaagccaagaatgtcctgaaggtaccccggcccacgggatctgatcaggagactgatttgtggtgctttacaccacaacttcagtttaaaaattgtcacagcttctccaaaccaagtggtcttggttttccctctattacaatgtgac

SEQ ID NO: 1458 - DNA, 1000 bp, Unknown
  Description of Unknown: Foot-and-mouth disease virus - type O strain Akesu/58, complete1 sequence
cgacagctcctgcgttgcactccacacttacgtttgtatgcgcgcgggaaccgctggactttcgttcacccacctacagctggactcacggcaccgcgtggccattttagctggactgtgcggacgaacgccacttgcgcaccccgcgtgactggttaatactcttaccactttccgcctacttggtcgttagcgctgccctgggcactcccgttgggggccgtccggtgctccacggttcccacgcatgacaaactacggtgatggggccgcttcgtgcgagttgatcgcctggtgtgtttcggctgtcacccgaagcccgcctttcacaagttttaccgtcgttcccgacgttaaagggaggtaaccacatgcttattaccgcctttcccggcgttaaagggctgtaaccacacgaattgccttcacccggaagtaaaacggaaatccacacacacggttttgcccgttttcagagagaaacgggacgtgagcgcacgaaacgcgccgtcgcttgtggaagacttgtacaaacacgatctacgcaggtttcctcaactgacacaactcgtgcaaactgtaaccccgcctggtctttccaggtctggaggggaagcttttgtactgtgtttggctccacgttcggtctactggcgagcgctagtagtggcaatgttgtttcgtagcggagcatgttggccgtgggaatccctccttggcgacaaggacccacggggccgcaagccacgtctttgacccaacatgtgtgcaaccccagcacggcaaccttgccacgaaaaccacttcaaggtaacactgatactggtactcaaatactggtgacaggctaaggatgcccttcaggtaccccgaggtaacacgggacacttgggatctgagaaggggattgggacttctataaaagtgcccaatttaaaaagcttctatgcctgaataggtgaccggaggccggcacctttcctctacaactactttacca

SEQ ID NO: 1459 - DNA, 1000 bp, Unknown
  Description of Unknown: unclassified sequence
ccgcgggagagatccccggggccccctttcaacgcgggtactgcgatagtgccaccccagccttatccttctcccgacttcccgaccctaacccaggttcctcggaaaggaacaccaaaactcaatcccctggatgctgactaatcagaggaaagttggcattttccggcccaggcttagagaagtagataagttagactcaaattgattcaattccccttggcgaatccgcgtcgaggcgccacctctcacttgccgtcctccacacccatccttaattcggcctctgtgttggaccccttgttgaagtggcttccctctgcgcggcgcggttggagaattttgtcatccgactccgacgaaactaccatcatgcctccccgattgtgtgatgccctccgccctgctgggtggagcatcctcgggttgagaaacctcttccttcaaccttggaccccggtcccccggtctaagccgcttggaataagacagggttattttcactctcttcttcttctactccacggatttctattccctggaagggtatgtgttgcccctcgcttcttgcggaacgcgcacggtggtctttccacctctcgaaaagtgtgcgtgcaacatgcagagatacgtgaagaaagcagtttgtgaactagtcctagagcgaacacgaatccggctgtagcgaccacttaagagcagcggaacccccctcccggcgacgggagcctctgcggccaaaagccacgtggataagatccactcttgagtgcggtgcggccccggcaccccggtttcgtggttgttctttgacgaacccacaaatggcgatcttaagcgcctctgtagagaagccaagaatgtccagaaggtacccctatcaagggatctgatctggagacgtgtcacttatgctttacacgagtgctcgcgtttaaaaactgtcacagcttctccaaaccaagtggtcttggttttctccttctaattctctgtcaat

SEQ ID NO: 1460 - DNA, 1000 bp, Cardiovirus B
tcccccggtcaccccctttcgacgcgggtactgcgatagtgccacccagtctctcctactcccgactcccgaccctaacccaggttcctcggtataggaacaccactttactcatcccctggatgctgactaatcagaggaacgtcagcattttccggcccaggctaagagaagtagataagttacaatccaaattgatttatcatccccttgacgaattcgcgttggaaaagcacctctcacttgccgctcttcacacccatcattttaattcggcctctgtgttgagccccttgttgaagtgtttctctccatcgcgacgtggttggagatctaagtcaaccgactccgacgaaactaccatcatgtctccccgattatgtgatgctttctgccctgctgggtggagcatcctcgggttgagaaatccttcttcctttcaccttggaccccggtcccccggtctaagccgcttggaataagacagggttattttcacctctttttcttctactccacagtgctctatactgtggaagggtatgtgttgccccttccttcttggagaacgtgcgcggcggtctttccgtctctcgacaagcgcgcgtgcaacatgcagagtaacgcgaagaaagcagttcttggactagctttagtatctgcaagaagacagctgtagcgaccacacaaaggcagcggaacccccctcctggtaacaggagcctctgcggccaaaagccacgtggataagatccacctttgtgtgcggtgcaaccccagcaccctggtttcttgaagatactctagtgaacccttgaatggcaatctcaagcgcctctgtaggaaagccaagaatgtccaggaggtacccctacctcgcggaagggatctgacctggagacacgtcgcaagtgctttacacctgtgctcgtgtttaaaaattgtcacagctttcccaaaccaagtggtcttggttttcctttttattactattgacact

SEQ ID NO: 1461 - DNA, 1000 bp, Unknown
  Description of Unknown: Theiler murine encephalomyelitis, complete genome.1 sequence
ccggttaccccctttcgacgcgggtactgcgatagtgccaccccagtccttcctactcccgactcccgaccccaacccaggttccttggaacaggaacaccaatttattcatcccttggatgctgactaatcagaggaacgtcagcattttccggcccaggctaagagaagtagataagttagaatctaaattatttatcatccccttgacgaattcgcgttggaaaagcacctctcacttgccgctcttcacacccatcattctaattcggcccctgtgttgagccccttgttgaagtgtttccctccatcgcgacgtggttggagatctaagttaaccgactccgacgaaactaccatcatgcctccccgattatgtgatgctttctgccctgctgggtggagcatcctcgggttgagaaatctttcttccttttaccttggactccggtcccccggtctaagccgcttggaataagacagggttatcttcactcctcttcttttctacttcacagtgttctatgctgtgaaagggtatgtgtcgccccttccttcttcggagaacacgcgtggcggttttttccgtctctcgacaagcgcgtgtgcgacatgcagagtctcgcgaagaaagcagttctcggtctagctttagtgcccacaagaaaacagctgtagcgaccacacaaaggcagcggaacccccctcctggtaacaggagcctctgcggccaaaagccacgtggataagatccacctttgtgtgcggtgcaaccccagcaccctgttttcttggtgacactctagtgaacccctgaatggcgatcttaagcgcctctgtagggaagccaggaatgtccaggaggtaccccttccgctcggaagggatctgacctggagacacatcacatgtgctttacacctgtgcttgtgtttaaaaaattgtcgcagcttccccaaaccaagtggtcttggttttctctttttattatattgtcaat

SEQ ID NO: 1462 - DNA, 1000 bp, Cardiovirus B
atcccccggttaccccctttcgacgcgggtactgcgatagtgccaccccagtctttcctactcccgactcccgaccctaacccaggttcctcggaacaggaacaccaatttactcatcccctggatgctgactaatcagaggaacgtcagcattttccggcccaggctaagagaagtagataagttagaatccaaattgatttatcatccccttgacgaattcgcgttggaaaaacacctctcacttgccgctcttcacacccattaatttaattcggcctctgtgttgagccccttgttgaagtgtttccctccatcgcgacgtggttggagatctaagtcaaccgactccgacgaaactaccatcatgcctccccgattatgtgatgttttctgccctgctgggtggagcaccctcgggttgagaaaaccttcttcctttttccttggactccggtcccccggtctaagccgctcggaatatgacagggttattttcacctcttcttttctactccacagtgttctatactgtggaagggtatgtgttgccccttccttcttggagaacgtgcgcggcggtcttccgtctctcgacaagcgcgcgtgcaacatacagagtaacgcgaagaaagcagttctcggtctagctctagtgcccacaagaaaacagctgtagcgaccacacaaaggcagcggaacccctctcctggtaacaggagcctctgcggccaaaagccacgtggataagatccacctttgtgtgcggtgcaaccccagcaccctggtttcttggtgacactctagtgaacccctgaatggcaatctcaagcgcctctgtagggaagccaagaatgtccaggaggtaccccttcctctcggaagggatctgacctggagacacatcacacgtgctttacacctgtgcttgtgtttaaaaattgttacagcttccccgaaccaagtggtcttggttttcactttttatcacactgtcaat

SEQ ID NO: 1463 - DNA, 1000 bp, Unknown
  Description of Unknown: unclassified Picornaviridae sequence
cactacgttacggttcccgcccgggacaactggtaccccattaggctacaacatggctgaaaagggtattgggtccccccggattgtgtccgttcgtagtgtgtgtaacgtggtttaccatctccactaacattggactaagcatttcatctttcctccccgattgtgtactcacttggctaacgctgggtggtcgcggttgggtccttgatttactttttctcgtctaagcattccgactgtcctccccgattatgtgctcattcagttaactgctgggtggtcatgactaacatcgaggaaccttctgtccacgcttactttgagctccggtcgcttgacgcttgtagggcgatagggttatcttcctgacaacatctttattctacctccataggctctatctatggagacggagtgtggcacccgtcccttctttgggagcttcggtagtgacgccctttgtcactctcgccagccgaggcatgcctggtgccaggtagcaaagaaagcatatgtttaaggacttgactgatttagcgcaagagtttgtagcgatgtccatagtgtctgcggattccccacacggcgacgtgtgccgcggaggccaaaagccacggtgttcacagcacccctatggatgcccacagaccccagtgggcactcttgttgccggactttcaggaaattaggcataggctcttctcaaactcctggcattggactaggtaagaatgccccggaggtaccccagtactccttcgggagtctgggatctgaccgggggccccacaaacatgctttacgtgtttcgtgcggtcaaaaattgtctaactagtcccaaccttgaacaagggattgttctttcctttttattactgagactggcctatggtgacaacagagattgactgtgaatacagttattttctggtgtttatcatttggtttttctccgtgctcttttacctttgtggtatttgttctttagataggcaaa

SEQ ID NO: 1464 - DNA, 1000 bp, Unknown
  Description of Unknown: Theiler's encephalomyelitis virus isolate Vie415HTR, complete1 sequence
catcccccggtcaccccctttcgacgcgggtactgcgatagtgccaccccagtctttcctactcccgattcccgacccctacccaggttcctcggaacaggaacaccaaattactcatcccctggatgctgactaatcagaggaacgtcagcgttttccggcccaggttaagagaagtagataagttagattctaaattgacctaccatccccttgacgaattcacactggagacgcacctctcacttgccgctcttcacacccatcaatctaattcggcccctgtgttgagccccttgttgaagtgccttcccccattgtgacgtggttggagatctaagtcaaccgactccgacgaaactaccatcatgcctccccgattatgtgatgctttctgccctgctgggtggagcatcctcgggttgagaaaatcttcttcctttttccttggaccccggtcccccggtctaagccgcttggaataagacagggttagcttcatctcctccttcttccacttcaagtgcctatactatgaaagggtatgtgttgccccttccttcttggagaacacacgcggcggcctttccgtctctcgacaagcgcgtgtgcgacatgcagagaaacgtgaagaaagcagtttgcggactagctccagtgcccacaagaaaacagctgtagcgaccacacaaaggctgcggaaccccctcctggtaacaggagcctctgcggccaaaagccacgtggataagatccacctttgtgtgcggtacaaccccagtaccctggtttcttggtgcactctagcgaaaacgcaaatggcaatctgaagcgcctctgtaggaaagcaaagaatgtccaggaggtaccccttccttttggggagggatctgacctggagacacatcacacgtgctttacacttgtgcttgtgtttaaaaactgtccagctttcccaaaccaagtggtcttggttttcattttttaaacaaatttcact

SEQ ID NO: 1465 - DNA, 1000 bp, Cardiovirus B
cgcggtgaagatcaccccgggaaaccccctttggacgcgggacctgcgacagtgccatcccccgtctctcctattccaactacccgaccctaacccagggtccaggacactggatcaatacaagtcatcccctgaatgctggctaatcagaggaaagtcagcattttccggcccaggctaagagaaacacaataagttagaatctaaattaatcaccttgacgaattcgcaaagataagtcctccctcccttgccgctcgatcacacccagaactaacaattcggcctctcgtgacgagccccttggtgaaaggacctctttcaacgcgacgtggttggagattaaaaccgactccgacgaaagtgctatcatgcctccccgattatgtgatgttttctgccctgctgggcggagcattctcgggttgatataccttgaatccttcatccttggacctcccggtcccccggtctaagccacttggaatatgacagggttattttccaaaattcttatttccactttcatgagttcttttcatgaaaagggtatgtgctgccccttccttcttggagaatccgcgtggcggtctttccgtctctcgaaaaacgtggatgcagcatgctggaaacggtgaagaaagtagttctctgtggaaacttagaacagacatcgaaacagctgtagcgacctcacagtagcagcggaaccccctcctggcgacaggagcctctgcggccaaaagccccgtggataagatccactgctgtgagcggtgcaaccccagcaccctggttcgatggttgttctctgtggaatcagagaatggctttcctaagccctccagtagagaagccaagaatgtcctgaaggtaccccgcgtgcgggatctgatcaggagaccaattgccagtgctatacactggtactttggtttaaaaattgtcacagcttctccaaaccaagtggtcttggttttctatctttaataattggttc

SEQ ID NO: 1466 - DNA, 1000 bp, Cardiovirus B
gcgtcttcgcggtgaagaacaccccaggggtaccccctttgaacgcgggacctgcgaaagtgccaacccaagtcttttcctgttcttaccctactccctccttgggtccattggaaggaccaactatattatcccttggatgctggctaatcagaggaaagtcagcattttccggcccaggctaagagaaacatataagttagatatgattttaatcccttgacgaattcaaaacttgatgttctccctcccttgccgcttgatcacacccacctcttaaattcggccttttgtgacaagccccttggtgaaaggacctctcttgtttcgacgtggttggaattaacatcaattccgacgaaagtgctatcatgcctccccgattatgtgatgttttctgccctgctgggcggagcaccctcgggttgagataccttgactcttttcttttggaaccttggttcccccggtctaagccgcttggaatacgacagggttattttctatactcttatttctacttttacgggttctatccgtaaaaagggtatgtgttgccccttccatcttcggagaatccacacggcggtctttccgtctctcaaaaagtgtggatgcaacatgccggaaacggtgaagaaagcagttttctgtggaaatttagaatggacatcgaaacagctgtagcgacctcacagtagcagcggactcccctcttggtaacaagagcctctgcggccaaaagccccgtggataagatccactgctgtgagcggtgcaaccccagcaccctggttcgatggctactctctatggaaccagagaatggttttctcaagccctccggtagagaagccaagaatgtcctgaaggtaccccgcgtgcgggatctgatcaggagaccgaatggtaatgctttacattatcactttggtttaaaaattgtcacagcttctccaaaccaagtggtcttggttttcctttttatccacatggcaag

SEQ ID NO: 1467 - DNA, 1000 bp, Cardiovirus B
tagcatcttcgcggcaaagaacaccccaggggtaccccctttgaacgcgggtcctgcgaaagtgccaacccatgtctttcccactctttccccgactcccacctcgggtctaatgaaaagaccaaatatttcatcccttgaatgctggctaatcagaggaaagtcagcattttccggcccaggctaagagaaacatataagttagatttgatttaatcccttgacgaattcgaaacgagacgttttccctcccttgccgcttgttcacacccacttatttaattcggccttttgtgacaagcccctcggtgaaagaacctctctcttttcgacgtggttggaattaccatcatctccgacgaaagtgctatcatgcctccccgattatgtgatgttttctgccctgctgggcggagcattctcgggttgagaaaccttgaatcttttcctttggaaccttggttcccccggtctaagccgcttggaatatgacagggttattttcttaatcttatttctacttttacgggctctatccgtaaaaagggtacgtgctgccccttccttctctggagaatctacacggcggtctttccgtctcttaacaagtgtggatgcagcatgccggaaacggtgaagaaaacagttttctgtggaagtttagagtgcacatcgaaacagctgtagcgacctcacagtagcagcggactcccctcttggcgacaagagcctctgcggccaaaagccccgtggataagatccactgctgtgagcggtgcaaccccagcaccctgattcgatggtcattctctacggaaccagaaaatggttttctcaagccctccggtagagaagccaagaatgtcctgaaggtaccccgcgtgcgggatctgatcaggagaccaattgacggtgctttacactgtcactttggtttaaaaattgtcacagcttctccaaaccaagtggtcttggttttccaattttgttgagtggcaat

SEQ ID NO: 1468 - DNA, 1000 bp, Unknown
  Description of Unknown: unclassified Picornaviridae sequence
taggatgacatgttccaagtcagatgccaacgacttggtaaggacgaatttgcccgcactacactacggttcccgcccgggacaactggtaccccattatgccacaacatggctgaaaagggtactgggtccccccggattgtgtccgtttgtagtgtgtgtaacgtggtttaccatctccactaacattggactaagcatttcatctttcctccccgattgtgtactcacttggctaacgctgggtggtcgcggttgggtccttgatttactttttctcgtctaagcatgccgactgtcctccccgattatgtgctcattcagttaactgctgggtggtcatgactaatatcgaggaaccttctgtctacgcttactttgagctccggtcgcttgacgcttgtagggcgatagggttatcttcccaacaacatctttattctacctccataggctctatctatggagacggagtgtggcacccgtcccttctttgggagcttcggtagtgacgccctttgtcactctcgccagccgaggcatgcctggtgccaggtagcaaagaaagcatatacttaaggacttgactgatttagcgcaagagtttgtagcgatgtccatagtgtctgcggattccccacacggcgacgtgtgccgcggaggccaaaagccacggtgttcacagcacccctatggatgcccacagaccccagtgggcactcttgttgccggactttcaggaaattaggtataggctcttctcaaactcctggcattggactaggtaagaatgccccggaggtaccccagtactccttcgggagtctgggatctgaccgggggccccacaaacatgctttacgtgtttcgtgcggtcaaaaattgtctaactagtcccaaccttgaacaagggattgttctttcctttttattactgagactggcctatggtgacaacagagattgactgtgaatacagttattttctggtgttcatcat

SEQ ID NO: 1469 - DNA, 1000 bp, Unknown
  Description of Unknown: unclassified Cardiovirus sequence
cccccggttaccccttctgaacgcgggtcctgcgatagtgccaaccccagcttatccctaatcccgactccccgaccctaacccagggtcctcggaagaggatcaccaacttcatccccagaatgttgactaatcagaggaaagttagcattttccggcccagacttagagaagtagataagttagagccaaattgatacaagcatccccttgacgaattcgccatgaaacgtcgtccctcacttgccgcttgatcacacccagaactaacaattcggcccctcgtgacaagccccttgttgacacgacctctttctacgcgacgtggttggagattttgaaatcctttgactccgacgaaactaccatcatgtctccccgattatgtgatgctatccgccctgctgggtggagcattctcgggttgagttaacctattcctttactccttggactccggtcccccggtctaagccgcttggaataagacagggttatcttcctaactctctctcttctactcttaagtgtcctctacttaagaagggtatgtgctgccccttccttcttggagaactcgcgtggcggtctttccgtctctcgaagagcgtgagtgcagcatgcaaagacctgcgaagaaagcagtttcctgactaaccttagtttggacaagattccggctgtagcgacctcatagaagcagtggacacccctctcggtaacgagagcccctgcggccaaaagccacgtggatgagatccacttctatgagcggtgcaaccccagcaccccggtatcttggtcatactctggtgaacctggagatggcgatcttaagcaactttgtagagaagccaagaatgtccagaaggtaccccggctcacgggatctgatctggagaccagtacactgtgctttacacattgtctctggtttaaaaactgtcacagcttctccaaaccaagtggtcttggttttcccactttactacttggcaag

SEQ ID NO: 1470 - DNA, 1000 bp, Cardiovirus B
tgtcttcgcggtgtagaacaccccaggggtaccccctttgaacgcgggtcctgcgaaagtgccaacccacgtctcttccttcctttaatccgattcccacctcgggtccataaaaaggaccaaatatgtcatcccttgaatgctggctaatcagaggaaagtcagcattttccggcccaggctaagagaaacatataagttagatttgatcacaatcccttgacgaattcagaacgagaagttctccctcccttgccgcttgttcactcccttccattcaattcggcctctcgtgacaagccccttggtgaaagaacctctctctttctgacgtggttggaattaacatcatttccgacgaaagtgctatcatgcctccccgattatgtgatgttttctgccctgctgggcggagcattctcgggttgagaaaccttgaatcttttcttttggaaccttggttcccccggtctaagccgcttggaatatgacagggttattttcttcactcttacttctacttttatgggctctatccataaaaagggtatgtgctgccccttccttcttcggagaattcacacggcggtctttccgtctctcgacaagtgtggatgcagcatgccggaaacggtgaagaaaacagttttctgcggaagtttagaatacgcatcgaaacagctgtagcgacctcacagtagcagcggactcccctcttggcgacaagagcctctgcggccaaaagccccgtggataagatccactgctgtgagcggtgcaaccccagcaccctgattcgatgattattctctacggaaccagaaaatggttttctcaagccttccggtagagaagccaagaatgtcctgaaggtaccccgcgtgcgggatctgatcaggagaccaactggcagtgctttacactgttaccttggtttaaaaactgtcacagcttctccaaaccaagtggtcttggttttcccattttaattgatggcaat

SEQ ID NO: 1471 - DNA, 1000 bp, Cardiovirus B
gttcgcggtgaagaacaccccaggggtaccccctttggacgcgggacctgcgacagtgccaacccacgtctcttcccactattattattccggttcccgccttaggtccattgaaaagaccaaatatgtcatcccttggatgctggctaatcagaggaaagtcagcattttccggcccaggctaagagaaacatataagttagaaatgattctaatcccttgacgaattcggaacgagaagttctccctcccttgctgcttgttcacacccatcatttaattcggccctttgtgacaagccccttggtgaaaggacctctctctttccgacgtggttggaattaacatcttttccgacgaaagtgctatcatgcctccccgattgtgtgatgttttctgccctgctgggcggagcgtcctcgggttgagaaacctttaatcttttcctttggagccttggctcccccggtctaagccgcttggaatatgacagggttattttccaaactctttatttctactttcatgggttctatccatgaaaagggtatgtgttgccccttccttctttggagaatctgcgcggcggtctttccgtctctcaacaagcgtggatgcaacatgccggaaacggtgaagaaaacagttttctgtggaaatttagagtggacatcgaaacagctgtagcgacctcacagtagcagcggattcctctcttggcgacaagagcctctgcggccaaaagccccgtggataagatccactgctgtgagcggtgcaaccccagcaccctggttcgatggccattctctatggaaccagagaatggttttctcaagccctccggtagagaagccaagaatgtcctgaaggtaccccgcgcgcgggatctgatcaggagaccaattggcagtgctttacgctgccactttggtttaaaaactgtcacagcttctccaaaccaagtggtcttggttttctaattttgttgactggcaat

SEQ ID NO: 1472 - DNA, 1000 bp, Unknown
  Description of Unknown: Saffold virus strain BCH1031, complete genome.1 sequence
ttttcgcggcaaagaacacctcaggggtaccccctttgaacgcgggacctgcgatagtgccaacccacgtcttttcccactcctaacccggttcccaccttatgtccattgaaaggaccagatatatcatcccttgaatgctggctaatcagaggaaagtcagcattttccggcccaggctaagagaaacatataagttagaaatgattctaatcccttgacgaaaccagaacgagacgttctccctcccttgccgcttgttcacacccatttgattgattcggccttttgtgacaagccccttggtgaaaggacctctctctttctggcgtggttggaattaacatcctttccgacgaaagtgctatcatgcctccccgattatgtgatgctttctgccctgctgggcggagcattctcgggttgagaaatctcaaaccttttctttttggaactttggttcccccggtctaagccgcttggaatacgacagggttattttctatactcttatttctacttttacgggctctatccgtaaaaagggtaagtgttgccccttccatcttcggagaatccacacgacggtctttccgtctctcgaaaagtgtggatgcaacatgccggaaacggtgaagaaagcagttttctgtggaaatttagaatggacatcgaaacagctgtagcgacctcacagtagcagcggactcccctcttggcaacaagagcctctgcggccaaaagccccgtggataagatccactgctgtgagcggtgcaaccccagcaccctggttcgatggctattctctatggaaccagagaatggttttctcaagccctccggtagagaagccaagaatgtcctgaaggtaccccgcgtgcgggatctgatcaggagaccgaatggtaatgctttacattatcactttggtttaaaaattgtcacagcttctccaaaccaagtggtcttggttttccttttttatccacatggcaag

SEQ ID NO: 1473 - DNA, 1000 bp, Unknown
  Description of Unknown: Saffold virus gene for viral polyprotein, strain Nijmegen2008.1 sequence
gcatcttcgcggtgtagaacaccccaggggtaccccctttgaacgcgggacctgcgatagtgccaacccacgtcttttcccacttttgccccgattcccacctcgggtccaatgaaaggaccacatgtttcatcccttgagtgctggctaatcagaggaaagtcagcattttccggcccaggctaagagaaacatataagttagatttgattcaaatcccttgacgaattcggaacgagacgttctccctcccttgccacttgttcacacccacacttttgattcggccttttgtgacaagtcccttggtgaaagaacctctctctttccgacgtggttggaattaacatcatttccgacgaaagtgctatcatgcctccccgattgtgtgatgttttctgccctgctgggcggagcattctcgggttgagaaaccttgaatcttttcctttggaaccctggttcccccggtctaagccgcttggaatacgacagggttattttccttattcttacttctacttttatgggttctatccataaaaagggtatgtgctgccccttccttctttggagaattcgcacggcggtctttccgtctctcgacaagtgtgaatgcagcatgccggaaacggtgaagaaaacagttttctgtggaagtttagagtgcacatcgaaacagctgtagcgacctcacagtagcagcggaaccccctcttggcgacaagaacctctgcggccaaaagccccgtggataagatccactgctgtgagcggtgcaaccccagcaccctgattcgatggtcattctctacggaaccagaaaatggttttctcaagccctccggtagagaagccaagaatgtcctgaaggtaccccgtgcgcgggatctgatcagagaccaattgacagtgctgtacgctgtcactttggtttaaaaactgtcacagcttctccaaccaagtggtcttggttttccaatttttattgaatggcagt

SEQ ID NO: 1474 - DNA, 1000 bp, Cardiovirus B
cccggccaccccctttcgacgcgggtactgcgatagtgccaccccagtctttcctactcccgactcccgactctaacccaggttccttggaacaggaacaccaatatactcatcccctggatgctgactaatcagaggaacgtcagcattttccggcccaggctaagagaagtagataagttagattccaaattgatttatcatccccttgacgaattcgcgttggaaatgcacctctcacttgccgctcttcacacccattaacttgattcggcctctgtgttgagccccttgttgaagtgcttccctccatcgtgacgtggttggagatctaagtcaaccgactccgacgaaactaccatcatgcctccccgattatgtgatgctttctgccctgctgggtggagcatcctcgggttgagaaaaccttcttcctttttccttggaccccggtcccccggtctaagccgcttggaataagacagggttatcttcacctcttccttcttctacttcatagtgttctatactatgaaagggtatgtgtcgccccttccttctttggagaacacgcgcggcggtctttccgtctctcgaaaagcgcgtgtgcgacatgcagagaaccgtgaagaaagcagtttgcggactagctttagtgcccacaagaaaacagctgtagcgaccacacaaaggcagcggaccccccctcctggcaacaggagcctctgcggccaaaagccacgtggataagatccacctttgtgtgcggcacaaccccagtgccctggtttcttggtgacacttcagtgaaaacgcaaatggcgatctgaagcgcctctgtaggaaagccaagaatgtccaggaggtaccccttccctcgggaagggatctgacctggagacacatcacatgtgctttacacctgtgcttgtgtttaaaaattgtcacagctttcccaaaccaagtggtcttggttttcactctttaaactgatttcact

SEQ ID NO: 1475 - DNA, 1000 bp, Cardiovirus B
cccccggttaccccctttcgacgcgggtactgcgatagtgccaccccagtctttcctactcccgactcccgaccctaacccaggttcctcggaacaggaacacaaatttactcatcccctggatgctgactaatcagaggaacgtcagcattttccggcccaggcttagagaagtagataagttagaatctaaattgatatgacttccccttgacgaattcacgttggaaatgcacccctcacttgccgctcttcacacccactaattgattcggcctactgtgttgagccccttgttgaagtgcttccctccctcgtgacgtggttggagaaatcttgtcacccgactccgacgaaactaccatcatgcctccccgattatgtgatgctttctgccctgctgggtggagtatcctcgggttgagaaatccttcttccttttaccttggaccttggtcccccggtctaagccgcttggaataagacagggttattttcacctcttcttcttctacttcatggtgctctataccatgaaagggtatgtgtcgccccttccttcttggagaactcacgcggcggtcttccgtctctcaaaaagcgcgagtgcgacatgcagagtaacgcgaagaaagcagttcctggcctagctctagtgcccacaagaaaacggctgtagcgaccacacaaaggcagcggaactcccctcctggtaacaggagcctctgcggccaaaagccacgtggattagatccacctttgtgtgcggtgcaaccccagcaccccggtttcttgttgacactctagtgaatccttgaatggcaatctcaagcgcctctgtaggaaagccaagaatgtccaggaggtaccccttcctcgcggaagggatctgacctggagacacatcacacgtgctttacacttgtgcttgtgtttaaaaattgtcacagctttcccaaaccaagtggtcttggttttccttttttatcctactgtcaat

SEQ ID NO: 1476 - DNA, 1000 bp, Cosavirus A
ggctcactcctgtacaccgtgagtccgcgcagtgctgacttaacacttaagtaatgtgtaggccgagaacgacaccgctcggctcccacctttcaccaccgtgggattaacaggttcaatacacaaattcctgtccttggctatgtcaaagcaatacagtgtgtacatgatgtgcacgctcaaggcggagacttaggcctcacagattgtgttttgtgatattgaatgctggatggtcacgttggagactgcatgtggcagtcttgaaacgtgtggtttgacgtctatccattatggcagtgggtggagtactgcaaagatgtcaccgtgctttacacggtttttgaaccccacaccggctgtttggcgcttgcaggacagcaggtttattttcttatgttctctatttctagccaacaggacactatcctgttgggcggagtgatactcccgttccttcttggacagattgcctccacgacctttgtggatctcaaggtagtcaagtcactggtgaatagagcgaaggttgaggagacctgaggaatttccatgtggctttgccaggagttgtagcgatgctgtgtgtgtgtgcggatttcccctcatggcaacatgagcctcacaggccaaaagccctgtccgaaaggacccacacagtggagcgaccccagctccctcctacaaagctttgtgagaatgaactcacgtttattcttctttattctctatttacatcaggccccaaagatgtcctgaaggtaccttgtgtatctgggcatgagcaccatcaactacccggacttgcacttcggtgcagacgcatgtggtgtcccagcccctctgcttcggcaggggggcttttgctcgctcagcacgagatctgatcaggagtctcccccggtgtgctttacacccggcgggggattaaaaattgcccaaggcctggcaaaataacctaggggactaggttttccttttattaacaatgtctgtcatt

SEQ ID NO: 1477 - DNA, 1000 bp, Unknown
  Description of Unknown: Human cosavirus A strain AM326/BRA-AM/2017, complete genome.1 sequence
tccgctgtgatgggctcactcctgtacaccgtgagtccgcgcagtgctgacttaacacttaagtaatgcataggccgagaattacaccgctcggctcccacctttttccatcgtgggattaacaggtttaatgcacaaattcctgtccttggctatgtcaaagcaatacagtgtgtactcggtgtacacgctcaaggcggagatttaggcctcacagattgtgttttgtgttgttgaatgctggatggtcacgttggagactgcatgtggcagtcttgaaacgtgtggtttgacgtctatccattacggcagtgggtggagtactgcaaagatgtcaccgtgctttacacggtttttgaaccccacaccggctgtttggcgcttgcaggacagcaggtttattttcttatattctctatttctagccaacagggtactatcttgttgggcggagtgatactcccgttccttcttggacagattgcctccacgttctttgtggatcttgaggtgatcaagtcactggtaagtagagcgaaggttgaggagacctgaggaatttccatgtggctttgccaggagttgtagcgatgctgtgtgtgtgtgcggatctcccctcatggtaacatgagcctcacaggccaaaagccctgtccgaaaggacccacacagtggagcaatcccagctccctcctacaaagctttgtgagaatgaactcacgtttattcttctttattctctacttacatcaggccccaaagatgtcctgaaggtaccttgtgtatctgggcacgagcaccatcaactacccggacttgtgcttcggcgcagacgcatgtggtgactcagcccctctgcttcggcagaggggctttttgctcgctcagcacgagatctgatcaggagcccctcccagtgtgctttacacctggcgaggggttaaaaattgcccaaggcctggcaaaacaacctaggggactaggttttcctttattaaca

SEQ ID NO: 1478 - DNA, 1000 bp, Unknown
  Description of Unknown: Picornaviridae sp. isolate bbr144pit2 genomic sequence.1 sequence
tcagaacagaatactcagtggacaggggaccaatccaatataagtcttgaccgggcctttctggaccagatgtccttaaggaggctgtgccaagccaccaggtaaatctctcaaagagagtccagagtctcgtaggctatgctgtattaatacagcaaagacccacacatccccgctttcaacgtctggcccacgaaacgggccactttctcggtctgaccattggtttattattgaaattggcttggaaatgctgacactgtaagttggtttgtgatttaaacaatggttaatctggactctctttgagagatttacctggtggcttggcacagcctccttaaggacatctggtccagaaaggcccggtcaagacttatattggattggtcccctgtccactgagtattctgttctgaaccgtgtaggcagggctagcgccaccatgattgccaagggactacctccctggtgacagggacccttgggcccaaaaggctaggtggcaactctcatgtcaagagaggggtatccaccccaatctgaatcatgtggagtgaagccactcgtcatggctctgaccccgagactgtctacatctagtaagatggatgaaaactggatttggagaccactctgattgtcttgatgagaaagtccgctatttgactgagtagatgccctccagctacccttatggatgtgaggaggggaccgtgactatagcgttccgctaaaccggtttaaaaaacatgaaaggtcaaatatgtggcgccattttccacttatatcaataaccatatgtctgacgaagttgattgtgctgagtgttctaagccctcctggactgtcagattaaaattggcttttctgcaatattttggttgccagtttgtatgggtttatcactcaggaaagaatcaagagaaagattgaaaatcttggattgtgcaacaaaagctcatttttgtccttgtgaaggcaaccagagattgcagtc

SEQ ID NO: 1479 - DNA, 1000 bp, Unknown
  Description of Unknown: Cosavirus F strain NGR_2017_NHP_CV, complete genome.1 sequence
cggtgtgatgggctcactcctgtacatcgtgagtatgctcaaccactgactaaagggctgcttgaacttaacatcatggattccgatccgttacattgatcggcccgtgcccttctcaatatgggattaacagagcttcaacttggttttcctgtcttttagcgttccaacggtattatgccacaacatggcagaaagcccgcggtagctatcacagattgtgtaaccaggtttggctgctggatggtcatattcagatcgcatgcatgtgtggtcttgagatatgtcccggttgacgtttcccttatgttacattcttgacagccggtggagtgctgaaattacgtcaccatgctttacatggtttttgaactccacgccggtcgctagacgcttgtaaggcgataggcttatcttcctatttctcttctttctagcccagtaggttctatctactggggcggagcgaggttcccgttccttcttggacagctggtcaccacaccttgtggattcttagactggcaaaacactggtgcaagagttgaagggattatgtgtttaagtgaagttctactgctttttgaggaatcgtagcggtgctgtgtgtgtgtgcggattccctcctgcggcgacgcaggcctcacaggccaaaagccacggtcgaaagaccccacacagtggagatatcccatctccttcctctcttagtagtttaatgaatctttttcacaggatcttataagactactgcatttcagaccccaaagatggcctgaaggtaccttgtgtattcactttggctgaaccaccgactccccggactggctttgccgacgcatgtgggtgcccagcccctgcccttaagggcaggggcttccctcagcaagtgacacgagatctgatcaggtgccaggtcactggtgctttacaccaccctggttaaaaattgcccaaggtctgacaccccaacccaggggactgggttttcttttatctt

SEQ ID NO: 1480 - DNA, 1000 bp, Unknown
  Description of Unknown: unclassified Cosavirus sequence
ctcactcctgtacaccgtgagtccgcgcagtgctgacttaacacttaagtaatgtttaggccgagaattacaccgctcggctcccacctttcaccatcgtgggattaacaggtaaactatgtgtattcctgtccttggttgtttcaaagcaatacggcatgtgcaatggcgcacaggcccaaggcggagaattagacctcacagattgtgttacacatttgtttatgctggatggtcacgttggagactgcatgtggcagtcttgaaacgtgtggtttgacgtctaaccattatggcagtgggtggagtactgcaaagatgtcaccgtgctttacacggtttttgaaccccacaccggctgtttggcgcttgcaggacagtaggtttattttcatttgaattctcttttctagccgtgtaggatctatctacacgggcggagtgatactcccgctccttcttggacaggtgacctccacgctctttgtggatctcaaggtgaccaagtcactggtgtttgaagtgaagattgaagagacactagggagtttcatgtggctttgccagggattgtagcgatgctgtgtgtgtgtgcggatctcccctcgtggcgacacgagcctcacaggccaaaagccctgtccgaaaggacccacacagtggggttgccccgacccctccctacaaagctttgtgcaaacaaacttttgttttgtctttcttaagcttctctcacatcaggccccaaagatgtcctgaaggtaccccgtgtatctgaggatgagcaccatcagctacccggacttgtagaacacattctacagacgcatgtggtaacccagcccctctccttcgggaggggggctttgctcactcagcacaggatctgatcaggagatccacctctcgtgctttacacgagggcgtgggtttaaaaattgcccaaggcctggcaaacaacctaggggactaggttttcctttattcaaaagttgtcaat

SEQ ID NO: 1481 - DNA, 1000 bp, Unknown
  Description of Unknown: unclassified Cosavirus sequence
ctctgccagtgattcccccttgcgggatctttttaaactttatttcaaactacgtttctaagcaactttaaatacacaagaacgttgacccttccattgggaatggaagagatgaaattgaaatggaagtattctattgtaatgtcaatagtcttaccatccgctgtgatgggctcactcctgtacaccgtgagtccgcgcagtgctgacttaacacttaagtaatgattaggccgagaattacaccgctcggctcccacctttcaccatcgtgggattaacaggtaatttgtatacattcctgtccttggttatgtcaaagcaatacggcatgtgcaaaggcgcacaggcccaaggcggagacttagacctcacagattgtgttgtatattaaattatgctggatggtcacgttggagactgcatgtggcagtcttgaaacgtgtggtttgacgtctaaccattatggcagtgggtggagtactgcaaagatgtcaccgtgctttacacggtttttgaaccccacaccggctgtttggcgcttgcaggacagtaggtttattttctttcaacttctcttttctagccgcacatgttctatgtgtgcgggcggagtgatactcccgctccttcttggacaggtgacctccacgccctttgtggatcttaaggttgccaagtcactggtgtttgaagtgaagattgaagaaacactagggagtttcatgtggctttgccagggattgtagcgatgctgtgtgtgtgtgcggatttcccctcgtggcgacacgagcctcacaggccaaaagccccgtccgaaaggacccacacagtggggttaccccaacccctccctacaaagttttgtgcaaacaagcttttgtttagtctctcttaagcttctttcacatcaggccccaaagatgtcctgaaggtaccccgtgtatctgaggatgagcaccatcgactacccgaacttgcgagcaaatttcgcagacgc

SEQ ID NO: 1482 - DNA, 1000 bp, Unknown
  Description of Unknown: unclassified Cosavirus sequence
ctcactcctgtacaccgtgagtccgcgcagtgctgacttaacacttaaataatgtttaggccgagaattacaccgctcggctcccacctttcaccatcgtgggattaacaggtgactagtttgtattcctgtccttggttttatcaaagcaatacggcatgtgtaacggcgcacaggcccaaggcggagatttagacctcacagattgtgttacaaatttagtcatgctggatggtcacgttggagactgcatgtggcagtcttgaaacgtgtggtttgacgtctaaccattatggcagtgggtggagtactgcaaagatgtcaccgtgctatacacggtttttgaaccccacaccggctgtttggcgcttgcaggacagtaggtttattttcttttaaatctcttttctagccgtgcaggatctgtctgcacgggcggagtgatactcccgctccttcttggacaggtgacctccacgttctttgtggacctcaaggttaccaagtcactggtgtttgaagtgaagactagagagacactagggagtttcatgtggctttgccagggattgtagcgatgctgtgtgtgtgtgcggatttcccctcgtggcaacacgagcctcacaggccaaaagccctgtccgaaaggacccacacagtggggtgaccccgacccctccctacaaagctttgtgcaaacaatcttttgtttagcttttcttaagcttctttcacatcaggccccaaagatgtcctgaaggtaccccgtgtatctgaggatgagcaccaccgactacccggacttgcgcacctaacgcagacacatgtggtaatccagccccctccttgaggggagggggctttgctcactcagcacaggatctgatcaggagatccatctctggtgctttacaccggagcatggatttaaaaattgcccaaggcctggcacacaacctaggggactaggttttcttttttatttttcaagtttgtcaat

SEQ ID NO: 1483 - DNA, 1000 bp, Enterovirus A
catgtcttgatcaagcacttctgtaaccccggactgagtatcaatagactgctcacgtggtcgaaagagaaaacgttcgttatccggctaactacttcgagaaacctagtagcaccactgaagctgcggagtgtttcgctcagcacttcccccgtgtagatcaggtcgatgagtcactgcttaccccacgggtgaccgtggcagtggctgcgttggcggcctgcctatggggcaacccataggacgctctaaagtggacatggtgtgaagagtctattgagctagttagtagtcctccggcccctgaatgcggctaatcctaactgcggagcgcatgcccccaaaccagagggtggtgcgtcgtaacgggtaactctgcagcggaaccgactactttgggtgtccgtgtttcttttattctcataatggctgcttatggtgacaattgaggaattgttaccatatagctattggattggccatccggtgtgcaacagagctattatctacttgtttgttggatacattccattgacacctaaatccttcaatacattgtactatattttaacgttgaacgcaagaaaatgggagctcaagtctcgacgcaaaaatccggcagtcatgagactggtaatgtagccactggaggatctacaataaacttcactaacatcaactattataaagattcttacgccgcgtcagctacccggcaagacttcacacaagatccgaagaaattcacacaaccagtgttagactctattagagaactatcagccctttgaactctccttctgtggaagcttgtggttatagtgatagggtcgcccagctcactgttgggaactcctccatcactacccaagaggctgcaaatattgtattagcttatggagagtggcctgagtactgccctgacacagacgcaactgccgtggataaaccaactcgtccggacgtgtctgtcaacaggttctacactctggactccaaa

SEQ ID NO: 1484 - DNA, 300 bp, Unknown
  Description of Unknown: unclassified RNA viruses ShiM-2016 sequence
acccttggacgagacaactttccagatcattgttgtgacgctgctttttctcgcatttgttcttcaacttttttccatcgcgctctcatttgtgagccttcgagaagaacaagtgtggtctcccaaaccacgttgggatcgacgtcgtcacaaccaccatccttaaatggaaattgatgaacttgtgttaattgttttgaccctcaatacgattttatttttcttttttattgttgtcgttgttttgatttttggatttattttgtttaatttttgttttcgaaatcggtgtatacccta

SEQ ID NO: 1485 - DNA, 300 bp, Unknown
  Description of Unknown: unclassified RNA viruses ShiM-2016 sequence
gtcatcggctttgccttcggacaaggcattataatatgtgtccctctgtgcggtgcctccgtacatctgcggaaaaccaaaaaggcaatgtttgtattggttaccatgttcatgttttttacgtatttatatatttacataggcttgcatacatttgtaaaatagtaaccggcgtacctctttcgcacgggaggtgcgactgtacatagaagtgcgtccaacacaacaatctacgatttagagccgactctaaaaacacaaaaagtcggcaccgtcacgttcgctcatgcggaccaacct

SEQ ID NO: 1486 - DNA, 300 bp, Scarabeuvirus lampyris
tagtgaaaggcagcctgacatgataataagagttgttacgtacgagagatcttctccaattggacagctttcacagcgattcagattagagaacacaatctgtttgtctgcagagcatttcttccttttgaatatagaagacggtcctgtggccttggtgacccctttcttgaacttctatgcagagcgatttgttgcattcaacacctcgccttcgagtgtactcatttccttcgaccaatccatctacgccccatataatcctcatctccaggcaagacagatccaggcagtgtcaga

SEQ ID NO: 1487 - DNA, 301 bp, Unknown
  Description of Unknown: unclassified RNA viruses ShiM-2016 sequence
atgatacattaagagtagtggataatttaactgcaaaggctagagaaggggcaaggacgaccaatgtcaactcaattggtggaagctgttagagcagcgtttttaaccctagacataagcttagatatatagtgtaggatataccgttaagataccagccttgtagagatgggattgttttaaaaccttaaaataatgaagatacaacagaattcgtatcaaagattcataccataaattgttattcaatcttttacgagtgattagtgcctgttagtattatctacatttgaatttgaaa

SEQ ID NO: 1488 - DNA, 301 bp, Unknown
  Description of Unknown: unclassified Riboviria sequence
agctcatgtaccttttacctgtcactcttttacagttgcttcaggttttgttctctccgtcaacaactataactcagaagtgcgaagctgcagagttttaccagcgttataattttctttactatagtaggtgctcttattctgtaaaatattttatctgccccatttgtatccgaagatgttatttttgtgatttctttaatcaagtatttgactgctattggagatttttccagttttcagtttttagaaattttatctgtatagttctttttattcttattattttgtttccgtaata

SEQ ID NO: 1489 - DNA, 302 bp, Unknown
  Description of Unknown: unclassified RNA viruses ShiM-2016 sequence
cctgtaaacccttgttacttcagtcttttcactgttataaccgtttactactcttggtattccataaataaagaaaatttaagtttcttgatttaacccaatttctaaaactattggttggtttgaatcaaatcttgcgttgttgacacgacactcttgctattaagtttaagagtccaagatcaataccgcgaactctctatactggtgaggaaccgtatagataaccgtcaagttgttgtagacttgcgttaactattttaactttgtttaaaatactgtagtttccagtctgaagcaaa

SEQ ID NO: 1490 - DNA, 302 bp, Unknown
  Description of Unknown: unclassified dsRNA viruses sequence
atagaacacacttgtgcgcgactgccccccgaagggggcccataacatggaaaacaaaagcaaaagtaataacacaaataaaaacaatactaagctacctcatccagatcagaagggttatagattttacgaattatcagaagaagagaaaaagaagctgattagaccaaggattcaattagaagattatagtacaaaacagagggctagagaggttgaccgagtgacgaggtctcaaattccaaaagaggaaataatattatctgataaagtaaaagaggtacttgagaagtttcctatag

SEQ ID NO: 1491 - DNA, 303 bp, Unknown
  Description of Unknown: unclassified Arlivirus sequence
gaagttcgttcccgtgtgtttaaggtttcagtttatgactgggtccgagactctcctgctaatggtttaactgaagattctggtcgtcttgagtggatatatgatactaataagtgtcttatcctggctcaaggtgacggctggtacgttagacctttagtccaatctgatataattaatttactatctggtgagggcgatttagtaggagacactctatatggaggtagcacatgggaagagaaccatatcttgaaagtccctagttctgttcataaatttactccgtcttgggtttatact

SEQ ID NO: 1492 - DNA, 303 bp, Unknown
  Description of Unknown: unclassified RNA viruses ShiM-2016 sequence
aaaagcgacgcaaaccgccaacagcgaaagcacaaaaagaagacaaacgaaacgagaccatcaaggagttgcgaggataataagttcgagaagtgcaaatataatttagtatttgagttaattacaaaagattaatcaaaacaatatatctaaattagaataattgatcgcacttgggataaaagatatctatatatttgaaattctagtagtttttagatttataggtagtagaataaggcaaaataatcctctttacagataagcaagagatctttctgatctagtttcacagatacaatt

SEQ ID NO: 1493 - DNA, 303 bp, Unknown
  Description of Unknown: unclassified RNA viruses ShiM-2016 sequence
attggcatcgaccgcaatgtcattaaactacgaccggggcaggttaccacgtgcagatcgacaataatctggctaaaagtgatgcacggaggcgccccaaacgacacagttgggtatttacccttacttccaggatgctgttgtggcagccccacgaaaatccaggagaccagatcgacgccgcccagttaagctgctgtggcaactaggctttatgtttagggcgtttaaatgagttagcttgcaacaaataacatcaaacttgcaactctcgaggaagagtttacacatgacgcgactacc

SEQ ID NO: 1494 - DNA, 304 bp, Unknown
  Description of Unknown: unclassified ssRNA positive-strand viruses sequence
cagagattattattgtttatctctgtgcttccgtcaaatacttattgcttatacttatattttattgaatatttcgaccgagtttacgttggacccaggtgagtcgtaatacgtttactcgtcaagccattttacaagattgatccgcgcgattgggattcaagtctagtcaaacccatttatacatcttctatagcgcgtgacgctttcggtttgtggaaggatattagcgaggcatttgttttagcagtctacctatttgttggagttgttgtgagatctatagacagtgtcatttccaaga

SEQ ID NO: 1495 - DNA, 305 bp, Unknown
  Description of Unknown: unclassified RNA viruses ShiM-2016 sequence
gttacgtcccgcgtttggcttttgcccgtgctttgataaagagcatttcggacttttcggcgagttttcttcgttagtcgaaggaaatttttgacaacaaatttgttgttttatctcgacacttatcgtggtgtagagatctattaattatttgatacaaatatttgtattagataattttatatatataaatatatataatttagttgtattcttttgctttgtttaatagtagcatttaacctacgctttttcttgctttcatttgttacttgttaatcttcttgagagtttgattttttgct

SEQ ID NO: 1496 - DNA, 305 bp, Unknown
  Description of Unknown: unclassified RNA viruses ShiM-2016 sequence
ttggctttgactagcttaggctttcctggatgagcctttaatcatctaggtctttttgtgctttatatatttatgggttataaaacttctttttctttagccttttcctgtaaggaaggccctttatataaagtacggttctgcgtgtgagcgtgtggggaggtatttacttccgtcctttggcattacttacgttaagtcgggtatttgtcataaaattttaggaaatcgttcctggagggtctagtatgagcagctagcctcctatggtttaaatatagctttcttttaattatactaatttt

SEQ ID NO: 1497 - DNA, 305 bp, Unknown
  Description of Unknown: unclassified RNA viruses ShiM-2016 sequence
gtgatcacatcaccattggcttgcgggaggatcgctatccgctagcttcttaagaaagcgaagactatttggtacagtagtcgattgaccattatctcttcatgtactacggtttgtcgccgtgccccaagacacgaaacagttggattaatctgtccactgtgggtgtaatttattactagtagatttctaaacaatacaatgaagagcattggggaacgcggtataattcccccgcggtttggtatcccgcgacaccagaattaccctccacttccgtgcacatcgtgccagcgcgaacggaa

SEQ ID NO: 1498 - DNA, 305 bp, Unknown
  Description of Unknown: unclassified Picornavirales sequence
tagaatacgctggaacatggtctccagatgctggcagtcatctgggtgaacctaggaaataccgactgcctatagctgccacccatcttccaatacctatcaacccgagggagtatcacattcatttaccggacaaacttttcttcgaactcaccgttccaagtagtttgaggcgccggccgaaggatgttgagaaactccggcggtattgggggaccgtaccatcatggtggcctatatctaacacgacagactgcgcatggcccatctatgtgcactacaactcaatcaaatcttgtggccat

SEQ ID NO: 1499 - DNA, 306 bp, Unknown
  Description of Unknown: unclassified Riboviria sequence
aacttaatagttttctttagtacattcattataattctagtttttattataatttattattatatatatttttaggatttagtgtagatacagagttataatgcattttttataaaattttttaattgcagctactgaacattttttcctattttcaatttttaaaaattttcgtttaatgattgttagaattgtagtaactaacttaaacgtaaaacaaatgctacagcaaccaatcaatcaataacacaatcaaattcagttttttataataataagagcacggcagttagagactcaggctca

SEQ ID NO: 1500 - DNA, 306 bp, Helminthosporium victoriae virus 145S
attcgcatcgacctcacgtaaaagacgtagagacttcgagatccttcgagtgacgccgaagagaaaatacgcgttattgttttaaaaagtgctcctcatattgagacgaagccgctgtcgctatcacgaccacagcataatcatcttcgtgagacccctcgccagtatctccgaggttaatcctttgattcagcgctcgcgcgtgccacccaccgcttaataagaacgttctgggtttgtcagttttgaccctcacgtggcaccacttaattgacatcaaattaaagtttcgtcatcttctaaaag

SEQ ID NO: 1501 - DNA, 307 bp, Unknown
  Description of Unknown: unclassified Pneumoviridae sequence
cgataaaaacagaaaatccgatagcacgacaacagatagttggccaattgtttaaaacaagattgagatcacttaataataaataatttaaatcaaaattaagttggtgtcttggctggctggtccagaacaagttgtcgagccgtctgatgagtagcacctcagggtcacgaaacgctggacgtaacggcggaacagattattgaggttagtagaacattatcacaaacaaaacaacaacaacacaatcacacaacaacgaacaaacaacaatccaagacaagcactagaggttagcacatgcaag

SEQ ID NO: 1502 - DNA, 307 bp, Unknown
  Description of Unknown: unclassified Pneumoviridae sequence
caaatatccttgtagtataaattccatactaataacaagtagttgtagagttactatgtataatcaaaagaacacactatatttcaatcaaaacaaccaaaataaccatatatactcaccgaatcaaccattcaatgaaatccattggacctctcaagacttgattgatgcaattcaaaattttctacaacatctaggtattactgatgatatatacacaatatatatattagtgtcataacactcaatcctaatgcttaccacatcatcaaactattaactcaaacaattcaagccatgggacaaa

SEQ ID NO: 1503 - DNA, 307 bp, Unknown
  Description of Unknown: unclassified Flaviviridae sequence
ctttcaccccttgtggaccctagtgattactgagtacttctacttagaatcctgtctcacagtttttggtgttttctaaataagcataattaagttgcttggttttgttatatttctattgttgtaacatagccttttcgcgttgtctttacgtcccacttctcattagagtaaagtgtccaaagagataccgcgtttttgttttgagcgttgagagaatccgctcataacaggcaccagtcgttgtagactagtgtatctgcacaaatttttattttatttttattttaactatttgtgtaccacc

SEQ ID NO: 1504 - DNA, 307 bp, Unknown
  Description of Unknown: unclassified Picornavirales sequence
tccccccacccacggcattggaatggggccttctttctatggaggaaagtgtgaaggcagcaaatcctgaatccaatgctaagagacgagggttatttagcccgtttatgccatggcgcgtctttaaataaaagctcggcatacctccagtcttcccttaggaataagtgtaccttaggtcgactataaaacaaccacacttgctaacaatgatacaacaaccccccaaactgcatctggttttaccacaaaggaggatttatcctctcgaggacgtcttgatactattcaagacgtttcctcctct

SEQ ID NO: 1505 - DNA, 307 bp, Unknown
  Description of Unknown: unclassified RNA viruses ShiM-2016 sequence
cacgggtgcaccgttaagcacttcaccatgggcatggtaaggttgaatgcccccactcggaaggtggttaacaccgctgaggaccagcgacaccaattccccgctctggactgagccgctcggcgcgatcgttaagagacagcaccaggctagcgtctgccatcaacatagacgtgggaagcatatcccttggaagcgattgcatctgagaacagcccgtaaacttcagcggtaagtgggtcggtcgcctgatcgtgatggccccaggtgcgtgggttaacgcaccatctccccccactaatacact

SEQ ID NO: 1506 - DNA, 308 bp, Unknown
  Description of Unknown: unclassified viruses sequence
cataaattcattataaaaaccaagtcgtgcaatcaatttgtacgatcataccaggtacagtttcaatagctgtactcagcaatctgctataaatcaattttataacaacatcacgtgcttacggtcaattcgtaagcataataatcagttctaaataattgtttagaaccatcacgccgatacaagaactttgtatccccataacttgaacgctgtcaatcaacgctcaaaatatccacctacagacacttctgtaagtctcgcgcaatttttcaatattttgaaaaactattccccgtttacccgca

SEQ ID NO: 1507 - DNA, 308 bp, Unknown
  Description of Unknown: unclassified Ourmiavirus sequence
gccgcaaagtcaagactttacgtcacgacatccgtaaggatgtctggccgaaagggtttccccgaattttagatctttcgatcgataggactgctgctcgaatgagtgtgccgtcttttctatcattgattagtaatttttggacccttaggcccggtattaaatattatgtgcccgcagttgtggtctgcgttacctttctccacactagggatagcatctattcagccatcgcgtacatacctgaatcaaaacaaagtgatagcgcgcctggcccccgttacgggccatcgtaaaacccctcgaac

SEQ ID NO: 1508 - DNA, 308 bp, Unknown
  Description of Unknown: unclassified Picornavirales sequence
tcttgtaaatatatataaattcctagttctaaaatatttattatgctatttgtgtattgtcctttattatttaatattaccgcccaagatgggacgaggcagcccctcaatatctagggcacctaggtgcagattgtctgttttagtggacaacaatctaaagaaactcactagcttcaaataacaatttaaccgaaaccaaaacaaaagacacaacctatcaagctagacttgacgaacacactgaagcaggagatattaatcctgggatcgagtaccaacgacaaattgtcactttttcagaagat

SEQ ID NO: 1509 - DNA, 308 bp, Unknown
  Description of Unknown: unclassified Picornavirales sequence
aataaacaaatagacatactgtaagtggattgggttataatcgagtaattggcgcttgagccacagcccttacagtaatccacaaaagccaattagagctgatttgattgtataagcttgtaaattcaacaatcgcaaaacaattagataatattgaaaatttaatagatgaagaattgaatctatcatgcggaattaaagaagaatctcaattagatgatgtagtgacagatatatccaggtccataagaccttatctaccatgggaatgtggattaatattagctttagtaccacccttagtaggg

SEQ ID NO: 1510 - DNA, 308 bp, Unknown
  Description of Unknown: unclassified RNA viruses ShiM-2016 sequence
ccttatggctttatttgtggtggtgtgaggagaccacgttgtgacacaacaaatagcctcgttgccctggtattacgagcgtcggtaaggttagcatcttgctgccagggatcggtaggtgcatatacgtcaagtgatgtgtgtacctttaatagggggcggcataaggccgccactgtagcacgcgtagcgcggtctaacgaaccgttgttggaggggcgtgttaccaccggcttgccggatggctggtcattctccaggtgttcccctccactccatgacaggaacccctaacactactacttcca

SEQ ID NO: 1511 - DNA, 309 bp, Unknown
  Description of Unknown: unclassified Hypovirus sequence
gggtgtagagaacctctgcgaggttcaatcataatggacatttgtgatgtacttacgtctctaggacgcccattactggtttatactctgtcgagttatcagtgattgtgcttgttctacgtatggaagctacagtttcattcgtaaagctcctacccctgattggttaagaacctgattacactaatgtgtaggccaacccgctggccctagcggtttcattcaattcttgttgggtgttctgtgaacttgaatcggtgagatgggcccgtgtgccccgtctggcctggactttaactagtgcctgag

SEQ ID NO: 1512 - DNA, 309 bp, Unknown
  Description of Unknown: unclassified Hypovirus sequence
agacgatttcggtcttacgcccactaggggcgcccaatactggtttatactctgtcgagttgtttgagctggcttgcggacattcaaaggaacgtctcgagctattgggtagcagcaaacgtgatacatgggaagcgctgttgatccgtcggggaggctgtctagcgcgtttggcttggccagctgaggtcagtagggctatgaaacccaagggtggcgatcccacccaatcagcctaggaatccacaccaggataggtgcacggcttaacaaccgaggcacgtggaaatttggccagactatgagtgt

SEQ ID NO: 1513 - DNA, 309 bp, Unknown
  Description of Unknown: unclassified RNA viruses ShiM-2016 sequence
accaatatggttgagtccctggttctctacccatctaactgtcatggaccgttgaaggctggcaaccggaggtgacgcagatttggggtgtttcggactctgtgtattatcttaccgtccggggttttattccctgggaaccgcataattgatattgatgttagacggcagcgaggaagtgatactcagaggaaacgaatctcatcgaaccatcgaggagtccgacgagcagcaggcaggcttgcgactgggattcagcgatggaacgaaaataatggtggagcgtcggcggcagatgatctggccctc

SEQ ID NO: 1514 - DNA, 310 bp, Unknown
  Description of Unknown: unclassified Riboviria sequence
gaactcgtccgacacaggaaaacgcgctctaaagcgcctaaaacatacagattacataatttcagagtatgatgaggtagttctcaataagtactttgaacccaacctagtgatatcgagactcctcaaggaatcctcccacaccatagcagctgttctactcgaacaggcaaatattgcttgcaacagccttcgcggcccaaggactattgaaataggacctgatgcaagaatacaagacacacacaagtgcgccgggctaatatgggcctgtagtgacggtaaggaccaaaagcgaattatcgagcac

SEQ ID NO: 1515 - DNA, 310 bp, Unknown
  Description of Unknown: unclassified Fusariviridae sequence
tatttaagttattaattgagctggatcattttgtcggagatttgatggatctccctggctgtcctggccagtcttggatgtgctaagttgtgggtagtttccctaggtttcatgcctgcactctttcggaaaattccgaggtggattaaggtgcatctggctgaaaatagttttaaatcactcgtctccatcgcgttttgttcatttaaatcatgcttggtatcaagcctgatagtgccttaaagaccctgatgagccctggcacgaaacgcacttttgtgcgttggttgattttagttgttttgttagt

SEQ ID NO: 1516 - DNA, 310 bp, Unknown
  Description of Unknown: unclassified Fusariviridae sequence
ggggtttcgttgcagccttaagtgtgtttcacttgtagactggccagtacggctggcggccctttgtggggcgccttttgtgcaatgcttcgatcccgtacaacaatctggcatttcgccgggcctggcagggcttctcggactttttaatcacgcatgctttctctggctttctcggcgcgtgttttctcggactgtggctaaaattcattaaaatccaaaaacaatgccactacctcaatctcctacttgaccctgatgagcaaggagcgaaacacgactgccatcgtgttggttatgaagttttaaa

SEQ ID NO: 1517 - DNA, 311 bp, Unknown
  Description of Unknown: unclassified Bunyavirales sequence
ctccacttggtggattgcgacaatcgggctgccactctcattgtagatttgaatgacaggaccccgatggttgcgaccccagtggagtcggaagtggattttggctaattgggtgttgtcgattatggcactcacgtcggcatggcgctgcatgggtgcggtactatggtttgtggacttggcagcaatattgtaatataattgtttcattacctatagtgtgtgtgctgggactggcgtaatacgtaacaactagtcccaaaaaccaaaaaactctttaacaaggattgtcctttgttttcaactgaacg

SEQ ID NO: 1518 - DNA, 311 bp, Unknown
  Description of Unknown: unclassified Bunyavirales sequence
aagggaagccctcctaggggcagggagtaaaacagccacccgtcgtgcggtctgcaaaagtctgacgctttgtgtgtatcagggtaaacccaccggaaggtggtgctggttttgaccaaaggcctgaatggtaacacattgccccagacagaactcactgtaatgcgtggtaagtccgtcgtactagtgggggggctctgcctcacttaatacaacagccggaatgagcacaccgagtcaaatctgggtgtatggttccgaaccgtctaaccgtaggttccaggtaactggaggcgtcggccgttggaggc

SEQ ID NO: 1519 - DNA, 311 bp, Unknown
  Description of Unknown: unclassified Hepacivirus sequence
atatatatatgtataataaataaacaataaataaacaaataaaaaagaaacaacggtcttgggaagactaattaaaagcatccctctaggcgtaacctaccatgtctataataaataaccaaaaggaggctctttgtattggattaccgtgcgtgtccaactagttagtcataggacactgcataggcttgcaaagagaggcactttccccgtaaagtacccctattcaggggagtaatcgccatacagaagattaacacacgcattgtagaataagtcttctactttagcgttcataatgacttactagt

SEQ ID NO: 1520 - DNA, 311 bp, Unknown
  Description of Unknown: unclassified Picornavirales sequence
tcatattaacaagggtttttgggactaccctgcagatgcttttcctgcaattctgtcccaacgctagattgctaacgatttgccgatatcgtcgaagatctttctagcgtcgcgtgatttatattacatatatattgcccattcgtttctggggctaatgtataccggtgtagcgagccatggctgcttggttaaagtgacccgtctgtgtgtataggcataaccacagatgtattttgtctgcgaacaacaatcaaagtaatacacatggtctattgaccgaattcattgatggagcacatggcaccaca

SEQ ID NO: 1521 - DNA, 311 bp, Unknown
  Description of Unknown: unclassified RNA viruses ShiM-2016 sequence
actggggcaaaccaaacgttttatcccctgatgaagagtggacatatgaagattttagacaaagtatactacattacggagataaggtagcgagtggggaagaaaaagtctcatgcgaatgcgacggaagaataggatgggaaagggacctaactgaatttaaccaaaacttgaagcggttccatctaccagaagtgcacaagagatgtgcagggtgttacttgaataaaggcgcattagaagatgggctacacttactgttatacttagtgccgaaacaacagcaacacataattatagaacagtacaac

SEQ ID NO: 1522 - DNA, 311 bp, Unknown
  Description of Unknown: unclassified RNA viruses ShiM-2016 sequence
tgaacccacttgggattagggcggagctaccgtcaacataaagccgcagacggccctgcgataacaaacagcaattgggttgatgtacatagaggaccaaaactgtgaaccctccggggggacgcaaaatttcagtgctaaacaaaacgccaagagactgcacggctccgcgttcctctatcgttagagacaaacgtatacatcgatgtacagtccccgtttgtggttcgggggtccaagaccaaccactactttcttcaccatttccgatttaactcttaatttctacaacgccactgtcattatccgtt

SEQ ID NO: 1523 - DNA, 312 bp, Unknown
  Description of Unknown: unclassified RNA viruses ShiM-2016 sequence
ggaatttgttcccatgtcttcaaggttaggccatataagtgggtattagaatcgccactattggccatctcagatgaaacaagtcagctagaatgggcatatgatactgaaagtaacataactcgtgttctagctgacgggtggaacttgagacctttagctcattcagattggttgtcactttataataagactggttctttaattagtgataatgtgtcgggagcgtcgacatgggaagagaagtatccttcagaacctcctaataatttacatccatttgttccaaagtgggtgtattcattgaagctc

SEQ ID NO: 1524 - DNA, 312 bp, Unknown
  Description of Unknown: unclassified dsRNA viruses sequence
ccaaccgtttaaaaatccaacgtaaagttctttatataagaacttaacgttccggttgacggcaggatcaaacctcagtaaccaatgaacctgagttaggaactacgggagctgggcgcagctggcggcggatcaaacctggaacccccagttaggaacgaccgagagggcgaggatttttaaacggttggtgtcgttattcacccttgatggaatacaagtaaaaatattaacccttaatgttagcaagtaagttagtttttaagtttgtgtttgtccccttaggttaagtttgtaagaacgtatggcacg

SEQ ID NO: 1525 - DNA, 312 bp, Unknown
  Description of Unknown: unclassified Polycipiviridae sequence
gaattagaccaacggggagtaggtgagttcctctcctctactagagactgatatagcccttaggtttcatcgctttgatctcagtgtgcccaaattaatagtaaccctcacatcaaaggggaaaatctgccccatctattttatcgttaacattcgcgtgtctacagaccctatactatatctatttttttagcttacattttaatccttgtgtgatttaaagagagaggtgatagaactatgagcccctcttgatttagaaaaaaccaaccatagaagacaaatataaactgcgctcacctatttcataaa

SEQ ID NO: 1526 - DNA, 312 bp, Unknown
  Description of Unknown: unclassified Riboviria sequence
gttacccctacgtattttgtttaacattaatgaaattgaagtgtctccgcgactttcaattttattcaaccaatgcaagttatcaacgaaagttagttagaaagacataatacacaatttagatgtattggcgcttagtcaccgcattagtgttctgtcggaatttagacactaattattatattaattccattagagcgcatgattttgtcatgtcctttatccacccgcagaattggatatgcgaggtgaggtggtttaaacactcgtccgcgatttgaaacgccagcgaagtttttccacaattaaacc

SEQ ID NO: 1527 - DNA, 313 bp, Unknown
  Description of Unknown: unclassified RNA viruses ShiM-2016 sequence
cgaggagttatggaagtctcgtaatttaagtgaactcgaattgttcgagggtcttgaagagcctgagattaagccaattaaactcgtagaagaaaaacaagagaagaaggcttctgtattattcacttgtaatcgcgagaaacgtgttgataagatattgtctggtcatactgaactcgagataactaaatctggttatcttagatctccagaagaggtatgcggaattattaggaaaaagatcgagagcagaaagaagaaaaaggccgatcttagaagagagcgtgaaaatagatccaaagagaggggtctt

SEQ ID NO: 1528 - DNA, 314 bp, Unknown
  Description of Unknown: unclassified Picornavirales sequence
tacaaaaacagattctgaaactttgtcccaagctgagcccattggaactagctgaatttccacttcagtacgtgggtaagcaacggacgaggtatcagactgccgtcgagagcttgagtgtcaagagcttgagacgcgccgatgcgtacaccagcaattttacgaaaactgaacgtacgctcaaggccaatgcagtacctagaaacatctctccgagaagttataggtacaacgcccaggtaggacggttgttaaaaccggcagaaggtgtcctacttgatggcattgcgaaagtcttaaacagcaagaccgtg

SEQ ID NO: 1529 - DNA, 314 bp, Unknown
  Description of Unknown: unclassified Tombusviridae sequence
tcagctatgtgatacattttgcggtttgtatcgcatagaaccgcggctaagagtttcggaggtccccgtgaccttactatatttatagtaggaattagatgattccacaaaaccccaaaaatgagtggtttatagcattaacccacttcattcaattatagtatgctcctgacaataataataataataataaagggattaacattggccctcctaataccaatgtaaatagtcgtgttcttaagaactcgtctacctgtttgaagcaggaaacactggcgtttcatgatggatcgtcagaatggaggaattct

SEQ ID NO: 1530 - DNA, 314 bp, Unknown
  Description of Unknown: unclassified Picornavirales sequence
cgagggtttatcactaggtaggataggagccgcacctatcttttcagggaacccaccctgttagccactgttaccagcgaccttcggaaagtcgtgttggatggtggaagggacaagcggattataaacgcctagccgttagccagcattgctgggtaggaacgcaaactgctttgcagtaggaggtgtgtagacaccactcgaggacagcgacggaggggctgtccacggcccacgaccgacgggcgcacaagaatcggctttggtgtccctccctaatatgaggtgacaaatttctcccatcttctctcact

SEQ ID NO: 1531 - DNA, 315 bp, Unknown
  Description of Unknown: unclassified RNA viruses ShiM-2016 sequence
tcagttttgtttggttgtatctcgcgggagttaatccgtaagagaataaccaaacaaaactgactttcctcttctttgctttcccgtctttatctttcacgttctcttgctgctttgcgattgcttgttcttttaggacccccgatcgctttcctttcttaaggctttcttttcgttacgtgcttctaggttttctttatcgtttcgccttgtttttcttttccttgctttttatctatttctgcgtttttctctttttacgttctgcttttattttattttaaagggcttttcccacttgcttcatgctttacc

SEQ ID NO: 1532 - DNA, 315 bp, Alphamesonivirus 4
aagtaataaccccgtccgtctagcttagacgaaaaacttagcttggaaatctagccacaacagttgctataagaatctctcgagacactctcccacttaacatcttctaggaatcttgctgctacaacaatttggctagtaaacgaaaaattcatacagttgtaagagacctttggtccgtacttttgaaattttgtttctaatatatataaatttgaaaggagggggtcttagcattgtctaagcactgcctacaaccctagcgaatacatatacattagtatgaatttgttgtaatcgtcctgataagacaca

SEQ ID NO: 1533 - DNA, 315 bp, Unknown
  Description of Unknown: unclassified Picornavirales sequence
cttagaatgtttcttaaaaccttgccaagcctgaggattttaccatatcgatttcgatcgctgtgataatcttctcactttccccccaccctcccatattgtaattgaagcggggagttttgattgcaattgtatagtcattcctatttaggatacggttggactttaactaatcctccccccagcctattagtctgtaatgcgaacgctaaattggctgtgtaaatttcttgcattaacaatccactacacaaacaaaatgtttctgagggtcctcaaacgaccagcccccaggatatacattcaccagacaaa

SEQ ID NO: 1534 - DNA, 315 bp, Unknown
  Description of Unknown: unclassified Picornavirales sequence
gtgacaaggtggatggcatgccaccacctatgccccctgagtaaagcaattctatgaccttagactgatcttgattcaaccgtaattgtctaatccaagttaaataaccccaacgtttcgtcgacggatgtggagaaactttgaaatacaactaaactcgtcgctcttgctattttgtagcacaagagagtctagcctctggttgattatatttcaagactgcttgttgtggagaagttaagccattgggaatgggacacgtttgcgttatccctggatattgccgccctttggtgaagctcatgcttgggatgc

SEQ ID NO: 1535 - DNA, 315 bp, Unknown
  Description of Unknown: unclassified RNA viruses ShiM-2016 sequence
aaatattagccaactgaacaaaacttagaactatactataacctacaactaatcctataacttactttaattttatttcttttcttttgtttgttttgttgactttgctaatatttattgtgtgctttcttttatcccaataaccctcagcggggctctgccttaattaagtttcatgtaacttgttttatccttttgtggtgttagttttaggatcgttttattgtagtattatttttatattcattgtttcttttgtatgttcttgtggtgtttgggttctctgtgttttataggattatctactatgtaatt

SEQ ID NO: 1536 - DNA, 315 bp, Unknown
  Description of Unknown: unclassified RNA viruses ShiM-2016 sequence
actaaggtacgggcttacaccataaagtccgttaaaccaaaatgtggtccttgtacatagttactgttacttatttatgaatcctacaattaaaaagtaggtagagcgtggatgtacattgtaatcttacctgagcgctcctcgaaatccctatttagggatacatttttggttagagtgtaaacaattttgtaggtagttctaggaattttgagtcgtatcctagaattaacatagagacttagtgtaaataatagttttgaaagcgacgccagcgctaaaaatactggaactgtttttgatggttcagcccac

SEQ ID NO: 1537 - DNA, 316 bp, Unknown
  Description of Unknown: unclassified viruses sequence
ggcgcacaaacgtacaccacgacggatattcgctcttccgagcgatatctggagtgcttgcggttttgcgccagcccgtagtccggattcccctgcgaaagcaggtgcttccaaaccacatcggcgcaaccgtgccaggtcggtgcgtcaaactattcgtttgaccccggcggcactctgttgtgtcctccctcttccccactggcgagctaagctgctaaacgcaatcgatgacgcagatgcgggcgagaaagctaagaaacgtacgaaagtactgtattcgaagccaactcgcgtcaaatctgcgccaacctgt

SEQ ID NO: 1538 - DNA, 316 bp, Unknown
  Description of Unknown: unclassified Picobirnavirus sequence
gaagaaaggagaagcactatggagtgtttactaaaacatctgaaaagcctttcttcaaccacttcaaagttgcctttggagtatgttggagtagaggtagagaggaggtggaaatgtgaccaccaatcaaattgagtacaataagttactcgaaactcgcagaactaatttagctaatgaagctgaaactgcgaggtcaaacagggcgcgggaagccgaaaccactcgcgcaaatcttgcttctgaagccatacgagcccatcagaatgcgattggagaagccgcaaatgttattaattccaatcactatgcaaga

SEQ ID NO: 1539 - DNA, 316 bp, Unknown
  Description of Unknown: unclassified Luteovirus sequence
atatttgcaaatcacggttttgtttcacggcaaaacccaaaacataagtaagatgggcctaactagccctgtggagaggctaccccttgaataagggtagtggttgcacgtcttggcccgacagattccggccgaccatgcttctgtggtatacactgcaccagtaagacctggtttaacaaaactttatcctacccacgatgagatgagtgggcggcgtaaactttgtggaattttacagagaaatctgtaattctgcacatgtttgcgagaggggtctccagtacccctttatagaaataagcgcttctttggg

SEQ ID NO: 1540 - DNA, 316 bp, Unknown
  Description of Unknown: unclassified Triatovirus sequence
ttttcttggcgtaattaaaaccaacaatgtgatcttgcttgcggaggcaaaaatttgcacagtataaaatctgcaagtagtgctattgttggaatcaccgtacctatttaggtttacgctccaagatcggtggatagcagccctatcaatatctaggagaactgtgctatgtttagaagattaggtagtctctaaacagaacaatttacctgctgaacaaattaatgaaaattatgaaaataaacaacaacttgttgaacagactgaaattaccacctttgaaaacgatttgatcgtgcttgaggatggaccgcaa

SEQ ID NO: 1541 - DNA, 317 bp, Unknown
  Description of Unknown: unclassified Hypovirus sequence
ggggtgatgggaaacttacgtttcgccaacgttaaggtactgtgattttgtacttacgactcagggtcgaccttaactggtttatactctgtcgagtttgggcaaatagctagactatctccccgggttttcaggagcccttagtgtctggctgacacggtctggaatctctttttacgtctcacttacggcaaatgtgaaatcgcctactgatttagtagaagaatgccggcccgtgtgcccgcattggcaaccgtgatgcccggttttccacttttgggatagggcttccctccgaaaacgggacgaaccaaaat

SEQ ID NO: 1542 - DNA, 317 bp, Unknown
  Description of Unknown: unclassified RNA viruses ShiM-2016 sequence
gtgggtgttgtcctgaccccatctgcccctacaacgcgccaacattactgtatgacatcaacaggaccaaaataaatgactatgttacgcgcgagggaaaaacacggctaccgacccaagcatatcgacctgacaaaccacctgctggattggaagtgaatcttttcttaaaaaatacaacccagtacaaaccctcttattgggatagtagggcctatgaaaaggcatgggaaaagttcacttacgccaatcctacagagctaacgcatgaagacatcgaatttgcaaagctcattctagctgatgagtatgactac

SEQ ID NO: 1543 - DNA, 319 bp, Unknown
  Description of Unknown: unclassified Permutotetraviridae sequence
agccttaaggttgaacgggtactcctacatttaagcatgttttaatttacatgggcgggtttggaaccgtcgcagtaataatagacatgggtggatttgaaaccatcgtagtctcttgcttatctaagtagatacaggattgtggtctgtaccctagaggaatgccaccatgcggtaaaaccctactccgtgccccctgcacgaaaccaggatctgaggtctggttgggtgaggaactccaaagtgggaagtccagtagaggggatcattgcctctacatttttcagaagaaacaactcacaacaatacacatactaag

SEQ ID NO: 1544 - DNA, 319 bp, Unknown
  Description of Unknown: unclassified RNA viruses ShiM-2016 sequence
aactacgagggccgggtaagtgtcctcaacataggttaacaatggaaaagtttcctctataaataacgaatttccactgtggcattggttaccattcgagttcatcgctgtgtgtggaatgcgaagaggcttgtcactttatgaaccgatttttattggtagcgcagttgtatgtgagtaatgtggaaacatatataaaaattataacattgcagaaacaccaaatttaaatataaagcccacaagcgaggaagggctagttcctcgcaacctgtcagcgcccgaaaggacgttcgatattccaactctaattgacgat

SEQ ID NO: 1545 - DNA, 319 bp, Unknown
  Description of Unknown: unclassified RNA viruses ShiM-2016 sequence
tttgtcaattcatggggagttggggtcgagaattgattaaaataaagtcgtcccgacaccatgggaataaaaattatatatttaagcagatgcctatagagctatgcacaaaaacaccgagcctgtgaccattggcgatatatctgtggcgtcaccaccgccacaacaaaaacacgtcccgtgaccatgggaataaaaatttatattggtcggtatatccaaataccagcgtgatgtttcatgttcatgtatgttgggtgcggcacccggtggttggaggaatggaggaggttggttaacataattcccctatctgaca

SEQ ID NO: 1546 - DNA, 320 bp, Unknown
  Description of Unknown: unclassified dsRNA viruses sequence
gttggaaaatagcccacaccccccccgccgggcgggctatttttccccggggcggcgggactagatggttgctagggccccgggcggtggtggtcgacgaccttgtggggtcgtcgacgttttcatttgtcttcatccatgcctgttctgatttccttccgttcgatttgttgttttctacagtcagcacctgttccttgctgactcgcctctcccatgggcgagttgtataaatacatgggacgtgagagaaccgtgctggatacctcacgtacacccaaagtcggtacggggatcgtaaccattacgctttttcctta

SEQ ID NO: 1547 - DNA, 320 bp, Unknown
  Description of Unknown: Fulton virus isolate CHABV1/NYC/2014/M026/0243 segment L1 sequence
agtagttaacaaacgcttcacaacaatcatcgattacttgctctctcaatatattgcaaaactgaaaaaataatatttctcagcaacctatttcaacgaatttgaaataactaataataaaaagcaagccaaagcaaagaaatctaaataattcacttctaaagcaaaggaacaaaagaaaagaaaagaaaacaaataaaggaagagaaacaaaacaagataaagtagataaacaggtagaaaaacagaacaaagaggcagaaagaggagagtaaaggctcttgtagagcattaccgcattaataaggcccacaaccaaa

SEQ ID NO: 1548 - DNA, 320 bp, Unknown
  Description of Unknown: unclassified Anphevirus sequence
tacttcttttctttatttgctttttattcatactcatatatcatcgtattcaccatgcatgatgtggtgttgattagtgataggtccaatatcaatttgagaaataaggcggagatataaatatgaaaaatggaaataaaaaacataaaatgaaaaatgaataactccaaaataaaaatttatagatataagtttccaatcatgaggtatttaggcctcgctaacctcactattaagaagatttctaacctatttttaaaaacccactagtagcagattcaagtacccttctgtcaaacatcttgaaaagattattcgat

SEQ ID NO: 1549 - DNA, 320 bp, Unknown
  Description of Unknown: unclassified RNA viruses ShiM-2016 sequence
gtcagcttctcgaaagcccgccctgggggcttctaataccgggggccaccgcaactatgcgttggataagctaaaaatagttgcttgtgtttgattaacgcacaggttgtaggttctgaattacctgcaatttgtggacagctacacaagtagtcattgtatatagtcgttatttagcgacggggtgacgcccacaaaaatagcactgtcatgttgtcgattgatgcaccgctcatgatatttgtacaaattgcattacttatctacataaaattttggaggacggtaccctcaataaaaataccgaattgaacactact

SEQ ID NO: 1550 - DNA, 321 bp, Unknown
  Description of Unknown: unclassified Narnaviridae sequence
agtatacactccactcgactaccaatgaaaggaggactattatgtcccaattcatttacactcagaacgaccttgtcgaagtcgatctgaatgaattcgatcaagggacgcttattcttgcgctccttgcaatcgaggcgcaggtgcctggcacacttgccagcatcttgcgtcaagccgcgttagctaacggggggtggagaatatcctccaacgtcagcaatccggggaagtccatcaatgatcagagggactttctcgcttggatgagaaaatttcaccaagccctgcaggaagagcaggcagaaaggagtgtctgag

SEQ ID NO: 1551 - DNA, 321 bp, Unknown
  Description of Unknown: unclassified RNA viruses ShiM-2016 sequence
tttctttcattatgtcctgggatgacattaaaagcatccagcctctcgtccatgtcgtgatgggttatacaagcgttatttttctacatctcttttattaaacgtgccttaacttcatggatcggttccaggtatattaacaagcctgtgggcgggtatttacccgcggccattatgattacagatgctcattcctgtatttcatataaaatcctaaaagacatgtcctgccagttttccgagtcacgaactggtttatgtatacactgactttctttttctatttctaatatcgcgcgatgcatatcgccttataaatat

SEQ ID NO: 1552 - DNA, 321 bp, Unknown
  Description of Unknown: unclassified RNA viruses ShiM-2016 sequence
ctatgcccagtcctggaacgagagagttaatctatcaggatttgatagatcaaatgccctctccaacaatgttgaagggaccagacggtttaccaataaatctcagttggaaagatctgatgagtaatccggaaaataacttgagacaaatcatatccagcatcggaactgatgcatttttcaaactatcgttggaacaaaagatttttaaactgcttgatttggagcagatggcagttgacgttttagacttaatgtccgttgaatacatgtaatcggtgaaaccattgttgaaaaaaactaaaatgcaacacccctcac

SEQ ID NO: 1553 - DNA, 321 bp, Unknown
  Description of Unknown: unclassified Riboviria sequence
cctataattatgataaccgcacgcaacgaacaagggcttttgatgaactgatttagttcggttcaccgacagcaagattttacgaaatggatttaacttaccacgcaaaccctcagcggaccgcaggtattttgatcgcactggactctttagatcataacgacaagattggatcatatccatgtagttaacgtagactacactaaagagattttaagcacggtaatgtaatagaaattacccgcctggtaaagcaccaaaccttcgtggcagttatggcctagtcacgattgcatcgagccatttactcaatgtatcaca

SEQ ID NO: 1554 - DNA, 321 bp, Unknown
  Description of Unknown: unclassified RNA viruses ShiM-2016 sequence
ctggactaccacccgtctttcactgcagacgttaaacactgtgccgacctgagggttcaggatgtgcgagcgtgtgatcttgctcccagcgatattggacgtaaagtcgctggcagtactgctgcactcattaagcacataggtgggctatttagtccagagacgcctcgtggcagtcccacaaagtctcaccccgtcctcgggccgcagcgccactgggcagtgcgcgcagctgacatagcgatatgtcagtgtggcctagaaaagataccgcctgcacaaccaaactcaaacattcaaactcaagaccaaacccttagt

SEQ ID NO: 1555 - DNA, 321 bp, Unknown
  Description of Unknown: unclassified RNA viruses ShiM-2016 sequence
gggggcctagttgccacacatgggttcgacactgatacagctgccaatgtcagtggtctgccaattacggtgtgtgtgacatctgggaccccaaaggtgcgcaaggcattggccttgccaggattggggctgggcgtgcaatttggtgtgcacaaccagtccctcagaaatgtgctgcgcgggttggtggagagggtgttcaaggttgtcaaaaatggcaaattggtatctccacctaaacccgtggcgaacgttttcgataagttgagtggctttcgggcccggttgttacgtgtggtgggttcatgccgcccttggact

SEQ ID NO: 1556 - DNA, 322 bp, Unknown
  Description of Unknown: unclassified Aparavirus sequence
gagctcggtacccggttttcactccgtgcacgattccattcactatctattgagcttcgatatcactctgttttgactctagttatactacactcaagcacactgatattatcgttctgatagtttgtggtttcattaaaagtgtatacatttatttatattaaatactgacactttgcgggttaaaatgtttaatactatttttcaatttgaggttgtatgagataattttgatttctatgttatcattgaataagggagtctggccctaattgatgtacgactcttctttggttgcgacccgagtcccttctacatcaag

SEQ ID NO: 1557 - DNA, 323 bp, Unknown
  Description of Unknown: unclassified Picobirnavirus sequence
ctattttctattttattctagtgttctttacctattccaaggtgaacaccaattgtagcagaaaatttacactagtagcacacttgcaagcggtgtggaattagtgtaaagagatagctacgcagcaacaaaacatccacaaatgtcacgtccaaggaggtgaaccctaagtgacaaacaaccagatacggtactgggagtatcgtgagacgggtcggcacaaccaagaaactgaacgcgagacaaatcggtccaatctagctcgggaagctgagacgaatcggtctaatctagcgagagaagctgagacgcgtcgctcaaac

SEQ ID NO: 1558 - DNA, 323 bp, Unknown
  Description of Unknown: unclassified Potexvirus sequence
ctacttggaaacatcatttcgagttccgaggaaagtggcagatttgatagcaggctgtggtttcgatttcgagaccaattcacaagaagaagggcacttagagatcactggtatattcaaagggcccctacttgggaaggtgatagccattgacgaggagtctgagacaacactgtccaggcatggtgttgagtttgttaagccctgccaagtgactggacttgagttcaaagtagtcactattgtgtctgccgcgccaatagaggaaattggccagtccacagctttttacaacgccatcaccaggtcaaagggattgacat

SEQ ID NO: 1559 - DNA, 323 bp, Unknown
  Description of Unknown: unclassified Luteoviridae sequence
atgggctctgtcacgcatccggttttgaatccccttttaccattttgggattaccggatatcgtggtgcgtacaggggccgtccctaggaagagtcgtagtgtaattagctacttgagtcagttttctttaggtttagacttccgggttcccaacccttctctgcacaatgcccttgttgctgtggaaaggagagtttttactgttgggaagggtactgatgttgtacttccattggtacctagtcatggcattttcaataagctcgcttatttccgtgactccataataaaagaagtagggttctgtaaggtacatagtcca

SEQ ID NO: 1560 - DNA, 323 bp, Unknown
  Description of Unknown: unclassified Flaviviridae sequence
tgcaggccgcactagcaattttccaccactgagcgacctgaactcagaccaatttctgacgggactgtcagggcaacccctgtaaaacgaacccatacgggtcggggactaacgcctgaatggctacctgtctgggtttggcctgatcaaggaagtctagtggtgcagttagcatcaactattgccggttcggccttcgggcagaacgaccctcgggtaagacgtagggccagggcatttggatagcacaatgggtgcgggatgtgcagctggtaacagtttcccccaccgcgtttgcctgtgcataaggttcatgtgattcc

SEQ ID NO: 1561 - DNA, 323 bp, Unknown
  Description of Unknown: unclassified RNA viruses ShiM-2016 sequence
ctttctacaagaatatactgctattaagcttcctctcgggttttttactaaacgcgggaaagatggtatctctgcctaccataattcgactaccggcagaaatttgggttgcaggtaagaagaagaagaattgacaatcttctccttcgaacaataacctaatcaaaggtcacagaactagtgataaggagtggttgctttaaaatctacaccttaaaaccagttaacgtgagccgcattatttctaagggccactagatttggacttgggtctcgagaaataatttgactatcctaaatagctagatcgtgaaacggcaaat

SEQ ID NO: 1562 - DNA, 323 bp, Unknown
  Description of Unknown: unclassified RNA viruses ShiM-2016 sequence
attgacattcttcatgaggtcttgccattttcctatctcctgccttttcttcttcatcctagacccttactcattaatatttactccatttaacatccctttggactttacagtgtattattgcactggcccttcaactagggtcaaacctgcctgatttgatatcatgctctaccacagggagagcaccctcgaacacgccatcagtagcagtagccgaagccggggttatacctcaatacctaggtgttgtatatgatcaagcttcggccgtagttacagtaggcgagcaaacaacaccaggaccccggggagaggctgca

SEQ ID NO: 1563 - DNA, 323 bp, Unknown
  Description of Unknown: unclassified RNA viruses ShiM-2016 sequence
atacgtggccttgccttgggtgcaggctttaaacgcattcattcccgtgacgaggaattcaagtagtcgttacttaccgatgctgtcggtaataaagtaaaatcagctgcaacatagaaacataacggtgttccgatgtggaggtgaattgccacaatggagcatgacaggctatgattgtaaggactagggacccgagccctgaggctatttagtctccccgcattgtcctgtgggaaaaagttaccactcgcgtatgtcagtttgcacctgcgtacgatgattttgtaaatattgctaccgaaactaaacaaatttttagg

SEQ ID NO: 1564 - DNA, 323 bp, Unknown
  Description of Unknown: unclassified RNA viruses ShiM-2016 sequence
ccgatcgtttatcggtgagcagcggctcacgaaacctagatagaccaccagaacaacggtacccccccttctccaatcataagaccctcgctttttttctcgctctctaataatcgtatacggtctaggcaggtgaacgcaataaacgccctttatggcccgatcatagaggaggctttaaagcaagcagactcacatttcctgtggatatacagtagagtttgcagtggactcataaatccatgagttgttgatgcgccaacacaaaattttgccacaaaactgaaagagacagtaaacctcagtaccagctgtaaacttgg

SEQ ID NO: 1565 - DNA, 324 bp, Unknown
  Description of Unknown: unclassified RNA viruses ShiM-2016 sequence
gtcggcttctatggcccattcactggggccttgtaccggtggccaccgcaactatgcgttggataagctaaaaatagttattcacatttgattaacgcacgagttgctaggttctgcattacctagatcttgtggtcagctatgtgaatagtcatgtatatatttccattttttagtggaggggtgacgcccaataaaatagcactgttatgttgttgattgatgtaccacacataatattttataaattacattacttatctttatactttaaacgaggagagtgtcctcgataataacactgcgcctctcactaatttgaga

SEQ ID NO: 1566 - DNA, 324 bp, Unknown
  Description of Unknown: unclassified RNA viruses ShiM-2016 sequence
aaagcagtgaaaaagtttttggatctgtcttcctgggcatcacatgattggactctcattgagggtaacgtcgcggcctgggagcgctttcttgataatgtattcaagtgtgagtatgtttctgaaggtgtattggtgaaaagtggatttgatttaatttatcatggaaaaacgaaatggtctgaagacatatggaagagtatttctatcgatcttgaaatccgtccaaaatttaagttatatgaagagtgtatcaagcggtcgaggagtgttccggttaatcctagagctatttaccttgacacttgggaaattaatgaaaag

SEQ ID NO: 1567 - DNA, 325 bp, Unknown
  Description of Unknown: unclassified Picornavirales sequence
ttgaaaagcaatctgcgaactttgttactatttgttctcctcagctagttattggacttatccaattctctccgttttcgcacttactagcactgggcttatccagatttccttttagtacactctcactttgcacttccagcacaacttaattttccttggtgcttttagtgcattcacaacgtttactttaagcaatctcgcttccccgatttgtcaagttaggggtttttgtttttcctttgttgtcacgcagcaatcttttactcttttccttttctttctaattctttgttatattctcatcccaccagcaatccaaaat

SEQ ID NO: 1568 - DNA, 325 bp, Unknown
  Description of Unknown: unclassified ssRNA viruses sequence
gaagttggaattgatgagggagacttcatcgttgcggctgcccttgcggggaatcttacgggtcgactgtccagggtcggttcgcatgggtgacctcatgtgggatttgatgttcacaccacatccagaaagcatcttggcgccacctcgtcgttagaggtaccttcacagggcggagcagaccgttacaagccaatgcaccagtggcgcctttgccgtaggtgtagataaatttacaaaagtggggggagtccaaccagtacatacactcccatcagtagtgatctgggtctggcatactgctgccactttccaattcttaatc

SEQ ID NO: 1569 - DNA, 326 bp, Unknown
  Description of Unknown: unclassified viruses sequence
tacatggggagataaggctcactcgactctaagcgtcgaactctcatcaaagcctaatctcacctcgagcgccgatcttcacttctgaagctctcctcccgctcaccactcgcaatggatttacatcacaaagctcttcgcaaactcggaatcaaccccgattcagatcctggactcgtccacatctacaacgaaagccctccgccccgttttcaggtcatcctttctataaggagaattatcaatcagtcgtcattgacgcactcaaagaagtcctcccatcagaagacctagatatagtccttcacggctatttccgaagtccc

SEQ ID NO: 1570 - DNA, 326 bp, Unknown
  Description of Unknown: unclassified Picornavirales sequence
ttgaaaagcaatctgcgaactttgttacgatttgttacttccagctagctattgggcttatccaatttctttcgtttccgcaatcactagcaccgggcttatccggatctctttttgttttctttgttacctctgttctgtgcgcgctttaattttcctttgcgttctttacagcagtcacaacgtttacattaagtaatctcgcttccccgatttgtcaagttaggggtttttgtttttcttttttcgtttcacagcaaacttttgctcttttccttttctttctgctcctctgctatatagttcttccccctttgatttctaac

SEQ ID NO: 1571 - DNA, 327 bp, Unknown
  Description of Unknown: unclassified viruses sequence
tgattcaagcacaacatcgtagacacgatcttgtggttgaatcattttaataaaacttcgcgtaccaaaaacgcgtgtgcatacgcactaattctggctgtcgaacttcggatcggctgaaatttgtccgcacccctctgttggccgggggggtagacgtaaaaacttccagaggtgaccctacggggatcgtggctcttgcgttgtaagattcgcagtgtgttacaagcattcaacgactacacgccacgggagagaaggaatagtctggcctcatcgcgcacaaagtacgaggaagaattgggtatttccttcatcgagcagata

SEQ ID NO: 1572 - DNA, 327 bp, Unknown
  Description of Unknown: unclassified vectors sequence
gccaatctcccttccctccgaaagaggcgaataatggcagaggcttcaactgctgaactatagggtacgttacattaatgatacacttgtgagtatcagccctggataatataagtcaattaaacgaccaagataaaattgttcatatctcgctagcagcttaaaatataaatgtaataggagctatatctctgacagtattataatcaattgttattaagtaacccaaaccaaaagtgatgaagattaagaaaaacctacctcggctgagagagtgttttttcattaaccttcatcttgtaaacgttgagcaaaattgttaaaaat

SEQ ID NO: 1573 - DNA, 327 bp, Unknown
  Description of Unknown: unclassified Picornavirales sequence
gggggccgcgcatctttacggagatgcgtggtccaccggcctgtttccccattcccctatccctttattttgcccatattgggcattaagatcggatttctcaggtttgacgcggattgggtaatggataaggtttggtgtattgcttaggtaatgttataccaagactgtagcagctagactagggggcacagtgtttatggactccattggatatcctgccctggtaggcactcactgtgtacgggaggttgggaagcctcgccctggccctagactgggtgatagcctggcgcttgctgagccagttgcttacagtataatcag

SEQ ID NO: 1574 - DNA, 328 bp, Unknown
  Description of Unknown: unclassified Picobirnavirus sequence
atttgtataaatggcattctgatatgcagcgttggctgaagcgtaacctgctccagcgttagccattccagtagcataattggcttcgatttgtttacgataattactttcactggctttgtttgatcttttagtttcattttctatttaaatctcacaattctaaaagtcttagcatggagattcacatgcgacacaccaatgagtgaaattttagtacctatcaaacacaataggaactacatccagtgagatttcgtgtagcaagcgaagttaagcaggatgaacaattattatcagtgttaaaaacattcagaaaggaggaaag

SEQ ID NO: 1575 - DNA, 328 bp, Unknown
  Description of Unknown: unclassified Picornavirales sequence
cgctcaaacttttacccaacaatttgaaggtcgtcgtaatgcttcgaatattgctcagtcattcgacagtggtaatcgtatccaagttaacagaaacgccaatgttgttccaacccaaacgttaagatgtgccccgagcattcctcaagatcagactgttttggccgatggtcgggttgagaggcgtgtccgggatgcggcccaacaaattgctattgtgaataacaacgttcaatttgagacttcatggaaatcgtttgtttatgtcctatgtcagaatgggtcacaacctataatcgatgcctccacttcgattgagactggtcgg

SEQ ID NO: 1576 - DNA, 328 bp, Unknown
  Description of Unknown: unclassified RNA viruses ShiM-2016 sequence
agggacactccctacacccaaattcataacacgcggcggattctcgtaaacccctgcatactcttagaggcttgtagcttaatagcgcgtttccttatgtgtgttatttccctttttctccccttccctttttaagttcttagtaatttattgctctgaactaaatctcgtggagattcattatcccttgtctatattatgcattgcgaagctttgataacaacagcgtcaaggtacgacgatcttgtaaatatggactttaaacttcatagctatatttatagcgagttgttgttggtagttatagtacgaatctaccagtaaaacc

SEQ ID NO: 1577 - DNA, 328 bp, Unknown
  Description of Unknown: unclassified RNA viruses ShiM-2016 sequence
tatagagcgaatactctatatacaatatacagacctaagttggtggtattcatggtctctaaataaagcgaaaccactacgttgtgcgaataatcaaattgcggcagtgaacccagagaacggcaattctgaatattagcattcgatctcacctaagtttcagcttgtgtttcatggtgattaaataaagcgaaaaacaagcaaaatttttgttattaataagcaaccccgaagcatttttgagcgaaagaaagttattaatacgagtattatcgaagaaaccattttagctaatactccaggaaataacgtttatcgcccaacaaca

SEQ ID NO: 1578 - DNA, 328 bp, Unknown
  Description of Unknown: unclassified RNA viruses ShiM-2016 sequence
gagaaaggaaaaacgtgtctccctagccatggattgaattcacggaccatggttagtgtggtgaaggcgataccgtgagtcgatcctcaaccacccttcggctggtgaacctgtgggttggaagcccactgggggtggacaggtcgaagtgtaaaaaatccacaaaatttcctctaaaaatcaaagtgaagatgacgcattactcgaagtgatacgtaacagcgcagtgaaacagactcgggaaaactttgaacaggaggaggaattcactgtggcctcaggtgttgcctttttggcggcactgaatgcccgatattctgactccgta

SEQ ID NO: 1579 - DNA, 329 bp, Unknown
  Description of Unknown: unclassified Picornavirales sequence
gctgtgatgttcggcttcggccatgccaatcagcggctgtatttgatcactattgtacttaataaacatatcatacgagtatatttaacagcattacagtgtcagtgggaacagcttttcagctgtactgattcttaaccgcccatctttaagacttagcagtctaatagggtttgaatctgatatgtacgcctagcaccgggtcgaggcacccagctagatcgttttaccgccttcctaacactactacatcccagcctgccggctctacaggcaccgcatccgacaaaggtgccgaggaagttatttccgccgacaattttcaagtt

SEQ ID NO: 1580 - DNA, 330 bp, Unknown
  Description of Unknown: unclassified RNA viruses ShiM-2016 sequence
tggcgctacagaagttacttagcaacttgtcgtgatgttagaattggtaacatacaacgaccggatgttaaagtaaatgtcgactctgttggcagccataaattttctaaatactattcaatattccacagcaacaatttaccaaagtggttttattacaacaaatgtccttgcaacgaatatgaagccatattaaaacgacactgtgtttcaacatcatgcaacactactcatccacttttcctaagagcaaaggctgtatctaatgagttagcgacactagttcgggaagatttactcgattataggccattaactcataaagagctt

SEQ ID NO: 1581 - DNA, 330 bp, Unknown
  Description of Unknown: unclassified RNA viruses ShiM-2016 sequence
cttacttctgggggaaatacaacggatattttagcatgccgtttcgcgacagaagtttggcacagagtgccgttctagccgtaacgtctctgacaaacggtgaggtgcgcgtgagagcactagtggtgggcaaccgcgggtccgcaaggacttgtgtagcaaagcaacttcgacgtctcgtgtcaatctgcaatacggttgactaaagttgcgctaacccggctacacacattcataagtatctcccataacaccccggtatgaggccaattgcgataagagccaatatttttagcacgaaagcacggaggaaacggagagaaatccata

SEQ ID NO: 1582 - DNA, 331 bp, Unknown
  Description of Unknown: unclassified viruses sequence
atccagagctaggagctctctctaatcgccgcaaggagggagcagcaaagtccggtctctggtcttcgttttagaagggcggagagtttcggctctactggctggtgtgtgccgcctaaaatccaggctaccagctcggcgcttttgaccagatccgtttaatcgagcgactgggagttagccaactcaatcgattgctacatcacaaaatcaagatttgtcccatattgggccgcaagaagacgttcagcagatcacgacattcgtcgacgattctaacatccagtcgtacgaaaagccacatatatcatctgtgactgcatggacaaaa

SEQ ID NO: 1583 - DNA, 331 bp, Unknown
  Description of Unknown: unclassified Picornavirales sequence
ttgaaaagcaatctgcgaactttgttacttttttgttttccaaaactagctattgggcttatccaattctcgttacttgtttccctcactagcaccgagcttattcggattttacttggttctctttgttacttgtttttaaaaaacgcgctttaattttcctctgcgtttattacaaacagtcaccacgtttaccttaagcaatcttgcttccccgatttgtcaagttaggggattttgctttcaattttttgtctcacaacaaactcttctctttttcctctcctttttgttgctttgttatcttttgctccctcccctttattggacg

SEQ ID NO: 1584 - DNA, 331 bp, Unknown
  Description of Unknown: unclassified RNA viruses ShiM-2016 sequence
cttcatcgggagcccgttgggctcctaggaggtacagccaagtgacaggctgttttgtgttttacgttgtctcaaaaacaagttctaagactatttatgcttttatgaaagcaccgtatgtgtcattgtatattttaaaaattataaaaatttcaagaaatgtgttactgatcagattagttaatcagaactatgggataatgttccccgtttttggccatttgaatgttatcaaaccccagaaggcctagatgtgcggactaggagtcactgtataaattcacagacataggacttgcccccctgtgtactagttaagcgatttattttt

SEQ ID NO: 1585 - DNA, 331 bp, Unknown
  Description of Unknown: unclassified RNA viruses ShiM-2016 sequence
cccggatttagagcagatcgactacgccctattaatagggtgtcggttggtcttgctcatagccggagcggtgattctgtttaatttgcagcggaaagtgttgagaacgatctccatcaccaatcctgttcgacaatatgtaatcgagttgtctaagattaaacagtaccctgacgatctccgaaagaaatttcggaatctcaatgtcctcaagtatgctccgtctttgaacggtcatagccatggtgtgtgtgccgcattccgagctgcggccgatgataccatcaatacgtttatacaggaaaacggttttgaggtttactcggtcggc

SEQ ID NO: 1586 - DNA, 332 bp, Yingvirus charybdis
aaccactgtatcaacgtaggcatgacaactgactctacatgttgaggcaactccaattcgacgttacttatttctacctctatttttaaatcctgcagtatctcttcttcattcagtccagggggccgcaagtccaaagtgccgcgggcacggagatggccgccttgcctatggggaggagggatgcattgaaggcatagtccggagaatggtagtgccctgtcggtgtcggaggagacggagcaatcaggggaccgcgtctggcacaggcaactggccggggcgatcccgacagtagttcgctggcacaccgccgtactcgttaggtccaa

SEQ ID NO: 1587 - DNA, 332 bp, Culicidavirus culicidae
tcgaaaggtaacatcgagtacttataccatatacatgccattaactagaaagtaagtttaatagtaaggaccatccatgtaaccgcatttattagaatattaagacagttttaatccatatagtggttttattgtaaggttttgtagtacttagagagagttttaagaaagagttgaacgtggacgatagattttggatctcaccatacgagcttgcgcgaaccctaccccaactcacctcccctccccttcctatcctcaccctatcccccaatccgccttttggccttagcggattggtttaaaaacaacaagaggtggcccgagggcac

SEQ ID NO: 1588 - DNA, 332 bp, Unknown
  Description of Unknown: unclassified RNA viruses ShiM-2016 sequence
tgtgtttttgtcaagataattgttctgtgattaacagtgattgtggttcgtgtaatgcgacgcagtcaaatgctagttttgatgaagtgtatgagagagtggaaaacttatctcataagaagattgaagagtgtgtagatcaggctattgatcgagcttctaagcttcgtgattacaagcttaatgttcacaatggctcccgacgggaatcatctgatcctctctttatttcgccccattcgttgttatcgcttggggtatctaagtttgttgcgtttgagcagcatcacagtttcgcttcagttgagtctctgaagttgcttgctctgtct

SEQ ID NO: 1589 - DNA, 332 bp, Unknown
  Description of Unknown: unclassified Riboviria sequence
gtgtataagagacagcatctctcgtttgcccgccaaaaattctggtagctagcgaccgcccctgtttcatcttcacccccgaagggtggacactaccggaggttcccacatacccacatatgggtatggactccgcctcttgtgtcaggaaaccggagagatcggctaaagctgccagcccttcggggtcattgggaacggtccttctcgacgattttactcggagaaggtccgcgcaccgtgccctcggagggcgtggtgcgtagcaatcgaggctcgtcctcctttacactctcattcaaattcgcatagatcaatacacgtataacaag

SEQ ID NO: 1590 - DNA, 332 bp, Unknown
  Description of Unknown: unclassified RNA viruses ShiM-2016 sequence
cggcaagtacatgcgattccttttcgccacgttagtggtttttgcttcactacccaaaacagaagtttttgttttggggccgtgctatgcacgaccattcccactaggtcaggaatggttgctatgacctaccatatagtagagagcggcacagggggggttttacggcaaagcccatatgttttgatgttttaaagaaatgtcagtaaaaaccgtgtgccccggaggttgtattggtgtatcacatagtgctctacatcggtacctcctcaggatggggcacggagttacaactccgcaatggcgacctacattaattggtcacaaacctt

SEQ ID NO: 1591 - DNA, 333 bp, Botrytimonavirus botrytidis
cagggatgggagaggtgggtcttttttgaccgttcatgaggctctggccgtctacctcttccagccctgctgggtggatacagcatacctaattttgaaacatcaactggaatcttagaaaaaagtataagataaaaacggcctttatcatatcgagacctgtataccacccaaacaggtgacgatctacacgctactctatctaggaaatcatcaatcaattaggaccagaaattgttacctttaaacaaaaagtaataacgttaatcttgtatcgttcatctagcactggtataatcttataacaaactagcgaatacaggttaatttaca

SEQ ID NO: 1592 - DNA, 333 bp, Unknown
  Description of Unknown: unclassified Hepacivirus sequence
agggtctgcgcctgtacactcccccacgggaataacaccagctccgagaaagtctgacgagtatcggtgttaaaaaggtggtgtgccctaccaacgtcataacgggtcgtgccgatgttccgaggcaaggactaccactgggtgcccgtgggaaaaaaggggcggatagggagctggggtgaaccgaacggccgtagacggccgaggtcacaggcatgggacgctttgagcctccgtagcctggttggatcttggattcccggtgtagctaccagtttactgcctgatagggtgcgggccagcgcatccgcccttctggttgttcataacgcc

SEQ ID NO: 1593 - DNA, 333 bp, Unknown
  Description of Unknown: unclassified Picornavirales sequence
tgtactaatgtgatcttgcaactagaagtaaataagagatgtaaaaattttagttgtattgctattagtataaagaggttggttatttaaccttacttccaggatgcctcgtgagcagccctcataatatccaggaaccatctctcgagcatacattataagtgacatgtatgctttaaattcgaaaaccttggtgcaggttcaaatgttaccaacgacaacgactcgaattaccatgaccagaaacaaattatttctttccaaaatcaaggtcaaacggtagctgatgaagctttgccaaagattgtagacttgccaaaatcatatttagac

SEQ ID NO: 1594 - DNA, 333 bp, Unknown
  Description of Unknown: unclassified ssRNA positive-strand viruses sequence
cctcattatagtaatattatatctcctgaatactatgtctattttgatggttatagtggaaaacctcatggtgaaactctttccgatttagatatatataaagcatatacaacatattacagatatattaaggaattttcagaattttgtaacaacgataatgattctaatactagcaatattattgaatatgagaataaggttagaaaatccacgaaggctaaggataaggatttaaaaaccaaaaactttcctgtgtttaatccagcattacaagaattgtataatacatacatcaaagataaatcggaagttaataaaaccaggttatta

SEQ ID NO: 1595 - DNA, 334 bp, Salem salemvirus
ggcagttcatcgtgcttaggaccagtgctggatcactttctccaccttcgcccagcacccacaggcctcaccatcctatctctcattctcaaacagcaccagtagaccagtcccctcccacagaatctctccaataaagaccatccaaaatcagtctttccaccacatttgtctagtcctagaatttcaatattccattaagtatagtaattattattttaaaaaacgtagacctactaacctcttttaaaacagcactcaggacaagaaagaaaattaggagcaaagaccaaactcctgcgatctcatagatcaagttctaatttggtataca

SEQ ID NO: 1596 - DNA, 334 bp, Mogiana tick virus
tttaaatcactcttagactcactttacaaactcgaagataaacaggaaaagaaacaagtgagttgttcatgaacttgacatggctgccccagtggtggcggccttgagctgcgtattaggcgggctgaggcggtagcatctgctgctggcaccagaattggtgttaggaaactcaccatgagtagaaaccagttacatacagcgccatttccgtgagatactccccaccataggatggttatctctggaatatgtggcgcccatcgacatcgttctaaacgaagaagacagcccttaccaacttgacaggaaggtttacgagaaagccctagca

SEQ ID NO: 1597 - DNA, 334 bp, Unknown
  Description of Unknown: unclassified Picornavirales sequence
gtttccacgagtcatagctttatctttaattccttgcatatttattttatatcagcttaatggagttagaaagacttcatcaaccaacatatttccttctctgagaatagtgcggtaatcctccgtactatctttcagtgaatcacggctttcaaagattagaaatgctatgagaataatacttttatatatattatatcattaattataaataacaaagtttagatctaattttgtccccttgaggaaaagacagaacaataaagaccagtccacttaacccattggaaagctattttagaaatcccttggcggtggaactaattcgactaaa

SEQ ID NO: 1598 - DNA, 334 bp, Unknown
  Description of Unknown: unclassified RNA viruses ShiM-2016 sequence
attgaattacgtacaacgttttaaattgcactgcgtataatacgtttagtgtaattggctgcgatcttattggtctgtataatacagttccaatacccaaagtcccccccgtgtagctcacggggttttattttccgtatatttacggctccccaaaatatttcgtatagcttacgaatgccaatatttttatttagtttaaatagatttttaatttggttttgttttatattatatatttgttttgctctctttgttagttttatcaacttatgtttacgttatattgtagtaagtgtcgcaggcccatttgggactgtatttgttaatttta

SEQ ID NO: 1599 - DNA, 334 bp, Unknown
  Description of Unknown: unclassified RNA viruses ShiM-2016 sequence
gttttgtagctttattcttcgtgtaatcgtagaagttgtgtgtagaatacttcaaatatttattgagatattcaatgcgcgatttccttctcctaaacaaactatacaatgaggtaagttgtatttttaatgttgggctccacccctatgtgaagtgtcgactcacatagtatttagacatacggttttcgttttgtagcaaattattggcgatcaagcaagagagacaaaccaattacctgtctcaaacaacgttgagttaggtggttggaacgaattggaagtatctactacacgtgagactgtagaaacttctattagtaactttaaccct

SEQ ID NO: 1600 - DNA, 334 bp, Unknown
  Description of Unknown: unclassified environmental samples sequence
tacctgtgattccttgttgtctttgacaactaaatattcactaagagaatgatctcactagacattctcgaattgggcaagcgcctcaccatcgcttgttccacccgcgcccttgcactcatcaacgataggcagagcatcggaagctatcactcattgtttgacaattgggtgacgctcctgatgtttgtgctgcttatcaatgttgtagcgcaagttaccggacgactgcgcctcctaccgggccctcttcagcaatggattggctgcctggctgttagggttatcgtgttcgatcaactgtggagggtgttccactacttcctgccttgca

SEQ ID NO: 1601 - DNA, 335 bp, Unknown
  Description of Unknown: unclassified Ourmiavirus sequence
ccgtttgttaacccagtttactctgggggacacgatcggaggggttcgccgggagactctctgagttcggcgtccaacgagtcgttctttggaaaggagcggcgagtggggcctgtggatttggccgtcacacacgttaacagaaacggcatcccgcaaccaactcgtaagtggtacctactcgaaggtagggggatcgcagtgtcctgttcgggggcttccccgggttcgcccggtgtcggagccacaagatctttgtggtcttacccgatcaacaccctctggcttgccggtacgcgtgtgccacaaacacaactgccattttatattttaaa

SEQ ID NO: 1602 - DNA, 335 bp, Unknown
  Description of Unknown: unclassified RNA viruses ShiM-2016 sequence
acttgctaaattacgtaaataagggagttataaagtagtttagtattgctatctctaggacactgttggctatttagtcttaatgatcaagatgcagtggagcagccctctaaaaatctaggtcacctccctagcgatagttaggatgatccacctacgtcgcgaaataccggatcgctacaattaaacaagatgaaacatctcctcaatctcaaaactatgaggaggcaccacagataacccagactgtggaacagcagcaagagttaattacttttgaccaggataaagctatagtggcagagcattatccgggagaaattaattatcctcgt

SEQ ID NO: 1603 - DNA, 335 bp, Unknown
  Description of Unknown: unclassified RNA viruses ShiM-2016 sequence
agccgtggtgggatcaggcattggggaggactgatgcagatgaaataacattattgaacacaattcctgtgcaaggtggttctcataggccaaatagcagtaataataagaataaagataaaaaaggagaatttgtgaaaactgtgaagctgaccaaagataatataccggtatggtgtagtataaggaacaataatataacggtggttgatagagctaaggctagatttgtactggtacatgtgtcgtatgaaaacacacagggagtgggtggttttggtgctcataggataggtgatgtggtcgttaatagtcatgccatacaacttgatgat

SEQ ID NO: 1604 - DNA, 335 bp, Unknown
  Description of Unknown: unclassified RNA viruses ShiM-2016 sequence
tagtacccaacttgacccacgacagtaagacagtaacattcataccctacatcaatcaattcggctatgcaagtaacgtacactccagttgtgtttgcaatgaatatcgtgccttggtcgatcgccacatcacagatcgcacatacatcaagtttgatgccaaggcctggcgagaagccgcccgtcacacccttaaatactaccccgggggtgttagtaaatgtagttacacccagatcatcaatggctacacgggcgggaagaaggctatctacatcaaagccctagaaggactgcgcgcgcatggtttacgaccatccgataccagggtgcgc

SEQ ID NO: 1605 - DNA, 335 bp, Unknown
  Description of Unknown: unclassified RNA viruses ShiM-2016 sequence
cttacggcctctaagaggaatatcctctccggctctcgccggtcacctatcttacgatggtgatatcccataaccagcaactataggagagaagatcatgaaagacaagagccttgcggagattgctgtatcttcgccatactttgacgaatacgacatcaatctctacgtcgcaatgctcgaaatctctcttggtctcatcgaacctacagacgctgtttgctcataccattatggttgtgtgctcgcagctgctgagttgttgggttttgactggtccaaccagttgaaacttctccccagtgtcccgtccgaccctcttcacggagggttcc

SEQ ID NO: 1606 - DNA, 335 bp, Unknown
  Description of Unknown: unclassified RNA viruses ShiM-2016 sequence
ccggcggcacgcgtgagcgtgctgtcggtgaactcggtggcgttggtgtaaaagccacgtcccgtgcctcccgcctgtctgggctgactacccaggcaggtgtaaaaccagtttacaaatcgaatcaggattcggcgcttgctagccagggggctggagacatccagcccaaaggcaaggaaacgcggaatcctgctcgtgggaaaggcataaccccgagtgccaaacatcaacgtgtttcgcagctcagaggcttcgcaaccgtgatcaacttctggttgtctcagttgcggctccgctgtagcctgtcggaactccaggatcacttcacggaa

SEQ ID NO: 1607 - DNA, 336 bp, Culicidavirus quitotaense
agttaatatgaccggtcgaacatcaccctggaattggggaagaactaccgtacttaactaaccacactagtatataagatatatactatatacccgcatttacataggaagataaggattttaaactattttgtaagttgatgttaaggtttaatctgtaagctaacagccataacagtagaaataagtttgccatatgttgtgtttcatctctttgtttctggctcttcaatccttgggtgtactgctgatagatgctcctctttctacaatcgcgctaaactgcccctccccaatctaccttttggcctcggtggattggtttaaaaacaaact

SEQ ID NO: 1608 - DNA, 336 bp, Unknown
  Description of Unknown: unclassified Metaavulavirus sequence
aacatatgtatcatctcgctcatgctagccaggatattgtcataattatgtagattacatatgtttcaatcatatgtcactattgtagtgtaatcaattcgcgatggtactgaattatcatcttatattccctggacagatttccgaaattgacaacatactctcttacgccaataaacgaaaatatctgattacggtgcaatctgtattcaattctaaacagtatatacacaatcatacacaagatagcttatttggattgttttacaaattactcactcataattaagaaaaaatcaaagagaacttaccggtgggggcgaccccaaatcaata

SEQ ID NO: 1609 - DNA, 336 bp, Unknown
  Description of Unknown: unclassified Sopolycivirus sequence
ctccctttgggtttgagtcgtcaggctttgttctcgaagggtcttgatggtgattcgtcccatccccaatatagctgtgaaatgcttgagggccgagaccatgtagggaaaggtaagtcgagccgataagatttgacaacgctatatctgtgcattaaatatttatccagtaccaaaggaactcaagtgtaatgctgacctagacaagtcttaggacgcgctgcttgaatacattccttgtacgacactcggtggtgatcgtaatttggtcggagttaacctctggataatatttgcccgtgtcggagcggtgatatagtcggcggactaatttac

SEQ ID NO: 1610 - DNA, 336 bp, Unknown
  Description of Unknown: unclassified Picornavirales sequence
agattggctgtgggtagcgcataccacgttaataatatgtgctagcggaaatagaggtattttagagatgcgcacatgcttgactttgccggtgtgtctcgaacgcgcgtactactcacacgtttatggagaggagcgaagtccgaagtgcagtgattgagcatccgcacgggtttatagcttacaaaaacagaaagtgacgtcacgacacaagacgttaaatgtgaagagtttgatgggttaactttaaaccctactcctgagctacttggagtagcttcctttagcaatgaagctggtcaatgcgcggcaattaaggctacacagtactattcg

SEQ ID NO: 1611 - DNA, 336 bp, Unknown
  Description of Unknown: unclassified RNA viruses ShiM-2016 sequence
gaacaggagagtaacgaaggtggtacggccgctacagaggcgcctcaccttacaaaatctaagttcaagcagcaggcgggacggccaccccgcgaactaataactggtgttgatcacaacacaaacgctattattgagaggcaggactgcgtgtccatcgtacctgccttggcagccagtcagaagatccacgatatcggagttggaacttcggacaatgtagtcttgaggattaataacgctcggaagagaaaagtgaatactgatcctcttgactcatgtgtacaagcaacagagtccgactgtgagaatcctctaggattcaggcgggttcgg

SEQ ID NO: 1612 - DNA, 337 bp, Wenzhou crustavirus
ctgtatgaagaatttacaaaaactgacaccatggagaaatcattcaaagagtgggaagagcttctcaaccagagacccccctcctcgacacctgcaccccttgtggagaccaggttctactgggagggtcttgtaatgggactgcttggagctgctctggtgattgcactctgtggaattctcaagcttgtgggatggaggtactgtcgcaatgtgattagtacacctctctagggctgagatgtccgggtgggtgggtgggatgggtccattgtggtgccttctcgtggcgggcctgtctagctaaaccacaactataaaaaaatgacaatacaca

SEQ ID NO: 1613 - DNA, 337 bp, Unknown
  Description of Unknown: unclassified Marnavirus sequence
cccgatatttggcataaacctcgatgacacgtctagcgtaatggctacgctggatgcgacatgtaaggttgatcaaccgtttcaaaactaaagctgctagctgcgcacgcgcgtagtacattggcctctgctctttttgagcatgttcacctctggaccatgaatcacaagtgacagctttttaattgtttttgatcccgttgagataccccaagtctcgctccgctggacctctatctgagagtaccgagcaggtgaaagcccagctcagggaggtaaccctttattccaccgggcctcgtcccacaacagcacaagaatcagatacaaccgaaca

SEQ ID NO: 1614 - DNA, 337 bp, Unknown
  Description of Unknown: unclassified RNA viruses ShiM-2016 sequence
gaattatagtaagattttctttgcgacttctccctgcgtttgtgattctacagtcatttctgctcaactttgttgctgcggccgctgtggacacaattttatttgcagagaatttttccttggtgaatgtttgcaattttatttagttttgtaatagactttgcttattattcattttcaggttactttgtttgtaatatttatcaattttgctctgataaagattacttgtcgcttatattttccttcttactatacactataattcttgttgctctttgtttattaagtttttgtggtgtaagttgttttatattcttattattagtgcttcatt

SEQ ID NO: 1615 - DNA, 337 bp, Unknown
  Description of Unknown: unclassified RNA viruses ShiM-2016 sequence
cccctcccggggttctgcatccttatctattactagataggttgtcctttcggctcttcaaccacctaggaggcaatcatggaaactaatttaagatttttcttaaccatagatacatgcactctttcagaagatgaaagagagtatctaaaaattaagttaatcataaaatttcctgaatttagaaattactctttctgcaaccactttttaggcatgctacgattccgtgttttttctacgggtcgttacatgtacttaaaagaggctatacagaatttgtatcctgaattcgctgatcgcatccggtttgacttccaaacagacggggtctggc

SEQ ID NO: 1616 - DNA, 338 bp, Unknown
  Description of Unknown: unclassified viruses sequence
gcaggagtaaagttaagatcatccaagctacatacctaagggacgtagtcggtgaccgaaacaaggctttctacagactattgcctgttctgaaagccctgcaaagtgaaggagctatcgatcgatacctctaccacttaccgtccggagatctcctatcggagaagtaccgaggacagtctattaaagaccaaccttgggaccggccggaaaagttcttcacacctgatcaggctgaaggacttcgaagaatcttaacccgagatatcggattaaaaccccgagtcaccaatatcctgatctcgcgaccgcgagttcaattcaatcgaattcaggat

SEQ ID NO: 1617 - DNA, 338 bp, Unknown
  Description of Unknown: unclassified Hypovirus sequence
gttctaattggaagttccctggtaaaggtgcacctgaaggcattcaagataaatccagttttggcgagggtgtattagagcctgccaaatccgaaggtttattttactatcatcctgatctgatttctactccagtgttcaaagtactaactgtaggcaaaggaacttgggctattggctaccttaaatgcgacgatggtttagcgccagtgcattacgatgcggacattgaatctttctatagcttttcatattctggttatacttggctcaacgattttaaatcgagtctgacatctggaactgagttgccaaaggacaatcctggacatgtgcaa

SEQ ID NO: 1618 - DNA, 339 bp, Unknown
  Description of Unknown: unclassified Reoviridae sequence
tcttcctactacttcgtgtctgtcgtcgttcgtcggttctgttatttaacaatcttaattcatgtcattttcatcaaatctgtcgaatctttgttgtggagggaaggaggattctccacagagcaatcaatcagagaaaaatttcgatttcgtaaacgagatggatcaactgattcatggaccgacattaactcattgctagaaatcattgattatgaaacaggttcacaatatccaccagttccaaacatcccagatgcgttactacccccaaattcaacaactggcgtaaatacacataatgtcaatcatcttgttagtaatattctttgcactagt

SEQ ID NO: 1619 - DNA, 339 bp, Unknown
  Description of Unknown: unclassified RNA viruses ShiM-2016 sequence
cgttttctccaaccatttcctgtttgtctgtcgtcgagccagccgcaaacagtttctatcaccgtcccctttatcttttcggtgaatccccttataccctaaccttcgttggttttccgcttttacccgcacgtccccttcttttcatcctttcggtgaaacccctgcaccctaactttcggtttttcgcctttttccttacgtcccctttcgcgccccccctttttctttcttctctttttctttggttttgttttgttctccccttcctgtcccctttcccactttctttttggtttctcggttcttcccccttcttctgttttggctttagccaat

SEQ ID NO: 1620 - DNA, 339 bp, Unknown
  Description of Unknown: unclassified Negevirus sequence
aaataagtaaataaattaaactaaataatctaacaaaacacacactaaagacttgtaaacaatgactatatactgacttctttattgttaatagttagagataagtgagacagtcgttaaagtatccaaaatttgaggtaatatgtcttaaggagaataatataatcaaagattgactaggcactgaccgtaaatacatcagaactaaagtacagggggggtgatggctgagatgaattgtaacttgcaggtatataaaaaagaaagaactataaaatgaattaaaacaactaaattaaaataaaggagaaaagtaaaagaaaaaaatcaacagacctc

SEQ ID NO: 1621 - DNA, 339 bp, Unknown
  Description of Unknown: unclassified ssRNA positive-strand viruses sequence
cttccgctcgctctgccctcggatatggcataaaactgtcccccccgtcgatccatgggggtccggtgtatagttgaagagatccgtgttgtattggataccacgcaagtagaacggttttatcgttctttctaaacctacttgtacgaaggcttgcaacacgagggctgctcctattgaggagagcgtacccgcgcaccgagaaacaacggaccttctgggttgggtgacccaggagtgtatataatatcacctactaattcatatttcataaattttatagatagatatagtagaaatacacacccgtcacaggaagaaattgaagtggctactgcc

SEQ ID NO: 1622 - DNA, 340 bp, Unknown
  Description of Unknown: unclassified ssRNA positive-strand viruses sequence
ttctatattacttttaaagtataaatggatattcgtaggtacttactccgggagttttcaaccctctcctggattgctatcgtaattttcattaacgtgattattctggttataaactatccctcaccacagtacataggcgaaggtcgcgttacttggcgtggtatagtttacacccagcaggatattacttttgtctgtcgcactagcaccaccgtttgcgtttttcaatcactcatttcactaatcattgctctgggttaccctttgtacccaattggaattgttgctgcttttatttatctgcttaacaagtggatttatttcctaaagcttcgtt

SEQ ID NO: 1623 - DNA, 340 bp, Unknown
  Description of Unknown: unclassified ssRNA positive-strand viruses sequence
agcgcacaagaagagaacgataggagctttatgaaatcaccaagagttgacaaaaggtttcccaagtttggtactaggttttgtgagagctcaacaatgaaaaccgcactaggcacgttggggctggctatacgcaagtctttttgtcaactcttggtgatttcataaagctcctatcgttctcttcttgtgcgctttaagcaaaacccccttttcaggcttctccgccttctaattgagagagttataggctcctccccctactaatagtgaggaaattatatcgtatacttgggaccattgtaagtcgctaacgcttttgttagcccaggatacagcc

SEQ ID NO: 1624 - DNA, 341 bp, Unknown
  Description of Unknown: unclassified Riboviria sequence
tgattcaagcacacaacgaggggaccctctcgtctgtgtttggattaaataaaaacttcgccaagcaagcggtgagtgcatgtgcacatattccgggttcgatttcagtggtgttttaccatggattcgttctgtatttatccgagcctcttattgctttaggggggtttcgtacaagctgccggaggtgagtctacggattagtagtggcttttgcgttgtaaaattcgcagcaggtaataccctgtacactgaactctacgccactggaaagaagaatgagtcggccttaacacgtgcactaggtgaatacttacttagttcatcttcgagataataca

SEQ ID NO: 1625 - DNA, 342 bp, Unknown
  Description of Unknown: unclassified Picornavirales sequence
tttcgtggatagcggagtttccagtctctttaaaatggtgacttcaggaaagactggaccgtgtgagtatggcagccacacggatagtgcccctcaaatgtttgatcatcatttgttgtatgggaggaaagatcctctgttggttgttgaactgcttgttatgttggacggaagcgggagggtcgagtgcgaacccaactaagctggagaaaacacagcatgccggtgatacgagcgcaagatttagtacaatttattcccgatccacaccatatttcccccgtattaatttacacatttacggcttgcgtggttaattccgcaacatagctggcaccagtc

SEQ ID NO: 1626 - DNA, 342 bp, Unknown
  Description of Unknown: unclassified Riboviria sequence
attaaaatgtgatcttgctttcttatacaattttgagaggttaataagaagaaagtagtgctattttaatatctaggttaactatttagttttactgttcaggatgcctagtggcagccccacaatatccaggacaccctctctgcttcttttatgattaggttgtcatttagaataagaaattaacctgctaactttcaaacaaatactagtaacattgaagatgaagaccggaaaattacttccgaacaaaaagagattgtacatttttctagtgaaggagttacccctagtaccactgcggtgcctgatatcgtcagcctttcaacagattatttgtca

SEQ ID NO: 1627 - DNA, 342 bp, Unknown
  Description of Unknown: unclassified Riboviria sequence
aatttaaacaagctcaaatgttttattccgacatttgggcttttaaaacaggaatagggttgcaacctatagcatagaagaagtgtatatggttacaagagaaatgttgctgtcgctattcgccgtgctttcttctatatttgagacagttacacgagttatttacgtcgactcgttgaaatttaacgcgtaacaaattttacaaataatgatcaaaattttataaaacaagaacaacaaacaatagatattattgaatctgaaggctccactcatgtagagaatcgagtggcgtctatatccacaagaacaacacaggttgctaaggctgtccctaatcaa

SEQ ID NO: 1628 - DNA, 343 bp, Unknown
  Description of Unknown: unclassified Chrysovirus sequence
gcaaaaaagagaataaagctttctacttttttgctccacacacgctcgactcagatggctgctcaaccaaacagaggcttcgactcattcttcgcagattactacgatcaggacggcttctcagatctcaccagcgtacgcgcgtccaccatccggccggcgaatatagtcgtagagccggaccacacggttttcgacacctaccgcacacacggcgggagccccccagactacacaaccagccaagtggcggacgcgttcggccagcgtgcttcagcaagcgacagggttcacggagtgaggagagacacagccgcttcagtgtacagcacgagaccgtacg

SEQ ID NO: 1629 - DNA, 343 bp, Unknown
  Description of Unknown: unclassified Solemoviridae sequence
tccataggaagcccgcacagatcagtaaccatgccggtctcaggtaccccaccacgcatagcgtgaccaagtaatgctcacatgcaaaccgggccacaaccagcgagatggcaaacactatctcagcaaccttccagatcgctaggcaggccggtcctaaggactgggcccacgctagggtcactctgggttcaacaaagtctcgcacttggttaataccttccatctttttcttgacttgtggaacggacaagattagtacaaagaaagaaagtgatatcttcaagaatctaacactcacaaatatgtacggatcttatccgttccacaagtcaagaaaaag

SEQ ID NO: 1630 - DNA, 343 bp, Unknown
  Description of Unknown: unclassified ssRNA positive-strand viruses sequence
caaccctgctggaactggatcatcagaaaaaggagaagaattaacacctttcgtaccactagatcagatttcgtttatttcacgttatccccgaaaattgccctctggagtgtattctggtgctcttaagaagattaccattgaaactttctttcactggactactagtacaactaaggaacatctaggcttactattgtcactagcctcgtttgaaagttgcttgtgggaatcagaataccattcagctattacaaaggaaattgaaaatttattgtcaaaatttaaatatataagatcttttgtctatatctatgacagagaagttgtagcagactctgtc

SEQ ID NO: 1631 - DNA, 344 bp, Obscuruvirus quintum
cgaaatcaattactttaaaacttatatgttgaatttataatgagtggtaaaagcgtagatctgagaaaagttcgccacatggcaactactggcaaccctgtgactaaggtcgatttggaaatgattatgaaggagttgatggagatcaagagagagatcaaatcaatacggcaactaatagagggtgcctcatccaagaggtcaattagtgaaccaactgctcctactttggccctctcagaagttccgtttcatatgagatttaaataagggaaatgaaaacaatcattcttttttaaaaaatcttgagtattttgttggtaaagcaggaatctttgtggaaa

SEQ ID NO: 1632 - DNA, 344 bp, Unknown
  Description of Unknown: unclassified RNA viruses ShiM-2016 sequence
gtaacgaggtcgcgctggtgtacccgccactcgccggagtccgaggagcagtacgctccctcttctccttttgcgggctctcctcgctgttcgcatggttaggttgctgggagtaccagcaaataccggtccatgtgcggctcgcctccgagctgcgatcgtctacggcgttcagcagtatatggacggcgcgaggatttgatgccacggcgctgcagttcagagtgcggcgcgcggaagctattgtgaagcgcaacgagtggaaagtaacaccgggtgtggtggaaacgacggtggccttcgtgtcggtcgaacaaccgagcgaggttgacgctgtccggttc

SEQ ID NO: 1633 - DNA, 345 bp, Unknown
  Description of Unknown: unclassified RNA viruses ShiM-2016 sequence
ttagcaagaaactacgctcaagtgacagaggaaggtaggttcacgttggttaacaacagtatcgtaacagttaaacaaggagaatcttcttacaggtccgatctgtccctatcagcagacttccagtttgctggcagaaatgtaaggacaaacacgagtaacgtccacacggactactcggggtataacaacaagtacatcacgtcagatggagtcttcgatgctgggctcgcactgaccgagtttgcaagaactacagcggagagacgtctcgtaaaagaagacactttcagcttactctctcagcaaactcaagctgatagccacgaatctttcatttacaac

SEQ ID NO: 1634 - DNA, 346 bp, Unknown
  Description of Unknown: unclassified Picobirnavirus sequence
aaacattgtagtttacaaatctgagaaaggagaaaccgcttatggttttacaagtaaacatccaatttacacacatccttagctcagccattagtggtctgagatttggagtaaatctggatgtagaaggaggtcgaatgtgacccgaaatcaaatagcttggtatgaagctagagaagggaagcgtcacaatgttgcaactgaacagctaggagttagagctcaaggtgagactgaacgatcaaatcgtgcgagagagttagaaactatacgacacaatgtgatcacagaaggtcaaacagatcgtactatccaggagcaacgcaggcataatataactggagag

SEQ ID NO: 1635 - DNA, 346 bp, Unknown
  Description of Unknown: unclassified RNA viruses ShiM-2016 sequence
cgaggggcgaatcccctcgtattcttttcaccaattgctaggtatactgggactcttagaggcggtaccgaaactatatatcatgatagtgtgtgggactcttagaggcggcactagattttgatatgtattgcatttggcttttcttacttcttcaaatttgatgttgtgtttaacacctagttaggattgtgtctaagtaactacccgtcctttggataggctctgcttattgatacgtcaaacctgggatgcggattaagaattgtgcactctatggacatggctcgaacacgatttgttttgacgacactttgaacccacactttggtcctgcgaactatat

SEQ ID NO: 1636 - DNA, 347 bp, Unknown
  Description of Unknown: unclassified RNA viruses ShiM-2016 sequence
ccctgtacactggtccaggcagatcggtgtgcagtaatgtaccgtctcagaggaccccatgtttggctcagaaagtacttgagccccagttgatatctgtcactggaagtacagataacttctatggaattgaccgaccatatgattttagtaggtttgaactgcagtcggaggtggttgatgatggaaccgttccaagcgtttctgaagaagaagttgtacaaacagtttcttttacggataacgctagaggcgtttctgtcgatctgccaacctcaacgaatgcagtggctgtcgtagataatacggacgatattggtttaggaacttttttgtcccgtccagtc

SEQ ID NO: 1637 - DNA, 347 bp, Unknown
  Description of Unknown: unclassified RNA viruses ShiM-2016 sequence
gttcctgatagaacaaaacagtttattatgaattcgtaacatccaggtcaacgagcaagaatagagtgaatgaaaagaccgattataaatgtaggtcgttcagtaattcattgatacattaaggtcgcctaacacccttgtatatctatttttcgttctagtaagttggagaaatgttatcatgaaattttaaatttgtctagttttaccgttgtagtgacggaaacccctgcagaaagaaatattttcagagaatacaggtatcaaacttattattttctatatctaaaaattttaaatattattattgcctaaattgaattgtctcaaccttaacttttaacaat

SEQ ID NO: 1638 - DNA, 347 bp, Unknown
  Description of Unknown: unclassified RNA viruses ShiM-2016 sequence
ccattgacgtcttgctcatggccttcgattgggcaagaccttggttgtaaccggccagtagggtgggtgtgcgcagcatccagcccgagtgtgcgggtgtgtggcgtgctggggagcttatgcttgtggagatttgcggtcatttagggacgaggacctaggtgcgagcaatatcctagagagccaacagcgatgacctaagagccataccttgatcactgaccagcacagggggattccaccgcggtgtggcgctcatcccggggaccggcccgtgtagagtgtatgaaccggataaaaccccacgaaccagccacaacctacgcaacacgatttgctacttcaac

SEQ ID NO: 1639 - DNA, 347 bp, Unknown
  Description of Unknown: unclassified Riboviria sequence
accctagggatgttgtcggtgtggggtattcacccttttacgattaccttccggtactttcgacgaaagtacaaccggatgggagaagacttcgtctttacaccatcccggagggaaccatacttcaacgttctcatggcggtcaatccttaggaaagctgccatgggaggggggaggctccttctcgacgagaaggaggaaactccttagagttgtactcacaaagtccttaggcctaaggcctaccgttgtggatatcctattgacgaggtcaataaggcattttcaacggatagagggagccatcaatgccgtcgtcgacagcctagtgtgctctgaccctact

SEQ ID NO: 1640 - DNA, 348 bp, Unknown
  Description of Unknown: unclassified Totiviridae sequence
tgataaatgagtcaacgtcacaactggacacggaaacaagaaagcgattcgcaccctcgtctccagtgctggcatttacacgactcatagtatcagctgattgatcccttagctgcatactgaacgcgaaccgggcggtccgcagggtgccaaataaacgagtgggaacagctactttgaaaggttgttgtttggcgggctgcacttgaatccaatgtggtgatggttgggataatgtacactagtcactaatgcggagacgtatttaaaataatatcacagttgaaatgcgtaatatgttaagcatattaagtccgattgtaacctgaacaaggccaacttaatcgg

SEQ ID NO: 1641 - DNA, 349 bp, Unknown
  Description of Unknown: unclassified viruses sequence
ccttcttaagttcttaagaaagaataaaaactttccatccggttttggaataccaaaccactttctatcgttcgttgaaggtttttgtgttatcacaaaacagaacgactgctttttggaaatccaaaagctaacagcttagtcaagcatactaaaaacttggaataccagtttttgcctttaactactagatccatgcatttaaattgcacttataacatcttctacagtagttaccactgcgatttggacgattttacgatccgtgctagcagtgaagatacttggcaagtattaatttttaccacgctatttatcctgtccgcttttatattcattgtcttctata

SEQ ID NO: 1642 - DNA, 349 bp, Unknown
  Description of Unknown: unclassified RNA viruses ShiM-2016 sequence
gctatatacggggctaacatgtaaaaatgctaaacggcatgttagcttgaacggataaaccgaaagcgggttgtttaaccttactactcagagcttatcagagagatttagcaacttgtatgaattgggcgattcatgcatgtacatatagtctgctacaataacaaaagaaacaaattgtaatgaaatagaagggatttctaatcctactttcactgatttaacaggcactttggtctcggcaggtgttgcaccagtttgtgctgagattccttacacagtgccatcatcttttatttctacttctgaggtgtctcaggatttgagagactatttttccagaccaagg

SEQ ID NO: 1643 - DNA, 349 bp, Unknown
  Description of Unknown: unclassified Riboviria sequence
tcactccggggactttaaatccggcccagttttaaatctgaaggtaagcaaaattaatgtatgcatatggataccaagtgtagtgtatatttgtatgttttgtaaactagcttaggctttgcatatttaagggtccgtactgcggaagagagatctgagttccccctgctcaactgtaaatatacccttccactatattgagcgtagttagtggattgtacatagttcgttcggtaataattgtaaaacttacattaacatctgtcgagatgctaaaaacgacgtcgaggtcggtactggaagccgacctttgattgaggtaaattccaacgcccatgacaaacctgaa

SEQ ID NO: 1644 - DNA, 350 bp, Unknown
  Description of Unknown: unclassified Flaviviridae sequence
aacaacgctaaaccctcaaacttttaatcaccacaaacaaacgaaacaatggcttcgaccaaagttttctgtgtgcgtgacgaggacgcgattgcggaacgtgctgccttgctgagcgacgtaggtctcaaaaccttcatgtcggcaggagcgcgcaacgctgagagggccgccgagtgccaatcggagtgcatttaccgtccaacggtcgagcctctgactgggctgtgctcaggcggtgatggtcacagtggcacccaccctaagcccactgaccaaggagaagaggcggcaaacatcgtcgtcgggagtgacccttctggcgggagtacttgcctttatggcatggc

SEQ ID NO: 1645 - DNA, 350 bp, Unknown
  Description of Unknown: unclassified RNA viruses ShiM-2016 sequence
ggaacttcagaccgtcatgtcttaaaactgtctggaggcctgcctaggtcgtcattactccaaggagaaaccaaaaggcgtgctatgtactggatacctgatccttcttggtttgtggttttgccaggagtgtcttgcttgcatagttgatggactgtagtggtcgaggctgtttagcttcaggtgtaaagtcgccatcagtaaaccactgaaggcagttgtgctgatccgcgcagctgaccttgagaaaaataaattggattactaacttatatacacttttcaaagagtcctgggtctctcaatacctagggaacacggacggattcttctttgacccctgtctcgag

SEQ ID NO: 1646 - DNA, 350 bp, Unknown
  Description of Unknown: unclassified RNA viruses ShiM-2016 sequence
gtcgtaaaatattttctacgttaaatttctttcttcagatttcaaacgttgctgaagacaaaaccagagtttgcacatactcttaaatcaatgtacatgctcccttaattgatccggagcttgataggattttgtggtcctattctcaaatactgtaagaacggcaacagtacacaatatgttacattatcatttaggtcagaaataccgagttgattgaagcagatatacttctgtgaaatccactattagcatttagtggtcatgtctttcaagaagacacaggcttaggtccttggcgtgccaaaaacaacagcctatattaaatagttgtttgaacgtcgtaaaca

SEQ ID NO: 1647 - DNA, 350 bp, Unknown
  Description of Unknown: unclassified RNA viruses ShiM-2016 sequence
gttatccttaaccacagcactttgtgacccttcagggggatatacctgtatcattcatccacgccgtcgaaagagggcagcacgtatctgcacagaaggccagccgtccggtggtggcgggtgcatgattacaaggccagcgggaatccgccctttgcggtaccgctggctggcaggtgcatgagcaccggtatgtgctgaccggggggccccattggggcccccccggttcattgatttgggatggcagggccccaacgcctgctccggtcacccatggtcggttatttccaatgggagctttggaaatttgggctcaccaaaccatttaacaaccatgaacagtacac

SEQ ID NO: 1648 - DNA, 351 bp, Unknown
  Description of Unknown: unclassified Gammacarmovirus sequence
aacaaactaatcctcggggaagaagtaaagaacgtggtgacagcgggggaaaacaaaagaactcaatggggcgaaagatagccaatgacgctatcgctgaatcgaagcaaggagttatgggtgctagcacatacattgctgataaaattaaggtgaccattaactttaatttttagtgtatggcctgttaccgttgtgactccagccccggggattactccggagcattgcttatattatttatctcatttgttttcttttatattacctcgcttagcccgcaaggaaatacttacgttcatcacttcgataattcttccgtcaaaacacaatacgttggcatctctacaa

SEQ ID NO: 1649 - DNA, 351 bp, Unknown
  Description of Unknown: unclassified Dicistroviridae sequence
aacaagttaagatgtgatcttcaaaattgaaataattttctcaggctaaattcattttgtatgctatcttaactcttggtgttacctatttaggtttacttccaggatgcaccgaggcagcccctcataaatccaggaaccctgagtgcttgatatttgtttaggtagacgatatcgataagaaatttacctgctgactttcaaaaaacaaactcaaactcaaatccagaaattgctaattctagcatctcgactgaacaacaagaaattgtacatttcgcaagcgaaggagttactcccacgactagcgcagtccctgatattgttaatctttcaacagattatttggat

SEQ ID NO: 1650 - DNA, 351 bp, Unknown
  Description of Unknown: unclassified Picornavirales sequence
tgcactcctcaccacttgggcttaactcacaagtccttgcttcggcagaaaccaaaagagagtaaatatatgtagtcactgtgcgtaatgcgtttaattgtttgtcgcttcatgttgcgtaagaatggatgtatatttgttaatccgccagggcgatccctaaagtctcttttcagagaaaggttcggctgattcctagagtgcgtaaacaactcgctcccttatagttgtaaaggagggttttaaaaatcaactgcccaaaatcaaaataatccaaattggcgagatgagttccaagatctcctcgacctctcaaatgaaaaacttggcaaattagtgcgggatacgtgg

SEQ ID NO: 1651 - DNA, 351 bp, Unknown
  Description of Unknown: unclassified RNA viruses ShiM-2016 sequence
aaggtccctctctccggttgactcctggaggtgcttgtatatattaagctaaagagtcatgtgtatatatggttacggccactgcatgttattttgtgtcttgttgactgcttgtggaacgctttgtacataaggaattgatgggtatttacccatggtctcgccaaccaaccacaacgcaccgtgcatttatggagttaatacgctcctatgtaacgttttaaatgtattactacgcttgaaaataataacaatgtaaattcatatactttaactgtagataatcataaagagtcgatcgttgcgttccatcacgctgatgccgcctggactacgaaggtggattctatt

SEQ ID NO: 1652 - DNA, 352 bp, Unknown
  Description of Unknown: unclassified Picornavirales sequence
gaattttggaagtaagatcgattttaaactttgtagcctccgcaaagcaaaataagagaagtacccacttgttgcaaccgcaagttgaaataagagtagccatttttgtagcataccgcaaattgaaataagagtagccttttctcaaatacttatttaaaccataaagattgacaaatataaaggattgctgatactgttgtatctataccttcctcaaataacactcctattgtcttcaattgccctcctgaatacgttgagagttttcgctcaattcttttcgtaattagattacctataaccattcttagagttatcaagagatcaatagacgaaatactcgctgaat

SEQ ID NO: 1653 - DNA, 353 bp, Unknown
  Description of Unknown: unclassified Riboviria sequence
atcttccgtatgatccctcacatgacggaagaatccatagcaacggtaacgttgttggaggaattcttgagggcgctggaaaaggaatcgagaaagagaaggagcaagagtggacacgagaagagcgcaaacaacatgagcagtggcagtctggagagtcatctaaagaacgtggatggcgctctggagaaaacgccgctgatcggcgctctcgtgagagagagaatgaacttgatcgtcaatggcgcaaatggcaatctgaatatgaaaatggacagatagccgagcgccagagacaaaatcaaggatggcaatccggcgagaaccaaaaaggaagggagtgggaatctcga

SEQ ID NO: 1654 - DNA, 354 bp, Unknown
  Description of Unknown: unclassified RNA viruses ShiM-2016 sequence
caaagcaacatggataccaatgtgtaggaagcattaggcttatagctttgtttaataccggcatcccaaagccaatcttaagataaaaatgagtgtattatcttattatatacaacacttactaattttttaaatttatatttatcagagctgggatatgtttcccagtattgcagaaatgcaattattatagaacataatggtgtttttaattatagtaaatttgtggagcaatccgggaatttaatatctttaaatacaccattagatacaaacgtgcagcaattcacgctaggcgcccctataaacagtacggaagtaccgggagaatcggatgagacttttcacattgct

SEQ ID NO: 1655 - DNA, 354 bp, Unknown
  Description of Unknown: unclassified RNA viruses ShiM-2016 sequence
gattacatgttttgtgatttatgtgtttgtttaagtgttagtttatgtgttttacgcaccatggctaggggtcacaacaatgggattagagttgtgtcagcagagcccggtccatgagtgtaagcaaccagggttactttggccctatactagtgttcgggttgttaaatataggatactagatcccgagtccttttttaagagtaactcgccttactacgggactttaatgaatgagttgccgatcatcataaaactaaggaggattattaccacgacaatgtgcaagaaacttaccgtttcttgaacaacaatcaaacaacggaagcgacgcgcttagaagtacagacaccc

SEQ ID NO: 1656 - DNA, 355 bp, Unknown
  Description of Unknown: unclassified Bunyavirales sequence
agacagagtcttccatggtcttactttggcgccttgagatacttttaccttttcataggcactttaatagttgtaccactgcttgtaatggtgtataaggcaataaaaagtttgctcaacttcatgttcaaaaggaaaagagttagggcctgtcatccaaagaaagtttaggctagataactaggtgcgtggcttgattaacacaaagcagccttgagttgataagagtttaattttgatagacaaaggtgaaaactgaattattggtttctatcaaaattactttctttgcttcaaggtggggctgggaattttccctcctcctgtaaaacccttaaaggccaaagaaaacgcc

SEQ ID NO: 1657 - DNA, 356 bp, Unknown
  Description of Unknown: unclassified Picornavirales sequence
cgctaaacaagttttccgtgcgttcgactaaacgtcggctgggtggacctattaacgataagatcggcgctcatgtgctgattactgataatctcccggataaattaccacttaagtattttgatggtattaatctctcaggaaagaacatccctgggaagtattcatatattaaggtacctacgcgtgcgaatccagagatagctgaccaagagaaagactcacctgaagcattgaaacatcaagatgcgggcggacctgaccagacaactgtcgaccaatcagcacaatcagcaataacaactcagagagatgagtcagcacatgaagtccccgtagttaataaggattctggc

SEQ ID NO: 1658 - DNA, 356 bp, Unknown
  Description of Unknown: unclassified Picornavirales sequence
tcctttcatttaaaactcattaatttcattatggctcaatggaggatgtgaatctctcatatatggccgcacgtaccatatatgttagataagcactatgaacttagtgttttagatcatcttcacttgtataattattttattatactaaatttgagtcatgttagatttgttgaattatcaaaatagtaaatgtagtgtattctctccaaaggagaactttagtgctatttctttgtaatatccatttattctaggaaagttccgaaagaattgtaacaatagatatacagagtgttttgatatgaaaacaaatttgacaaccccttgtaaccaacagtattattttaggcttt

SEQ ID NO: 1659 - DNA, 357 bp, Unknown
  Description of Unknown: unclassified Totiviridae sequence
tgaatgaaaagcgcgagcgcggcgtcgtgtcgaccgcttttctgatcctgctggttgctggaccaatacccatcagtagcaggcagggggagtgcctcgagtcacagttaacgtcggctgtgtcacgacggtcagctcctagtaaattgcataggagttcaccctgtgtattcgccctgcggggtggtacactggaaccacggtcccttagcccagggatagcgccgtggggggatcgcatgagggcgtagttagggttctgctattcagacgtacgcacattaagtgtagtaggccgtcatgtggtggtaagcctaccgctggtaccggggtacagcgcctacgacctacaagctc

SEQ ID NO: 1660 - DNA, 357 bp, Unknown
  Description of Unknown: unclassified Orthohepevirus sequence
tcttttgatgccagtcagagcactatggccgccggccctttcagtctcacctatgccgcctctgctgctgggctggaggtgcgctatgtcgctgccgggcttgaccaccgggcggtttttgcccccggcgtttcaccccggtcagcccctggcgaggtcaccgccttttgttctgccctatacaggtttaatcgcgaggcccagcgcctttcgctcaccggtaatttttggttccatcctgaggggctccttggcccctttgccccgttttcccccgggcatgtttgggagtcggctaatccattctgtggagagagcacactttacacccgcacttggtcggaggttgatgctgtt

SEQ ID NO: 1661 - DNA, 357 bp, Unknown
  Description of Unknown: unclassified Rhabdoviridae sequence
tccaccctgatctccgaaactccccaagtcagcagccggacatcaaagcaaccagagcaaccccaaaccactcagaaccaacctcactataaaaaatacatatcttttctttctcaacaataacttaagctccgcagctctcaatctctcaaccagaagaagcagctccatctgaccctagtcaacacactccgatttagcaatcaactacacccaaactcaaacaccccgttcaaacagtcctgcaaccgctgcacgcaccaccggaacacatagataggtgcatacttctgcactttagaaaggttaaaaacgctccaagtcaaagaagtcccttaaaacttaatagaagccaaa

SEQ ID NO: 1662 - DNA, 357 bp, Hubei hupolycivirus
tgtagggcatcatttcggattgtgggttgatgtcctgggcaacggaagccttgagatggtacgaagcatttttggaacatatgaaccctgacatggtgatattgtcgtttgacttcggttaggaccctcatgcggaccagtgaagaaaattcctattggaatgtcctgtacgcccgtctgagaccgtttaccgtggaatgaaagcgaagacttatcatgtaaagattgtgtggaaagaatttgtgggtaacatggttcattagagctccttataaaaaacaaaatgggtttcgacttcccaaacaaaaacataagaaaaataaaatgtagtgtaattagtaatttgcccctaaagag

SEQ ID NO: 1663 - DNA, 357 bp, Unknown
  Description of Unknown: unclassified Picornavirales sequence
ggccggccgggtagccacaagctacccgacccatgctttaggagtcctttaggtgtattgtatatattaaacttcttgtatattattgtacttatattcgggacggtgatgtcccactcttgtcaacaggcgttgagagaactccattgcggcgttccttgcactgtgaggctgcagactgcacattgcgttgatctttctgtagtagcaaggttactggatgtagtgccagttggaggaaatacctttctagcgtccctaggaaatgttcccccctgggcccaatttggcccgagtctgataggtaattcagaccccttctcgtgtttgagcgtcacgcgagaattcagggaacag

SEQ ID NO: 1664 - DNA, 357 bp, Unknown
  Description of Unknown: unclassified Picornavirales sequence
atgtgatattcaagaggcattctttcatggtcacccatcacataaggaaatttccaataaacttgtgtgtaaggcttgaaagaatggtcggagtactctatttagagtgaggagctccgctggcagccccagcaaatcctctattggataggaacagctatatcgggtagctatagcagtcgtacagtaacatgtgcggcgttccgaaataccatacctggcgattcaaacaaagaaaacaatactaccaacgtacataacacggagctcgcgtcgagttcccaagaaaacagtgtcgaaacggaacagattacaacctttcatgatgtggaaactccaaataggatcgataccccc

SEQ ID NO: 1665 - DNA, 357 bp, Unknown
  Description of Unknown: unclassified ssRNA positive-strand viruses sequence
cagctctagcggtctgttattttgtttaaactttttgtttgcaaactagactttgtcgaaccccttgcttacaaaccattaaacaatttatatctcacttactgcccatattagagttagcactttgttaacttacaaagttaaatagacagttgtctatcgcttcgcaaggagcactcaccctctccctcaatcactactaagtgtgcgagagagatccaaatttttaacatttttataacttggttttgtttcatcagtctcacaatattttctgtccgacaaatccaagttattcaaatttataagtttttaaatttttatttttggaaagttgtctgacttcccccggaagcc

SEQ ID NO: 1666 - DNA, 357 bp, Unknown
  Description of Unknown: unclassified RNA viruses ShiM-2016 sequence
cagggatcgaaaccctgtatatatcttagagagtttagcagtcgcgcattgtaaccaagacgggccggccctcaccaacacgtagtgattctgcggtttggtgttcggtgcagtgtaagtccctacccttgtttatcttgtgatcagagtgtaagtctactcgaccaaagaactcggtttttacataagtttctattccgaatccaaagaaactcaggagtgatcgggctccacgtacagttgcgacactgtgcgtggcgtcgtcaggtagtgtaccttgaaggttatcctagaataatttgcaaatttaggacatttgcacgtctcccaggacgttaaacggttcgaaaagacagt

SEQ ID NO: 1667 - DNA, 357 bp, Unknown
  Description of Unknown: Changjiang tombus-like virus 5 strain CJLX42586 hypothetical2 sequence
gggtgcctagcgaaggtgtcgggtgtggagacaaacacccccattggtcatgtggagatcgatggtgacgttttgagatggcgtcagacaaataagctggggaggtcaaaagtgcgtgggttgtggacggtgactggcgccgggttccacaacagatatggcgtgcacaatgcgagtaaagccaacttgctgcgaggtgtttatgagagggtgctctaccgtgtggtaggtggagtagcacgcctccctccaagaccctcgggggatgtgttcaatgaacgcttgtccaagtttcgctctgccttggtggcggaaatccctgaaagtctccccataacgcgtgcccactttgtggac

SEQ ID NO: 1668 - DNA, 358 bp, Unknown
  Description of Unknown: unclassified Orthorubulavirus sequence
taatcagacatgatcatatgccttgcaacagctgtctgctattctaaaagtttcagtaaccaccgatccaattaactggcacccatttaatccatctatttgcctttcttgactcccagctgcacactcctccgggcaactctgccatcttctggcttctatagactcacgatctgcaatccggcccccgccttcctgcatctggcattccaaagtgaggctcgatctcagcatttagaaaaaaccatataggcccgactggcaccacccacccccccgacccaaccgccagccgggaacacaaccccacaccccacagcaagcccacacccgcccaccagcggagacccagcggaga

SEQ ID NO: 1669 - DNA, 358 bp, Unknown
  Description of Unknown: unclassified Picornavirales sequence
acgtgattatgtgatcttgctatactgaataaataagtgatgtaaaattagtatagtattgctataatcataagaaggtggactatttagtcttacttccaggatgccttgaaagcagccctttcgaaatccaggaaccatcactcgattatacgtcataagtgtcgcgtataatttaaaaactgcacttgccgaaacgaatacgaacgaaaaccctggtacaggtttaaatgttaccaacgatgatgattcgagatataacgaggtaaaacaagttatatcttttaataatcaaggccagacagttgctgatgatgctctagctaaacaaaaagatttgcctcagtcttatttagat

SEQ ID NO: 1670 - DNA, 359 bp, Unknown
  Description of Unknown: unclassified Blunervirus sequence
cacaaatctgaaccactcacgctggtttgtcacctgtattattcaggtttactaccttcactacttcttcactaccatgcgcttaattgcgtgactacatgcgcttcggcgtgactagcgcttcgtgcgccttccactactgtattatgtaatatatccgtttctttcttcctcagtcaattgtgtcggattgtgattattaccaatcaaaaagcgcggttcctactacttcaccgtgtgttattggtactttttggttaataattacattctgatcaattgacactccctaaaatccaaattctttccctaaaatccaaaagtgagtgctattatacgtattagtactttataatatt

SEQ ID NO: 1671 - DNA, 359 bp, Unknown
  Description of Unknown: unclassified Picornavirales sequence
tgaatactgcagttaatacagctaggccgacgtgaagtatcataggcggagaagggaaaatccggttatgtaacgtcgttaatataaactcgtgcgttgtgtgtttggcgacatactcaacttaaaacaatgttctttggatggagttcagctaacccctgttaatttcatcgttctggagtagtttaaagtagtgaagacgagtgtatgtgaggattccagcgatggatgaaagtaaggctcccgaaaggtgcaacctcatatgtctcgttgtagtagcgaaatttatgaaactcaaggaatggaccgttgggtaaaaacactcaaaactctctcttttcttatttggtacactacat

SEQ ID NO: 1672 - DNA, 359 bp, Unknown
  Description of Unknown: unclassified Picornavirales sequence
cacaaattaccttttccccctctactgattggttcactcgttatgactaggactggatgtttacgttacggaatttgcgatttcactgagtttggccagctcggaatggcaattttggcgaatgtgggttattgtgaaacgcaccgaatatactcccgaaaggaggttagtaggggcgtgtagcaccacatagctgagaccacatgcgacagagcagataggagccaggaaatacgcctcatttgttgacaagtgtaccggctctgaatgtgtggggaggggtccccacatgggttctgtactgcctgatagggttgcggctgatcagttgcaatgtggtataatcagttggaattcac

SEQ ID NO: 1673 - DNA, 359 bp, Unknown
  Description of Unknown: unclassified RNA viruses ShiM-2016 sequence
gtggggcacacagtagttatagtagttatatgccggacccggctggggggccctgtcactccttgacaggcagtgaacgtcactggcttatgcaaaatagcggatgcctgttggaaacatgggctgaaaacacaagaaccaacttagtattggataccactttgtatataattatgaatatactgtatatatacaagtaggcttgctaagtttagacacgtccctcgtggcgatgccatttttatggttgtatggtcgtacattccagtatattcctttctgtggtgataatcatatatcatagggagtagaacttgattgctacaaattcaaattcacagagtagcccactctataac

SEQ ID NO: 1674 - DNA, 360 bp, Unknown
  Description of Unknown: unclassified Flaviviridae sequence
gttgacagctgcacaatacaattcctaccttgaaggtacgcgtgttctcggacacaaggcgtgcaagtggaccttcggtctgcgaaccccaaagcgttcaaaaacgttcacatcgttccgatctgctgtacaattcgctcttccgtatctaccactctattgatttagtatcactccttgctgttagcctttcaagaaatttagatttactcttacctctttgcacctccactgctccgcagttgtaggtgcactctctcaattcgtagttccgtcttccctaaagatattctacccgcggctcgtttacacctcgtaaaccccgttacgctccttgccacctccctcaaagaggcagtt

SEQ ID NO: 1675 - DNA, 360 bp, Unknown
  Description of Unknown: unclassified RNA viruses ShiM-2016 sequence
catactgccatagcggaggaaggttgcgcgtgagatatattggatacttatggtttaatagcttgtatctcacaatttattggtggaattaaccatttcatcaaccagtatcatataatgagtgtaatatgatacttaaacgcacttactaatttaaatatttacacatcagagtgggagtatgttctcccacatgcgcataacagcattaatcaagatagtatactatatgcaagtatatcatgtatatcagagcattcatcggtagaatttaatgatacaaaagtcgaggatacgaatgtgttgcgttacgcattgggagaaaccagttataaaactgaggttcctggtaatcgtgac

SEQ ID NO: 1676 - DNA, 360 bp, Unknown
  Description of Unknown: unclassified RNA viruses ShiM-2016 sequence
ccttgggggtcatctggcaatgccagggttcggatctgtagaaatacagactatggtaatccataggaaattaatctccggagtctgtctggatactgctgagacagatatgtcttaagtaggttaagtgtgctttgccagcacacgtgtcattgtgtgatatacgtgtatagtaacgttggctaacgttaccgtgctagttgttatatgatggcgcccgtgccgacacgagtacattctagtagttcagtatgcttagcatgctgttctgctggtctgtacagatgtcatacacacaaccagggctgggagtagtaactaggaccggtccttaacactgtcaaacagacaggaggactt

SEQ ID NO: 1677 - DNA, 361 bp, Unknown
  Description of Unknown: unclassified RNA viruses ShiM-2016 sequence
tatagacgtacaacttaaacagttgtcgtactagtatatatttgccgtatcaggtgcgtaaacccgggcggctggcagacgcgaagctccaaacctttagaaaacacaattttaaataaaagttatgtaagatttgtccctatcatttgatcgaactcttaaattagatcatttgagaactccctgtttgtctctattcaaactactatttgagagtagagagattcacatttcttcgttaccctttaacgttaaaagggacattcttaaagcaaatggagtttggcttacgttattgtgcgttaatcttattgctggaattgagctggattgctcttccaagcgtaatgtttgatctacg

SEQ ID NO: 1678 - DNA, 361 bp, Unknown
  Description of Unknown: unclassified RNA viruses ShiM-2016 sequence
aagaatcaccagcctcggcttcagttatggtggaaaagtcagaccaatccacagagatcttgctccagcaagcgagaataactacatcgctcgagcgtttgatttgtttaatggaatccaagaacttcaaccatatggagtccctgacttcacagaccagtggtccaatacaagggccgaatatagcagcttcttaaggcatgcggaaattagaagtgcgttagaggtccccactattactcaacaacaaaagaacgcactgttgaacatcgctgaggaccgatattctataatcaaacataaaatacaggatgattatcttgatcctgtaaatgtacgggatattatttgtaatttgaat

SEQ ID NO: 1679 - DNA, 362 bp, Unknown
  Description of Unknown: unclassified RNA viruses ShiM-2016 sequence
ggtagaaggccctgcaaggcctccctctatcttagtgaattgatgagtagatatatgtatgggtgggttgggatacgaatgatccctcccacaacacaccgtaagactacatgttggcacaaacgaccatgcttgcctctgaaacactctgcatgtgatgatgaatcactgttagccaggtggaggttttcaagaagtccgctttgtgttttcacgaatattacgttgagaatccatatgatcgaacacccgcgacaacacatgctcttatgggtacgcattaaaatataacccttctaaaccacattcgtccaaatgtggtccattgacttaggacaaccaaccccccaaaccaacacgcc

SEQ ID NO: 1680 - DNA, 362 bp, Unknown
  Description of Unknown: unclassified RNA viruses ShiM-2016 sequence
gatcaaagagttcttcaccggagagaagtcgggaagggtataacaagggagcaatgaagaggaaagtggccattgatgccattgataagaatgatggttcagctattgggtcgatggtgattaacgcagatgaagtaacaatgaccatcaacttcaatttctaatggagtgtcccaaaggattcatgtgtctttaccagaggcccagggaatacgagccatcattcctgattgttttattcattgcagttctgctgttcacttgtacaatccttagtgctacacaacaccaaacaataaacaccgacaactcatctgttaagactcagtacatcggcatttctacaggttcgaaatcttaac

SEQ ID NO: 1681 - DNA, 363 bp, Lophuromys jeilongvirus 2
tgattaaattggataaaagcttagctgcttggttatgagtgatattgtgataaataatgtgatcaattgaagatacttgattactattagtgataaatagattgttgtgtatgtctgtgattactaatgtaactgaattgttgagtttaatcagaccacaaatgctgctatattgccaatgagctattatctcatgactgatgacactatgcgagagattagtcccaacacaattgattgatataatttatttacaatagttctcaaggataattactaagaaaaacttaggcggcaggtcataatccgtcaaaagtttggatgcatgacttctgtctttaagatctgttaaatcatttttta

SEQ ID NO: 1682 - DNA, 363 bp, Unknown
  Description of Unknown: unclassified Bolenivirus sequence
aaatattcatcactattagtatatacgcatacccatacccgagattataatacggtttctattaggtcgttaaacgagaccaaacagaattttcttgtgcttctttagtctatgttactatcgcataaccagattcaacaactatagtagttcctgagaaaaattccgcgaaaacgcgcacagaaacgttataaaaggtgtagtgtatcctattatacccatagttggtatacagatactagtggtgaaacattcacactcgcgacaaaagttttacattttaaaacaaaaagtaaaaacaggctcgttaataaaacaaacgatcccgctcaaaggaagtttgtttagtctcctctaagcagg

SEQ ID NO: 1683 - DNA, 365 bp, Unknown
  Description of Unknown: Posavirus 1 isolate Ishi-Ya8/JPN/2015, complete genome.1 sequence
ttcccggtgtaaaaagctgggcgcggtctggctcccgtcgggtggaaaggtccaccaatggctggttgagtgtaagctccggtgctctggttgtcgcaattccagacgtcgtaataacctatattgcatctgactctaatatttgtggccctactgtatctagttcttcttctgctcaatctgactctaaaaaacaaaaactacaaaaaactgcttacaaccttgaagaattctttgatcatgatcttcctgatcctatggtctcttatcgttctaaaatttcaacaagaattcttgaaaatcaaggttgcattcactctgattctcatcttactcctcgtgtgttttcattctctactgttggc

SEQ ID NO: 1684 - DNA, 365 bp, Unknown
  Description of Unknown: unclassified Picornavirales sequence
ggacctacacaagcgttaattcgcctgttcgtcccacccctttgcggcgcatgccatcgcgtcgcggagctagctccacaccaactgaggcacacgatgatagttactgctctgaggtcctgagtgaatctgaagagagaatggatcatcatgtttctgcgcctgagcgtccctcaaagtccatttttatggaagtacccggcacaggtataaatacgctcaaggatgggttgggtttcggcgaaccttaccctggtaaacaaccgcctactaaccaaacaacatacatgtcgggagactttaaatcacacacacagattgcactgcaagtgcaatcacaagatgagtatgaggagttgttgcaa

SEQ ID NO: 1685 - DNA, 365 bp, Unknown
  Description of Unknown: unclassified RNA viruses ShiM-2016 sequence
aacttctggttacccagcttaaaggaaatttccagtaaactttaaagtcaaggctttagttctaggtcgaggtgccctatttagggtgaggagcctcggtggcagccccatcaaatcctctattggataggagcagctacattcaggttgatgtagcagttgttaggtaacactagcagcgttccgaaacatccagacctgcccaatccaacagtacgaacaatggccctaacggcccaacgattgatacgacggacgtcaagatcaacacaacccttgcttcctcttcacaagaaaactcccttaaagaaatcgaaatcacagctttccaggatgtggaagcccccgcgcttgccctcactcca

SEQ ID NO: 1686 - DNA, 365 bp, Unknown
  Description of Unknown: unclassified RNA viruses ShiM-2016 sequence
tgtggattgcttctggctccgttttgttttgacttcgttaatcgaagcttcggatatttccgagacttgactcaaaccggcgttagacgcgattggctggcgtaaccgttactgaggctagaagggacgcgtcctcgcgatcccttcgtttctcatatttggtgcagctgtacacgtccgttttctcttaagtgtaggtgataggatagggtgagaacgcgggcgccacgttttagctttttctaggacgtccccagtggtttaatacctcggagcttcggctctcgggtccttccccccccgggtggtgtagttagttgggtccccagggttgtttcatcagcgcttcgttgtttttaaaaaca

SEQ ID NO: 1687 - DNA, 365 bp, Unknown
  Description of Unknown: unclassified RNA viruses ShiM-2016 sequence
cgccattactactgtaccaagaaaacttcaaacaaacaacaactgcgacaaccctaactaatgtaaccgaaaccaccaatgcactcgaacgcggcaacgcatcgaacgtaaatccgtatctgcactcaacactcaaaaagacaccaattccaaacgatagattaggaacatatatatctggaccacagttaggtgatgcacgcattacaactggtttggtatacccactatcatttcaaaaaatatgggctaaattattttacagtttttacaaagtaaacaacaattcatactacggattagatcgtttcattcatcaattaagtaacggataccttaatgttacaggaacagaagatgatttc

SEQ ID NO: 1688 - DNA, 366 bp, Unknown
  Description of Unknown: unclassified Omegatetravirus sequence
tttctctctcttaccaagtgcggtaaaacaaacaaagaaaggaaatcgagtgacaacggcctctacacacctcacgtccgtgaccaccggattatacgtcgcccgcgcacggcgccttttccgaccactcgtgagagtcgctggacagctgtccgtgaccacccgattgcagtcaaattactgctttcggaccactaagtttgtcctcgaacgacatacattcgttcacacactgtcttagcgagacctaaactcgccttgatagacagctcatgacagatcgttgccggcgcatctgtttcatctacctcctggctattccgttgctattatccctcccgagcaagacggctgggaacttttaga

SEQ ID NO: 1689 - DNA, 366 bp, Unknown
  Description of Unknown: unclassified ssRNA viruses sequence
ataacgttgagaacgtgtgtgggaatgcctttcctagactagcttgcttggtaaaaaggtaagacccatgagggtcatatttgattttgttggttccgcttttggaatttggactgttcatgtgtgtacagtgagttcatcgacacatgtttttgaggaacgcctgaattggttttcaggggtgtatcagccccctcatgagtgggtttatcccactctttgggagcttttgcagcgtgtgtgtgatgaactaaatgagcagatcttatggaaccatgatgagggcgacatagacatacaacaagaggtgtgggttgaccctgaggagtttttgaattaggctcttgagttgcggcaagctctcaa

SEQ ID NO: 1690 - DNA, 366 bp, Unknown
  Description of Unknown: unclassified RNA viruses ShiM-2016 sequence
gggagcttggtcaaacgaccaataacatgcacaggagttcatagtttagagttgaagcaccacacttggtgtgagtgctcctcgaacaagaattttaagcttcgtgttgttggcctgaccgagctcccttgcgattgcagggggtttaaggaggttgtgcacttaccccttgcaatcaagaattgtagtgagtggttctaccactgcaattgcgtgcacaatatagtcagcgcgttggtgggtcgcgttgctttgtgcgttccgtcacccaccactcatcgaattgagcaactttcaaagatatcacagtctttggctcgatcactggggcatgttctccctattagccaggaccaggttattagg

SEQ ID NO: 1691 - DNA, 366 bp, Unknown
  Description of Unknown: unclassified Riboviria sequence
gtaacactcaactgtatacccgcgacgcgtacgggtcaacttacgctaacccttcttcaccagactacactgtcaggtttaaaacccaaaaggcagttaaaaccattaacggcatccgagtgacgaacttcgtcacagagatcatcgtcaatgatctggtgggcgttgatgtcaaaggcacgagtgccgttgataacattgccatccgcatacgggtgtcgggagccgctgaggcccatgatcgcgtgaaagcgattctgaaagccttagccacccaacttcccaattggtgcgacgagaacacgttcctcggttttgaaccgaagacgcttccttccgtcgtgagctgataagaggtccaataag

SEQ ID NO: 1692 - DNA, 367 bp, Unknown
  Description of Unknown: unclassified viruses sequence
tttctctggttacccagctcataggaaaatgtcttttaactattgagtcaaggcttagaaattagaatggagggtcctatttaggatgaggtcctccggtggcagccccaccaaaacctccaaagactaggaacagctatatcgggttgctatagcagcatcaaatttatttgatgcgttccgaaacaccaaacctgctgataatcaaacgaacaacgagcaaacttctaccctcacaaatacaggacttagcacgacttcagaagaaaataacatcgaaacggtccaaatcacgacctttcatgatgtggaaactccaaataggtacactaccccgctggtgcagaacactgcagcaactagccgt

SEQ ID NO: 1693 - DNA, 367 bp, Unknown
  Description of Unknown: unclassified viruses sequence
gatctccggtctggtgagaccttaaaccaccaatcaggccaatggccttcagcttagcctggcataatcgcactcgaccgtaagctgaacgaaccaaaaccggatgagtgagtgcaactcatctggacgactcatgtaccagcttgacacagctaagtacatgtaaggaaaatgtgtctctaaaaatcaaactcaaaataactatgattttgaacagttatcacaaactgttgaactcacggacattgacaacactaatgttgtgtctgcgcagtccccagaagtggaactctcttctggtgacccttttccagatataactcccacttcctttctctcacgccctgtgaagataggaacccatgtg

SEQ ID NO: 1694 - DNA, 367 bp, Unknown
  Description of Unknown: unclassified ssRNA viruses sequence
gcccgctgtagctcggcggcattagggagttcagggtttccatatggggatttgtctgtcacacctttgataaagaaacagaatggccgcaccacatgttcgttagtatgtagctcacgcgggttggttacctaaaaccctctgcctagttggatgaaaaccagtaaggcatatatttacaaaaatgaacatctgagtgggatctcagtataactcttccccctgtccgtgggtccacggtcgatggtatgattgggggtgatgcaccatctaaacgcaagtgcagtgcggttcagtctcgcgcggcttgtcagccccccccaacccgggttcagagaccggtcttattctatttagtggtcacaac

SEQ ID NO: 1695 - DNA, 368 bp, Unknown
  Description of Unknown: unclassified Picornavirales sequence
ttttgattactcccgaggtggttagcaacacatttgcaggtgttgttctaaaaaataatgcaaaaagcgaagagaaccttacagcagtggttcaaattcaaaaagaattcttagcagcagctgaattcgaaaacgaagaactcgttacagcagtcgagtgtggaagtggagctagtagcagcagcgctagcagcattgggtttacagaagtgcctgaggaaagtagtgaggaagaagaagaagagcttacagccgtgctcaccgaaaccagtgattttgatgaaatcgaagaaatcatagttggtaaacatcattacaaccaacgcccccgcaattcatatgtcgatgacttgtcctttgtgaacagc

SEQ ID NO: 1696 - DNA, 368 bp, Unknown
  Description of Unknown: unclassified Riboviria sequence
cgccgaatagacgtcatgctctacgtttccagatttctggagatgtattgtgctacgcctacgtaggtgcgttcccttcccaactccccctgctcattagagcgggcttgttgggaaaacgccgtagggacatcgattctcgtttgaggctaggcctcaaacgcgatgttctagcggtatccgatttaacaagcaaccgtctcgcggttgcttcgcagatctggtctggtatcattgcatgtaccgccggatctggcttcgtctcccttcgccttgacaaggctcaaggaagagaagctattcatggtctcgcgagactagctttgtggctagtctcgaccattcgaaactctggcgcaactcacgtc

SEQ ID NO: 1697 - DNA, 369 bp, Unknown
  Description of Unknown: unclassified Hypovirus sequence
gggggttagagaaatcttgggagatttctatcgtcatagacatatgtgatgtacttacgtctctaggacgcctatgactggtttatactctgtcgagttgaacgtctggtggttcctacgtataagaactgcagtcttatgtgtgaaaccctacccctcgctaaccgagaacggttgtgtgatttgaggaacgttcgctgtttaaacttctttggaggaactttaaattgtattaattttgcatttgcaagagttagcccatctctaaaatgaggctatcgctgtgaacagccttaaagaccctctgggcaaactgattatgaattgagagttagacttctcagaaaaagtctggtcttgtcctagatt

SEQ ID NO: 1698 - DNA, 369 bp, Unknown
  Description of Unknown: unclassified Picornavirales sequence
tgcggtttactggtttatgtttatcattttaaagtattaaacaacgtaatggcttcatcagcaaaaactaacgaacaagctttagggactacagtagcagcacatggcactagtggccaagtgttagctgaaccaagtccaattgatcaacaaattcatgataaccctggtacgattaaggcgtcgactgcaattgaaactcttttcaaccttttgttcaaagattatatttttaaaggattgtataccatctctactgatatggctcccggacaaatcatttggaaattacctattcatccagcagtttgtaatcaatataatgatcacgtaagaaaaatgtttaatgtttggacaggaggaatgaaa

SEQ ID NO: 1699 - DNA, 369 bp, Unknown
  Description of Unknown: unclassified RNA viruses ShiM-2016 sequence
agcctatgtgaaatagttggttttggcttaccaactagcgccactgtaatacgcgccgcacagtcagcttctgtaaataatgtaaatactgtcatcgccgagggtcaacaggttaccccggctgataaagacactaacctgacccacttcgaagatcttaacactggcggagacgccaagatctcggaggtagccattgccagttctggcaagtatactgagtccgctctgggggattggtttaagagacccatccttataagggaatttgtgtggcccgaggacactttgctccttgactcatttgacccttatttgctgtatttctcacatagtacaattaaaccgaaattgcatgggtatagtcga

SEQ ID NO: 1700 - DNA, 370 bp, Alphamesonivirus 2
actaaagaaaattttgttttctcccataatactactactacaagtatcaaccccgtccgtctgctagagacgctaaactctagcaccaaaaatctagccacatcagttgcttaaagaaccccttgagacactctcccacttaacatcttttaggaatcttcgatgctacaacaacttggctagtaataacagcaaatccatatatttcaacagttataagaggctttatgtccttactttgaaagatttgtttactattgtcacgattactttaattaacagaggctatatttagtgctcagcacgttaacgaaagcatttgtacaatagtatgagtttgttgtaaattgtcttgatacgacaccctatc

SEQ ID NO: 1701 - DNA, 370 bp, Unknown
  Description of Unknown: unclassified Riboviria sequence
cataagtacctatattcagcgccccggagcatcagttccgaagaatcgataacgattatccagagcattagctacaaaacgccttacaaagtaagaagacacgatacgataacgttgagtgtatgcgaacacaaagagacgaatacttgtggcatttaaagctgataacagctttacgtggcaagattccgcgtgaggagttgagggagataattataaaatatcaagtacattttaaaataaccccatcaatatatagcagtcataataggaatatagttagacctaagttagaagaatactataggatagcatattaggataagttagattataattagtggaactttccacctaatctacctccact

SEQ ID NO: 1702 - DNA, 370 bp, Unknown
  Description of Unknown: unclassified RNA viruses ShiM-2016 sequence
cgatgggccggtgcttaccccgccaccatccaagtgcccggaggtcacatgcttgacctacgaatgccccaaaccccgggcacttacctcctatcccttcaacgagctgctgcaagccgcttcgcagcgattgtggtcagacgcccagagcgtctgttcccgcttttgcgcgaagggggtagaggcctcagctattttgctgaggcaaattcgagaatgggcctccaagaccgcgtttgcagtcttgagtatactcctgtattgtgtcaccttcgtatgttgggggacgctttatggcccgtggctactcgtctcgacctacccggccgagaccctcaccgcatgcttattggccctttgcgtgcgcttt

SEQ ID NO: 1703 - DNA, 370 bp, Unknown
  Description of Unknown: unclassified RNA viruses ShiM-2016 sequence
tccgatctctcgtcgattggcagtacgatgttggagatgtaatctccaattatgcgtccttccaaggcgacggccttgtccttcgttatggctatctgatggacaccacaaggtgggacatcagtgtgtcgacgaagaacccgggtatccggggtcttccgtccacgttcgacgctcactggtggagaatccagaagcgtagaacgcgatcgactccatacggatttggctctaatcctggtgaattctcatcaggtcagtgggccattttggccgctcttggtatgaccaagacgccaagatcgctgcgataactttgtcgctccgatttacaactgaattaacaatttaataaacgaaggacaatgct

SEQ ID NO: 1704 - DNA, 371 bp, Odonate anphevirus
aaatgaatactaatgtatatcatatgataagtattactacaactcatttcccgaaaattcaggatttttacgagttgaacgtggaatacttcaatttaataagagaaaaatatgatgcatacaagggagataaaaattctcctgaattctttgcatcaatcgacaatcaaaaacttctcttattaattgaagtatgtaactacataaattcaagacatggattattccaggtgccaatattactgttgactccacagtcaacattgaacgcatattggcagaagatcgtaaaaggcgatccaacatccctgcaagatctagttcgattttattcagctaaataatgagaaaaacccgtaagagtcaggaag

SEQ ID NO: 1705 - DNA, 371 bp, Unknown
  Description of Unknown: unclassified Picornavirales sequence
atagttacataaattcatattcctatgccacaaatttaaaacaaaaaattcttgcacggttaagtggctcgtgcctacatatttccaaggagccttgattcttggagtgacccttgaggtccctgcatatagtgtgatggtgtagtataacaaatctggtaataaatatctccaggttttgcttgctgtaaagtacctagtgtctggctcatgcaagcacacgggaatcccgtggttgctatttcttcatattatatgtagcctgtgtaagatcaggtcgattggtggcggtaccaccctaggtgactgagttgtgtcacacctgggaactgaggttaatcagaacaatcttaaactcttatcttttcact

SEQ ID NO: 1706 - DNA, 371 bp, Unknown
  Description of Unknown: unclassified Riboviria sequence
gtaaaactcaacttttatcacgcgatgcatacggcgttacatatgcagatcccaacgaccccgactttactgtgcgcttcaaaaccgcacctaaagcaaagagtcttaatggggctcgcaccactaactatgtcacagaaattatcgtaaacgataatgtggctgtaacagttggtgggcaagcggcggtagatgcagtatcattacgtatacgcacctccggcacccgcgagtctatgccgcgcctgaaggcgatgctgaaaagtgttgcctcccagtgcgaaacatgggctgacgataacgttctattaggttttgaacctcctgtagggaatgaacccgacgttgttgtttaacgggagtaaacgaaa

SEQ ID NO: 1707 - DNA, 372 bp, Menangle pararubulavirus
ctcagaattatctgaacatctacatcaccaacttctaacccaataaatttactgtgtggtcatcctgcaggactcacttgctattgccaccctacaagtaaaagccaattcaacaaatgcattgctttaccgcacatcaactgacctggcacttcaaattcaaggaccccgccacagcgcatgacagcagccccgaggcaaccccctccccacaacccactacacaattcctctcccatcacccaatcccctgctagtttaataaaaaattagagaggtgaaatgcacacacacaacgaccggaaaggagcacgaacaggtgcacccacacaccaccccacagcgaccaacccgccagccatccaaagcatc

SEQ ID NO: 1708 - DNA, 372 bp, Unknown
  Description of Unknown: unclassified Orthorubulavirus sequence
gaaatctatcacaagtctatatatgtccacaattgacccttaagaaccaacttccaacgattatccgttaaatttaagtataatagtttaaaaattaacattaagcctccagataccaatgaatatgaatatatctcttagaaaacctgattattatgtgatagcgtagtacaatttaagaaaaaacctaaaataagcacgaacccttaaggtgtcgtaacgtctcgtgacaccgggttcagttcaaatatcgacctctaacccaatttaacacccattcttatataagaacacagtataatttaatcacaaaagacctcaaaaactgacacagcttgatccactcaacatataattgtaagattaataata

SEQ ID NO: 1709 - DNA, 372 bp, Unknown
  Description of Unknown: Human parainfluenza virus 1, complete genome.2 sequence
gtctacactcctcaataatgacacccattagctctaaatcgtaccattaatcaaatacagatcaattcgatacaatcagttcaaataagaaaaacgtagggacaaagtcctctaccaacatcaaggaagacaagagtctcaaaaagctcagcctaagcagagagaaaaacaacaacacaaagaaagaaaaggacaagatcacaaacaagaacaaaagcaaaaacaaaaacaagaacaaaaaagggaagaaaaacaaaagtatacacaaaaaccaaaaaagaaaaaaggccagagacaaaaacggaggcaagaacaaaaatttaaacaaaaacagaatttaaattcataataaacaccaagatagagacaaaa

SEQ ID NO: 1710 - DNA, 372 bp, Unknown
  Description of Unknown: unclassified Picornavirales sequence
agtttagttttcacatttaaatttgtaaagactgaatttcactctgggagacttgctttctgtttcttcccccaggaaggatacgataatcctaacgcgcctgttccctcttatgcgaattctaattatgttcatagagaaattgtagatattaggttatgtaatgaagttacatttactataccattcatttcctcctcaccatggagacctactgacaacacaagttatgctagtcacaccggatatttatcagtgtatgtagttgaccaactggttgctccatctggagtatctacaacagttactattcttaaagaaatttctgctggaccagattatgaagtagcactgcctaaatcaataaattat

SEQ ID NO: 1711 - DNA, 372 bp, Unknown
  Description of Unknown: unclassified RNA viruses ShiM-2016 sequence
ccctggggcccgcccacgcgcaacaagcaagtgcagctggaggccggcttgtatgcagccctgcgactggaagccgcctttaacaacaggcgaaacggggcactcccactccagctcaaggcaaaggcgattaggcaccttgccgcgtacgacactagcgcttattctccgctagagttgacggatttgatcctcaacacggtcgtagccgccatgcgtcctagtggtcccgaacacctcctagcctcgatgttcggcaaccatcgcttccaaaaggagctcgcccgccttgaccctctttataaactagcttgaagaggccctgctaggcttgacgccacctgcgtgaagggcacccccctggggcccctc

SEQ ID NO: 1712 - DNA, 373 bp, Unknown
  Description of Unknown: unclassified Narnavirus sequence
aaataagacataaggcagttcctatctcaatatctccaaaactaagaaacctacatcaagactcgctccggcaatcaagaagctcaaataccaacgttatattcttcaatcatcaataagcaatcaaacttgtttatccatcatcaagcatcagtaataatgtcaggaataccatctgagtttggaattggtgttgatatgagcaaaacgattgaaaacatgaagaaacttcaaactgccatggaaaacgacccaaattttgatccttcattgttcgatgacaagaaacctgataagaaagtgaagggtaaaggtcctatttccgacttctttcgacaatctggcgactttgttactgaaactcctatgggta

SEQ ID NO: 1713 - DNA, 373 bp, Unknown
  Description of Unknown: unclassified RNA viruses ShiM-2016 sequence
tgaaaataaagcgctcacaattgagaacaaatatttcaaacaaattatattgaaaatttaatttaaaattttattaaaagtcttttaacagaaaggggtattttagtattgaggtattattttacgttgagtaattaaaagcagtataaatctttacttttggctagtagtgctgcggcatattaatcaagagaaagttagatcttgtcatttggtataaaatcgaggttttatattaaaccaatttctagtaaaaatccttacgaggtagttattattaaactaaaaataaattagcaaaatccttctacttgaaaaacactgtgaagtaaggtaaggtaaaacaaaattaaaataaaacaaattatataaa

SEQ ID NO: 1714 - DNA, 374 bp, Unknown
  Description of Unknown: unclassified Picobirnavirus sequence
gtaagaacagagaagtgaaggtaacgaagtcaccttcagaacagacaaacggagcctcaaagccgcagcagaagcagcagcggcgttcgagacccacaaagaaatcgttcaaagaaagagcgaaattcaacgttgacagatcacttactgaccagtcagcaacagaagtaagcgaaacactgtctaacaaaccgacatcctcttcggttttcttcccgagccataaggcatctgctctcagtgccgggaattttattgagtccgcaggtcaggaaaactttgttgaagatttttctcgagtaaaagagaaatacagaccaggacacacgttcagtattcgggctaatacacaggcaaagcgtactccaaacgct

SEQ ID NO: 1715 - DNA, 374 bp, Unknown
  Description of Unknown: unclassified Tobamovirus sequence
ttgtacttcgaattatctataacttactgaaatttttgttttgttttgttcgttttgttttgatttaatatttgaattatgagaataattttgtcattcgcgattttatgatccaaacttgaccacctgggtgatcacgattcgggtgcagggaatgaaacgctttccagcgcgtgtagttttgaaagtttacttgttgttatgatgtgctggactaaattaataagcacacattgtggtttgtgacggtcaaccataaatactaagattgacctaatgacgtagtcagatggcgaaattaattggtataggttttgagtatctattaggtcaatcatcgcatttcttatacaattttgcttttatttagaatc

SEQ ID NO: 1716 - DNA, 374 bp, Unknown
  Description of Unknown: unclassified Mivirus sequence
agtgaagcagagcggcacgcgggctcaggaaaaagcgcctggcttccctccacctcgctctcactggaggtagaccaaacatggccctccatgagccaagcagcctattatcaacccgtatatatcatttatgtttgtatatcttatgaggacgggtgccgttatgtactctgaagggccctcactcctccatgacggcctctctattagattttttcgccccgggaacacaggaacgagggcgttcagctattagatgagaagatcatggaggcatgtatccaaaattgtatcctcatctagccctattgtaatcctcttctcagggcaacgtttttctctgtttgtattaaaaaggatgatggaacgataca

SEQ ID NO: 1717 - DNA, 375 bp, Unknown
  Description of Unknown: unclassified Partitiviridae sequence
caatgcgtatgtcgcccgatggggaaatccgaagaggcggtatatctgcagtatcatgggaactttgttccatgctaatgcacgtgtattctaagattttccggtttgcttggatagtattaatcaatactacttttataacctaagccggatatattaacaaagagagacttatgtcaccttggttcgcatctgctattgtccgtattctaattgcagtcgttgagatcatatcaaaagcgcctttaaaatagaactatgagacgactaattcgacaagtttactattggttgcgttatcgctacccttggtaataattttgattcgttctcctctttgacgtgattacctatttatttaacaaggattataaa

SEQ ID NO: 1718 - DNA, 375 bp, Unknown
  Description of Unknown: unclassified Picornavirales sequence
gaagctgagtccttgacaagacgttaaactgtcgctagatgagtgtgatcttgcaaaactatataaaatccaaagtttcaaaagttttgtattgctgctcatcagttggtagggtcctatttaggattactgctcaaggtcctacgaaggcgtccccttcaatagcctagagcgctttggtacggtctcatttatgggtttatatgagtacttaaattttaacctgcttcaaactctaatattaaagtaggtggggaaactactataaaagcccaaaacagtatgcaagaagacgtcacttctggcaagttatctgatgaagttcaggaaactactgtttttaaaactgacgctaatattgtcaaagcttctatg

SEQ ID NO: 1719 - DNA, 375 bp, Unknown
  Description of Unknown: unclassified RNA viruses ShiM-2016 sequence
tttttctgcaactataaagaaattatcgtgacgaccgccgctgttggcggagtcactgccatttgcgtcttagcttataagcgtgaatggtttgtttcaaaggatgccgtttatgctaaaatactcactgtatttagtacgaacgtgcagccggattatagggaaactgttcgccttgttcgctatacgccgctgaaagtgggtggagctcattcacaccccgatgctgcagctgggcgcacaagcgcaaacattttcatcgataaagtgtgtgcgagcataggtcatatcccgttctccctttcgagttcgaatcgtgatgtcagagctggaaatgacggatgccgcaatttttatttcagtaaggatttgacc

SEQ ID NO: 1720 - DNA, 377 bp, Unknown
  Description of Unknown: unclassified Morbillivirus sequence
gcactgaccatatgatccactgtaataagtccaatgaaagtatcaattaataatattggtagtgcaatgagtattgattgtataatatactcctttaaactagatagtgataaagggttatagatgatttcagttattttaatataatcatatattgattttattatcttacatgactattatgtaattgaattatgtgtcatcaattaatagcttaataatatcgtttaatgtacttatattgatggatagatgtgttatattgtaatcaaggatttagtatttagaaaaggaaagagtttaatttgttgttaattagttattgtgtattcaattagaaaaaacttaggaatccatgttaataaaaatttattatc

SEQ ID NO: 1721 - DNA, 377 bp, Unknown
  Description of Unknown: unclassified RNA viruses ShiM-2016 sequence
tagcacctaggggaagaactcttttgttcttcctctatgtagtgtagaataatatataccagttataacatgtagactcacatggctagggaacttctacacttgaaatacatcgtggagtctcacgaaaactactgcacattgtggcgttatgtgtggtttttaattttaatgccagtaaatctcgcgataataatgatacaaattcttctctggatagctcattatccaattttaacaatgagcaactttctagctcagaggcagttggctctgacaacaacacgacgacgatcgagagtcatctatcagatattgtactccgcaccatatcgagaacagacccaatttataactcactccccaaaccatatggt

SEQ ID NO: 1722 - DNA, 378 bp, Unknown
  Description of Unknown: unclassified Hypovirus sequence
gggtgtagagaactcctggggagttcaatcgtaatagacatgtgtgatgtacttacgtctctaggacgcctattactggtttatactctgtcgagtttgctaggatatggtggttctacgtaaagaagctacagttctttatggacacactctaccccactttggacctctttaaaggtcaactttctttaaatttcttatttgttaaccctgatgggtgttcatttctatgcctggagcaacgttaagctggagtgaaaggcccgtgtgcctgaaacgtgagctgataacgagagtcagcgaaagagaaatcccgacgaagggtaaattttagattttaagttggagactgcgacagactgcagacacttggtcaaa

SEQ ID NO: 1723 - DNA, 378 bp, Unknown
  Description of Unknown: unclassified Astroviridae sequence
caaaacaattttaaaaattcaggactttttggacaatgccggtatggaatatcccatacttacggatgtgaattaccaggccttatggggcttataattatggtaaccaaaatattttatgtgcttaacgtgcgctatactcatgttcggaaaatcagtcaaagacgaagaagaagcaaaaagagtgctaggacaagttttaactgacgaagaaaccttgggactgttcatactatcttgtattgaacagcaagagttagaaacagaagtagtaaataaagaaggagacgaagttgactgttggttggtacccatagtcactgcactaactgcttttatacctctagctcaggatataattagatactttatatcaaa

SEQ ID NO: 1724 - DNA, 378 bp, Unknown
  Description of Unknown: Barns Ness breadcrumb sponge aquatic picorna-like virus 3 isolate2 sequence
acctgtgatatgtctttaaaagatcagctcagttttaaatctgagttctacggaatagcaaaattaatgtgtgtatttggttaccatgtgattatacatttttatattattattttattgttatataggctttgcacatatgaataaacttaggtttaccctatttagggaggcgtcgttcaccaatgtaaataatgtcacccatagagttgagtcactctttgggattgtaaataccgacttactaattttaaaacacaaaataaaaacaaaaattctttacagaagtccaagaggcttcttcaacgggaaattgatctcaactatcatgttgtttttgataaaggtttcccaaccgtcttccaaattttgacgaat

SEQ ID NO: 1725 - DNA, 378 bp, Unknown
  Description of Unknown: unclassified RNA viruses ShiM-2016 sequence
tcttaaaaacgtatatatagtttcgttaagagtttttacaactcttctcagaaactacgagcttggtttttataaccagctcaaaacgatcagtccggatagacttttcgtctcacacttgtgtttttacagcacaaaatttgtttctcgatttctcaaatcgactaagattttatatcttaggttgcaccgcaaacataaaacggtagttcatttattgaacgaaacagtgttaaagttcacttacaaaactcttaggattttatatcttaaggtcgtcccgacgaacataatcggaaaagtgttaaagttcactcacaaaactcatagaattttatattctgtggtcgtactctcgaacataaagagcgtttcacg

SEQ ID NO: 1726 - DNA, 378 bp, Unknown
  Description of Unknown: unclassified RNA viruses ShiM-2016 sequence
aaattggaactatgaatttaataaatacagctgagaagattaagaaattttataataataaattaagttacttatatatcaaattcaggaaaatggagttcccaaaattctatatggatttccagacagcgactcactttaaacctagaggaggcattcaatatttagatgaagcgaaaagagaaatgtattcgatatcttttgatactaaaggggactatgaaacggttagaaaatatcttcagcaaagccaaataaccggagcaagatttgcagcacttttgaaaggacaggaaagaattattggaaatggtcaacccgaaattttaacagataactatcaagctcaatatattaaaatttaaacaaataaataaa

SEQ ID NO: 1727 - DNA, 378 bp, Unknown
  Description of Unknown: unclassified Riboviria sequence
cttaactcggagatgagaggagttgacggcactgcatcgaatttctgatccgtcgtctctggttagcgacgctataggtataaagtccagcactttcttgcatgggactcgtgccacttccatgtgggattcgcccaattcgggcggcactaatctgctaagagctcccttaacggtctgctcttcagcatcgggcatatttattaatgcacgacgggctgaatcgcctaactcccgtagatacacatctccgacccaagaggggctagagaacctgggaactccacagatcttctaggttctctagcccctctttagttagggggagcagcccttgtttttgttctattcttttctcgttcgtataaaataaaaact

SEQ ID NO: 1728 - DNA, 378 bp, Unknown
  Description of Unknown: unclassified RNA viruses ShiM-2016 sequence
gacttattaagacacaaggatatccgtacattgtggtcacgaccgggggttgtcaagttcatggcgataaagcttggcgggataccctggcccatttggaggaggtggcaaatcattagtaattagtagattagtgtgcaatacgtttcgctgacggctagaacccgttgcttcggaaagcgcacatcgaacgtggaaaagacaagccacccggcctcacgcagatgcgggttgggcacaccacaatgtaggtacctgcgattcgcaagtgggtgcgcggcggcaaccttcagggcaacctgttgattgcgggacctggcgaggaacgctgactggaggggaaagacctaccaacccaaaagcaaacacacatacaca

SEQ ID NO: 1729 - DNA, 379 bp, Unknown
  Description of Unknown: unclassified Hepacivirus sequence
cagggtttcgaccctggcccggatacctatcgccttacgccgaaaggtaacgagtaggagtcgggtccccaggcccttaccgccaccaagccaggtggggaggtatgggagccggggggtgcagctggtagctccatgggggacgccccgtgagcggatgctgcatcgataccgggttagctctctgggagagcggcacttgacaccacgaatccgggaaccggacaatcgccggcgtgggacgcgttgcctccgtggccgagcaatttggcatgcccgtggtgaagagtgatggtgggggggggccccccttccagtaccgtactgcctgatagggtcttgcctcaagcccagagagtcgaggctgaaaaccgccatc

SEQ ID NO: 1730 - DNA, 379 bp, Unknown
  Description of Unknown: unclassified RNA viruses ShiM-2016 sequence
gtaggggataaccctaccataatatagtgtgatgatttagtcatctctattgattcacgcttgtaaaaagtcgtgttatgcacgacttcccgttgatcgggtttcacagagtttatgactcttaaagaattttctatgcgtgcactgccatagtgtgtatatgtctcccttgttcaacaaatgttggacatgttacaacgtcaggagaggaagaacgtttgccgggttaccacgggagtttgccgacactccgcagtacccaatggctttcgggattagccaaactggcttttcccttttgtaggatgccgtggcgggcctccgattcgcgtgtgtttgattcggcgcacgcgtcttatctcaatggattgcttcactt

SEQ ID NO: 1731 - DNA, 380 bp, Unknown
  Description of Unknown: unclassified RNA viruses ShiM-2016 sequence
ggagtctgactcacgctggtgagcagtagagcatgttggaagaaacctgaaagccccgttggctgatggtaatggaccgggcgaagtccttaaactcaccattgggtctcacaatataaactacccaaaacggtgaccaatcctgtggcgtcgatcagccgtctgatttcttcggaataagatgtgtagctgaggtcagcaggtcgggtcttaatacttccgtgctaagtgtgttgaacctgtagcggtaaccccccctcctaaagtcggcgaagggtacttcgaaagtttggcactaaatgccgagagactacacgggtaggcggcgcgtgtaggaagacagagaggtctggactggcgatatatgccaggcttcttgg

SEQ ID NO: 1732 - DNA, 381 bp, Unknown
  Description of Unknown: unclassified Rubivirus sequence
gaagggggttagaggacgcggcgcgatgatacccctggccatccggctgctcatctgttccgtggccctcgttctgtgtcagctgctgcgtctcacccctgaacagctgcaggcgcttgagaatttcctccaggcgatcggtgtgcccggctgcgtgttggcgctgtttcacaaccgcaccgcatgatctgggccgctctcctcctttggctgctcgcctgtgtgcttagcgccaccgtcgccagagtcacagcggtcctgttcctcgggcttgccgcgctgtacgtgctggcccgaccgtacggatcgcccctctgcaggttgttcgagctcttatgaactccgtctccaatctggtcagcggcctcatcggggtgggaa

SEQ ID NO: 1733 - DNA, 381 bp, Unknown
  Description of Unknown: unclassified Mononegavirales sequence
gtgacagtcaccttaacctcgcaaaatcttagaaaataaatccttctgaaaaactcttgagttcataattatacctaggcttaccggattatgggtgcatggttgatacttttccgcactagtattattcttgaactcgtgcaagtctgtttcgagattactaaagggctggttttatcacaagcagaaaaagaaacgcttaaagaagaacgcaagataatcaaggaaaagatcctcacttcgttgccacctagtataagagattctgctacgcattcgtcttaaggaaaaaccgagttcacaattcaatctattacaaatcactaaagctcatcttaagtgccttatttcctctgtttttcttccctcgtacgtgtcttc

SEQ ID NO: 1734 - DNA, 381 bp, Hermit mivirus
agcacttgagtagacaaatgtcaaaaccaagcgctgaacactttctaagagaaatcatccgtcttgaagcggagtctcgctccatgatggaagattcgtacaaggattctcctgcggtgattttctgtcaacagcactttggtcctggtcggggtctttgcgcctgtgtattcctacgggtagccggagttcccctcctggactgtgtggccatgggggatgttgagaggtatagccttgaggcacaggagttgatcggaagaccattcgcatggaggagtgattgtccaaggtgtggaagggagtaccactgccccagccagtgagtagacccagtaaagatagctgtttaaaaagcattcttatctgatttctctctgc

SEQ ID NO: 1735 - DNA, 382 bp, Unknown
  Description of Unknown: unclassified Riboviria sequence
ggaaccggctttcctctgattcaagaaagcgcagtgtgtgtaaagcaatagtgcgtgcaagcttacattagatgaattgttagtacctatacgaatgaggcagatattctttgttgggatcatatatggtaacatatacccttcgaaatgcgtctgaacctcaggatcatgtgcggaaaacagattcttttgtaagatcttttactagtgtttttacttttgcaaaattgattaagttcggttttacgacagtttaaagaaatgctagagtttgttataatatttctggagagactttgcggctaaagcaaaagtaagtccagatgactttggtcactttgaagaggaaagtgacaggtgtttttcccctctctttttaact

SEQ ID NO: 1736 - DNA, 383 bp, Unknown
  Description of Unknown: Picobirnavirus sp. hypothetical protein and capsid protein genes,1 sequence
gcctcttttgcaatgttagatcgatgtgcttcatcttccatagcctgattatgtctcttcagttcataattggctgcagcactctgtctttcagcttccatattgtgacgctgatcttcggctgctttgaagaaagcaatttggttacttgtcatcattcattcctcctttctgttgatgatgaaagttgtaatcatgtaatttgcgaactagtccacagcaccgaatggctgtcgctagtttacatgaaagtgtggtttttaaactgtgtaaaaccataaagtgttctcctttctgtaaactagcgacagccattcagtgctgtggactagttcgcaaattacatgattacaactttcatcatcaacagaaaggaggaatga

SEQ ID NO: 1737 - DNA, 383 bp, Unknown
  Description of Unknown: unclassified Aparavirus sequence
ttagggaccgttgacgacagctccacgtatatgctcattacgcccactgcggaaacaatgtgatgctgtggtgtatacgtggtcaagctagcggcgtgtcccgcttattttagttttagtctatcttaggttaggttaatttagtttgtagttttcttttctccatgtctggttacctatctatcttaactacgctccagacgactaaatttagtatggctttcatggagaggtttgctattcagcgtgcgtgtaccatcggcagccccaaaaacacgcgtcaggagatctccccagccaccatgggctaggttggcagccaggttttaacttggtggggagtaaaatagcctgctccaattcaaaattctgatacttctata

SEQ ID NO: 1738 - DNA, 383 bp, Unknown
  Description of Unknown: unclassified Picornavirales sequence
cagtactcagtgtatcactgcttactgtgactagatccctagtaaagattttaacacgtaatatttattttgtttatttattatttatgtgtgtaagcgactttgtgctttccacacacaacaaaccattatttagactgctggacgcgtgtagtctcgtgagagttgcgtgaaaatggcttgtcccgagggacgtagttatctggtagtttattaatgcatttgttgtgtgcccatttccttttgtgtgctggaccacggtggtgtaggtgtggtgtgcttaaatgccccacagcgaaccactttaagatttaccacggttttcgtggtattgatcggcacacctgtatttccatggtttgggtacacctaaaggcccacca

SEQ ID NO: 1739 - DNA, 383 bp, Unknown
  Description of Unknown: unclassified ssRNA positive-strand viruses sequence
taacctatataaaattacaagatgttgatcgtagattacctgagttggtttagcttcgcaatgagcgtagcggatgaacatctggtggtatcgcatatggcgatgattggttttgcggaaaaaccggcgaatcgtagtcggtggtcggagtgtttccaggaacatccctgctacaagcataaccttcgagaaaattgtacccacggccacttgatcgaggctaggttcggcggtgtaatgcactgccggaactgcctaccgcagacgtcggaacaacaggtcgaacatactaaacaacacgacaaatgtcggaaagaagcttacggtatcttggttacagctgccccggaccatagtaagtgcgggtatgcgttcgcttatga

SEQ ID NO: 1740 - DNA, 384 bp, Unknown
  Description of Unknown: unclassified Hypovirus sequence
atcactataaacttccatgtgaacgttttactgcagaagaaatacaaaatggacaacagggcccaattcacagaactattgttgctagtgatagggtgagccacgtaccatccaccagtggtggggtattattcttcaggtttttgacgcatggccgttgcactgatcaacgtttcgagttaacgcagatcgagcgggagtgacccgtaatagcaaaagtctatcaccatccatgcgttaagacgtggacgggtgtgaagcttggatgagcgatattgtgccttcatgctctcaggtccacttaattgtgggatgcaattcattttgtaatggtgtttatctcacctgatcatggtacggtcatccgaagactaatttcccctt

SEQ ID NO: 1741 - DNA, 384 bp, Unknown
  Description of Unknown: unclassified Permutotetraviridae sequence
agtcctagtccaccctctctccgttgttatgtttatagtgtccctatacctattttataacacagcccccctgacgaaatttgcaactacccttaacaactctactctcctgaaaccggttggaaccttcatttcatcccatttgacccagacagcgggtctgctatggttggtacccatatcattcgtagcggccaaacctgcctgggcctttctggcggcactcatcactggcatcttcacaactgagtacctccaagctcccacgaaatattgggagtatgcttttttaggagcagcgatggtgctcctactaaaagcgaggaacgtacctcagttcttcatagcattggtcgtggttatactaaccattggcgttgggct

SEQ ID NO: 1742 - DNA, 384 bp, Unknown
  Description of Unknown: unclassified RNA viruses ShiM-2016 sequence
aataactcaacatcttacaatcataacgctgtaggtaatgcggctgatagcggccccattagggtaaactacgcaacacacacaggcaccccaactatcctccacacacctcagacgccgatagaggcagagaagtgtgggcaacggttgggcagaccaatatacgtcttgtcgtatgacgacgagattttgttcaaaacttctctggagcttcacgagctctttgacaatgatctttgcgattttagtatctcaattctcggtgaagacaacgaactagttatcactcgcgtgcacacaaaattagatatatacccagagccagagaagattaccgacattcgacaacagtttgtcgcaagaccccaccaacagaccacacct

SEQ ID NO: 1743 - DNA, 385 bp, Unknown
  Description of Unknown: unclassified Mononegavirales sequence
tccgcaaacaacaaaaccaaatcaggtcttagcctttagttgtgagccattgcggtatgacgtactggttttgccagtggacggaagtcgctgagtttttaataaaaccccgtagtctagcgtcaatgtgccatgtgcctatgtgtattgtatcaactaacgtatatgcgtgttataactaatacaaaactacagttttaagaacccagacgagtaattacagaattgaaaggcagtgatagaagagaagaaaataaaggatcgacaacgtgaaaagtacctgtggtgataaactaagcaatacaaaagattgtgaagaaaaaatagtgaaggaatcacagtgctcataaattttcaaagagaaaaagatcaataattactaaag

SEQ ID NO: 1744 - DNA, 386 bp, Unknown
  Description of Unknown: unclassified viruses sequence
gggaaaaacggttgcaacgttttgttccattcgcaggcccagtgttgtcatgggactagttatgcggatggcccacgggtgcgcgcagagcctgtgcgcgttaaaatcgttggagtcacttcgacaccccataggggctcctttggccggttggtggcgttatacactggtgatggggctccgtttcacggagctggacctgtttcgccgttatcaggtggtggtccctcgcgttcctgcatagcgagcctgctcaagcagttgggcaaatcctcgtggttctcaaggtcccgtaaaacaaggaacccgtgcgcagccccgactagaaacacgtaaactgttctacggggggtgctacctacctagtggtttcatagaattttgtg

SEQ ID NO: 1745 - DNA, 387 bp, Unknown
  Description of Unknown: unclassified Picornavirales sequence
caggattatatcgttgaaccattaattaaactgcggtatttcttgaacttattatcatgagaaagtcttttctatactgttttattaactattggaattaagatagttgttgactttgttatgaataaggtggtacctcagatttggaatttcattaagggaattatatcatatatgtttccagatgttaagattaaaaattatgaagaatatgctgaatctcaaagtccaattagagaaacacctggtaagaaaggtggaagaaaagcagtaagattgatacgagcacaagacggaaataatgaatttttaaatcatgctgatagtgtaatgaggcgtaatatgtttagtttccacttgattaaagtggaaacaggaaagacacag

SEQ ID NO: 1746 - DNA, 388 bp, Unknown
  Description of Unknown: Picobirnavirus sp. hypothetical protein and capsid protein genes,1 sequence
taacgtaatccaaacccatttgcgtcatatttcttgactcctttcataagtattcgcccttttgatctgaattcgtgagataggtacattgacctaccgtgttgaatcagagaagtagtagcacacttcaatcttttgtaggaagatttaaacctaattttcgaagatgtcaatgcatctccctcctttcggtagttctagtaaatttatatttactagaactaccgaaaggagggagatgcattgacatcttcgaaaattaggtttaaatcttcctacaaaagattgaagtgtgctactacttctctgattcaacacggtaggtcaatgtacctatctcacgaattcagatcaaaagggcgaatacttaagaaaggagtcaagaaat

SEQ ID NO: 1747 - DNA, 388 bp, Unknown
  Description of Unknown: unclassified Narnavirus sequence
gggcacacgcacccatggtgcattcggtctgctaaacagaccactggcgcaggtcggtgaggacctgcgtaaggcctttaacaaggccagggccgaggcccttaacttggctcagccaagaaccaaggggttcccccttgatcgcctgcgtaggcgattcgcagacactctaggatggagtgtcgtgttccagccgaaggctgtaaaggtcaagaccgaccttgagaacgtcccaaaatgggagccttctccagtgtggagagccgcaccaagaggtgcgatatggagatcttacaagatctcaagtctgctaacaacgatagcagtaagcggttggagagccaactgcacgcacgatctcgtgcgtcttgccataaacacatggcat

SEQ ID NO: 1748 - DNA, 388 bp, Unknown
  Description of Unknown: unclassified Hepacivirus sequence
tacctcctccataggagacacactaccctggcccacgtccgggactgggttgcttcttcccaactttccgggaagagcggcgcgtgtgtggattacatgttcgacgccaatgaagctagaccgtgcgacaccattcttcaggtctcggtgggtctgtaggctaaggcgcaagtgtatgaagcactgtggagtgctatgtgaggggggacccctctggggagaggtcaactcctaccactgacgggggaactcgtcagcttgtcggtaaagcggagtctgtggggataaagctgcacgcgtagacgctaaggcctctgatgcgcggttggtagctccacccagatgaagtgtaacggcgagtagggcatgccctgtgactagggggggg

SEQ ID NO: 1749 - DNA, 388 bp, Unknown
  Description of Unknown: unclassified RNA viruses ShiM-2016 sequence
atatagtatatgtgtattgtctaacaagaatattgctgctcgactatgtcgaggcttattcattggtgttggacgtgcagattttgctagttgttggtggtaccttttcaaacccctatctcagattttctcttggtttagaggacagagatgtctttaaatatgtggtcatgttctggcctactactctcatcatgttttgtgattgggtgattagttaatttgaatggttctggcaaatcgtttgtcagtctcgagatatcgaggctaaataaatatgtttggtctacgagccagttgtgttatcctttaaggaaacaatgtcatcactagggtgaagtacagtgcccttgtgttgattctatttgaactgtcccgtgcgctcagg

SEQ ID NO: 1750 - DNA, 389 bp, Equine hepacivirus
acctccgtgctatgcacggtgcgttgtcagcgttttgcgcttgcatgcgctacacgcgtcgtccaacgcggagggattcttccacattaccatgtgtcactccccctatggagggttccaccccgcccacacggaaataggttaaccatacctatagtacgggtgagcgggtcctcctagggcccccccggcaggtcgagggagctgaaattcgtgaatccgtgagtacacggaaatcgcggcttgaacgtcatacgtgaccttcggagccgaaatttgggcgtgccccacgaaggaaggcgggggcggtgttgggccgccgccccctttatcccacggtctgataggatgcttgcgagggcacctgccggtctcgtagaccataggac

SEQ ID NO: 1751 - DNA, 389 bp, Unknown
  Description of Unknown: Wenzhou picorna-like virus 14 strain WZSLuoII97619 hypothetical2 sequence
tttccaggaaatgccaagctctgggaacttctagggcgtccgaaacgcgtcctgtttatgttcttttgagcatcaaagccaaagcacagaatttgggactatgtactcggttttagtgaccggattgatagcccagctacctaaacttggaggaatcccaaatattggtagtcatgtggatgacacttggcgaataaaggcatagcaataagtcctactcttagctatctaggttccagaccttgagtcaggcctggttctgaaactaccgacttgcaacaattataaataacgaagacaagtctagtcaagaactagataatccaccagatgtggatgaaagaaccaccacagtccaagctgtaggagacactgaaactgccgaagtt

SEQ ID NO: 1752 - DNA, 389 bp, Unknown
  Description of Unknown: unclassified RNA viruses ShiM-2016 sequence
aacggagagatagaatctcatacccggtggatggcagattcccggtcacggccctccaatatcgcatcgcctatgacggctcacatcctgaaatagtggatttgagacctaacgtcgaggttgagggattgaggaggtccgaggaggggtcatccagatgggacttgggttcattctcttcacctatctcatactattatactgcactgtgccgagcgggacaactcaacgtcgcgcattgtcttgaaggaatagtaactacaatccaaaaacagatactgcaaagggcaatcagccccgaattcaaagatgatttcatacgcaaatggtttaaacatgtacacaatttcttttttacaaaaatatccgaaggactgggcaactcccta

SEQ ID NO: 1753 - DNA, 390 bp, Myriapod hubavirus
gcgcgaggatagacacccccgttcccagttttcgatcatacagacagatttctgccggtaagattccgaactgagctgtattgccaggtgactgatactactaggtagtatcctttcatttagataccctgaaaaaggtttttttgtttgtttgtttatttggtttttgtttatttgcttctattactttatccaattgtttttcctattaaattttagatttagttcaatttaaatctttgtatatcaattgtttcagtgcattttgttcaaatttgattctgtatcaatccattttcacttctaaacttcttatataaccagtatatcctatacttttgattatatattcatataatattttaaaaaaaccatccagaattgtcaatc

SEQ ID NO: 1754 - DNA, 390 bp, Unknown
  Description of Unknown: unclassified Marnavirus sequence
gggtttagaggctgactgtatatatgtaaatagctcggtgaacgtcactagaaaatagcggatgcctgtgggaaccatgggctaaaaacacaagaacccttcttgtattggataccatattttgtacattattaattagactatgtattttatataggcttgcaagaatgtagacacgccgctcgtggtgatgctgtatttacagcttagtcgcaattttgtctgattcctctgcgtagaataatgataactgcgtagttgtaacacctcattgccaacactaacaacaacaacgacggtgccgcgtcttatcaaatcggcacaactagttctaggataaattcaaatactgtaacgtttagggatggacaagagcagtgggatgctgct

SEQ ID NO: 1755 - DNA, 390 bp, Unknown
  Description of Unknown: unclassified RNA viruses ShiM-2016 sequence
gggggaggtgtaggcccccaattatctgacggccgggaaagaccgctggcagcccggaaagacggcacccttaaatgaaaatacaacatatacgataaaccctctatgcgcgccgatggcacccctactttcgattctgctcactgctgctgtgatcactgctatcttcggactcgcttttttgttgcacgcgtgcacttatgagcgaacctacaccaacgacgtatagacatccacagcatttcgtcttatgggtcagtagagctactttcatagtagtataccttgaagttttaaccacttttcaccccggaaggggaatacgcatccagttccgtttccccagactgtacgggccctaccaagtacccaccgctccagcagcgcctg

SEQ ID NO: 1756 - DNA, 391 bp, Unknown
  Description of Unknown: unclassified Anulavirus sequence
cgcatagcataagtgttgagtcaatttgcctttcgataactggtttttggattcattttcgttgttagctcaacgcttgtccgatttccggtgtgtagtgccccagcgtgttggtccacgacattgctccgcacttgttcgattggtactcgaggcctgttactagttgctctgaccctagcttgggtgagtgactttaaggctagctgctaaacccattgatcttgttgagtaaagcgtgagagttaggcccccgtttgtcaaagggctagactagcgcagcttcagatacaaggattgaggtgacatcttgaggccttggccttcaagctctctttgggtggtgtgacttacctgtttcaggtctcgtttataagcaaatcttgtaaat

SEQ ID NO: 1757 - DNA, 392 bp, Unknown
  Description of Unknown: Fish HDV-like virus, complete genome sequence
gacatttctctatttcgtcctcaatctcttcctttcttatcagcaatttcttgtattcatctccgagcttcctcctctcttgctcttctttctcctccttggggtcaggttcctctgaatccccaactcttccccgactcttagacctggatctccccccactcttctgcttctctggctctgcagcctctttccgtggaatcttggatttctccctttcgccctgcttagccctcgctagtactttctcagccatttcttggtttcttctcgagattcgggtggggggcggtctcttctggactactctccttgttttctatcaaaagaataactcgagtagagtcctttgaggcgcaccgcatcccgaggtatcgagatagagagtaaga

SEQ ID NO: 1758 - DNA, 392 bp, Unknown
  Description of Unknown: unclassified Picobirnavirus sequence
atgaaaggaggtaaaaccattgtttagatggtacaataatttacaaaaatttcaatcattattattttcacaagcaattgaaactatcactgaaatcatgacaggtcagtggtgctttcataagcaagtgaaagaaaaggaggttaacatgacacaaaatcaattaagctatcttgggttggaagaaactaagcgtaataacatagtaactagcgctgaaatcaatagacacaatttagcagatgaaggtattcgtagtgccgcgaatgctgaggctggacgtcacaatttagttactgaacagcagggggctcaatcgttgaaggaaacacagcgatctaatttagtgaaagaagcgatttcacgcgatactctgtctgaaactgctcgac

SEQ ID NO: 1759 - DNA, 392 bp, Unknown
  Description of Unknown: unclassified Picornavirales sequence
gtcgaaaccagatttaactctggtgtagacggcatgtccactttcatatttaatttaagttattaacctcattggttgatcaataattataacaacaacttaggttagcgctgtagcaccatcatataatttatgatcggatggtgtgaggctctagcccaaagcactccgtggggctgtcactgcgacacattcccacaagtcaaaacgatagagtacgtagccacgatgcagccgaaaggtatcagcatagcattgctcactgatgtagaattattattccggcacgtggtatgtaggattgggaaatcctaccttagacgtatactccctgataggggcgcggcaggtcgatcgtatagactttaaaacctgttgaaaactctctcaac

SEQ ID NO: 1760 - DNA, 392 bp, Unknown
  Description of Unknown: unclassified RNA viruses ShiM-2016 sequence
tagctagactggattctagctgtgacatttgatcacttctctttttatataaacttcaggtaataaatgagaagaagctatgtcatgaaagtgggagtccctattcagggagtatgggcctaggatgccttcttaattgatgacgagtcaaataatgatccaggtcccctgaagtcgaagtgtcagtgattgagctgtcaggcactttagattagtagcttactgataacaataataatagttcatctcccggagctgggtccgaggggacaaaagattacacagaaacccagcgttcagcccatgtaaatgaaactgtacaatttcaggagggtggtccaacttacgtcgctgaaattacacatggaaatgatgttactttcgacgatgga

SEQ ID NO: 1761 - DNA, 392 bp, Unknown
  Description of Unknown: unclassified RNA viruses ShiM-2016 sequence
cccccagtgacctctatcaaatatctgtttagttgatgtctagggctattgagagactcattctgatcactgtgctaggctgccttctcttggaaatctttgactacatacagagaaataacaaggaaagtgaagtgactgttctcgggagaggtgactgtgttatatatacagggaaaaggttttgtgaggaagggaggaagttgagctgccctggtgtctatgaggatttcttctttgtaacaggtatcctgatttcaaaaggtttttcattggctgctattgcaggttctgtagcactgctagcatttgtttacgggaaaataacccgagagttgagaaccagcgaagtgatagacagacgactggacagggaagaagttgtgtaaagt

SEQ ID NO: 1762 - DNA, 393 bp, Unknown
  Description of Unknown: unclassified RNA viruses ShiM-2016 sequence
tcgttcttgctgagtgtttgttaaccccagcaagtttcaatcattgaacttttggtgttgttgcaccatttgttcatttcttttccttatggaaaatacaattgctcaggagcgtttgctttctgagtttatttctcttttaaatattcttagtgataaagctaattttgttcatcttgacgaaaggtttcgttgtttagtctgtgtaattcaatacggttctaaggttgatagcaaactttttagtgaatctgttaggtatattaagtatctttgtcataaacatcaaatttgcattgcagttttatccacaggagtttttgctaggtcaaatacacatcccaattgctcttccacagttggttattattgtttccgctgtgatccttcaat

SEQ ID NO: 1763 - DNA, 394 bp, Unknown
  Description of Unknown: unclassified Narnaviridae sequence
cctgaatcggaacataaggaaaaggctttcgccttacccatttgtgacggttaaggggcgacgggcactctgtaagagtgacccgcctcgatcgcgatgcgctgttcgtgcctacttcattgcaggctctcgcaggtcaaaacgatcaatccctagtcgtcgaattaatccgtttaccaaacagttatggaaggctgtttggtgtggtcttatctcttgtggtctcggaacacgtgctggttcttgggaattgaggaggtggttggcgcactctgttgagcgcaacggctggctctgtgttgcaaaggagttgaaggacctttgcggttggctgcgagccagggctcttaagagcactggtaagtgggattccaacacacacactcatattccc

SEQ ID NO: 1764 - DNA, 394 bp, Lophuromys jeilongvirus 2
tagtataacaggatctgaccattaagcactccaatcttaatgcaaattaaccttgaaccaacactatcaaagtacgattatatgcattggtggatattaattgactaaccagtctaataattattatattaatctacatagcaagttcaacaaattaattcatgcaattataatcaacacacaaattggtagaaaataaggtcatgattaatgtataggataactgatggcttactgacaaatgaagtacttacgacttcaaatattcagttagaaaaaacttagggtcaaaggcgagtcaagccattaaaacagactttaaagtgtgcattatcaccggtacgataatagaagtaggcttacaatttagctagatcttgttaatgcaattaac

SEQ ID NO: 1765 - DNA, 394 bp, Unknown
  Description of Unknown: unclassified Riboviria sequence
ccatgtctaattacaaaatccgttcaagcggcgaagccaaaactgtgttagtgaacccaacgacatataaaagtacgttggaaataactcataagtttaagcgagataccgcgctcaacgtcgatcaggtccgtattggtgtagcttcggcttataccgataatattaagacctgcaaagacgcatgtggactcgtacgccgtgaggtagtaaatcttgaaatgtccgttcttttgggcatggaagatgaatactacactcgcagaaaacaacagttagcggatacgctagctgcgggccaaaaattgttggaagcattcgacgaggtaaaactcggtctcgtcccgtcaattgaaatcgacgcgacagtctcttaaccttataaggaataatt

SEQ ID NO: 1766 - DNA, 395 bp, Unknown
  Description of Unknown: unclassified Picornavirales sequence
gccacaaaaccatacaatcgttggttcttgtcttaattttgatttttgagcgccagatttcatacagtcgtcagctaataactttgcagcaggtagcagacgagcaataagatcagtatttgcgcgatttaatttaatggcagaccatcatatatgtaatctttgttgaccatgatcttgtttccattaatgattttaaatattcttccgaaattaattcaaaaatttgtttgacacaactagccgattatattggttggttctacaatcatccagaccccgataatttagattacacttctcgctatattgctgaaatcttcgcttcatttatatgttgtaacttgcatttcactaatccactcgcaatttctgagtcagagttctttagtgat

SEQ ID NO: 1767 - DNA, 395 bp, Unknown
  Description of Unknown: unclassified RNA viruses ShiM-2016 sequence
agaccactgaccttgaaagtcacaaaacttatcacggtgtagtagcatcgtaaagcaactacaatgtttatgtatagttactgtatatatgtgagtttttcatcctttaatttgtaagagtggatacataaataaatcctgcatgggcgttccccgaaatctgtttttacagatgatgttgctggacatcaaaaattgaaatcgcagtgagaaatgggaatattcttagctgttaaataaataaataccttcccggaaatcttttcaaaaccaaacaaaataaaaacgaggagggagtgaaatgctccacacccggttttcgtgcctactctaaggaagaatcacaaaagttcctaaatattctgatcgatgattatatcactagattagaagaa

SEQ ID NO: 1768 - DNA, 395 bp, Unknown
  Description of Unknown: unclassified RNA viruses ShiM-2016 sequence
ctggatagtggccattggcgcttatagggagcgcttagtgtacagtaccctccgccacccgggcattggctacgggtggcggcgtctgcgattgccgaaggacacgatagttcgatttagccgtggctagctgtagtggttggtggtgagtccaggtgagaaagcttggtaaccaatccgaccgcggtgacagtgaaggtgaaatcaaacaggggattccgccaaccccggacgttgtagctaggcccatattagagggtccgacgtagccagattttggatttgttctgtaaacatttccagggagctgtagcggtatactgcagctggtgtgaccgaccataaggcttagatgccgttttaaataaagtcacccctcaatttttcaatccacc

SEQ ID NO: 1769 - DNA, 396 bp, Unknown
  Description of Unknown: unclassified RNA viruses ShiM-2016 sequence
ggggaactggtcgagcagcctcgagttgcgtcggctggtacggagggagtcgtcccgacactccccctaaaggttgcggtggctgcagacgggtctgcagtcggcgcaccagtggtagtaacgcctgagcaatcaggagccacaaaagcgatccggaggccccggggcggttgcgccgttggtgatgatgttgcggaaaagccgtgtgggtgtagaaggaaagatggcacgccgtatcctttcgagtgtgagacctgttactttgaaagaagtcacagggagagaaagcaagagaccatcaagaaggtgaaggaggcggcgaaggttacgaagaagcataggtgcagcaccaggcattgcatctatcgagacggtgccaggaagagcaggcactgg

SEQ ID NO: 1770 - DNA, 397 bp, Unknown
  Description of Unknown: unclassified Picornavirales sequence
ttcgcagcagatttattgtgtggaggattactatttatttagcgtacctatcacagtgaacctaggattagtagattacgataatatagcgtacctatcaaagaacctatttttataagatgcattttacatattcaatcatatttgcttgcattttaaattcataccttgttccagtagcattcacggttagttgagaaatactggttagtgcgttgtatctacaggcatgcacagaaatcactgtaggggagatcacaaactcgattaacaatgtgcgccgaagcataccggagcgatatctgtatgcgccccccttacgttctaagttacaacctgcccacgagagttaacgatttgtcttttgaatttacaaactacaaattaaactttaaaa

SEQ ID NO: 1771 - DNA, 397 bp, Unknown
  Description of Unknown: unclassified RNA viruses ShiM-2016 sequence
cgggggggtctatacccccccgttatgaagaaaacatctacttacgtctctcactttttgaagtgttattttgcaagtttattgttcttttcgccttttggccaggcttatcacctgatactagaaacgattacacatacaactttccccattacgttacacgtcacaacttatatatattttgcagtcgttattcgaatgcgcttaagattatcggctgtatatatattcggaagaaaagttagtttggcagctgacaccccgttattatgtaacatagagatttatattgacattttatgtattcggggattcatgtgacaggagttgggctcttaattgagtccttcatttgttatattgccaacccttttataccttcctagcgaatagcgat

SEQ ID NO: 1772 - DNA, 398 bp, Mammalian 1 orthobornavirus
accgtaccgaccaaactcttaaaaaccctcttctcgggacagaggtctctttctgccttaaatcgagttcactcccccatcacgtacgagcattgggccagattaaagcaaagaacctggcatcctgtgactattacttgctattccgccaagttgtattgccccctgaagtatatcccattggtgtcttaataagagctgcggaggccatactaacagttatagtatcagcttggaagctggatcacatgacaaagaccctatactcctctgtgagatatgcactcaccaatccccgggtccgggcccaacttgagctccacattgcctaccagcgcatagtgggtcaggtctcgtatagccgggaagcagatatagggccaaaaaggcttgggaat

SEQ ID NO: 1773 - DNA, 398 bp, Unknown
  Description of Unknown: unclassified ssRNA viruses sequence
tacattctggtttccccaacgatttgcattctgaatttcttcgtttactttataccccccaacagcttgaaaacccggacctcaacgtccgtcgtctcccgcatgtgatccgctcacaccctaagttcgactccgacttaattcttcctcaacagattcccattacttatggatctaaggaaggtcgtacttgggttaatgatcgtcgcgatccttacctgacgccattcgctgttaaaaacaaattagcttttgaattcccccgccccaacggttccacacaactaaaatctttcggccctgaccccttcgtattcgtcggttccaacacgagatacgccacttctgacaagctagcctaccggctacgcacctggcattctcgtcctaacttggac

SEQ ID NO: 1774 - DNA, 399 bp, Unknown
  Description of Unknown: unclassified Dicistroviridae sequence
tcttgctaaactgaaacaaattctcggatataaattagtttagtagtgctatttctcagacaggctgggctatttagtcttacctcccaggatggcctgtggcagccccacaatatccagggtaaccgagtatatgattaagagattaagtcgtcctttttcatgaatatctgacttgcgaataacgatacaaatacgaatcaacaatctcgtattaaaactgatgatgttacttctgctcaagcatctgaactttacgagattgctcctgaaatttcaaattcagcagagcagcgtgtgcagatcacagcatttgctgatgattctgcagttttagccgaacatgtccctggtgaggctattttacctaatagggacacgacccagcatacagatagc

SEQ ID NO: 1775 - DNA, 399 bp, Unknown
  Description of Unknown: unclassified RNA viruses ShiM-2016 sequence
atgtaaacaacatgtatacaatttcttgcaagactacagttggtagtacgttacaagtatttactgacttcggagtttcaaaaagatgatatgcaaaagcgtaagtgattctcgagacgatgatgaacgaaaacaacttagtcaaaaagatctgaaacccagaaattagatttaaggcgcacattaaatagtaccaactcagaaatgagagagatgatttatatacgtgcaaaattgaaaatggaattgtagaacggatttgaacaaccgcatgttagacatgtattatggcggtggaagatacagtataattaattatcactatggattaatagaactgtatatgcctggcctccgaaaggtgattgcaggcaatccgtgagggattaaaactcatca

SEQ ID NO: 1776 - DNA, 399 bp, Unknown
  Description of Unknown: unclassified RNA viruses ShiM-2016 sequence
gccaaacaaaacccccgattacaagaacaatcgacctatctttataaccatatcgctttatatcacacagatctaaataatttggctagatgtaatactcttaacaggactgtaataagagaagaatggatctctcagtcagcaggagaactaaggaatctacctccaattactgttagtctattaacagaaagaagggcattgattaatattgagacagaaagtccagaagctaagggatctagtttgggaactgagagcacaaaccatataattggagatgagcaattaagaacctttgcccatgatttcacgttcaaaatactatctgagaagacggatgttcctcttatcaagttttttgaagcatctggacctggtgataatttaacaccagat

SEQ ID NO: 1777 - DNA, 399 bp, Unknown
  Description of Unknown: unclassified RNA viruses ShiM-2016 sequence
cctgagtcatcccaaggggggtatgtgtacattaaggatgtcaacaaatcctttttaaatgccctaacaactgaccgccccaactcaatacctagcttggatttggaatatgattatgtcgttcgtattcaacatgatcctagatctcacatcgacttgtctttcaaacctacagagcagtttgtgattgtcaatgtaaagaagagtggttccatttactttgaggatcacaagtattgtctttcaggccattctattaggaagtttccccatgattttactctccgtctcttgagtgttttgcctgagagacacatttatgaattctttcctgatttaaaatcttctcttaatgagcttagtcctgacattgttttttggtggcaggatgttttctac

SEQ ID NO: 1778 - DNA, 400 bp, Unknown
  Description of Unknown: unclassified Jingchuvirales sequence
gaccccttggggacaaagatccacacaccacacactatttacctacttaactaactaccaaagcattgcctgggctttttcacaggtgtgttctcgaggttgggatttaactgggataatgtgttgactaagatgtatcctgaagaggggggataatacactatctccagtaagaaataagaggctcgacgtataccctaacaattaacatctgaacgtataccattacatcgtgacagataatcctggatgaattaacctggaaactgtatgagatatcctttgaactacccgagggagaaattaagagactcgatgtacaaaggacagttccgagggctgaattttcagaccccaaaaggtgagaaaaacatctcacaatctttaaaaactgtttgct

SEQ ID NO: 1779 - DNA, 400 bp, Unknown
  Description of Unknown: unclassified Hepacivirus sequence
catcgtgctggccttacggccggggttcgccccacgtaggtcactatgtgaccacagcgcggaagcgcacgtcaccttaacctattggtaaggcgattcactaccctctagcagctagctgcactcggaccagattctgtatccgacactacataagactagcgtacctagggctaacgtctaacgtctcaggtacggggccagtccgccggttagctcacgcgccggctgatcatgcccttaatcctgctctgctagggttagaggtgaaaaaacattgtgcaagtgaagctatgaaaccatccgtcgtcgagtgggcttgggcccccactttaacggacgatgctacagcctgatagggcgttgccactaccttgcactcttaagtggttgtaacaca

SEQ ID NO: 1780 - DNA, 400 bp, Unknown
  Description of Unknown: unclassified Iflaviridae sequence
gccccttaaaatttaattttaaattggaatatcttttgatactccgactgtttatttggtaaccccaactaggcagtataaatacaaattggaatatctccggatactccgactgtttgaatagtctctatttaagcagtataaaccaaacaaaagcgattaaaataaactttaagtggcagtgtttgacttggtaattttatcactcaaactaggagaaatccgaatcccagaggacgcacttaatagtctaaatgaacaatttttcaataatagaaatcgaatctagcaattttgaaagcgacacgcgaaattttgaaaacaatccatataataataatttaatagaacgttttgaatttgttggtgaaggaagatatcttatagaagaaaatcaaca

SEQ ID NO: 1781 - DNA, 400 bp, Unknown
  Description of Unknown: unclassified Picornavirales sequence
aaacgaacacagagataaatactaataggactacatatagaagtgtaccctattactactcatctgaataataagaataagaatcataagaataagcgaagcacactaggatatatataatacatatatccacgaataagtataagataagtacaagaattcacaatatcacaacagcaattgcaaatccagaacgaaagttcatcacaattcaatacactattaatacataagatacaagaagtaattgatacactatttgaacaagtcgacaacgataagaaattacaatatctaatagataaagtcaattcactatatagattggttaaagattatacggattcacaaacagaaactataatagcatatataaataaagatatcgataataagaatc

SEQ ID NO: 1782 - DNA, 401 bp, Unknown
  Description of Unknown: unclassified Vitivirus sequence
ttagtttcggtagcagtagcaagtatgatcagattaggtatagatcggcatttaataaattagtagtttaaataaagtggcggatagtggagttgtgctgctaaagtctttcctgcgttatcacagatacactaaggaggaattctttctgcttgcagacattaagggagaaagcttggtggattttcacattcgatcgagaggcaccttgagcgttgaggatttaaagaaggtagcgaacgacaatttctcacccgagaatttgagttcgacagtgaataacatcctcaatttcaaaaagctgacctgtgaagagaaggacgttctgctatttattggtccgaggattgtggagatagtgcctcccagatactccagcggtttacactacagcacttacc

SEQ ID NO: 1783 - DNA, 401 bp, Unknown
  Description of Unknown: unclassified Hepacivirus sequence
cactccccgaggggaatgcgccagccctggccttgttggacagggtagcgagagggtcactccatttttctttacctctcgccactgggctggtcaatggcacagacgtgggacgctataagcctccgtggtctggttggctgtagtctggccggtctagtgggcccccttggaatgataacctggaagagggctaacgtgaactacccggacggaactccggggcttgggattgagcgcaccagtagacgcttcggcctctgatgctgggttggtagccgcctttatggtacccaagttgggcatgcccataggaatcggggaaggcgttgggttgcctcctgcctactgcctgatagggtcgtgccgtgcgtccaggttcttacggctgtataacactt

SEQ ID NO: 1784 - DNA, 401 bp, Parechovirus A
agaggtcttttacgtttcgaacaaagacaatgtctgcaagatgattaaagagctttctttgcatcctaagtcgacctttgatgaacattgtccgaagattttacgcgcttgtagagaaaatttgggttttattccgtacccgaatacgtatgatgagtgtcagagagacatcttgtcatccggaatctgttgggaatgatggtcgtaatcgactacaattggagtgaatttaacgtcagcactaaaagatgccttgaatatgctgagggacactcccaggtgggctatttagccttacttatcaacttacctgagcagcagtcctgctaaaaagttaggcaaacaaaaccaactcttagggattaagtggtccctaagttttaaacacacttgctgaaact

SEQ ID NO: 1785 - DNA, 402 bp, Unknown
  Description of Unknown: unclassified RNA viruses ShiM-2016 sequence
gtgtgcaggagctgtcactgtggagacaataaatccaccccagttttaaatctgatggcagcaaaattaatgtgtgtgtatggataccacgagtacaatatctttatatgttttgtaaacttactcgtaggcttcgcatgcagcaagggtccctaatggggaacgaaagtgagtcctccctgctcaaacggaaacatgtcgttccacatcgcttaatccagcgtgtggtctgtacataaaaggattggtaattgtaaaaccaaaattctcggcttaataaaccgacgtgaaagttgtccacccaagaagggtcacgaaagagacaacacagaagccggcgtcagctggcaagactggaatttcaaaacccagtcaggagttgaacaaaatgatgcctacatc

SEQ ID NO: 1786 - DNA, 402 bp, Unknown
  Description of Unknown: unclassified viruses sequence
accatctacactccccgttccagggattcccagcgtgctagggtggcacgtatctgctccgtttacattatttgagcagggctggggaactgaatggcaccggtgtggcaccgctattgcgctgcgtgaccgggttggctggagtctcagtctctccatgcgggcctggacggaccacaggggaggggagagagcaactgaaagtgtatccatgagtacatggagcgctgcagcgagcgcacatctaccacgcttcggcctggctaagatggttggtagccgcctatatggtactgcagtagggtatacccgcactggaggggggatagcgttgggtcgctccctgcttactgcctgatagggtcctgccaggggcccctcccttctggctgtaaaccactt

SEQ ID NO: 1787 - DNA, 402 bp, Unknown
  Description of Unknown: unclassified sequence
cagacgttagtaaggcagctctattcattatcatatgaaggtttggatacaagttagctatcgtataggatggaccaacgtatgttcccactccggtcacaacctcaatttcaatgcgaattaatcgcaccatgtggttcggattgtaaccctgcttatgtgtgacagatgaaatagcaaaagccaattcatccacccaagatgttgcaccaacatctaacatgccattacgtatattaacgtatggcgtgcgcgatgtatgcgtgcgactgttagttaatggccccaagcgaccttcgtgatcaatgttgcggtaaataacattgaagcttttaagtctcattggttcgtcagtgattttgtaagaattaactattctgaaatcaaaatcttccaagctac

SEQ ID NO: 1788 - DNA, 402 bp, Unknown
  Description of Unknown: unclassified Picornavirales sequence
gacagctccacactggaggctatatgctacgggcctgttaaagagccagagctcctccccggatgtagtcacaacgttccagtctgcgagtgcaagtgttcaagagtcacaacaaaactctttgacttcataccagctattccgtcgttggtatggactcataagtcatgtgtttgtaatgaaaaggtagcactttcattgcgtcatcagattgatacaggcgatcgctatgcaaccacattagacttacgttctgtcctgaagccctggatagaacatgttagccccgtttcacctagtgttataattaggcatgctacgtcacgtaagaggctattgttggaacaagctcttgaaagtttgaaaggtgaagaattatcagttaaggacgctaaggttaga

SEQ ID NO: 1789 - DNA, 404 bp, Unknown
  Description of Unknown: unclassified RNA viruses ShiM-2016 sequence
ctgcaaaataactgtatataatttatttgaggtgtgtaccatgagccagtcacatcttttgtacaaaacggcttactacattgtataggtgcaaggggagcacgaagtcaatatccccctctaaatacttgggtaaaagtacgatttgccaagcggtggatgccgcgaaactaccaaccgttccaaggaaggttaagatagtgcgaactgcatcttttgatgaagtgtgtacagcatacgattcaggagatcctagggagccgatctactattctgcggaatgttctcatggtgatgttttggatgttcagtccggaactgagaaatttggagttactatcaccaaaccagctaaaggtactaaagagcagaatgtatcatttaatgatcaaaatccttctttc

SEQ ID NO: 1790 - DNA, 404 bp, Unknown
  Description of Unknown: unclassified RNA viruses ShiM-2016 sequence
tggagattgtgctatccacccaatgttaattctgggaaaattgcacatgtataacatagttacttagccctaaattagtcctacatgcacagtagggtgagaggatgttatgcagcgtagcttagttgccattacgttttgcgcgcgttgtatcgtaggttttcgagcaagcttcggtcggcttgtttgataaaatttgaccacctgtttctaatcataatattttgacgtttattgatgataacgtcggggaggtgcatgctgcaccttccattactgatcccacatttcatcgtggtgaggatcatgctgcccccttttctggttggttttctcgacccttgcgtgttgccagttattcttggtctgagggcactcaactggccgagggttttaatccctgg

SEQ ID NO: 1791 - DNA, 404 bp, Unknown
  Description of Unknown: unclassified RNA viruses ShiM-2016 sequence
ggaagttccctccctggggcctcctccccttcctccaatgggttaacattggagggggtggtagggcggaggccgccctgcccgagtactactctagttggccccagttccgtcgggcacttgaggggctgcgggtcaccagtagtaggctactgctcgcgagcagggaggccgaggggaaactcttccagtggcgtagggaaaatggtctcgagtggtctcctgcgtggacgacatctgagggggtgtgggccgggggtgacccgggcccccactccctcggactcgacccccgcggagcccgcgccctctcggcgtgcaagcgcctcccggctaccattggccaggacagcgccgctgccgcccatgacgcgtgggtcttgaggccactcaccaaggatgag

SEQ ID NO: 1792 - DNA, 404 bp, Unknown
  Description of Unknown: unclassified RNA viruses ShiM-2016 sequence
tttatgactaacattacagttaacagcaaaactttcaaagaagtagctgaatacccagatagaaccgagtattctaactcggcggttgcgactacgtcgccagagtcaatttctattacacaaaagtggaataagaaacctaattcaaaaagatcaactacactgacttgcagaaaagttgtcccatataagaatgagaatggtattgatgttgttgaagttattcaggcatcaattcgtttaactcacctaccaggccgtctggctaatgataaactagagactattcagaatctatttaaagatctcttagctgttgcatctaattctgatgtacaggtatccctagttgctggtgagcataatttgactctttcactttagtaaaacttaaaggatttata

SEQ ID NO: 1793 - DNA, 404 bp, Unknown
  Description of Unknown: unclassified Riboviria sequence
ttaaccttcctaggagaaaatccttatgccacaagcaattgagctttatagcaatgcaaccgaagctgccttcgtacaccctgaagacgtcctcactcgtgcgcgtttcacacgcaaactaagtgaaaagactgtcaacgggcttaagactgcaaaccttcggtctgagattatcttaaaccaaacggtcggcctgcgcgtatgcgagcagacctgtgctggtgacgaggtactttccgcccgtgcttcaatatctggttcaatcaagaaccatgagaaggtcgacgcgttagtcgacaatttgattgcagcgttacaacagtggaaaacggataagggtagccgaggcttccctgttaccgacttcacgtttaacgattaacaattaaatcaacggagggtcc

SEQ ID NO: 1794 - DNA, 405 bp, Unknown
  Description of Unknown: unclassified Pegivirus sequence
tggctgcaagtccttttggacttgcagtcagtattgtgtttagttgcgttaaaaataagccatcgtcgtttagacgatgttttgtttgtaattatcacctttttctcggctttaaattgccggcttttgcgaaaatttaccctttctttgctacctacaactttttgtagtacactcccttgtcattttaggagagtatctagcttgatactaagaaaaacgccgtatgtgtctgggacgcgattcggctacctttatggtattgatgacaattttatcttagtttagtaaaactaagcatttcttaatgaccttagaaatgaccaaggccttttatgtacacccagcagtactttatgtgctgggtagtgaagtagcttccacgattggtgctacagttcaacc

SEQ ID NO: 1795 - DNA, 405 bp, Unknown
  Description of Unknown: unclassified RNA viruses ShiM-2016 sequence
tatgacaaataaagccatacttctccaggcaactggatcgaatcgcgtgtacgctcaccccgaagacattacgcgaactgttagccaaaaattacagctaaaagaacgcgtcgtcgacggtaaacgagtaccacatgtgagaacagaggtgatcctcggtaggcaagctccaatcgctgtgtgtgaaaacacctgcgctggttttgaaaacctcagtgtacgtctaagtctgagcggcagtttatctaattctgctgccctagacagtatgttggaggaattaaaatccatcattgaccgtgccaagagtgacaaagtcagcaagggcttcccgttaactgaaattactttcaatagttaaggaaggttaatgtgaacacacaatctcgcgcgcgagcgccgaaa

SEQ ID NO: 1796 - DNA, 406 bp, Unknown
  Description of Unknown: unclassified Riboviria sequence
gttgggtgtgtttggggttgtagacgagcgatatctccaagagataagcctaattgcaccgatcagggaagacaatttcacaaattacgagttcacggaggttatctaccgaaagggggcggcctcatacttgttgaacattgggattcacaaggagacagaagaaagggctgtgccgggatacgatcaccaatccctttgcgcggcactcgggaagatctgcccatttaagggggagcgatctatccctaagggtgtatctgatgcatcagttacgatcctgaaccctcaacggattagagaactatcgcaggttcttgctgcattgcccaagataaaactcttcgatgagactggggggatcaacatctctatattgctagcactcctgcgatggattcccggt

SEQ ID NO: 1797 - DNA, 406 bp, Unknown
  Description of Unknown: unclassified Anphevirus sequence
gtgccagggtggatcaatcagatctgaatgtatcatatgtgtagaagtcagtgaaccctccctagaaccgaattgagtgtttcacattacgtgtcaggatgtgtacagcaccaaacgcacgattagaatagttcaattgttgacgagtcatctcaacacgctactggacttgtgaatgtccctccacttgattgcacaatttttggattttaatctatttttaagactatttttactgggctaacgggtgtgtaatagacgtcttccttgttgactgtctgggttaatgtttgaatctcgcttttaacttttggtattacatatatattaaaggcccttttgcctcatatcaatatctctgaaaaaaactaacagatttaaattgatcttaattgtgaattcagct

SEQ ID NO: 1798 - DNA, 407 bp, Unknown
  Description of Unknown: unclassified Riboviria sequence
ggagtatatcctatgcaagcacagaactttagtgtaaccgtgacagacggtgaaaagacctttgaggtcctgtcacctgccggcgcatcagcgcctgcggaattccgtttacaagacgacggagttgcgcctacgctcctcccgtacttatcaatcaaggcaggaaaaacaaatggtacggcaaagcgccgcgccagtattttgtttatcaagccgattgagaaggacgggctgcgtattgggcagaacgtttttcaaattacaggtacgattgatctaaatcaacccgcatctgtgactgaaaaggacgtcgagttgctgctcgaggtcatgaaggaggactttatgaaagaagtcctctccaagtgtatcgcccctaattaaaagggacataaccaggagaattt

SEQ ID NO: 1799 - DNA, 408 bp, Unknown
  Description of Unknown: unclassified Riboviria sequence
ctgaaagatagcaaacagattataacaagtaggcatgattatgttaccctgctcgatgggagtggtaaacagtcttgtgatgctgtcaaccaggttgattcctcaacccaaaatacggatggtacggtcagcgcaagcaaggccaaatataaccaaccgcaaaacccgattaaccaaagggtacggaaaaaggtccgcgtgaagcggaatgatttgttggacttggatgataagttcatacccgaacaggccttaaaagccttaagggatcaagagagacgtggacaggcgcggtccacggcgtcaaaaagacctgcctacgtttgcaatctgtgtggacgggagtgcccccatgtatgtgattatgtatatatagaattagaagattggcaaagaatcccccaccaa

SEQ ID NO: 1800 - DNA, 410 bp, Unknown
  Description of Unknown: unclassified Hypoviridae sequence
ctcgtatccctcggtgattgaaccattgaatgacttgtgaacgtatgctcctcgtctgacaaatcctccagctccagtagatggtaattcttcgacatgttgattcatattgttacgtatgaatttcactgtgtttggttttgttgttttgtttgtgcttcgaacagttcgtttttcttctactcgttctaatggtagagtagtttccctgttgtgtgctttgtgtttgcgtattgtaataccagtattcagaaccttctatatcgtgatatagaagccaaacaaaacacaaacacaaagcacacaacagggaaactactctaccattagaacgagtagaagaaaaacgaactgttcgaagcacaaacaaaacaacaaaaccaaacacagtgaaattcatacgtaacaat

SEQ ID NO: 1801 - DNA, 410 bp, Unknown
  Description of Unknown: unclassified Riboviria sequence
ctccgcaattgagttctaaactacgagggtggtatttaattcccggattacttaacgttcccgaaggccgtagaatcttgattactttagacggaatccaaaaacgtggatttcatcctgaccagtgtgatttgtttacccgactacaagatactaacctcaaaattgctttgacagcttggtcgtttgcgaacgacggggcttcaaaatacaaatactccaacagcccaccctcggactatccccctgagggacatagagctgttcattggctagtagattctcgcacagctggcattactaaaagctggctatatatatacgattggcacaatacaactggtattataaccccaaacaactttccattcttcccggatagagacgagtttgatgtatcagctgtacgc

SEQ ID NO: 1802 - DNA, 410 bp, Unknown
  Description of Unknown: unclassified RNA viruses ShiM-2016 sequence
ccctgtaattttatatgatttgtagtagtaaacaccagttcctccaaactataagttacactacacaaatcatataaaattacagggtgtaaagagaagaggtactggtgactacgctgcaacagtgtttcactagcttaaagtgtgatagtgtttaagtgtgtttaattgtgtagtattattgatccagtattttagatatagttactgtttgttctcgcatcttagggtttaatatttatagtatttaataacaactgtattagtagtgtaagtttgcagtgagtgtttttatcctttagcacagcctttcctgaccaaatatagagttgttgctattgttgtttcacaagttaatctgcgtgcctgcttagattagaataacttttcaatatatcagtgttacttat

SEQ ID NO: 1803 - DNA, 411 bp, Unknown
  Description of Unknown: unclassified viruses sequence
tccacttgtaggctctccgtgtcacgactgatccatcactgtgggatgcatagtcacaccagcatggttagatcaggaatggcagactatgtggttgaactaggtcgaagtgcgtgtatggaagctgtggagactcggaggatcaagtggtcaggagtcatcctagatggattgaaactaggaggggaactacacagcttacagactatagcgggtcatgtcactgcatcaggaaaatgtgaaggatcttcatactcagaccaatttgggagctggacaggagttgtggtgcaggctgaaattaagatgttcatagacagatatgccacaacagcaaacatcagaacgggggatattacgatcagagggggcctccggtgcgaatgggagtcttagtcatgtttcgacaat

SEQ ID NO: 1804 - DNA, 411 bp, Unknown
  Description of Unknown: unclassified Carlavirus sequence
tttgccggggatgacatgtgcgctaataggaagttgaggcttaagactgagcatgatggattccttagtaaactgaaattgaaagctaaagtggatttcacagtgcacccaactttttgtggctggaatctcactaagtatgggatatacaagaggccagagttggtatttgagaggttatgcatctcaaaagaaaatggaaattttagagaatgcctggacaactatgcaatagaacttagttatgcatataaacttggtgagaaggcagtaggcttgatggatagtgatgctgtgagttgttattaccaatgcattagaataataatcaagtggaagcatttacttaggagcagtgtggctatagactttgtcgctaatgtggcttaggtttcttgccataaattgaat

SEQ ID NO: 1805 - DNA, 411 bp, Unknown
  Description of Unknown: Hubei picorna-like virus 77 strain WHCC115343 hypothetical protein1 sequence
ctagatcctttgaaagagttgtttggtagttatattccatacccacatcagaatcctgtctccgattttcttatcttacctagttctctcactactttcaataccaatattgatggtttagttaaagtcaatggtgagttttttgattataactggcgtggttatgtacgtatagttaccggtttttctgcaacccaaattggtttaggttatggtcttcgtatttatatagagggttctgatcctagttatcgagctggtgtaactccatgggcttcggatgaaggttttgaaaatttccgtaatccaacaagtcttaagaaacgcttttctaattggaactctactgtatggtatactaatgctttaacttctaaaacaactctttctaattctggtgctagatattgg

SEQ ID NO: 1806 - DNA, 411 bp, Unknown
  Description of Unknown: unclassified Fusariviridae sequence
gttccataaacacaccttcgtgatgaaactggtctcacggagccgccaaaatccagtgtttgggatgtttaggttggcgaccaggggcacaaccctctgtagcttggctggaacgggtgcgtgcaacgtgagtacacgcaacatgtccgtgcaagggaacctgctagccagtggtccgttaagacagtggtgtcttgaacaggccatccatttcaacatggagaacccgagtgtaacgactgcgaagtctttaaacctacaacatgaacagtctactccccaggccttttggttattgggtggtgtgttagagccccaaagcaaccttttggaccgccggcttaggcccattgatagagctcacatcaaacgtgaagtacctcaccagtcttcacccacgatacaacactg

SEQ ID NO: 1807 - DNA, 412 bp, Unknown
  Description of Unknown: unclassified Ilarvirus sequence
agtaaatctacccatcttcctcccaccctagcatgacgaaaatccagaaatggagattgcctggtgcgatgtaaaacacaaaattcccggcggacttcagattccttgaggtccactcggtctttgaaggtccctgggggggagttgggaggcgaccccgtaaatttactttacgcaaccgaattcaagtctttgtgagtgtcagattgtgtcgtcgttcgtgaggtgaatgctgtcgaggaccactccaattcaactcactcgtcagtcacatagtccataagacttaggaggttgtagtagtttacacccatacacaactttgttgtaagattcaattctacgacgcgttgttagttgaggtccactcctttcaatctgtcgtaaaggcgaatatcgagcttatcttaag

SEQ ID NO: 1808 - DNA, 412 bp, Unknown
  Description of Unknown: unclassified RNA viruses ShiM-2016 sequence
cctgggttaatattaaacccagggagcctgttttgctccatttgagctcgaagataaagcttcggctttatttagagtatcatgtagaccgcggtcattcgtgatcgcctatacatgttggagcaaagccctctgatggcgaggattttaagcctgtagttcgctgcagggccatcataaacacaaccacccaaacaaaataacctacccaaaccaatcccattccttagattgatttccgttgacaattttgctattgatttgtgacgattttaccgtgtttttactggtttttccgtaagaaataaccttgaaagattacacagatgtcggatctgtggtcaaggagacgtagcatgttttacgctactatgtactgaaatctaggggcagccccccaccaaacctttat

SEQ ID NO: 1809 - DNA, 413 bp, Unknown
  Description of Unknown: unclassified Tymoviridae sequence
ttctcgggccccactccgcccctttcctgcgttctttcctttctgcctccagcctccccgtcccgttcacaaagatccatcagcataaaccttcaaacaaaagagccaaaactctcctaagcaacctccgctttggctttgatggcatcctcaaggtcaagttggctcaaggtgaaggtttggaccccgatctcctctcttcttggagtcgccgtctcacctacgcacaacccaggcaagttgaactctgcctcatccaaggctttccaggctgtggcaaatcccatcccatccaacaattgctacgcaaccgacacgactatcgtgtagcagttccaaccactcatctacgtgaagagtggaaaaacgccctccacctttcaaaagaaacttggagagtgaacacgtgggaa

SEQ ID NO: 1810 - DNA, 413 bp, Unknown
  Description of Unknown: unclassified RNA viruses ShiM-2016 sequence
agttgtcaccccagtcctcgagcacgacgttaaactgctccccccgttggtccatgggggttctgtatatagttaaagagacccttgtataattggataccacgtacatgtttatgttttatcgttctttctataatatgtatatgtaggctttatatttgagagtggaccctatttagggtagtgtcctcgcacaaacaagaaacaacggccctacaacttaacccggtttgtaggatgtaaataaatgggttggtcaatgtttatattttaacaattggtttctatctaagccagggacagaaactgtagatcaaaatctggttggagctgatgctctacagaagactcaccatgaatatcagggaggtgagctagtgccacagagtggcactaccgacgatgtatctttg

SEQ ID NO: 1811 - DNA, 414 bp, Unknown
  Description of Unknown: unclassified RNA viruses ShiM-2016 sequence
gatcttctggtgtttgtacatatgcacatatatatgtttttatatttatatacttttatactttatgttttatttttatttgttagtgacaattgtgatttatattcacaattagtacttacgtctcgggacgttaaaggaccaagtgagctgcctctcactagaccctacggggaatgggcattgtgtatattatgatttacttttacaggaatttatttctccttttgtatttctgtaattgaccctgtatatactgtttcataaaagcttgactcgctagaggtgtataacactaaacctcattgagtataaacatagtaaagtgttggtcaatgtatatataataataaaactgaagaacctagtgtcgtttcttcaggctttacacgtaagacacaatctttaaagggt

SEQ ID NO: 1812 - DNA, 415 bp, Unknown
  Description of Unknown: unclassified Ampelovirus sequence
cgtggtgaacgtgtgaaatcgctaaaggatttttaaagagacaaattaacaaataaaacgacggacgcaccgcaatccatcaaagtacaacaaaaccctaaaaaccactacaagaatttacaaaactcgtcacaacccaccctagtaagggtgtttcgagaaaacctacccgactcacaggacttcaccaaccgggcggaaacagaactaggagaatctaccactaccaggagctcgtcacctgccaaagcagtcctgagagcccaaagaatatgagctaactccaggcgacgagaaatactcgcacacgagcttcatatctttgccttgctcgagctgcaagtggtgcgcgttcacaaccacgactattcgcggtgggtaagaaacccgggagacgacttaactccctaaaccg

SEQ ID NO: 1813 - DNA, 415 bp, Unknown
  Description of Unknown: unclassified Flaviviridae sequence
gtatgaagataaatcaaagaggtgagagtggattaccacagcaacccgcttcatacacattggactataccaaactgatcttttaggctagattgggaaatgtgaaaagaacagcattaggggtgaagggcgaaaggatgttagccatacaccgagtagcactagccctgataatatgcgagagccccaacctgagtagatgaggaaggccgtagcagtgagtacactgtagccaacaaggttcctactggtaaggatcacccactaggtatgacctgtagttgggggcatgcccaggccatccttaatgcaaccgggggttggttgcatgaatccaatagggaaatctacacagcctgatagggtatcggcgccgatggggaaaggctctataaaatggcgtggaacatagcac

SEQ ID NO: 1814 - DNA, 415 bp, Unknown
  Description of Unknown: unclassified Picornavirales sequence
aaatacgacgcgatcgccacagctgaagcaactttatgatgtcgtccacgaggccaagaggggcagaggtaacccggacgaaaacgagtgatgtcttatctagggacttttacgatcctgaagaacagcacggacaaggtgttacggtgaggaataagatccagtatcacgtccaataacagtgtcgggaacaggggagaagtgtaaaactccggataaggcaaataaatctaattgaaaggagagctttgctagactagtaaattgtgaaagcaatccaggaaatgataacggttgaattcttatactcagcatagtatatctctgtagcagagagtacttgcgaaaacgattctttgaatcactagaccttcgcgggtcgccaactcagaaccaaaccaatttttacccaaac

SEQ ID NO: 1815 - DNA, 415 bp, Unknown
  Description of Unknown: unclassified Riboviria sequence
atctgggaatccgcttcctaacccacccacaggatttttcctaatctggctgggaggttacagtcgctgtaatgcgtgcaccaacgtttgcgtgctgtacgtatttagagcccgatgtttttctgagtttattgccaattttcttttttcagtattttcattttattattgtattatttttattcaagtgccttgcctcctgtggttcgtgcagctatgtgtaaggttttcaatactatttgtaagtttgatcctctttggttattagcactcggaattcgcaaaacccaaatgattttatgagcaagtagaggagatttctgatgcatgtagtagtttcaggtcagccttttggcgccccatttttgggttattacagtcgcgtgtcgcttttggtaagggcttcggatgcgcg

SEQ ID NO: 1816 - DNA, 415 bp, Unknown
  Description of Unknown: unclassified RNA viruses ShiM-2016 sequence
aagcgatcatattacagctttatgttatagccttgtgtgtgtgagagacacactcattttcctataattattttccttagtcggcccctgtgattcgggaggtctgctatgtcgtataatcacgtagatagccggtggcaatatacgtaagaccaccatgtcggcacctgtagtgggtgatttcactttttgatactgtgagagtttccagtattctgtgttatgggcacacttccattcatcctttcaatggattccaggacacgaacgcgtgcatgaagaagcacgttagtagcgatagggtttatacggccaaacagagggtgggacattcccaccagattgaattttttccggtcttggaccacaaaacaacttacgacacagatacaacatactgatatacgaatacaat

SEQ ID NO: 1817 - DNA, 415 bp, Unknown
  Description of Unknown: unclassified RNA viruses ShiM-2016 sequence
agcctattgcgccagggatctcgcttaacagaacaaaggtgttgggcaccttccgatcctactgcatgtcagcaacctccagcttacggggagtgtttagcatccgtgctgactatgatatcgctaaaaactgcaaaccagtatatgacgatgtcagaaggatggtggcgatggcccctagggatgaagcaaccatgagcattgctcgcaatgctgccatacgatcatgccgggaacacaaagttgatcctgaatgcatcccagtcgtgttggcaaaggctttgcaggtgactaaatccgaggtcaatgcagctgtgcatctcagtcgccgcaaggagcgaaaggctacgggtcttttaaactccttctaccatgtcctccgaaaatagaacctgcaacctgtgttccattaccc

SEQ ID NO: 1818 - DNA, 415 bp, Unknown
  Description of Unknown: unclassified Riboviria sequence
gtatgcaagcaaaggatataaccatcaccttgacctctggtgaaaagaagtttgaggtcctttctccggccggggctgagaagcccgcggagtatcgtctagctgacgattccttaacccctactgccgcgccttacttaagtgtaaaagcgggcaatgcgggtaaggtagtgggaactcgtaaagtttccatcttactcgtcgtccctgtccttaaagacggggtacgcgttgaccagtcggtcatgcggctagagtttaaagcatctggattagctacgattgcatccattaaggaggcggtcgaaatgctcactaagttagtagagcatgatagcgtccagactgctttgaagacaacgactgctcctaactagaacagtcatttaaacttaatatcacaagaggatgtttc

SEQ ID NO: 1819 - DNA, 416 bp, Unknown
  Description of Unknown: unclassified Aparavirus sequence
ctttaaaagtcgtgcgtggcttcaccacgcacgatcagtactatcagttaaccactcttgaatatgctcaatgaccctattcaacactggtgtctcttagtacattattttagcacttaacgtgcatgagttttgcccatttctttcaaaaaaatgagtattcgaggagacgtcccgctccccgtcttatttcaaccgtagactcgacatctattggtggacatttaattccagtcgccgtaagttgcttctgccccgcgctatattttcttatacttatggttctataggtctggtttaaaacgtaaatagacggcccacaaactatagaacgcgtacccggaacgccaatcccggataagtccctggatatatagatgcaccgcaatataagcctgcagactgtctcatatact

SEQ ID NO: 1820 - DNA, 416 bp, Unknown
  Description of Unknown: unclassified Posavirus sequence
actgttctcgcacgtgtcttttgtgtggtttgtttttgtttatcgtatcggaaccatcactctattaagcctctctattgtttggcagcttcagatggttataagaacacggtcataaatgacaaaccgatttatgaatatgaaggagaagcgatttgtgatttgcatattccatcaaaacttgcttacatttggaaaactagcatgttttctggtggtggtgttataagatcaatgacagtttcagatactagaacgtttttttatgataaccctgagtttgcagatatctggatctttttttttagaaactgagttatctgattagtgtgaacaactgtgttggtgtaaaagtccctgctcctactatttcggagtatggtgtcacctttgtttatcttgtttcccatcccaca

SEQ ID NO: 1821 - DNA, 416 bp, Unknown
  Description of Unknown: unclassified Picornavirales sequence
gtaaggactagatactatttaaactagagtacattttctaattttgcataaactatggcggcattgaccctggcgtaaacttcgccagcaccaccaatgtcaaatgggttatgtatgattatttcttgtattaggtttatttacttctaccgaccactccttagtttccgatgctagatgtatctggagcgcggaaaaccatttatttggttagtacgagcactggttttgtttagtattcagataggtgtatgatagaaaaagtagcaaaccctcaaacgaatggccctctttttgagtaagccggaagtgggttatcttttccgtgggggcacggttaaggagcgctatgttggatgacagtctcgcggcaggtcgttctatcagcactataaataccacctgttgaccttcac

SEQ ID NO: 1822 - DNA, 416 bp, Unknown
  Description of Unknown: unclassified RNA viruses ShiM-2016 sequence
ggtttatgcgccacgcacgatttaatactaccagttagtcacacttgagtacactctattgactctactcaattctgacgtctgttagtatcattgattaaataaggcataagtgctcatagcacattagttttgttttgtctctaattaaaagacaattcactcgaggagacgtcccgctccccgttttatttcaaccattgactcgacatcaattggtggacattctctatcctccgccgtaagtagcttctgccacgcgctatattttcaacacttgtggtttcatggaagtagtttaaaacgtacctagacggcctacatgccatgaaaagcgtatccggaacgccaagcccggacaagtccctgatatatagatgcactgcaatataagcctgtaggaggacccatatatt

SEQ ID NO: 1823 - DNA, 416 bp, Unknown
  Description of Unknown: unclassified RNA viruses ShiM-2016 sequence
tgcaaggtttgcatcccttgcacgattcactatgagtcctctttgtggcacactagtataccctactttgaccctagcttttagctacgctcatgtacgctgtactactctgtcatttttggttagtagtgttttgagttttcctcataatttgcacctttattcggagagacgtcccgctcttcgtcttatttcaactcacggactcaacatccatgggtggacatttcttaactcccgccgtaagagctttgtgccccgcgctacatttctcatacttacaggtttgcaggttctgtttaaaacgtattagacggccagtatactgcaaatgcgtagccaggattccgaccctgggtaagtccctcagtatgtagatgcaccgccgatatagccgatagggagtacgatacatc

SEQ ID NO: 1824 - DNA, 416 bp, Unknown
  Description of Unknown: unclassified RNA viruses ShiM-2016 sequence
gccgggagtaaatatatgtagcgtaatgatatataataattatattttcattacgttacgtatgtttgccaggtaaggtggtttaccagccatcatttccttttttcggtccattggtgatatgaccactcacccttcccattgttgttttcaacatttcagcttacatccagccgctcttgcggctctgttccagctgtctgtaagtttaacagactataatcacctatgaagctacaattagcagagttgtagtggaggagttcggttactgaaaccaaatcaagggcattgaggattctctgccgagattagatgccttatttaagttttgcgtgctttccaatttttacgtggatcaaacgcaaggtagcttgtagtcaagccgttgacctaaacaacagtactacaccatt

SEQ ID NO: 1825 - DNA, 417 bp, Unknown
  Description of Unknown: unclassified viruses sequence
agaaaattatttggtgtgagcgattatgatgtaggctcttggattatataaaataattgacccctttgttgaaaggataaatcaacctctttcgttttgaagcgtggaatttcaattcgattgtagtagtgtcattcctatttaggatacggttggacacataaataactaatcttccgcccagctccttgaactataccatctaccactaggagttgtgtaaaattatggtggtcaaaacaacaacaacaattcttcacaatctggcggttcccagtctacctcccccgctcagattcacaatcccgataaaatggtagacaatttgtcaacagacgttcaacaggaaactaatactacgtatttcgaacaacgagcagttttcgatgagacaaccttccaggctcctctctctca

SEQ ID NO: 1826 - DNA, 417 bp, Unknown
  Description of Unknown: unclassified RNA viruses ShiM-2016 sequence
tttgtggctttgggtgtctgatatcacatccaacatacaaaccattagatatcctgacagttacatttactgcttgaatactatttcaggaaaataattatattcaagagcgtgggtgctgtcagaagaacacctgggcgtttcccgaataatctatttagattagagatgaaaataatattttaaatataggtgttactcaaatattttccaaactctggtgaactataagtgaagtcactagttttataatcacttactaaaaagaataacaatattggcgtatctcttgcccaaagagatctgacttgtggttggcagattcaatccgaacaagtgtcttatgacacaaaaaataatgatgcacaagacactattgtctcttttcatgatgcggaaattggcagtagtgttgat

SEQ ID NO: 1827 - DNA, 418 bp, Unknown
  Description of Unknown: unclassified Husavirus sequence
aggacaaggctttgcgggaaaccgtgaagcaggcaggtggagaggtgaagactgagctcgctcggcttcctaagccgagagagcttaagcagagtctttccactgtcgcccgagtcttgccgacgaaggtgcctttggcacctttggcgacgatggctcgccgagcgagacgccgacagctcaatgctgcgttgaagtcgattgtagcggtagtgagtaattggaatcgctcgtttgacgtcgctcctcagacgtgatttcgaccctctgcgcgggcagtaacaatagcgcctcctctggcagttctctggataagaactgttcccagtgcgtgggaaacaatagcgcgcgcgtcttggatgattccgctaagaatctcccaactaacatcatttgcgggtcccccgcttgcagggtg

SEQ ID NO: 1828 - DNA, 419 bp, Unknown
  Description of Unknown: unclassified Torovirus sequence
gttttagtcgtagtttggttaattataatgttagtttagtgttatataatatattagttggtaaatatttagaaaaaggttataaatgggtgaatggtgttcttaaacgtagtgatgttttggttatacagtatgttcaggaggcttatgctactaatcctgtgttaatgattgtagttattgtttttgtggttgttgctttgttaagtttattgttttcatattgttgttctaggcctttacataaggttgagaaaaggttattgtaatgtttttgttagaaattatatttaaagtattagctttaattattttacaccaactgctaactttgtaccttaatggtgcaagtgcgttaccagttgtgtgtgatatatttgaacctcctttttatagttgtaggttgagagaggatagtt

SEQ ID NO: 1829 - DNA, 419 bp, Unknown
  Description of Unknown: unclassified ssRNA viruses sequence
ttaacttactaaccgcttacgtaacgaatgagcacatctacctaacttacacggggggatattggtcaatttttatctatactatcatattacgtgatgtcctagatcgtttaattttaaatggggtggttcctgttttcctaatatacaagcctagtgaaaaggatttaatccaatttaacagtgcgaagagtatcttattatctaaatatccaactgccagattcaacgtttatgacgttgttactgatattcctgtgacgagagtagctattgatccagatgactttcaagaatctaaagattttttgacgaagggaattatcaatttatggggcgaaaagaaattatggaacgaatggtacaacttcactcagaaatttattaacgagtcaaaatcgggttgtcgaaacacgcta

SEQ ID NO: 1830 - DNA, 419 bp, Unknown
  Description of Unknown: unclassified Riboviria sequence
ggataattcccttgattaagtatattaatactttacgtgacaaaacctcctctgagttcgttcgcattgaaccaactttcgacggtggtcagttgtctttcactgcagctgtagttaaccctatggtggcaggcgtagtcgtacctatggtacgaggcgccgtccgcattactttaccgaccgaggtggtcgtgtgtggtaatgtgtgccctcagaagattaatcaatctgtggaagtgaaattcaaccttcatcagggcgctgctgatttagcagaacttcgtgctgaagtgttacgcgcaatggatattgctattacctcgtaccaacttggtaacggtattgtcccacctaccgatgcttcttttgcttcggcctgatcttttacaagcttcctcacctcctactaaggaaaacat

SEQ ID NO: 1831 - DNA, 420 bp, Unknown
  Description of Unknown: unclassified ssRNA viruses sequence
tgtactcgcctttgtttaaaatcaatactctttgtcaattgaattgggtgcgaacttctattataaataacactcttataaaaatgcaatcctacaatttcatgtcttctattgatagacccattatactaatccttttctctaatcttctctctttcaaagatttgcgtaacaatagtagatatcctgatgactatcctctttattgtctctcaaaagaccctttcttaacttatatatctaatattctcaggtgtcttaatattagtaaaaatgtcgatattaacgagctcatcacttttaataatcaatattcctatgctattgaaaaatttaaatatttcttaaatgtctctaattatctatacaatagagaaatctttgaaaacgaatatcatctaacttggagacaataataaa

SEQ ID NO: 1832 - DNA, 420 bp, Unknown
  Description of Unknown: unclassified RNA viruses ShiM-2016 sequence
agacgcgagccccctctatctgtgtgccggtacggagacattttgcagccattaccggacggtgcgcggattttgagcatacccgcaaccccatgcgatcatcgtcatgtcattagtaaaatcgcatggttttccgattgggttggcttcaaacgcctttcttgttttactgggtgcctgaagaacgagctggtttcgttgcataaccgacaccttgttcgtagggtggaaccagaattcaagacagtgaagcaggttgcctccaattggttatcaaagtttcctcggttcaagaattaccatcactggactgaagaggaagtgatcagccatacaacacagagtaagcgacaaaggacgcgtgacgcttttcgcaagtaccacgaggagggtgttgcagcctcggaccgccgcattaag

SEQ ID NO: 1833 - DNA, 421 bp, Unknown
  Description of Unknown: unclassified Ampelovirus sequence
gcggctgagcacaaggcccgacccagacatttttccgccgattacgttgctacggtggacatattgaaattgttctccggggtccatatattggagaattcactacgacctgttaatggtcgaactttattgaaagtcgttagtggcagcgtgagcgttgtgggcgtaggtggcttgccgctacgacttagtcgcccgcactgacgcgtctttgttagacgtgtctcgatttagattataccaccttagggtatcgtccagcgccctggtggtagtatattcgtgcactggggttgcaacgagtaatacttcatcaaaagccccacctgctaaaatcgagaggcgtgagtctccacgggtagcggtgccagtagcagatcggcaggctatagccgatgcccgatggaaaaagtacgaagtt

SEQ ID NO: 1834 - DNA, 421 bp, Unknown
  Description of Unknown: unclassified Arlivirus sequence
gcagacatacaacttctatctcaattatgcttacctctatctctcttctaatactcgggttgtcgataaagccgaattacataatttatgctatcacgactagaaaaaaccttattttcagaagattgtaattacaactctactcatgagtttattcaagaatctggaattgtaacatcagatccaacattctgaatgaattggactgttctgagtacaatgagtagagaaagcttaatctcatattggattttaaataacggaacttagaaaaactctgagatgtgcaaattgaaattatatttcaagctttcgatgtcacatcagctattattattgagacacaaggaaagttgtttgttttagaaaatactctacttctagtaaaatagcaattattagaattatatttacaagagac

SEQ ID NO: 1835 - DNA, 422 bp, Unknown
  Description of Unknown: unclassified Hepacivirus sequence
taaccggatacactccaaagccaccggacaggctacctgccgtgacccgcagccgagggtctcgtagggggaagtgcgcgcttctttgcgcacagccggcggccataacctcggtgaggcaggcggagtgataagctagtgtgaatacccatcggcggggaccacaccaaaccctgtcgcccgctgcggcggtgggtcctggcaacaggaggccgcagtgagtggttcttcaggggaacgctggtgggggcttagcactagtggaaccttgcgcgctgaagccctggggcggtcgtgaggaggggtgaggaatgctgggaaggtacccgaaaggatctgatcccaggctaattgtctagcccctcccgacctttttccttttatttttcttttctgttgttgactgattacatagatacaag

SEQ ID NO: 1836 - DNA, 422 bp, Unknown
  Description of Unknown: unclassified Bacillarnavirus sequence
gttttcctggtatcttgtacatatacatatttacatgttttcatatttacatatttatttgttatattttattgtgacaattgtgatttgctttcacaattagtattttcgtctcgggacgttaaaggaccaagtgagctgcctctcactagaccccacggggaatgggcgctgtatatattatgatttacttttattaaaatttatttctccttttgtatttttataattgaccctgtatatacaatccataaaagcttgactcgctagaggtgtataacactaaacctcattgagtataaacttagtaaagtgttggtcaatgtttaaaaccaaatgagttaggtgtaatctcagaaacaccaacatccggtagggatacaatttctctctattattgtgatgcagatcatattaactat

SEQ ID NO: 1837 - DNA, 422 bp, Unknown
  Description of Unknown: unclassified RNA viruses ShiM-2016 sequence
cgattggggatctcggaaggtaccttattcgccggggacatccgtccagatggtcacctcgtgaccattctggtgcgtatgtggcctggcaatttggttggagtcctcttattagtgacctttatcgtcttgctgacttggctgatgccacggaagcgaggataaaggcactaaaggagggacatcgtgagcagaagtatggtggtaaactaccaccatccataccattctcacagtggaagtctggagtgaagaagactctagtcaatggctatcgccattgggtagagtacgagattcactttaaacgcgttgagaccaactggttcactaccagatttgagcttaacgacgagtatttaccagacttagacaacccgtcagcgaatattagaagagcccttgggcttgatctttctaat

SEQ ID NO: 1838 - DNA, 423 bp, Ghanaian bat henipavirus
tgatagaccgggaagacaacgacaataccacaaccaacagctcccaaaatgcggaacaaacaagccccagaaccccaaggagacagcccagacaaccaaacccggcaccccgcagatccgaacaaagccccgcattcgaccccgaagcgcaaaccaaaaaaaccaccaaatctgccacagaacagccaaccaaccccaaaggacaccaacgacgcaaaacccgcttaactataaaaaacttaggatcacaaggtacaaaagatccaacagaaagacaaccagcccgactgcacagaacccgaaaacaagccccaaaagaacaaacaaaaccccgagaggagaaacaaccaatccccacacccgaacaaccctccacacccacacatagctcgaccacttgctcccaaggagtcttttcacttc

SEQ ID NO: 1839 - DNA, 423 bp, Britarnavirus 4
tttttgttataatggtaaccataacgacggtttaatcaatctgttattgatttagtccgtgtcctagtttattctagggactttttggtcagcctaccagctgaccttttcactcgtcacattcttgagtgaataaattgattcttctttgtgaagatgtacaactatgcctggtttctgtttttaggcgatttaatgtattagttctttttgatttgtagcgtgtagagcgcactaattgaggtttccgtcaattcctcattagcttctcctttcggagaataacgaatcacattgaactcatgcaaatcacgtatgagaactcagtattgtatatgtgtgtaggccggtaccgtatggataaatccgaaaacctgatcacatatgttttattgcttgcagaaaactatatgactcacctag

SEQ ID NO: 1840 - DNA, 423 bp, Unknown
  Description of Unknown: unclassified Picornavirales sequence
tttttagaaacaagctgcgaaaagatttcttttaaaacaaaatttcttatattatattttaagaaactattttggttcatatttatagacagttaagtcgctactgtaagctacttcttaattgttagtttaaattgctaaagtattttctacctcaagcttttaaaaacccaatcaattttttcgtgatttttaaaattttgaaaataatatcatcaaaaattttctgcagtataaacttgatcgctcgctttttaaagatcctgtttatatttgcgcttaacatcttcaaaattatctttgttagatcgttcacgatcttatctcatttggtacttttgactctgttgatattaggcattttgaaaccaaagcaatacgcgctttttgtattggtacttcacgcatattcgttaacacaaa

SEQ ID NO: 1841 - DNA, 423 bp, Unknown
  Description of Unknown: unclassified RNA viruses ShiM-2016 sequence
gtttcggaatttcctttaataaaaccgccccgttgacccgatggggtttatgtatacagttgaacagggttgtgtgtatatggataccgtgcaaatatttgtttttcatattttgtattatttgtataggctttgcatgcatagatgtcgtcctcgtgcgatacccgtatttacgggaggttgatcacccatcaagatatgacgtacaatgtggattgagtgtgcccattgtattgtatattgtagcttactaaaacaattaaaagaaataaaaacaggggtttccaggattaccctacgaaaaatagaaatcttggtcaagattacaaaaacattaaatgcttgaatgatttgccacatgctttagccaaacaagaccctgatggttggttgggcataaattattgtgcatcttgtaatctt

SEQ ID NO: 1842 - DNA, 423 bp, Unknown
  Description of Unknown: unclassified RNA viruses ShiM-2016 sequence
cctaggttaaaacctagggtagatgtagagagcaatggaacattaattaaatcttaacagagatgttccatcttttaaaatctactgaaaagtattttgccgtaaccacacgtaacgtggcgtacttatacgacaaataagagagtagcacacttagtgttagaaatttttatttaaccatgcgttagatgtgactttctatgcacctctgcagacaagaagaggcggtattccaccgatagcaggaaggtttgtttgtgtttctttagcagaatgaaacacagcgctcttgcgcgctttgatttcgtcatgagagcaagatgacgctggaacagacagctattttcttaagtgtttggacataaacacacgttgtgctacgttagtaaacgagccctctcgagagttgtaagtttaacaaat

SEQ ID NO: 1843 - DNA, 424 bp, Unknown
  Description of Unknown: Picornavirales sp. isolate wpk049shi02 genomic sequence.1 sequence
ttgattcacaatacgggatgtagttacatgcttcatttttacatcataatggggggcttggtttttaataatagttcgaacagcgttacgcgcttgtcgattttcgtaaatggcaggggcttgatttaaaatttttgttacaggagctacacttttgacttttgtatcataaaggggaccttgagtttgattagggttatattctggtaacaccggtatatctctacacccatgttgagatataccggtgttaccagaatataaccctaatcaaactcaaggtcccctttatgatacaaaagtcaaaagtgtagctcctgtaacaaaaattttaaatcaagcccctgccatttacgaaaatcgacaagcgcgtaacgctgttcgaactattattaaaaaccaagccccccattatgatgtaaaa

SEQ ID NO: 1844 - DNA, 424 bp, Unknown
  Description of Unknown: unclassified Negevirus sequence
ctccactgtctccgttccaactgttgcagactcgtgatcgcatcttgcgtgaaggtagcgcctgattttcaggaaaactcaacagttgtcggagtttccattacacaggtttcttcctcgttcttcctgtgttgttctttgaacgagaatcggttatttcttgcccttataacccgggttttattatttttgcctaaatttctattcctataatttctttactctcactatcgcacaatttaaaaatttgaacaaagaaattcatttgaatcaacgtctttctgatagtgaaaaaacatttcactaattcaagacgataaattatttcctacattgttttatacattgccaggagatcgattggatttttctgctgtaagatttgtgaatgaataagttaaatatgctttagtcaattatcatc

SEQ ID NO: 1845 - DNA, 425 bp, Unknown
  Description of Unknown: unclassified viruses sequence
gtaaggtcagtcactttggagacgttaaatccaacccagtttcaatactgatggttagcaaaattgatatatgtatatggataccgtgtttgttttaatctttatatgttttgtagaaaattcataggctttgcatatattaacggtccctaccggggagttttgttcgagttcaccgtgctcacttgtaaatatgtcgtaccatatgagtcaatccactctatggtttgtaaataaataaatggattggtaatatctttaattataaattatgccgggatgtacaagccaacataagttttggtcccggggaagcaaacgtacacaataaatctgtgtcggagacacagtcagcagtgactgaaaattctttattgaaaatagagaaatttaagccacaatctggtccggaaggcactactgtt

SEQ ID NO: 1846 - DNA, 425 bp, Unknown
  Description of Unknown: unclassified Deltavirus sequence
gctccccgcctccagcccaatccctgtcgttgcgggccgccagtccaacggaggaattgtcaggtccaccctggatggagcttctcttggttggaaacaggcctacccggatcgtctgacggagcccctcatacagcgggttcccgagatatcctgtgccctattgcttaccgtatgtaccaagatgttcacctgttgttcccctgctttcccaagtcttgggttgtgtttcacctgacgacctcctcttcctcccctgcccgcaacgttcccgacccctcttctgtcccgatcttcgcaaagttggacttacctgctgcggtccaacggggcgggaccaccaacttattttatctcttaagagaaaattgttgatttgggtcccagcccttcgttgaggagcagcagaaccaacacagcgaagg

SEQ ID NO: 1847 - DNA, 425 bp, Unknown
  Description of Unknown: unclassified RNA viruses ShiM-2016 sequence
ctttgcataaagagatttaagtgaattgaaaagttctattaaatttgtttaatgtcaagggcagttgagagacttattttgattacagtcatcgcaacactttttgtagttatcactgattttattgttgaaaatagcaaagaaggtgaagttactattttaggtagaggagattgtataatctactctggtaagaggtactgtgaggagggtagaaaactgtcctgtcctggtgtctatgaagatttctttttcgtttcagggttacttctgtcaaagggtttcacttttgcttcaattgcaggtgccatagccttactagtctttgtatacgggaaaataacaagagaattgagaagtagtgaaatagttgattcaagatttgatttagagcaagcgagagaaaagaggcttctttgtaatct

SEQ ID NO: 1848 - DNA, 425 bp, Unknown
  Description of Unknown: unclassified Riboviria sequence
attggagaaataatatggcacaagccaaagacttcacgtttaatgacggaacttccgatctgaccttcgaggtcttatcacctgcaggaccaaatagtccagcagaatttcgtcttgttgatgacagcaaggcaccaatgaccctcccatacctcagcattaaagcacgaggtgtgaacggagcattggcccggaaggcatcaatcatgtatatcgaacccatcgtgaataacgaaggggtccgtacaagtcaaaacgtatggacgctcgagtcacggattgatttgagtcaaacaaccgctactacccaaaagggtgttgctcgtttgatcaaactgctacaggaggacttcatcactgaggcccttacaaaagctgtagctcctaattaaacaaaccctaatcttacatacgaggtttattaa

SEQ ID NO: 1849 - DNA, 426 bp, Unknown
  Description of Unknown: unclassified Hypovirus sequence
gggtgtgaaaacttacacctgctctatatactttcgtattatagaggcgcaagttcgcttcgctaagtcgggttcaaatcccacgcaattttacctgttacaggtttattgcagcttaggtacacttagacttaggagtgtacatccttcaatgtagagttccgagctggaactctcataaggctcgtagtgagcacccgggattggtcgtctcgggagtagaaaagaagactactttaggttagactatcttcctttctgactttaacggctgatgcgctaactcccacaccgcaggtgtggataggttggttatttactcagagtaaaagttggataaattgtttagtttttttaaaaatgaggtactggccatagaaccagaaactgcggctaccccgcacatatcaacaaagatatgccatc

SEQ ID NO: 1850 - DNA, 426 bp, Unknown
  Description of Unknown: unclassified Picornavirales sequence
tctgcaagcacgggaagccccgtcttggggacgttaaaacccagttttgtcaactttaaagacacgagagggtactcacgttaggcaaatactctttgttcggcaggttaccaggatttggattttataagcccgagtttgccatttccttggcaccgaacgattataaaacatcggaggagttagagtggcgttgagttatgccattctttagagctatttgctcactctatacattgacttactacatatacatatacacaattacataataaagaaatagatatagatatagagggatcttatacatcccaaaacacactagaatttttgctagtgtgcacttgttgtggaggttttgttcctcaagccgatttagcagaaggagaaatctcatccgctcaggacaacttcgcacaacagacc

SEQ ID NO: 1851 - DNA, 426 bp, Unknown
  Description of Unknown: unclassified Picornavirales sequence
ttattggattatggagatatatgatggcctggcatggaatccaggaattcttacatattggaattgtatcccacgtgaacggggatgtggcaagtcccccagtaatgctgggctctacccaatgtgtgaggaccgtgacttcaagactagttatggtcgtgtgacaagggaaagagtttcttacccgcctgtgtattaggtgtgtacgctgggaaaccataagcgatcgaaggtaaagtggtgctgaaatattgcaagctcaatgccttctatcgtgagtcggtgccgctgcatttgatacacgcccctcttttggggtaaatggctgacacgggcatccgcacttgggaatgtgcggctggaactagactgggtgatagcctgccggctggcgctgttgtcatggtatagccagttgattgccac

SEQ ID NO: 1852 - DNA, 427 bp, Unknown
  Description of Unknown: unclassified Alphavirus sequence
ccagcactttagatttacagccacggcgtgtaaatctccagtgtttcgagttgcgcaaagcgttttctggataaatgagcattttcgaatacccactgactgtcacatcagtcattgacgtaattttcgcaacgttcaaaaccttcgcctcttcttcacccagccttggtctcttcctgaagaccatttgcaactttccaatctgggtagcttttgcaatcggtttgatctgccttacgattgacaggatcagcaagcacaagtacattcggtatttgaatacgagacatcacatcgtagagtcaattgccgagagaggtggagtcgtgccagttcagcccaagttgagaacgcacttctcacctagacttggcgatcgggacatcacgtctgccacacccaccagtgcatcacgcaggtggaacta

SEQ ID NO: 1853 - DNA, 427 bp, Unknown
  Description of Unknown: unclassified Picornavirales sequence
aagagacaggaggttcgtcgtattgtcgattttgcgtatttatatgcatatccgcactgccgcttatcgtggtttcttttaaatgacatttggaaagacaaatgaacacttgtgtttgacgtttgtgtactcactatatactagtatagtgagaatgaataaatggctcgattattatgtgaataagtgaatgaaacttcaagacttagcaactcgattgtgtttagctaagtgtgcttgaaagtaacttatttatcatatgtatcgcttgaatttattttgattgcctatggtgtctaacccacaccagcctcttcatgaccctctgtgcacgcagggattaacgtgcatgcaaagtagcgctgtttgagaacagttttaaatccacaatatgtggtctttgcattagattttactcgtgggaata

SEQ ID NO: 1854 - DNA, 428 bp, Unknown
  Description of Unknown: unclassified Ilarvirus sequence
tcagtcgatggaaagttaatatcactcaccaagtaaatcgctctttgttagcgtgttgagttgagtactcgatttcatttcgacttcgatctggtattatccgattgttgtgtttggtggtcccaaggcagggttggcccgtttgggaattgtaaatccaagcaacaaggagagcagagagaatcgtgataagttcgatctatctcagttgtaaatccgatagagaattaggagcaaaatcaacggtatcaaagcgatacttactcttttgaggacagttgattccagggttgctccgaatttctcgacgcggtggctgatacgatttgagtatcacgaggcttaggatcttcggttggacggaagagtaagggttggccctgctttcgaaagaacgactgattcgaatctgtccagagacgagaaga

SEQ ID NO: 1855 - DNA, 428 bp, Unknown
  Description of Unknown: unclassified Iflaviridae sequence
tgacattgacaccaggtaaagagaacgagggaatccgaccctatccgttctctttacctggtgtcaatgtcaacaggctccagtggggtgtctggtaatcacccccgacaagtacagtcgttaaaatgcagaccccagtaaggtatctggtacttacctccgacccggattaatatttctgtggagtcgttaaataattagcaagaaataagccgaccactggttactccctcataggtttcagagttaaagtgggctcctaaatatgtgagtgtaccgcatttttagtgagtacatcagtacaccggtctatgtgttacaacttatgaagttatattatcgagtgacagagttaacgtgagaagctcttactgctaatcttgcatttactgcctgtaaaggtaacagtgagattaggggctgagtag

SEQ ID NO: 1856 - DNA, 428 bp, Unknown
  Description of Unknown: unclassified Negevirus sequence
gcaaagttgtcaaccagcatcctcaccagatgtaattgccgactgctaagattgaacccgaattctaaacgaatttatcaatcgctcacccttgtccggtgagtccaaccagctgcctaacccgcagaaacatttcacgcgaattaatttgacgtgaatccaattgtcccagttatctggtacaaatctccgtttaaaatttttattttaaaccttttcgtcactttcacccagtgacacttcctgcagatccttctgattctgcaaaaattgtccgctcactccggatttctttgatttgttcacatcaaatctcccccaccttcattttgaagtcctgtctcattaatagtgagactcccccttgaattgttttcttcaattctcccctttttcgttgttaagttctgtcctaatccgacattacg

SEQ ID NO: 1857 - DNA, 429 bp, Unknown
  Description of Unknown: unclassified viruses sequence
taccccctttcagtgtttgttaaacagactcttgatttgtaacccttgttgttgaaagaactagctattcaaaactagtgccatcatttgactaacccgacttctgtcggtggaaccctgtctttgacggctcttatctgcgcattgagcccagtttgctatgtcatcaccaccaagaaccatttcacgattcgtctgcgttaacttctccgcatttccgcctgattgcccattagtttgttcgactttctcgtttgcgagacttgaacgccgcacttttatgctctgctcagcatattaatccatcgtattaaacacaaacgatcgcagatttacccctgcgttaccaatagcgtactagtgatgtcgcactagcctaaccctgatcgagaccacactcgtaaccatggattccagccaagccttaaa

SEQ ID NO: 1858 - DNA, 429 bp, Unknown
  Description of Unknown: unclassified viruses sequence
ctacactaaggtagttttcccactaactctaggagtaggaatagcattgatagcattcaccctaacaaggcccactctccccacggtcggggattcacaacacagcctacctcacggtggctggtaccgtgacggaacgaaaacagtggcctacaactccccccactactatagtagtagtttcatccctttcttagctgtgcttggtttaacactcttaatatatgtttctagtctatgttctggtcggggtgctactaggagttgccctcattgctgtggtcaacactaacaatcctcagtgtactatagtattcaccggtcattccactactatccaggggtgtgagcggttaactaatttgcatgacatcatagcagcggttaataaccgcttaagttttagctctagttgtgaaaactaactcc

SEQ ID NO: 1859 - DNA, 429 bp, Hermit mivirus
ggcatcctataacaccgggtgaggactgttcagtattgttctcctatgcatgcttagttttagggtcacaggccgataagttctctgtctggaccatctttcttagtagtttgtaagtgcctgtttcatatatagatgtactattaagggtttagtttttaagtatatttttctcataatcatttagcatcataagattgtttttctcagatgaatgacagatacttctgttccactactcaaacttcccctctttctttcagagggaaggaagacggggagttggactcccagttatccctattagtccttatctcaaacctgcaattccatcagatccaatatttttgctcctaatgttgtaattggctagtttaaaagaacacccccactgagtaaacattataacacaattacacagttccaacc

SEQ ID NO: 1860 - DNA, 429 bp, Unknown
  Description of Unknown: unclassified RNA viruses ShiM-2016 sequence
agaacttgtccacatatttgatgcttcgggataagtgagcctccatgttgtcgaggtgaagactactactcagtctttaaaagagaggagagcgtccagagtgtgtgtcttgagcagaccacactttagtatttgcttacagaaaatcatattaaagtggatggcaatgccactgaaaaagataattgcatagagattgaaggtatttcaatcactcctaacttagagttgacgtctggggtcaccggttttgatagtgaagccacattgtgcgctgaagtgccttctttaaataagggaactttgcgggcagatggcgacatcaatcagttgaagcattatttagcgaggccatttttatggcgtactgggacttttcttgtttcccctgggccacaagagattgcaccacttaacaatcacgcagat

SEQ ID NO: 1861 - DNA, 429 bp, Unknown
  Description of Unknown: unclassified RNA viruses ShiM-2016 sequence
tttgtcaaaagcctgaccgtcaagtcgttaaactgtccggatgcggaattatctgtagtcgaaactctaaggaggaaccaaaaatattctgtatatattgattacgatgtgttatatgtgttgacaactacatatatattatagcgcttgtatactgctggttgccgtagtggcaaggagtttttactcctggagaaggaccactccaaagaagtgttgtgataggcaagtgctctgaggcgagcacttgacccgtatacatagtgccttactaatttttataatttttataatactgaagttgacagtataaacaacttatacatattatatacacctcaatcgggtacggttggggtaacagatagtgtagcccctaatgtgaggagtgaaactatcacaaattttgaagtgcagaatgcaggagaa

SEQ ID NO: 1862 - DNA, 429 bp, Unknown
  Description of Unknown: unclassified ssRNA viruses sequence
gggcggaaggccgcctcctcgccggttatctgcctccggccaagtgactagcgcttctgctctagctctcaataaccctctcttctctacaactggataaagcaaataacatcatggacgcctccaacccagtcaaatctgcccagcgctatactctctctgagctccgtgattctcgacttgcatacaaaagacaggacctgaaagcgctgcaagctatggcggcttccgcggagaggcaactgttctcttcaggaggcccaagcaaagaagcttttcacagtcttactatggacctaaacgaagacctctcttcagtgcgcgcggcctctggcttatgacgtgaggagtgagatcgacttcctcgacaaactcccgcccgttccggtagataataccaaactcggggacaggcagatacaccccgcc

SEQ ID NO: 1863 - DNA, 429 bp, Unknown
  Description of Unknown: unclassified RNA viruses ShiM-2016 sequence
aacacatccaacatgtcttctttaattaaatcaaagatatgggatgtgttaatatttccggggccccaacttgtcagcagttgttcatcttgggatttacgtgggcgctcaaccactatggaacttccatatgtggttttaatgggttacccgccatattttaaacgccaacgcgagcgtgctcgcctttggtctttgatatgtagagtgattaaataacactctggttggttataaacatatatcatggtattaattttaaacgtcagttaacaacgggtgtcttgcgtgcaaaaacacttcttgctgaatggttattattaatatggtcatatatgcttataaatggtgattaggtaaattaataccgggtgatctgcgtgcagaatcacctcatattgagatacctgttagtcatgttatcattag

SEQ ID NO: 1864 - DNA, 430 bp, Ollusvirus scaldisense
gctctcaatattacacttatttactttatttctttatctatgaatttgtccttcaattatatatatccctcatctaagctgaaagacattattactttaaaaaataacatattttgtccttctgtatagttaagtctgttctcttactccatccatcatggcacgtagacaaccacatagatcaggtttgtccgagattaattacatatatgatcactgtaatgaagcacctataaaatggttaattgatggtgtaaaattgtgtgtgaatataaagaatcattggttcttccagggggcaaacctcgcatttgcatggtatagagataatgttcatatctacttattaccattatatgattaccatatggtaaaattgatttacaatgttatgattagaggttaccctgattacatctagtgtccattg

SEQ ID NO: 1865 - DNA, 430 bp, Unknown
  Description of Unknown: unclassified Picornavirales sequence
atttagcaacgtcagagatgacattaaatatctaaagccgcctgttagggtttctaacagcttatccgtggaagtgccacggaacataaattaagaccccgaaggtcgagcgttggtgtgatcttgcctcatcattttatttctaagcagagattatagaggtagtgctgccagcgtaattccctgcctatttaggatactaatcacacagggattaggcagcccctaaatcaaagagagatgcttagactcaggtgcaataaaagtgtaagccctgttttataaatcacttgccaataataataataataatggtccgggcgcaccaataagcgtccaacacacagaaataccttctgacatacacacaagtggttctgccacagaagcggtgccagaagacccgacagttagaggaggagagcataat

SEQ ID NO: 1866 - DNA, 430 bp, Unknown
  Description of Unknown: unclassified Picornavirales sequence
tccgatctcggcgctaggctcactctctgagtgccctagtggtcgttcccttttcaacaagaataaaacttgtaaaaattgaaaaactttgagtaaagtataaataccctcataactgagtaaaagtctgttatatatgtttgtttgtttgtaggcatctccgtgccttctacactactatatttgcccctgtgcgtacgcgcttgtgccgtgaggcctcacgtacgttcagatgcttatcctgagggatgtagcacaaggtgacacttatactagtacctttttccctgcccacgactggacctgggcggtgtaggtgtgtctctctcaatgtttcactccgaaccgttctataacaaggttgtactttccaacctgatatcagtgtgctataaattttctatcattgtggttagtccactacccaaac

SEQ ID NO: 1867 - DNA, 430 bp, Unknown
  Description of Unknown: unclassified RNA viruses ShiM-2016 sequence
cagcgctttatttctaaatacccttatggtagatgacatacctcctgtgtacacttaatgagtgtacatacgagtgaggattttactgtctggttgttatgaaaggatgagttgtttcccagtccctttttcaaataagattccctttgacttttataagtcactgcaatcgtagtctggaatcgaatactacgtcgagaacaagagtttaccaaacgttaacgtgcgttcatgtgagcgttttcgtttagggcttgtttttggttaaaccgagtgtttaaatatcacgagatatatacccggaggttttcactgatccggtgtattaattttaggtgaagctaatactaatacttatgttattaagggtgtcaaagcccaaaccctggcgatttctaaccatgctaagcaggaggaagctcaagcttac

SEQ ID NO: 1868 - DNA, 430 bp, Unknown
  Description of Unknown: unclassified RNA viruses ShiM-2016 sequence
ggaaggctctttgagccctcctatggaatcttggtatgatgtaattggaaggtaaagccctcctcttggattatatataaacatttttctacgttaaattagatactacgttttaaacgttagtagtatcacccttaaacatttatagtcacgcaatgttaaaactcatgacttgtacccttaattgatccggtactgacaacttaatacgattgtcatttatagcagttgaacggcactgctagtattagttcttttgtaatgaatttcttactcctcaagaaattacatttaattgcaataacgattgcagagactacttaattgtagcccacggtgtgagcatagacgctaagctcacggtaacggttagggaagcccaaaagagacgccaacccacaagtgctcttgaaccctgtattatacaatc

SEQ ID NO: 1869 - DNA, 431 bp, Unknown
  Description of Unknown: unclassified viruses sequence
cataaaactatacaaccgtaaagtcttgtccgcttctcttcagggagaagcaaaaacttggataccgttatataccgtattctaacttggccaacgtgcactactttggtcgtaataccggtttcagttaatctgaagctataataattgggttgtttaaaacatcccgtaaaacttacgagtttaaatactcgtttaattttctgctctttccttgagtagaataaaaattttcacacttcaccgtgtgattaacttgttttccagttaactgtgaaaaccgtcttttcgtttcctgtcaatcagggagctaattctttgagattaattatctcttttctgttctctcgtaatcgagagaactctgtctttggtcctcgcaagagaaccactaccgtctatagacttctttgtcttctcttgatcttcag

SEQ ID NO: 1870 - DNA, 431 bp, Unknown
  Description of Unknown: unclassified Picornavirales sequence
gcaattaaacgagaatattgattgttaaaaaattcaaaagtgtcactgatgcctgcgatataactgagtcaggcatcagtgacacttttgaatttttaaacaatcaatattctcgtttaattgcagagcctcaaataggtatctccattaatcatacaattgatgggagcctagatgacgctattaataaatctctatcccttttttcagaattatctaaagctctatccgataaatatcaaacaaccgttaatgattatcaacgtaaaattatcgcctcaataacgtcaatttataatttatatcgtttcacaactcacaaattatctcttcaagatttttgtgttaatctctgtggagttattggtgccgctggtcttgcctccgacatcataactcaactaataataactgttaggtctcttttctta

SEQ ID NO: 1871 - DNA, 433 bp, Unknown
  Description of Unknown: unclassified Picobirnavirus sequence
ctcttgtatagtttacaagtattctacgaagggaggtgtagcatgttgctataccaatcgcaattttatcaagcgattaacaaaaacatcctgacgttactgactagctacatgctggcatgcacagtaggtacagtcattgtaacggatctgtggaaaggaggtaatttatatcacagatattcaggttaagtactggacattgaacgaaagtaaacgtcacaatgttagtactgagacacaagcagccaatgaattggctgaaactaggcgacacaatgtgtcgactgaaactttgggacgtgacaccctaaatgaagataaacgtcacaatgtcacaactgaaacggagagtagacgccataatgtacaaactgaacgtgaggcgaagcgtcataatgttgctggtgaagtcgaaaccaaacgacataat

SEQ ID NO: 1872 - DNA, 433 bp, Unknown
  Description of Unknown: unclassified Narnavirus sequence
gaagagtcaagcacacagaatatcaaacaccgatatccaagcggagaaccttagggtccccgtaggtaccgggtttggattacgtgagacggggaagtctggtaaaaagagtatcgcagatctctttttgcccattatctatgataatgatgactatacccttccgggtcgattcgactcattacttaacttaaagtttcgtaataagcgattgcggttttcaagaaaccgagatattaagtatctcccggactcgtacgcctcgttcgttagaggtaggttagcaaccgaattgggacttagtcccctaaaatctaagattttagtcggtagatctattaccactatattaagaatagaggagttagtaagggctatcattgataaccttctattgtcatttaaaggatttttcttagaaaaaggccggaaa

SEQ ID NO: 1873 - DNA, 434 bp, Unknown
  Description of Unknown: Anopheles darlingi virus isolate MAC, complete genome.2 sequence
ttgttcagcagagttattctcttcaatttcattgtttttgtctactgtattgcatgattttattaaccaggatgactattatatacatatcatcttggtctttgccacttattttatatttgctatattaatctgtgcgttagcacttaaattaaacaatcccaggcgtgggcaactgtgaggtttctttgagcatgtacgcagatatttgagtaagatagatttcaggtctttccaccaccttggcggaatgtactcctttatgctatattatcatacacttataattttactctgtgcattggcatttgacccaaattggttagggagtgggcaactatgaggcttcctcgagcatatacgcaggtacttacacaggacaggtgtaaaaattccccatgacatttttttcaaaaaacccgctagtcagaaag

SEQ ID NO: 1874 - DNA, 434 bp, Unknown
  Description of Unknown: unclassified Riboviria sequence
tgattgaagaaccgacccatgaaggtaagctattcataaatcctgccaatgtggtccaagtttcatcagtatcaccctgaggggtgtctgcttctgcttggtccgtgataccacatcggcttgcaatggctgccaccgtcgtgtcaaccgtctgtgctgtctgtcctactgactggattgcgtccatcgtaactgtataagggttacgagggaggtaatcctgccagcctgcttctgctattgggagggtgtccaaatccgtatccgaatcgtcatcgtgtggggtgtctgcgctgggtccttgtcgaatataaatccatactgctttatcgtcaatcgtcctgtacttttccatatccttcatcatctgtattcgtgggggtcctcgaaaataattgtagtttgcgtcgtctccaagggcttggtatagtgtc

SEQ ID NO: 1875 - DNA, 435 bp, Unknown
  Description of Unknown: unclassified Capillovirus sequence
aggagggttatttggggagtgtgattttggaaatgatagtatcttcaaagattacattaatagagtaaaaaacaaagttgaaattgatttattgaatgagagaattttgaggataaacactgagatgaatcagtttgacccaaggatatacatgatgaataagatagggtttgtcactagcacatcaatgtttgaagcaggccacattgcatcaaatgaatccaaccagtcaaaaggtcttcctccacaaacaagccggccatacgatgaggtgaaaccatacatgccattgagtttgaggaattcttatgagtcaaggacaaaaggcaacaggcttctatctatcctgagaaatcaaaaacgtttatgtgatttaggatcaggctctaccttaggtttaagagttttggagggcttgaaaatgttcaaggagga

SEQ ID NO: 1876 - DNA, 435 bp, Hantaan orthohantavirus
ttagtgaatgtataacccttattatgtgatcattatatactactgaatcattatcaatcatatttgcactattattatcaggggaatcatcatatcagggtatgggtacatttatgggtgggaatcattattcaaagggtgggtcagttaatccgttgtgggtgggtttaggttcaggctgccttaagtagcctttttttgtatatatggatgtagatttcatttggtccttgaactaatcttgctttctttcctctttttctggcttcctctgcttactaataacaacattctacctcaacacaaaactacctcaacctaactacctcattagctgtcgctccttgattgtctttttagggagcatcctatagtagtagacaccgcaaaagaaagcagtcaatcagcaacatggggatatggaagtggctagta

SEQ ID NO: 1877 - DNA, 436 bp, Unknown
  Description of Unknown: unclassified viruses sequence
tccgggaaggctatcagcgcgaggtggggtgggagcgtctccactggcggttcggtaacatttggtctccatctacgaagatggctagtcgcttacgtggacacttcggtgcccgcgtcccgagcgctgctaatgcagcccttggagagcactggctgttggagcagtatggtcatggactagatgcgtcccttgctgtctgcgtagcggtgaaactctggcttacgccaaccattaaggatgaggctatcgcacagtttcatccttttctggttggccggtaagttcgtttccaggtgtgtcccgtccttttgcaattccagcgggcgcaccattaaggaaattgcggggggttcataccggccctcaagtccgtgcgagtacgtctatctactcccaggtagtcggtggcttgtatagagttcatgataacaca

SEQ ID NO: 1878 - DNA, 437 bp, Cryphonectria hypovirus 2
tttcagtagttccgcgctaaaagcgactcctttggaatcggtgatttgccgattacatggaggctccctggagggattgcctatctgaaagataagatggctgctgcacagccgtgggcgaaacgtttgcgtttacaacgcgtaggagaggtcctaacaaacaacctctaacgtggtccaggtggtgacactctccattccgtcaaggacgaagctcgtccgtgaaacgagtgactcgcaccctgaatgagaagagagaataacggatgcttctggtagttgtggagtagtgaccctagaaactaatccccagaagacctctcgctcatggatgccggaccaggtccacacctagtttaggtgttttgatggtaaaagaaacaccgcagactctgtcttgacatgaccggttgaccccgtacgaggtccgacttata

SEQ ID NO: 1879 - DNA, 438 bp, Unknown
  Description of Unknown: unclassified Sopolycivirus sequence
tgagatacccgaagaagtgagttatacgactttgcacacaaatatatataagttcataactagttgttttgcaagaagaactctacggatgccagtgagttatttaacatcaagcacgccttgcaggatgtgcatattaaatcttacgcgagttacatgctctttgatatctttgagtggccggttagaaattgtctcctgtagtgcccaattgataaaggtactattttagtccctggcaagcagattcaataacgacccaccgtcctatactctttgactcataacatggttaatcagcgagagttaatatgtgcgtgaccttacgcagaaatgcacagggtaatgacctccaagtagaactagtatgtgtttgtatccctggaattgatttgaaataatgatggatgattaaggcgaagatttattcaatgaaat

SEQ ID NO: 1880 - DNA, 438 bp, Unknown
  Description of Unknown: unclassified RNA viruses ShiM-2016 sequence
gctggctgccttagtcttgggcagacattaaatgcatccgctgtgtcttgggcagacgaaaaatgcatccaatattgtcctgggaagacaataaaagcatccctctgggcgtaacctaccacgtctatcggaaccaaaagggggcactctgtattgggttaccacgcattcccaatatgtcagtcattgggggatgacgaaggcttgcagagtgaggcattttcctcgtaaaatacccctatttaggggagtgttcgccgcacgtaagactgacgcacgctgtactggttgagtcacctttacgagcgttaatgaagacttactacaacaaatacaaaaagatttaatgttacaattaatgaggaaaatttggagtcacaacaccaaaatgttaggtttagtgatcagactccacaatgggactacaccgtagatagt

SEQ ID NO: 1881 - DNA, 438 bp, Unknown
  Description of Unknown: unclassified RNA viruses ShiM-2016 sequence
ccccaaaaccccccccttaaactcaacactgtagtggattcattttccgttgcaaaacaaaacattactacccgcatttatgtaggctctgtgttttctatgcgaccgttacattaatctctactctgacccactagtttataaaaccgaagacctgaatgaaacgattttccttcttttcaacctctaacgaacctctgacggcttgagaaacctgaagttagtaattatgtttaaaagaaaggaaagtcaaacgcgatgactcttacatccctattccataccgttgctccacaatgtgagcgatgcgaggtcgggactgcagtattaggggaacgagctacatggagagttaattatctctcccctcctacgggagtctcatgtgagctgtagaaagcggttggcacctctcgttacctcgcctgtacatgatcc

SEQ ID NO: 1882 - DNA, 438 bp, Unknown
  Description of Unknown: unclassified RNA viruses ShiM-2016 sequence
caagtatcccatggcttttaacgattggcaggctattgactttgtattttttgacttagaaaacgaagttgtggaaatatatagaggacacggccttgccaaccctgagagctttgtgacatatacgatcgatgatatcaatttgtatcaccttcatcatcgttttatttgtgacatcattgttagcgcgtatcttgagcagtatcaagtcattgtacatccgcttgtcaacaacgctgcactgcaaagtgctcttggcgggtaaacgcttaaacaaaaaacgctttattcgcgggaaagcagttgacagacctgtacagctaataaggcgcaaacgattgaacacaatcccaaaaaaacaacaaataattgacgcaaaaaactacggaaatcaccacatctctttgcaacattacggtgactccaaagacatacaaa

SEQ ID NO: 1883 - DNA, 438 bp, Unknown
  Description of Unknown: unclassified ssRNA viruses sequence
tttcgggaaagtaggatgtatctttcaaaggaaagataagctaaatgtgcggtcgcacaaggttagatggaaggaaatgtccattggcataaactcagattgattgactttcaaatagaggaatgattcgcgtcgcgtggcgcctagtttacactgggcgcatcggccttgcatataagcaaggagcgctacgtcgtagcacgcattgaaaagtccccttaagcaagggagcctttgctctatcgattgcagatagagacggtgaacaatataccgaaccgcaacagagaaagcggtagtcaaagcttacaagtcgcaatggaaaccgtgatcgtacggatcacgtgaaccgaagttgcgcaatctgacaacttacgtgacaggattaaacgtccagaaggcccatggtccccggcatcgggaatccacagaaccaac

SEQ ID NO: 1884 - DNA, 439 bp, Odonate anphevirus
aaattttatagaactatacaaaatatttgggttaagctggagactttctgcttgtttatggaataacatgtcacaattaattttacataaacaagccagaaggccattaaagattaatcgaaaagcattaatggcttataaaaagacccctcaaaacttagatctgacagaatctgcttaagaaaaacccgtaagagtcaggatgccaaaacctacaataacatttacttgtcctaattgcggtcatatcattagatatgaaaggagtgatctaccagccgtccctttgaaaccaggaggaagtgcttcaaaataacaggtcattaattaactttaactatgagactgtattggagataatccacatcattgattatttttaagttgttaaaattttgttttctggtagctaagattaatctcacgatgcagtacaaca

SEQ ID NO: 1885 - DNA, 439 bp, Unknown
  Description of Unknown: unclassified Ebolavirus sequence
atgagcatgtaataatgggatgatttaatcgacaaatagctaacattaaatagtcaaggaacgcaaacaggaagaatttttgatgtctaaggtgtgaattattatcacaataaaagtgattcttagttttgaatttaaagctagcttattattactagccgtttttcaaagttcaatttgagtcttaatgcaaataagcgttaagccacagttatagccataatggtaactcaatatcttagccagcgatttatctaaattaaattacattatgcttttataacttacctactagcctgcccaacatttacacgatcgttttataattaagaaaaaactaatgatgaagattaaaaccttcatcatccttacgtcaattgaattctctagcactagaagcttattgtcttcaatgtaaaagaaaagctggcctaacaag

SEQ ID NO: 1886 - DNA, 439 bp, Unknown
  Description of Unknown: unclassified RNA viruses ShiM-2016 sequence
gttgcatgggggaataccccatgcaacgtttgttttagcctgtggcgacacagggaggcgtttggacagcttgctgcccagcgccttgacttatcgctcttttcttttctttttctattacactttccgcaatagttctttatttcctgcaacgaaagccgttctaaaagaagtgattagttgtacatccacttttacctttctttatttacttctctctcttgaggagttcttttcagaaaaagacatggtgtgagtaggagtgagtctgatggccgagcgtggttcacgcataactggtcagattcactctggagaagcccttgtcttggctctatattcgtttgtgtaagcccgtttaggtatgtgaaacagtttagtaatacagtattcgtagtttttgaggggaaaccttcttcttcttttacttaggctgaaa

SEQ ID NO: 1887 - DNA, 439 bp, Unknown
  Description of Unknown: unclassified RNA viruses ShiM-2016 sequence
atcagctcacgttatttttccataacgcttgtgtgtaagtatcgttacgttccctaacgtaggttgggtaaggtgacgcttctcgtcataccatcgttattttaacaactttaagcgagcaaagaaaatttttaatttcttattagtatttattttcagtctcatatagctatatatatgtgagggttttgccacttgccctttaaaggttaaaacaaaacactattataactagctaacgactagcctacctctgagtgttgttagagcaattgtaaaactctaacatcaacaggttcaagggcgaagtgccacagatgttataaggtgtgtggtcaattgcaccttgatgtgcggggagtgacgtcctacatacaattagtcacatacatgatggccaaaggggatgcttcggctgaactgagtagcaacacaaaat

SEQ ID NO: 1888 - DNA, 439 bp, Unknown
  Description of Unknown: unclassified Riboviria sequence
taatcacccgaggggtcttacccatgcaaaatgtaacactaacaatagcggacaaatcttatgcacgttttcaggaaacgccagataaaacaacttacgttgcttctggccattctgtcggcgatgtcgatttgctgctactcggccgtaccgtcccaaccacaaccagtggtaatgccaaagttcgcgccaacctcgttaatgactttacgtcaggaaccggggatgataagaccgttattggacgagcgtatgctaatgttgaaacatcggtgcctgctatggcatcagatgaagacaaagcacagctgctatctgatttacgggcctacgtggcatcagaatcttttgccgaattgtataataaacaatcgatctagtatggaattacccgtactagtttaaatagattgtaaactttaacaacaaggttaagatt

SEQ ID NO: 1889 - DNA, 439 bp, Unknown
  Description of Unknown: unclassified RNA viruses ShiM-2016 sequence
atatccaggtggaagagcctacacgtgtagagccagtgcaacaggtatacattccagaagctccatatcaaactgaacagaaccatttaaacttgaggacggcctctgccattgcggaggccagacagttgaggcagggcgctcctgttccgccaccaaggagtgtggcgggaccagtatctttgagtttgcagaggcagacggttcgtacgggtggccaacaatcgattcctgcagtgccaagcgtagtttcgcacggcatttgcgaatcgcagcagggtcgagagttgatatcccgtggagccaggcgcaaacgctcgaagaagcagaaaccagcgttgtcgcaagacttagttgtctaaagcattatccgcaatatgcagataatgctgaagacaacctcaattggttgtttttggcggcggttttggatgttgac

SEQ ID NO: 1890 - DNA, 440 bp, Unknown
  Description of Unknown: unclassified viruses sequence
attcagacctcccacccgacgacagccccacacccgactcgcgtttttttcaaaaatataaaaaccaaaaaaataaactacctttacatccaccccctgtttccaagcaccagcccgggtcgacagccgacctaaacctttacggccataagccatgggctccctactcctaccctgacccgttacacacaccttacctctctctgctaaaatacgcagcggagacaaatttacatgctcagaaccatgtcctcgccttgttactgaccatcacaaagcacaacttctctgactttcaacgactcatcgaccgaactcgcaacaaccaccttctccaactgcggaggagacaagacgctgcgttcccggatatctcttttccaccgggaccaaggaacttcccccgcttcggcaaaaaagacgagctcaacctcgacctc

SEQ ID NO: 1891 - DNA, 440 bp, Unknown
  Description of Unknown: unclassified viruses sequence
attctgtcctcccacccgacaacaaccacacaaacgactcacgtttcttcttaaaatataaaaaccaaaaaaatgaaccgactctacaaccacccctgtttcacaagaaccagcccgggtcgtcagccgacctaaacctttacggccataagccatgggctccatattcgtatcccgatcccctgcacaccccttacctttccctcttgaagtacgccgccgaagtgaaccttcacgctcaagaccacgttctggccctacttctgaccatcacaaagcacaacttttctgactaccaacgcctcattgaccgtactcgtgacaaccacttgctgcaacttcgacagcggcaggaaagcgccttccctgatatctccttccctcctggacctcgcaactttccccgtttcgggaagaagactgagctcaacctcgatctc

SEQ ID NO: 1892 - DNA, 440 bp, Pillworm peropuvirus
tccatctcaagtcatcagaagaggaaagtgcaggaagctctaatctaaataggtaagttgagtgatctttatatataataattttaggtaattgtattggtttttaataataaatattctctttttaggacccacgtctgaaggaattggatgcatcaagtgtcaaacaattgtcagatgttagaaatcacaaagttgaaactgtgcaatatatccccaaaggggtacaattaagtgttttgtctgaattgtattttctaggagatagcttactataaattgatcaatcaaaaaattattttgtattattgatgttagaattagctttagtgattttgagtgtgattcacaatcaaggtaatcatacacttctttaaaggactttgttataattatttattctctattgttttaagaaaaactaacaagtcaaaatcaca

SEQ ID NO: 1893 - DNA, 440 bp, Unknown
  Description of Unknown: unclassified vectors sequence
tttttctcgagattgcttcatggaaaagctcagcctcaaatcaatgaaaccaggatttaattatatggattacttgaatctaagattacttgacaaatgataatataatacactggagctttaaacatagccaatgtgattctaactcctttaaactcacagttaatcataaacaaggtttgacatcaatctagttatctctttgagaatgataaacttgatgaagattaagaaaaaggtaatctttcgattatctttaatcttcatccttgattctacaatcatgacagttgtctttagtgacaagggaaagaagcctttttattaagttgtaataatcagatctgcgaaccggtagagtttagttgcaacctaacacacataaagcattggtcaaaaagtcaatagaaatttaaacagtgagtggagacaacttttaa

SEQ ID NO: 1894 - DNA, 441 bp, Unknown
  Description of Unknown: unclassified Metaavulavirus sequence
tgctgtataagcatcttatgatgacatataaaactgttgcagaaacatccaagttaatacacaaataagttatgtttcaaagggggtaatacactatcacgagacctaaattattaagtacacactaagtaccactgggtcagacagattgagtcttctaaaatgattgtcgcaaataatctctatgacactactgcacttaactattagatctgaccaatactatgataaccagtttcttgattattgatattctgattcgcagttcaatttatgtgggttaggcttatcatatattaattccgccaaagtagggggaaaggtttctcaatcagtagtgacagttccaggtctcttcacaattactgttcttataagatattaagaaaaaactaacaattcagcagggattaaacaagagacaattgggggagaattacc

SEQ ID NO: 1895 - DNA, 441 bp, Unknown
  Description of Unknown: unclassified Sopolycivirus sequence
ttaacgaattcgccctttgctacggcgggttgacggcatagttatttaatcaccagtgaatggggtgtgtaccttcacaaaattcttaaacggtttacgattctgatatacgacacaacaattttaactgatctcttatgacgacaatggaaacatttacagaatatactagcttgccatcaacaaggaattctccagacaaagttttgcggttttctattgttcttggatgcatttttatactgaccttgcttgttattatgactacgattgagattaaagaatatacagaacgaagacatcttgaaagaattttgatagagatagaaactcggcgaaattatgtagaagagtctcttttgaaatcaaaatctttcaccccgattgattctgttgatttttcacaaacatcaacagttcactctcactatattgatttta

SEQ ID NO: 1896 - DNA, 441 bp, Unknown
  Description of Unknown: Picornavirales sp. isolate ltt163pic3 genomic sequence.1 sequence
atatcgtcccggcgactagccatccaggaactgtaagtaccaaggcactcgaggttcccttcatccgatagggcataaaccctgtgatcaactttcttaccactagtcggtccagattttccgattggcttttcggggcagatactagcttcatcctcagattgggcgtcgtaataaccatccgaaacaccatcatcagaataatcctctgctggggtagaatttaggttctcgacttcttcattcatctcagcaaaggattattctgatgatggtgtttcggatggttattacgacgcccaatctgaggatgaagctagtatttgccccgaaaagccaatcggaaaatctggaccgactagtggtaagaaagttgatcacagggtttatgccctatcggatgaagggaacctcgagtgccttggtacttacagttcctgg

SEQ ID NO: 1897 - DNA, 441 bp, Unknown
  Description of Unknown: unclassified RNA viruses ShiM-2016 sequence
cctggatgatactggggtgtaggtaagaggcctacacattgaacaacatattgttctaattacgtaaggtatacggtgtagtcagctctaataagaacaactggctatattcatgcacatatcagtgaaaattattattattctatatatataataaaattcaagtgcaagtacagctttaaagcacgccctaccaaggaccgactgtaagttttgctgaattaataaacttaatgtagatattttgtcgtttgtagaaataaactaccactactgactgtttagtggtaccattcattgggttgagtggaaaagacattctcagttgataataataagaacaataaaaacaaaaagcccttaaataaaagaaggcaattgaaacgagatagacgtgtggtggtctaaaaatagccatataaacgttaacgtgtggtggtg

SEQ ID NO: 1898 - DNA, 442 bp, Hubei chipolycivirus
tctttacgaaaatttcagagatattctgggagtccgcgtgaagcttttcctgattaacatcaatatcgtggatgacaaaatacaaaaattccttgactgcgttgataggatatttttgccgtcgccgccccacgcaggaaatgggtttgtaatcgctccctcgtaaatccgaagggttgaggtagagtggtggcgcccatgtagccttacgagcagatcgatgcgtctcctttgtctaaattgacggaatttgagcgtattgaacaattcatgtaaccaaaaactttttctttatacaaattttacttatcatgtttctgaagtcacagtagcttacaagactttagttagttgttcaggatgaactttaaaccatatgggataagtggttgaaactttcccgagagtggtccaggatggactaaaaaccaataaaaatttt

SEQ ID NO: 1899 - DNA, 442 bp, Unknown
  Description of Unknown: unclassified RNA viruses ShiM-2016 sequence
gctgcaagtcccttttgggacttgcagtcagtattattgtttaattgcgttattgagcgtttggtcgtttagaccaacctttagtaatgtttttatgacatctttttctcggcttataaattgccggcttttgcgaaaatttacaactttttcatgccaccaacacttttacgtggtacactcccttttctgttttaggaggctaatctagcttgattagtgagaaaaacaacgtatgtatcttggatatgatccgtttactctatgagtattgacagaaactttttatcttagtttagtaaaactaagcatttctttaaaacaccttagaaatgaccacaggtccttagcatcgactattttatatagttaattttgggagttatagcccaaacactgtaaaatgaactatcagtgaaaagttagtcaaccataccccacc

SEQ ID NO: 1900 - DNA, 444 bp, Unknown
  Description of Unknown: unclassified Qinviridae sequence
agacaacccaactcaagacataagagacaccaacgaacttcaataaatctcttaaaggttgtctcacaagcaggcccaatgataagttaatttaaaaccttttgtctgcttgtgaacctgatatcatcaagaatcgagcgtctaacctgaattttgaatattttgtccctgctgttctcgttggaaaaaggtttgttgtctctatatgcttcttctctttgatttccttattgtaattaaatttaaatctgcgttatatccagattcagatgacaagtttctaattttaccgatagatattctgcataacttatcagctgaacgctcaacctttccaaacctgaattgaacattggtataatccttaagaggtatgtacatctcttaactgttcaaaatatcacatttgatggtgactaacacatatctttcatttaaacagag

SEQ ID NO: 1901 - DNA, 444 bp, Unknown
  Description of Unknown: Soybean leaf-associated ssRNA virus 1 isolate SaSSRV1-1, partial1 sequence
gaaaagaaaaggaattgcactcaaagttagttcttcaaaggaagattgcaaagaaagctctagtgatggcaaagatgtagagaattttatcttgaacagagtgtgctgggaaaatttacccgatatttgcacctactaaagcaaaattcgggcgtgtagactctaacccgttcgcgggggtgagcatcctgcctccccgggggccagcatcttcctgtcatgggaagagcggtggcgagcctgcttttagaccggggtcgaaggcttcgtaacgtggcgccacttggtacacgctttgggaaatgatgccacggcttgtcattccttctgattgtcggctgggaagcttgaaatatcttcgggcctgggaaagcccttaaatttcccccttgactggggagatccgtctaacagggggtggtggccaacaccgttcatgaaact

SEQ ID NO: 1902 - DNA, 445 bp, Unknown
  Description of Unknown: unclassified Picobirnavirus sequence
acaaataaatataggaggaagtgtctatgaaaaactgctttcttaccattgtgatggcgataaaacattggattctcagcgtactgttacgtaggtacgcttgtagaaagaaacaaaataggcgaagcttcaaatcgctcacgaagcaacagaaatatataatttataaagactttagggaatcgccctctaaagcaaaaggagaacagtatgaagaaagagatcattgccactaatgttattgaagcgatggaattagttgacgaagatatgcgtcaggtcatgcagagttggtgtcgtcaagatgtgatgtttagacatacaacagctgataaacttgtatctaaaggtgagagatggatcgctacactcactattgacgctaaacgtcctaacattcaattccagtttctaactatctactatatttggaaggtgtctaaag

SEQ ID NO: 1903 - DNA, 445 bp, Unknown
  Description of Unknown: unclassified Benyvirus sequence
aaattcaaaatttaccattacatattggtatttatttaccctcagttggtgatatatgtgaggacgctagcctgttgggtttcctgaccgaccaaatccaagcgagcttaatccaagtacctcgtctcaaattgagtgtcaagtgaataagcatagtgaccccatcgtttcagggtagttgacggctattaatagacatattacagacgcttctctttatttatcaccaacatgggatgtaatgtttatgcgtgagcctatggccgcattgtaaaattagtggttttgaatttctattcttcggaatatacaaggtttaaaagaccagcatttgggttaaaaatttttaaaccttactatctttaactagtaactcgaattcgatttatattcagattttgtatatcaagttgttgtgttttctgatcatcattaagtggccgtc

SEQ ID NO: 1904 - DNA, 445 bp, Unknown
  Description of Unknown: unclassified Hepeviridae sequence
ttctagtcatcatcaccgtcacgatcatagcaagcagcatttactatggccaccggcgtgcatcacgacgtttgcggtttccgcgagataaatgggcagacgcgatgcctgagctgcatggcgaagccaggcaacaatccatccccttacgggaagcatcaaccggggtgtgagtgggtggctgccatctgcatactcaccggccaaccgaccttccccgtgtgcaagctacactgtagaaaccgctacctttcaaatcaatccgtctgcacgcataccacacacacaccatccactctgtgccccatctgcagcatgaagaacagaactttaccaacagtcagcaagtgctattcagcccatcaggccttcctgggcccactccacgccaaacacaccagagtttgcttgatctgcaagcagcattcggtatgtttagtgtgtg

SEQ ID NO: 1905 - DNA, 445 bp, Unknown
  Description of Unknown: unclassified Bunyavirales sequence
actacagctgcagcacgctgtgcctatatcgtatgatacaatacactcttgaagttaacaaaccagaagacgaagacatagttttaactgtagaggacttatcttataggttatccatttcaagtgagggtcatcccttagagacacaaatatcatattgtaattgtagttgtaattattattatagttattctagtgtgggttactgtagattatcatattttagtagagttattaatatcaatagtagtcttacaatacattattcagggagttatttagaagtgttagcatttgtaaatacaataccacaaagcccattcaagcaggagatttctcacaaagtgatattagatattcacaggtctgtaaggcatcttggtgcactttataataacaacaacacacttagattcatctgcaacaaccctttaccgtcaccacc

SEQ ID NO: 1906 - DNA, 445 bp, Artificial Sequence; identical to SEQ ID NO: 488
  Description of Artificial Sequence: Synthetic polynucleotide

SEQ ID NO: 1907 - DNA, 445 bp, Unknown
  Description of Unknown: unclassified Picornavirales sequence
ctcgaaatgtgagattggcggcaagagtacgaaaatgatgtttccagtgattttggattgaatcaaactggaagagctattggcaaaggagttctgtaacagcgacatcatcgccagaccgggcactagaaaggcggtatagcgaaccccggggtaaacttgaacgtgctcttccagtacatgggagaaatctccagagtcaatgtgcatgactaccgtaaaaagtacataaacctcgtgccaactgaaattttcaacttcccggactatgacctcgttgttcttcgactaccccctggatctacaggtggattgaccccacaccgttctattgaaaaatgctgcgtaagcgaagtagatgaacacggcaaaccacatccgcccaccatctgggtcaacagaaaactccggtacattaattatgacgtaaacaacaaacactgcc

SEQ ID NO: 1908 - DNA, 446 bp, Unknown
  Description of Unknown: Sugarcane mild mosaic virus isolate PSR07106, complete genome.1 sequence
tctttatctttaccggcacttccagcaaagaagtcattcctgactttctctgttgttccactatcattacgccagcgcccgcgctcccattcctgtaaccccaggctgttgtctagggttcgctcctccaccatcgccacaccagcgccctcgctctccttcctgtaaccccaaacttttgtttagggttcgtttgttctcaaacactctcacgctcaacccgttcgttttcccgtctctgtagaaactctgctctggtgtgtttgacctcagtcacgcactgtttacgcttcttctttttccaaaaacacaaaaagatttgttgtttcgtttctgtagaccagtagtagacttgctcccttttaccccttcccttcttacctttaatcctcaaaggttcttttatctcaatatcgtacatacctttcgccttctagttttccagt

SEQ ID NO: 1909 - DNA, 446 bp, Unknown
  Description of Unknown: unclassified RNA viruses ShiM-2016 sequence
cctttcgtcttttggtggtggccggcacggtcgcggccgctgccgcgtcaggcggctcgggacagacatatctcgagttcttttttggtcaagtcgggagcgccgtcgcgtacttttacgcctgcgcctcgactggccccttgtcggccatcgccaacaccatttcgaccggtggctggtttaccgccgccgcgggccttttgtgctcgcttttcgtggaactagcgatagcgctcggctggctcactgccaacgcgctgttgctcgccctgggagcggcacattggctcgccgccgccgtgcctttttcctttttctacctctcctgcaacccggtggccgcggtcgcggccgtcgggttggccgtcgccaccgcgtatgtcttgcgccactcgcaccgcgagttttacgcgcggtacgtgggccctttcgtcggagacgccgac

SEQ ID NO: 1910 - DNA, 446 bp, Unknown
  Description of Unknown: unclassified RNA viruses ShiM-2016 sequence
acgatctatcacccaattttctcacggaatttggctggcccgatttgcacgggattcgtgactctctttgctatcacgcaaagaaagttcatacgacccgtgcatcgacggttaagccaacggaggatgaattcaataaggtttgtttttatttggagcaagcatatgcgcctattcgctcggccaaattggttgagctgaatcgacccacgctgcgacgaataatcttaacacaactggattggacttcgacccccgggcatccatatcggtgttacggtaccaccaacagggaattgtttaaattcgacggacttgatgttgacgacgcgcgttttgaagtgatatattcggcagttgaagcacgatggcaggaactcctgactcggccttcggcagaccccattaatctcttcatcaagcgtgaacctcacaaaaccaagaaa

SEQ ID NO: 1911 - DNA, 447 bp, Odonate arlivirus
taaagtaaagacagatagcaattgctgggtacaaagaatttatgcagagaatactcatcaaataataggaaagaacgagaaaagcactcaagcaggatacagcacatgttatgtactatttaattgaagatgctgtttcactttaaatcatgcaacattctggaataaggtattgatgcacatataatattcttataatgtgttctgttagacaaaactgtattataatattcgatgacacctgatactttgtgatttcctgtaatctacctatgatatgatggtagagtgaagcatttcatagttgatatacaatcaattgtaaagcaatctattaataaaaagacaagtctccaaaggatcttaaattacatcttatcagaataaggaattcctagtgattcatcaatccttgaatgcccagtcagagataaggcaactataaac

SEQ ID NO: 1912 - DNA, 447 bp, Unknown
  Description of Unknown: unclassified Picornavirales sequence
gggatttatacgagttgcgaccatggggcaaacccccgaaaccctatttagggtggcagttggtcgagcctatccgcgtcctaggagaatattgtgagttgaaatattttccgaagacaatgactcgctgaaataaaaacaaaacaaaatttagtcacatttgttcaagatgaatatggtcagagtgccggttcaggagctatccttgctgacccaaccattattcatacagatgaaggtgattataaagattttttctctcgaccagtcaaaattgcatcatatgattggacagagggtaattctgttactggacaaattagcccgtggactttgtattttcagagtgttcccatagcagcgaaattgcgaggtttttctcgtttgcgtgctaatttgcatatacgtattttactcaatggcagtccatttcggtatggggatatc

SEQ ID NO: 1913 - DNA, 448 bp, Unknown
  Description of Unknown: unclassified Flaviviridae sequence
ggagtcgtgccatgtgcaccagcctgtaaaatggccttctttgaagatgttcctaggttaatgaacgtctaaccgcccactctttggttgagacaaaccttctgtgtttgttctgagtaggtaaggttgtgggggtgtgtccccccttgcgaagggaaaaaaggctaatcccttgcaggcggataatggtaagccttgtgtgagcacctgaacttccatgactcgtttgctttaaggggagaggccggatttccttgagctagttaaagttttacccctcaagggatgaagactagtcgcggtagtaaccttcatcagctttaacttttcccatcgaaaaaaccgtggggaaccccaagctagcccaaaggtgcttggggaggttgccagtgaccgccagaggataacctgggcacactggtatcaaatctaattattaattctcact

SEQ ID NO: 1914 - DNA, 448 bp, Unknown
  Description of Unknown: unclassified Iflaviridae sequence
acacatacttgtctagcacctgcattccaaggagtattagcgaaaacctttttcttaaaaccaattcttaattttaagtacaaccctcgcagaacttacaaatcgtgctcacgccttttgttatgtttagttaatttgtagttgaagaatttggacgaataatataacgtgcttattattcacgagaccctctaacgtttttaacgcattgatctcgtaaaatctgaagactgatcttacattgacattaaattaaacaaaagaaacgcaccacgacagtagtgtggccttactgttaaaacaactaggcctaacgagtatttctaactgtgacgttcgatgaatcattccgaactatgtactaactgatctaaatcgttgttctacaaggaccgtttcaccgcctcaatagatcctaactatagaggaaaagaaacaacaaacaaac

SEQ ID NO: 1915 - DNA, 448 bp, Unknown
  Description of Unknown: unclassified Picornavirales sequence
aaaacccacgtttctaagtttactcgccggccaagaatggctactggaggcacgttggaagctacttatttctagcataacaagttcagtgtcgaggttctgccctatgtttgcagatttaaggtgctgggtacgcttttaggtctgaggaccaagaattacctttactactgtacaatatcaacatgttcgctccgcgttcgggagcccaccctactgtaatttcgaaaaacagtatatagggcctagcaacatcaccacgatttgcgctggtgtgagctggggtctatgttacccaggtgggaatttcattccttatttcaaggtaaggatgatcttaggggttgagataccccacgctacttgagggcatggcctatccatgacttgcgctaaaaattacgttgcgtatagtaatcacgttcccatttctctcaaaccatgaaaa

SEQ ID NO: 1916 - DNA, 448 bp, Unknown
  Description of Unknown: unclassified RNA viruses ShiM-2016 sequence
aataccggcgtcacgagtaaggaacgtgtggacagggcggcctgtggactcgtaactatttagttttaccacctaggaccgagtttaaattgtccagggaagtggcgtcactcacgccttgttgagtcgcaaggcgtgtgtgaaatgactcgccgaaactacagaccatattaagagagtagctactgagactagcagagatgagactgaggtttgtgaggttattgaaggtctcacaataaataatgacgcccaacccactggagtgaccagcttcttgcaagaggcatgttcatcagtggaagttttgggtaaacatcacaaaccgcctcaagttttgaattatcaagaagatgttcagaacttgactgattattttaaaagaccccggttgatatccagaggggctttggctttgtcttccattgcttctcaagggcagtgggat

SEQ ID NO: 1917 - DNA, 450 bp, Unknown
  Description of Unknown: unclassified RNA viruses ShiM-2016 sequence
tgcccatacggcatccttgttgatagtttcacctttcgaggtgacgtcgaccgaaattcctgtttatctaggttgtaatctagtctattagtgtaattgtacatatttatttatacactatgtaaatatttgtaatatattccccagcggatttgtaatatagttagttttgttagttttccttgagaatttctttttctcaaattttagcaatcgaaccctattggatggcattttggaattgaacgacgcgaatgttcacttcttcgtagtctgaccccatttccatttttccattagttcgctggttttgcgttacgccttttgtaccttaaaaagatatgtgctgcgcactttggtctggactagacctaataaaacttgttccccgttgtgcttatgtgagtaacgcacgagtacgtaactcaaagactcacatatattttaatt

SEQ ID NO: 1918 - DNA, 451 bp, Unknown
  Description of Unknown: unclassified Picornavirales sequence
ccttagggttatttttattgtaactagttggaacaatttacaacaactaagctactttacctccggtctcatgtagacatttggggtgactgtcatgcggtggaacacttcctgtccgtttgtacatggtatttggtttcactgatggctttgtcgctaccatctaaatgcttgagttctttttggatgataacaatattcttgtttcttggttggattatgtttgcctggcagaaaggtgttaaccatgcactaagtatgacatgcaattcccagccaagggcgaactgtacattgttgagtgcacgttagatgttagctagggaactagcttaaccaggatatatccgacattgatacgttggtagtgggggttgctaccatttatgcacacagcctgatagggtcttgaccagagataatgtgcagtataattggtctgtccgtataa

SEQ ID NO: 1919 - DNA, 451 bp, Unknown
  Description of Unknown: unclassified RNA viruses ShiM-2016 sequence
gtctggtgcggtaccgactcagcagcgcctggaactcaggcgcacagggctttgtagctgcagatgtcttctttttcctgtaactacaagcaatgtggacgaggggccacaacagcaatccaatcccccacaaggtagcgcaccggccgtgaataagccggtagagtatggatttactccacccgaaatctccaaggatcagaacgtaaaattcttggatgccgaggtaggcacgggtgatacacgtggtaccccttccgatcctctccgtgattctactttgatcggagatgccggattgggtgatttcttcaagcgacctataaagatagcgagttttgactgggccacttctgtcaaactcaatgaacgtttcaatccgtggcggttcttttgggaagatcgtagggtgattaatcgtattgccaattacaaactcctgaaggccacc

SEQ ID NO: 1920 - DNA, 452 bp, Unknown
  Description of Unknown: unclassified Totivirus sequence
aaaacgaagaaactacctctcacaagttgggagagaagctgtatagaaactcaccctcggtaaacattcttacggactttgaacaagagctagtttcgtacaactactcacaaaagagtgaacgcactgtcacgcatgcctggggttctaacttggttccctcaagcatacgcgtgtgtggtgggcgcgtgtatgcctcaccatttgaagatgctactcatgtctacctcagaccgtacgcaggaagggcatgggaaggcgaagacgtctggctgcatatactcggctgcagcacgcttgccactgtgataacgattgccgggcgtaagcactcctattacaagctagatcagtactgccggtattcagatccttcgattattgctgtagtatcacgacacttgacggggctgtttgagtcactaaacttcaaccagcctaatgatgatact

SEQ ID NO: 1921 - DNA, 452 bp, Unknown
  Description of Unknown: unclassified Picornavirales sequence
tatctcacgtcgctcgtacgcaaacgttttacaccagattcgcttggtctacaacggctacagcaggttcagtgttgtttagcgcgcccatcaccccaaacttctatcgttatactatatccgccgctcagtacgcccctacaactttagcgtataccgcagctgcttttaggcaatggagaggtggaattaatttcaattttaaatttgttaaaactaaatttcattctggtagagtaagaattatttatgtgcctggagattattcagcgggcacaacgcttcctgacagctttgatatagacgctaattattcaactgtggtcgatcttcgatcagatacagatgtggaatttaatgtaccgtatgttgctattcaacaatggttgttagtcgataatgctttccctggcacatcgcgtacgaatttgtttagtactggcaccatttat

SEQ ID NO: 1922 - DNA, 452 bp, Unknown
  Description of Unknown: unclassified RNA viruses ShiM-2016 sequence
tgggagtgtatgagcccttacaaaccttgtgaggatgatacgcgatcgcagtcccgacttgtctccagacgaggttagacaggaagcagtgttgcgggtccgacgggcccggacagctcctgagctagtctggggcctattcgacgctgtgaacaacgcctgggaaggcacccctggacagttcgcgagtacgtgctgggatctctccgcgcttctgcgccacatggccatcggcgccaacgggcgagtgcagacagtccggagatcagaccggtgcttagcaagagccgtccttgaaaacgcatttgggaggagcattaggcgcaacctaagccttcaccgctcctaccgccatcttcccaggaatccaaccctgcgcgaggctttcctcgctgagagattggtggcattggaacgccgaatagttcactacacggtgacctggtcggacg

SEQ ID NO: 1923 - DNA, 453 bp, Unknown
  Description of Unknown: unclassified Hypovirus sequence
aaagatgttttcattaatcagtgaacgaaagttaggggatggtactcttagggttgatctataaagatcctaactaggaggaaacatggccctgtctcgtgatgatttctttgttcaatcactaaagcttctcttcaccaaaaaggagagagctttgagagcttagctgtttcagctatttgaaccccgaaggattcatgtcatagacatttgacttctatttgaagtcgttcattcgttcatccgaagatgtaaaactactgcgcatgtgcgtgatggtcctgaattttcagagtagaacggcagggatgattgttctgtggagtagtgccctagaagaacaaatcctcattcccactcttgaaagtggcccatggcaacccgtgatgcccggatcgtcttctggacgtaaaaggttagaggctacgagagactgtagagaccttggtcaaa

SEQ ID NO: 1924 - DNA, 453 bp, Unknown
  Description of Unknown: unclassified RNA viruses ShiM-2016 sequence
ctgcagggtattcaccctgcagtcttgttggaatatttgatagtatgctacttatgataattagctcgttcgggtattctaacccgtcgacttaattacatagctagtatggtattgtatgtattttgacattttaatctaccttttttgttattttattatggttaaattaaaatatcgccttttcgtcttccaaaagacacaaaactattggttctgacttcgcatgatcaggtaattaacacttcgtgtaatgcaatctccagtactttacagctgattcaaactggattaacaacttttggaatcgccgctaatacacgttacgtatatgacgtgccctttgatggtacgcaaggtgtctgtcctttttacagaacgcggtttaatgggctattatatgccggccatgcaccgaagcactatttgtgcaagcaaaacaggtacgctcct

SEQ ID NO: 1925 - DNA, 454 bp, Unknown
  Description of Unknown: unclassified Fusariviridae sequence
gttagaagccgtctagctctcgacgttaaattgagcagacatttcgtttaagaagggggctagagaggtagcctggtgtaattcctcaccccttaaaaagttggttcgcagccatccatattcttaaacggtccagaaagtgtaaactggaacctgtgaaaattaaactaaggtggtgacttagataacctgttgtgagtggacgctcaccctcaagtgaagaaagctggatttgtacaggaaggcacttagtaagggtgtgggtgttagatgacgagtgaactgagggacccaaaaggttgcataccagctcggcatctgcccacacttctgaaacagtgagcaccccaacaaggaaggttctccaagcttgattgacagatgtgtccactgaccgggcgaaagtgccctgacggtcgtgaaagcacggcaaaacccactaacatcactcatc

SEQ ID NO: 1926 - DNA, 455 bp, Unknown
  Description of Unknown: unclassified Totiviridae sequence
gccccttcttcgtaggcagtaaacctaatactgcctctaagttctctgtgtccggacgcgcggctgtaaaccgcgacgctgacctcgatatcctgctggcgggatgtcgtgcaacaaaaaattcaaaaatatggacggaagcggtcctgaggagacgtcacgaaacggctggtccgtcggccgcgagtgcagctgggctgtgcaatcaacaactgctggtggatagtaccccgaacccccctattagtgatgctggacccaccggtgctggcccaagagctaagctttctgcgcgagcttctcgtttgcgcgtctgcgaccccacggttggcgccaccgggaccggcggaacgaacggtgtgcacggttccctctgtccacctgttaccgcgggcgttccttgtacggaacggcctgtattcaaagccacccctgccatatcgcaggctccgtcc

SEQ ID NO: 1927 - DNA, 455 bp, Unknown
  Description of Unknown: unclassified Picornavirales sequence
ctacccgcatttatgtaggctctaagagttaccttatgattggacacagtttatgagtgatttggactctttccgaatttgatatattttaaaattcttacaatttagagagaatacgaacgcgatggaccttgagaaaatcttagctagtaattgaatctttattgcgtaagaatgagatgaacggaaccttaccaatcccaacccaaatatggaggagctattgcctctttcctgagggcggaaatcagtattaaccgacgtaaacccaaacccaaacccaaaccgaaaccgctaacctgaactctgcactactctacttggaacgcaaaggaaaaatttcactagaccaatgctgttcacgacattgtgaacgcccatattttgtttatcgatttggaagacaagctgtcatcaaaacacttgatgagtgcattcttacggtcgacactccc

SEQ ID NO: 1928 - DNA, 455 bp, Unknown
  Description of Unknown: unclassified RNA viruses ShiM-2016 sequence
acgggctctgcactgcgcctggttttaaatctcctttctgtattttgggagtaccaggtatcagtgtaacggcgggagcccgattacgtaaggatagtagtaatattaggtatttaacacaaaccagcctaggactaccattccaagcccctgaagcaagcctacacaatgcgctcgttgcgatagaacgccgggttttcacagtaggaaagggctccgagataatcctcccaccacaagcacaacatggtatttttgaggaactcggctacttcagagatgaggtagtacgtcattcggggtattgtaggaaattcagcgaggtcgagctcgccaattcgtaccattctggcaaaagatcccagtactacaaagcaattgcttcattaaagactcgtccatacgaagaaaaggatagctttgtcacagcatttatcaaaaaagaaaagcactgg

SEQ ID NO: 1929 - DNA, 456 bp, Ollusvirus coleopteri
cctacttctttatgggctattttaaaacttgagttggactaatatattttcataatgtctaatgatagggttgagtctctccatcagatcagaaacaaatctttgccaagccaaaaatacaagactccagataaaaaaccagacttagatgttgacaagcgtttggcaatcattgagtcgaagttagattctgccttggctctaatcagacaattagtccaacttaaaaatgctgaagcttcaaataataatactgttaaatcttctgcacctcctatgtatccccatcttcctcacaccacccagcctagctatgttactgcattccaattgcccaagccttattaggttagcataaaaagtttaataaaaatggctgtaaattagctattttaaaagtaatatcgcttttaccctctttattaccaaaccagctatttttcagctatctcaatc

SEQ ID NO: 1930 - DNA, 456 bp, Unknown
  Description of Unknown: unclassified Sopolycivirus sequence
cagcctctgaagcttttgaagctgaagaaggtattgaaagcggagttaaagttggtgagtcatttggaggaccattaggaatcggtgcaatcattcttcaatcattaggtgatgtaacaacaaacgcactaactgctggaatgaaagagactcaagctagcgattatacacagaatgcaacgcaacaaggaattggagcacagttgcaagctggtttaattgaaaagaatgaaactgccactattgatcaagtatctgctgtttctaaaggatttgatcttttgggacctgctggtgctggaattggttatgcaattggacaagcggcttttcaacctggagatccttatttgaatacagtcaactcctttaatggaatgacgaaccctcaagacactggaattgtacagtcactgaatactgatagtgcaagcggtgcaacacaacaagtagaaa

SEQ ID NO: 1931 - DNA, 456 bp, Unknown
  Description of Unknown: unclassified Picornavirales sequence
actatatgtaagggagaaagccgtggctgattcgctagaactttgttcaataggactgttcttttacgttttgtaacgtagtggaggttaggtccgcaaatgaaagctgcctttggaaatatagtaatgtaaacctttatagaagtataaagtggaggtctttatcgaactcttgttcattctcctcccattctcacatgttagtgggaaataatttaaaatggatttttctgtttgaagtttgagaaactaataatagaagtagcaactaccaccgaggtggaaaaacgtcattgagttgtgcgaaagttgtatttcgatgatttagaggtctatcaaatgaatggcagattttgaagtttcaaattactttgtgtttggaactctgttattaacataaagcgtcgaattggagacgttaaatcgaactttttcttattatttaaaccaatcaat

SEQ ID NO: 1932 - DNA, 457 bp, Unknown
  Description of Unknown: unclassified Partitiviridae sequence
taattatacataagttctccttgttttaaataaattatatttaaaactaaatatattagttggtgttcatgtgagactcaaagaagcattaaagaagtttgacttcgtcaaacgtcttaaaatacctgagaagctatatcctacgatagtagctaatttagctgccgtacttaagggctcagacaataagtacattacacctttgggtaaaacacacgatcctatcgaattaatcgtagcttgggatgaagtattccaagctaatgcacataaactaaacgctcctttactagacattgaagcagagcaacggcgcaagtttggacctcgttcaagggctaagccatgggttgaaagaaaaccaggtttattagcctcatttcatagtcagattgataattttacgccacctttcttcaaattcgaagatggtgaacataatttatgtcctctttct

SEQ ID NO: 1933 - DNA, 457 bp, Unknown
  Description of Unknown: unclassified Picornavirales sequence
tccaaaacttatggtttggatttaggcaagttttacttgtgctttcttgatcttgtttttggcattactaggttaatagtgtattgatttagtttttatatttcaggtagttaggcgagatgctctactagcagtcctaccgtttacaagtatagaaatgatagttggttacttttagcttttagtacttagatggatgaaagatgtgtagcatattttagtatgatttatgatacacttaagttattgaaaagtaaatcttgggttccaccagtttctttgattaaataccatcggcaaaattcttagctcattaatctttcttcctgaagttcagttttaactgagcgtaacagagattgtatttaatgcaacattagtaagattttggcctgtatttgttagagaactacagcgaataaaattcctaagtgttttctttaatgacatcaggaag

SEQ ID NO: 1934 - DNA, 457 bp, Unknown
  Description of Unknown: unclassified RNA viruses ShiM-2016 sequence
aaaggatggaagattgaaaaactggaactgtatttagtgaaagagaacaactgaaaaggttgcagttttaaaccaaaatgatctcagttatgagagaaattcggtattaaatctatcacccattttcctgattgaccctagttggtgtcaactgtaatttgttttgtttatttgttgttttatgtgttaatgttactaagtttttgtgaatatgatgggaaagcaaccgctctaactccaggagatgtacctgcccgagggtaagggaacctttgtaacggttttagatgttagtaagtactatagttcacgaagattgagtatactgcgctggagtggggatggcagcgcttaattaattatcttcccccggatggcagtccgttagccactatgtggtagccgatgctttggcaaggcatcgacataccctagtacgcaatgccagtatgagtgt

SEQ ID NO: 1935 - DNA, 458 bp, Unknown
  Description of Unknown: unclassified Picobirnavirus sequence
tctttacatctatattatctttaattctttattctattccaaacaaatgttctaattcgttctctagtaaagaaatggacaagtacgtccttggagaacactaattggaacaaattacaaagaagtcttgaagcaattagtcctaggagattagtgtaggacggaaactttacttcaagcaaataacatccagaaaggagggtgatttgacacagaatcagatcaactaccaaagaacgctagaagataggcgttcacatcttgcgaacgagaaagagacgaaccgagctaacactgctcgggaaacagaagaacatcggtccaacgtagcgcgcgaatatgagaccaatcgatctaacgtcgcaagagagacagagactcatagagcaaatttggttcaagaaaatttgacgtctcgtagagaccaggaaacgcgtagatctaatctagcgcgggaa

SEQ ID NO: 1936 - DNA, 458 bp, Unknown
  Description of Unknown: unclassified RNA viruses ShiM-2016 sequence
cttccggttgccgacgcttccctcagttataaagattatcttaacgaaaaaatttttctcgctcctcctcaacctcctataagaaatcaaacctcggtctctccggccttaagtactactactgccgttagtgtcccgactacaacacccgagatcgttactacatctcgtccgataccatctactactagaaagtcgagaccagtccctccatcttccattcctccatacatcgattgcggatgtctcgaaccacatcagtgcggtcctcctttaggcctccctcagaatgaccctcgtatgtctcgtgattaccctagggtttattcacctaactgcaattggtctgatggaaaacctcaggacacctatataagacctcctgacactcgcaatcgtcatcaaaatcaacgatcccgcaatatttaatttgaatataatttatcaattctataaaa

SEQ ID NO: 1937 - DNA, 458 bp, Unknown
  Description of Unknown: unclassified RNA viruses ShiM-2016 sequence
gtgtcatctgcgtgggcagaagatcttgtccacccaagtgcgaccgcaaggtcgcgcctggccgatccagggagccaaagcacgaagccctcccgtgcgggcccgggggcagagaaataacatctctctgtcagccgggactcgtattcggagagcaagcgctgaacgctcccgctagcgggaacaagggacaccgaagggagacgacccccaggcacgcccttattcgcctcaagtccgcggaacatcttgcggactctcacggcgatctggcggggggcaacccggaactcgtcgcggggctggcgctcaggtcccaggagcattctgagctcccgggccatacgagtcgtcagttgctcgacacagtccactgtgccgagctcagagcctttgccctcgaaggggactttccccctcttgcaggcaacggcgctgaccgcgagcttgtgccgggt

SEQ ID NO: 1938 - DNA, 459 bp, Unknown
  Description of Unknown: unclassified Totiviridae sequence
caaactcacaatttgggggactctgccacaccgtggatgacggcctagattgcgccgttattgacgtcgtgtatggcgttgttgtcgtcccatgcccggccggcccccccctccactcttcggtggtgtgcggtgccgcccggcgtggccggttcatccccatatacgcttcgtcaatgacgagcgccatcgtggccggctcacatcctgggcagggggtccgtcgccgctcgactcttgttgacaaagcggcaaaccgcagcgcagcggttgtgacgtcattttgcgcgcagaaccttggggtgcgcacccataggccataccatccgaacagggtggctccctggctgaaaagtggttctttggtacacggagtagggagggctacggcctccgttgatcccgtgtgtcaacgaattatctgctcgcaatcttcaccttgtttaccccccccaagcc

SEQ ID NO: 1939 - DNA, 460 bp, Chinturpovirus 1
gtggaaaccccgcggatatctctgaggcggcagcctgtgtacaggtactgccgacccttctatagcgactccaaactcgacccgcccctagcctgacaacgtcaggaaggcaagccttgaaaagcctccgtaaccgtccaacggaggtggtcgtgctttgcagcgctcgttcttagtcagcgacccaaactcagttgaccatcgtttcagactcgagagggcgtgccctcatctgactcgacttctgagatctagctgacggtctgtgaccttcatcaacggaccattattttctacttagttgctcaccaggctaaacgcgagtgttctcgcgcactaagtatacttaaaatcctatttgctctgacgttatagagcttaggttcagtgttttatacactgatctccatcaatctccacgacatctcagtgttgtctcctgtgatcctaactactggta

SEQ ID NO: 1940 - DNA, 461 bp, Unknown
  Description of Unknown: unclassified Marburgvirus sequence
aatgatgctcaaataaaacagaagtccatctgtataaggagtatggcttaaatgggtatttgtcagattcttaagagattagtttgtattgatttaaataatgctttaaccttacattgctgctttaaatggttgattaagctgattagcttgtaatatataatctcttctgggccatcagatctgtaatgggtttactagattatatacaagacacagtaatattttataaacaattcttgctcagttttgctttgatttaataacatacatcattgtgcctttcattgctaggtcaacccaactgataatgatattccttctgaaatagtaagaaaaactaatgaagaacattaattactgggtaaaagtgattaagttctttaaatttgatcaaagtaatattttgtcagtgaatatattctcatatcacttgattaaaaacaggaaattatcctaac

SEQ ID NO: 1941 - DNA, 461 bp, Unknown
  Description of Unknown: unclassified Dicistroviridae sequence
gcaaggtttatctcttcggagtttttacttgtatcggagacagttctggaccattcctgcggaattcgctaatgatcgtgaataacaccaacggaaaagtttgtatctctactgtagaaatctccaaccccaaaccccaacccccaattttaaactcatggacgaaggagtataactttcccaaactcatagtattgagtataactatactagtcagtaaaagactttaatccgacacacgtagtgtcgttaaatgaattctatttgtatcaaatagtcttatctccccgtaaccaacacgaaaatattgaacgtttcgtactaagttacatggatgtgatcttgctagattatactgacgacaaattctagtaatgctatccaactacaagagccctatttagggatggcctcttcgcagcagccctgcaaactgccactcgtcaacctgcttcgactct

SEQ ID NO: 1942 - DNA, 461 bp, Unknown
  Description of Unknown: unclassified Picornavirales sequence
catcatggaattttggagctatcaccgataggcttaaaaattgggtgaaaagtatgagtaaagactgcattcagttttttattgattctccattcgtggctggactcctttctattattgctggaattgctcaattccttggattgtatatggttatgcctactacaagaactggaattgctgcccttgttgataagtttcagaactcaacaagaaccatgcattatgcgaggaatgggttcaaaggagtaatggattcggtaaaggactgttttgcatgttgtaaggacatgttgggcatttcaaataatgcggaacttgaaaagtttaaagaacaggtcacccaatcattggagctttgtcgtgatatgttaataacagcacagtcaaaaccaggaacatttgtaaatgattcacagagatatgtcggatgcagaaaaagagtataggagacgtcatct

SEQ ID NO: 1943 - DNA, 461 bp, Unknown
  Description of Unknown: unclassified RNA viruses ShiM-2016 sequence
cgtgtatattgtatagtatatgcgtaaaatttatttgcccgacttacgacggatttcgtttgacgagcaggagcgttgacttctgcacaaagtatgatacaaaagttagagtattcacgccttactattatagtgacgcttcatttatttttattttcatattatttcgttaaactttttcgttaaaagttaatttatatagtatagagagctggacttacattgtcttcgcttttatgcgtgcttagttagagctggattgctcacgacgtatgtgtttaagttgagattgtgtgtgaaattttcagtagctttatatagggggatatcaaacctccaacccaattagaatttgcgcttttaattggcacttgaaagtagtgatgtaagcaaataaccttgtgtgggatggctcccacacattgtatggcccgtcggcattgccgtcaatcgtaacacct

SEQ ID NO: 1944 - DNA, 461 bp, Unknown
  Description of Unknown: unclassified RNA viruses ShiM-2016 sequence
aatccttgcggctacaagccgcgagatggctggaccgcgcccagcatgctaaaatcccctcgactgaggagcgggagcgcgtgattgctaagaccgtgagggcgttctcaaacgcacaaacaaatggccccacggcaaccagagatggacggctgacctggagaaactttctccaggatttcaaaagtgcagtgttctccctggagtttgacgccggcatcggcgtcccgtacatcgcgtacggtaagcctacccacagggggtggattgaagatccacgacttctcccagtgttagctcgcctggttttcgaccgattacagaagttgtcggaaattaggtttgaagatctttccgctgaggagctagtccaggctggactctgtgatcccattcgactatttgtcaagggggaaccacacaaacaagccaaactcgatgaggggcgctaccgcctcatc

SEQ ID NO: 1945 - DNA, 462 bp, Unknown
  Description of Unknown: unclassified RNA viruses ShiM-2016 sequence
ggtgaatccccccctcttcctctaacgtctattagcaggtagatgtgtcttctcttattttgaagatgaacatactgtggattctcgagtgtattgtggctacacaatatagctcaaagagctttttagcgagtgtgtattcgctagattgcacactcaaactattaagttctggatttggtgactatttcagaacatttctttgttcgtatgtattatatgtaatatattctgaatttaaggttgcactttggtggttcgtcctacgcaggaatcaccatgcaaattcaaaagttttgtcattccctatacttcgggcaaaacttcaacaatattttattgttaattatagggcggtctagtatcaatcgttatatgacctaaatatgtagtatgcacgccactacgtatttagtattttaagtgcagcacctagctcaaggttatgagcccttatataaa

SEQ ID NO: 1946 - DNA, 462 bp, Unknown
  Description of Unknown: unclassified RNA viruses ShiM-2016 sequence
tgggaaatgaagatggtgtgtatttatttatttatttattaagttaatgtttaatattccaagttctatatttgtttaactgtgtgcgtttccttagatattgatctactctcttttaactttatctcagttgttcttgacaacttcattaagttgatccgagtcctgtcatatagtcaatcgtatgggaagtaccaatacccttcttaatcccaacgagtgagatgacaataacagcatttggcgttccatgctgttttagcaggaatgtcttattgactcgggaatatttacttggtaattgatgtgataaactggtcaagtgcctgcgataatgacacacgtatacaatcaaaatgaggcctaaatacggcttttaattggtgctatgcttcgaagcaatgatacaatgatataacattacatcaaattagatcctgaaaaaaactaacagacctaaag

SEQ ID NO: 1947 - DNA, 463 bp, Unknown
  Description of Unknown: unclassified RNA viruses ShiM-2016 sequence
ttcatattgcataccgaccgtcatgtctttaaactgtccggaggcgctgcggtagtgtcgtcgttactagaatgaaaccaaagccgaactcaacattgattacagatgttatgtatggtctagcacataccatgcaagcagactgctttgttgagacaagaatgacgcgaacatgcgagtaggtatttacttacagtggtttatagccccacaaacaaaggtgtgaataggcagacacaatgatgcatgtgtctgacccgtatcaacaaatcgcattagtaattttacaaattttattacagagccaacgatctctataaaccgtacactatacaaaccccagtccggtgcactgggtactattcaagaagaaggtgttgcaaatcttacggcacaaatcactaactttgaggagcaagatgctggttggaccacatctattggcgcaggttgggattctacg

SEQ ID NO: 1948 - DNA, 464 bp, Unknown
  Description of Unknown: unclassified Higrevirus sequence
cataaaattcaaacaattctactgaggtgatcccttggtagtcttattttgtccggcgacgaggggtttggccgttatcaccctagacgctgtagtcatcaggtactggcacctgtactggagaggggctgcacgttgccatgctcggtgtggacgcgagatagtgctatcgcatccgagagctggtgtcctggggactgcctggggcgtagctacactattatatatatatgttggatcgatctgaggcaaaagtccactgcttttcattatatacgtttggactaccggttagcgggtggtacgattagggacgcctgataacctttcgtatctgtcagtgtgataatagtgctttagggtaagtggtgccgacttgtcggttttggtcgtggtcatttggcctggatgtgtttaggtaaggttgtgtattggttgttgcatcttgtctttgggacctcgaa

SEQ ID NO: 1949 - DNA, 464 bp, Unknown
  Description of Unknown: unclassified Picornavirales sequence
gggggaccatcgacttatactcgatgctttccccctctccttttcaacgtcctgggcacgatacgcccaaccctactaatcaagcttgctagatttgctggtaagacccgtttggtaacgtaattacccgtaacgaatctaagaggtttggctggacttagtacctattaagatatgccttccggttatgtctcgagctctgctgtggaacaacacttggtaacaagtgccccagcagttagtgatctatccggttgaaacagtcttattgtgggaacagtttaagtattccgattacattcggcgtgaccttacgcagtgcacggacggatagtaccctcctttaggatcgaatccgttctttaggcccctcttggcatcctagcgagtcacctctccgtgacaagatagtgctgtattggcaaatattttcactttttaccaaaaactttcatgatgacaaa

SEQ ID NO: 1950 - DNA, 464 bp, Unknown
  Description of Unknown: unclassified RNA viruses ShiM-2016 sequence
gtgccttaaacctattcacccagttttgagtctgggctctacggaaaagcaaaacttcatgtgtatatatggataccaattctcgcacaaattttgtgtacttttatgtgttagaattaggctttgtacataaagacaatctgcctgcggattacccctatttaggggagagtttcgtctactcaatgtaaactacaccactcctagcactaagcaatgcctggagattgtaaataccgcttactaataatgtaaataataataataataatatatatacatcgggtattacgtacccaacaatttttgaaattttgtcagacctcaggaaatacaaaattaatccaaaccgttttgataaactatggcataaacatagatgggaattagggaaaactgtttcatcatttgatggagtggagattcctcctaaaagagtgaaccaacgcctagttaaccaggtt

SEQ ID NO: 1951 - DNA, 465 bp, Unknown
  Description of Unknown: unclassified RNA viruses ShiM-2016 sequence
gtgttagttcactagggttttatattaccgtagtccatgccgcgttagtgctgggcgttttgtgccatgaaacggtacttagtttgcgtttgttttgagagtgtgagctgagtgaaaatatttattctttgatgatatatacgtacgaagtactatttaagtatgtgtatagcttcgggttggcaatatacccgttacttattgattggccgatatttttaagcggttggagtaaattgcatcgcatcatgtaaacaagaaaatgttcctgtttttgtggtatttcaccgtaagactcagtgttgagcagggtcatatcatatttacagtgtttgaattattgtagatggtggcatgcatttgtagccaattgtcggttcgttattgaacccccaagcttgcgatggtagtagcaagttgagccgggataggccggtggttacactatcaaacaactcagcagtg

SEQ ID NO: 1952 - DNA, 466 bp, Unknown
  Description of Unknown: unclassified Gammaflexiviridae sequence
cccccccttcgtaaaaatttgcggcaattacctccaagctcgaccacacgaacgagctttcacgttcgtgacttatactgattccctccgaggtcacatcaaatctcaacttaaaactttcggtgacgtggagggacatcacatcaagacgtgggaactggctctgctccaaccatgcaacccaatcgtcatctttgacgacgttggtctagctcctcctttgttggacttattccttatcacccaccccaacgttaaacactttttctttaccggagaccccgcccaaccccaatacaacgcctacaagcgcttccctaatgccccctttgtacccgataaccttaccattctcgctcaatcagcttgtcgttacttccgagaaactcgccgggtcccaatcgctactgcttccgctcttgggctaaacacctcatccaccgctgagggtggccttggactctcc

SEQ ID NO: 1953 - DNA, 466 bp, Unknown
  Description of Unknown: Hainan oriental leaf-toed gecko picornavirus strain LPXYC2131221 sequence
gccacacgggggtttaattactcccgtgtggttcgctttggacagggtttttgctatgccctggggaatttcttcccgaaatagccttctgcagttcagagtagtagctggactgtgggagttcttttctttctttttcttactttatgtttgtttgtttaaggtttgatataatggttttatgtaatgtagtagccagtacgctggtgagcctacgtcaagattttattagagggccgtcctgtcctcgaatgttattgatgggtatgtcaggtgggttaaaccatttggcgggcagtcactggctaaagggcgtactagtgattctacttgtgcatgacatgatggttctgtaagtcgcagagtggagtacggacctggatgatgctgctgaccagtggggccttatcccctgccgtttttacgcaattggcggtatgggtggtagttgcagtagctcagtatt

SEQ ID NO: 1954 - DNA, 466 bp, Unknown
  Description of Unknown: unclassified Picornavirales sequence
ggggtgtcgctgtgtgacaaaacaaccacttttttctgacttaaagctacgaaagcagcatcgaacaaagtcttagacaaagtgccaagtgctccatgtagctttaagtcagaaaaaagtggttgttttgtcacacagcgacaccccgcatgataccagtcagttcggaattcaattcttccaggatagtgtgcaggtgcatccaaaaagcgccgtgcgccatttaccagcggaaatttcacctgtgtgcaaagtttatggagtagtgggtaatcaatccacggcctattctacagtggtgacgtcacccatttctgatgcggtcgagagacactgtggtattgaacagcgttggggtcctccgaaatttcgcagtaattacccatggcaagcgagtttacagttttcatcccaacctactttaggcttacctgccgaagatttaatttatgcggtagattcctac

SEQ ID NO: 1955 - DNA, 467 bp, Unknown
  Description of Unknown: unclassified Picornavirales sequence
cgcggttaaacccgcgcaaccttctttcagccgcgtctgagtagcgcggttagtcctgatacacagtttcctgttgggtactgtgtcttcgggtgaatgctcttgtgtgaatgttttaggctgtttaagggaagcgtttccccgtgcgctgtgagggtttctcacgctctttcggggtgcagtctcttctgttgttcattaagatgtatggatgcactgttgtgaaggatttgtgaactggggatcgacaccccgtgaggggtgccccagtgtccataggagtttgctggagaggtgtgttgctgtagtgactatccgtgacctggcattctaaggtgttgaccccaacctgtgagggtctggatcgcagtgttgaagtgctttggagggttcaatggggtttctgtagtggatattatgtgcttgacgactactggtacgagtgtattgggggtctacatgtgtga

SEQ ID NO: 1956 - DNA, 467 bp, Unknown
  Description of Unknown: unclassified Picornavirales sequence
gatgagccaaattacattacgttgtgttgctgttacggctaatggcgcaaaattcgcaaacctcgctaatccagcggagtctgttacttttaaaaccactaaccaacagcgttcacgcaatggtgtacaagccgttgtcggtcgctcttcaatcgtttggattgcaccgcacgtcgtaaaacaatgcgatgatgcttgcgctccgtcgggtgatttcaccgacttgctacgtctcgaattttctaatgcgaattcaggggaacagttgattacccgccttaatgatttggcggactggttaactgcacacccggaattccttcgaggctttggtccacagcaatcttctgacgttgttcttggaacagtatgaatattcaggtaatgttattaggtagccttgcgattatcgcaactaccatcataacggtaacaggaatcgtttcttactacatccactaacttgc

SEQ ID NO: 1957 - DNA, 467 bp, Unknown
  Description of Unknown: unclassified RNA viruses ShiM-2016 sequence
gttttgccagaatgccaactgatcggaagagaaaatggcaaagtacccctttgggtggcacctcaggtgcaatggctggtcaccggcctttgtgcatacgtgccaacagggttgtgggggcggatgcgggttgtctctggcctgtcatcactgatcccactccaaccgatgggtccaattcttttgggcactactccttcctctggctttgtctggccgcgcccttctgggtgcaaacggagtttggtttgaatcgggttcctgtgtgtcgtacacacccactgagtcagacggcaccgcgccgtactgatatatcttgagggccgataggggttggcctgtcctccaggatggcttcctctgagtcattattggtgaggcaagtagtttctgctgtgcgtgcttcagtgctgcctgcatatacccatctcattcaattctgatgttgaggataatgcctaatctgg

SEQ ID NO: 1958 - DNA, 468 bp, Unknown
  Description of Unknown: unclassified Narnavirus sequence
gatgtcttgtatcaccggacggtagaactaccttccagtgcttgtggtgctagcgtgactgaaatcacggtcaccaagtatctcgagcgcaagtcgattgggaacgaacctcccctctctgtcaagcttctccgcccaccacgtctccaccgaagtgagaggcgtgtgtttggaaaactggcggacagaaggaggggggagtttcaacttcccaggtttcatggtctttggtttgcacggacgatattttcctcccgttgcccagtagcctttgtgcgctcctgtggagacgtacttgcctactgcgcgattggagacaaacgtaagtccaggtggtggagcttcactaacgagggcaggacccccgatgcgaagtcgcacctccacctccttacgcatgccttcgaaccgccgcgggtcggcgggcgcgaagaaaatatcgatacgtgcacagtactttgttgggtc

SEQ ID NO: 1959 - DNA, 469 bp, Unknown
  Description of Unknown: unclassified Hypovirus sequence
ttttggggatggtgctcttaggtttgatctttgtagatcctaactaggaggaaacattgccctgtttcgtgatgatttctatgttcaatcactgaagcttctcttcaccaaaaaggagagagcttcgagagcttagctgtttcagctatttgaaccccgaaggattcatgtctaagacatttggtttctattcagaaactattcattctttcatccgaagatgtaaaactacttcgtagtaacgagacggtcctgaaccctgacatgtggaacggcgacgacaggcattctgtggagtagtgtcctagaagaatgatcccctgttgttacctgtcagactggccccggcacaccgtgatgcccggtgaactggtccgtgagacccagatcggaatactccaggctcttttgcacgatatgcttgtcatttttcgtggattaccctggtgctcgttcccaatccgaaagt

SEQ ID NO: 1960 - DNA, 469 bp, Unknown
  Description of Unknown: unclassified vectors sequence
cggacacacaaaaagaaagaagaatttttaggatcttttgtgtgcgaataactatgaggaagattaataattttcctctcattgaaatttatatcggaatttaaattgaaattgttactgtaatcacacctggtttgtttcagagccacatcacaaagatagagaacaacctaggtctccgaagggagcaagggcatcagtgtgctcagttgaaaatcccttgtcaacacctaggtcttatcacatcacaagttccacctcagactctgcagggtgatccaacaaccttaatagaaacattattgttaaaggacagcattagttcacagtcaaacaagcaagattgagaattaaccttggttttgaacttgaacacttaggggattgaagattcaacaaccctaaagcttggggtaaaacattggaaatagttaaaagacaaattgctcggaatcacaaaattccgagt

SEQ ID NO: 1961 - DNA, 469 bp, Unknown
  Description of Unknown: unclassified Picornavirales sequence
gttttattcttctgtgttgtgagacgtgaatacgagcaacgggtgctatgtaggagtacatagcataccaccgtaagtagatagcgaaatgacaatttcttataacatagtgacaatttgatgtatcacacagtatttagaacacactaatattgtggtttactgttctctcagtagtccgtgtatgtgttaagtataaggtggagataagaaacaatagcattccgttgaatgacaaaggcatgtggccactattgtgttcttacttatatatgatttaatggattaatggataacttgagtgttgtactttggtattacgctcaattggtctcggaagactcgtttttgagctccacgtgagaacgtgactggtcagccgccagcacgatatcgccattaaaaatggtagagagctctattggttacagacaaaatttctgaggtttctgctccgttgatagcagat

SEQ ID NO: 1962 - DNA, 469 bp, Unknown
  Description of Unknown: unclassified RNA viruses ShiM-2016 sequence
gttcctctcctctctacctgacccggaccacgaggcggctaagctgttgttgggccgaggagtaaagagcttggacgtgaaggatcaaagtattgatctttcatgtctaaacgtgtataaagagtcatgcccaatcagtactctacaatacgaaaaggctcaaatacatccagaggccacgaaccaaaaagacggaaaagtaaccgtacgacgtaactttggtagagtaggcgcacaggacgctttgttgtcctctgcagcgctagtaaaatacccattagaaacgttggaagaactgcgcgacgcaaccgtatatacgtcaggaactccctctggtttttcaaatcgaatcaaggagcttacaacacggacgtgcaagtcggaaggaaaacccgcctggatagccaaaaacttatctaagttgctaccaacaacagaacttcctgattggcatgatgttgaggggttg

SEQ ID NO: 1963 - DNA, 470 bp, Unknown
  Description of Unknown: unclassified RNA viruses ShiM-2016 sequence
atacttttagacgttatctaattattctgacatttcaggatagcttacgtacagaacaattagataacgtctaaaagtattggctattaacgccctattatatacacaaatttaataacggaactgaaattgaaacaacccgtatagcaagagagatttttaaaaatttagatttcaagcacttaggtgcattctttttgctatatagaccataccgataaaacacacccaaccccggggatttccccttttttgcaaagtatttatagctaaactaaagcagaggttcagatatctacttgaatctttgtagcagtggttatatttgcttattttttgccttcgggccattctaaactaagttttatcgaagttcctaacttggaggtgtcacttaggaagaatcaacaactaaaaaaggtcacatacacacattggaagattcaaagcttaatatctacttagccaag

SEQ ID NO: 1964 - DNA, 471 bp, Unknown
  Description of Unknown: unclassified RNA viruses ShiM-2016 sequence
gtggggagctaccactccccaccgcttgtttacctgctagtacattttatgacggtctaaccgccattctttgtatccctcttactgatcatttgagggctctattgtacccaacagacaagaccgagtagcaagattaaacttttatttctataactatatttcccattacttagtattaaggatttttgggtatttatgtagaaatgcctagtcacgacatgacttaaaataaatagttaggactcgacatcctatactatgtcaccccttttcggtcccgccgtaagaggcttaggcccctgatggggattctgtgtaattgcgaattacagatgggtttaaaacgtagattggagaacactctccatgtagacggccccattagtttttcgtgcctgaatgtgagtcggcgccaccacagacccctgatactgccgtgacaagccctgcagggattcctcatataac

SEQ ID NO: 1965 - DNA, 471 bp, Unknown
  Description of Unknown: unclassified RNA viruses ShiM-2016 sequence
cttatggcatcgtgctgaaatcacggtaaacttactccgttttgggaagaacgttaagctttttgatcttggaccgatgttaaaggtatcccgtcccggaaagacgttaaacttgctaagtcagttgtcctctgattagtgcccacgggcaataggacttgtatataaaagtgattatagcacagagttgattatttttcgttttgttccactctgtagtaccctatgtatataaataataaaacctacgtgtagtataccgtatgacttgaaagtatttgcacgttaaacgtagtataagtcaagaaatgtatatataatgatactgatgatggacagttaaaaccatcacttttacatattttcttttccgattcggctgaaactggtgaccaacctgttactgccaacgcggaaacagaacaagttttaacccagattggaggagatgccccacaagaaaatgagggc

SEQ ID NO: 1966 - DNA, 471 bp, Unknown
  Description of Unknown: unclassified RNA viruses ShiM-2016 sequence
gactggacttgctggggaaatacctagtgcaacccagcattttaccatcgctagccactactcaggactatccagagaggcactagacgcgtggttgttgagtttgacccacgcagtaatttaagactcgctaaaattttagaatccatagtagaagagaaagtttgtgcagagattgaaggtctttccgtgaatgcacccgatgaaacaacgggtgttactagttttgcttcggaagccggggtgtgtgccgatatccctatagaccctgttgtctcattcgccaaaggcgatgagtcttaccaggatctaaaggaatattttaggcgcccccggcttattttcaccggcacttgtgctaacactgtttccgttttggtaaactccaacgttagtcagatttcactttttcaggattggtttccgaatggtatagaacgactatcaggagttcaaggggttcgcttcgat

SEQ ID NO: 1967 - DNA, 472 bp, Unknown
  Description of Unknown: unclassified viruses sequence
tcatgaactcattaattcacttaatcacaaaacttgttgaacaattagaacttcgtggttgggtttgaggtgtttaaacatggatcatgtagtaccttatctacaaatcccagttgttggtctaatccttttaaagtaatggcccggaaacaatgtagggagtagtgaggatctgtgagtaagacgtgctctggcaagccgcgggtctccaattctggactttcggaccccagaaaaggaagtcgatggcccccatcacagtgagcagtaatacatgtgaagtggacaagttccattgaaaatcattcactcattggtttgtggcaagttgtgtggcaacgaggatcaagttgtttggcaacggcaagctgtgcggcagcgtggggaatggcaagctgtgtggcagcgtggggtaaggcaagctatgcggtagcgtgcaagggcgcgaaagctctgaggagcgattctgaac

SEQ ID NO: 1968 - DNA, 472 bp, Unknown
  Description of Unknown: Hepacivirus C strain SL7 polyprotein (POLY) gene, complete cds.1 sequence
gctagtgatctcgcgggggcacgcccaaatttctgggtattgagcgggttgttccaagaaaggacccggtcaccccagcgattccggtgtactcaccggttccgcagaccactatggctctcccgggaggggggggtcctggaggctgcacgacactccaccatgaatcactcccctgtgaggaacttctgtcttcacgcggaaagcgtctagccatggcgttagtacgagtgtcgtgcagcctccaggaccccccctcccgggagagccatagtggtctgcggaaccggtgagtacaccggaatcgctggggtgaccgggtcctttcttggaacaacccgctcaatacccagaaatttgggcgtgcccccgcgagatcactagccgagtagtgttgggtcgcgaaaggccttgtggtactgcctgatagggtgcttgcgagtgccccgggaggtctcgtagaccgtgcatc

SEQ ID NO: 1969 - DNA, 473 bp, Unknown
  Description of Unknown: unclassified Picobirnavirus sequence
atcaattaattctttaatttcattcaatttccaaactaaagttctgatctagttctcaaagtaaagaaatggacaagtacgtccttggagaacatcgattggaacaaattacaaacaagtctcaatatgcacgtctgaggagatcgatgtaggacggaaaagcatagtttgagcaaataacatccagaaaggaggtagatttgacacagaatcaaatcaactaccaaagaacgctggaagataggcgttcacatcttgcatccgagaaagaaactaatcgtgcaaatctagcgcgcgaaagagaggaaaaccgctctaatctggctcgggaatatgagactaacaggtctaatgttgcaagagaagttgaggcacaccgctctaacgtatcacaagagcatcttattgcagctagagatcaagagacgcgaaggtcgaatttagctagagagattgaaaccaatcgctcaaac

SEQ ID NO: 1970 - DNA, 473 bp, Unknown
  Description of Unknown: unclassified Iflavirus sequence
ttttaaatatcgggtacagggttttaaccctgtacccggtattcagaccttagcttttgagctattgtaagaaggtagcctagcttttaagcaatggcggtattagatcttgcttttgagctctatctagtacgtgtttacaattaattcgattagttaagattttaattagttttagtaaccagtgcttcaatcttctattgtggcactggcttggatctcccttacacatgtgattacatgatagacttattagtagtagatacatctaaattctacaacgacctagtaagtattagttatgtgaaatagaatgtggaggattttaaattgtgaataggcctttatattcggagtaggtagtattgcgtatactattaatcccacaatacgtggtctccgtcttagtatttttaatttgcgccccaatggaaatggctcttcggacttgagtacagaggggcaacccataa

SEQ ID NO: 1971 - DNA, 473 bp, Unknown
  Description of Unknown: unclassified Picornavirales sequence
ggggacagttaacatagctaatgctagttgacatgtccctaaacccttttcaacgtctgacccacgatacgggtcacctctttatgtttgttttgttttacgtttgtttgtttgtttggtggaacgtaaccacccgtaactataactagaatgtaggctacttaaattaggtttgttttacggatagttctcgtagacctcgagctacgtctcgtgcataaacatgggtaaccatggcacttggcggttagtggtttttacttggctttcacgaactcaaattgaaataagtcagtgacatttgaccttgtaggcgtgaggcgatgtgcaccgcgatatcaggtaaccttctttaggtctgagatgttgtcccagccacaatctttgcgagctggtcgagggctttcccgaggtactgcacttaacccaaaactttctaaatcaaactcaaactattgcagacaaaattaata

SEQ ID NO: 1972 - DNA, 474 bp, Unknown
  Description of Unknown: unclassified viruses sequence
gaatttcattttataggaacattttcacctcatagcaacactcccattgttatgttgtacccctcccctttcataattgccttcctagtttatcttgtgcagtttttatcccagaagattgcattgacctgctgtgtaacaggtgttgcatggtaatgactactaggtgtccatattcacggctcgagggccacagggtgaaaatccctacattctagtgtgaagcgaaagataagctggaaattgagagaaagctattcaaggatagtgtcgtgcagctcttaggagtaaaggtgagtaacgtaatatgccttatgagctctcgacttctcaacacatttctttgcccaggtagtggatcacaacgtgaatggtcccataattaggggtattgtaggtaaaggtgcttcgacatatgtataaatgatcgaatagcgataaccggccgtgactacagggaccccctttacaaaa

SEQ ID NO: 1973 - DNA, 474 bp, Bavaria virus
gtgggaaccctttcctcaaactccggacacggactactctccgtgtttccctcatcaaagagggcctcagctggcgcaagtcggctggggccccaagaatcacctgggtggatctctatggcgactggggtcgctttgactgtgatcccaccccactctttgctcgtgaagggtgcatcctcactgaacaccctcgggcagagatgcaagggtggaagtcgctcctgccccctggcaacatgcaggtgcccgatcccaagctcagctctgacttcctctcctgggtggtgcaacactccaaggttgatgaacaaacctggagggacctcaaggcaacctggtctctcgaggatctccggcgcatctccacagactacctcatgctcccggaacctgagaagaacactgatgcctatgatggctggctaatggtcggcgagatgttgaccttagccggtctcattggctgggagg

SEQ ID NO: 1974 - DNA, 474 bp, Unknown
  Description of Unknown: unclassified Riboviria sequence
tcttgctcgatgtatacaaaattatgatgtaaataaaacgttgagtattgctattgtagaaagccgtgtagatttttatctttatatcctaggaccacggaaagcagccctttattgtccaaggaaacatcattgctgtacattggttaagtagccgtgtgcttaagaaacttacttactgaacaaaattttaatgctaatcctgatgttttatccgttacgacccctgattcaaatgatactataacccttcgcgatgatggcacaagagtttccgaacgctttaccgcttgtgaaggggatttgccttcttccctgtacgattgtatcggtgaaaagagtgaccactctatctccgatttcttgagcagatatgtgattatacaacaagggacgtggtccagcacgtcggtgcgcggagacgttttgtctaatcttgttttccccaagaatttgtttaatactggccaatat

SEQ ID NO: 1975 - DNA, 474 bp, Unknown
  Description of Unknown: unclassified Fusariviridae sequence
agagcagccgtttggctgcctggtaccacatcataggggatcgccctagtggtgccccagttttctcccttagaccagcctatcttacggctggttgtccttattaaggatgggtttggttttcttccaaatttatagtcgcctggtgcgacttcatcttttgccccctgggccagctgatgagctggggccgaaactgctggcagtcctggcgttggaatttgtattccgactcccccctgtattgagaacacaggtggtaaattgaatctcacggtgccattgagttggtaaccagaaagcttccgtatctcgtctgagaggaaacaccggttgaaacagcttcggcgcgtttgcttgtgcgtacaacttggagggttagttgcgtttttggtgctcagtcccgtcaaatcttattcctttaaactgtttgaacgtagcaaagaccttgcagtcagtagtaacgacactgac

SEQ ID NO: 1976 - DNA, 475 bp, Unknown
  Description of Unknown: unclassified Endornaviridae sequence
gtcgtcaacaccaacacctaccaactcacaccaaccaaccaaactacataccaccattgattacaaatctttgtccgagaacagcccctcggacaaagattaccaaaacaacccccataaattgggggccaagggctgcgactcgctagaagtcgtaaattcatctagcacaataactgaatggattcattccaagcggaacgacaaatccattcaaagatacaaatcacgcggatttacgacatgggatgctgttcacagtacgccgttcggaatatccgttgagaaagaaactgagttagctgagaaatttctcaatgaattagcaacacgcagctcagaattgaaacaatgttacaacgaacaagtggtgtgggaagaagatgaaaaacctgaaccagaaggtccggaatttgaagacctgcagccgctgaccgttggagccgccacacactgctggttgaacataccattc

SEQ ID NO: 1977 - DNA, 475 bp, Unknown
  Description of Unknown: unclassified Riboviria sequence
aagataataaacgattaattataaataatagtacgaataaacgtaaaatgagtcatttaatatatagcgatttcattaaactaagagatgaacttcaacaatacttcacggaggcaatttcgttaccggccattcattacttcaaaccaaatcaaccagtcaccttatcagttaacatcataccatctggggaagttaatgacgaccttattagcgaactcagggccaagattcaacaacgtatcgccaagaaatccggtattaaaccgacgcttggggagacgtacccgttatatttatccatcaacagggagacgattttaaaaattcaagtgcatatgaaatatgcttataaggattttgaagcgattattgacgagatagattttgaactagtagaggcaattaaaacattgaaagacaccaaaattgatactttaactaagaaaagcgttatcgataaacttttaagaaa

SEQ ID NO: 1978 - DNA, 476 bp, Unknown
  Description of Unknown: unclassified Dicistroviridae sequence
acatcgtgtaataaggcactagatgccccaaagcacaaaattgggtaacccgaactgaagcttgtctcaacaccaatcaatcgcagaaattggcagtggacggcccatggcgcccgaggttggactcttattgttccggctatgttataacctctgttcgcaagttatagcgtagtgctatccttggagaaatcctaaccagtgcctttggaaagcacaccaaaacaaaccttgacctggacatgtcattaaactgtccaaaacccaaagtcccttcaggacaacaatccatcgccagaatgacgaaaactcacggtcgagttcgaaccacgagtcgagtactcaaacttagatggatttctttgcgtaacgagcttcgaaactcgcgtgtaaagttgctacgatagtgcgaccctcttaggagaaggcagagcttaaccctaagttgtatcttgctcgcgttacgacaccaatct

SEQ ID NO: 1979 - DNA, 477 bp, Unknown
  Description of Unknown: unclassified Tombusviridae sequence
attttccctaccaggacataggaaggtgttactgagtcctggccggcctgtgatggccaacggctgaaaggccgtgcctgtagtcgagtagggaggtttgcggtagcagcatcctggacaaagttaggtgtacacccaccttgccaatggatgtcaggacaacgcattgctccccccggcccgtctgcgcagaaccatggtcaatggcgcttatggcctgcaatggtaaccaggttgaattccctggctgtgcttaggagtgtgacgggtgtccgcgtcgtgatttatagggcgggcttaattgggataccgagggtaggcgccatagtctgggtaaccaggctcggttctgctaacggctgcaggtgtgcgcggcgagccaggggacactcctaggccccctcgccagctctgcccgagcttaagggcattataccttgtctggggtttaacagggggtggtggccttcaccattc

SEQ ID NO: 1980 - DNA, 477 bp, Unknown
  Description of Unknown: unclassified RNA viruses ShiM-2016 sequence
atttcacccaggattcgcacatcctaaccatactcgtcgcattgttcgcgcacaacacctagggggaggtttagaccccacgcactcactctgttggagagtataatccagcaccacacactacatgtgccatataggaagacgtttgcgctgtacgcagtgttgcgcaactgagctagtgctcccacctccatgattacgggcgattgattgaatgcgcccttacaattagttagaacgcttggaggtgagagtgggaggggtatttaccccagggagcagagccgagtgcccgcttaagacggtgagagccgttcagaaagtttggctctgtgggcgatcgcgtatgcaggattaaggtatccgcatatgttaaactagcacctttcaaataataataataataaacaaaacaaaaatagagcaccattcacaaacaacaaacgcaatgtgcggcgccaacgggcgcccgttgcg

SEQ ID NO: 1981 - DNA, 478 bp, Unknown
  Description of Unknown: unclassified ssRNA positive-strand viruses sequence
gcaaaaaggcccctgggggggggttaatgagtactggaaaaagaagcgcgagataccacttcgctgattatgctgattctggtattaaggattagtagagtatcggaagtgccgaagggaataatgctggtccgttgtaaacaggatacttatgaaacctcttaacagaaactttgagcaaacaacaaataaacgaacaaaaagagttatatattgaacttgaaaaatcaatatcttttatttagattgatttatattagtctttataatcgtagggaataattctcatctaatgatatcgatgtaaaatgtatcattctagctattcaattatattaattgagcttagcatctgattaaattactattgtaaaataatatttaatccccatctttgcaagatggaaactcttaataagtcaggagtataatggatttaaaccctcacaccgaatcatgagtataaacagattcaaat

SEQ ID NO: 1982 - DNA, 478 bp, Unknown
  Description of Unknown: unclassified Riboviria sequence
ggggttaagaccccagcatattttcaccccacagcccttggggttagcctacaccttcatcaagatgatggtttaggtttgggcatggaatttgacttcgaccttgcatgtctgaccacgaatgtcatttcttcgttctggctgtagacgagactcggtattttgtattaaggactggcagggcccaagtattggcctaggagctctacatggctaccaggatattcaggccgataggatgtcccagcatctgtgtaggactgtttattacgccaatgtacctctgactctaagcactagagggagggggctgctacaggaaaaggacggcattgcctatccgattcacgtcatgagatttctctgacctctggcctgtagtggctactccgggatgggaaacccggactggcctctcactgcctgatagggtgtcggcggacacagtgcttagttttatagtccgttgtaatgggac

SEQ ID NO: 1983 - DNA, 479 bp, Unknown
  Description of Unknown: unclassified RNA viruses ShiM-2016 sequence
gcaaggtttatagccttgcagtctctgtttgaatagttgatagttatatgtctatgtgtttagtgttgtacgttcaattatttgaacgtgccgctctcgatacatatgtcattataggtattgattgttcaatttaaactcgtttttcgtacttttgtcgtaaaaaagttcactttttcagtctactatcaagactttaaaaggatagttggagttttcgcacgtctccgtaatttacacttcgtgtagtgcaatctccggtactttggtaatcagccggattataaatttttggatttactgagctaacagtctcctcatactgtacgtcgtgcccatagatggtacgcaaattgtaggtattcctactcatggggtttaatggtagtactgatctggtaccccggctattatagcctaaacaactcagtttttgccaggacgctgttatttataacagtagtcctggcgtatatatt

SEQ ID NO: 1984 - DNA, 480 bp, Unknown
  Description of Unknown: unclassified Partitiviridae sequence
ttgctcgcattggtgctcgcaccaagttaatggttgattggatgatcggttcttgggaaaactacttacgaccgaagacgtggatggacgcactcgaacaagaacagcaggagaagtgggcagctgcgaagcgcaggtacgaccgaatgattgaccatgagaatcagaggttggcaaaggcgcgggctgaatacgatgccattgttaacgatgtttctctgaagcaggccacggctcgagaagaacttcgagacgttctgagaggatttgggttgcaagatgcaccattactttcagtcccgtctgaagatcatggccatgaaaggctcagagaggaactcagctttctggggataaattttcgtcccccagatagccagttccactaatcgtgttcaaggaacaatacgcactctcgctagacgagcacgccggttaagaatgaaagaagcagcgacacagagacatcctatagagaaa

SEQ ID NO: 1985 - DNA, 480 bp, Unknown
  Description of Unknown: unclassified vectors sequence
ctaaggtagaatacttcatattgagctaactcatatatgctgactcaatagttatcttgacatctctgctttcataatcagatatataagcacaataaataaatactcatatttcttgataatttgtttaaccacagataaatcctcactgtaagccagcttccaagttgacacccttacaaaaaccaggactcagaatccctcaaacaagagattccaagacaacatcatagaattgctttattatatgaataagcattttatcaccagaaatcctatatactaaatggttaattgtaactgaacccgcaggtcacatgtgttaggtttcacagattctatatattactaactctatactcgtaattaacattagataagtagattaagaaaaaagcctgaggaagattaagaaaaactgcttattgggtctttccgtgttttagatgaagcagttgaaattcttcctcttgatattaa

SEQ ID NO: 1986 - DNA, 481 bp, Unknown
  Description of Unknown: unclassified Botourmiaviridae sequence
gggggtacacaggttttggcctggttcccggggattgtgctccacctgcgctttctccgagatttagtgctccttcggctggagagtggcaccgtaacgcgcagtggcgacgggccgtggttgctgggcatcacccagtgtaaaagggatgtaggggcattgcccgtaatccggtgaggaaggtaccggtcccaaaggggggaggtaaaacgctaatcaggcgtgttctgcgactgtgcctcgcgcgcggcagttcagacccggggactaactgtcccgggcgcaaaccccggcgggttgggtggacatggttgtcacctttcccttagatctttgcagtcgtaaaagaccgggccaagggggccctgaagtctataaaggtgggcgtcaatgcccaagcttcttgtcaacacacaagcgcgaattgaaacccctccctgggtcggagtaaaaggacccgcctttaaaagtgaatgataaa

SEQ ID NO: 1987 - DNA, 481 bp, Unknown
  Description of Unknown: unclassified RNA viruses ShiM-2016 sequence
ggggacaacccagtctttactgatcacggtagacgttaaataaagagatcccggtgttgtccaatgctggaggtgttaagccaaaatcaaaatggactgctaagtaagatatacgcacagcgattaggttctgcattacctattcaatgtggtcaggctgcttagtggacttgtacatacccctttttaggggagggtttggtcacccaacaaaatagcactgttatgttgtcgattgatgtgccgcacataatatttattaaattacattactaatctttatactatttgtgagccagaatcagctcaaaatgattcacacatatcgtgcgatcctcgcacaattcatactgtcgcgtctttcgatgaagatgatgaagtcttgcaacttcgtgctcgggtcagggagctacgacaaaaacttgaccgaaagtaccgccatgttaagcagctcactaaacgaattgagcagctagaaggt

SEQ ID NO: 1988 - DNA, 482 bp, Unknown
  Description of Unknown: unclassified Riboviria sequence
tttattaatactttcagaggaaactcttatgacacagaagaatctggtccttatcgagtctaatggctcgacccaactttatgggcaccctgaaaccctcgcgaagaccgtaaaggttaagcgctcattgtctactaaggcaacgagtacgggcgtaaaggtaacgaataaccgtgttgaagtcgttatcaacgcggatgtccctgtcaccgtctgtggcgactcgtgcgccggcggctccgaggttctgtctgtacgtttgtcaacaagtggtacaccgaaaaatagtgcagagcttgatgcaatgcttgatacgttaaaaagtatcattgacaaagctaaggcttcgcgcttaacttccggctacccaatgacccaagacttagtctgggttgatgtagacgaagcgtaacagacaaccgttaataggagagcaaccagtgaaaacatggaagctagaacgccgagcacgtgatgtgcta

SEQ ID NO: 1989 - DNA, 483 bp, Unknown
  Description of Unknown: Sclerotinia sclerotiorum deltaflexivirus 1 isolate AX19 polyprotein1 sequence
ttttgtatttatggtgtttgttggttgctttgctttgtttttaactcacattcttttgcactttatctctctaatcttgtttctgctccgccacactctcggcttaaattgagtggtctcgctgtaccataccagcgatatttatctatctgaaacgacttcaggtcgcaaacttgtcatcacagctaatgccatccgaggctggtccacctgtaatgggtgcatatggtgtacttggtcgtgtaagctacgataacccaagtgctgatcgtcccgatcgaggaacgggtgcaaaataggtgttcacttcatctccaccccaatctcgaggtaaccagatcttctcccaaactggtgcgttacgcatgattgccgaatcctctgcgtacgtgtctgggtttgacccccaggctctgtacagactgtacgggcgaagggcactacattccctagtgtcttaaagaaacagtcggcccccgagta

SEQ ID NO: 1990 - DNA, 483 bp, Heterosigma akashiwo RNA virus
tgatagaaagttctgcagtattctgcagaactttttaataccctttgtagagggatatctactttaattgctggtgtgcgccagctcgcttttcgatgtgattcataattaactatacacttgagcttaaaaccaattgttatgcgtaggtagcgttctttagcgtctactgtagtgtaattaatttgtttgctctagtggtgtctttgccttcaaagtactacagagtaagttcatttgcatagttgtgttgtgatcatgttgactagcttgtttgcgtgctccattaataacatcagtcccagctggcggggcaataagtaccagcctggttgttgcaagccgtgccgaaagaagcggtatcacgacccgtgtccctccatgtagtcgttaaaaacaagtgaggtaaggagttgtccatcttcgagaaaaattaataaaatggacttttgggtctttggcccccccccgcgttaggcacct

SEQ ID NO: 1991 - DNA, 483 bp, Unknown
  Description of Unknown: unclassified ssRNA positive-strand viruses sequence
ttgttgatgctgtagcccagtggtctccgcgggtgtggttaattgcggcataaagactttcttgcagcaggttttgttgttggttgttgagtatggcgcgtgctaggggagttggttgagagttgttctttgcttgtgttccttagtgtgtgccttgtgttgtgtacacggtcaggcgagtagcctttgctgtgtgtacagcttgtttgtgcctttcgcccaacgtggtggcgggaggtatttgtgtttaatcgtcgttgagcagtaggctctcacggcgaaacgtagcatattgtgtgttatatttgtcgtgttcggcgaggaggttttctcggcttgagcacgatatactgtgttgattaaatttaagtgtagttccttgcgctctgttgggtaagctatccctacagagcgcgagatcatattgattgaagcaaaacgtgtatagtgtatattgtaacttgttagttgtaaaaggacaaa

SEQ ID NO: 1992 - DNA, 483 bp, Unknown
  Description of Unknown: unclassified ssRNA viruses sequence
tgggggtagccatccctagtgtaatttcttacggggatgcatccttgccctttcaggaaagtaggatgtatctttcaaaggaaagataagctaaatgtgcatggcacaaggttagatggaaggaaatgtccatcggcataagctcagattgatttactgtcaaatagagaaatgattcgcgtcgcttggggcccagtttacactgggcgcatcggccccatatatcatggggtgcgctacgccgtagcaagcattgagaagtccccttaagcaagggagcctttgccttatcgactgtagataaggacggtgatcaatataccgagtcacgacaaagaaagtgacacgtcaacgcttaaaagtcgcgatggatatcaccactatactagtggtgtgaaccgaaatcgcgcaaatcgacaattcatatttcgataggattaattgtccaatcggcgttccgattcacgtgagaatccgttaatc

SEQ ID NO: 1993 - DNA, 484 bp, Unknown
  Description of Unknown: unclassified RNA viruses ShiM-2016 sequence
cctagccgggctttacccggtttggtcgtcttttgcttatgtggtatattctccattttcgaatggacgatatatcgcataggttttctattctcttaaaaactaactatatctgttatatatttgtattgtttataaggtggtgggtttagagttttaattgtaagtaggatactctacttccccacttttgttttgtactatgtttaaggtagcacctaatgtgctattcttagtccaccgaagttttagtgaaagcaactgctttagattattttgccctgggtcttacccacttgcatttacgccgtgaggtattgtgcttgatgttggacagggatctaaataagtgacctattttgttcttggtctttgctaacgttgttagtagctattaattaggtggtactgcgcgtaagctagaacttacgacaagtgacctgggtatgtcatttaaactactcattcaaaatttacaatacat

SEQ ID NO: 1994 - DNA, 485 bp, Unknown
  Description of Unknown: unclassified RNA viruses ShiM-2016 sequence
tacaaaaatccttaaaagtcagagaacttttaaaacccccggttagcacaaactagccacaaatagtctgagtactaccaaacgcacgtattgtccgagcacaattacgtaaaccaacgctacaatcgcacgtattgtctgagtacaattacgcaaaccaacgctacgaacaataaagcccataattttggatttatttccacaatttacgctatttagacttatcgctgccctccactatagtggttgtatcatctctctcggacaactgaatacttccaaggtatagcgtcgcagtcagagcacagcgcctaaatcttggtataaacgaacgtacgcctacagaagcaacctatgagttacacttatactgctctcagctcgagcattaccgaacgagaaaacatcaacgatatcgacgacacaactgttgacccttcagcctcgttcctagtgcccgtcagcgaacaagtgtataggccaac

SEQ ID NO: 1995 - DNA, 485 bp, Unknown
  Description of Unknown: unclassified RNA viruses ShiM-2016 sequence
gcgctgcgcctgattagtccggaatgacgtaaaactaccaaactaccccttgcttgaggctaacaaagcgcgtgtcccaagggacctaaccgggggtgcgtcctataggacgataaacaggacgcccagattccagggctatccggttttcggcggtgcacccagcatcgccggcgacagtgcgtctagcgctgtcgtctggtccgcaatgacgttaaactaccacgccggcgcaccacgcgccgtcttcctgtccgcaacgacgttaaactatttagggggggttggtacggcgagctgggtcccgtccccgccaccgcccccctgcagccctcggggcgttgcagcagcatgaccgcggtcagctgccacgctcccgggggcgattgagtcagcctccaccgccccgcggggcggggtgttaagctggttcggtgtttctgcggccttactgctcgatctccaacactattcggtccgtgagg

SEQ ID NO: 1996 - DNA, 486 bp, Unknown
  Description of Unknown: unclassified viruses sequence
cttattcattctgcatcatggcgtttataaataataatggtaatgctaaccagcgtggaatacccgcacaacagcaacaaagacctcaacagaggcgtccccgtcagagggattacgatcggatgttgtcctacaatcaagacagagctggtccgtcttgggcacaacaatcccaaccggtttttgagtatgagcgtgcaatggaacgcctcaaccggcaacagcaaccccgtccagtacagaagagcacgggcagtagacagcagaagaagcctgccgacagaggcccagagccgaaaccgacaacagtcgagcaggggcagcgagatgatccgatgtacgaaggtccatgtacatcaacaaccgccagtaccacattgtttggccacaatctggactacagcggatacattgccctagtccgtgagttctacatcaataccacggcactaaatccgcgtcttacacgcggagttacccttctgc

SEQ ID NO: 1997 - DNA, 486 bp, Unknown
  Description of Unknown: Picobirnavirus sp. hypothetical protein and capsid protein genes,1 sequence
aataatataggaggaagtgcgaatgaaaaagacatgcatttctaaggtgaaacgatttctcatctatctattggcgtacttgttgagcacgctttgtagagaagcaatgtgtattcacattgtgaagaatcgtcagtgttattccgtgactgtaactaacggaaaattaaataaggaggtcaagtgatatgaccaaagtacagagcgctggagagcgcaagagctatgtgatgactatcggagagtatattggtaaggctcaagggtggctcaacacgctgcagatgatgcacgcatacaacatgaatattgatgcgaaatcatcgaatatcaaaaccggtactgaacaaggtcgaccttatgttgtggctacttatagttacactatgattaagggtcctacttctgttaaccgggtggtaacttggatctgggatgatgatcatcctgatggtgagttagcttactcatgcggaggtgattaat

SEQ ID NO: 1998 - DNA, 486 bp, Unknown
  Description of Unknown: unclassified Reoviridae sequence
agtttttgcttccgaagtcatatcacacttaggcggggttaggtctgaaggaagatatagcgaataaaatatatagtgtaaattaatttaatagaatattagcattcaaatttcaatggagcagacggagtggtggaacagttactaaatgatagtagaggaacggcatggtcacagtagagtttagtgaggaggataccagtaatataaacaaacaagtctgagtaatatagttaaccagccgaaattaagacgacgtgaggagattctactgagacaagagctggagggtggaccacgtttgaagaatcatagaaagatgatttggagattaggtcgaaattgatataagtgaattaaacaatacgcttagagagccaaagatattagtagtaccatgttaccatataataagactagctactaaagagggcgggtttagtgtgatcgattctttcctaaagctatcatgtctaaattttctga

SEQ ID NO: 1999 - DNA, 487 bp, Unknown
  Description of Unknown: unclassified Sopolycivirus sequence
acgctgctaaatctttagctagtggtgcaggcaccgctgctaatgtagttaaaggcgttgaagcaacagcttcagcaaccccttggggtgcaattgctttagtcaactcaatgttgggtgatgcaactgctgctggaattgatgctggaaatcgttctacaattaacaaagacttccaagcaaactcgatgcaacctggatcagcttcacaatatcaagctggattaataaaggacacacaacaaattcatgcgaataatgagttagctggcgcacgaattggaggtgtttttggaccattaggagcttattttggctcacttttggctaatgcacttcaagataatgcacccagagatctctatgattcactcaagactggctattcattcgatggaaaattcaatccccaagatacaggatcagttaattcaggtacaacagcaaatttatctggagaaactaatatgcaagataatttaataac

SEQ ID NO: 2000 - DNA, 488 bp, Unknown
  Description of Unknown: unclassified Hepacivirus sequence
gaaaggaaacgtatgacaagtttgggctggaggtcccttacccgtaccaatccccgcatgctctggattttgaggcttcgagcctgccacagagcctctgcccgtgggtggcgccgccatttatgtcttctaaatctcacggcctttctttctgttaagtgtgtctggctaagaaccatttcgacccccggggcggcaagcttttcgccctgaccctgggccactcgggacacacgttctctgctgcgcgatggccgtcgcatgcgtgcgaaccatcagaattgcaagtgtgtgggaacggtttgactgtaaccagtactcttgggacaaccagcggtaacgctggcccttgggcaggcttcggcagctggtgtgaaccaatcctaggtacctgccttgcatgatcgtaaatagctgtatgtaagatcgcgccgcaggcaggagttggcggactccttaaacaccgtcaaccccaaaaaactatatat

SEQ ID NO: 2001 - DNA, 488 bp, Unknown
  Description of Unknown: unclassified Iflaviridae sequence
agctggattttaacgatgagaagcttttaaattgttcatggtgatacccccctccccagtgtgattgtccatatttgtttgattgatttacgatgacgaaaattgagtaccctgtaatgattaattctttgttttatgaatataatatgacctcttatgctgactagtgtgagtgccgctagttggtggagtatgatgttatacaattgtatattaaatttagctctgagtaaaatggttgaaccccatgttgaaatgacgctatctgatatacgaatgtatgagccagaatgttgacaacacctaataatgcacaattgcaacaacttcggttggagcctcaaactgcgattggtcatgtaatttactagctttcaaactatcgacctagacaagtcttagggagtttgaaagaataggaaaccaattcgtgaatgtttgtgtacccgtgtcggagcggattattaggacggcggacgctttaaaag

SEQ ID NO: 2002 - DNA, 488 bp, Unknown
  Description of Unknown: unclassified RNA viruses ShiM-2016 sequence
gcagcgaaatacaaattcctgtcgcaaaagagtgttatgaggagtcacgaggtcaaaactcccgttttgtaagtttagtgaacactttgagttcattagcggtggatgccgcgaaacattttgtacattttatattcactccaccgagtttgtatttgtatagaaaattgtatcctagttctcaggagctgaatgcagatgtacaaggtgggggcgatcaaattgccccacagattgattcaaatccggccctcacgtttgtcgatcagaacgcaggtgcagaagatggggtcgacacttatgttgaccctctgcgttccaatgctgaggagactgcccccttctcggaatggaggaagagacctgttctcttggcaacggtcccttggcagactgggacagatttggacaccgttttcaacccatgggtggaatatttttccaaccagtacatcaaagaacgctttggaaggtttcatatagcctcc

SEQ ID NO: 2003 - DNA, 488 bp, Unknown
  Description of Unknown: unclassified RNA viruses ShiM-2016 sequence
ctgccccgtccaggcataaaacggacaccacctccctgtgtgatcttactcagtggccaataacttggtcctggaacatcactgagcatgctacagggggtagacacctaagggatggtgcggagcagccctccggaatcccatcaggacctagcagtgacgaccttgagttgagtcgtgaacaattccaatgtgaattgtgctgcgaaatacccagacttagcattcaagaaccagaattatatacaggacagactaatacgacaaccgcttcgctacctgaaatagcgacagcggcgacacaacagttgtctaccaccttggtagagaacgcaccaccacacaatgaacaacgccagattgaaccccgcgcatatacaagtacgaatgcctttaaggtagatcggccagaattactggaaacattgtccagggaggtgacagttgtcaccggcacctgggatagtagccacgtacaaatagccgac

SEQ ID NO: 2004 - DNA, 489 bp, Unknown
  Description of Unknown: unclassified Picornavirales sequence
aaataaaatgtttaaatacaaattgtttttcgattcgattcgatttgttttgggttttggtttttgggtcaagaccgtaaaacggttcaagagaattcgtaaaacagatcgccgctagtcaaagctagttcgtacactagatcactgtcaataaattcacttttagtcgtcaatggtcaggatacttccgctttaagggcgcgtttgtatgattgcctttatatttcttttgataacacgacgtgctcatcccaccttgttagtatcccactaacctggacaaatctcgtgttttgaaaaatatattaatttatttgcgtaaattactatatttagtacttcttatacttaaattccttggagttaaattgcttattataacaatagcattttgctttttacttggatttattagtaaaagaacttacttaaccctaaccctagtttttggtgtgtacaatttatttgaaacataccaagaattcaaaa

SEQ ID NO: 2005 - DNA, 489 bp, Unknown
  Description of Unknown: unclassified RNA viruses ShiM-2016 sequence
cgtatggagaacatacgcaattattgccgtctaacgggggtgacgtaacaagaccccggatgagtccaccacgtgtggcattttcagccgaatagattcattttatgacgacagattaatggaaatgttttagtgtttaagtaaaagggtttggaaccttagagtaacctcgatagtatatttatatactcccagaacctagccatggggatgggccgttgaggcaatgttctaagaccagagattttaaagcttgacaagcgctttacctgagattcctcttttgagtttgaatatattaaagatagtctaaaaacatttatcagttaattatgttagagtagctgaagacatgtatttcgtgctctaacctctgaaatgttaaatgtttgtccaatggttcggtgatcattggaatattagcgaagttaaccttcatctttaataatcctgtgtcggagcagtggtaaagtaatcggactattaagc

SEQ ID NO: 2006 - DNA, 489 bp, Unknown
  Description of Unknown: unclassified RNA viruses ShiM-2016 sequence
gtagttgggggtggctctgatggtgtgtcaggtaccacccccgccccatccggaggtggctccgacggtgctgtgggtagcaatcccacccctacgccgaccaggacgcgttaccacgcggcctcggctacaggtgtacccgcaccctacgacttcttaggattaggcgcggtttaccaggtcacttccgatttggtataccagaggtttgacgatgtatggaagctcgccaattacactgacaagaccgtttacttccagctcaaggttgtgtaccacaatcttgcgttcgatacgtccgttaggtatggaaaccaggattcctattcttaccataccgacgtggcgtttgacaacaatggcggtaggctcgtcactgttacaggaaagctgcaacctgctgaggcctggcgttcgagcatctacattaagtggaagttcggagtcacccccccagacatttactggaccctgaagacagacatatac

SEQ ID NO: 2007 - DNA, 490 bp, Unknown
  Description of Unknown: unclassified RNA viruses ShiM-2016 sequence
tattttaaacactaatttaagtaccttgttttattttataaaacttgcgacttaaaaatgtgtcttctttccttatcgtttttctttatgtttgtattgttagtataaaagtgagtaagtgattcatttcatgcttttcttttattcttttaaacgatattatacattcaataataagtgagtaagtactgccagtgcgctggaatgtggtagccccacttttggaaagctctaaatcttatgttgattgtattatatttgttttcggggttaataatgttccctttctaatattattattagtctgtaacactaacgtacaatgacgtgatattcgtcccagagggaaactggttaaaagcgtgcgcgctacggcgtgggttgatatgcaaccaaagacatatcgttcagccctcagcgaacatagtctgagggaagcttgtcagtgctttaaactgacaaattttattttactgctagagaaatcgac

SEQ ID NO: 2008 - DNA, 490 bp, Unknown
  Description of Unknown: unclassified Riboviria sequence
gtacaggcgcattcgagagaagtgttattcgcagttgtatgttccgagtacctgaatcacagattcacagaaaggtcattaactgtcataatagtgcgtaatcgaaatttactgtcaaggggaacgagagtgtaaaggtttacaacggttcgcccgaagtacttggtttttgtgcgctttacagtgagagaagcagtatttacgacgagtaacggagtaacaggagtgagaattcatcgaaaggtgcacttcacgattaaatacagtgtaattgttgtgtcacagcaacgagacgagcagtatttgtgaatttgtgtcgagtaattggatcagggacccattgaaacggcttgttgtgttaaaatacagtgtaattgctgttattacctattacaatataattaattaggataagcgaaatcgtgcattagcacatcgattatagaattaggttaattttgttagcgattgttagcgttatacccgcaaa

SEQ ID NO: 2009 - DNA, 490 bp, Unknown
  Description of Unknown: unclassified RNA viruses ShiM-2016 sequence
cgtagaggtgttgcctctgcgtttatttttgccaccctggctgggtgcttgtcaggccgctatagacatttcatgtttgatgcatgtgtggacgtggtatctgcctaaggaaaagtcttttcattgacggttttattacttgacttactattttagagttttttgactgtgtggggagtgttattttttcgttggcagtatttcgttaaactggccgttattcttttaggtgttggagacgctcttagttaatatgctgctttctttttagttatcattgatctggattgatctgagattatattgaaagcactatgttgtctgtgaaatttgcgttagccaacactagggggatatcaagtccctagcttcttgtgagtatgtggatatctcgcagaaccagttgaaagcactggatgaaatccgcaattgctatgcaattttcatatccgctcgccgacggcggtatataaatgtcggtcatggaaac

SEQ ID NO: 2010 - DNA, 490 bp, Unknown
  Description of Unknown: unclassified RNA viruses ShiM-2016 sequence
atcagtccattcgtcaagctgatgacttgatccatcaacaatggtggagcactaatgtcaagcaacagcccgagggattatatgtaaatgatggctggtatgttgagaaatgcaccatgcccacgacatattatccgactgatatatatcatcctcactactacctgtataacagattaatagatctgcaggagtttgtgttcggtaaaaccgaaataaaatacatccccgagctttattcacaattgaagttaagatcgttaaacctgccaagagatgatttgcatcataatcaattaaggtccgcggcagttcagattcttaaccagaagaacatcaatcccacaagggttcatgatgctctgatgggttcaattaccagagccatgatacctgatgatgatgagttatcaagtatcagaattcgcaaatccggtcctgttaaggccaggcagagcgaactttcgggggaaggagatccaagcacccg

SEQ ID NO: 2011 - DNA, 491 bp, Unknown
  Description of Unknown: unclassified Hypovirus sequence
gcctgtgggttcccgactcaggccgccctttcgggcgtaatcggggtgtagttactgcgctttcagcagtcaactttgtcaagatgatgtatctttgactgttggcgttctttaaactacggttgtgtctaacgacacgttctcttaattgagagtcacgctatgcgtgagcccaccaagtggggttgctgggtttccagcggttgtcgctcgcgacagtttcatagggttcacgtcgcccttgctaaacgacgaatttggttttgcttcctggttatactgtgccagccttggtggcacttaaacacttgaatgcgcacaccttgaatcgtttcgccgtcttcgccggtgtcaggatttagggccactgttctatcaagagggataagccgcgcctgtctgtgggtagttggggatgaatagacgtccgtggtgcaacgtgcacggctcccatttcaacaactacttggacgaatcagagcgtaaggtaa

SEQ ID NO: 2012 - DNA, 491 bp, Unknown
  Description of Unknown: unclassified RNA viruses ShiM-2016 sequence
gtttcggtacgccgaccgtgctcgctcagtgcgagcacaacgcgctaaacgcgctgtacaaacgccatctttctgccccacctaacctttgcacccgccccttccactcgtgtttcctcgactacattcaaactaaacttgttcctcagtttcattttgtccggcaatcctgtgaaggcgcatggaagaagaagaagacccaatctaagcttgactcgatcgaccggtccgttgtttatgaccggttcgaattccaaagagcgaagtcctttgtcaagcgcgagattagtgtcaaggttccgaagaaagcccgtttgatacagggcaatttcaatgaaacgacggcctaccacgatcctgatactttcaaggccatctcccatctttttgaagacgtgcgcttcgaagctgaaggcgtttcgttcgtattacggtacacatctgggtgtactaacgccgacatcagccgactgttctccgacgaggttgcg

SEQ ID NO: 2013 - DNA, 492 bp, Unknown
  Description of Unknown: unclassified Marburgvirus sequence
ttattgttcgaagattgacaatttgatcactttcagttttcaatttcaacccttatcgcgagatttggacacgatcttactaacttcaataactgaccccaaattcaagtttactaaaggctaagatgaaaataatcactagtttgttgtaaattactcgatcaaaatgttcttaagctatcttcaacttaatgatgcaactctgtttcatctttcttttgatttcaatgtcacagctatatccaagtgtctaattaacaacttgtacctctaaggaaaaccatgaagaacattaagaaaaaggatgttctgattcttcaactgaacttgtatatcctttattgatacccttgagagacaactgttgacgctagatcacggatcaagcatatttcaatcaaacatcctaaattttcaatcgtacacataataaccattttggtagcattgctttgcagtataggataggtggtcgtgaaaagacttccaagc

SEQ ID NO: 2014 - DNA, 494 bp, Human orthorubulavirus 4
tcatacaaatcaatcactgatatagagttaaggaacattttatatccttccccattggatcaccattaccatcctgatatataaaaccacactacactatgcaccgtccaatatctagccgaccataagatcacaaccacattacaccaattcaatcaaggacatccctgcaaacatcaaacaatcaaaccacgactgcaacagacacagcaccacctgatcaagccagaccctcaccatgcacccaagtcacccgacacaaccgcaaactctcgactccactattcaaaacacatcctcgaacagaccacccaaaaacaccgaacaatcaatctcctggccacaacgatcattgtaaattttaagaaaaaatctaacacacaactagagccaaatacagggggggaaaaacgcatccgccgccacacgcacagatccagaactcaaggcaaccaagacccgccagattccgctccatcttcaaagaaatcaac

SEQ ID NO: 2015 - DNA, 494 bp, Unknown
  Description of Unknown: unclassified Orthorubulavirus sequence
tcatataaatcaactattgataccaggctgagcagcatcccacatccttccccactgtactgctagcatcattcagatccatagaaccacaccacaccatgcaacaactgacattcagccaatcactaaaacacaaccacaacacaccaattcaaccaaggacatcctcataaacacaaaatgatcaaaacatgattgcagtagatacaacatcaccccatcaaatcaaaaccccatcgtatactcaattcacccgacgcaactacaaatctccgaatccgcccccagaaccacatcctcgaacagaccgcctcaaaccaccaaacaatcaatttcgcaattgcaacaatcattgtagattttaagaaaaaaacaagaacacaataaataccaaacgcagggggggaaaaacacatccaccgtcaagcacataactctaaactctgaggtgaccaatacccgtcgaaatccgctccaccaccagagaatccaac

SEQ ID NO: 2016 - DNA, 495 bp, Unknown
  Description of Unknown: unclassified Hypovirus sequence
gcctatgggtggtctacataggtgagcatgcgttgctcgatatagaccgccattattggtaacacgcttgaagtgttctcatccggagaaagtgatttgctttcttccatgaggctccctggagggattgtccaataatggttgataattttggttgctgcacaaccggggctttgcccggggatttcatcccgttcaaggtgaggcccttgtagtaacctctccccgctgcgtgagcgaatacataagttcacccagtactgacagtgtcagcgccgcacgtgcgtgaaacgtgtgactcgcagactgaagcgacctatggtgaaaacggatgtaccatctagctgtggagtagtgaccctagaagctaatccgatggttccaccagtcgttgtttgccggcaaacgccacaaacggtttcgtgctttgcgtgaagaagcacggtctcttaagagttcattggtacggttgaccccgaacgaggtccgaacata

SEQ ID NO: 2017 - DNA, 495 bp, Unknown
  Description of Unknown: unclassified Tombusviridae sequence
ggcctattgctagcgtagagttctcctagataacgttttaaatttcttatggcaaaaggaggagttttaaagcagcttaaaccgttggtccaatccctggccgggagttccaggacaatgaaacgaaaccgcagacgtggtggccgtcgcggtggggtgctgaccaccaagggttcgcgtccgcgaacagttaataatccctcgtggggaaggtcgttgccggccgcttacgcttcccacgtgaggccaaggttcaatatttcaagccgtacggcaactacggctgttgtttcagggtgtgatctaatatatcccattccagcaacgctcaatcctgatagtgagaccatattttcaatatttccagctaatcccgcttactggtccggtactcgtatcgcccagttcgcgcccgcttaccaaaattataggccgctggccttcactgttagttacattcctcaagtagcagtgactcaagcggggacagttttc

SEQ ID NO: 2018 - DNA, 495 bp, Unknown
  Description of Unknown: unclassified Picornavirales sequence
cgggcaaatccctgcgcaatcaattgaccccatgctggctgtaaaccttagtgtatccgtggctgtccccacggagaataagtatgtgaaaccatggccgtagattgattgttcaaaccttttgaaccgcgtaatatttaacctttcgagaactctattaaaatctatacatcagatgcaagcgttgattgatgtatactttttgtagaactatcgcattgtaagctctttccctctcttcctttcaagctggtagcccagtaggacgcgatctccttttaagaaacacacgacggattcgaccccgctcgttggcgcacccctttaggctagtagtattggaacttcattctctttgaaggtaggcaccacgactagaactcgtggcagatagtagactcttttcaattaatttctgattaggcatgagcaaagtagctttgaataactcctcatgactggattgtacgcagatttcatccactgcactcagaa

SEQ ID NO: 2019 - DNA, 495 bp, Unknown
  Description of Unknown: unclassified Picornavirales sequence
cgggagagttggcctcacgctgtttagcgtgagagccggctctcctgccccttcccctgagccggggatcttggctcattcccttcttttctatcctccctcattggactttacggatgacccggcataaacttgacaaccgatgttggatttcccttgtggctgtgatggaggacataccctcgggtgtagttgtgtgcgtgtcgctctgcgacttgagcttcaaagtggtgctgaaatattgcaagcgtcgttgctcaattaacggagtgatacaatcctatgaacccaagtgcattcatgcgaaagccccggaggggtgagtagcatggactcgaatcagaagagctagagctcgcttggtacggcacgtagcattgctttgcctaaagaccaagggggtatggctataggtgggggcctatagcttgtctagtgctggttgacagactcgtgctacgcgtctggttcgagtataagtagctgcaactcact

SEQ ID NO: 2020 - DNA, 496 bp, Xincheng anphevirus
ggtaagcgacatccgagtttataaaaaccctctggttatattacaaaacaaattcattggcatctaattagtaaccgaaactatgagcaacactgtgaatagaattgtatgttggaggtgcagaacactcatcagtgtaaaagcagctgaagatgaaccattccagccttacattcgttgtaatttctgcaacagcaagaactggattgttccttctgggaattaagagtttataagtagtgttgttttcttttcttttgctagctaaatcagtatgtatttctttacatatgtatatattttctattataccttattaaatgtttctgattgagagtatcaatatttaaattctacatcgatagtgagaaacttaatttagaaaaaacctcgtggtcaaagttacacgcaacctagaaaatataactaagaaagaaagagagaggaaaccaggtacgacacctactcaattggcagaacatcattccacttcgag

SEQ ID NO: 2021 - DNA, 496 bp, Unknown
  Description of Unknown: unclassified Picornavirales sequence
agagacaatcggatgagttcttctcctttaagtaagaataggtagggtcttaacccctaggttgcggacaccttaagttccgctgctaggtttcagtgtgatcttgttagtgtatataaaatctatagttctaaaacacttaagcagtgctgctgaaacaacgaggtgggctatttagccttacttccaggaagcctggggagcagccctcccaaattccaggaaactatagtacggatttcgttagcttgagtaggctcgatttcttaaaaatttacttgctacaattaataacaattcgggtggctccgattcaaaagctaacttagctccaaacactgttgtggatggagcaggagaaaggacgatagacggtactaccgctttcgtcaacgattcggaagtagtgcaagcgtctattatagcgcctctctccgtttcaagattgctaactcaatcgagtgcagtcgaaaatatagaggatataaaaagatgg

SEQ ID NO: 2022 - DNA, 496 bp, Unknown
  Description of Unknown: unclassified RNA viruses ShiM-2016 sequence
atcgtatatgcgtttatacgcatatatgattagtagacgatgtctctatcgataaagaacttcaagtttagtatcccacgtgagatccttggagcgacaccccttttacaaataataccttttaaacgtattttcaggaccttgcatgacaatgattatcccccgcactgaatacaaccatacgtggattgtataagatgggaaccttgacaaacatttggtacgcgccgaaaggccatcggagacataatctccgcacctgtatgtagaccactacctggctctcaacagcttgagactttgtcttaaatcttcggattggaaacggctctatttgggtgtgctgataacccctcatcggagacgctgaggagggagattatgcctttagtgtacgccaccttgtcttgcgtaatgccttggttggtattgattctgggggccagcccagacggagctaagttgcactagagttatactggctgttcatatcgcc

SEQ ID NO: 2023 - DNA, 498 bp, Unknown
  Description of Unknown: unclassified RNA viruses ShiM-2016 sequence
tgtagtttgacaagctacatattatcttctttttcgtcttagtgtgtgctgcactgccatttgtgacagtgtagttatcacgtggacgttttcttctatgaattgtcttctttttctttcttcttttctcttctttttctttcttttctacattttcttttgaaaatgttctctttttctttctttcttttctctttcttttcttcttttcttcatgacctttgtgtctgaagtttcttcgtaatgtttagtacctttttaaaggaagtactttactcatgttgatctccctatgacgttcaaactcgcgagagttgtcttgggctgtacgcattttccttcgggagggttttgtatgtactttttaagtgggaataaccgcttatgtggttacttctttctatgaagtagagctttcgttgtttttctctttaaataacgcagtttttgaaagtttttctgtgataaaattttcatttctttttccttttcttcatt

SEQ ID NO: 2024 - DNA, 499 bp, Unknown
  Description of Unknown: unclassified ssRNA viruses sequence
cttgcaggggttgataccctatggatggacttgatggttcctggtcggtgctgccgtcccaagtccctcgggaactacgccgtaaaagtgttagtcgggccccttgccttgttataacttggggacatagcttggtgctgattgctatgccttaaattgcaccgctttctctagcacaacctgcctggcagtcaactggcaggttgtgctctcctaggcgtttgccacgctggaggttaatgcgtgacctgtgctcaaccggtgccccgccggtcttccgcttaggctaagagcaggtctcgccgcggctgctaaccgcgggttgtgttacaaccagggggggtaaactccagccctaagtgggtccggttctccggtgaatcgctggtggtggtgtcttagcacctcattgccatccgcagcccagtttgtgggtcttcccttggtgaatgggaaaccctcctccccaaattttggttttgtttactggtgatcaacg

SEQ ID NO: 2025 - DNA, 500 bp, Unknown
  Description of Unknown: Narnavirus sp. isolate H4_Bulk_Litter_23_scaffold_4 hypothetical1R sequence
aaaatcatgaacttaaaatgcagctcaacgataccaacattcagcttcgaaagcttcaaactcaattcattgaattccaaacctcacttaaagaacagcacaaagcaatgatggcaagtatcaagcaacactctgatgcgatgaaacgtctcaaagattatgaagatctccatgaagttgatatcgaatcacttccttccgcaacttcatctcaactccgtacccgccaacgagttgaccaattcatcaataccctcccatcaggaacccagtctcctcatcctgctcccattcgtaaatccaaaattgttgatgaaccactctcattcaagtaatcgacaattcttgataagctgccccttactgtttcattgaattggtttctctatttataaaaactaggagaataatatctttatactacataacgatcaaattcttaagaactatttatcaaccacaaaaaccaactaccaacaaacaaacaaacaaccatcatc

SEQ ID NO: 2026 - DNA, 500 bp, Unknown
  Description of Unknown: unclassified Luteoviridae sequence
aacactgagacactgtccggatataagctcgggagactcgtcacctccgtcgtatcacttgttgttagtaactacaaatagcacctaaaaatcaaaaaaacagagtgtttgtttgcttttctgctcactttcttttagaaaatccagatcccactaccacaagtgggtgaaaaatatgggtagggtcggacttagccagtcctgtcggtgaagacactggaggaataccaggtggcgtcttctagggataccgattccggattcggagcctgcttctgggtggacactgcctcggacacaaccgagtgaacaaatggagtcactaaccacgatgaaatgagtgggagggtgaatcgacctcaattacgtcgttaaactggttggagttcctaactactcggaagttggggagaaagtcatctcaaaatgatcgttcaaagtcatcgagaaactttggcggctagggcttgcaattatggacttggcttttgcctagaaac

SEQ ID NO: 2027 - DNA, 501 bp, Unknown
  Description of Unknown: unclassified Sobemovirus sequence
ctggatctttgtacctttgtgccacctaagctggtattggtttatctcacaacgcatgtccgacacagtgattgtaaacttttcgctgatccgaactcggtgcgtggaacgctttggcgtgaattccctcccagttggaagacatttcattggttcagaggagattcctacaggcatcggtttcgttgagcggtcttttcaggtcacagcctttgggaactattcagttcctgagagaagccgagtcaggttgatagactgcccagtatcgtgcgaggggacttttaagttcgatccggtacctttgtggctatctgttatctgtcgagtttgccaatctgaggctaaccttatcatcaaccaggagttggtgcctgggtatagtgaaaacagcaagttcgtgttttgcgaccccgaagggagacctttacggattagaacacgaagaggcgtccagcccagcagattttaccaccaggaagaaaagaccatttgtcagtc

SEQ ID NO: 2028 - DNA, 502 bp, Unknown
  Description of Unknown: unclassified dsRNA viruses sequence
aacgaggtaagactaagagatcgtccgtagggagggtcctaagtcccctctttttgtctggaaaaattcccgatccagttctaacagagggaaataacgaagatttagttctttgtttaagtggtttttcaattccatttttaaaaattgaaatgtaaggcttggacttaaagtaggtatattgatttttgataggcggtcaatataatgaaataagttgattaaagtcgcaccccgaaaaatctagggggcgcccttttactactgtactaccgactacgggacgtgccgtccgaaatcttaagacttagcgccttaatcatttattgattggggaatcgcggcgctaaccagaaatggaggtgaaccacttaaggtgaggcgacagactgcaacggtagggcttacgacattgtgtagcttgaaagagtgaatttggatcgagccgggtattaggggacagtcggagggatttttaaagcgaaagcttccttggcgcgtt

SEQ ID NO: 2029 - DNA, 502 bp, Unknown
  Description of Unknown: unclassified Fusariviridae sequence
actggcacgtctacttgggtagcaagggagtttgtattcaatcccacccgatgagggttccttgcgtgcgatagcatgggaagtgggcaacactgatggagggaataagtgttgtctgtaaacaagactgcgacgggcataaagtaacctaaggtcggctggctatggtgattatgctaacaggaagggcaatgcctgggctgtggacatgcaatcagaaatggttgttatgtgcccgagaggacggatgcggcagtcggtcacccaaatgatgacgttaaactgggcttatggtgcaaaccgtgtcacagaggtatgagcacaggattggggacctggttagcaaaatgtgacaccgtatccccctgtggcgccgatcaagtcttaggacacaacaaaagaaacctaaaacttgctggcaccacgaatagtgttgtctagggcacaacacactacaagcgaaacacaacatagtactcaagagtgcacacacaaaacaagg

SEQ ID NO: 2030 - DNA, 502 bp, Unknown
  Description of Unknown: unclassified ssRNA positive-strand viruses sequence
tcgggaagcccgttattacctttttacctgaattttgcggctggttgcttacttcccatggtatcattaggcacccctaccttttgtatgcgaagtatcttttccataaagaaaatggcaccttggccaatgttctaatttcatattacatggaattccaacattcgctaactcttggtgacgctctttgggaatcacttccgtatgatcttttgccctaccaaggccagcttcaacttctttttaatcaagctcgttctcgcgtgccttcctttctgattcgtgagaataaacttggcgatgctcctgctgccaagctttccgctcgttatgatctctttcgtcttccagctgattttatgcgcatggactggcgccttcttccttctagtattagacgatcacttctcttggctaggggtctgtaatgcctggcagcgttgtcatttcttctaatggaccccaattcttcatccaagatcatcgctcaacttctcgctga

SEQ ID NO: 2031 - DNA, 503 bp, Unknown
  Description of Unknown: unclassified Hepacivirus sequence
ttgttcgcgtaaatcccgactaggcagaaaagtgaaggagtctgcagcgtgtaacgaccaagcccggacgaccccgttgaaacaggtgtatggtcatcgcgagacccggcggttacatgggtcgaatgtcaaggtgagttgacattctaaaaataaactcagttccaaaattggtagaggtttaggcagaataggttacacaacactgtgctggaacgtcgcctctaatgcccgagttcttagggacagtagacgtaagtcggcgagttgacaaaccagtggcactctttgctgtgttgtaaccctatttctggctccctcgttccgatggcggaagcctttttttaggcagccatgcagcacaccaggcggcgtccctcacacaggcggcaagagcaaaaatccttcgggtgagctcggtgtgcacttttatttaacagcgactatgagcagtttccttttgcagcacattgtgctgtgttgttcttggtggacttccaatc

SEQ ID NO: 2032 - DNA, 504 bp, Unknown
  Description of Unknown: unclassified Ourmiavirus sequence
gagattagacgtttggcgaggttgtctcgactcagctttgttgagtgtaggagacttctcgcccttactgaaataagaaagtggaaagaaacaaaaaaagagaaacattggcaacgttggacttccctcacgtttgtgaggggtacttgtcccccgcttgcgggcatcgttacaccgatggaaactagtaagtagagcagtggagtaggcccagaaatagtcttggcccgtgtggtccgacttagggtcgctaccttttagcggcgaaaatgctaggaaatattttttcttgcccaagtgcgtagaatcgcgtgcttggggaggtggtcgtacttttgtattgccgggttaaccctccgggggacaaactaccaaggaaagagcctgaggtaaagaaggacgtaggcgtgtgtaggcacccgaacctttgtttcgatgagacaaaaaaaaagtgtcgtcctctacaggacaacttaaattgtgaatcgctcgattcgctttttt

SEQ ID NO: 2033 - DNA, 505 bp, Unknown
  Description of Unknown: unclassified viruses sequence
ctcgtccaaatcgcaaccgacgctgcttccgctgccgcccgcctcgctgatgagaacctcgctgctgtcgctgcacgcgacgaggctatagccaagacgcgcgagtacaaagcggaatcggctcgtaaatacccgggagcaccttcaacgtgagaaagatcttgagactaagcatgtggctgacaaggccattcttcaggctgagatcactgctctcaccgctgagcgtgatcacttcgagctggagaatgcaggtaatgaagcacttgccgctggcctcaaagcccgcatccttgacgccgtacgtgacctcgaatctgcacgagctgaagtatccaagcttaaggcagattcggctccattgctcgcccgccttgaccgtgcacacatcttgctcggcaagtactccactggctatggattcgctcgcccgtttgaagaggtcgtccacgctgaacttgaccgctccgacgacgagttgagtgctgagcgcaatgaagggtat

SEQ ID NO: 2034 - DNA, 505 bp, Unknown
  Description of Unknown: unclassified Picornavirales sequence
gttagccacccacgttgttttttccaccagtcacttgactgtgtgttcagttagtatgtgattacactgtatggtatttctagttgcgactagaagcagtccattttcacatgctagccggaatgcattttcgagcctggtgttttactcttcttttggctaaagaaagaaaaccagttaggtgtgtttcagcaaccactatcatagtctgacttacatcgctactattttcagtggccttcgtaattttacgggccgcgctattctttgagtaggaacgtacgcctccgttagaaggctgagctcaaggggaacagggcatagccccggcatttttgtgccgctggattgtgaccccttgtgtgtaggttgacttaggatggtcgaattcctgacacgtatatcaaaacgtggccacctatcagatagtgatacgttaggtgtgggctgtgagcgcctgtttatcactttgccggcgggctaacgctcttcttgtcgcctgggc

SEQ ID NO: 2035 - DNA, 506 bp, Unknown
  Description of Unknown: unclassified Mitovirus sequence
ctcacgaaacctgcacccgggaaaaatccctttcgcagacgtgaatgatgataggatagttgttctagggaacggtagagtaagtttaatttcgaacctactccacttagtacggcttacccagctagtagcgctcagaaaactgtgaaaacaggactatggccactttagtttggaagttaatggcgataaagtatctactcccccgaaagggaagaagagacttttagccctccatactcactttatgtggaaattagcagcgaaaagtcagctatgggttaacccagatgctgctctctaagctaaatccaactctcagatgtagaccgtcttaacgatatcctttacaggacccattaatctggctttgatcaggttaaagtgatggtttccagaagatacagagttcgatacggggacagtgagacactgaccgagtaccaaatgctctagcacctctgaagtttaccaggagttcaaagcctggctacctaatacttaaa

SEQ ID NO: 2036 - DNA, 506 bp, Unknown
  Description of Unknown: unclassified Metaavulavirus sequence
taatcacctatgccagttggttctagcttaagccaattattcactaatcactgctaatcatccatcatatgaagtgatcaactaagagagcgcccattaatcacatgtaatataaggagaaaatcctcaacggacaaacgaatcgtttaagggcttgaaccacaatcagatatcaagctacagtatgtcaaatcctatatatacattgtccatattgctacgtgagtccacactctattagctgccagaattcttactcctataataataccaagtcattataaatctgcctgtcaagatgatcgctcagataccacttaggttaactgtcaagttatcaaagtctataacaagcctgtctggatctgatacaaaaagagcacagattgtgatcttaatcccatcccttgacaacataaatctgattaactatgcatattcaagagaaattaagaaaaaacgggggggaatttatacgaattgcggtcacaaaagtataaccgagc

SEQ ID NO: 2037 - DNA, 507 bp, Unknown
  Description of Unknown: unclassified viruses sequence
ggttaccctgcggaagggtggtaaaagactacgggtcggcagactaagcatctgtaccgtacgacgccttcgtaccgtgttcgaaaagagggtggaactggatcttaatctctgagagaatccatgtcctcttagtagtaggtgcggaatatgccaagctctcctgacgtggagcagcaggagtggttaccctgttagggataagggatctgtgcgacccccccggcataatcgtttagagctagccaccgtgctacggaatgacgcaaagccattcatctctctatccgaagaaaaccacaaggttctcatttttatgaggcaacgacgtacctgagttcagtcctaggacaatctaatccacgtttggtgcagataagactgactcgaaactaagttgaacccactcgccgagctcttcaatgggcggcctaaattgatccagcctaggatcattttagtagtttaggcactacctccatcaacggtcgttttgccaagacctta

SEQ ID NO: 2038 - DNA, 507 bp, Odonatavirus fabricii
catccataacatgttatatattctttaattatcatatatactcattagcattattacttgattgtatataaccatgtttttgtaactacataactctaaacctaaccaccattgtagctggtattgattcttgtattaaaagttcattaatttgatgtgtgtcttttattgttcacgctgttatgcaagactctgacaacgaggtaatggtctaaatgtgtacaaacttgatatatactgttcctcgtgtatctaaataattaaactaattcattatttccatttatgttgtattctctttagagtgtcaagtcattcaagtcaagcggtagcgggaagagatcaaagtcctctaaaactgtaaaatcagggaaaaagcagaagcaagagggaactccccaaagggttaccagatcaaacaaatttgcggaaagtgcaagtgttctaagtacacttgaaacgttatctatcgcagaacctcctgtatctgccgcgcaacctcaaata

SEQ ID NO: 2039 - DNA, 507 bp, Unknown
  Description of Unknown: unclassified Picornavirales sequence
ttttctctcatggaatagatgtgtagctctgagtagtggcatcgaaacccttgccgtaagttacatgataatttgaggctgtggctgataatagtgcagacctcttttaagtgtggactcgcaagacgatttcatgggcttatgcttaagagtagctcctgtagtagtgctctgactagccattgatgaaaccgatcaattattggggttgtgtactttacccacttaaggtacctgtggtaaggattagatggtggatcactaccggtcacgcctggcgagtaccaggtgctcattggagcataagaaagttgataggctctgtgaagcttgaaatcaaacccactgtgtagtgtagacaatatgtgttgattttgattatgatcagacatttaatctgtgaccgttgatacttcctacccactctaacggccttatgaactatatatagggttcgcaatcattcataaggttttatatattggattggctaccctacgatgcaac

SEQ ID NO: 2040 - DNA, 508 bp, Unknown
  Description of Unknown: unclassified viruses sequence
aggagcatcgagcttgagcgagctcgttaaatatacgctcacgggtggttccgtgcacggattctctgaattgtgcttcagacccttttgaagttccgatctttgtatttagtggctgtttgtatattatgcgttcttcaattgttatagccatatgttgtgctagtgctagatgttaggtcaaatttagcactttatcttatgaccagcaagtttaacagatttagaaacgactgctgacgttcaaattcagcagacttttgcttttgatgatagtgagaagcaatttattactaccgttagagacggtgaggacccaactcatgattggggttcgtactctgatgttgatttggccagatggcttgagaggcctattttagcatcgactcatatttgggaggtcggacaaccctttcctcagatttatttcaatccttggtcagcgtttcttgacagccctagtgtggctcaaaaactatcaaatttttatttgctccgttgcaag

SEQ ID NO: 2041 - DNA, 508 bp, Unknown
  Description of Unknown: unclassified ssRNA positive-strand viruses sequence
ctaggcacctgggcgggggttaatgagcactggaaataagaaacgcgagacaacgctttgctgattacgtataagtggagtatcggggagtaaaatcctgctgattacggttatatggagtatcggaagtggcaattgctataaactgggtccggagtaaacaggctgtttattaattttacgttcaaacctattgcaacaattccttacaacaacaaaaagttaaataggaaacttgaaaaattcctatcttaataaagtatattttgttttgttatcactacccgttttaattaataggctctgtaacattcataatagaaatatttcgtaatgataattctcatcaaaagatatcgatgtaaaatgtatctgtagctattcaattatattaattgagcttagcaatcgttaaattattataatttaaataataatttaatctcaatctagcagattgaaaaacacaaaagcataagtgtataaatatgcaaacgatggaagaaga

SEQ ID NO: 2042 - DNA, 508 bp, Unknown
  Description of Unknown: unclassified RNA viruses ShiM-2016 sequence
agctatatacgcacaagttcttttaaatgatttaaacgctcaatttggactagtggacaggatgctctatgcaacaagttgttactactcaggactttaaaaccagagaagagtgtttacacatgtagcttttgaacgggcgcatgtgaataaaagttcagcttctaatcaatctaacaatgtcataccagagagggatgctctggaagtatgtgacaatattacatcccttgctattgacggcgtagagaccacaggcgttactacgttcgctcaagaggcttgtgagcaagttgacgttttgggaaagttctatgttcctactagcgtagccactttgcagccggagttgcaggaccttaaagaatattttcgtcgtcctcgcgttattgcccagggtccttttacgcttaacacgcgtaataatccagttcagttgaatttttcagattctaatttcgagacgttctttccaggtgcacgtacgcgacttttaggggtttatggc

SEQ ID NO: 2043 - DNA, 508 bp, Unknown
  Description of Unknown: unclassified RNA viruses ShiM-2016 sequence
tgtgtatgctacaacatacacactcagtttaacggatctatccgttaaatagtttgcccacttctagtggtcgcttttcaccaggacttgatcctgtcgctttttaaacaacaaaccaatactgttttataatgacgatttgatattgtgttttagttagacctgcgtggttcattagtactgccttgcgaggaactggaaaatgaattactagtcggaccttttattaaccgctgcatgcaagttatagatcctaacacacaatatgcgagaaggaccaatctttggattatgacactgattagactgctggaacgcgtttcaggctctccgaaagatatagtacggagctagtgaaacaagtctttgtggagcgaaattatctctcactgggattggcactctcagaagcgtgagttcctttcacataagacgtatatctgggaagaaaagagcatcgataattggctctgagtttattaccagacgaaacactttttctgctatc

SEQ ID NO: 2044 - DNA, 508 bp, Unknown
  Description of Unknown: unclassified RNA viruses ShiM-2016 sequence
tccgatctgcaacaacatacacactcagtttgacggacctatccgataaatagcttacccacttattagtggtcgctcttttaccaggacttgatcctgtcgcaagtacaaaatattattacctacgtcttacgatgatgatttggtattgtgttttagttagacctatatgatttgttagtactgccttgcgaggagctggaacgcttatcattagtcggaccttttattaaccgctgcaagcaagttatagatcctattgcacaatatgcgagaatgaccaatgactttggaatatgacgctgataagattgctatggccccgttctaggcccccgaaaagttacagtacggggctaatggaacaagtctttgtggagtgaaattacctctctctgaaattagcgacttcagctgcgtgagttctcttcacattgtacgtatatctaggaataagggctttataggccctgacgtagtactagacgaaaaactttacattgctacc

SEQ ID NO: 2045 - DNA, 509 bp, Unknown
  Description of Unknown: unclassified viruses sequence
gggatttttgaccgcccagatgagttttcatcgaaagtttgtcacacatgtttgatgggacacaatccatccccttatagttgactatgtactacagtcgtaattctataagagtcttgcctgctagtgggttcacactagttccgttgtagagtttctgggatcttcggattaaaaccccatacccctcgtaagtcaaaatagtttagtctcagccaagaaagaagctagatatactattagaccactgcgtgcggcactgaaactttgcagacaagatagtctgttttaaatcgacttattagagtcagagacgcctccgttttggcctctatgggtgatgtgccctgacacctccgtctagtcaacgagagtacaatcgcatcaattttcttacacataacttgcctgtttctgggctgccctctctcacgggccgaatatcatgtattcgaagtcttgtgtttgccgggtcaccaaaaccggctaggatttaactccgaaaagtt

SEQ ID NO: 2046 - DNA, 510 bp, Unknown
  Description of Unknown: unclassified Narnaviridae sequence
ttgaggaagagtggaagggtgaaccgaaagtttttacaaggttcaccccgtccttcttcttcctgcccgtggtcgtcagtcttggcagctggagtcacaacaaatgttgactccagtctggactggccacgctgcaccaatggtcgggacaggaagcacaattgtgctaccgtcttcgatgagctgtgcggcagcctcacccgtgatggcacgggagagggcaaattcaaccttcagaagctgagggctgctggcatccgtcttcaagacgttccagcctcccttagcaaggttgcatttgctctgactgcgcagaagaaatgtgtatgtcagcatgagtacgactcactcacagactcgctttactttttgcgggctctatgtgagaatcttcttgatgctgattcaatatttcttcgtgctaagacatccgatttcgacattttcttatccacactcttgaagttgaacaacgtggaaagagtcgcagccattaagtattggactgcg

SEQ ID NO: 2047 - DNA, 510 bp, Unknown
  Description of Unknown: unclassified Picornavirales sequence
tagcgcagacgcaaacatagagtgtgcaagtttattacttgcacactctatgtttgcgtctgcgctattcgaatctttgtaagagacccttattctggtttggaaacgcctgggcgtctgcatagatgtgcagtcccttttatggagcactcttatttattgcagcttaattctatgattaaatgccatcaagtctaactatggcattttacaactacccgtctttattgataggctcttggttatagaattaattaggcctcttttgatgaaagaataaatcatccgctatttataggaagcgaagaattttctatttatagttgtagtgtcattcctatttaggatacggttggacacataaataactaatcttcttcccagcactttggtctataccatctaccccttagtgttgtgtaaaattatggtggtcaaaataacatcaacaataaagaatctgatggttcccagtctacctctccatcacagattcacaatcccgataaa

SEQ ID NO: 2048 - DNA, 511 bp, Unknown
  Description of Unknown: unclassified dsRNA viruses sequence
aatacgttgataatagatactttctatgaaagtctccctcttttgcattagccctttcgtaactgatcggtctaaggcctgttcaaggctcattgagatctaaggataaaaattcttagaaatattaaagattatcgggggaagattgcgaggacaagtgcctaggaaacacttgaaacaatccttgcaataagaaacctacaaagctgtctataggtatgtgctcagactatagactaaagtataacactgctccctgagacggggggtgtgtccatatgggtaactgtatgtgatgctaacgaagccctatgcggattgcttgaagcagaagcgatatgatggatggtgcaaacgtgccgaaagcaaaattatttagttttgttattaggtgtaacgatcgcgtgtatactgaagagaagctctagccggtacgatctccttggacactaatgcctttaaataagttaggtgggggcgagcccctttggtactgaggccgcatgtaatc

SEQ ID NO: 2049 - DNA, 511 bp, Echinoderm berhavirus
aggcccagccttgcggcagggggtgctggcaccgcgggtattgctcttgctcattgttgaaaccctgccccaacccgctatcaaactgagtctcgtgaacttacctaggcaagcgagtaattccactatataattgtttagaaaatgtatatgtctctcacaagcttattgatgattgtattagagagacagttaggattgattatgtgaaattgagagcctgagatggcatatgagtcatctatatttggaaatgtattatattatcgcggttcttataactagtaggctgtagtgtactgtaaaatgtatgtttgtaggtctgtagcgaattgaagtgaatcaaattatgatctaaaaagccacttaccttattaatactggcatgaccacgtagaatgtagaacacatcatgtatatccataatgtatattagtacttaccttctgttgcttagaaaaaatcgacaaacacaacaacgtctcttaaccagactcacaggtgtcacatt

SEQ ID NO: 2050 - DNA, 511 bp, Unknown
  Description of Unknown: unclassified Picornavirales sequence
cggggtggttggaactcacctgtacggtgagtgtctagctgccctgccccttcccctgagccggggttctttggctcgtccctgatctttttctatctcccctacttgtttgattctccccgactacggagctttttggcataaacttgttatcgatgttggattgtccgttaactgacttgatgggggacatagccccgggtgacctatgtcttgaagcgtttcctcacatggattcaaagtggtgctgaaatattgcaagcgtcgtttccatgtgtgtagacgtgaataggcatagttagcccaactgcaatcacctgaaagcccctgaggggttattaaggtggactcacaactgaagagctggagtgggcgctttacggtacatagcattgctctacctataggaagtgtctacatggctaagggtgggggcccttagcttgtccagtgctgggtgacagcctcgtgccgcgcgtcagtttgtgagtataagcggctgtaaaccgcc

SEQ ID NO: 2051 - DNA, 511 bp, Unknown
  Description of Unknown: unclassified RNA viruses ShiM-2016 sequence
agaatgatgagcgcggaaaaataaaaatattgacatatccaacgtgtacgcagtaccattcgaaaactcgactctaaagttagaagacataccacgaccacgaccacgattttgccactattttcttttacaagcagcgtaatctagctttgcatttttattactattattgcttcaaattaagccattagaaagtaaatatttagaattattgtatctcaactctatacatggaaggagctggaattgttcaatactatcaggaaaccaaaattcattccatctctccagcccaggccacaagtctacaaaacgcgctagagggtttgacaagtaacagatcaattagggttagggtcaattctgacctcgacaaatacattactaatttcttaggaactcccagtccgggagtaaatcagtcaactgtgtcaaaggttaacgccagagcaagagcagaacttgctttgaactacgacccagttaggtggatcagctcctacgaggcgct

SEQ ID NO: 2052 - DNA, 512 bp, Unknown
  Description of Unknown: unclassified Marburgvirus sequence
gtggcttaaactagcatgagtatttccaggtcaaccacataataatgttggaggcacagtacattatagttgattatcctgtataataaaggatatacttaccctgatttatatttactggtataaaatagtagcatcatcttatcaactagttgtcatacaataggctgttcctataatctgatggtgaaagtataagcttgtagagttaccatgagtcacaactgttgtatattgtccaaaatatatcttgtgcaagtagtgtgtgcttgaatatgctgatgtaatacacactaataatgattgattaagaaaaatcaatgatggatattaaatgtccatcaagcaggtgtcgtaaaatattaggggtttcaaatgctgccagacttactaaattttacataggattatataattctcttcgatatacgttatatctttagcaaagtaatgaaaacagctttatcatgttagacgccaattattcatcttaagtgaatcctttcttcaat

SEQ ID NO: 2053 - DNA, 512 bp, Unknown
  Description of Unknown: unclassified Picornavirales sequence
tttttttgttgctcgaccgcctaaacgaaggcaaagtgctcgaccctattgcggttgagtatattgactcagtgctagagcgccactttttgcgctacttgaaccgtctcaaccttacgaggtatgagaaactcgtgtggtccggatcatatccgtcctgcacgatcgagtacttgttcctcaaggctcgagcgaaattctatcatgacaatgatagagtctcgttctacgaggactgtcttcgccgattggaatcggctaacgtctactccgtcctgcatgacgaagaatgctctcatgagcccaccgttgacgtcattgagacgtgtgccgcgcacaatgttgtgcgtgttaaacgagtccgtcccgctatttgggatgatttcactcgtttagtggaagaacatcccgttcgagctcctgctcctattcgggatgctacgttgctgcgccgtctgcgtagtatcattagtggtctggtcgcccaccgcactaatgatgtttatgagggc

SEQ ID NO: 2054 - DNA, 512 bp, Unknown
  Description of Unknown: unclassified Picornavirales sequence
gggggttgtgaccttcccttggttctctttggacgtaagctatacgatacatgcgctctttgttgtctggttttgtcacttttgttttgtgttatgtttccttctttctgggtgttctagcaccacccaagtcttagcgggttttccgattctatattaagacagatgctagctggctccgtattcaatccatctgagcctgtgtaaagttcttttgatttcttgggcttgcttacaccttgccaaaggtttgttttgagtggcggtggtttggccacgtggtgacacgtgcccccggacgtactatcgctatagtgcggaatctcattaaccaggaatagattgaatgttaagcaggaggtgatgttttgatgcgtagttgggcagctctttggacactagggaggtaccccttatgggatctgactctagggctatgaccatgatgctgcaaaaatttgtttccctttttaaaaacacacgaacacaacttaatgaaataacgatttgaa

SEQ ID NO: 2055 - DNA, 512 bp, Unknown
  Description of Unknown: unclassified RNA viruses ShiM-2016 sequence
gcaaataagaaacctacggcctacataaatattaatgcatatctacaacataatagacatcgcacagttgcgcttaagttccaggtctttgcgcgtgtggctaggggtcataatatgataggcattgagacagtccaccaacctatgtttgatatggaacgattccctatggtgaagtttggaacggtggttgagtatatttgggatagacatgttatacgagcagcggtgatagacaaaaatgattttgtcaatgagaacgacttcaatactatgcggcattgtgctatacaaagaagtcagtgggcaggaatttgtttgcccaataggtattatgctgtaaacatgaattttgatatgttgcctattttcgcagaactagatgcacatcgtactcgtgaagtacctaaaaatgacgcagcacaaccaccagctccagctgttgcagtggcagataatgctgaaacagcagaaatagaacagaaagcggaaaactaatttgggctaatgtc

SEQ ID NO: 2056 - DNA, 513 bp, Unknown
  Description of Unknown: unclassified Mononegavirales sequence
tatgttcaatatatataatagcgcaagtgcctctctcttttaagaaaacccgccagtcatacatcaccagtgaatgctgataattgcaaggatgaataattccatagtagttttcagcattgtcctcattgtaggtttactcactggaggggtctttatcatgggtcggattacatccgcaggactccagttgtcttacacccctggctcactcttttattttgtattccctaatttttcgactatggccatagaggcttcattagtttacaaagtccttatatttttcgtatcaatattgatcctctctctcctgtcgatcatctatctgatgcacaaggagataatatctacgataagatgggctagtgaaacatatagagagtcaaggatgtttttgcaagcagcagcaaggtcagggcagtcaaggggaccactgcctgatttaatgagaccctaagtgtatggctcagtaatcttttatttacaaaaacccgctagtcaaccatcata

SEQ ID NO: 2057 - DNA, 513 bp, Unknown
  Description of Unknown: unclassified Picornavirales sequence
tttaaataagagtgtgcaagtaatacacttgcacactctaagttttcacatgagatgaccgattgtttggaattatatttcactcaattggaaacactcttgtgtgtctgcttagatgtgcagtcccttttatgaacacctcttatttaaagtattcatttgttagaatttatacatgcgccatcaagtctaaccatggcgtttgttacaactacccgtttgttaaataggctcttggttttaacatttgaatgacccctttgttgaaaggataaatcaacctctttcgtcttgaagcgtggagtttcaagtgaatgtagtagtgtcattcctattcaggatacggttggacacgtaaataactaatcctccacccagctctttgaactataccatctaccactaagggctgtgtaaattcatggtggtcaaaatgataatgaaaataataataatcatgattcgaatggttcccagtctacctctccaagttcgattcataaccccgataaa

SEQ ID NO: 2058 - DNA, 513 bp, Unknown
  Description of Unknown: unclassified RNA viruses ShiM-2016 sequence
cgcaagacgcatgttcagtattgtttttgtatttgtattgtaggtctaagtccttggactttgagttataattttataatgcaaaatctttttacgggtgagtaaacacctcctttttggtaaaaaatcaatcatatttaatgatttaatttagtcaccttttaggcgatactgcatattgttccagcaggatagtattactattgatagtaatagttctactattgtcgaaatgaccgtatgtatagtacacatcactataagaaccggtaacctttatggtaagggaacacaggaataccgtttggtacccatattccacgcattgaagacaacctcattatctgatgatatgcgtgtaggagtttttctttcctccttgtttataaaaacctcactgagtcagttccacatctgttaaaaatgtgggcacaactaaagaccgagttgtgtagttaggccttttattttatttttattggaagcaatagagcttcccagacaaattttaag

SEQ ID NO: 2059 - DNA, 513 bp, Unknown
  Description of Unknown: unclassified RNA viruses ShiM-2016 sequence
gggaataaatattccttacacaggccttaagccttctagtttatattgtactagatctattccggtatagtatagactttaggtatgatagcgaaacccgtgagggtacgtttaatatcatagaggtctatcttcagatactacgccacgtatttggaggctcataagttcttagggcttacaaccctacggtctttggcatacattgtaaaattacaacataagcttagatcgcagttaccagcgatatctcttcggagaaaaggtaacagaactgtggtgaacgatgttaacaacgtagttaacaacgatgtcctttataaagagttcgtaagatcctttggtaagatcttacgactttataaagattggaagtttgtccaaaaatttgctcgtcggattgaaaagaattacttctctacaaccgattacaaattgaattttggacagatcccaagcgaccgagccattaagcgtgtgaagaacacgctgtgttggtgcttttcatatatt

SEQ ID NO: 2060 - DNA, 514 bp, Unknown
  Description of Unknown: unclassified Hypovirus sequence
cacagcctgttaaatccttcaggtggccccgtggggtctaaaggagtggatcgtcctacactttcagtaggcttcaaattagacgtgttactgtctattgaaggtgggtaatttaccgatccggggctatgcccgcgagctttgctcgagacaattgtcgtgcgttccgtgcgtgaggtttcctcgtgctttagagcgtgactttgtcatgttataatagtcaagttgtgttacgcatattaatattaacacaagatgagtcccattctagcagtcatgggaagcgcatttcaaaagaatgctgtctaggctggaatggaagaggccagttggggtcttgacttgggctgtacccaagaactaaccaggattgatagggtcaggagtagggtgtgttctaaccaacatcatctcctatctagtcaccttgaattgagtgggtaaaggtgacgaataaattccactctccaaaacaaatagtttgaaggagttacctgccgtctcccaaaaaggc

SEQ ID NO: 2061 - DNA, 514 bp, Botrytis cinerea fusarivirus 1
tttggtgtgacaaatcaaccctgaaatagggttgacgactcgacacgacaacagtttcttctaagttgtcatgatttagtaagtctaaaactgttccacaccgaatttcaaagaaattttgaaaaacgatacggaaagttcttgaattggacaaggcttttcctgtcataaggcaagattgtgcttgtgtgcgctctgaccgaaccggtgggcaaggactggagcataggaaggaccatttagtatgggcttagtcgggcacaagtgaaccgtggggtccaaaagactgcttaccggcttgtgcttagggcttagtcctgaaatttgcgtagtaccccagcttctgttcttacctacttaaagggaaatagacgtggacactagactacatggaaagacatgttgacacagaatgaatagtattctacaaccaacaaaactcaacatttatgaagacaccagacaaacctgaacaagtaattatccgacacccatttagtaattttagtgaaag

SEQ ID NO: 2062 - DNA, 515 bp, Unknown
  Description of Unknown: unclassified dsRNA viruses sequence
ctaaggcaaagtccaggcacaaaaagcaaaagccgagagctcatcaactgaacaatagatgcttggattccctttttgaacatgaatgtatattgtgcactgatcagatccttgttgggccaaaccaaattgtgattgaccaggataatcacctattccgtcgacctattccatcgacctattcgttttgctcattgttcattctgatcgaggctcccgcgtaccgcgttgtttgtatcggtgtacgcgtccgtgacaatgacggtcaagcaaagcgggccttctataaatggtacttgagcgtactttttccctctttgaaacccacgaacgtgactgagacgacgagcaaacggtgcacttacctctagtcgctccagtgcatttgtgctttcactagacgttcctcttcttcctacgcgctatcttacgggcttcttcgcaatggatcacttccaggctcatgcgccctgcgttgggagctcttccgataacatccagcaagccgatgtgga

SEQ ID NO: 2063 - DNA, 516 bp, Unknown
  Description of Unknown: unclassified RNA viruses ShiM-2016 sequence
gtgtgcatagctatttacttagctatgcacactacattggtatttgtcagtttaatgctgacacattatgcaactacacagtcgcctttatgatatttatcgtttatcagggctactacatagtcgccttataaacttcaatgtttatcatattgtatgtttaattactgatacttttaccggcttaaaagagccgccgacatttatttgtccgaaatcttttttcttttttggtacgcctgttgaggcatttaataccaaaaccattttcaaagagaggtacgacagttctctgctgtcttactctataaaagcctaccccaaagagtagaacttgagggatgatatgagttttgcgctacttgactgcgcttattattaaagcgtcaagccacaacctacctgtcagttaattttcatgaaattattcggcagggaaccgtagagtcgcgggtgccacgacttgaaaggacttgtccttagcatgcaccgtacaccgatgaaccttacgaggtg

SEQ ID NO: 2064 - DNA, 516 bp, Unknown
  Description of Unknown: unclassified RNA viruses ShiM-2016 sequence
gggtactagacccgatgacggaatttcgctcatgccggccctggccggggggggcagacttcggcgcacgtagacttcggtcgcggactggtgatatgcgcaagagatattctagttaagtcctagtggcaatattgtcccgggtgctgccctgattatagcagccgagtaacctgctcgatcgttaagagaaatataaggaccggaccgcaagtaggggtcatgcataccgtcgttggatatgcatcagcccccacgtaggctcgacggcgcaccacgctttaaaatggtctcctagctggagtgtacgctagtggcagcttgtgtaggcttgttgtcgcgaccacataccctggtccttggtacaccgatggacccctggccgaggttaatggcggccccgcagggcagttaaatatatgcaggtaagctccagccttgagtgggccggtctgacatacgtgagtccgttcgtgcaccagcgttaggtgtacactacccccctacaattacatc

SEQ ID NO: 2065 - DNA, 517 bp, Unknown
  Description of Unknown: unclassified Riboviria sequence
gtacaggcgcatctgagagaagtgttattcgcagttttacgtactgattacctggatcacagattcacggaaaggtcgttgctgtcataatagtgcataatcagagtttattgcaaggggaacgagagtgtaaaggtttacaacggttcgcccgaggtgctttagttttgtgtgatacacgctgagagaagctacatcagtgacgagttacggagtaactggacgagtattcattgaaacggctatatcacggtaaaatacggtgtaattgttgtgtccattgtggaccatcgagaaaagcggtatttgtgataggtcacggagtaaccggatcggtgtccaccgaaacggctgcgttgcgtagtatatagtgtaatcgtgtgttagtgtttattgtttatcattattattttgacaatattcattcattatttagataagcgttatcgtgcattagtatatcgattttagaattattttatattttataggcgattacgagcgttaagcccgcaaa

SEQ ID NO: 2066 - DNA, 519 bp, Unknown
  Description of Unknown: unclassified Picornavirales sequence
ggtcggggagatgtgttcatgatcggttaacaccatcatggatcatctctccccgacctctttttgacccagctatgggttaaatagtacttttcttttctcttttgctttcttttgtgttttgtttgttttgcaacatataacaagcattttatcagtattagtgtctgcaactgtataacaagcaaggtggagcaatcatgcgagtatatctcaattgaattgtgacacacaagtgtgcactatgtggaataaatgccattttggccaaacctggttagccagaccagtagtaggacaatttggcacccttagtgggcgcgacctagatgctagggatgagcaaacctatttcccctgagtacaggggctctccttcacctctacattttggacctctttttgagtatcctcgatagaaggtgaagtgacggtgtaccggatggttaattgatctcattgctgggtgacagcccgctaggaccaggcagcatctttgtatggacctgtacatgtaac

SEQ ID NO: 2067 - DNA, 520 bp, Unknown
  Description of Unknown: unclassified Hypoviridae sequence
gttgaaatccttacaggtgaacccgtctgggtcctaaggagtgagttaccacgctttcagtggtttgcatttgcggtagtgatgtgctactcgctgcaagcggttatttcttttaactcgtgcccttctcgtgggcgtggaagttatcttccgtgatcttttggatcgtggtttcgtttgaaaccgtagctacttttgtgtagctgtgacctacttcaggttgttaatttgtggttcgcctaccacgtagtgctacggcactgtacattctttactccgaagagtttaaactactatgcgtgttggtactcgtgatgacactgatggccgtgaccgtgtgtcaattagaggcttggtctatatctgttgtaaggaagtacctacgaacagattctgtctcggaagacctttattataaatttaagaccttcaaaaccataggcttaaaccatcgacccaaagacgctttcgaatgtgtaccacttcaagtcaatctttggtagggaggttataaatccac

SEQ ID NO: 2068 - DNA, 520 bp, Unknown
  Description of Unknown: unclassified Sopolycivirus sequence
atcctgctgctggaattcaggcagctacagcttctacagctgaggctggtgctgttgcaaataaagcggctgatataacaactggagttgtacaaacagcagagggagtggcaggagctactcctgttggaatgatagcgttgattaactcaatgcttggggatgcaactgcagctggtattaatgcttcaaaccaaaatgcaatttcaaaaaattatatacagaattctatggcaaagggatctcaatctggttttcaggctggacttattaaagaatctgagttagctcatgcatctgtaactaatgcaggagctaaaataggaggcatagcaggcccattaggtgcttggtttggctctttgatagctaatgcaattcaagattcaactcctaaggatgattataataatttcaaaacaggatattcctttgatggcaaagttaatccgcaagatactggtttggttggctcaggaactactgctgacctctctggtgaaactaacatgacaacatt

SEQ ID NO: 2069 - DNA, 520 bp, Unknown
  Description of Unknown: unclassified RNA viruses ShiM-2016 sequence
atcccgctctttagtgttagtacttgttacacactaaatcctattatctaaggtcaatgtgaacatgtttatatgaatgtgtttgtgttgcaaagtgtttgtcttaatatgatgaacattttgtgattattattgattattagttagttattgttagtttatataaacaaacattaggtttgttagttagtgttagctttgttttgagctgctcatggggctcacattcgtctaatgccgctatttaagtttgaggtacgttgatcgtcacctgtcaaccgctgcctattattacttctacacatgcgagaatagcgtttcccgagtagtgttgacgtatgtttgtttgtatactaacgatgttttttattttgttttctagtcctggtgtgtacaggaattcatcgcaactgtatctttgttaagggtacagcaatatatattatagtcaacttccgtaagaaaaccaacttcagcacatcccaattgtgctgtcgtaattttggaggaacactctaac

SEQ ID NO: 2070 - DNA, 520 bp, Unknown
  Description of Unknown: unclassified RNA viruses ShiM-2016 sequence
actggaatgacgaagttagctactcccgagaatccatgtcttatccagaccatggcccggtagagcggcctgctgacgttatacgtcagcaagggacagctcccgtgtcaacgtcacctacagcacaggccactcctatggccccagcgacatccgcgcccgcagcgccagcttcgccaaccccttcccagccggagggaaacgcgagcagggcctctgcaggtgcggaggcccgtggcaacgccagtctgcaaggaaatgcacagagcggaaacgcttcagtaagccccgcgtcagcaattcctttggaacagcaggcgacagctaccaatggcccgacatcgatgcctgctccgcgaagcgtagcttccgtctccacgtcgaccgatttttcgcggcgcaagcaaaccgcaaagctggtccgattggaacccggagcatcgaccgcgttgagaagagatgccgtagctggaagtgctcagtaacccgctacaaagattttgaagaaaactttgaaatc

SEQ ID NO: 2071 - DNA, 521 bp, Unknown
  Description of Unknown: unclassified Caliciviridae sequence
catagctgttatgctatgtcaaatcgaacctttaacatctagttctcactatctcgccttgggatatggcttcggccctctatctcacggttaggtagttctgactgattttttgtttacgactttcttggcttttgtctttaaaaaccatgtgtaactgtaagtgcccttatcgacaggacgcgccccacgtggaattggggaaatctggatcatgggattccgcctgcagtacggaaaagtaccgagtacttagtatgttctgtagtgccccatgtgaagggaccgcctgagctagagctacgggcttggaaggtaaggtaggacgcctttttggctatcctacgatcgtccggcgccgattgcgtggcctcgtgcccctctccggttccgccccgatgatgcaggatttccgctaggggtttgtgacgcctccaggtacgtgaggatgggaagcctcaccaatgcgtagtgctgggtgacagcctgccggctggcgcagttcagtgtggtatagccag

SEQ ID NO: 2072 - DNA, 522 bp, Unknown
  Description of Unknown: unclassified Picobirnavirus sequence
atttattaatttatcaacacagaaaggaggaatctattgtggtttgtaaaatcattaattcaaaaccacatagtcactcagtaatcgccaaatcacagtggatgctgtgtactttagcggttgagtgcagaaaggaggtatatcttgacagatatacaaattaagtactggggtctcaaagaaaccggtcgtcacaatctcgctggagaaagacaagcggctaatgaactgaaagagactcacagacacaatgtcactggtgagaaagaaaccaaacgacataatcaaacctttgagggtgagacaaagagacataatgttgctggcgaaagagaaacgcataggcatagtgtcgtgctcgaaggtattgagaaaggtaaactcaaagaggttactcgacataacgtagcttctgagagaattgattctggtaaattgtccgaatccaaaagacataataaggttaccgaatcaatccagcagcaagatgcaaatacaaggcttcaagttgcttatacccaa

SEQ ID NO: 2073 - DNA, 522 bp, Orthohepevirus A
gcccggcactctattgtggaacaccgtttggaacatggctgtcatagcacactgttatgagttccgcgacctcagagtcgcagcatttaaaggggatgattccgttgtgctctgtagcgattatcggcagagccgcgacgctgctgccttgattgctggttgtgggttgaagcttaaagtggattttagacctattgggttgtatgctggtgtggttgtggccccgggcctcgggactctgcctgatgttgttaggtttgctggccggctctcggagaagaactgggggccaggcccggagagggcggagcagctccggctggccgtttgtgattttctgcgaaagttaacgaatgtggctcaggtttgtgtggatgttgtttcgcaggtttacggtgttagccccggtttggtacataacctgatcgggatgcttcagaccattgctgatggcaaggcacactttaccgagacaatcaaaccggttcttgaccttactagctccattatatatcgggtgga

SEQ ID NO: 2074 - DNA, 522 bp, Unknown
  Description of Unknown: unclassified Phenuiviridae sequence
gccttctcatttatataagaactcttcagtgatcaaaagatgtcagcatctgtgtgatatagcagttggactggaatcatttgctggttcagcaaaggagacgaatccagtttttaaagattaccatggtctttttcacataaataaattacctgctatcaacagcctggcatctcatgttccagagagtatcgaccttgctttcaaactaaaacggaggaaatttattatagagaaacttcatttgccaccagaacttcaagagacaacacaaagagagcaagatgatatgccttctgctagagcagttagttgtggtgttggtggtgggacaagaaatctggatttttaatattcttgagttgtctggtctggcattggttgtactgggtgccatactgctaactgatgtccccagagtgctgttgtcccgacttttaggctccaatcacacatagacggagaccacatttgaaaaataattactaatctcgtgtgaaattgtaattagcaatcatcaag

SEQ ID NO: 2075 - DNA, 522 bp, Unknown
  Description of Unknown: unclassified RNA viruses ShiM-2016 sequence
ggggaacactttcccccatgctctattttaacctcatatacgactttgtatttattaaaggatttggatcgcaacggtcctcttcttttcttactacaaaactcgtatatgttgtatcatcaatcttatcttttcattacaactttacttatcactttatcacaaatttatttgaatgttaacttctcgaaggtatggcaaacaagaatgtgtgagtgtggtttcacgaataaagggtattaggtgcaagaatagcttaaagtatatgcttttaaaacggcctctatacacctagtatactggagtatttaagtatcaaagggatatctatgattataggaaatcgatatcaactggtgctgcttacttactttacgtaatagacttggtaactctattataggtaaaactcacggaacgctggatttcttaatggattcgagaacggacacatgatagtatttaacatcgatatgagacatgaattacctcatatcatcataattttcacttgaacaaacc

SEQ ID NO: 2076 - DNA, 524 bp, Unknown
  Description of Unknown: unclassified RNA viruses ShiM-2016 sequence
atacaactgaaagcagttaaccccgattgaacgtcttgtccacgatacgtgacctgtgaccgagagaattctactactttgttttcgcattccgtcgctattattttcctatttaaagtaagaggttgcctagagcatttaccaggactctgttaaatagatgagattttgtgtgttgtctaacaaaacactcagggccaagtattccctctaaaatactaaaccgtcttaagtagtgagctatctttgattgtattgttgattatcaaccaacttccgcctttgattttagcccgcaatctgaaaggttatcagttataaaacctccgcgatcgacgactcaagacttgttcctctgttggtactcgattcgccgcccctattgcgagaattagaagagatagtcccaagctaatctactttgaagaatcattgtgatctccacctgtacttgataactaccagtgtattttgctttgattgccatagttgtttatcgattaaagtcctttaggtactcaacc

SEQ ID NO: 2077 - DNA, 525 bp, Unknown
  Description of Unknown: unclassified RNA viruses ShiM-2016 sequence
agcgtgcttaacagcacgttgaaagtaaattgttcgaccagagcatgcgtaaaactgatgcctcttttgaggaccacaatctggcgaagagtcatattgaagtacctctaatcagtgggaggagcccaatagcgattctttttagataattgaaaatggactttttatctcgcttcttcgcgcgagtaataaacacgaagaaaccaaaattataaaatttttaaaaatagggtcgcaggcttgttacctgcaaacacattatttagaccccccaaaaatagaagctccgtagtttgtccgaattgcggctcacttggtcattaagaagattccctgaaactccgccaaaagcgattgtaacgtaaaggaattatttcgagaaaccgagttgaggtgtgagataacgatattctatgccttccttcttttcccaacaagaagataaacatgttgaggaccttctgaagtggttatcttcagtgacagggtgaaagcacccaatccaaatttaacattttcttaatc

SEQ ID NO: 2078 - DNA, 526 bp, Mivirus boleense
cgttagagatgagttagacggggttcttcagaaggattcagagaaatttgcgtatgatactctgactcatgtgctccacatagtgcatagattagcaaccatcgaaggattccttcttattgtaacacttgttcaaaaaggtgaagtaagcgttacagccaaacactgtaatgacggctataggagcttcatccatagcatagctcagcgagttgatctgagagccaacatggcagaacatcctcagggtgcctttgagtacaagggagagaccatacatcctttcaagcattggaaagtagggatgagatggggtgtccaagcaatgactatttcacgtcgcttgtgaggatactgatgtatatatgtaaatatatttagcattagctctgtaatcatcttatcttatatccatgtagtcaatattttatgcatatctcgttcatattcactcactgtattaaaaatggagacaggattcaattgatcgatttttgagcagatacactcttcctcagagatcatc

SEQ ID NO: 2079 - DNA, 526 bp, Unknown
  Description of Unknown: unclassified RNA viruses ShiM-2016 sequence
gggcgtgacctacgtcctggtcttcattgaccgcaccaaaaggatctatatattgatctttcacgaatatgacggtaattgtgaagtgctatatatagtaaagttattagcgccatgtgtaggcgtgaacgcgaccgtcaataacacttcagcgtgcttgagcaggcatgctgtcgtacatagattgctcgccgctatcaataacaataataacaatgacaatacgcttgttggaaatcgttctgccttagaaactgaacagaataccacatttgtagaagacgcacctcttaccattacaccaaatgttgtagtgacagattccacttttaatgacggcgctgttgacaacgtggctttgggcgactggttctccagacccgtacatgttgccacatatgtttggaatgagggtgcactcttggatgaagttctattgccttggtatgagttttttaacattttaaccatcaggaataagctttttggatattcacgtttgaggtgcaaccttcatgctaagttc

SEQ ID NO: 2080 - DNA, 526 bp, Unknown
  Description of Unknown: unclassified RNA viruses ShiM-2016 sequence
cggaaatgcaattgatcaggactgccgagtatataccaacgcaatatcggttggataggtttaatgagtttttcaggactggggacagcagctccagcgcggctactggccccaagaactcactaaacaaagtgaatgttgtgcgcaagtgcctctcaaaacgttggatagtaggcataggattattagccatggcaagcctggtcattttgcgaaaaccgcagttaccgttacatatcccaacattatcgcgtatcatgtaaatactcatagtagttgttattgtaatgaattagttagtatatataatagacatttagttgataggagttatattaaatatgataagttagctataagtaagggctttgggttagttgataagttttatagcaatgttaaggtacataaacttagttataatgatatcataggggaatatactggtagtaaacgtaggttttataagcaagcattatataagttaattaatgagggttttcagcgtaagtttagctatgtgact

SEQ ID NO: 2081 - DNA, 527 bp, Unknown
  Description of Unknown: unclassified dsRNA viruses sequence
tttggaactcagctaatacactggtggctgagctgaggttccaccatctaattaaactactcaaatataccttcactaggaataataaattatatatatccctcgtggacgtgattaacgaagtagcaggccacacctttaaattgagctatttagatgataaacagaacttaaataaaccgaagtttttctttgattacgatactgttgcgcgtaaacacaactttaataatgaacctactgaaataaatggcgcaatattacgctggatcttcctacatcccactcctccaagtgtatatgactacttaccaaattttaatgaagatatcagattagaggattccattcaagttcttccagcacgatcataccttaatctagcaagtgtgccgtatgttccaccagaacgtttaggtgacactgactctaaaaatgagtatatagaacttgaccctcacactgtgggcatagccgttaagaaacagaattcagtactcatagaagaatggaatttttatcataat

SEQ ID NO: 2082 - DNA, 528 bp, Unknown
  Description of Unknown: unclassified Alphavirus sequence
gatcgcaagcagagtgttgagagaacggctaaccggatcaccatgtgcagcattcattggagatgacaatatcgtgaaaggagtcaaatcggacaaattaatggcagacaggtgcgccacttggttgaatatggaagtcaagattatagatgctgtggtgggcgagaaagcgccctatttctgtggagggtttattttgtgtgactccgtgaccggcacagcgtgccgtgtggcagaccccctaaaaaggctgtttaagcttggcaaacctctggcagcagacgatgaacatgatgatgacaggagaagggcattgcatgaagagtcaacacgctggaaccgagtgggtattctttcagagctgtgcaaggcagtagaatcaaggtatgaaaccgtaggaacttccatcatagttatggccatgactactctagctagcagtgttaaatcattcagctacctgagaggggcccctataactctctacggctaacctgaatggactacgacatagtctagtccgccaag

SEQ ID NO: 2083 - DNA, 528 bp, Unknown
  Description of Unknown: Yongsan picorna-like virus 1 strain 16-0061/ROK/2016 putative1 sequence
ccagtaggtctctaatccgatccaatattaccgcgcacaaagtcgaaaacagccttataacaagactccaagcacttcttcttcgagggtccaacttgttttatatgaaacaattgtacctttccgacgcgccaggtcgaattcggttattcaggaaactactacaccaccgtcaccgtgttcaagcgagtcggaaaggtacaattgtttcatataaaacaagttggaccctcgaagaagaagtgcttggagtcttgttataaggctgttttcgactttgtgcgcggtaatattggatcagattggaagacgcaaggactggactccaataagagcagtgatttgaatgctgatgtcgaggataatgtgcaagaggtttcgaaggaagagaatgttatcattgagggagcagaagtgagtactgttgcaagtgttccccgatcccaattgcgtgaccttgtggctttgtcaacaacagagaaagtttacacatttgctgattcttcttcatctgtagttggaagatgg

SEQ ID NO: 2084 - DNA, 529 bp, Unknown
  Description of Unknown: unclassified Salisharnavirus sequence
acgcatccctccatgcggggtcgatctgcatgtaaaaccaaatccggctatgtttgtatggttacgcacgccaatagaaaagtttgttcatttatcttttctggtttgacgcttcttacataagactgttgtatggcaatccttatttagggatgggtagtcgcccgcaacaaatgatcataaattgtaagattgagggatcttgcgatatattatttatccccttgctcaaattacaaatgtaacgctcaccgagggagcgcataaatctcgggaccaaacagtgttgtataacgattatgcaaataattgggagtacggcgtcgacgcagcgcaagacccaacgtactcattgacggatctcaatgatgcatcacttgaacattttttctcacgcccagttaagatagcttcttataactgggctacagggactgctttatttcagtccgttaacccgtggactacgttttttaataatcctcgggttataaatcgcatttctaattttaaccttattaggtgtaaa

SEQ ID NO: 2085 - DNA, 530 bp, Unknown
  Description of Unknown: unclassified Picornavirales sequence
ataaggtaagttaattataccttgtactttattgattatttgtatactatctccattttaaattattgatatgttgtgtgtgaacccatattgatatttaaataataaggatagatatactataattgatactgtatgtaagatttaacgtttaaaattatacttatcttttaaaacacccaaaacttgtatgaaacgcaagtcaatcattcaattagcaaactacccgtatttaatataggctctttgttgattgagtaattgttgttcaaatgaacacctatttaagggttgattaatttcttaatgtgcgtggtggcacctttaaatagtagatttccgtctttctctattcagagtacttttggacgttaactaatgctccatccagtcttgaatgtatgataattaaactcaagattgtgtaaatttatcttatcgcaagtacatcaaataaaatttatgaagaaccagcaaaactcgacgataatttcgcccctgatcttagtaatgtaacaaatactaatttt

SEQ ID NO: 2086 - DNA, 530 bp, Unknown
  Description of Unknown: unclassified Riboviria sequence
acaaaaccgtcattccaaagaggaagacaacctcactaaaaaattacaagttttttagtttgttcgagaaacataccggcgaaagaaagttgggaaagtttctacttgaacagacggaaaacacatataataataaacgtaaattaccagatgcgattgactgtttcaaaactattcaagagatattacaatctgttgatcagcgaagaatcggtattaatccaactcaactggaatattacaaatcaaccttaagacaaaaattgaacggctcattgaaccgaccatttatcgtagcccatagtggtttcggtaagacgacgctagctaaggaaaaatggattttggatatagatgattacatcccaaaagaagtatttactgtgcaaaactcgtcaacttcggcgcctgagttgattcttcaaaacgaatatatttttaactacatatgtgcatcatctggtgtaggtaaatctcacgttacaaagtttcacaatcaaactaatgtctttatcgatatcgatgaagtc

SEQ ID NO: 2087 - DNA, 530 bp, Unknown
  Description of Unknown: unclassified RNA viruses ShiM-2016 sequence
tgatatcatggcagtggctgcggcagcaatgtttggaggtaatgtgttgcaaggtttaatgaactggggtatgcagaaagatgttaatgcacaacaatttggatataatacacaactcattaatcaacaaattaaaggtcaaatggcagtgaatgcagttaattatcaaaatttagctaattatcaacaaacaatggcgagatcatctggtgctccagcttatatgtttggaggaatgtctagtgggatgactcccaatattgggggttatcatgtaatgaatacaggtggtggtgcaaattttatgactggtaattttgcgtggacaatgcctgttggaggtatttctggttatacaggacaaggacgagcaccatcaactgcagatgttggtacccaaatgggtggtatgacggcgtcaactggaacaaatccaatagaacaccaagattaaaattagtctacctatggttcctaattcgataatagatggcagcaaataaacaagaaatcccaaaaagttatttatc

SEQ ID NO: 2088 - DNA, 531 bp, Unknown
  Description of Unknown: unclassified Robigovirus sequence
atgagccttaggcctccaacggattttggcaagccattactgtttgcggctgccggcgtctctttggccctgctcattgcagcttacaaaagtcactacttaccacccgtaggcgacaacattcattctctaccacatggtggtcactactcagatgggactaaaagcataagctacaacggtttgaattgccaacagaatcacagccagaacctcttatcaagcaccagcaagttgatcccgcttaccttagttttcgttgtgagctttttgatttatgtctccagtaaatttggcaataggtctcctagcattcagcattactgcattcatcatcgctagtttcaattcaagtcctagtaatagttgcatggttttgattactggcgagagagcgttagtcaccggttgtgaaataacaccagacttgtctgatcttgtcaaacagttgaagcctcattcacatagcttaggtttttagcactaatactgatttgtatttgtgtgtgattagactacaattcattttaa

SEQ ID NO: 2089 - DNA, 532 bp, Unknown
  Description of Unknown: unclassified Closterovirus sequence
aacgttgcaatcaagtattgtataccccgattcttctttcgtgtttgcagatggtagctcactttcacccagtcaaatgcgcgcttctccttctcaaagcgctgaaagagagtttgcttaccttctacacagcgaaacgctttttaaatggtgcgcaacctgcgggccttcaatgcggtctgctctcagtgaaattaaccaactcggcaaatacagagaggatgcgaatatcgaagtcgatcttaaaactgtcgggtgtaagtatacaatcgatcgaattagagatttccttaagaatagcaacgactcctcgaacgacgcggttgaacacagctggagtttatctaactcttgcggtgaattagttgatcccagtgacatttcgcgttttaagaagctggttttcggaacgtcatcgtctgttgacaacgatgaattcactgctgtaacccatattcgggattatctagcttactgtttatctttagtcgataggtttaatttaccctcgcttaagggtgagaaagaacta

SEQ ID NO: 2090 - DNA, 533 bp, Unknown
  Description of Unknown: unclassified Nodaviridae sequence
tgtaaagcgccacggcttcgccgtttagctttccccttttggttagagcgatgtctatagcttgttcccttggttgcgggtaacgtagtgatggcaaagttggccaactgggattactggcgtacgatgtaacagctggatcgtactgggctctgggatcgaccgtctctcttgaggatgctgcacgcttcgcgcgttagggctagagagagcagctcgtctagtattgtgcaatggtcttgccttgctagctaaaaccaacccgaatttgatagtacgtgaacgcccgcccattcatagcgacaatgataaactttcaagccctaatcactcttcttcttcgttttgtttccttggtttttgatttggcattcttagtgcttcgttatagttttaaggctcttatagcccttattaggcttggttggctccttttgcgcctaccccttcaagtttgtctggccgtagctcttttggctttggccgcagtgatctcattagcaaccgcccagcataataccagctggactgac

SEQ ID NO: 2091 - DNA, 533 bp, Drosophilid anphevirus
ccttaaaaacaagtataaaatatcagcctattaattacctatataaaaattataactaaaacattatattatcagcaatattaaccccaagaattaataatcttaaatcgtaaacatataatcttaataaaacccgttgagtctagtcacatatctgtaataatacccaaaattaaatactatattaagaaaagagaatgtatgagactaaaatcatgtgtccctattgtggaatgatgatcaatgttaggataagtactaaaactgatagtaatttttcaaaaacattagtcaattgtaggttttgtaaagaagaagtaaatatagaattagtcacaactgggaccatagacagtaaagagccagttggttcaaacaaaacagacaggtaagaatcactcctacattatggtataaaagatgctactagaattccatccattttcttataaaatctttaatcaataaaattataatcaagttaatactaaatctttgagtcttgtcacttacgaatagaaaaacccgttaag

SEQ ID NO: 2092 - DNA, 534 bp, Unknown
  Description of Unknown: unclassified Potexvirus sequence
ctaaggccactcagcaccttcatcgctctcacccgcgccaagggcaacctcaccatcttcgatttcaatgccaggtttagttccaccgcctgaccactccaagtcactcttcgtccttgctattggtataactgtggtctccgcactatttgtgctgaagtcccacacgtttccaattgcaggagacaatattcaccgcttcccctccggcggccaatataaagacggtaccaagcagataaatactgtccacctactcatgctaggtacccgaaataccctgactacaatgcttgccgccactgccgccatcgtcatcctctctgcctatatatttcctaccatcctggcaataatattcgccgtatttgcccttgttgcaatacatatcaccacccctgagcccttctgtaccatacacatagacggggcgtctattactatcactaactgccccgatcctgcagctatattaaataaagtagctataggcccctggcgagggttaagttaccacaataacttgaaataatc

SEQ ID NO: 2093 - DNA, 537 bp, Unknown
  Description of Unknown: unclassified Sopolycivirus sequence
tagatgatgatcaaaaagcacttgatgattatgatgcatcaaaatctgacccatcgtttaattatggacctggtgaagaatctgctgcaatcgatactgatattcctattgaaacaggcattgccgagggagctgagatcgcttccgctggaaccccttggggtttggcagcccttataaaccaacaagtaggacaatcagttaattcagctataacaactggacaagaaaatatttcatctcaagattatatgtccaatatcaatcaacatggagtaaatgttggcttgaatgcttcccttattcaaaatcaacaacagcaaacaattaaagctggctccgctggaggaggaattggatctatattcggaccccttggcgctcttataggacatgccgttgctggaacagtacaagcgaatcctgatttattcaatactgctgcttcttcaagtggatggattaatcccactgatacaacagctgcaaattctgcttctgctgctgccccaactggtgactctacaatgcaagaca

SEQ ID NO: 2094 - DNA, 538 bp, Unknown
  Description of Unknown: unclassified viruses sequence
gggattttaaccgcccgttgtattcttacacaaaagtttgttacgcatgtcttgaactgacacaatagttcccctaaaagctatcacgctcccttgtgatgtaactcttttagagtcttgcctactagttggtacaaactagttccattttaacaccaaacacatcaatggattaaacccgtgttccctccccgacagatctacaactcttagcttacagccaataaagaagcttaagtcacgttgttaactcgtcctggagctttcgtgttattgacaattccccctccccctcttttggactgattgtctaaaccccccgacttatatagacagagacgcctctatggcctctatgggtaatgtgccctgtcaacttcctgttagtcactgaagtacaatcgcattcacacacacaaactaccgcttgctcgttttacgggttgccctcattcacgggccgaatatcatgtattcgcaaagtagtgtttgctgggtcaccaaaaccggctagagtcctactactcgataaataagt

SEQ ID NO: 2095 - DNA, 538 bp, Unknown
  Description of Unknown: unclassified Partitiviridae sequence
catcccttttggggcaaaaggtttgacaggggattggtcaccctacaaacttctggataggaccaccctacttgcgacggtagcccgccttacccgcaagtggagagcagtgagggcggatgtttgggctagaaccccttgcgataacgagtactcgatggtacggtcacagagcaaactgtactggcaaagtcgggtcaaggagtcgctgcgacacccagacattaggttaagagtcagttctatggatgcaggggaggcattcaagctggcgcacaaacatttgcaacgcagattgcgagtaactgaagaggcggtcaaggagaagaacttacctccgctgcatcttcagcacttgcgcgctctcattgtcgcgttaaaggattggcactattctccggatagggtgtcgattcttgcgacatgtgagttggcgcgaggctcctccccccctgaaaggcctccccgcattgaacagcggtgggtgggaggggttccaaggccattcgcaataaaggaggagataccaccctcgaag

SEQ ID NO: 2096 - DNA, 538 bp, Unknown
  Description of Unknown: unclassified Triatovirus sequence
ggcaaacgtgtgatccctgcattaactcaacaaatatctgatgtaaataaagagtttttgtaacgctgcgtttgtaactacctgggctatttagtcttacctcccaggatgggtagtggcagccccacaatatccagggaaccatcagtatatactacatggttaagtggcctgtagtacgaataattcacttgctacaaaacaagaaaataattcaatagctcaagctgaggtagcgcctcaggaaggacagaatgctcaggagcaacaggaaataacatcatttaatgatgatcttgctgttattcctgagggagtacccggagagacaccagtcccgtcttttcggcatgatcaattcacggacttttcagaccattctattatttcgtttttagagaggtctcagcttcagtcgtcgtttcagtgggaattcgcgcaatcgggcggtgcttcggggttgaattcgattggttacgatctgttgaaaacgaacgactcgccagggttgttagtaccttcacagatattcaagccc

SEQ ID NO: 2097 - DNA, 538 bp, Unknown
  Description of Unknown: unclassified Picornavirales sequence
gattgcgatcctttcactgagcactatttacagctggtttgctgggaagaaaacccgcttacgagagcgttatttcggaaccttgatgcaacaagttaaatgcaatttttattactaagttaatttggaatgttgtttatttaaacttttgttcttttagtttgttagtttatactcctatttactttagttttaacctaccattagtttattatgtttatttagttttgtttactttgaagtttcttacctggtgcattggagcgaagtagcttttgtgaaaagtccgatgttcctgaactccattgggaacctatgcggcctctgacgggtgtctttggcggaaacatggataactggtgggaatctctacacatagaggacaagcaccaacttcagacgctttgtattacaaagccgggctgtaccctgattttggtgtatggatacccatggggatggggtctgttttgtctactgcctgatagggtttttgcaaacaaatgtgtaagattataagatttgctgtagttatttt

SEQ ID NO: 2098 - DNA, 538 bp, Unknown
  Description of Unknown: unclassified RNA viruses ShiM-2016 sequence
acctctgaactccctctgaagtttgtgctaaacaaccttgatatggtaccgctagaggttttcggacctttggcggcaatttcgctctgtgatgtcacttgacaagcaaggaatctgtcagcaacaatgacagtgtaaaattccccaagaactggcgacgatcctgaggcaaagcctataagacctcgtggtgaccctccagtgtcatgaatttcactttgcgaaaatcactgcacttactaaagaggtatgtgacatttcctctttcctttctctccttcctttcctggtacacattggttacgcaacgggcataactactcctcagacaactactgtccgtatcgctttgtgtactttggcttgctatttagcgtgcgtgtgccttgggcagccccctaaacacgtgtcagaggaccgctccagcctagttgggttactacggcagccacgcttgcgtggtggagtgtaaaactaacctgctcctacttcttcttctccttcttcctctacttctcctcctccttctactaactct

SEQ ID NO: 2099 - DNA, 538 bp, Unknown
  Description of Unknown: unclassified RNA viruses ShiM-2016 sequence
attactcccgagaatccatggcttatccagaccatggcccggttgagcggcctgccgatgtaattcggcagcaagaaaacgctcccgcgccaccaacacccccagcaccagcaacttcggttgctccagctcaaaccacgccagcagttcctggcccttcagcccctcccactgtggccgcagatgtgacaactccctgtgtagaacagccggagggaaacgcgaacagggcctctgcaggtgtggaggcccgtggcaacgtcagccagcaaggaagtgcactgaacgtaagcgtttcagtaaaccccgtgtccaaaactcttttggaacagccggcgacagctaccaatggccagacatcgacgcctgctccgcgaagcgtagcttccgtctccacgtcgaccgatttttcgcggcgcaagcaaaccgcaaagctggtccgattggaacccggagcatcgaccgcgttgagaagagatgcagtagctggaagtgcacagtaacccgctttaaggattttgaagaaaatttcgaaatt

SEQ ID NO: 2100 - DNA, 539 bp, Unknown
  Description of Unknown: unclassified Totivirus sequence
gaaaaactatccccgctggtcggtgggccgatacccaatcggtctatggagggaattcaaatagggctctggtagtccgctcgccatcgccttcggtctttccgttatggaaggtttgcttacggtccacgtaggttctccgaccttgcgaggaaagattgcgctgctttgcagttcccttaactggggcgggttaggacgtcggtagggtgcctgtggccctgcggcaggcggatctagcacgtaacgtatcccttgccagggagagcgtgccgaattgctatgggttggtgtaggtcctcggttgtgtacggctcctcgtccacctacatcacacatgagaaactgatgacgacacaggcgtgtctaggactcatgcgtaactgctccgatgggatattaggtgtaacgactgcctgtaaagttaaagagttagcaactcgggctgaccagtctgccctttgcgtggggtgtggcatacgctaggacgtggacaaaaacaacaaactaacaacaacaacaccaagccaaaaagaaag

SEQ ID NO: 2101 - DNA, 539 bp, Unknown
  Description of Unknown: unclassified Picornavirales sequence
ctaggaaggcctttttgtaattattcgtagttgcgattattaaatatatagctatatctcttgattgagaaatagtattctgtacttttgtatttcatttgattatgattaatttatacaaatagtagctatatacttgacaatcgtctcttgtagtttaattttaaattcctagaacaccttaacccttacaaaacacacatatcattaattttaacatttaacatatacgcgcatatcttaaaaatttaaaaataacttagtgggaactacttaaatatataaggttaatgttatatagatcgaagatttatacaaatcacgaaacctcgcaagggttgcttctattttagcattaacaaactgtattttcttaaagtaccttttgtatcaaaaacaaaaccgaccacacttaaacatgacctctgaacaataagtttcagaagcgatcggaaatgatctatcacatacgtagttgtgatagcagtttgggtgatctgacttcacccacccccccctaaaaactttttacaaatatg

SEQ ID NO: 2102 - DNA, 540 bp, Unknown
  Description of Unknown: unclassified RNA viruses ShiM-2016 sequence
tcgcattgttgtggatatttggtgtctctatggtttgttcactactattaacgtgtcttttaggttattattttataagactagttaggaggacatacagttatgcatgcagaaaaatccaaaaacatgatagtagtgtagatgccttagagttagtgactgtatatcgatctactgttgactctcttcctatgcctgtacctttatcctgaccctcagtaccgcaagcaactcgaacaatctaaccaactgtgtggggtgcgaggttaaagtatggtaacatactctctcactatgaagccagggggagatttagtagagccaccgcccgccactagtgcggaacctgtccgtaggttgggaacctggagatcagcgtgccgaggtccataacctctcccagtgtatttctgtgtgaggcattggcaaagttatgggtagccttgctggttctgcctggggagctggaagtcttcgagcccagggggtatcgtcaccgcccaatcttgtgacgtctttttcaaacatttgtattctatc

SEQ ID NO: 2103 - DNA, 542 bp, Unknown
  Description of Unknown: unclassified RNA viruses ShiM-2016 sequence
gcatttgcatcactttgacctggcgaggtcagtaaatatacgctttttacccccggtgcagggttacattgtaccaccttatcgcagttgattacggcagagtcgaaatgatttgcttgttttattttcaattctgacgctctgcgatttgcatattattgtacataaacatgcgtctgtggagtgctgagtcgcacccatagtactattatagacttgctacaacattaaatcaaaattttacggtagaaaccgccaattcatctttgaaggaacagaatgtgtcttttaatgaccaatctgcgggctatgttcattcccttaattctgttattgattctacgagaaccaatgtggatgcatatgatgtggaattggggaattttttcgaacgtccattaaaaatagcttcgtatgagtggtcaacaaccattactttctttcaagattttaacccgtggtcattgtatttagagaatcctcgtgtagcgaatcgcatttccaattataagttgcttaaaggcaaacttcacgttaagttt

SEQ ID NO: 2104 - DNA, 544 bp, Unknown
  Description of Unknown: unclassified Riboviria sequence
cttaaataagtataacgtaaaagccactacagttgatgacttgattcaggatatgactagacaagcatgtaaggcttttacgttatacttatttaagtgattgatggttgctggttgctgtgctgtaggggtcaacacctccaaagtaagatgagagaaatcaggcattctatgcccgttctcactgtatcttccttggaactgtttatcagtaactctcacacgcacaagacgcgaaaatagatctcacggaaatgaatcctttggtatatataacgaatttgctaattctactggtgttgatgatcaagttaaatcattaaactcaattatttcatcagatccatacagttttgaatctgcatttgttaaagaacaaccgtgtaaattgcgagttgtatcattgacttcaaaccagaaagattactcaaatttgttgaaaaccttaccggaagccaccttgtgtgctctattttcgcgtcttgtgcgtgtgagagttactgataaacagttccaaggaagatacagtgagaacgggcataga

SEQ ID NO: 2105 - DNA, 545 bp, Unknown
  Description of Unknown: unclassified Picornavirales sequence
tgtcaattcatttttgttgaataatcccacgtctttcggacaggtcagaccgaccttttctaatagttcaattctattaaatggaaattacaataaggctcatgattttatgaatgcgaatgccctaaacacgcttcagtatcctaatgtaccaccgcctccttatgttaaggattcaccctctctgctttcctctgcagaaaaagcaggtggattaggggagatgtcaacaatgggtataggaatgggcgtaggagcgatggactcagcactcaatgattacactaatatgaaaattgagaatcaagtgaggacgggaacagggcctgacggtcatgcgtttgatgccgtacagcatgcacaaaatcaagtggcgtcaaataatgctcattcagcattcagatcttcagcattgatgctaggatcagctctaggtccagaaggattaataggagctggagttctttcagcagcagattatgctctgcaagctgtaacacaaccctcagagaataccaccaatagcactagtggcgatttggtaa

SEQ ID NO: 2106 - DNA, 545 bp, Unknown
  Description of Unknown: unclassified RNA viruses ShiM-2016 sequence
cgtgcatataatgtcttctacgacattatatgcacttattaggaaatctttgtacgcttaccgcctacgtgattttcgaacacgtaacgttaggatttgcttagcatttacctggagtactgtaattagttttgacactatgcatgctgtttctacccccgtcttggttactacaccaagcagccggccttttagggcggttaccgttattatacgggctcttttgagtatgaaatttttgaagatttttaatggatgaaaaatcagctggcgggcatgccccgctaggacaagacgctctagctattgagcgcctggctatgaatgccggaatgaggtacattgtttgtaccaagaggttttttagatgttgtttgttagcgataattatgctttcgaaatcagacatcctgacggtgcgaagccgtacgatacaacctcaaggggtgcgtgtcggtgtccattgtattgaacatggacatacttgtttccgggaaacaagtgtcgaggactatctcccctcgagctagcttgctagtaatgtg

SEQ ID NO: 2107 - DNA, 545 bp, Unknown
  Description of Unknown: unclassified Riboviria sequence
aggttaaagactccctgggggtataccccagggagtctgaagatatttgagcctcgatcggctcagatttagtgtgttaaacacttttataaggttatcaatttaccaagtatgagtgttatacactctgcattggtattaattggaccttttaatcttttcaacaacctaagtatcgactgtgctaaactagcagtcaaactatatgttattataaagacccataatgtctataaacttagaattataaacaattattgtgttgggactttgttggtcccattgtaaaattatttcatttgacggaggtataataagcctaccagtgctccgtctacagctttaaactttgacgcgtattttatctaattctgcgcaagattgagtcaacgtacttttatttgtattaaatttgtaaaaatgctttgatcgaatcgatcttcgtgcagcatttgtgtaaaagcacgcgccgttaaaactctacgagtcattttggaactcttgactatatgcaaggcaagctgaggtcataaaattccaataca

SEQ ID NO: 2108 - DNA, 546 bp, Unknown
  Description of Unknown: unclassified Botybirnavirus sequence
gcaataaaaggcgaagccgggaggcttctattttattgcccagtttttcatctggtcaaaatgaagtcggctatctagctagcggagagtggaactggtcctcttcgtacgaaaccaaaccgagcccccacccggtgaggtaatccagtggcaatgcgtgggggagacctcggcctcggccgagtgattgtgcagaacgggtggtgatgtcagcaatgctcaccgtacatgtccgtgctagggagaatgtcctgtatccagcaggaagatatcccgcgtgtaacgactgcaagcactttgtctcctacgtagaacagtctatcacctagcggcgctgatcggccgatacagtaggtggtgtgtaggcttgccagcccaacccccgccacagacatagcttccaaacaattacacacacacaatatagcagagtgagctaatccagcagctatattaacacactacagtagatcaacttttgaatactgttatcgatcaaacacaagaatccatataccaatctcacaaattacaaaacacaaaaaa

SEQ ID NO: 2109 - DNA, 546 bp, Unknown
  Description of Unknown: unclassified Picornavirales sequence
gggacaaccccacagctggtacaaccattgtgggttggtctccaccctttttcaaccgtggcaacttcggttaaagttgcaaatcccccctctccctattccacctcccttactttcactccccatatatggtcccagattttattctacctctttatatttttatttagtacagtggtggtgaattactcccagcataaactttgctggatcagtgttcatcaagcatactaattactaatgtactgagctatactattatctggcatctcacctggataaccggtgtgaccatatttcctaggttgcctccctatgtattttgtagcacctgtgcatctgcacgttggggcgacaaattgtaggtttcctggcacgggtaagaattgtggaaagctagtatgcagttaatgcaagggcgcgtttttcgctaccccgacactgctaaagtttttgggaggggtcccttaaacatttctagtattgagtgatagctttgcggcaggtcaccacaaccttactataaataaacctgttgaatctcac

SEQ ID NO: 2110 - DNA, 546 bp, Unknown
  Description of Unknown: unclassified RNA viruses ShiM-2016 sequence
aaggggtcttaaccccctggttcttttgataaaatagcaataatgcacaattatagttgttgcaagattgttgagaaaaacattttattcaattcagtcttaattggcggataggttggcatcccgtcatgcatttaaatgcagatatgctttccacattttaaagtgtggaaccgatactgtgctcttgaaaaatggtgtagagccgcgcttacatttgcaggtgtagcgtgaaggaacacggaccaccatccttagcgttttaacgctgaggcgaccgcggccctgaattaatcagtgtgggctagattatgccactgtacaacacatttacaaataaatacaataaaaagaaaatttgaggtccaattagaggacactaaaaaatatttgtttatttaatttaaataaaccaacccccacttaaacctttgtgggaagggaagcttctgcttgagttgagatacctttctcatttaaaaaaggcgcttttattttggacatttttgcgacacaaaaagaaatccattttatgaaaacacatca

SEQ ID NO: 2111 - DNA, 547 bp, Unknown
  Description of Unknown: unclassified Picornavirales sequence
ccttcgtgggcaacgatcagcacacattgtgtctgatcttggcctacggagtttacctttttgacgtttgatagtacgacaactattcattgtatttgttactttgttcaccttacctattgtttcattccctgtatatgaatatgaatttatcttaaacggttattccatttgtttcaaaggaggatggaggctatcgagcttgcatggaattgcaagcagtactttagtcaagccacttggaacgaatggtttttattgtttaatatttatttatatgttagtatacactcctagagttctacattgtttgtatgaagaatgggggaaagctacttgttagttagtaccacagtctttttaagcaattccagtagactggtatttttgaggaaaggtggtatggactgaattaatgggcgcattttttgccaacccggagagtcctaaagttatttgggggggcccttataacatttccactattgagtgatagctttgcggcaggtcacctcaaatctactataaataacctgttgattttcac

SEQ ID NO: 2112 - DNA, 548 bp, Unknown
  Description of Unknown: unclassified Picornavirales sequence
gtttttagattttataaaaaatttcgaaacccgcgacgtttttgacgagatatgtgatttaagacacttactaaagggtttaaagttacaagatttaattttaaaaaaaaacttaaaaaacgtcgtttaaggtcacgaaaaccatctcgtttaaaaattttaaaacaatcacaaaaataaaacaaaattaataaaacaatctcaaaaacaatataaaatatcactcttgtagagtgtaaaaatgtaagtcggtactttaccgaattgtggatatcaatcttatccaaggtgtatttaaacacgtggcttttgggttttgtcgccctagttgtcgtccgtgcgttccaccttattcaaaccgagtaacaagttagttcttgtaagggctagttaatacctcctccaaaagagtttgtagtaacttgctagtacctgcttgagccgtatcgtgtaaaaggcttgtttgaatgtattcaccaatcgtaagatttatttctgattggtagataaaccccagaccgtttccaatttaatattaacccaatatg

SEQ ID NO: 2113 - DNA, 549 bp, Unknown
  Description of Unknown: unclassified Metaavulavirus sequence
ggataggtgatccacctggaattaagctggttgattaagaatgtctgatacaacagagatcaaattagttaatctaaatgtgctagggagatagtgcaccaaagctataaagttgcgtattttatcgactcgcacttaattaacctgaaaccaggaatctatctttaagctatgaaattatgtgtcaaaaaaactaatatcaaattaaggagtatatccccatacacaacaagcattaataataatcatcactaagtatatagaaatcgggatcaacaatttgatcttcgtgagacttaactatacacaagattaatattaattcatgagttgactactcagtgttgattaactcttttggtcaaatttaggtgaagaatcaatataagacagtaggaactagattacaaaaaaatgggggagaacgtttgacagggcgcgtaatcagacatagcttgtctgtgtaagttttaagagatacgcggtcgctcaggagtacaagagtcaaagtagaaacagtttaaaggacaggacacggaaagcagaaca

SEQ ID NO: 2114 - DNA, 549 bp, Unknown
  Description of Unknown: unclassified Astroviridae sequence
ttttgcattctgcaaacttcatcctcggggtcagggtttcccggcaccactcctccacccattgagtgtgtccttttggtgataacgccgccatttggttctcacactgtaggaggaggtctgtcatattgacaccgtgtgctgataggattgttcgagttttcccatagcacatgtgttgaatttcagtgtaagtaagttccctggttgatggtttaaagatgtcaaagtagcatccctcaatctgcgccgtgcagtcagtctcaagagcacgcgtttctccagctaggaacccaagcaagagaaagagaagtagcatgcaggcaaaggtccaggtccttgatgatgcgcgcacagccactgacacggcatttttgctatcgatgatggcatttctaaggagttttacctcctgctgatggtgccgtatcactctgtctttttcctgcagctctttctccctttccttcaagagctcacgcaaccgcatgttttcctctgtcttctgggatgattgtgcagcaaagagccttatcctaagctggttgg

SEQ ID NO: 2115 - DNA, 551 bp, Unknown
  Description of Unknown: unclassified Morbillivirus sequence
actataacaataataaacagctactaaatagtattatgtatttaagtgtacactgataattgcgaataaaatacaccagattaataacagtatagagttaagatctaattgatatgtgggttggtactcgatcatttattagctctactgattatctatatcttgaatcaccaaatgtaagagcatcaacaggtaataagttttggattgctagattgacacttaattctcagaactagaatacccagattgtcaaacctataaccttgttagattcattaaagttagattcttgtaatgttgatcaattatcacttgagcaattataaaaaactaaggacctaatgtaataggaacccaaactccatccagtgagctctaaatcgccatgcttgaatattaatttatctagggcctgtctaactcagaacaaagatcacaactagagtctaaaggagtgggtcaagtctgaacaattatcaagagccgagattcaaaactgattcctccttaaactcagaaccctaacaatatatcatccactcaacatc

SEQ ID NO: 2116 - DNA, 551 bp, Unknown
  Description of Unknown: unclassified Picornavirales sequence
cccctggggactggcgcttacgcgttagtttccaggatggtcttttcaacccagctatgggttaaatagcaacttttttatttttccagtttcactggactgtgtattggacactacacagtataataaaaggtgagtctttctcaccactttcgtgtctagcggttcaactcatttaggcatgtttgtcaatgtatcaatattagttgaagtgaagatttggaatcacaccacaaccccagtggtgcccaccataactctgcctcggatttcctccatagtaatatggaccttggtagttacacggtgttgtttatacatgagtcttcatggatcttttattgccgattgccgaacccctctatgaccactgttccgttaaggttttgtaagtctgctcccatgtaaaagccttggtcgtgcttaaatgccttcccgggtgagaggaaaggcctacttagctcacgcggtaggaacacctgtcatgctccgacacagggacttatattgccgaaacccattttccattttaaaccaactactctctcact

SEQ ID NO: 2117 - DNA, 551 bp, Unknown
  Description of Unknown: unclassified RNA viruses ShiM-2016 sequence
ccctgaccgggggcaagaacgcaagttcacctctggaaacacccttacaaaggggtcgtcagtgtttggcgctcttctgtgcggccaggggtccaattaacagctatttactgttagacacatttcagtgtcggcatgtggatggcattcgcgatcgcacttagcctaaggaggttacacctgtgcgtatttcacacaagtataatcaacctctttggttggagtgtcggtccgataaaaacggcccgctcgagtacgctcagttacctattattggcgacggcgcagtacctgatagacttctgccgtacaaggttgcgaaaccttatactcgtgcagatgtccgtctggatcacttagttcccgcacctattcccgctggagttagcttaattgagcttcctacagcagaacaggttgtaagttctttgttatcgagtcggcccacgttggcatcgtcagtatttcaacctttcgttgatacagctggaatccagaactcagcattacaaaatgctattgagtatggaaatatcttgttactcgtctct

SEQ ID NO: 2118 - DNA, 553 bp, Unknown
  Description of Unknown: unclassified RNA viruses ShiM-2016 sequence
tacggttttaaaaccgtacgcaatatttgccatctagctcctgatgtaaaattgagcattaatcaagtttagctctctactataaattgagtaattgttcgtgatgaaatattcatgggcgactctagctctctagtataaattgagcaatcttttatttagtgcttattgttttattgaagacgactgatggcatacggaattgtacttttaattaagggttagtatcctaatagtaaccatgataccgaataaagtaggtccaaagcaaagtgaaatttgtggaggccgtcatggcaatgctattagaactgaggatttaatgcttgacaagcgcaatatctgagcagatagtgtaaaaaatagcaacaatagttaaattattttacgatatgttatgaatatgttagacatgtattatgattcataacctctattcttaatttaactatatccaagtctcggtggatattggattctgttcgcagttaaccgtatttttacattgcccgagtcggagcggtgatattgtatccggactacttaatacaaa

SEQ ID NO: 2119 - DNA, 555 bp, Unknown
  Description of Unknown: unclassified Picornavirales sequence
cgccttttaggctgtttttccacggctgaaggtgaaagaagtcgttacccgcctgcctacttcgggccgggctagtaacatggatactaccctaagtgtgtgatccgggtgaggttccccccctccccagaaacttgtgatgagggtcaccatcccgcatacggcgacgtatgggtgtccctgcgctggcacaaggcctgctcctgaaagggacaggcgcgcttaggatgttgaagtgtgaagacccggactgagctaggtatggagtcctccgccccctgaatgcggctaaccctaaccccggatctgtcgcaggcaatccagcctgaaggcagtcgtaacgcgtaagtctgggatgggaccgactactttggggtagcgtgtttcctttttattttattatggcgtgtatggtgacaacaatagggcattgttgttatcatacgttcagcgccttcctagctcttctacagtggttgataaccgctgtttcactgatccccagtggaatttcttggatttttctcggcttatttttaggaggatttgcttaca

SEQ ID NO: 2120 - DNA, 556 bp, Unknown
  Description of Unknown: unclassified RNA viruses ShiM-2016 sequence
gtcagcaattccctctaatagggccgaaaccttattagactacttagtggaacagtacaactcttgcaagttgctgtaaagctgagttctcctgattttcaatcaacagaaaagagcctcattggaacgacatacaaagcgtaatcgttcgaatcaatgtcctattttcgacaggagacgtgtaagtgataacacgtgccagtcacgaccatccggtaacgacagagagctattacaaacgaaatgtattacaaatagtataattaaatctattgatacattcttagcactccatcatcttcacatagatgacgtaaattttaattcatactctaaaaaaattaacgagtatgttgatgataacggtataaaaccgttaatagacagttttaaatatttctgtttttacaggttcaataagtttattggggatcttgatacataccccaagcctgataattatttagacctccaccctaataggcatttggagaaatatctaaacagaaaactgtcaagtaaaacacctaggaactataaatttttagtgtcatta

SEQ ID NO: 2121 - DNA, 557 bp, Morsusvirus argatis
gtaaccaacatcatgagaggcaccccacctacccatgcggcatcattctctcattggcaccctaatctgctcgcttagcattttgtgtacctcgccattctaaaccatactcattggggcttcattggtttaaaaccatgccgacacaaaaattccatttttgaggtctggactctctcccctcctcaccccaagagactatctgactaccgcatcatgtccagccgtctccccccgggtcggtatcgtcggcagacgccaggggttggccgcggtagacgcccggatgcttcgtcggatagcacggagtttttaggggccgggggtgacatagagcaactacgcattgcggtacaaagcctgtcggaacaattgcagagtatagaagcccgcctcgtcacggtggagaccaaactggtgcatctttacgacgttgccgtgttcccacagcggcgcaccaggccggatgtggggaatcagttaccaatgggcatgtagccgacacaaaaaacctccaattggtttaaaacatcaggatctgtcctgatgtttagacc

SEQ ID NO: 2122 - DNA, 557 bp, Unknown
  Description of Unknown: unclassified Hepacivirus sequence
gccgctcccgaaagggagtccggcgcgtcatcccactccgaggagtggggtggcgtccccgtgtgccggggaaccatgaagcctaagggcatccacattttagaatgaacttgaagcttcgtttcgctggccggaaagtcctgggttcccatggccagggttccgcaggtgggtaaatcccggtggggttccatccaggatatacggcaggcgggcgtagtccggcggttcggacgacgtgtgggtcgcctacggtggattgttcacaggatgggcactccggtgtgaataggccccgtcagggtgcgctgacgttaaactcaggccttgcctggtgttcggggaggattgcagggccacgccgcctctaagggccgtatggcacagtacttcttcgggcgggttgtcaaggccctccaacgcgacaccagtgcctcggcaggcatggggccacccagctcggcgtcccgcacacagacggcgtaggggaaaatcagcaatgtgaccccgggtggcattttccttctctctacttccatgcatgatcaaccgcaatc

SEQ ID NO: 2123 - DNA, 558 bp, Unknown
  Description of Unknown: unclassified RNA viruses ShiM-2016 sequence
tgggtgatgagcccggtgaagatattatattgctttttagttttattaggtagttcagttagtttttctaactgttcttaacttttactctaataagtagtatctatcttcattagcaattcatgaagtgatgtttaactcctaccacctttggtgttagagggggattcttactatcctctttaattagtaagtttgtttgggttcaagccccaactgtgaaattagcttgtagtacaatatattgaggcgtgtgactgaagaatcacacaactcgggaagtgaatacttccctctgataggagtagcagcctaccagagtattgcttatatagtttgcacgacttgaaatttccttttcctgatcgttcccgaaacgattcattaactatgagggacgtggtcctagagggactaccgtatggtaagacgatagaacgttaatctaaaaccttcccacgttaagaccaatgaggtattgttcctataccgtgacattgagtctttgacgtgtaataaaagtagttattttctaaagaggaaccgtggagacacatt

SEQ ID NO: 2124 - DNA, 559 bp, Unknown
  Description of Unknown: unclassified Narnavirus sequence
gcctcaaaagacgaaatcgcacgacaaccctagggttgacgtgtggtggaacgcttgcgaggcggtacacgggagtcggggtgccatccgtcctaagggacgtggggccacccgacaggtactccctcgcaacacgcggcagcgtgttgcgttcctaaagttatcccccccctctgctgcccacgccaagttgttaaacttggtgtgggaggccctcctcggtgtcgcggccgcctaccgccctttgcctacctgggggagtcgtttcggtaacaagcgttgcttggaacttcaacggctcgccctgtggttagtaagggcggcagacggtcaagggatcggagcgacgatcgcgtggctaaaaggcgcggccagtggcgcccgcaacacttgtgttacaggcgcggccttgctgccttccacgcgatttctcgtcaggaagttgctgatcggcgatactcgcaatgagtcgctggaccagctgtccttcctttcccgatcccttccggaaggggactctgttgttgagtccaggacacttgtcgctcaccgcgacaat

SEQ ID NO: 2125 - DNA, 559 bp, Unknown
  Description of Unknown: unclassified Totiviridae sequence
tattcatcaaatatatcaatcgaatccaatactttatgttcggttacaggcggtgaaacttgtaaaccttgataaaatacagaaccagattgtatattacaccacttccgttttggtggtaaaggaggtggagttggaatatacatcttaccaagattatgtttagacattttagctggttgggcagaaatgaatgtatatgtcggagcatagcagcggaccactatacacaaacatcgtatattgaggtttttctctagtttatcgttgatatgagagctcttgcgtcatacgtggcgtctgggtagctcgtactcatgttaaattaggaatcgttcaccaaaaccaaccctctttttaaacccttggaaattttatctgattctaagtaaggaacttagttaccaatgatcttagctgataataaattttccacaagcatttagtttagtgcaatcgcttatctgggatagcaacccgttagcactcaacttccaattctcctatttctggtttaaagccagcatgatccctaagcgggagatgattgtagaaatag

SEQ ID NO: 2126 - DNA, 562 bp, Unknown
  Description of Unknown: unclassified Umbravirus sequence
ggggaatctggctcgccaccagcctcaagctcttcccacaaacttaaataaaatttaaatttaaactaggcttaaactgaaacttaaacttagacttacacttaaatttaaattttcacggtgagactcacactacctcacgtaaaacaaagttgtggcgatgtgcgtgtacagtgcacgcctagttaaatcactgggggacgtacgagctgcttgtagacacccggcagcgaaataagggtgtagcgcagctggcgcaacgatttgttaaggatctgacactggaaagacagactctcatctaattcttatccgtatgctgtgctcaccctggcgggggtttgacgcgtttgcttagagcaacatgtggacgggttttcgtggacccaggcgccgtgggcgcaagcaaggtaagcttctgccttaagagggcccccccgcccggggggtgatttagtacacacggtgtgtcttcacaaccgcggcgtgtggcacgtccagttttcaggccagggtacttttccttgatagatggaaaaaccctccactcccagcacacacg

SEQ ID NO: 2127 - DNA, 562 bp, Unknown
  Description of Unknown: unclassified Picornavirales sequence
ccttagggtctggaatgcgtcctttctgggcacttccacaatcctaaggtaattttcaacgccagcgatggagcgatatccaaagaacctttatgttttagttcgtcttgtatgtttataaaatataaaattgggattagcaacccacaaaaacatttttgttattctcaccacatgagagggtggttaaacctcttcgtaacctatcttgcttgattggctacttgggctagatttaggacaacctctttagcaagcctaaattactcctcgtacttgcacctggtaacaggcgtacctggaggttacggtggcgctaacttggacttctcgttaattcgtgcaagtttaaatgatgcctattttgaatacaagaaagtatgatagtaacttagggcgtgaagttccgcttaacataaggcagtataagtactaagataaggtgtaagacctaccttaataactgttgtcttttctcatggtctttccgtgggagcccttgctaggggtaaagttaagtattctcaaataatttttcattcaaactctttctctctgtttt

SEQ ID NO: 2128 - DNA, 562 bp, Unknown
  Description of Unknown: unclassified RNA viruses ShiM-2016 sequence
cgcgtaataccttgtttcacccccggccgctgccgggattttaataagcgtgtttaagcacctacgtcccaccttcgggtgtaaattacctgcgatctgcgacacaggggcgcagggtcgtgcactagtcgatcggtttgggcgggccggtcgtcgacgacggagtgctgccggtgcacgataagatggtccaggttgcaatgatccacgcgcctggtaggggacgcgggggggggttttctttatatcgactccacacgacccccccttggccgggactgtccctaactccacccttatgcctgagtagccggggctagtccggtgaacagcctgggaacgctgggaagcgatacggtgagggcgctaccgctacccgtctgcagcggtttctgttgtgtgggcgacagagtaaagtggtagtttgcgcatgtgagggtcccgaagcggagcggcctgcgagtgcagggtttagccttacctgcatgaatgtgggcttagctccgtggatgttccgtttggctcgcacggccaggtggataatagaccgcaaggtcttggc

SEQ ID NO: 2129 - DNA, 563 bp, Unknown
  Description of Unknown: unclassified Picornavirales sequence
tggcgagcaattgattaactcgcccgcactatcacgcggattgtaagttcaaacggattgactattatgcggacctctagttcaaactttttgaagcggactattggttcaaacagatattatttcacgcggatttacagttcaaacggataagtgtgcttagatcaccttgacagctggaaagacagcaaacaacaacctttacattacttgatgcttattcagtaatggcgatgagaaatctcgtaatgactttatagagtaaagggcggaaacgtgttttactactaggagaatacatgcgagtaggttacattaggagttgattgataacgagtcctttgatggcactagtttatttcgtgcaaacccttaggataacacatggtaacatgtgcctttgggcagagctgattagactggtgaataccacaaagtgaattgtgcgtcgagccttttattgtaatatcggttactagcgttaacgaatgctagagtttgttgtataacactgcattgcggctaaagtaagtgtgagtgtttgactttagagtagtttcaag

SEQ ID NO: 2130 - DNA, 563 bp, Unknown
  Description of Unknown: unclassified Picornavirales sequence
gcacggggtttatagccccgtgcattgatttcgacggcaagttattgtcgatagagtattacatacgttggatattaccattccttctaaggaggtctggtgttgtctttcatatgttttatgtcaaatagcaaaattttccaattaccttttacccacattttatgtttgtcttttacggttctctccgtaacacataattgtctaagtgtgtgtaaaccttttatcaggaaatagagaacttttgattgcctactttatattaatatttagcgaaatatttgcagttaggaatagttcgtcaattagtactgctccccgtaaggtgaactttttggcatgcaagtgtgagcagcaccttgtccttaactgtatttatagtagttatctaaattgatgtttggtaaggttgtcttaaggagatctgattataaggcgattggttgacgttacaactaacccccctttttctcatagcacaatttacaggagtatcacgtgcgctaccttttacctattgttcgttgtttttcatattgccgcgaggtgcaagacttcctaat

SEQ ID NO: 2131 - DNA, 563 bp, Unknown
  Description of Unknown: unclassified RNA viruses ShiM-2016 sequence
tttcttctttttggactggaagaaattttgtgtacatatttataagtcctttttgactgccgatgtctataaaagcctggcgctagctgcatctagttgttacctaagtaggaatgtgcctttatatattagtgatttagtgaatttcatatatatttatcgttttgcatatgttttcataccctgtatatatttgtatttataaaaccttactctcattgcgtcattgcttcacgcgcaatttggagtctaaacatagctgataagcaggtaaaacattttcaattattacggacagattattgccatgtcttaaacaggcaattagtgggggagagcctcgaaccacccacattgagaggacacctaccgttcatgttcatcagacaagggacggttccttggaacttgatatagggagacatcctattgatttttccaaatcagacatagacgctatttcgcaaacaggaccagtagatagattggtaggattgaccgggaagtacacaccaacctgggcagtgcaaaaacctcctgatgttgtagttgatgtcagttac

SEQ ID NO: 2132 - DNA, 565 bp, Unknown
  Description of Unknown: unclassified viruses sequence
actgcgtacgggaattccccgtacgcagtgtttgcaagtagtttggcatcaaatatgcccttatgtagcagagaaccttctctcacgaactacgtgttcgtgttatttagctcactccctatgtttgtctatcttcaaaaccatattctaagtatgtgaattactaactcacaccccctttatgtatttttaatggaaaagcaaaacgacggttatctagcatgttgctagacactccgtggcctattgtctctcgagactctaggcaacaacagctatgaggtcgccccctcttagctaaccttatttttattaggatggtaagtcctttgtttatgtaccttttaaacatcaatttaccgattactgattcgtccttgacgatcactctcacgagtgtcagaattatacattcagaactaagctctaatcaagagcaaaattcaactatacaggcttttagttgtcttattttataagcgatcagtgaaatatcttttcaggttttagtatggcctttagttaatacgtttcacacgttaagaactataaaacattaccaacc

SEQ ID NO: 2133 - DNA, 565 bp, Unknown
  Description of Unknown: unclassified Riboviria sequence
caaaaaacttgactaaatatcgctaatcctaaaaatgactcgagtgattgaatttactattgagtttcatgaggatgacattggagatatcagactactctcttactactttccagatgaaactgactctccaatcacactgactccagagatgattataaaatcagttgaagacaaataccctaacatttgcatcgaacaaacactgagatatgaactaatgcagtcaggtgatctcgtagatgcgagagcagacgatgaatttgaattccacgaagatcatgtgatctttaaaggtgaggaattcagttctattatgttgtatctatatgtctctattgatgaagaacaggaatatgttgactatgaaagacgcttgaataccatttgaatccttattgacaactttatgttttatttttatttatgttctagcagtatgagcatcatttgaaaaaatttgattaaacattttgattaaaaaaacctatttgatctaagaaataaagatttaagtttcccaaactttgaacacaaagcattttacaaccccaattcttcaatc

SEQ ID NO: 2134 - DNA, 566 bp, Unknown
  Description of Unknown: unclassified RNA viruses ShiM-2016 sequence
tcctcataaaactagaaacccagttatgattctgggtgctacggcgtagcaaaaatcatgtgtatatatggataccaagtattatatgtttttgtatgtttgtgcttattgtgcttaggctttatacatatcggcattccacaaaaggaatacacctttttaggtgaggtttcgccagccaatgtaaaatataccactcatggcactgagcaatgctttgagattgtaaaatatcgcttactattaataatttgtataataaaaatgtgagagtaaatggatgtgaaattacctatgagcagccaaccattctcgagattttatcagatcttaaaaagtttggaataaatcccaaccgatttgataagttgtggcgtaaaaaccgcaaacatttaggtaaacgggtcgaatcttttgatggtgtaaccattccttcacaaaggattgtttatactaccgatatttctaccttagagccgcatagtgggactgaagcaacagtttcaacagcggacgctgaaacaaagactgccaacttgcaattcgttgatgatgttagtccacat

SEQ ID NO: 2135 - DNA, 567 bp, Unknown
  Description of Unknown: unclassified Riboviria sequence
gtttgggttcgtcagttggaggctgttttgggctcggcccctggcatagtcggggctttcgttaaagggcggtggacaccagacctcccctctagcgatcgctccgtcggtgctaaccttgccctcagccatccgacaggtggtgcaaagatccttggtgggggatctgtccgtggcggcactgcaggacaaccgcgtagggaaacctacattgttgtggagctatctgatggctccagggaaactgttttccctgaactgctgggtcgtttggcatcttattctcttctcagagagagaaacgccgatcttgtttctgcccttcgccttcgggcgcaggagtggtgcaagaatgctgggctttcgagcacagtgtcttggtgggctgtttgttcagccatcaagttggcgtggcccgtgtcggagttggaaacctcggtttccgacgtcgtaggggtcgggatgtcaaccacttcttttcctggtctggcttaggccagatcctttgaccttaaggggctttgctttggtgaatgtcccggccctcttcttgagggttccaccctg

SEQ ID NO: 2136 - DNA, 571 bp, Unknown
  Description of Unknown: unclassified Picornavirales sequence
gcgaggataccctcaccggtatcttcgcagactctaaacaatctatacagcgtgtgtatacacgtttgtttgatatgattgttcatttgatttaataatgttttattgcctcagagtgaaatctgaggtttggaagcttacatgcttttaaaatattcattgccaccatggtttacgcaccataggtggtttgtttcattgaatagttgttgatttctcgtataaaaacacacaccctccaaagttggaggtctggtttctaagtgcataagcttggaagttaattgtgtggattgtggccgagaagctgctattgatcttgtttaagatggctcgatcgtaattgtaaaatcatctctctatgtaaatagtgaaaattgccaaaacgcacgtaaaacacattgtcgtgttagtcgtggtctacagagtattgtaggaaagataggtttgctcagcctttaaatgagatgatggtgtaaacaccccctgtctgacacagaggaagaaatgtcaaccgtttagtgtagttcgagcacttattatcgaatcggtaggtccaccgtaaggacat

SEQ ID NO: 2137 - DNA, 571 bp, Unknown
  Description of Unknown: unclassified Picornavirales sequence
tagtgacccaggggggggacttgcgagtccacctctgaggaatctatttaacgccctggactagcgtatagtccatgctgtcgttttgcacaaaaacgtttaaatgtttgtttgttattacatttgcacacatgtaactccaacacaccctatcctaagtacattacctcgtggtattatgatactggcagaaacagaagttgttggagtgaccttttagacaacagtttagaaagtggcgggagtatcgaacccaagcgctagattgttgtatattagctcaattcattcaattatgtgactgtacatgacaaataccattagaaatcttatcaccaccactggttagcaacccagatgtctttggcattgcacggtctgctataaggtggaaccatggggtaagcttcgcaagactaagatactaagtccaagagtaagggttaagaatttcttccctgtggcagtaccactcaaggatgaatggtcataaggaggggtcctatgactgaggtattataggtgatgaaccagcgcgcatggctgtcttctagcgaagtaaaataaatat

SEQ ID NO: 2138 - DNA, 572 bp, Unknown
  Description of Unknown: unclassified RNA viruses ShiM-2016 sequence
gtgcgcagggtttttatccctgcgcacagctttactgatcatggtgattttcttgaggcatatatcggcacctatgtagtcactgaacttttgtgttaagagagtggctttatcacaatgagtttatctgcatatttgtcgttattatgtcttccttttgcaccaagatcatttctagtgtgaatgaattatgtatgaatgtgaacaaaaatatagataacctaccggttctttcaatttcgtattctttatacattacatacttgtacctttgctactattttgagccttcggaaagctctttgagtgggtagtagtatatgttaccttaatgctaatatgtacgggacgatgtatgtccttacagtgcttgattagatgatagtgatgatagatatcactgcgtgattcgttggtagagcaatactgtattgcatatgatcccctaggcggatgagcattatgtcgtagtatgatagatctttattttcttttgaagttttatacgtttaagggttttacgttaaaacctcagagttcattgcttatattttatattgttcattataaac

SEQ ID NO: 2139 - DNA, 573 bp, Unknown
  Description of Unknown: Hubei picorna-like virus 78 strain WHSF6879 hypothetical protein 11 sequence
ctgtaaggttactcccttacaggttctttgataatatattacagctgatttgatatcttacttgtgaacattcagatctgttttaaaacacttttctgaaatgcttagcttgtattttattattttcagtgtaactatcatctttatctggtgatgttgctctcaaattttgttaaatttgttagttcagcatgctttttatcgtatggtttttacagtaatatatttgatgagaaaccttttggaaaaaacgtttactttaatgtaaacagtttaattcatattcatttattaatattttcattttcttgtactttgtacattcattttcatattgtcccttggatttaaaggacttcttaattgagaaacagctctctgcggagagtgtaaataacttatctggggtagtaacccgttaacagtttcaatacattttgaatatccttaaagtcttcccttcccgtatttaagctataagactcggcgagttccgacgatggcaattttgttttatcttttcttacggagtatgattatttgctttttaatgatagtagtaacttcggttca

SEQ ID NO: 2140 - DNA, 573 bp, Unknown
  Description of Unknown: unclassified RNA viruses ShiM-2016 sequence
gtgtgtgtgtgtgtgtgcgtgtgttagtcagagttctttgggggccacaagttctcggtcacgacagccgaccggccttctattggcaggccggcggtcagggacgtagcatatcaggggcatcatctcccgctcgctcgccccagaggtcaacccgcctgacggcggaatcggctcaacggggcgatcgggacgattagggtaggtagctctgcttccgctggactcgcgtgccgcagaaggcgaagagggggcaaacaacgacctatgcaccgaccatatccgaccaattcacatcccgggtacgcgactccgggaactcggtccacaaaatagaatttcacgctcgtccctagcgactttctgaaaaccgaaagtcttccgctgggatcgtgcgggggcgtgtaagtggggcggtgcgtgttcttaagttggtgttaacagctgcgccgcgactatatgtaggtgtgtgtgcgtgtgtgtgtgtgtcgcgtcgtgtcgagtcgtgttgtccgcacatttgagtcgtgctgtccgcaccttttcttttcagtgtgttagaatacccgaggc

SEQ ID NO: 2141 - DNA, 574 bp, Unknown
  Description of Unknown: unclassified RNA viruses ShiM-2016 sequence
gattaagttactttaaatggatttatcaaccattgtatttttagtatctttcctccttgttgggaggtaaaatttgtggacttgatttagttagtatttagaaagttttcgtccaacttttgtttgatatactgtgccgtcatattcttggcacaattaagggttgacaccccggtaattgctcatgaattgataattctgagcaactttgtttgatctcttatgtaagagttatttactccatagaagagtttcatgttggtgatacgtatgattgtggacccgtctcgtagggttattttaaacacatgattttaacccagtttgttccggctgggagtacaaaacaagacttctgagggtggcaccgatgaagagtcttgagccataattgaaataaatctatgtgaggctttgtttggattgtttagtaatctgtacgcgacgtttaaggtattcaaaaaccttggcttcggccgtaagacgtgcatgatcgctttacatgaatttcattgttaatttcgcattagagtgatgctttgttgttgagcacgcacttttattctttatcgct

SEQ ID NO: 2142 - DNA, 575 bp, Unknown
  Description of Unknown: unclassified Picornavirales sequence
cccagcctgggcacctttttaggtttatggttagcgtttccctttaacgcgaattctagtataaggttcgctggctttgccgcaccttatattctctctttcctcttattatcccatctagttttcaatcttttcttcaactagtcactctttctaatttttcccttctattttgggggcagagtaagtctgttacctgagtggatagaggtacacctctcgagtccaaaccttttctttttgatagtttgatcgcttcggtgggcacatagtgatgagaagtaagcggtcacaggaggatacaagtctagtttccatggtagttgagaagttttgagatcgttgtgatacgtgccctacagctgggtaggatgtccgagtggacaccatctcgtggtgacttcaatacattgcttctggaggacttggcttatggtgttggctaacaccggaaaatagcatatttgttgggtagaaacttgactagtgttagggtggtggtaacgaacaaaccctttgccagtactatatgtccgtgcataaataccgatttttgcccccaaaaccgctttttc

SEQ ID NO: 2143 - DNA, 575 bp, Unknown
  Description of Unknown: unclassified ssRNA positive-strand viruses sequence
gggaaatttgtgagattatcgccctaaaggataactctcatgcgggtccgagtcccgcctgggaacgatatgtcacgtcaaatggtggtagggaaaccgttgaaccaccagaccaccctggtccggcttgtaggctgcgtgggctgacggaacagcagttggcgaggagctgcgctatgtaataacgggtggcccgttcctagtcatcgtcgaggggcaaataatcgctcccacttcggtgtcctcgatgtgaaaacaaactcggttttctcgcgggttggttacctgctccagtgagtcgattaaatggggattagtgctgtagggccccagccacaggttcggcactggtgtaacaaccgtcacccaggccagggtgtatgttttggccaaagacacctctagttccctgccattccggggaaggcggttttccgctaggtggagaaccaggctattctgtttgcagattggtgcgtgttagcctggactgtgggtgtcagtcaactcacctgtgagagatggtcatagatgcctcagtttaatcttagccttgaccgggtcagcgctccctt

SEQ ID NO: 2144 - DNA, 578 bp, Unknown
  Description of Unknown: unclassified viruses sequence
tatcttcctcccccccgcccggcatggcttaaaagttccagaatgcaacaatgaaggttacgttatgagtaaacggtcttggtggtccactttactgtgggtcaccctgcactgtctctaagcttgcactgctgtgccaatcatgagcgtttgttagttaagctgcatccacttcactgtggatgaagaagtcgttctccgtcttcactttcagcatatcggagcctcagtgcgttctgacattaatttgttggacccctgttgagtgatatggaatgacccggcagtaatgtcgttaggtagggccccggtgcgcttcgctgcgtgcacccctactgtatgcaacctgtgatccattacaccattggcccattaggctaggttgctgtccgagccgatcgtcctaattagacgagcatcgtgagcacataactcactacgtcgctgtgttacgttggtccccaccctccgtagactcacccacagcccgtgaaggaatacaaggtgtccttctgtgtagagactgcacgctcggcggtctagttgccacactaggctgaaaggaacagtccacccac

SEQ ID NO: 2145 - DNA, 578 bp, Unknown
  Description of Unknown: unclassified Picornavirales sequence
ataactccttaaagagaacaatacttataggcaataacaacaatgcaacaatggaagttaacacaggaggattagaggttattacagtctctaactcaaatataacgatcatacctaaagaattttcattaacatttacatcttacaatgcccagcaaacgttgtcactattcccatttcaaccattaccactaaataatttacccgaatatttaacttttgacagaaaatataaaactaccactccttttactttaacgtttccaactgaaatgtctcaggttgtgatggatatatttgggttagttataccagcaaattcccttagtggattaacaattaattatgtcattcaagattcagatgcttttgtgtttcaaccccagatttacccgaatcttatagttaaatctaagtcaaattcagtgaaccgctcagacgttatttctccaagcactcgtctggtttatcccaatggtttcaatggggatataattttatccttcgaaaccttgcgaggcacgccacttttatctgattctcccttggtatttattgttagtttgagttaaggaggc

SEQ ID NO: 2146 - DNA, 578 bp, Unknown
  Description of Unknown: unclassified RNA viruses ShiM-2016 sequence
cctcgtacggacgttaaccgtccgtacgagatatagtctagttggcagcttaaacccgctgcccaggttctacctgtattttaggtactgttctggtttgctctggaatgggatcgcatcgtacatggaagaaccatgacgatgtcccactgtagagtgtaccacactgttactgctacgattgacagctatataaaagtttttaatggagggggagttaacctctgtaaaaaatcataaacccttataaagtgtttttcatactgattcaaaggcttgcacttgataaagcctcaagatctaaccccataatcaatgggattactgtgcatacggaagtaccggagccagttcttatgatggtattcgcttatatgccgaaaataaagcccccgtcctaacaaaacaaggtgggcaccctacacgggtggacaccgagccgtagagtcacgggaagtgtagatttgaaagagcttgctcttagtctgcttctatacgcttgacagagatttgagttttgcacttgtgtatatagcgtctcatttgtcttgttaaaacgtgtctcgatttgttgtcga

SEQ ID NO: 2147 - DNA, 579 bp, Unknown
  Description of Unknown: unclassified RNA viruses ShiM-2016 sequence
actcacccttttacaataaaatttctactagtaaaagtaaaaggatgcttaaccgttaaatgctatcacactaaccgcgtgctctatttagagttatatcctaggatgcgcgaagagcaaacctcttaatatccaaggaactagtagtcgagtaaatgcactaagttatgctttactttaaataaataacttgcgaatcaacaaaataataataatgaaataaataatgtagcaccccctagttttaatgacgcaccagatgcatctttgcttcctaccgaacagatatcttcacttgtaacgcacgatgatggaggaactcctcatgaatattattcttctaaacctattcacgaactatcacaaattgaacaagcgactggtaacgagtttactaaatctttggataatttcctttctacacccattagggtagcagctggtacttggactactacacagacggcaaatactgacctgcaaaccttaaattttccggatgtcttgcttaacaaaacattgattgcaaacaaattagatggttttgctttcttgcatgctcgtgttaagtttcaggtg

SEQ ID NO: 2148 - DNA, 580 bp, Unknown
  Description of Unknown: unclassified vectors sequence
ttgcaataattgactcagatccagttttatagaatcttctcagggatagtgataacatctatttagtaatccgtccattagaggagacacttttaattgatcaatatactaaaggtgctttacaccattgtcttttttctctcctaaatgtagaacttaacaaaagactcataatatacttgtttttaaaggattgattgatgaaagatcataactaataacattacaaataatcctactataatcaatacggtgattcaaatgttaatctttctcattgcacatactttttgcccttatcctcaaattgcctgcatgcttacatctgaggatagccagtgtgacttggattggaaatgtggagaaaaaatcgggacccatttctaggttgttcacaatccaagtacagacattgcccttctaattaagaaaaaatcggcgatgaagattaagccgacagtgagcgtaatcttcatctctcttagattatttgttttccagagtaggggtcgtcaggtccttttcaatcgtgtaaccaaaataaactccactagaaggatattgtggggctagcaacaca

SEQ ID NO: 2149 - DNA, 582 bp, Unknown
  Description of Unknown: unclassified Picornavirales sequence
gcatgatacattttaaaattcccattttgggacgttgattattgcgtgatataatcattttcctttggacgttgactgttgcgtgattcagtcgtctttttcctcttgtgttattttctctatttaataaatccaaaaacaaatagagtttagtttccattttatattatttcgggcatcgttttggtcaagcgatgtagatcatatgtatgatcatttgttagcttatgtttaggaaagcattacgaatattcttaagatacaggagttttgcttgcggcgtggtacccgtaagacctcacaccagaaaattagttattttaatttgttgtctcactgccttgacccgttgcgattagaaagtaccaggattggtgccatgtgcttccgttatatcctgcgaaatcgataatgtcgactgcggctggatgggctttgtttcagggcaacattgagaaataccaaaaatatgtttatgtgtgagtggctcccgaggtcggggatattcactgtgatgggcttctgaacataagagtactaacatgtgtgagtacttgtgatgtgaccacctttttaaacatt

SEQ ID NO: 2150 - DNA, 583 bp, Unknown
  Description of Unknown: unclassified Cucumovirus sequence
tttggtgtctttccaaccgacgtatgattgtcctatggaaagacaccaaagcgggaagatcatggttatgtaacgaaacgcattgcccatctataggagacaactccttgtcgcctagatcagctaagtaaattctcaaagacccttcagcatcagtggaaactgttcgagtaacagcacataatacctgggggacgctcatatatccttttgagcacaattcaccaacatcatatccagacttaaagaaggaagcaatacgaccgtgggtcatctcgggaacgaggggccggactgaaatagcattatcagcacgcatccaatgatgccggcctaggtcacactcagtagccattttcttaatggcttcagggctaaataatatcttttgaagatcgtcagacgtagccgctgaggactgttgagttaaagtcctactggtaccttggaaagccatgcctcggtaatcttaccactgtgtgtgtgcgtgtgtgtgtgtcgagtcgtgttgtccgcacatttgagtcgtgctgtccgcacatatattttatctttctttttcagtgtgttagattcccgaggc

SEQ ID NO: 2151 - DNA, 583 bp, Unknown
  Description of Unknown: unclassified RNA viruses ShiM-2016 sequence
tttatagatatttatatctatatctttttcacgttggaaggttttaacattctttgaatggtttttctttcaacacccatctatcattcattttattaactcattattcttttaatcatttcttcgttttttcagatttactcttgtcttcggagtaatgactatcaacctcttataatgagtgtttatattatttgatgaatttattgaatcactacattaatttgtggtagttggtgaccctgggtttgaacgtaccctcggaaaaatcctgtttcaatatttacatcatttaatatgaatgttctcgagctgaactcaatgtagctcatcctaaataaatctttgagagtttgcgcgactaaagtgccaagatgtggaattcatccatgagtaaacatgtaaaaacgtgcgccacttaataatatcttccgtgatccaatggtggtggggtgtcccgactcgaagaggtgaccgcgcacttgagaccgttgcgacatacgatctcccctgttgctttgggttaaaagcatgtccttctctccaattacgttttatggttacaacttttgctatatagata

SEQ ID NO: 2152 - DNA, 585 bp, Unknown
  Description of Unknown: Hydrocotyle vulgaris tombusvirus strain pt175-tom-27, complete1 sequence
caacggggctgatttcttgccctttcgggcggtttgtttgccctttcgggcggcttgcttttcagcaggctgggtacctttccgcacctgtgagtaactagctttcgctggttgcatggcggtaatactctctattaccgccatgcaaccagcgaaagctagttactcacaggtgctgaaaggtacccagcctgctgaaaagcaagccgcccgaaagggcaaacaaaccgcccgaaagggcaagaaatcagccccgttggaagtggctttgggtaagttgttgcccggagtgcatttggggtggttgggtaaggttgtggctgagttggccaagcctagccctgggtctgcggaggcctcgcaacctccgttgttcagagcgctcactgctgctctgaaggtgattggcggccaggacatcgatgctgccaatgcgtacaggaacagctctgccgtgaaagagtacgtgggaaaggtctttccccgtccgggaaacgccaagcagagcgaggggccggcaacgaacgtggctccgttgaacagcaagcagcgtcgggcgctcaagcgtgccgacaaacaggccgc

SEQ ID NO: 2153 - DNA, 585 bp, Unknown
  Description of Unknown: unclassified RNA viruses ShiM-2016 sequence
gtagacggcgaaccgtcaccccaacccccccctcctccgccaccaagtccggaaccagaaccagaacccaaaccagccccacctccaacgaggttttggggatatgagggtaaaccaacctcccgagtttcaacagctcgcaatgatcagttcatagatgtcaaacctttgacatttataaaactgtacaaatgggagaatgaacattggagtaatgaaaattttactgccaattatctacaaaatgatcgcgagaaagcaaccccctatttcctaatccccgcagataagggggaattcacagtctatatagagaccgatggggaatacaaagtccgtgcaatcacagatcctaacaagggtaaatgggcaggctttgtagctttcaacgcagatcaagacggctggttcgcacgtgagtattcaggagtcaagatttcaaactatcaagctacacgtagctttgtcgttggacatcctgatgctgaggtcaataactgccacttccaaggttctcgagcagtagaaagtgattactactgctcctttgacctctccgtggccgaggatggtgcttattgggct

SEQ ID NO: 2154 - DNA, 585 bp, Unknown
  Description of Unknown: unclassified RNA viruses ShiM-2016 sequence
cctcccctttcctccatgccaccgattctggcccctcacagggcggtctttcggtggaagtgacatggaagaaaggcgggggagggggggtcacgcccgctgacatggtgtcagcgggctatgccggcgaaccggaagggctacctgcccttgtgaggtgaatccgtggagagaataagagaacgcgttactggtggctttacaaccgagaagaccatcaagatctcgaatggcactgccacccgagtaaactatgctggcgtcaaggtaacgaagaccatccaggacacgctgactcctaacttcacggccttgctaaaatgcggacaattccttccgctaaatccagtacgaatcaccactgctactgaaacccgagtttcttcgggtgacggttgcaagatctggcccaattacaacccgggctacatctattttgatggtgatgttggtggtacgagcttctttacgagcgcgtattgccctccttggcccacgattggtgacaacgacggtttgattaacgccgctgtcgtcgcagcccgcagtaatgcggtgtctgatacgtgggatgtgttgacgttt

SEQ ID NO: 2155 - DNA, 587 bp, Mossman narmovirus
gatcaagtcagccatcggtgggagtgttagagctcttccaatattcagttcatcactaggtaacctataagctcattagtaccagaatgtgatatgtttccgatacggggtgtcacactatgatacacaacagcgatagtacagattagtagttatatgcaggtctctaatacttaatggtacgacatctcaatcagacaaatcattaagcaccagccacgatcagtgtctcactctatagctacaacaatgagtcttcctatacagaccttccaagcactgtatatcacacttataatgggtaagggctagtttcagtcagatagtatatattgtttgggttaataatctaacaacaaaaaacttagggcaaaagaccctttaatcctggatctctgtacagtgccagacagaccaatccatagctccccactcacagtctcctcactagcaatcaccggaggattcgttgtggtaagtcatatagagctatatttatactttcaccaaattctatattcactgtcagcatccgctggatcttgtcttacaatctgttgcagggaactctatatctggattaaatc

SEQ ID NO: 2156 - DNA, 588 bp, Unknown
  Description of Unknown: Beihai sipunculid worm virus 6 strain BHNXC41400 polyprotein gene,1 sequence
gtgcgctcgcaaaatgcgagcgcacacctgcaggtttatgatgttgttcttacgtcttatgacaacctgcggtggttagaaccaccttgactcgaactgagtcgaattaaattttaacgactgaaggatagacggttccccgcccgtcgactcctaatcggtgatccttaattttgatcgtgtttgacgatcttgatatggcccgtttgacgtgcctgaggtagttttcttagtcagaaagccttagggattacacgttagacggaattgatagattttatttcacgagatttgttttggtgaaacgttgacctcggcctgagcctactagatgatatgaaatctcgcactttccagtaccagcggaaatccgccgtactcagtgttagtgcagtgattgatttgatttaagttttatcagtttgtcgacgaataaaggagttaggtcccaaccttacaatagggatacctaaagaattcagacccgtgtaatgcgggccctcttcggaggtgtttgggctagtaccccactgataccacagtgttagttttactcctacgactgatttaaagtcatctgctcgacaa

SEQ ID NO: 2157 - DNA, 588 bp, Unknown
  Description of Unknown: unclassified Picornavirales sequence
ctatggccacccagccatagtattgcggattagcgtcccattaagattttaatttagctattcacaaccttttgttctttctttgattgacttaagccgctgtgtctcacccttttttgtaacctatttatttttctccggattaatatttagccgctacatcccaccccctccacctcgattgcccatttacgacggtttttctgttacttcattgtaactgctctctctctctcggaatttcggtgatctctcgtactagcatagattacgagaacgatgccaatttgttgacttcgctcttcttttgctttgacgaatacatataagtcacgtacttttaaatgtccctttagacatgtttattaaagggaaagtgcgtatcaggatatgtatcaggtaccctgaaagtcataaggttagactttcacattagggatacgattacggcccagaatcattggattctctgggttatacgtaatacacacgcttattacaagcttctcttcttagatgttaatcattcaggcgaatggaacgcgcgtctcacgaccgtaagtactaatagccaatcacgaatttgaa

SEQ ID NO: 2158 - DNA, 589 bp, Unknown
  Description of Unknown: unclassified Bacillarnavirus sequence
ggactcttccatcacccatttatatgtttgtattttacatatttatatattaagtgtttatttcttttgctgagaaatatgtacagaccactaatgtctataaactataagagtgtgcagtctcatacttgttcccacgggaaattgacgtgtatatattagtgatttagcgtatttaatatttatttgtcgttctgcatatttttacgtaccctgtatattacattttcatagaactttcagtctgtctagcccatgacttcactgctagatttgactataaacatagtgataagtcggttctacatttacacaattacaagccgctggcaattgctttacaaatattgccaaccgtgtgggaaaatctccagaaaatacacacttgaaaggagatgagctacctcaggtttattcacatcccagagatgatccattggaattagatatttcacctatccagggactacagcgccaggttacgatcggtaatctctcatctgaatctttagagatatctgaggaaattcagtcggagaaagtggaaatacaaccacttgatgatcgtgagagagaaattacagaatta

SEQ ID NO: 2159 - DNA, 590 bp, Unknown
  Description of Unknown: unclassified Closterovirus sequence
gctgcgtacagcgaaagtcaaggacttgaagctagctccgagttttgactttcgctgtacgcagcgattacataatttcgcgcatctggcgcgcctttaataccgttggagtcctgcacttcttcggcactgatacaaccactacggtggttaaggagttttcggctgctgggccgatcgtccctttacggaaatcctgttttccgttctctgttcgcgctgctgttcgcgcgattaaagctgccggacgtcctattgacgctccgcgctccggatgcctctgtggcctccctgttatcgacacatctggtgtcgtgcgtccccgctctgttgcgggcgtttggaggtatgctctgtgtaaacctccccttactgctgccgccaagaggtccatccgcaaggcgaagaaagattctgcattctttctcagccgggcttcttctctcttctctcgggaagtcccctgcggcacgcgtcacagacttcgcaagcgtgttgcgaaactagctgaccccactgtgcgtgaaagtccccaagacaagactaaacttaaggggcgccgacatggcaaaaactctgacctcccgtat

SEQ ID NO: 2160 - DNA, 592 bp, Unknown
  Description of Unknown: unclassified Picornavirales sequence
ttgggaaatccccaatgcttctttcaacaccgcctgactatgcggtggcgcttcggctcaaacaactagtcacttccccctcttaactactacccaagacttctaactacccttacctacttatttgtctaaatttcaaacttttattctcacgcgtcttataaacatcttttctatttgttatggtatgttttgtgatttgtgtggtgtatttcatttaatgggatctagtggaccgtgccccggttgggtatccgctccctttaaatgtttgcaagcactcttgacattataacctatcatttagtttacttgtttgtatgatcgtatttctgaatcgtaacatttatgcaattctttctcgccgagacttgtctaggagataaagttcctgcatatttagtgttacggttgtataatggagacttagatagcttcacactgaggacgctttttcgctatccttttgacctgattcaggccagtgtggagttaatgattgtatggatgggccctacaatttgtctaagacttggtgatagcctcgcggccgctcgccatttatacaactgaatagcggttgaaactctct

SEQ ID NO: 2161 - DNA, 596 bp, Unknown
  Description of Unknown: unclassified RNA viruses ShiM-2016 sequence
gcggaagaaaaaccgcacacatatactaagcataaatcgaaggagatttaaagtgaagcatttatttaatatcgtaacaatgaatgtgaaggagccctttttatgttaatgtacaaacaaattgacaaccccccgtctacgcagacattaaatgctgtcttttatatattgagattaaaataatattttgtgattatagaaaacacatcaatttcttactccagagatagtaggagtctaaaactaatacaaaaccgaaatacactattcgaagtaagttctcgagggtagtgttatttcaaacgggacgcacaagagctaactagttaaagacactcttgcccacaaattgaagttccgaacgctgtaagaccgcaggacccttttatattatgaatactactattacgaatgtagtcgttagaatatttatttatataaataccaatcttcaatttctttatcgtatgatagtgacattttgtcatttagaagattactttatatatatatatattactttcaacgtcattttaacgtgtgatcttatataatgtcccatgcatttaatgcggctattagttcgctcataaaat

SEQ ID NO: 2162 - DNA, 597 bp, Unknown
  Description of Unknown: unclassified Anphevirus sequence
ttgcatgtccagtaaccacacatatatcacgtcaatctcgatgtggtcattgtctcagaaaaacagaagggggtccttaattggcaattgtttgttcatacttgaatctcctgtaaaaaaaaccttcgagtgcctttatacttaattaagactagtaattatattttatacacataattttttatgttatacaccatgcatatacacatagctgtatctcttatcacattttaagaaaaaccgaacaaaagatggatcgagccggaaacacaccacaaaacccacatggagccatcagggatagtggatggatcactgtaaatggtcaactaccacctaatgacctagaacctcctgaaaggaagggcggaattacatctcaaccggtatacggctattgtaggcggtgtgattccgttgtccaggtcaaaccttctcccttttccagtcattatcgaaatggtcgagtaattgactctaagaagtcatcagtctgtgttactccctattatctaaccccatgagagaataaaggcacctacttgactcccactgtgagaagttgagccaaacgatttagaaaaacccgagtccaag

SEQ ID NO: 2163 - DNA, 597 bp, Unknown
  Description of Unknown: unclassified Picornavirales sequence
cggaacgttgtatgctcagggcgtaggcaccacccacgggtggtgcctacacgtgtggactaaaccacacactcttttcagcacttagtgctgctatctctttttgtaacttagaagtttgtacacaatgcgttagggccacacatccagtgtggtatcgcaaagcacttctgtttccccggtgctagtaggagggtggctgctccacggccacttgccgaacccatcgttacccgactcattacttcgcaaagcctagtaacccagttgaagcaagcccggcgtgttccggtcaggaaaaaccccccctggccagaaacatgtgatgagggtgggctatccccactggtgacagtgagccctccctgcgttggcacatggcccgatctgggcgtggttcttgtggatgctgccgaagagccccgtgagctagtgtttataccgccggcctcgtgaatgcggctaaccctaaccccggagcagaggctactgaagccacagtagtcgctgtcgtaacgagtaattctgggatgggaccgactactttcgagtgtccgtgtttcctttattcttttattgttgtttatggtgacaaac

SEQ ID NO: 2164 - DNA, 597 bp, Unknown
  Description of Unknown: unclassified RNA viruses ShiM-2016 sequence
tttgaacccacgctgtctataagtctagtgtaaccgtggctgtccccacgctgaatagcatgtgaaaccgtggccgtagaatgattgtacacttctaaagaactgtgcaatatttaacctttttcccttacgattttattctatatatcagaagcaagcgttgattgatatatactatacttttgtacaatggaaaattgtattagtttttaagattttagttataagcttctatcttctcctatatgctagttgactagtaggatgcgatctcctcttgaagaaacacacagcggattcgaccccgtctgttggcgcatttcaggtgattattttggaactccgttatcttcggaggtaggcaccatggctagaacccatggcggcttgtagtctcttataacttttgatccctcgataggcatgagcaaagtagcttagaataactcctcatgactggattgttagcgcatttcatccagcgcacttggaagatgattttatgagatatacgcgagccgtagaaggtcagtccctgaaataagggtggcattaccggaaacgctatcaccaattgaaagccgcaacccatataac

SEQ ID NO: 2165 - DNA, 598 bp, Unknown
  Description of Unknown: unclassified Anphevirus sequence
tcgtctgtaggaactgtgtcttagtaagattaatcataatagtataacggtattaatctaatccttttgggtgagttataaccatcacctatctgcctaaacgtatctagtgcgatctatgtgtaagttagcctttagaagctttataataataataataggcatcggaagcaagtgtggtatcattataaaaacccgccagttacaaatcatgcctgtttcaatagcttgtgcacattgccactatcccattgacatccagtcagttggtgctcccagtgatattgggataaactgcaagatgtgtggaaaaacatcatacgtaatcaatgccccattttaacatgggtaggtagaaccgccacaccaggtttatatttatcttttgctcaagcacaatgcaacctagcaaatgcattaatatatctatatattttgaagattatacatattgtgcagctacattatcatcactgtgaggcttcttttctttatttatatttggctaatttattcaatgtataggttctcttgcttataaaaaacccgccagttacagatcacttgtcgtgtatttggaacattgaaaatcgaaaat

SEQ ID NO: 2166 - DNA, 600 bp, Unknown
  Description of Unknown: unclassified Riboviria sequence
gcgggttaccccgcatggcgttttgaacgtgtcaaccacgatacggttgctgtaggggcaccagctgtgtcccacctcttgctagcggagctcgttagccggtgccggtacgttaagtcggcaacataggagttagttttatttcttctttactatattctttgttttccaggttgtctgcataccgagagctgctaccggtgcgcccgccggggttaactgcatggctagcatgcagctgtggccgccaaaagtgcagatgtagtgactatcgttgcggtctttgatttcagggggcattgtacgcatcctgtatcgaacgggtcagttggggtaggctacgggtgaaaccccagtggtatcctaataatatttattaggaccagaggcacgctaacgcagcggataatggtgagtttcaagggacaaaaaccattcaacgctggggctcgggtgtcactcctgattcgcgaatacatggtgtgtacaatgtgataactcttgtcattgaagaccccatcgtaagctacaccctatgcgtttagggctactcaggggcatgttaggttttaaagcccatatgtttgttagtatgccagg

SEQ ID NO: 2167 - DNA, 600 bp, Unknown
  Description of Unknown: unclassified RNA viruses ShiM-2016 sequence
ctagactggtcatgtattttgtgatcatgctacgcgaatggcgagactgtcaattaggacagcctcggtgtagatactgatagtatctccgggtctcttatatttcagtaatgaaaggaggagaatactttggaaacaaattttgcgttaagcttaactactctaaccaaagtaacaaccgcagtctgtaaagcactacgatcattaggtttgtcaaagagaaaagaacacgcaatcgaggatatattgataaaacaattgtcctcctcggggcctgagtatgttttaaaacgcttatccgaattaacggactggcgaaagaaacatctcgagggagagctaagttacgctcccgcatggcacaagaagagtacgttaaaggatggaacaactaaaccatctgataggctgggaagccaagtctggaaattatcagacaaagctttcttttgtgtagttggttgcttgaggaaaagtatagagttaaatataccaaccgaaaagcagctttctaaatggttagagggggtaaggtgcgaaatcacatcaatacccagcaagactataacgctatccccaccagttgaaacaattgactgg

SEQ ID NO: 2168 - DNA, 602 bp, Unknown
  Description of Unknown: unclassified Picornavirales sequence
gccagttcagggctgtaatcctgggaaatggaccgaatccatcagtgatgtagacctgttttgtacggaaaagcattcaggttagatcaccgtttgttgggatacgttaatcctcacacccccccccattccatttgtatttaatgtttagccgggtggtgtccggtatataaattaccaatgtttaacggatttgtttgtgtaccttcggtctgaaatcctaatgctggataatccttggcgtctgtgtttcacggtcttggaccctctttaggtgaatatgattgcaacctgtcggccctcttcggagcgtttagacatatcatattcttgggtcgctagcgcttgctctaaaccctcttagttgaaaattagagcacgtacgaactttagtggtcagggtgtacgttaaccacctataaaggtcatgtttatccacatcgaccctcaaggctaaccctttgagttaaaatcggatatcacttcgtcaaaattcgtcttcggtttctgcctccgcgtcttcggtttcggttagcgtatcttcggcttcgattcatgctttggaaaagcgtgttgagaaattgtctcttattgtgactaag

SEQ ID NO: 2169 - DNA, 602 bp, Unknown
  Description of Unknown: unclassified RNA viruses ShiM-2016 sequence
agtgtcgcaacgaaagcaatgccccctacctctttgatcgtccttcatggtgggaaccgtgttggaatgcattgagggtggagagaaaacttctttaggttagtatcgatatccaattttgtgcgtggaaagcttgagctggctgaccacattttgcacttacttagcttgcgaaccaaaagaataatctagcgttcaatctgcttaagattgacagagagaggtggtatcctctccaagctgacactgagcttgtggataaagacagtggggaaggcgtaaaggttcaacaggaaactgtccggtttcatgacaatcaaaaatcttattcatacaagattccgactgcacctgataccattgctgaggattctgctattgacgcagcatctctcggtgagtttttgagccgtcccgttaagattggaacagtcacctggagtgaatctagtgcggctggtttagcaacatccatatacccttggtctgcattcttcaatgatgcacgcatcaaatataagcttaataattgggctttcattcgatgcaatttaaagatcaaggtgttggttaatgcttccccattttattatggagcagca

SEQ ID NO: 2170 - DNA, 602 bp, Unknown
  Description of Unknown: unclassified RNA viruses ShiM-2016 sequence
caaaaatccaagttatacatcaagccaagagacaagtgcaattataaataattaacccaattacctacagacaatccaaatatatcggaaaatgaatccaactttaacaggtggcacaggcgaagcaagaaatggtcaatgggataagagaagaaaacaagcctggctaaatgatgcgctattgctgctcgacttgaaacttgggtttactatcaggacacgatcagactcacagctacagatgctagtatcaacatttgcaagcaacgagaagttgaaagagtattggcttaccttgggtgatacaactcatttggtacagccggccggtagttcagcctcatcgtacggtactgcgtttgagtgctcatactcgggaatgtttcgagaaaagtacttagagtgggtgttccaagacaaacaaatagttgacgaaatattagaagcaataggccagccaaagctgtcaatagtgtagacccctgaggagcttagcgaaacggcaatgccgtagggtcgcccccatttgaaaaaagaagtaactacaaataacaatagctccaacaaataacacaaatacaaacaaacaaacaacgccaaaa

SEQ ID NO: 2171 - DNA, 603 bp, Unknown
  Description of Unknown: unclassified viruses sequence
gggcaataccctgcgcaatcatttgaactcacgctgtctgtaaatcttagtgtaaccgtggctgtccccacgctgaataagtatgtgaaaccgtgaccgtagaatgattgttcttctttttgaactgtgtaatatttaaccttatatctaatattttattgatctatttatcagaagcaagcgttgattgatatatacttcaatatttttgtacgatatactgtattaattttaattttctttctcctactatatgttagttgcctaataggatgcgatctcctcttgaagaaaaacacagcggattcgaccccgactgttggcgctcttcaggtgactattttggaacttcaattatttgaaggtaggcactgtggctagaacccacagcggtaagtagattcttaattttatctaattatgttaggcatgagcaaagtagctttgaataactcctcatgactagactgtattgtgcatttcgtctagcacacataatgaaataactttaatttaatcgcttaccgtagaaggtcaaccccattttatgggtggtattaccggaaaacgctatcaccaattgaaagccgaacccaatataac

SEQ ID NO: 2172 - DNA, 603 bp, Unknown
  Description of Unknown: unclassified Riboviria sequence
atatacagtagtcgactaagacatccgaatgcagtatccttaatgaaaagaataaaacacccagattgtacactgtacacttattagagttattacttttaaaataccacgcgtacatacgtgctattttaaaagtaataactctaataagtgtacagtgtacaatctgggtgttttattcttttcattaaggatactgcattcggatgtcttagtcgactactgtatatggcgtgcacttctgctgcctaaggaattattgcgaaacccccccttctcacaaacacacaaactcacaaatactctcgaactcatcacaactcgagttcagtttttatataaagctggtgtctgagaaacagctagtcgcgagctagtgtactatatgtcatgtctatgtagtacagtttcaacacgtatctttgccttatatgaattccccacacaaaaatttccttctgagtacgcctcccggtttcataccttactgaaacacgcgaggacaaacggccgtggcctctcagtcgtagctatcaaaactttatagccgaacaccgctatggcaaccccatggttattaggcaattctgaaaatcttaaact

SEQ ID NO: 2173 - DNA, 603 bp, Unknown
  Description of Unknown: unclassified ssRNA negative-strand viruses sequence
tatagaaacagtactactcgtgagctactagacagctgaatctcacttggactgattacattcgtacatgctaatcacacttgtcctctggcaatgcatccatgtgtagttgtcacgcaaccggatcacattcgtacacattgtgccgaacatgcatttggcatttatacagtagaagacctaattgaagacattgatctgtacaatcatgaattggctcaggcacaagatacaggcgaatggcgacacttcaatgaaatatggagcaataagataaacgaaaagaatttggatcacattaatatccttttagtgcccagtattggtttaggagagctcattcaatcaaggagcatcatggcattggttcttaatgacagttccttcagtttgtctctcagaggaatgtcgatgcaggataaacctttacagattgagttcagagaccagagcatgatgtttgaaggatatgtgaaacagttcgaaataattagttcgctttcatcctttataatgacttatatgtgaaattaaaggcacaatacaccgttgaactacacataaaaaaaaccgtttaaagcttagttctcttttaacactaca

SEQ ID NO: 2174 - DNA, 605 bp, Unknown
  Description of Unknown: unclassified RNA viruses ShiM-2016 sequence
ctttcaaccccgggttcttttacaggtcttactaaccttgtctaacagtaatgttgacaaaattagtggtttttaagtgcgaagagctaggtttttccaaaaaaccgtacacttccgtgctcgtaagttcagcacgcctaatggaggcaattcttacatccatgagctagcaactccaactgctttaggttttagaatagattgttcgaattactgcatcaggaccatctgtcctttcataaaaccacttgttgattacaatccgctgtcagttaatattttgcactatatgtgctaactctgaccaggtgagtaattagtaagaaccatcctccatcaaagtcacaactggccacgtttgaatacgctgtctgctttgaggtttggattcaattgacacattgcgcggcattgatgttgattgtctgctgagctagcttagtgacactggggtcaaactgcttgtgctatcgtgtgataacgcgttacggcgtctgcactggtatgacgatgtccagtgactcgagttaggggaagtgcctaacgttctatcgtcacttaccttaaactttccgtttcttacggacccacagctggtaacacat

SEQ ID NO: 2175 - DNA, 605 bp, Unknown
  Description of Unknown: unclassified RNA viruses ShiM-2016 sequence
gcccgagaagggcttattatgacgtgaaatgaacgtatgagttgttaaagctccatgtttaaaatgggggctctatattgttattttatgtttaaatataagatctgattggaactcttttcggtaaataaaaggagtgtgttcactagtaatgtttggttcggtttttgttattaagagatggagttaaaacatatacagcttcaaaagaatgaagaataccaacaaacgtataagttttatgtcccatacttatagtattgtgtataaacattattcgtgacacggctagattatcatacgttatcacgttgcagcgcgtgtgcagttttgaaaggataatcattaatagcgtttgttttttggctgtagctcttttatagagttagaggtttataatacaatagaatcttaagtgattcccataatgtccttggttgtattttaaacctcgaatacgtgaatgcaaatactcgatacctaatagagttagctatgctacccgttgttgtatgagatggtatcaaatccaacggagttagagaagttgggagatagacctggcttatggttagtttcacgtattttaggttgtctaaaacgaa

SEQ ID NO: 2176 - DNA, 605 bp, Unknown
  Description of Unknown: unclassified RNA viruses ShiM-2016 sequence
acccaattatattacctgatattgatgatatacattacaaatacgcttttttaagtagtttcagaaataatgtttttttacattatcatattactactaatattaatagttttagttattatattaatccgcttagcaaatcattgactaagggtatcagtagatattatacggtccctttgaatgggaacacattttttgattcgtatgttattgatgatgttgtattttcacttgaaattaaatcagatggcgttatattagttgatgatcaacaagtattttcccttaataatggagttaataattacactacttgtacagtaagatttaaaactgtcccaaagaaagattctaacaatttactaatagttactatttatttagtcgaatatgaaaaaatatttagtaaggacccattaaagaatgatgaatactcctttaatagaactattaatagagtttatactaggtcatttggtgtgtccgattttaataaggtttttgttgatcctaagaagtcgataaatgtttttttatcgctggatacatttaatgacatagtgcatgactctttatattctattttcattgctcgatctgaa

SEQ ID NO: 2177 - DNA, 606 bp, Unknown
  Description of Unknown: Mint vein banding-associated virus isolate NCGR MEN 454, partial1 sequence
cgtaatctgatagcctgagcgattcagaattcctccaaaccctgcctttgcagtcttcgttcctttcgtttaagttcactttcaatcctgtactttttcattttttactgcatcccatcccatcgttcatcaattcacaacccgcagaattcatcttctgcatttctcttcttttcattcttgtttttcgttcacttccattttctttgtgtctcaccaccacatcgacttttggctttgttttctctttgttcgttccatacttctcaacccgcagaactcgtcttctgcattttcgttttcttcgttttctcattttcgttcaaaaacacaaaaagattttgctttcttttcctcttttgtctctcacgagacccttgttgtcgttcacgcccagttgttttcacttgtttctctgttttccaaaacttttgttctctttctttcttcgttccattcactccggtttttcttcagttttgtttctctcctttgcaccactccatccttcgaacgttccattcctctttgttttttgttcttcatttccacttcttttcattctttttgtttccccttcgttccttcccacactcccatcgcggt

SEQ ID NO: 2178 - DNA, 606 bp, Unknown
  Description of Unknown: unclassified Iflaviridae sequence
cgtagatatgttcatgtttgttttgttttgtaatttagttcaaagggctatacctacccctgattagtaacaaaatataaaactcggtacagaccggggcaaactaatatagttatttaataatctgtttgaccttatcttatgttcaatgccgtgttcgcttgcgtttttcattcccaggaaaatgttccccataagttttcagattattgtttaattattgtttgtgtataaacaattattttataaggcaaggcgttaattgatttaatgtttataagtatacggatttttattagcacgaattaattccatggtgaccaccgactagtaatcgagtactttgagtacaaggccaaaagccctctgtataacatgtgaagtgtgttagaaatgataataaaatgaagttgaaagtaaccgcttaatgattttgaacgtgacaagcttctatgcttaaaatcatctcatatttattatgtaattcaatagatgtgtatctctacctattggatgtattcctctaaggaatagatgatctaagaaccggtcctttggtggtttcatacgtcatgaaatcaccattcctttttaaaattttcaatc

SEQ ID NO: 2179 - DNA, 606 bp, Unknown
  Description of Unknown: unclassified Picornavirales sequence
ggaggatactttgtttagctttgcaattcttaaactgttttccatttcactggtcgtttgacgcttgtagggcgacaggtgttcctagctcttgcttttctaaactatcgaattttgttttccactcgttcatatgtctatgtatgaatgaacggggtgagtcctcgttggccctcgctggagtgtaaattcccagtctttctggaactagaattacacaagactccaggagtgttctgaagattttcatatttaaataaaatcttttgggattgtccttgatggttgtagcgatgtctagtgtgtgtgcggattcccatgctggcaacagcatcctcacaggccaaaagcccagggttaacagcccccgctagatgcatggtaccccccatgcccattttggatatgaaattaaggtttgtttacttaggaatttcataaggaagcttctgaggctatgaaggatgcccaggaggtacccgctatatgtggatctgacctggggaccccttgcgtagctttactgcgtagtgtgggtttaaaaagcgtctagtagccttgttttcgggggaccgaaaacttccacattattttgagactggcatc

SEQ ID NO: 2180 - DNA, 606 bp, Unknown
  Description of Unknown: unclassified RNA viruses ShiM-2016 sequence
gccggggctctttgagccccggttatcgtttgagtagtctgatagaatatgtctatctgcaggtcttgtcattgtgcgagaaatgcacgatgatgatgttcttgtagtgttgcgaagtcttgccagtgtgcgagatcgcacgttggtgatgttctttgcttgatatttttattagtatgaacagcttggtgttacactgagctatatgctcggtgtcgccaccccaaactgcctttctactactcgagcggttacgcagccgttttctgcaggtttttagtcaatttatcctgcgcgtaaaaattaaatacactttcaacccagttgacgctttttaaggattttgcgtgataaatcatccccgcttctgcggatgaaaagacggacatcgtagatcaagactgtaagtccgtgggctgcatttcacttttgtgaatgtagctgttacagtcagttagggtggatatttagatgttttatgcattgtagatattcaccacatcgatcacccggatgcaacagcgtgacggtgcgtacatgtagaaatagcgtgtatgtgctgaatgttactatttccctcattttttgagagctcatttgtcatgt

SEQ ID NO: 2181 - DNA, 606 bp, Unknown
  Description of Unknown: unclassified RNA viruses ShiM-2016 sequence
ttttagctaacttatcctctaacattattgtgttagatttatttataccttaggaggtacaaattggattatttgacagaatacccgattgataaatctttatccattatcagtcatatctcttcagtctgctctcagttaggtggacctctctcacaagaattgaatactcttgttcaagaggggaactattctgctctaatcaactttaaatttgattatcagaagccctatacacaaaacgactttatttacgcccgtcaaattcaagctcttgtttcaaaacaggagtttattgacttaggcgtagatcgagaagttgaagcgtataaaaccttttctgaggctgaggaattatgttcgcgtactaatgaacgattccgtggtagtctatctgacgtttcgtcagagtgtcactccgtgctttacggggcgacacgaaaaatagctaccatactcggagacgttcctgagtacagtgaattaaatttctcttttggacctggagctacaaccaacgttaaacgagcgcggtctaaccctagggttaaacttgaagctcctctaacttgtagtttcgaatttgttccccatgtcgcgaaattc

SEQ ID NO: 2182 - DNA, 606 bp, Unknown
  Description of Unknown: unclassified RNA viruses ShiM-2016 sequence
tggtgccgcgcggtgcttaatggtgttgaggcgcaagtaaaactgcaccacaggaacattaaggttacgtcccgtgtcggattagtgaagttgaggagaggtttcggttattttcgtgatgttgtgcaagacaacatttttttttataataatacagtcagcgtggtattgcgggctttgactgagcggttgtattacgttaagggtgtggatgggtttgtcccatgccctcgacccattgtaccattctccaggttgaaatggattcgcgaccgagtgcggagaggattagcagctgtgccgcctgtgtggacatatgaacaatttgtcaattcatacacaggtagcaagcacagacgttacacctctgccgtttccaatctagccgctagaggcttgagaagaagtgacggttacttgacaacattcatcaaagccgaactatacaatggcacaaccaaggctgacccttgcccaaggttgattcagccccgcagccctgagttcaatgttgaactaggacgatacttacgtccacttgagaaacttgtctacaaatccatcgaccatttgtttggccaccatgttgtacttaaatgtgacaac

SEQ ID NO: 2183 - DNA, 607 bp, Unknown
  Description of Unknown: unclassified Astroviridae sequence
tgtgttgcaaaatcccacaaatcctcatatgttttctcaatttcaacaggatcactataatggaatttctcaaacatcttcgtataagctcgagacgtccaagttgtggatgcatagtcgtgttgttcataaggtgttattatccctagtaatggatctctcactttttttcaactatcaaggatggagtgaaaactcaaaccactatgcaaatggttgtcacacaggctcggaaaataaggaaaaagaaaccctttacatgtgctttttgtaataagacttttacaaactggcatgaccgccagaaatgtaagaaaagccaagagaaaaatgcagctgaaaagaaaaaagatgagccaaaaaacgagaagaaggggcagtagaaacatcgagctgccccgtttcggttttctcgtggtatgactatcttgaaaaaccctttggaaagatttgcctacctgaagaacaaacattgcttggctatatagcagttgacaaactagtggagagaactaaaaaagtgagagatccattactagggataataacaccttatgaacaacacgactatgcatccacaacttggacgtctcgagcttatacgaag

SEQ ID NO: 2184 - DNA, 607 bp, Unknown
  Description of Unknown: unclassified Picornavirales sequence
cgtgttagtgtgatcttgctcttaatcggataaaaagagagaataataagatatagagtagtgctactaacataagggtcttagttatttagctttaccacacaaggtggaccgtggcagccccacaatatctagtgtagctctctaggatgggaacattaggtcgtgttctatccgaaattacccatggcctgcgtctaaaagtaataaaacaactaatggcaataataataccgctgtcattgatataaatagtaatacaggtattaatgagaaagagagcattggtcagagtaattttacagctcctcaagcacaaaattatgaagaagctccacaaatttctcaaacagttgaggagcaagtgcaaatcgtaacatttgatgatgataatgcagtagtccaggaacatataccatatgaaatagaagttccacgttttggaaatcaacaacacacggatcttttgacacattcagttgtgacgtttttaggaagaccgcggcttatttcatcatttccttggttggccgaatattctcggtccacgaatatactaaagttttcgaatcacggattgctcgtaccatcgaatattttatctccg

SEQ ID NO: 2185 - DNA, 607 bp, Unknown
  Description of Unknown: unclassified Fusariviridae sequence
gtcaagatgcagcactatggttgtgtctacacttgtttgtgacttgaagtcgtcggactgtccactctgctccttgagacatggtggctttagcctttatgtcttaagtggtcgagttgacgggccctcgccctcaattctcattttatttatttgtttaatttatttggccacatagcccttgtgctttgtggagattatgatggtgcgctggttccgcactgacagggagttttgttttcctgtcagttcggggcctgtgaaccatctaatctcctcaacgctcatggtgactatgtgcgggagtcaactgatgccgagtatattattgaggttggcatggtgtttgccattccaacaccaataatgtggtcgggcccagatggtttcccacctggtcctcatcctgcgtcgccaaggttgtaggagtggctttgccgcccctgagatcttgtcgacgccggttgtggagccggtttgccactgttccccaaaattccttttcttgtctcattgtcaaatgcaagctgcccgaatattagctgagcggatgaagttcaaaggggaagcacccttacctatgccaccacgcgccccttggctgaaa

SEQ ID NO: 2186 - DNA, 607 bp, Unknown
  Description of Unknown: unclassified RNA viruses ShiM-2016 sequence
cgccaattcttacgtcagtgtgttactgtttaacatcaccatggcttttagcactgaagtccaatggtgtttaatcggcatcgggttatgtcgtaccggtaagtatgtttatgattactttaacaggtttaaattacgggccaaggccatcaccactgctgctaattcacaggtcaatgctgtcatgcaagtgatgaacggcgacatctatgaccatatggaaattacagatgtcaccgaagatttgtctgaacaagttcttgattcatccgacaattctgttgtgaacaagcgtaggcgtgttagacaacgtgccccttttagagcttatttggtaaaaattggcaaagcaaaattcggtctgctcaaacgaactgaggccaatcgcatggttgtccgtaagtttctgtatgataattgcatagcacatggcgtgcttgcaagacacattacagataatattgacttcgccactgagatggtatttatacctacagagtccgagttgaccaatatggctatcaaatctactaccgttaatgttgagagtaacattgttgcccgcttgctgggcaccaatgatgctttcaattgatggggcccaagc

SEQ ID NO: 2187 - DNA, 608 bp, Unknown
  Description of Unknown: unclassified Trichovirus sequence
ggtggaattactcaaacattttggatgggatgacaaggtgttgcaaagttacatcagaatgaaatgcacattgggttgcagactagggggtttcgccatcatgagattcaccggagaattctcaacatttttgttcaatacacttgcaaatatggtgtttacgttctgtagatatgaggttccagatggcaccccaatctgttttgcaggagatgacatgtgcgccctgaggaatttgaaagaaatcaatactcatgaattcattctgagtaaactgagcctcaaggcaaaagtcaatagaacaaaagtgccaatgttttgcggctggaggttgtgttgtgacggcctcatcaaggaaccttgtttgatatacgagaggttgcaagttgcaattgagaatgggagactgatggatgtgatagactcatattttctggaattttcattcgcctacaaattaggtgagaggctctattcacatcttgaaattgaacagctgaattatcatcaagttttaacaaggttctttataaggaacaagcatttgctaagaggtgattcaaggcacaacatctcggaactcgagtggctttcagacgaggatggcg

SEQ ID NO: 2188 - DNA, 609 bp, Unknown
  Description of Unknown: unclassified RNA viruses ShiM-2016 sequence
ctttttctggccgcgcttttaccgtggtcggcataccacgtaggtctgatgatcaccgctaatcatttgacgcaaaaggccaagggggggggtgactattgcccggacgcacttgtgtaaacaaggtaagagggggaaggcatacatcaatgtccttcttcactcttgctatcgctgcaaggtagatttgtccgaaaacctcacggacgaggtatagactccaaacctcccgcccccgatcgtgtatcacatgtcgtgacacgttactcgtagttcttaggtctttgttagtaccaacaagtccatcccgcacccccctctggaacggctttgggagggtggcgcgtgcggcccgggcgctcctagcaaagggtgccagctgggttcaatcaacggttgtgtgttgcaccacgatcttataggattcgactcacccatagaactacaagtaaacatcacgcgtgcaatgacggctatcgcctgaaacaacgaaagggggcaaaactctttagaacatctgttctcatctagcggcagggagagggaattagctggcagtaaacctcgacctgaaatttttaatgcagccagggcgccgtttttactcta

SEQ ID NO: 2189 - DNA, 611 bp, Unknown
  Description of Unknown: unclassified Botourmiaviridae sequence
tggaagcccctttgctttcatccgtcgctaaccatttccggtctccaccaccctcccttccacgcggttacgtcacatttgcacgtaagatcgttcgacgcctgttccctcacgggtgggacgccggatcttacgagtcttgtgtgctcggaaccgatccttctttgtcagcatgtttggagaatcgccgcagtgcgggcggacttcacggctatgtttccaaccctcgggttgagaatcaactcggacgttttcgtcacgatgacttcctcacgacgtgcttagacggggcaacccgtcctttgagcgtcgcttcgggtctgactgtcgtccagagtgccggtaagcctcgcccgctgagcaaattctcggcggacgcgatacacttgagaccgcttcataaggcgatctatgatagactgtcgcgcgagaaatggctctgccgtggtgattttacaactgacgttctacagcgcgctggtttttcctttgttgaaggcgaagtcttgacttcgggggattataagagtgccaccgacaatctctctatcgaggttgccgaggctattcttgacgaattgctcaagtccacggtctctgtgccggggtcg

SEQ ID NO: 2190 - DNA, 611 bp, Unknown
  Description of Unknown: unclassified RNA viruses ShiM-2016 sequence
gtgaggtttatacctcacacacaattttgacccatctatgggtaaaatagacgtccagagttttttagcatgcattctttgagagacgttaagcacatgaaagagcatgaagttgtcgatgtacagagaattcattctccaaggcagggcacatcttagtatataaaacaaaacgattccgattatttacgacgaaaccatttaagtattaatcctgacccgattttgatatacgacaaacagctgaataactgttaaaactattcaaatccaacggaccagtaatcttaaattacctgtgacagccgaagtttagtaggttcccaatatagccgtgaaacgcttgagggccgttacagctctaatttaagacctacgtttttaaagcttggtaagcgctttacttgagcaacatatacaaaactagtaccaaatcttagtggaatttaagtatgatatttgaatgttagacatgtattatgtcaaatatcctctacatttctacataaaggtcatgcaatgctcagtggttattgcattatggtcgcagttaacttgcagttttgtattgcctgtgtcggagcagtagtaaagtaaacagacgatttcac

SEQ ID NO: 2191 - DNA, 613 bp, Unknown
  Description of Unknown: unclassified Picobirnavirus sequence
tcaaagatcaaacttggctcaggagcaattgacggcttcaagagatcaggtggctaaggacctaggttatggtaccttagctgaaagtacacggcataacaaagcacaggagcagcataatgttaacgtccttggtgagcaacaaagacacaattatgcccaagagagctataatgtagcagtgttaggtgagcagacccgacacaacatagctaacgaagagctcacacgcttggctaatgaagagattgcacgaagcaatcgtgcacgagagagcgaaactaatcgacataatcttcaaaccgaagatgtggctaggcagcagttagttctatctcaagattcattggctgaaactgtgcgatccaatctcgcacgcgaaagtgaaacgcatcgatcaaacgttgaacgggagagagaaacgtttagatcgaatcgcgctagagaggaagaaacttctcgatctaatcgcgcaaaagaggatgagactcgaaggtcgaatctagtccgggagatcgagactgaaaggtcaaatcgggcgagtgaaggtattcgtcaacaacaggtgaatttaggctatgcgcagttaggtgagcagcgccaatatcaccaa

SEQ ID NO: 2192 - DNA, 613 bp, Unknown
  Description of Unknown: unclassified RNA viruses ShiM-2016 sequence
gtgtgtttgttcaacacacatgttcatttttacccagttgctatgttgcaatacctaacttaatcagaggttatgttttagaaactcatgatattagaggttatgcttgaagaactcggtaagttgatatgttttagacactcagaaggatgaactcttgctggtcgtttattactcgttagtcattacgtctggtaccttcttgctcgtgagaccgatattgatggtcttctattactcgtgagaccaattttgttagctattgttaactcgtgaggcatgggatttattttaaccataaaacttatactaatatgagatggttttagccctatggaaatgcttagtacccttaggtgtgggaacacttttccaaagtcggaaaaacttcaaccgctgtgttgtacatgttgattgattttacatctcaccgctatgaaaaaggacattgctttattcatatgataaggacgatatggagccggtttagctacgtcgagactttggtcgtagacgcgtagtatgccaagcccattggtcaaactattaaggctctctggattagcaacccagtagtagatttagttttggtctgggcgtattccctgaagat

SEQ ID NO: 2193 - DNA, 614 bp, Unknown
  Description of Unknown: unclassified Picornavirales sequence
gtagtacgttaaacgtacgaccaccgatgagactgaaatgacactagttgagattatttcaatatcctagtgttataaagtcaatatttgttggttgatcgtttcgtcaatcgatggcgctgacagccggaaagacggcaataataaaaaccaagatttagtttttaagttttgatttgattgcaaaagctatcttgaatagacaatcaaaatattaagtattgcaaaagcttcttaaagaagacaatatttaattagttagtaaccaaacctcatcgtgcccctaagggttaaccggttacgtaaaagcgtagaggtattaaggtcactgcggagacctaaaatccgcaattttatgttttgtaatgttttaattatagacttagatgtaactataagagtttataaatacttgtttcaagatttatagacaagatctgatcctatggattttagataaccttcatgttagtggatagtgtgtgtacctatctaaacgcataaggctcttatttcatatttaaagtaggactatgtattacggcgcatctaacggtaacgttagtcaagaccggagaatctcggaatgaattttagtaattcccaaatttata

SEQ ID NO: 2194 - DNA, 615 bp, Unknown
  Description of Unknown: unclassified RNA viruses ShiM-2016 sequence
ctcgcacacgcgtttgcgtgtgcgaggatttcatttagtagttgtctctattttggagacacaattggtggacaggggtccgcccctgttacaccgtttgtcggagcaatggggtacgccccattgttccgtgctattgacgatttactttcttaactaggtatcgaaagtgttaaaccagctttcaccaaactttctacggagattgtaagattaaatctgacctgctagacgtatcataaaatccaatgtttactagtattgcttaaagctgtccgatcatgaggaagtacctactttcggatgtggtatttatgaggcccgtcacttggcctagtatgaaagaagtgaccaccaaaccagtccgcgaactatgttcgtttatagttatgatgtgtaccttttctaaggcgcgactatttagtctcacattttataaattggtgacaatttacataattatattcgtttagtgtgcggagagccgtagacctatggtgtatgttgatttgaaagagcttgctcttagtcagtacattgaaagccctagtggtgtagtaaaacataggtcgctttgtgaacgagaaaccccaacttttggggctttcagttcgc

SEQ ID NO: 2195 - DNA, 616 bp, Unknown
  Description of Unknown: unclassified Picornavirales sequence
tgcgtatgtaacccatgcgcatgttttcatatagatatctttaaaacaatttgtagagaccctgcatattcttctttagaatcaggtatgagaccctgagtatttgctgttaagttttatttcgacgactattccgagaaatagggactctgtagccctggtattttgttctataactgtctggtttgtaatgaccttataaacatttcagttgttcataacatttgctataatttcagtataatatttctgtatgattataattttgcaaaaccccttttgttaatcacattttattcaaagcttcttaaatgaagttgcattagcattttatgcttttgctgtcagtctgatttattgttatatttacttattaatggtggcgagaattccactcgtcttgaaaacctttattttatatagaggtctgttttgttcacgctttaggtttcctatcgagcgactatgtgatgaaaaatgtggtagaaccaagtgtttcatcttatgcatacacctcaatgataggttgttaaaatctatatcacgctcgtgtcgtgaatgttgggtactctgatttaattgcagtaactttcctaaccgagttgtcatatcaacc

SEQ ID NO: 2196 - DNA, 616 bp, Unknown
  Description of Unknown: unclassified RNA viruses ShiM-2016 sequence
atatgcatgggcttcccatgtatatcaattttatagtccgatccttattttaggtggcgagtatcctgctacatattttggcgagtacccttagcactggcgagtaccctatatctagtagacgattacccatttatttctgggttgggtgacccccttaattttaaataaccatcttatatcatattcattatttcaaatgttatattatatatgcttcctcatttattattaagtttgcttgatttaacaagtttgaactcgttatgaaacattgtctaagataactggattcggattctgggccagttatggagaaacggacgattgactgagagtaatggtgagactttttataattattcagtaacaactgtggttagtttgcggacgcccgaccgttctgtaccaattttattaagtctaaatgggcccttttgcaccttttggtccttaaggtctacagccattgcttgtagttacggacattcagacctccctgtttgatagcatctttctaatatttccagaagtatttgatttcatccccataataattttaagattgtgttttaaagtttttgaaaggttttcacaaaatctttcctctctggca

SEQ ID NO: 2197 - DNA, 618 bp, Unknown
  Description of Unknown: unclassified Permutotetraviridae sequence
aagccctttgtgcttcgtccctttgatcctttctatcttcctcttctacgacgacaaactgctcacccaactcgctaatactttctctgctaatgccgcgttcaagtggcttgggactttcatctctgcacataagaaacaaatagctgggctcatatttcttgtcccggccacttttctgtcgtgcgatcccaaatgggcaaccgtagtatctgctgtggtttcctatctggtatcagaggtgttccccgcccctgggaagtatttcgagtacggcttccttggaggttcactcattctattgtgcaccgcaaggaagccgatccagttcgtcgtcgctacggtggttgcgctgctaaccattggtcttgggttgtggggctcggaggtatttgcctctttgccctccacctcacgccagggctagcaatcagcgacatccctctctgcgaccccagaaactgcaaagtctcctgtactaccaccggccacccgctcccttggtgtgacacaggtcccactgtctactgctactcagagggcaaggagtgcaagcaatgttgccccttagctctcccaccgtgtacgccatggccgtcgtgcttcttcacgactacc

SEQ ID NO: 2198 - DNA, 619 bp, Unknown
  Description of Unknown: unclassified Picornavirales sequence
cgatgtatcggtaaatgtagtttaaccctctgtttctcgagagagacaggttggtgttctatgttctgctgcattgagaattgggctcccgttgtattgttgtacaaattgttgatatgtgttactcgtaaattttcagttaagttagcgttagaatttatgtgtctaccattataaacgtttgtatgtgatgtgttctaatttgatgtttatccctggtgttgaccgtgccaggcgatctgtaatatctgatgaagaagtggtgtagcttgacctacttgccctaaacttgggttttttattttaattttggaatacagctatttccctcctagttggattaagacagatggtgctgcttgacaatcagcatcaatcggtttggacgtttgtccagtcaagttgagtgtttagtacttgttactttgattttggaaattttagtgcctcatagctgtgagacaacactattagtccttgtcagagcgataaaggcttttcatgagacgtaagttgagcaattatgattgggtagcgctggaaatccgcgtagctcgtccttgttgaccatccatggtggtggatcagattgcttggctgacaaataaccacagatatt

SEQ ID NO: 2199 - DNA, 621 bp, Unknown
  Description of Unknown: unclassified Picornavirales sequence
acacattcaatttgaaactcatattcattcactactgctccttggagcagtttgtgtttaatataaaacccaatttatatgttattatatgtttgttttgttttgtctgactgtattagcactattaacgtgccagtcgaaaagaaaataaaaatagaaaaatataaatactttataaactgttatgatgtcatttgcgaatgagattgaataagtacagaaagaatgttgagattgaaaccccgtttgagtccccaaagatgcatgctatattatctcatactctttgcatttttatgaatttcaatttatattgcaaaaagaaactaacatttcaaagttattcgagattgatgttctataagaacttatatccttcgaaaatttgttagtttaatataacgtacctaaagtaatgaaatatttaataccacccctcctttgagtagcttaacctctcaaagatcccgctgtggatttgtattaaatatgtaatgaaatgtgggaattgtactttattaaataacgaatgattagagcttgcccgattgaatttaggcttgttcaaattgatcgcttgaacaaagtattagatcactttttatggatttagtatgaata

SEQ ID NO: 2200 - DNA, 621 bp, Unknown
  Description of Unknown: unclassified Picornavirales sequence
actagagacctttaacttattttttgcatcagtacttgtgtataaccttactaataccgtcattaaaactcaaagtagatttaatgaagctgttattggatgtatatttctactgattgaacagactttgtttgttccgtgcatggtctcaaaattaaaataaaataaaacaaaataaaacattataaaattgaaaatacaaaatattaccactttaaagatcactagaatgttttgaacatttctataccaccttatatttattatagagggctctatctacgagcacctagcgtttacagaagacgtaacttttgctttagcactttaaccttgtgaatggaatattggcggagggacctatgaggaagtacctactaacctcctttgttatcaaattttctgagtcgatttatttcgatgtttcatagttgtggcgcactcccactaaatttagatactcaaaacccaatatgtggcattcctacgttgttagagagttccgcgcaggcggctatcgcgtttatttaatagataaggtttattaatgtaagtagccattcttacatgaaatactaatcaccttctattatctaaaaccctgttgtttagctatatatt

SEQ ID NO: 2201 - DNA, 622 bp, Unknown
  Description of Unknown: unclassified Benyvirus sequence
catccagtgtagcagcctaccatgccaagtatgtaaaagtccattttttgttctctattgctgagaaatttcttaacacgggccaacagtatttgtgtatggtgggtggatctcctttcttcggatcgtaggcgtctggttgagacgccatttaaggttgtgcaaggtgggcgtgtgtcgagacattcacgtaatcatcttctcacagggggtacctaaagcccccatggtcgtagacctttaggtgaccttagaaaaggcacgcgggcgactgattcgttcaaggctgaggagtctttaagtgttcttacaaggacacgaccgggttggaaaagccctctctctacagagagaaaagttgacaaagtccttacgcgataggggcgactttcccaatagggagtcccagtcgtaggctctactgttcagcttcgcctttcccaatagggagtagcagaacacgttcgggtaataagggcccatgttggtcaccaagtgcgaatgagcaacggaaagttttcggcaatcggatgaaagcgtcttaactctgaaaaagggggccacccgtgaggggtaagtgccatgtgcgtggagtttgaacggcgatctggaacccggtaag

SEQ ID NO: 2202 - DNA, 622 bp, Unknown
  Description of Unknown: unclassified RNA viruses ShiM-2016 sequence
atcccttttgccttggagaggcgtaaaatctaccagctccggaactattcgtagcataagtttaaaatagttgtgtatatatggatactacatattttataatttacatgtttatatattttatggaagctttgtacatatagacatcctacccttaggataccggtatttactggaggtttcgtcaaccagggaaacattgtcacacacagatacagtgggtactgttctgatgtggtgtttatattaaatattgcctacttcacttaataataataatacaaacagtcttagaactgactcaaatagttctcctgatagcgcttatagtgtctcaaaagcagctcaacaggtttcaacgcaaaatgtacattttgttgatggagacacgccatggtcttacgacatttcatcatcaccggatagcaccacccagctcgcaggatttagcgatgcagaactcggttccttcctcggtcgtcctctcaaaatcagagaatttcagtggactccggaaagcactcgattgtttgaaatttttaatccgtggactgatttttttagtaatacagatgttttagagaaaataaatagatatcgtaatcttagatgtaatcttaga

SEQ ID NO: 2203 - DNA, 623 bp, Unknown
  Description of Unknown: unclassified Picornavirales sequence
tggccgcaatcgctagtgctattggtgctcttgcaggagctgggattaatcccaactctattatgcaagctggtttgccttttgcccaggcagcccagcaacaaaattatcagcaacaaaatattcaatcttattttaaaggagaacaaggtttacaatcagatgtacaaaatcagtttactaaagctggcttgccttcttttatggcttataccggtggtaattcaggttctaacagtttgccgcgtcaagaattttcattaggcggcatgaataggttcgttggtggaaatgttggcgccaatatgccttccaccatgaatgctatgcaacagtattaccactggggtaacccgtttggaagttcaggtcaatttaatttccaaggagtgaatggttcaaatgtaccacgtaccaatcctataccaagcgatgcaaggcagaataatacaggttctacatttacaacaccagacaatgctaatacaagatattccacgcggggaacaccagctcaaagatcgactgctgaaggaaccactgtccctggagcttttctcaatacctagttaaaacgtcattgagagaaatacgtagttatatcttgcccagaaataactgca

SEQ ID NO: 2204 - DNA, 623 bp, Unknown
  Description of Unknown: unclassified ssRNA negative-strand viruses sequence
aggtttcagtaactattaaccgaccgacgggtctggggattcttaattagtgggatggtataactatcatgatccgtctaattctgaatttctcgtaaaacaaatcttatttctaagacaaatagaaaaaaactcgactgctatagatccaatcattcatcattgtcactcgatggattccaaaaggatctactcagaggaacgatttctcatatccgtgatacgtccaacagatccggaagaagaatatgtagagattgatatattcactgagaataacatggacaatccgattgaaatgacaacaggtgaactccatgacattgtaactgataaggttccatttatgcatatttagtccactgtatttgtactctccacagacagggagaaggtactgatgtctgtcactgatagaaatgtcaagatccatttcctgaatcgatttatcacaatagacaacatgaggtttgatttcaattcaatagtactggctatttctgtagacagagaagaggagagacagagggaaatgaaggagtaagaaggatgatggaatctatatctgtcattagttcttgataaactgctatgttattacttaaagaaaacccgattgcatc

SEQ ID NO: 2205 - DNA, 624 bp, Phomosis penoulivirus
tgcacgggtttagcccggcccccggatctgacgcgtgcctgcggactgttgaagtaggttgtcgtccttgcaatgtgagtcgattaaagagattatagtgccaaaggaatctcgcgctctcgagcgttcggcacttgcatgttccggtgccgggctgcgggttgacatccgcggtcccgttcccccctaggggtatttaaccggtgggtatgctagtaaggtccggccttcgggttaatgaacgcatattaaaatcttagatgtattcctcgagaggaacgtaagaacccactaggagatgctccaggagtggaccgtagcgggtagtgccgacggcctgggtggtggcggttgtgaaacaccgcggaagtggatgtaggggcgttgcatgtaatgcagggttagaaacctgccccgagtagcggtgtcgctgactgtgcctcgcgcgcgagtgacctccccgtgactgtgtgttcgtgcacggcgggttcttgccctttgggggccgcgaaaggttgtgtggacatggtcgctacctttcctaccacacccaaaactccgggacaacgaagtccctgatgagtataaaagcgaattgaaaatagaccccaaaagaaacagaac

SEQ ID NO: 2206 - DNA, 624 bp, Unknown
  Description of Unknown: unclassified RNA viruses ShiM-2016 sequence
aagaagtgagactttaaaacactttatggatcgcaattccattctttggtaaaacttagacaaattgtagcttgcagatttattagaagagtttatagttgtttggcaaatgataatctttatattgcttacaattatttcacctttcgtgccgtattgtactctagttcaaaatcatttgtggtttgctattctatttaatgttatattagttgttttttatgctatagccattgtacatgtggcaaacgttgttatacatgacgtagacgacgattaatatggttgttgttattaatgctccttttactgaagggggtgtttctagggttgggaaattttttgttttagttttcccaaaaaaatttaaatgtaggttatttgttaccgtgtaccacgagactttcagctgtcaagtgggcctatcatgttggtgctattcccaggagaataatccgacgagtcattactaaaaatgctacccattgtcaaaaatggagattcgaggagagaactgctaaggccaagttgcttcaacaagtgcgggttggtatagccaatagtgttaggaaagagaaggagaaattgcgtgatgagaaatttcagtatgagtacgagcctcag

SEQ ID NO: 2207 - DNA, 624 bp, Unknown
  Description of Unknown: unclassified RNA viruses ShiM-2016 sequence
ttagcggaccgcattttgtctgcgcaaagtgacctagggtttgaagaatatatagaccgggctgactatatcaacgccgaaatgcttgcggatgcactaggcattgatgccccggattactcgggagaagaagagttaaaggagaagttgcggaagatagaccagaaagtcaaggaaaaggtctgtggtacaaaggagctgcccaggaaagggaaggttcataagcgcaaccgtgcgccgttcatccgttcaatggtaactgaattacggatggaattcccgttcaatgtcactgaagataatgcagctaatcgcctgtccatgcataggcgcgctgttcaattgatgaagaatcagggactgtgctctgcccacattgttcgcgatgtagacttgattgttgagatgatgttcgtaccactgcagagtaacattgaagcacgtgaatgtgctaatacatgggctgtgagaaacgacatcgacaagtataacgccaggatgctctccgcctggtatgagtggttactccccaactggctgttgaatagacagcgggggagtgcccatcgcgccgcttagggaggcccagtgaccgtactcggaagggaagagactggcattaaa

SEQ ID NO: 2208 - DNA, 625 bp, Unknown
  Description of Unknown: unclassified Picornavirales sequence
gagagatattctctcacgtgcgggtaaacgatatgctagtcgttttaactggattttattcagtttatgattttaactacgtacatgctagcccatggcgtgtgcttttgaagtgataggaacttcaataatgcaacttggaaagttgtatcaatggaaggattttcccaagactgtgtcttggaaccaccctattttgggttggggcttgcgcggcccctttactcttagtggtaagtccttcgaccacctcaacgaagtaggcagtagtaggcgcggctctctgagcctcgtactttatgcttcagcaatgaagcacagttttaaactggtgcgtacctacgtctcacaagagaacttgtgatttgactgagtacttgtcctatagtatggaacattttggaattgatgaaccgatttggaaccgctatagggaacggatttgattcccttggattgctttgcttgaaattgtttctgagtgttgtataacgtttctatgctgtccgtcttgcaggacattaaggtatagaatttatcggttacccgggccggagtttaagtagatttaatgaggttggcaccttatcattatttcttgcaacatttcaggctaagatgatgg

SEQ ID NO: 2209 - DNA, 626 bp, Unknown
  Description of Unknown: unclassified Anphevirus sequence
agtaaaaaggtgtgcggggtaatcccccgcacgcctttgtttgtagaatgcacttatacagattccgctcttgccgttaattataccgctcttgccgcaatctgtcaccagatccgccatttccgctataaacgccatttacgcaatctaaacttgttttctctttcactaggttatgctcacctaattactcaaatttgctacaccacccacagcacttgattagtcaccacttgctgcttgtattatatagactcttttgtacacatttaatgtaccatatttatttaccaattatagaagaaaaataaaaatcaaataaccagaaaataaaaatatttatagacccacaatgtctttaaaattggactcaactctatttctttgccgatttagacttgtttgaacctttattccgaactcctcttgtatatacgaggctagtaaggtaaagtgatatgccctggacgcatgtatcgtcctgtttgtgagtaaagtataactctctccctaaaagtttttacgtttgtcagggataagaccgctagtgatgtatgccacggacacagaagtcctatatgcatttaattccactagttcataacgtacccccccatcttaacacc

SEQ ID NO: 2210 - DNA, 627 bp, Unknown
  Description of Unknown: unclassified Virgaviridae sequence
gcctgcccacagaagatggtctacttccatatcagaagatgcagaggagaggtcatcgacaccaaccacccccgcggtgtgtatccatactttcatactgatctaccagcgaaatttcataataaaaaacccgctagttacaaatcatgtctgtcattgctgcattgtgggcatctgggagcgtgaccttctacaggttcttagaccacttgatcaagagccttaacgggggtataatgttcgacccccagccggacggatctctcttcggcccacccagaattcacttgatgagtgtgtcgtcagagggacttgccattctggggacaatcgcattggctgcatgtgttgggtttcttatagataactggcatgagtatgtgactaggcagaggtttcgcgaaagggtaagaagccgattgtctcgggtggattactatacccccaatgagtgagtcatagctcgccccaaaatcctcagtgctcaaattgtgacccactggatatgtatgacacacgatagtgttacatgtgaatgcgctttattttctagctgtgatatttttatgtttttattagtaaaaaacccgccagttacaaatcaataagaggagtaacacaggaacg

SEQ ID NO: 2211 - DNA, 627 bp, Unknown
  Description of Unknown: unclassified RNA viruses ShiM-2016 sequence
gcgacgcaaagtgtaccttggtgcatagtatagccatttggcgacgggatttcccggaaaatcgaggcatttgcctctggccatttggccctaagtgtttagtgtgtgtaggaaagtttgtcgcttatttccgagcacatgtatgagttgtatataataggtctcgtaactggggcggcccttgttggactagcgtggtttataacgacgcgcgtgcagcattggctcattgtgcgaggactaccggcccacgtcggggatcttgagttacctagcgaatccggcatcggatattcgctgagttctttcgatctcgactcggttgatgattaggttgtaagccttttggcgtcttagttttcggcctttcggcgtttagttgtaagtctgacccgtttgggcctttagttataagttgcctcttttggcttattgtaagtttccctttcgggttagttttaagccttttcaggtcttaggttctaggtccattggattttctattgtagctttttagcttttgttttgtgcccccttttggggccgacccacgtttggcgtggcttatctttatgtttgcttaattgtaggttgcgccgacttaagtcggcgcgttgtagatttaag

SEQ ID NO: 2212 - DNA, 628 bp, Unknown
  Description of Unknown: unclassified Sobemovirus sequence
tctccttctcgtgcatgtcaccttggcactggaattcattttgggggcgtcggcattttgccggcgagtagggagcgccactcacgccggtattcgccgggggggacgtgaggctgcgatagtcggcagcgcattttgctggtgtaaaatagggaggccagtccctgctccccgaattaccttcctgtcgtacgttcccgcgtgcggctatgagccaatttgcggcgtggttcctcccacgtgaaggtgaaggccaggggtgcggtagccgccggtatgcatgtatgtagcgatgattcgatcgtcgcgggtagtgccacccctcccgactgctcctatctggattaaaggttgaagttgtgcgatgatgcccaaactcgcacgatggaacctagggcagcgggcatggctacggttcggagcgcgtgtacggtccggggtcagccgtccctcggaaccccatcgcgtttcaggttagacggttagggtgggatttttcccagggcttttgtattagttattgcgcgcttggtgtttttccgagaatgacactcacatcaagttgtcccccttgcgcactgtttttggagcgaactgttttgcagttattagtggattttcgcccact

SEQ ID NO: 2213 - DNA, 629 bp, Enterovirus C
attaaattaactctattgaacccgttatccggtgatataggatatctgtgaactaacatcacaataatcagttagcccctcgatttatgccttcagtggttatcgaggtctgctcatacgacgaggagacaggagattgtgaacttgagagtgcggcgaagatattcaccagtaacttcgacgggacttacgtcctatacactcacagttccgggccgaaatacgccggatcaactgtcacactcgtctgccctcactgcggggtgagtgaacaagcgacgttcccgaccagaggcctttcaggcaactggggtcaccacgggccgcacgacttacgacttgattgtaaggcgcggcactggcacggagcgtgcgaggtcattcccctctctgagcaagagtcgcgtgtagcgtctgacggggttttcgaaccaggtctaacgcacatcactacgacccgagggcagtcttggactagacatctttagtccctcccagttctcgctgggagtcccgcagcctggctacgggaaatatcggtggggttgatcaaacctacacctcttcgagaaaagcgctcttcgagtactccctcggcagactattctgttgcgtctcccatagtgaag

SEQ ID NO: 2214 - DNA, 629 bp, Unknown
  Description of Unknown: unclassified Iflaviridae sequence
ctccacacgggtttttgcccgtgtggagatcatcaagcttttatcagtagtaatttgcagttactcgagtcctctgtttggactctatttaggaatgttaatttaaactcaattcagtcgtcgatgtctctattgggtttattccctttagagttatacaattgtcttgagttttaaaaattgcatcactatttagagtctcgcattttgcgcatgactcggataattttactttattaccgattttagtttgtgatctgacccagttttctatctattcagtgtttttgctaaccatgcaataatatgtcgcactgtctacgccataaagcaagactatttataggtgcaaatttaactttgagaattctaggctttgaacttcttattagttgtccgataatttgttatcgccccggaccgggcgatttccttctcatttatgagagaaacttttcaatgtgctgagtactgatcacgtggaagcacactaatatgtccacatgaactatagtcataatcaatgaccctaaaagtccttgtccggaaaacacgcacaaggcattatccgcaggttttgtcgcgaatccaaaataggccggattgtagacctatcgaatcgcgataac

SEQ ID NO: 2215 - DNA, 630 bp, Unknown
  Description of Unknown: unclassified RNA viruses ShiM-2016 sequence
ataggtcctaacagtgtagatctgcttatttcaagtttttctagttttctgttggatagaatagtaatatattattttaatccatttagttcacggggctatacctaccccctattagtaacaaaatcatttaaaatactcggtacagaccggggtccaatttaatattcttaattatgcaattcgaccttatgataagttcaagaagcttctcttggttcctaataatccccctaggaatttccccttatcttttttgtataattttgattaactttggatgtataaaaattattattaaggcaaggcagatagtataattctgaaatgttacatgatttagattgccatttgaagcccctagataaatagttctgggtatgagttcgaggaaacaacaacgatgccgattttggaactacaatttactttatgtttcaaagtagggttttactagtctgtgacagcttttgcttaatacacgttagcctatgtgctaaaacttcgatgacatgtttatccatggacttcggacatatatctttaagatatgcgtgtactctgaaacgtcagatggtagtagcatgacgaagatagcaacctaccaattttcctttattttctttcact

SEQ ID NO: 2216 - DNA, 631 bp, Unknown
  Description of Unknown: unclassified Bunyavirales sequence
tgtctcatccccgaccaccatgtcgttaaactggtcgcggcgcgcgtgagtgtcgtagccccacggggaagccaaaatcacactcatcgtagtggttacatacgaatacatgtttttgcttgtttatcatgattcggaatgcttgcgatgagaatggggagtattgaaactcgagtgctatttagttaccgcagagtcccactgcaattaaaatacgcgataggagtgttctaggaggcaagagcattaccggtataaattaaatcgtctcactaaattttctaatgaaatagagtctgctgaagactttaaaatcagcgggtatgtaccacaagctggcgagcctggtactactatagcccaaggcaatgggcaaaagttggaggccattacaggcttctccgaccagttggctggttggacgacttctatcacgggaggtcgtgacgctacgtataatttagctaacaataatgattccgacttgggagatttcctcggtcgaccagtcaaggtgttagagacacaatggtcgataggacaacctctttttgagcgttttaatccttggtatttgttcttgcacaataccagagtgaaagagaagacttccaactttgaattattgagg

SEQ ID NO: 2217 - DNA, 632 bp, Unknown
  Description of Unknown: unclassified Bunyavirales sequence
agtagctgtttattgagtaagagtttgtagaggatggatgattaagagtgtgagtgagaggtgtagttgtgcgggtggtaaggttgagagtggtggtgtagaggaaaggtggaggtggagaccaaagtgatggggtatattcactgtgtacactttgctcaggttctgaaaacgtaaacctggataagaagagaaagaagtactgcatttgtgacaaggccttcttagaggagcacacctgcaattgctcagctggagtagtcaaggaggagttcctgagacccacctttaagcattggcatttgagtgagcctctaaataagtacagactatcttgcataaacgaggagctattgaagaagagctcatccaaagggccagtggttgaccctgactacagagtatcctctttgtcttttagactaggttggccactatcaccattcagtaagagctcacttccagtgcctcgttctggttctctcacaacaccagagaaacccaaggctgttaaaggcgccataaaggctgagccgaaatctgagccaaatccatctactagcagacccagtagagtagctcctcacacacaatcagaagggactgctaggaaggagctgtttaaatcagac

SEQ ID NO: 2218 - DNA, 632 bp, Unknown
  Description of Unknown: unclassified Riboviria sequence
ttccgatctcgattttatatcgcatacactcaacaattacccctttatttggattatcttctgccttgctttcgagcaggtgcattagacttattccttataattcttccacaaaatttttcttacctccttttggagggatctttttgcgcgaattatatattggcaatgtataatttttaattgactaatcgtcttacccctttttgtttgcataaacttgctgtatctgttgtactgcaagctattgcatatgatggatttttgtgctgtatactgtaagctattgcacttatggttccagcgagtggtttgtataacatttccttaaccacgcgtaagccaacaaaataattagtcctattttgttaactttttatcaattgactattgatattttgatgagttggcactcattattattatcttttgccaaacccctcaatatttaccctagaacgtcatcttaggaggagtttttattttctaacggttctttttagacgcttgattataattataaccttcggtacagttcttagagtttttagtatgttttgtccaacaaaacatgcagcctgtattaggtttacaaatactagggaaacgccccgaaagagcgatttgtggta

SEQ ID NO: 2219 - DNA, 632 bp, Unknown
  Description of Unknown: unclassified RNA viruses ShiM-2016 sequence
gcgaaatcgtctatggttaccaattatccttaaattggcgcaggcggcgttatcgtctttagtggaaactactatagtgtcaccaattgcttgtttacattcgacgtactatttgagagtgtgagtttcctttggtcgtagggtacttttgtaccgaaagcagatgtgttttcctgctgtttaaggtttttatgatgagtcctccgagaggggttttgtcggcacccagtcgacatcctttattctggatgacaccatacacggtacaggaaagtgcttgcaccagtaggttgttccaagagcgtggatcacggatactgagtttattttaaaacctagtgtgaagcgtggcggaagacccttcctactgtaggcgcatgtcgtggctagaacccgcaattgcgcttagcaacaagatagtgatgcccttgagtgatggcaacgttgttagtgtgttatgttatgacgaccgctttctttggcattttgccaacgggacggcccagcagagacacgattagttgtggcatcctatgtagtttggatgatctatcttgttgtgaataacccggtgattgcacaccacctgggtttgatttcccgactggccggtgtgtttgtcgttcggttta

SEQ ID NO: 2220 - DNA, 635 bp, Unknown
  Description of Unknown: unclassified Narnaviridae sequence
aggaacccctacggggtcacataagagggctactgtgcacccagctaggcttaaagcccgctgtcgcagacgtcttcctatcaaggaagaagtctgagatcgaacgaatagaacaggagatccatggagtcttcgactccttactcttgttcgactggaaatcgtttaacgatgaacataactacaagatctatagatctgtggttgtgtctatcatcaagttaggttgtaccaaccttgacttggtgacaacgtattggaagcagtttacaaactggctcttcatacgtgtgtcccggtctattactcttgaagagcctagccgggataaacaaaacttcttcttcactttaagtgatattcgaagaattcgatcctatctggatagggattatcccatttccaaacgaggatggtcacggatagcccacctgatctctacgagacagctggtggccgggtccgtacggatagagcgacaatctgtcgatcgattccgagaggtgactacgtcaccctttattgccgaccccgatttccttaaggagatcggggacgtcgcttacgtcatcgggagacgcctcaggcgttctcacggcgactttccttcggatgccggacacatatctttaagt

SEQ ID NO: 2221 - DNA, 635 bp, Unknown
  Description of Unknown: unclassified Alphachrysovirus sequence
tgataaaaatttaaaaatctctcagcctctaatacgacactgacatggacgagttgagagagcgggccaatctgatatgctcatgggagcatgtcatactcgatagagcgataggatatatcgtattgccaccgggccatgggaagagccacttacataacaggataccaggcctagtagaggcagacatggtattcgattgtagaggagacgatgagctgaaacgactgcgcggcaaagcgcgggagaccggggagtggtctacttacgatgaagaatggagtaatagactgtcggttcgtctaactaatcatcgttgggttgtaatggtaccatctcgcgagatagggaacaggataggcggtgtgtgtttgggggtggcccaactccacgacaagcagtggtcagctaacgtctcaagtcgtgggaagacgtctcgtgactatgaatacagcaggcaggttggtgtagatgtattgaggttcaagtgcaataaagacttagcagaatggttactcacagtggctaacatatggttagatgtgtgagcggcctgaggagtaccccccagggggacgaaacgctggtcgtagccgcgggcgcaagctaaccaacacatactaataagagacaac

SEQ ID NO: 2222 - DNA, 635 bp, Unknown
  Description of Unknown: unclassified RNA viruses ShiM-2016 sequence
ccgagtgaggacggtgttcccacaaaattataaaaaccccaatgttagagaccagattctttacgcgacgtactattttagcgtcagattctttattatttctatttttagggttttatattggcccgattgtagtatgactacaattaaacagtatacgtcaaatataagtcgaaagacaacgaatgctttcattatcattattcaactataagatttacaaaacacacgttgttatgggcgtaacttacgaaggctatttagctgaggtgatccccggattagtagatgttttgtgatgatatattgttgccaccattccagagttttcattaattggtaggagacaagatttaagcaggttgtgacaaccacgaaaggatgaacctatgatatcataatgtttgattagtgggttgcaatgaagaatgcgtaatccaagtcatgtattcgtgtctgttacctccccctgttaaagatgtgacccgtggtcacatttccacttatgtggcgccgtaagctatattggcgtgtagctgaggtgacttgtttagtccccacgtatgattactcagagagtgtgagataaaacttgtttaaaagacaaaatctaaaaatatttctgtataatcaaa

SEQ ID NO: 2223 - DNA, 636 bp, Unknown
  Description of Unknown: unclassified Picornavirales sequence
catgcttaattgctatataatagattgaacattctataacaaaaagtttcattggagttcaccagtgtcgaaaaaccgtaatgcagattcacgttaggagtcagccgtccgtggtccgagacgttaaatccgacaacgaaagcgatgtagtaaatacaaactaggaaatgtaatggctgaataacagtattgacaggcgttataaacaccttatggaaattatgtatttaatgcgtagccgtaggcagcttggatgtgatcggagtgaatgtgcgagtatgtgtgtgttttaacacattcgcttacgctatccaagtaatgaccgtagctatttagctttactgctcaggaccggtcggtggcagccccactaaagtccagaacattaaaataaatcaacaaattcttcaatacaccaatgatggtccaagtcagaattcttcaaccttttataataattccgaatttgatcagcaattcttgctttccgctacagacgggaggcaacatacaataattgattttttggaacgacctttccctctgacaaactttgaatggaatgtttcgagttctcagttttctacgctgtattctgcagaatttcctgatgccgttttagctcagccattgtat

SEQ ID NO: 2224 - DNA, 637 bp, Unknown
  Description of Unknown: unclassified Tombusvirus sequence
gttctggggcgtcgtcgagagccttaagccgtggctgtgttgtgcccgtcaggatagtagtgaagttgtggagaacatccgttccgtcagagcccgcccgggtgaattggcggtggtataccttgactacacgcacgaccctaagcaccatcacgtcaccaaggggttcgaaagtcttgttgtggtggataatgaacaagatggcgcgacaggacgttacccgcccgctcctccgccgcctgctcctgctcctcaacgtgtacaagtatgtccagctcaaagttacttggcgcaactcaagggccgctacggggactataaggacgcgctactacgtagcaagtctaaggtccctcgaagagaccctgtcgcggttgcccgcaagaagaagctagacgtgctagtcagcaggaatgtgtgcctcgcagaggcagtgaaatccaagcagcaccactgtgagagtgctgatgttctcagagagatcgcgagtctcaatgtgggcaataggagcgcgcccaaggtctgggatgcagttgagaccttggtggccacgacggtggccgattgcgctctgggggtcgcttgggaccctccggtaccgacagtgacgagcccttctgggccgccactaaggtcc

SEQ ID NO: 2225 - DNA, 637 bp, Unknown
  Description of Unknown: Brejeira virus strain AR800224 hypothetical protein 1, hypothetical1 sequence
aaaagggggaaaaaaacctaaaatttttgggggtttttttaaaaaacccaatttgttaagcttcaaatgaactgaaaaccggtattacgaccaaagtagtgcacgttggccaattttagaatacagtattttacagtatccaagattatgcttctccctaaagagaagcggacaagactttacggtagtatagtcttgtccgcttctctttagggagaagcataatcttggatactgtaaaatactgtattctaaattggccaacgtgcactactttggtcgtaataccggtttcagttcatctgaagctatactaattgggttgttaaaagcatcccgtaatacttacgagtttcatcgctcgtttaatatttctactctttctgagcagaataccacccctacaactcttaattggagttagtaaacttttcacaccttatcgtgtgaatacattgttttccagttagctgtgaaaactgtctttctgcttcctgttattcaggaagctcttctttgagactagctgtctctcttctattctctcgtaatcgagagaatcctgtctttggtcctcgcaagagaaccactactgtcttgaaggtttcttttgaagccgtcttatcttgatcttcaa

SEQ ID NO: 2226 - DNA, 638 bp, Unknown
  Description of Unknown: unclassified RNA viruses ShiM-2016 sequence
cgcacgttttccttgtcattggtaaccaaatggcaagcttggattcgtccttgagcgagttaggttgaatatgcaactgacatgaaccatttcggtgggtgccgtaacgcaaggtgagtggctgaaaagaccacaccggtgttacttaccattgaatgttgggcatttgtagcgagagatgatagatgtgggaagcaggggccctgcttgcagaacaagtggatgcgaactgaactctagcgacagtaagggagtatctgcttgcaatgtgagtgtgcgaaacttgtgaaacacattgcgtaatcaagctggacttgggagtccggtagctttgttgctgccggagaggcgtggggaggccaccaccaagtaaccaacgatgtagcacttgcccggcatgcgccttctctgtccgagtgtaaagacaatacccttctgcggtaccttaacactggagtgatttatgtcatttgctgataatgcttgcaaatcgccttggggtaatgtccgctcttaggctggtgtacatcggtgtaaaccgcagtaggtccctcccgatgcaccagttgttgagcgaactgcgcctgggggtgtttttcaaattagggatgtgcttatgctgccctccttcatgaaat

SEQ ID NO: 2227 - DNA, 639 bp, Unknown
  Description of Unknown: unclassified RNA viruses ShiM-2016 sequence
tcgacgtatcattttcccagacccgagcgcatgatgttcctctacgctgtgcttgttacctgtttcttggtgtgcatatggagactctgtgtgggcagaggtgccacagtgaatgctaacgcactggagcggtttgatcgtgccaccctcggcgatgagtcgagcgtcgatggtggtcacatgaccagccgccctgggtttgctgcagcaatggcgtgcaaggagaagctaggggagctgcgctacaataacgccaacaggatggtggtcggcgattttgtgcgcaactacctcagagagaactaccccgacatgaggaatgtcgatagggtgaggcacgctgccattggtgtggagttggcattggtgccgacagtcttcgcggtcgatgcagctggcttcgccagtgatgcggctgtgcggggccgtcgcgcaatggcaagtggacccaagtaggggtgccctgtcacatttcctgctcgggatacagctgttgaggttgaagctgtacctgatctcagggagcgggaagagtgtgataggggaggtcgggccaacggccctgatcgaacggtgcgctacctggctggctttgggactggagtcaactacggcgtgcatcgtaactcggctatcaac

SEQ ID NO: 2228 - DNA, 640 bp, Unknown
  Description of Unknown: unclassified Tymovirales sequence
aggggctgaggcactcaagcactctccacacccaggagggggccgagtcgacgtcatcatcagctgaatcctgcgtggcgggagtgacgttcgatggctgctgtcggggagccgggagcaaatcaggaacgggggcggttggttgctgaaggaaaggaagcaagaagaagggttccagttcgtcgactttcatgacctgcgttctccattcaagatagaagcgcttcgggtgaaggtagttgtagtactgggctacttggcagttttgagtgtagcttcgagtggcgtaccagatggctgcggcgacgccagatccgacgcagaggagggcagcgtagttcttccaatgactacgaggagcaagctgcgggaaatggttcagcacccgagttgggatttgccgcttcatccagtcgataggttcaaatttggactcgcttcggatcacgctcgagctctggccggtaatccatcggggaagcccacgccaatacgcggtgaaggggttgattgagtcgttaatgaagttgtgcgagcgtatacgggctgacgctatcgtgactgccttgtgaattgccacatacgttactcacgttcaccgttatcgtacaaaccgtcatacgctccaaattttgccaac

SEQ ID NO: 2229 - DNA, 640 bp, Unknown
  Description of Unknown: unclassified Luteovirus sequence
aaactcgagacccagatggcaatatcctctccctacaccctggcggtttgaatgccatgggccgtgacctacagcagttcgaaagggatgctgtttataagatgtgggtcgagggacaagcagaggatatacggcgaaaacagattgagactgatgccgcctcagcacgttctatttctgagaacgactaccgccagataaaccaggaaatacgagctgccgagctgcctaaccaaccgaactttgtataccgggacgaccctattgtgaagcaaaacagcacgtctgatttcattgctgcacgtagggctgatttcgatgaacaaagtgtatcggatttgaagtctaatgcatcaactcggacaatcactgggaatcttggtggtggcaaactgaagaagaaggcgaacgaccttgatgatgttgaggacaagatcttgaaggcattaccagaaattgattataaaccttcagaaatcctcggcgtcaaggcacggtatcatggaggatgtggcaagtggagagatacctttgattcttccatgaattgccgttgttggatgccaaccctcgagtggcaacaagttgattttcaatacaaggggaaagcatccaagaatgagggaaagtctattatttc

SEQ ID NO: 2230 - DNA, 641 bp, Unknown
  Description of Unknown: Agaricus bisporus virus 14 isolate AbV14-003, partial sequence.1 sequence
attatttatcggttattcgtcgtcttggaccctaccagggcacggtgatcgactttggctcgatatagaatgcgcgggcttgatgcctactagtccaaaagactaggaagagcgacattttcttctgtacgatatttctatcgtctgtcttgattgacgcaagacactacgtgtattattagtttcttattctcttcagatttctcgttccctcacgggtaagactgaattacagggcgcgaccctggagaatcaattatccttccggagcttccgcccccactgctcctctcccctcctatttgtccgtttaatcgaaatggtccgcgtctacgtcagccagcgagcgttataaatgcaggccgcccccccatcactcttacacacaaagacaattacatcatatgctaaactccattgactagagctctggatgtgactcgcacttgcctcgtgattaaagatcgaaatagcaaccggtgaaatagtctagtacttaatgactcgtccgagaagggcgacgagagcctactagctatgggttatcctatattccgtgagtttcgacggcctgaccctaggctttgcagtatctgttgcgagctaccctcattctttggtaactcaagcaatcaaatcgc

SEQ ID NO: 2231 - DNA, 641 bp, Unknown
  Description of Unknown: unclassified RNA viruses ShiM-2016 sequence
cctggcgaggtgatttttcttccttcattgttgcgcgtaaactctgcgcgtattcgatgaagggtcttttttgtgtagctttaagttttcccgctcaatcgggttgattatatgcatgttcctttggaggtcctgtaatatagactgcggattgtggctgagccgtcatttagatcgttccctactttctttatgccttgctggtagaagccagtattgaaaatattacggcgcttattgtattaatttaacctagcgaattgctttgttacacactagctggcatgcatgcctaaatgcaaactcttaatgttcgtgcgtaaccatagcgcacctgcccatgctcagatagtgtggtagctcctggctagatccaggaacagttgtagtatagaacctgctggcacacagattgtgccaaccaagtcaacaggtaggcatacctaaatgcaaacccgtgtagaaactttttggcataaagattgtgccaaccaagtaaacaggcctggctgacccaggactatgcgttaaaggtgttttcggttccgtggtcctgagtggcctacacgacgggcgcatagtagtcccctagggacgtgggtgcacactatggtgtgcatcaagacaataagccgaacccc

SEQ ID NO: 2232 - DNA, 642 bp, Unknown
  Description of Unknown: unclassified dsRNA viruses sequence
gtcatccaccgaccggtgggtgtttggcttgcggggaaactcactgctatgcaggaatggaccaaccaaacacacaagacaaacacccactggcaccccgttggtgctcagtcggtgtatggccatcccccaactccatgcaaaattaagggcttgggggatgctaattagtatagcacacaacgcaagatgtcttgccacatgcgtcccacccgggggaggagttccactgcctacccctcagggtttatgaggacgtgcccaaaattcggatgcttggtacatcagccagatgtattgggcatgccggtgctaagtccaagccacgggcgaatgcgacctggaagcttggtaaatgccgagagactgcaacgggctagggggtgccatttggcactgcgttgagcaacctgaatgtggtgaggtacagtccaacagctaagcgagctgagatgatcacatctattgcgtttgcttctaggtgtgctcctgcgttttcatccctattaagggctgtgttctcctccgtcttcaaactgttccgcattcacttgattcagattttagtgatagcgctttatttgactcatttgtgtgcgtttcaatctgttttcaagacggaccgatcgcgtgaatctgggc

SEQ ID NO: 2233 - DNA, 642 bp, Unknown
  Description of Unknown: unclassified RNA viruses ShiM-2016 sequence
gttttacctcactaaattaatagtttcaaacacgcaatacccaatctactagttatggcagcagcagcagcagctcttttaggtggctcctccattggagcagcctcacaattaggatctacagcaattagtgccaatgcacagcgtgaaatttctgctaatcaaattgaacaacaaaaatgggaaatgatgagaagagaaggagcatttacatcgcaagggctcccctctttcttagcttaccaaggtggcaatgcatatgtacctagaaccgttagccatttaggaggtacgaattatggtatatcggggttcaatggaaacaatctgccgtattcaccttcactcaccaggcagatgtatggcttttacaacgatcctttgcgatcaaggaccgaggcacctgccggtcccgttggtgatccgcagtttcctggacaaaccgacagaatgggattaggagctggaaggtatagtgcagttccaccaccaactcacatcggaactcaaacagaacgaacccatttccctagtagaacgtttgtaaacagtaaccgactttaatagatacctgactcattgagcttcatctatcgcaatacccaagtgattgcgaaatttggaattcgtgaatcattcaaa

SEQ ID NO: 2234 - DNA, 644 bp, Unknown
  Description of Unknown: unclassified Cilevirus sequence
tttcatacatgagattggtatttgctcatatggattttgaattttatctttggttttatggatatgacgactcttaatcttcatcggcagttacagctgcgcctcggcccggactgtatttggtggtacctggaatgcccacacctttgaagacagaatactctatttcatatgtcgcaatgatatttattcatattttgtgtatcgctcagccgattttggtttgagcatttacacacacttagtttgagattatctgtacgtttatcacaatgttgattgacgttttagattctctcacgtatagtacgtgggctataatcggttaaaattttaaccgtattatttcctaacatattcgagatgacttgatctcccgtccttctcagtattgctataccgtttaacggtgttgagataaactggcgtcggtcgattctcagttttaccatcttgtttggtaactcttgtatatatgtaaataggtaagggttcttgcgtgccaagagtcttctgtattaatgtagtggactgctgcttcgatagagttgcagcagtacttgcattgatatgtaaatacacagagatacatatcaatgatccactccttattatggagacaaatcaaggtatgagttcacaca

SEQ ID NO: 2235 - DNA, 644 bp, Unknown
  Description of Unknown: Raspberry mottle virus isolate HCRL Glen Clova, complete genome.2 sequence
gtcgttttcttaagtggggtagttacgtcttaactagtagtttccagcccaacacgcccgttcctctcggtgctttgttgtcgcctccatgcatcagcgagaccctatcgtcacttcgtcgatgttagtttcttgtcctcgatgctctagcttctacgcaaaatttttcgctctccgttagtttcagcgatcgatcgtctcattcttcatctctctccccttttgtttctgacggtctcttctttcaagcttccgagctcggtggttctttagttaccctttcgttgtcaaggtctctctctggtctgctcctttctcttcgcgcgtcgtccccctcagcctcaggtatacgcactcgcctcctagattctattgttgtgtcgagtttgtcccctgctatacacttttcgttgaagttacctaactcccgcggtgagtcactgtcgtctactgtgactttgggcgctcgggtactctttcttccgaagggtgtttataactccttcgcgatcggcacgtccttttcggtcgtttcttcgttgtcgcgtgtttttcaaaaacgaccagagtcgcgtttcgcttaccgtttctcctcccctgacgtgtctctgtcagaccagtttaggttttgtctaccgctaatc

SEQ ID NO: 2236 - DNA, 644 bp, Unknown
  Description of Unknown: unclassified RNA viruses ShiM-2016 sequence
ggtagaaacccggttcccttttggtggttgtgacatgccaccagctcaagtgaaagaactccgagatctggtatatttccatttatgcgaatatttggttatgtacggattgattcttttgcacttgagttcaaacgtccatttgttcttccaaaaacaaatgtttatgttttagtgtcgtcttgtatgtatgtgtgtatgtttgagagtatgaatgttatgagttgaaaaagttacaaacacaagtcgtgttgttgttgttgaagttgttgttgttgttgaagattgttgactttgtgtatacaactttttgctcactgtatgtatttttgaactgactgtacggacgtcgatgttatgattaattctaagcgtacctaaagtagtgaactttaagatatatcttaatagctgatgagatgcctatgaaatcttggtaggatgattaagttcgatctatcgagttagtaagtggcggtcagtgatttagcgtagctctgtatcttattgtaagcgaaatgtgggaaagcatgctttgcatacttagttttatgattaacggagacagactttggacctgacctccagcccttgcgcagccgctggttgtattttgcgcacccccctgactaattgctttcaaa

SEQ ID NO: 2237 - DNA, 644 bp, Unknown
  Description of Unknown: unclassified RNA viruses ShiM-2016 sequence
ccgaccattgcggtcgggtgtacagggggtgcgcggcgttcgggggcttcggctaccttccgcgcgtgttttagggggcacatggttgggacgaccatgtgagtagtgtgcggtgctcacgcgaacccaggcgttctggccgtgaggtggtcctacgtgaccacgcagttttggggcttgtgtagcttgttcatttgccattttggcgctgtcgggacggttcacgtcccgactgactcccgtagggtcactaaagccccgtgccactgtaaaatagggaggccggtccctgcacaccgaattaccttcctcatcccacttcccaggtggggtgtacgagccaattagcgggtgcgtgccagcgcactgaaggtgaaggccaggcggatgctgttacccgcagctatgcaccgctcacctgccgtcctatccggatgaaggcgacctccagcatgattgcccagtagtgctgttggaacccgaggcggcagtgtggatgactacggccctcagatccccggtttggccgctggggtgcggcgtgaatcaagtaacggtgggtgtgccgtcttgtagcgtcctgaggtgggtacacaccaatgggtgggtcgtgactggggtccgacctagggcaatttctgcgc

SEQ ID NO: 2238 - DNA, 645 bp, Unknown
  Description of Unknown: unclassified Picornavirales sequence
cctagggatacagagattttggacaattatttatattacagcttatatttggactaacagctggttttgttacttggtaatacatttaacatctaaatccaactgttaggaccagatagagtgaggctttatacacgccatttgtgcagggcctcatgggactgtacaatctaagagaatgtataaatgccttagtcgtatttatgattgttcatcaaaaacttttgataaattttatatctattttaaaatttatttaatgcatttaaatatgaactaggagtaaagttctatagtgaatagcttatctggggtagcaacccgtataactatagaagtaatatgcctggttcctctatttctgactgtgtaggaatttttatggagaacgtccaactaacagtggcgcttatcctaagtttcgttagtaaacttgcctaaagcttttcgatcggtaagactcgcctagttgcgacgacagatcacaatgttttaaatttaagggagatagtcctcttatctagtgattcagtattactgtgattattactatatctattaagcgtaacgaccttagtacgtatagtaataagagttctaaatgatgaagatttgaagaaatatcccgtagtcgtattgttaaat

SEQ ID NO: 2239 - DNA, 645 bp, Unknown
  Description of Unknown: unclassified RNA viruses ShiM-2016 sequence
ataaaattccgtacaacgattagtcgccgattaggtgctttgtgaggtattcacccaggcctagtttcgtgcgcgtgctaggttgctttggctataaaagttggagtagtataagcagcaaactcctatatttaaccctcattgaggggtacttgcaatggctgattgccttttatggagggtgcttgtaatggcctattgtgcgtgcactataggttcctaagggtataaaagtattacttgtatgttccattaaaaggttcagttcctcagggtataaaagtattgcctgtatgtctcatgagggagtgcgacaccccccttttaagtttcagtttaacttttaatttgatgatttaggttctggtgtctgaggtattacaggttgcgcgcctggacagcacatgttagtcatgtattatggtgtttaccaacacgtatctttgttcctaatgattcttttaggtcaagataaggaattgtgtgccccttatctgataagctgaacaccttgggatacggtcctggcgtttagttacagagacacatagccccgtggggttccctcgtatcaaatcgtataagtggcgaaatgaaagcttagtttctttgaaactagcaagtaagaatagccaaccctaagaa

SEQ ID NO: 2240 - DNA, 648 bp, Unknown
  Description of Unknown: unclassified Ampelovirus sequence
atataaaaactaaaaaatttttaagaaaaaccaaaaacagagtgtttgtttgacttttcctttatttgtagtgagtcagttgtaatttcgctgtttccactatcttatttttatcgtgtttttccagtgtgtagttaaagtcaagtcgttgatttggtgatagtgtgtcgattgcgcaccttgtaccggatttcccgaattgacttattagagtcagtaggtttgtatcggtctcgtttgtttttctttgtaactgttcctgtctgcttctgtaatttttaatttcgggtttatacgcatttgtgtattcgtgtggtttgttcagtttccagttgtaacctgtattactatttgggtttgtcttattaccgtctacgttgttgtttggaagttcccggaaaccactttcttcccaatcaacacacgtcagttgttgttcattctccctgtttgtttcgctattcctgtcagtagtgcatccactgtcatcctcgaacactttagttttacagtttcccatttttacttcctaacactcttagtctttccgttcgtttaattcctttttgtgtttcaaaccgtctgtggttttaattttcctgagatataactttttgacgcagtaatctttctcttacaatcttcgaa

SEQ ID NO: 2241 - DNA, 648 bp, Unknown
  Description of Unknown: unclassified Picornavirales sequence
aatcatcactcatcaaacgttaagtcccctgtttatacttctcgttatcattactaaattagaaactcatctttgcggtgatatataattgtcgtggttgtcgattatatattgtcgtgctgtaggatatttgtcttgattgttgagatattccaatcaagcgaccttctatctaagttgtcgagcatatgaatcgcatagtttattcttaattgataccgacttaccctcgccttcatgtctaaataagctatgtctcatatgtgacggattacagcactgttaacgttttgagacgatatataaggagacctaaaggggtcctcctggttttaaattgagtacatattgtaccgtaccaggcaaaggcctttaggagatctatatattgtttcgaaatgttgataagtaaatggtttctcaccccctccccgaaccttaacgtgattgcactcatacataagaatctcatgtcctatttgaatcatcaggattagactcttttgcatgtttaatgaactcggcgcttaaccacgtcgtttaatgaattagaacaacccaatattgtaggaaaaactttcggtgatataaagaaccgatgacaggtgtcaaagacactgaccgacggaaagacgtcacaacaaacta

SEQ ID NO: 2242 - DNA, 649 bp, Unknown
  Description of Unknown: unclassified RNA viruses ShiM-2016 sequence
gcggggttttccccgcatcgtcttttcaaccttatcgaatatctgtgccattgtgtcatggctatttgatattgtatgcttcttttgtgctcgttcggcaatgacctttccgcacgatcactttggcagctttcttttcaccttccggtttctttttgttttatgttagtttgttttgtgctgttttgctgtatgcgttctctacctatgtaacgccagctaaatgtttactataaaaatacttttcataagttagttttaaatgcattccggtttcggttttagaagtctttttgttgctatcttaattatgtatgctcctagtgaaggattcgctctgctagtttaaacttagtatgacatatttaattattttagtggcatttagcaactccattaatgaacgtttgtaattaggtgagatacgtaggtctcctgtaatgtcctttgcgtaagttgcttggttagtcccttgcttcttagacacttcgtgtggtggacctcttgcactgactgttgaggttgctcataaattacgaattagtaaggttggttttaggactttttatcagctttttggcccctttattataaaagctgtaggtaatggcctcatccatacgcctaacattgtttaatcaatgtgaaa

SEQ ID NO: 2243 - DNA, 650 bp, Unknown
  Description of Unknown: unclassified Picornavirales sequence
tacaaggcctatacagaccacctagatcagcggaacttaaagagaacgtataattatcaattattcaaacgctgatctaaatcaacttttaaacaattaaccctgacacgtccatcattgtaaaatataattcatattcacctttgcatgagcagttacgagtacgaagaaacgaagaagtttatagagcgagtttatgagaagtttaaaacgcacttgcgtcatcatccgttgtgcacttctcagttaccatcaattcgacagtgcctgacttgctcagagtacttcaccgcctatttggactatttggtacatattttgtcatctttaccaatatccagacgagaatacaagatccttcgtctcgtcgaaagcctacaattggaaattgcagatattgtagaggctggcggacttgctcctttcatgtttgtattttcttccccttctgttactcgtattgttggcgaagaccttcatgaagtttggtagatcacaatcattcattaatatatcattattcattgtatttaacctcattctcctgtatttatcaattagatatcgcaacgaacgtcgaaagaagctaaaacagaaggctgaggacattcttgaatcttcgcgcttgaatttgtttaaagacgatcacg

SEQ ID NO: 2244 - DNA, 650 bp, Unknown
  Description of Unknown: unclassified RNA viruses ShiM-2016 sequence
ccgatctcgcctctcggcttggactaacctggttatcactaaccagtaccgtgtacaagtgactccacatgtggagactcctgtcttcacccgttaagtggcctttaactacacgctttgacttgttctacgaacgaatcaggcctgtagttggggttgccatcctggagtagcattcttccttgtcttagcctgttcttgaacagaattagactaggaaggcattgctcccagatggcttcctcccgttcgctggagttctcattagaccccagcagacggataagcccacctaatagtggtcattcaccattgcattgtgcgtaagtgaatggttgtcagaagtgacgtgatcgtgtcctctctcgaaattgttcttgttcaagagagagctcatgctgtgactttacaaccaccggtgtcctatttaggacaggtaccggggggtgcagcccaccccaaaaccttaacaggataggactagtgcgattgggtaaccgcattatcctttaccaacggtaagggagtccgaaatacaactacctgctaacacgaaaacaaccccaggtattagggtcgttcccgtgtcgaggcgccgtactacttgtcctagcgaccgcaaggtcaatggaaagtcggacttgaaggct

SEQ ID NO: 2245 - DNA, 652 bp, Unknown
  Description of Unknown: unclassified Picornavirales sequence
cctgggttgatacccagtggtcatttggacgctttggtaaggaggcgtaattatccttcccatgtggaacctagtgcttaggttcttttatatgttctttgtttgtcctgtatactttctatcgggcaatcttgtagcctaacacaatatgtgttttgggttgcctaagataatttcaattttaaccagtccctatcttggggttgtgcctttctttctttcttatatcttcttaagctgacttacttgctaatccgactcctcgtcaacgggagggtaaagcagtatcactagggtattgtgatgtaggagaaaaagtaagtaggaattatacatgtaacgaaagtaatttggtactttaaactctcttaatcccaaagtgtggtattggtcatgttggagtaggctacgggtgaaactccttcacatttagtaatgtgttcacacgctaacgctacggtagaagacagactaggtcttattctcaacgtagggggacgggtgtatgttcatgactagccacatattaaggttttgaggggctgaattatataagtatgtgtattaattcttggtactagtccctggggactagcccttttctaggttgatattagttttccccaattttaaaacatatgagatttacgac

SEQ ID NO: 2246 - DNA, 652 bp, Unknown
  Description of Unknown: unclassified RNA viruses ShiM-2016 sequence
gggccacgtcggaaaaaggtaacaaacgctacgaagccatgtacgtcaatggtcaaaatgacgatcatggtgtagtgattaaaggcataagaggaagaatagtttatgctgaagaacaagaagactggatggacatctcaccaactccaaagaagaaggtgagatcgtttaccggagaatctctttcttcgaagaccacaactctcaccccgcagttcgaagaccaacctccttttttagaggaacgccaggcccagcaaaagctgagcctggaaacgctgactacagccactgccgaactcagtcagaaggacaagcagatccttctgaacgctctgatgatgaagactcagagctcggggccgagacagaatgctactgtcttggatacagcacaggaagaacctgcaccgagccaatctggctcgacgttccagccaccgagaacccaggaccgggttacgaggaaggcctctacgcgttaccacgcgtggactcctgcgcagaaaagaagagtttctgtacgcacgtccagatcaacgccaaatcgcacttaaatcacatcccccctactcaacacgaacaacaatatgtcgaagaaaacatcttaagacatctccgctcaatagctggtgtttactgctattccacc

SEQ ID NO: 2247 - DNA, 653 bp, Unknown
  Description of Unknown: unclassified Picornavirales sequence
gatccacgaaattcaggattgtgctttggtcaggcaattctgaaggagagatctctgtatcctggtatgggatctcgttgacctgatgaggacggatataaagtgtttgcacctgtcacgtagtggggtcattgcagctattctattattgctctggctgccgcaaatgacctaggctcgtgtatgtgtttatgcattcacactctgagaatcaagacgtgctctgtaaccatcacaaattctcaccgtactatctcgacttgtcttgaatggacatgaaatggaacggaatggacatgaataagaaattcaattttggatatgcacgactggcgactgcgttgtactgtctttcctcttatagggctgacacagacgttgctttaaagcgtgaagaagtagtttccaattttgtcttaggaaaataatctcgagcgattcgcatcctgttagggaataggattgatgctccttttagttcttgtatactgatgactcttgtgaatggaatgattcagtaacgttagcatccgcttagccacgggtatcgattaaaactggctcccacactagtaacaaggccccatccatgttcaagagcatgtagttggatcgcctggtgtcagcgaacagtattcagtttttctgaatcg

SEQ ID NO: 2248 - DNA, 654 bp, Human orthopneumovirus
actcaattatcaacattgaatgacaggttcacatatatcctcaactgcacactatatctaaacatcataaacatctacactacacacttcatcacacaaaccaatcccactcaaaatctaaaatcacttccagccattgtctgccagacctagagtgcgaataggtaaataaaacaagaatatggggtaaatagatatcagttagagttcaaccaatctcaacaaccatctataccgccaatccaatacatacattgcaaatcttaaaatgggaaacacatccatcacaatagaattcacaagcaaattttggccctattttacactaatacatatgatcttaactctaatctctttactaattataatcactattatgattgcaatactaaataagctaagtgaacataaaatattctgcaacaaaactcttgaacaaggacagatgtatcaaatcgacacatagtgttctcccattatgctgtatcaaatcacaatcctgtgtatataaataaacaaatccaatcttctcacagagtcatggcatcacaaaaccatgccaaccatcatggtagcatagagtagttattaaaaattaacataatgatgaattattagtatgggatcaaaaacaacattggggcaaatgcaaca

SEQ ID NO: 2249 - DNA, 654 bp, Menangle pararubulavirus
caatcttgactggaaagtggataaaattctctctcagcagtctgttattacccaaatcaaacacgagcaacatgcaatcaaagcaggaatagccactttggaaggtcttatcaccaccatcaagatcatggaccctggagtaggtgatggcgccactgcggccaaatcaaagagattatttaaagaagcccctgtggttgtgagtggaccggtcattggagacaaccccattgttgatgctgacaccattcaactggacgagttggcccgcccatctcttcccaaaacaaaatctcagaagtccagcgctgcctcaccagcggccctatccggctataagatgacattattggctcttatcaaggaatgcattcccaatcaggcaaaacgccaaaagtttgaaatgcaagttggcggaatccgaaatgagcaagatttcaagaatctccgccgagagataatccgcagtgctgcccaataatcattttgtacgctactacatcctgccaattcagcacaatttgattaatcaccgcaattaattagcaactattaatctcttcttatgccaggctttgcttatctgcgactcttctttgagctttaagaaaaaataagtgagcccgaaccagttaagaagggcacactccgacc

SEQ ID NO: 2250 - DNA, 654 bp, Unknown
  Description of Unknown: unclassified Aparavirus sequence
taaaattgtacgtagggacttttatgtccctacgtacaatttacgcagaaattagcgatataatttcaaaattgttttgtggcgcctgagcagcctttttaatggtaggagcgtcgatcccccgtatggagtggagaatataaggctcagctaggatgacacgcctgtacactgtcgacattagttaagttacaattacacgtcttttgccgaagaaaccattttagtcaattgattatgatttttgtataatgataaacagtgatgaactgtataactcatcgataacaaaacggattacgaacctatttgtaactatcttgatcgaagtctagtagatccccaatatagccctgaaaagcttgagggacgagatagctctataaatagacgtgaggctttaaatcctgataagtacattacctgagaattcctccttttggagtttgaatttatataagttagtaccaatagttaatatcatttaagtatgttattattgctgaagacatgtatttcggataataacctctacattgatatataaattatatgcaagtctcggtggatattgcattatggtcgcagttaacctgtagcttatatattcctgtgtcggagcagtggtaatggagccggataatttcgccaaaa

SEQ ID NO: 2251 - DNA, 654 bp, Unknown
  Description of Unknown: unclassified RNA viruses ShiM-2016 sequence
gtacgtctttagacgtacagtcagacttcttgtttagttgtgttcagttcatgttcaggtttactttatgagaagtgacctacatgtatttgacgcagttaaatgcgatatgacgatattttcgggtgaagaaaacacctcccattttgttgggtaaaaaattacattcttgtttttatggcctattggcactgtagcaggttcgagccctgcaaggccagtagatgaagaccaaaaagagtcattttgtataggactctgaatttatttacggtgaagttagatagaacgcttgcttctgaaacttatagagtacgaacatttgcgccagttatggcactcctttggagaactggtttatattgatgtgtgagacttgaggactcgatcaatatagcaaatatcacgtacataatattggaaaagatgagcaaggccagtaatctattctgatccctttgatttatttagggtgtataatttgatgctgacatttggtaacgggatttaatttaatgtactgctagtcccatagcgtgaataacgtttagcatatttattactagtatcttgggtcaacagccctgggtagcgcagtctacggagcgttaaaagtttgttacgaacaaccaattttggtgtagggggagcaca

SEQ ID NO: 2252 - DNA, 657 bp, Berhavirus beihaiense
gaatccctcataactcgataggctccgatttttaaagcgttgtttcctaagaggggtatgacgggtgagttacaaggacatgcctatggggtaacattttttggttttttggtttgtgtttgtatacgcttgcttatacaaaatacaaccaaaaaaacaaaaatgtcaccattagacacgatcttgtgactcactctgtcgtacccccattatcaaacagcgcgttaatgagcttaaaaaaacgaaaacacaactcaggaactttgcaaactcctaatcaccaatattcggttcttatcctaatataggttagacataatggcgaaaaatgtgacttttgttccaccagtgaggtccactgagacagaggatgagactcttgccactctctcagctatgagagatcagtggatcgcccaggacggtcttcccctttggagatctcaagcaggggtaagttagtcttcctagtgccatattatatcgatatgaggtcattaacattgctgaggtactaattcgtctcgtttatcctttcaggtaaaagtggcaagagagaaggggttgctcgcctacaactcgagtgccaagaagtaccagactgcaggagatctaggtcaggccaatgcctcgcagttcgcccaggccgctcacaag

SEQ ID NO: 2253 - DNA, 657 bp, Unknown
  Description of Unknown: unclassified Picornavirales sequence
ctcttccgatcttgggggttcgcccccatgtctcatttcaactagccgtgtgtctagttaacgcaccgcctcaccctggtcgttatcgggtcggttcttgcgaccgttagatcgtgagcgtttctgaggatcagttcgtataagttctccggtgtggcgaccgtaaaatcgtcacgtcccatgcaatagatgacgttaaactcgtttgccagttacataaaggaatgttgttacttttaaattgtctgttacatttaacatcttgccagtatgatgctactgtacactacgggtgtaggaaccttgtagtgtgacgtatcactcatatgtggatgggtgctccagacctttatggaagctctcagttagtagtgatccttgacttcattgagccctggtaacagtggaagtcaagatgtatatgttgctcaacacacttcggtgctacgaagctgtttgtggaagtactggcgaggttcattctgaatcatatgtttgtcacatagtcagggagtgccgtcgcttacgacggaccctttttctttataattacaaatctgtgtctcaagtgttgttggctggttttcttcttctgttttcattgttcatatatatacgtcagagtgaaagactcggtatatacaaaactgatccaga

SEQ ID NO: 2254 - DNA, 658 bp, Unknown
  Description of Unknown: unclassified RNA viruses ShiM-2016 sequence
agctgctccgccttgggcaggcgttgtatgcaccccgccttggacagcgtaaaggtccatttctgtccagggatgacgtaaaaagccccgcttgggacagcgaaacagtcctattccggacctatccgggatagcaaatgcatgagttgaaaataggtatgtacaacagattactgcatgtttaattatttatatgtttctttttcacatgttcagcattgtacatataggcacagccctcgcgctgtactggtattcaccagagagttagccactcaacaaaacatattgccacttggagtattaagcgaaacccttgtggtatgaacataaatagcttactgaaacaaacattaataataataattctaacaatccatcagttaatgatgggccttctttttctgtatctcagacgagtaatgagtcatcagcacaaaatgtacattttattgatggagactcgccatggacttatgaggtttcacacagcaccgattcgacatccaagcttacaggattcgatgacgcggacctcggatcattcttatctcgaccagttaagattaaagaatactcttggtcaccaactgttcagttgtttgaaacatttaacccttggactgagttttttaataatgcggatgttaaagataaa

SEQ ID NO: 2255 - DNA, 659 bp, Unknown
  Description of Unknown: unclassified Picornavirales sequence
aggtcttaagtcctggaaggacattaaacttaacccgtcaggaaacttcttttcctgtttttccgtgttttacgttaaaaatatggagtcagtggaacttactcgcctcgaagatgtgatccgtaaatctctttcattctagtataaaatggagattctatcaggctatcattcgtgaaacggttgtgtttttacgcatagatcagtaaggcgccgtgctggcagccccagcaaagactaacgaaactagatatatcctaaagggcctgggtggaccgaatggacgaatataaccacctgctgaaaataatacaaatgcacagggacctgttgcccctattgcaaataataacaactaccctgtggcagttaccgctggtgaggatactcacactgcatctgccacaaccggtttcacaaccgatgctaacatcgcaaatgtagcaccacaagcacctgtaggagttgaccggctttttcttgcatcgagttcggacaattacgaacaggatatcaagaccttcttggccaaaccggttgcaatcaaatctggaaccatatcgacagccgatgttgttggtactcctttgtatgctgctaatttacctcatgatggtctctctgctagtaatatcttcttaaagaaaattgaaggtttt

SEQ ID NO: 2256 - DNA, 660 bp, Unknown
  Description of Unknown: unclassified Picornavirales sequence
gcattagcccgacttatagttggcactttgagcagtgcccgctttcgaaataattgtgaagattcaccctccatcttcgaccccatatctacgcatatggcgttattatgaagcaaataccatgtccctatttctagctcatgtgtattttcacttttattatctcatttgacttattctaacgcacattcttccattttcttagtgtgttatttaattatcaaatacaatacaaccccccctatttctacatggacatttatgtccattttgaccgattttttgggagggacaatttatgcttttatagatttatcatgggatagtggggtacaacccactactttatgttaatcaattctattttaatagtacctaaacctataattctggatacgcgttattatacgcaagttataaagcgtctatccctgtttagaaccatgtttctatccaaatacgatgacatccagaattgcatactcatgaaccccagttttaaattgaatttgacgatcccgtaaatatacttcagaatctgttcgtcctgattttatacttatgtagggtggtttcatgataaaaactataaaagaacgtccataaattgttttcccggaatttattctttttaaattttcctgaccatttttaaaccaa

SEQ ID NO: 2257 - DNA, 660 bp, Unknown
  Description of Unknown: unclassified RNA viruses ShiM-2016 sequence
cctatacgtcgaaagacgtataggtagcattgtattatttgtgttgattagtttactggttatcacaaactagtatactgctgagacatatttagtaatttttaacgggtgatttatgagaacacctctccaaaaggagtaaaaaatctcattctttcaagctgtattcagctatcaaaaaacgttgtttcttcaattttcttcaaaaactgtttgatgaagttagttagattcactgatctgtgtatttacaaatccggtttaccgggaaatttggtacatttaagaccacaatacgacctaatgaattttaattgtaaagtaggcaaataattataagtcctatttttgatttgaattgtggaattaacgttttagggtgaatgaagtctgatgatatcgtgtagtgataaaagagccctgagaagctcgctaccagtcacagatgtatatatgtcgtgtcggacatagtcgagagacacataaggcactattcggttagttatagttaaagactacgctataattgaggaagatgaccggagtaccagctcatgcgagtaaaggtacgcaatttcaaatacgatcttcccgtatgttgattggcaagttaacatactatatatattttttgctgctacaaacaacaataatattaca

SEQ ID NO: 2258 - DNA, 662 bp, Unknown
  Description of Unknown: unclassified RNA viruses ShiM-2016 sequence
ctgcattaatttgcagcatacatatttgacccagatgagttcggcctgggataacaatagtcgacaaaacttttaacccttttttattttcagggctgaccaccctctttcaaacggttagtgattgtctaataccacttgattattgggcaaagtctttttagcgtctgtttatgatttatttcattgtgctaaaacactttttgactctgtgcattcaggtatatcgtgcattgaactttcatccttgcattgatagaacggatttcatcagattcattgagtatttcttgatacagctcagtatagatttgcttgacgtggatatcagcccacgatactgatgtgattgattagacgtagtctgtcattcgagaatattaatactctttgtttccaggtgtcttcttagtaagcttgtctaactcagatatcttagtgtttgttccaaggaacgaatttgagcctacactcttgctaaccactggagtgtacaaactttgaggactcgacaccttcgaagggcttgtgttttaggccatgggacgtctccgaaccttataattccttgattagttgaatatgtagctcaaggtggattaggcgccacccaactatgatttgaacagttcaaatgagacattaggccgatcatatatact

SEQ ID NO: 2259 - DNA, 663 bp, Unknown
  Description of Unknown: unclassified Sopolycivirus sequence
ccttttgatgtttgaattctaattccgttctcgccggagatgagtaccggcttgagtttaattcccaggtagcgcgagccgtgagtcagcccagacaagcgcagtagccctacttggagaggttctccttgagcgaccagaagctggcattgaatcgagccacataatgctgagagtagagggatttgcattctattgtgaaagcaataatttgagagctaagcccatcacattgtgcactcggaatattgtgcagcgcgaaaggttagtaacattaagttggcgaaaggttagcgcagcaatgattggtggtaacgctggatcttattgtggaagcaatggatgaatatgaagttgaaatcaggatcaccacacccccgcagcatagcggtaccgtactgaatgtcacaatccagtgatgatttgaagcctataacgggcggacgtgtttaaatggtgttttatgtggatgttagttcgccggaatgtgcagctccggatatcgagtcgaagattcagtgaccagtggagcaagcaacataggtaactatttcgtatgattttactcacaaaattgcactgggcaggagcttccaaaggaaccttctgcttctcgtaactgcacacaaactagatttcttattttcgaagagcatatttaaa

SEQ ID NO: 2260 - DNA, 663 bp, Unknown
  Description of Unknown: unclassified Picornavirales sequence
ctgcaagtcgtttagacttgtagagggaatgttagttaatagctgtgcacatgtcgtttagactgtgtattttctagtcaccttaattggtgcataataaaaatactgttttttgttattgtctgataggactttaaactatcaaacaaacctttcgtagatagggtcatttctctgaacttagatgagaaatgatatcaaactatttagtgaacgatggtaacgatgttgtgatacttatcacaacattttaatccatgtcgtctcttaattgagacggataactacgaaccgcactgtttaattatagtgtacgtgcactcgcacacttaccaaccattttagtattggttggctatattcttatgaatatattgtaatattgtagtataaattaaactttgagaccaagtgttgatatagttttaattttgtataattggaggccatagcaatgaggccgttgtatgctttgaacaaaatgtaaagcctagggcgaggaacttaatagttcggaccctggtatttggagtagaagatataaaccgccccgttcaaatgggtaaaccaatttttatgctgagcagaaggccgcctagcccgacctgcaagctactattcaattgacctttggaagctgagaagatagtcaatcaagaaaaa

SEQ ID NO: 2261 - DNA, 663 bp, Unknown
  Description of Unknown: unclassified Riboviria sequence
aatctcaatcttctattgagaattggtttttagattcattttacgagggttagtcaatgagattattacgaaggagtcctaattgtgtattctgtagcaggattgtacccatcccgctcatactaataaacggaacacgccttacgggaaatccgtattgaagtacgataaaggctgagcccggccttatcaacgtgagatctgagaagtgaagcacttgcaatgtggatcttcaagagtgattgttatttgcacgccagttcaatccagattacggtgcaaatgattcataaaagtatgagtacagatatctgcgcaaacaccctagtattcctaaccctcccctcttaaagcgtctacgggcgttgcaggtctaattgaaaacagcggtctgctatagagggagaattagacactaactcttttctttctcgcctcggagctttatagcgatgtgggaacgcgaacggtcactctctaactacttgttggttttgagagagacttagtacctagatacctaaggtgagaatgaacattgttatcaaaattataaaaactgccgaagcgctaacaacgtgaggctgttgttttctaaactttcttgacccataaatcgtatttagtcgtcactaatacgtagcaacgtttgcagcgtccctt

SEQ ID NO: 2262 - DNA, 664 bp, Unknown
  Description of Unknown: unclassified Mitovirus sequence
gatctctctcaccgaacctggccccgggcaaatgccctaatccagaggtgaatgtgtaaagtctcaggccaaatggggttggagaaggtatcaaagattagattaataaatgctttaaggcttttagttaaacttcttgcttgattccgtccctggtgtgcaaaagcacactacactcgagaagaataagagctagataaccttagggataaggggatctaactccgaaatacactctccaacacccgtgttctcctcctccttctccggcagctttgcggctgtcgagagggtaaggaacgagataggtgcggattgacacttccagtccagtataaaaactgaacaactgaagtctatctgacacatgtataatgttttctaatttagaaactcatcctaagtggaaattagcggcgaaaagtcagctatggggtaacccagatgctgtttcctaagctaaattcgactctccaatgttgaccttcttaacggacgacctcttaaatgtgaggaccctattaatctgactttgatcggattagaatgaagacaccaaagggtaaagagttggatacggggacagtgagacactgacctagtaccaaacgctctagcacctctggggtttaagggagtttaagcccttttaatagtagtaaaa

SEQ ID NO: 2263 - DNA, 664 bp, Unknown
  Description of Unknown: unclassified Picornavirales sequence
accaaggcataatcacattggaatacggctctgagtcccttttgaacggttaagaactattcaactgggaaggcacccgctcccttgtggcgatgtccaaggatgacaaaacacaaaacccaactctatgtttttgtatacgtatgaaatcttggtgttgttaaatattagcagccaagtaacgtaagacagaataggttgagaaaaccagaaactaatcagtaggacctccgaaagttagaccttctggcactactctgaacttattaaacgggatctctagcatctaaattttagtcgctgacgtaagcatttgctagtaagatactgtgaacagttcatcccagatctatgacccgattgaaataagaccatcttatgaacgaataacggattatatgatttgacggatagtctcattgacatgcacatagcgagtttaatatgattgaagtagcaaaccctaggggaccgcaatgaatatcatattaaggttgaagcgcactcaacccttgtcacgagatagtaaggacgttttacatagtactatagttttctcaaaactgtgtataggtgcggataacattgaaaccgttcaccgacctcatgggatcgtcctaggaaagcccatgttgtatgataaactaggcctcaatgtagcaca

SEQ ID NO: 2264 - DNA, 665 bp, Unknown
  Description of Unknown: unclassified Picornavirales sequence
tgcgggtaaactcccgcatgtgtgaatgaggcgatgtcccaggaactaactgccgatcctggttttaactacgatccgtatttgttactaatgcgatatccccccattgtttgcctccatgttgttttcaacgcttttggccttgagtgttatcaagtgttttagcgacatagtgggaagctacggctgcgtccccatttttgagtggcgacccagttttagtggccactctgtccctgaactgcgctataatgtgaatttatgttcacaaaaacggactgatgtaactgttaatgactaaggaatagtacctcactgaagtatcaagaccccgttcgagcggtgtacatatatggatggaaaccttgtctgagtcatctcgaatactaatcaatgagggatgtcgagtaagcatatcatgaaccacatagaatagtggggtttcggggttagaggctctctgcagcaatgtatctctaacaccatggccgaaatgagagatagagaccacgatgtttgtgtgtaagtaatgatgtgtggaaagaaaattctgaatgttggtatgatatcagtctaaggggagtggctcacctaagagctacccaaacatttcacagcagacaacataacgtactgagagtagttggaaggttccagaaatcagt

SEQ ID NO: 2265 - DNA, 665 bp, Unknown
  Description of Unknown: unclassified RNA viruses ShiM-2016 sequence
cttccgatcttgcgtaagcatgccctaagtatttgtggtggtctttaaaaagacatgattaatatgtaatatctccctttttaaggttttccctaatcagtcaccaccataatgccaaatgcatattacaaatggctttttcaacgttcgtgaaacgaattcacatccactattctagcgaatcaatgctcagctagtctagctcattgtgaatgttagcatcactgcagagcacatgtgatcatttctttgagcagagcggacccagtggcaatctgtctttgccggtttaaaattgtaccttaacaatccgcctatggtaacggcgtacccaggaccgcaaatccattaatgggataacatttcccatgttcttttgatattatgtgaacatgtaaatcttcaacaaaatatcacaatggctctatcaatctttcagcctcgacagttgaaagagggctctctagggatttatgtctatggcccctgtggttaaaacccgcccatccggaagtgtattgggactagcaaaggaagaatttattcaaatacctcctagttcttggatctgaccgggagttgatcccccgggtacactaaaagatgggacaggatctccactaccgcctgcatttaatagactgctttcccgactttgatatact

SEQ ID NO: 2266 - DNA, 665 bp, Unknown
  Description of Unknown: unclassified RNA viruses ShiM-2016 sequence
agtgttagtcacttgcatgaagagtagccgttgacagtatggcgatcatactggcgtattgggctttcacttgggtagcagtacctctgtgcctcgtctgtacgtctccctatctcgggagtctaaaaatagattcggtggttcgacagtttcgaccgagtgctgtgatggcacgctatctgaagtctgcggttgctgttggctgcaacagcgttgggcgcgataagtctaatatgtttgatgaatcacttttctttgttcgtatataaaaaacattaagttgctttttacccctatgtcttaggacagtaaaaattcatacacgcgccgtgtactaaagataggcgtattcatattctttcgttggcattttcgttaaatggccgacattcttcaaaataccaggtaagaaaccgcattgtgagctggaaattgcactgttacatttgaacctttttaggcgagctggattgctcatgtaactgttggaaacacacttcgcaaaaggtggatgatatggtataactggtcactattgaccgcaaggagcattatgtatagtgtgtgctctgtaggcagggaagtgctgctgtgttactatacacaagtcgtcctttggcgtggttgccattggatctgttataccacacacagttttaccactt

SEQ ID NO: 2267 - DNA, 666 bp, Unknown
  Description of Unknown: unclassified RNA viruses ShiM-2016 sequence
cccggagccctgcgtacctacgcaggactttcttttaacgtcacctcgacgtgactgaggcatttacacaccctcttttgaggagcgccattaatttgacttgtaaatgaacacaaaaccggcccccaaaactcaatgacgacaatctttagaatttaacactacccgcttttaaagtaggctctgttatttctattgaggataccgcaaagtttatctttcaaaacaactcactacggaagataagtgaccacggacttcatacaataataaaaatccgtttaaaatgacgtgcacaagtaattatttagagactcttagtaggatatgccaagatgcgttctcgcatatccatagtattaggacaatctcacttaattaatcaccaatcttttaaacttgataataaaatttgtatgaatgatacattgaccctgcgaaataaccttttaaaatacgatttaataagataataaaaattgaattgggaactcaataataaaattcttatgtcggtgttggcgaaggaaatttcaaatctatgacaacgtgaacggaaatgaaacatcaggtttttcaactacccgcatttatgtaggctcttgaaaccaaaatcaacggttcttcggaaccaaaattttagaattaaggaaaacaaaaaccaca

SEQ ID NO: 2268 - DNA, 667 bp, Unknown
  Description of Unknown: Solemoviridae sp. isolate ybw116shi01 genomic sequence.1 sequence
agacagtatctgtatggtgtcggggtcgccagtagatttccaactgacggtctttcctctttcaaattgacctaacaaccattctggtgatgactccagacgttgcttaaaatgcacgtgaatcaagttctgaacatagttggctgagaaaccaccattgacagcaccgcccatttgatgaatcccaaggagttcattgcctttcatgtacgcagccccactataacctggcagagtcatctatacaggtagtactctgcaaggttatagtggggctgcgtacatgaaaggcaatgaactccttgggattcatcaaagcagccccactataaccttgtagagtactacctgtatagataactctgccaaagctaacagcatcgtgcgaaacatttccaacagttcccttcccatcgggtccaacaatttggcctgttgtccgaatctcatccatatgcccgacgttagaattgctcaatcccaatcgggagaactccgcttcgtccaggacaatggcaaccagatcagcatccaaagggatgcggacttttccagctaacgaaagccagacgcccaacttgctccttgcgcacttaaccaaacaagctttgggattttaattaattcaattgcgagttagaccatttattacttaacattcgtaaca

SEQ ID NO: 2269 - DNA, 667 bp, Unknown
  Description of Unknown: unclassified Picornavirales sequence
tggtgttctcgctaggactcttggggtgcgaacccccttttcaacaaatattgttgaattgcaagtgatgtaacgtattgcactaattatagtaagtgttataccctccacaaaaatattttgtggagtgttaaggtatggattgtatagggcattagcaattaagtctgtaggccgaaccggcatgcacggtacatttgaatggactggagttatggtttgaacaacttagaagtcactgtgtgtattccttttaggttgcacattggcccattgatgaacgcaatgttagcgtagagtagtcataactattttgttcttgccatgttttcatatcttgaaaaatgtctcttgtttgttggcgtatggtttggtgctatcgtaaagcacaattccccagaagtcgtaagactattccgaaaggatttgggttagccctgggggaggtaggtctccatgactcagacattggatcatggcattgcaaaaacacccatgttgaggtggtgcccaatagatcatgaacaatctctgtttaagaatgcttctacatgggggtctatggcgctgcgaggaatatggtcatgtaacaagtagggttcctcttctacaaatgttgtagttggtgtttagattacaatctttaggaccataccggcagcgttaa

SEQ ID NO: 2270 - DNA, 669 bp, Unknown
  Description of Unknown: unclassified Picornavirales sequence
gatctctgtgggggagttttattctcccccataggtcattttaaagcacccaacatgttatgtgcttaataaacttgcatgcgcgtggtctggcgggtggtttcaccctccggggtgtcatcatcaacgacccggtttctgtttatcgacaaaagcaggggcttggtggatgcctgattcaccacatacatcgaaacatgaagatgtaaaatttatgtcgttggtaaattacgttaaagttacaaccaccaccatcaggcaggattagattatccttctacgctcggtagacaaaaccttgtattcgggacaatctaatttggttatgaagtactgttgtgaaacagtgtgggaactgcttggttaggttaattcgttgtggagaatgcaccgtggcaacacgttttccccagcatgaaaggtagtgcatgccctagaccttagcctctcatagtacctgctgcgtagtggctttatggattaattgaattgctcctggagtctaaggagactggcgtaacttaatacgctaccccccttctttaacaggcacaattgtacaggatactcacgtgcagtcaaagaaaacccccggagagttagaaattttgcgagagacagtttttggtttactttgttgcgacgagtagcttgtaagaggccggcaac

SEQ ID NO: 2271 - DNA, 669 bp, Unknown
  Description of Unknown: unclassified RNA viruses ShiM-2016 sequence
gtcccaccaggttttcacctggtggactcccctatattgtatgatttcattgcacagtttagcacctgtgccgtgcttttatacgaaaattttattctcctttatatacctttcacagtaattttgtgttctattatgtcaatacctctacgaggttttgcaagaaccctcgtatgttgtgttgtctttgaactcctggtgagtttagaaataacctcatcagattactacctattttatacataaagcatttattctcgttggtagagaactaccattcccgctcgtctgtaacgcgttaagtgcacaccttttggtgtatttgagctgattatattgaaactttatattcagatcgtctgttttaagtatgttactttattgtgcgtaagtcccttcaagaaaacttgcgtagtcgtgtgagactagagaactcagactaacgaactttcgattctgtcataattggaaatgatttatatgaacttgtttacaccgccccggttgtcttaagttagatactatctaggacccatgagtggttaaccccacatagatactagtattaaaatcggccggcgaaagccttgtggatttgcactccactccgagcctccgtccctccttcatcggagagggggttaaaactttttagcttctatttctttt

SEQ ID NO: 2272 - DNA, 670 bp, Unknown
  Description of Unknown: unclassified Alphacarmovirus sequence
gcggcgatatgaacactgccttaggaaattgcatcttagcctgccttatcaccaagcacatttgccgtgggttagacgcgagacttatcaacaatggtgacgattgtgttctcatatgcgaaactcgtgacgtggggcgtgtcgtggataagttaacgacagcgtggctccactttggttttacatgtatcgcagaggaaccagtctatgaaccagagaagattaggttttgtcagatggcccctgtatatgatggtgagaagtgggtgatggtgcgagatccgaaggtcagcctaagtaaggacgctttttctatggttcgttgggatacagtgaagaatgcacaacaatggtttaaagctgtggggcagtgcggtctatctatagccggaggggtgcctattgtgcaggagttctacaggatgtacgagcgcgcgggaggtcatgtcaaactcccagtgttgaaagaggttagcgctagtgggttgtttcatatgagtttcaattccaaccgggcctattctgagatttccgatgctgccagatttagcttttggaaagccttcgacatcttaccagatgttcaggaggccaccgaagctgaactgcgtcgcacctggattagtctcgattttggcccggctggtgaccttaacaaccctatcctaga

SEQ ID NO: 2273 - DNA, 671 bp, Pediavirus cirripedis
ctctgcggtccacttctgtcccacaaggggccgtgcctgcccagcgagtacctcgctctgttcaaactcgggaaaagaagagcattgtgaggttacttcctaagcaactattttcttttaagttagttctccttgctttttgcgtgtttagtgctttgtaggtatgtgtggtcccctatattggattatgtccattcgcgccctgtggcgccttccaggcagggaccctagtagaagtgatgcgtcctctcaggtatctctcttgtcgttagaacgtgtcgttagtgtggagcccggctccattgcccgtctccccgcagctccgcttgaactatacagtgatggtcgaattcgcccgccacaagccagtagcaatgatctctctgctgaggaattagatcggaggctagacctccttgcattagaatcaggatgatcgatcccagattgcccctcctcccgaatacgatatgttagtacggaggagaggactccacggcatttctgccaaacctggggtagcaaacatagggtacaaatacacgtgtcgttctgggtttctgatttaaaaccaccgatgatcgggattccaccgaaatcactgtttattagccgggccagaggtcttctgtgttctgagctcctgcttccggaactgctcgaaagcactg

SEQ ID NO: 2274 - DNA, 672 bp, Unknown
  Description of Unknown: unclassified Picornavirales sequence
atgtagcaatttgcaggtgcccgagacatggcgtgtatctgtattattgtttttatgtgaaagctcgccttgactaacccgatggctccttttaccgacggtaattatctttaagtaaggccggattagtacgtttcaagttgtggaatataaaaaacttctttaatttataaaagtggatgatgcaaaagttggattaagacaaagaactcttatacccaatgatcgcacgcaaagttagtatttatacgaaaggttagtgcgagtctgaaactcaacaaatgacagaagaaaattattttgtgatggatagcggaaagacggttctggaagaagagagaaaggttaaaagactagagcatgtatttgtttttgtggaaacaaatagatgagctagagaacaggttggtctatttaagcttagggccttacctttctaacgttacccgggagaatctgccaccattgtgctgggtggataacagtagtatctgagagtctaggcaaggaaaataggtattttcccctaaaacccttttccctttatgtaatacccatgtcatgttttaaaagagaagctttccttttgaaacacaagcacacaaatactaaataaatatattacttgtgaatttttatttctttttgatatctttaaatacaacgtttaat

SEQ ID NO: 2275 - DNA, 672 bp, Unknown
  Description of Unknown: unclassified RNA viruses ShiM-2016 sequence
caacgttaatgattccgtttgtatctttgatacataaatcgtttcgatataacgatttgactcagtcaatagacgtattgccttaaccggtttccgcgagtggtacttcgcgatacgtgcctcgtatcacattgctattgatttgcagggtatgaactttagtcaagagctgggattttcctgtgccccgatttcagtcttcacacaccaagacacagcgagtacatacaacgccttggtaggtcttaatagttgcagtagttttagcccatgaatttggctctgattctaccagtacctaaccttcgccatggctaatgtcactggattttcgctatcggggagccgcatcggagcgggccctacctaatatccaattggattgcaaaatgatcacaactaaccaaaaaaaaacaaatcatccaaacaaccaacctcacatccaccatttattcaccacaatctggcaaatacataaagaccaatatcacagattttaaaattgttcatgcaaattgtttttatgataatattaaattcactaatgtacctttgctttcagttcaagattcagaatattatttgtttacaccaactattctagccactaaatttcataatataacaaatggatcagttacagataattttgtcagaaaactcaccacatta

SEQ ID NO: 2276 - DNA, 672 bp, Unknown
  Description of Unknown: unclassified Riboviria sequence
cgggcattacccgtacatcacttattgaattatttggcattaaatatgcatagaaatcacaccctcgagtggcatctgagcattacgatgctcttatgtcactccgattgtgactctattaattctatttattctaggtttattcacacctccgtctctttcgagcgtgaaagttgaacccttgcctatgtatttgtgaaaatccagaacgaaggtaggtacacattgtagtgtatagtccttgtctaggttctcgttaggcacgagttcaccacctaggaataaaatctactggaatgccaccagtagttacgtagaaagttaaacgtatttattgacgtctattttaagatgttgaactagaacttggattctagtgttaggcgatttaatcgcttttgaaattgatttttcttagtgtatcatagcacagttagttaggttactccaatttcctactaaccccttttataggtaaaagataatgataaagtaattagagaaataacgtatgacacttcatatatatgtttacgtgttcgaccggcgcacatggtaagaccggaatcgagatcgtcaatgtatatgtgcttgtttgaaagcaatatgattaaaatttgacgtagggtatgagaaaacaccccgtccattcaattgtaataaaccacttct

SEQ ID NO: 2277 - DNA, 673 bp, Unknown
  Description of Unknown: unclassified Botybirnavirus sequence
gcatgcctttgagatgcagttttgatttttgtacttaacaaaatgccatggatatgtatgatagctaatgactatctggaacaagaggcacgctgcccccggctaggggtccgaactgataaggttcttgcgattgatccggcgcaaggatttctcatttgagaaacagtcttgaattaacaagtttaaggacggaagcctcgacatgtccaatgttcacaatgaagctggtcttgtgaattcgccaaaatccagtgctttccctggaatcgtgtaccctctcattagagaggcgattggctggaacgggtgtaggtgtcagcaatgccctacgtgttgtccgtgcaaggaggagagctgcgtatccagcgtagtttgaatccgagtgtaacgactgcgaagcctttgtctgtagggtagtcctgtaaaagggggctatccgtccaggaacagtctgtttccctgtcctcccgtgaggtgttgttcgtgactacagttcaacagtaaaaaacagggcgatgtgtagatcggaaagatatctctaacaaagtattaagcgaaagctaaccgcgccgcctgccgaacgtgctgactagtacccgggcgtaaaactacaactacatatcacaaacctacgacttaactaaaacattccaaaatctacaaaacaaac

SEQ ID NO: 2278 - DNA, 673 bp, Unknown
  Description of Unknown: unclassified Picornavirales sequence
atatgtgccctcacctgtcaattgggaccaccactttcagtgaccccatgcgaagtgctgagagaaaggaagccttcttacccttcatttgtgaacccactagtctaagccgcttggaatacgatgagtggaaatgttcattctaaatggagtgaaacatgacttaacttttctagtcagacgcatacttgtgtgtctgagcgccactgtcttggcgtaattcttcagagtgtcacgccgtgcttgcggatcttacgtggcacatgacaaggctctcgctggaactgtgagtctgaagcatgtgaagtaacagtgaagagtgcatgatcacacgtatgtgtgggctatgagcctgcggatcaacaactggtaacagttgcctcaggggccgaaagccacggtgttaacagcaccctcatagtttgatctaccccagggtagtgatgttgtgtacctagtaattgccaattttcatgttttggtatcacggcataccggagagttcgcgggtgaaggatgcccagaaggtacccgtaggtaaccttaagagactatggatctgatctggggccctgtctggagtgctatacacacagctcagggttaaaaaacgtctagcccgccaggacccgagggattcgggttttcccttaaaaaaacccgactagagctt

SEQ ID NO: 2279 - DNA, 674 bp, Unknown
  Description of Unknown: unclassified Mononegavirales sequence
ttgtaaaagaaaaaggataaccggcactcctgttataaaaacccgatagtaacgctcaactcaaatcgctgaaccaatctcagagaggacaaggagtgagattttcctcaaggagagagcagaggagaaaaggtcaaggggaagaagaaagaaacaaggaacaaagagggtgaaaagagagagaaccagtggtaccaaaaatgacagattacgtcacatgcaccctctgtgggaccaaaatccctgtgattgttgtccccctcggcacactcgaaagagcggttcagtgtaacgtatgcgggcaaaactattcggtctctccaaagtgaactggtgtattgtagaagccaccttagacatgtacatatgtatacacatgtgtatgtgtctatatgcatacacacatctatatatatatatatatttttgatcaatttactcatttatttgtctatcatctttacaatctttcaaacagctcaagaagcatcagcgtatgtccatttggatacgcactacgccgggaagattgcatttttgtattgtgttttacaatgagtgttgcagctactttttggttggagtgttttcctggatcgggggttctttgttattaacacaccatccacctggtacttttcagatttagaaaaacccgatagttaccagtcaaa

SEQ ID NO: 2280 - DNA, 675 bp, Unknown
  Description of Unknown: unclassified viruses sequence
ccattacggccgggggaaaataagggctatggcgtcatgccatagtttatatacaccacggattacgtgaaccttgttagtaataacgggtgccctttgttagggatgtgttttatgaattattaattatgttataactcttattttcaactacgggattaaaaccccactttaaaactatatagggaaatttagtttaaacctgtataggaaattaaggattgataattttattgaacgagcctactcgttgaatatttatagttagttgtgataactagccttgtatttagacatggataatctccagcccatgttcgacataccttaggaagtttatatgcggcacgtattcaattaaatgaagatgctataagtgcttgattagacattaaaactagaacaagttctctagttgtcgctggtagagcataacttatagtaggtggattttatttgatgacccaagtatttatgaaatttgtcggcctccaagttgatcagctaattatttatattttgcgagtaatagtagttcagactgtgctatccccttgacatgcattttttggttactccagattgtgatattagggctctaatattgcaagactgcccaccaagtaaggaacttatgtaaacttgcttgggaaacacattactcaaaaaattatt

SEQ ID NO: 2281 - DNA, 675 bp, Unknown
  Description of Unknown: unclassified RNA viruses ShiM-2016 sequence
gtggtttacacaccacgcacggtatatagttaaaagtcctcccaattgcaaccccggcttaacccgctcttttaagagttcgttacagcctcgcttgcatgacagctggttctatattctttatttttctttttgtttaaatgtgtacgtcttttgttagtgacgacgttaaaagtaactaactgagttttattagcgacctcattaaaagtaacttttatagtggatatctatctcttatcccgagtgaagattcgttaaatcactggacttgatttctttcattgtatgaagattcagatgcctatagtacgttcgaggtgtaaaaacctcttcgcggaaataggatatacatctgtttttgattactttgttagattgatagtgacggcttgtatcctactacacgtttgacgtgatatcgtataatcactaggtggcttgacaaccgcccaaatctcttgacctctcatgacgaagcataaacactaaactgacctcaccacagtagaattgtggccagggaactggttagtggtggatagaccttatgtcgaatccgcagtgttatcattgatgttttgagaattgtttaggtcggctagttgagaagctatagccctcccatgttgtcaacacattaggttctcaccttttacctcttttctctccttt

SEQ ID NO: 2282 - DNA, 676 bp, Unknown
  Description of Unknown: unclassified Iflaviridae sequence
ccccccacccgttcaaccaccgctaacatgtcggcccagtactacggcgctgtgtcgtcccctgttatgtgctccatcatcaattcggcctcgtactacggcgcgttgtcgtcttacccaagatgaggatattgttgacggaagggagaaaacccccgctgttttgaaaaccccaacttttatgtaaaatgtaatgtgttgtccacgttgtatgtttacgcggtggcatatataacaagaaccgcctgcagactaacactcacttcgtagatttgaggttaaagtttggaactgaacagttgatcattttctggtgtccccccagttggtttaagtactgtaaaaatgtgatatgtagtaagtgccagacctcttaacagttagttcttcggaatgttgattcaggtgacactgatgatcatttgtaggtatggacttggtatgtcgtaggggcctgtcaacgcaggtgcagccgcgcaaccccttgcagcaaaggactagatagtcgcaagattagatgtctgatgaatataccagacacagataatcgcttccaggtaaataactcactgtctcttcggagatataggacggtacctcggatagtcgcgcgccttaaccggtatctaggactcgttcgatcggagaacggcaagggctcccggattattttgca

SEQ ID NO: 2283 - DNA, 677 bp, Odonate arlivirus
ttgatgaagttcaactactctttaaggtcatacaaaatatataatgtatcttatatataacaatatacacattatgatgtctcattaaacaattcgtacaaacagaatttcatgagaagacatgtaattgagtaatcatggttctttgttgtcaatgccaattggtatctgcttagtggccagaatctcgatatatattcatatcactcaacttgccatagtatccaattgattgtggtaacgtggtttgaagccatgtagaatgagaaactcattcttgagagatctctttgatttccattatatcaagtctctaattagttacatcaattcttttgagtctttaatttgttagaatcagttgatccttagcaagatcccatgcttcctacgagaatgagtaacttaacgttcgatatggaggagcaaacaatgaataaaaagacaagacttccacaggattatgcaaacatgagatgtttaccatcaattattttacccattgttagattccagtctttagaattatttttcaaattcttagcaactgaaaagtgatctataatataagtaattaaccaaaatacgatcaatcaatatctacactttatcactgtgtgttacattgttttagggctgtaagattcctaatgaaaagtagcagtttctgatgttgc

SEQ ID NO: 2284 - DNA, 678 bp, Unknown
  Description of Unknown: unclassified Picornavirales sequence
tcgaccaagttggaggacacgttggaaagtacattgatggaaaaaataatttagaccttcaaaatttaaaggggagaaatttattagaccttcaaaatttaatcggtgatcagaaaaaagatgtcaccggtatggagatagctggaaataaagatttgcagaagaatcaacttgacaaccaggataagtggatcaatgcaggacgtgactcgttcactaaagcaggcctcccggaattttcattctgggatcggggtcgcggtggaccactcaatgtcggttcgacgagaagttcaatcggtggtaacaactttgtgaactcctttggaggcccaaacacaaacttaccgtcaaccggttcctcgccatacgcagacttgaatggattatcccgcccgttctgatcagggttgtcataaactttcttcatcatttcttgcattcttaagcgttttgtcatgagtcgcaggttgctgttactcatggggtactggtttgcgcacaacaaagtgttcttactggaaaagcgtttcattatgcacaaaaaaattagaattcctaaggagcttaactcccgtcattctagctatcgtgtaaactaaattagtttagtagtctttcttaaaaagataaattaaaatttaatttgggttaaacataacatcatacacatggatc

SEQ ID NO: 2285 - DNA, 678 bp, Unknown
  Description of Unknown: unclassified Picornavirales sequence
tgaaccgttacgcaccactcagttggtgtttggtggcaccaatgatggaacaaaaggctacaccacttgggctacggcccgcgccaccttgtggcgcaaagacattagaagaatagcataccgcccactagggccctgcagccagcagggtaacgggcaagcacttctgtctccccggtagaacggtataggctgtacccacggccgaaaactgaactatcgttacccgactccgtacttcgcaaagcttagtaggaaactggaaagttcgagttattgacccggagtgttccccccactccagaaacgcgtgatgagggttgccaccccgaccatggcgacatggtgggcatccctgcgctggcacgcggcctctaagaggataactcgctcctactggtaaccgaagagccccgtgagctacggtttattcctccgcctccctgaatgcggctaatcctaacccatgagcagttgccatagatccatatggtggactgtcgtaacgcgtaagttgtgggcggaaccgactactttgggatggcgtgtttccttgttttctccatttgttgttgtatggtgacaagttatagatctcgatctatagcgtttcttgagagatttccaaacatttattcaagtcgtacaattcttgtgtttaagcagtacagtgtaagg

SEQ ID NO: 2286 - DNA, 681 bp, Unknown
  Description of Unknown: unclassified Picornavirales sequence
acaataaaatttatgaattactacaattattatatgtttagaataagtgcttttgatggttcgctctagcaaagcgggtcacacgagggaggaacagattttggaatctcgtggcttattttattctcaagtatttatatagatgggatattatcgatgatttttggtgcagccgtaagcagcagagaggtaagaagtttaggcgaacataccattccgaaaggagcacaaaccgcacacaatggtttgtgaacagcaataatggtactttcactcgttttgcattatttgagtgtgctggcagggtcgaatctgtcacaattaggatgtcggcttaatgaaccgagtccctaattgcagatgcattactttagagtgaatagttttcaccgacgatacttaaactgtggtgactccacacccacctaatttctaaataaatatgagacaagtctcttatttgagcatttattttattgttggttgggggggcaaatccaatgatgaatcccaacacttctctcatatttattttccgaattagcaccaaatctctttattgattttatcaggagtatctcggactgcgttctatcgtcgtttgtccgggtgactgtcgtgaaagacgaatatttggagagaactccagtagctgattctgaatttttacaatattgccct

SEQ ID NO: 2287 - DNA, 682 bp, Unknown
  Description of Unknown: unclassified dsRNA viruses sequence
cacgggggcacacaacgatttaacgttgcatgatgtgatcttatcgtttcatcatgtatatatcgaaggatatataatgtaagttattttatgttatattgcttgagggggtatctcaggcacttgggtatgctttatgccgctatagcgttgtcccttaccgacacctatgttgtttataggtgcagtcagtcatgggaggaaatgcctatgccatcagacttagaacaagtcatttagaatgtcatcgtttcggccaaccacatacgaagtgggtggcggtccattcaggcaactggatgcggctagttacgtgtaactcgataccacaaagctcgcagcaacgaggccaggctttaacaattctagcagtccatgttagaaattgcgaaagataaagcaaggtgacccaagaccaagggtaagcaagggtcgacgtttacgttcgacgaccgcacaatctggggagtaagtgattgtatggccctgttcttgcagccagcaggaatatccatgtgtggcattgatacatgggaagcgtcaaaggactgtctagccatgccacagacaagtacatttgggtacttctagttaatcaagaaagcgattagtttcgcgaccaaaggtagaccgcctagatctagcctaaatgccgatgcacaagcggaggtaatctagcact

SEQ ID NO: 2288 - DNA, 682 bp, Unknown
  Description of Unknown: unclassified Picornavirales sequence
acatattttcgcccggtgcagtgtcatagcaccagctggatttacttctgcaagtggacgcatttgcagccatatctccagccgtacctgagcttcctaatttctgcacgacccgtgtgattaggccacttacgtacaacccctcacccttctatttctttcacagctatttagtattacatccgtggcgttaggcccgcccaacatctaggcctctctatagcgtgtgagatctatttagaatttggttgagttattgtccctcaaccaccatccgtttgctactcacttgaccttgacagagcattctgttagtgcatagtagtcgattccatccagtaccccttgatcccgggtatctggcccgtagactgattgacttcagcttattgcgaagcctacccaccatagtaggagatagtagcgagaactgtcgatggtcagagcctgctaaagattattatgtacagtgatcaccaccttctggtattgtctacaccaacgtccattcggtcttaatcgagcctacagaacgcgccacgttctggtgctgaattggataaacaaacgtttagctatggtatagcttgtaattgtgacttcccgacgagggaccacatcgtttgctctggctatggtaaatagctaagccctagtaaggacttccacaggagcctccagc

SEQ ID NO: 2289 - DNA, 682 bp, Unknown
  Description of Unknown: unclassified RNA viruses ShiM-2016 sequence
tgagggccttcagccctccagccgtattttgataatagcttagtttatataagactaatatatagaacagattaattcgaactatatatatgcaattaaattttgctattatcaaatgtggaagtatttcatctttatataagtctaacgtattttcaacagataaattcgagaatttacgtatgcatttgctttcacatttgtttttgatttcaaagtcattaaacaattatgtttgtttcattatcattttattaatgttaatttatatacttatacatctttcgtttaatttcttcgatttagctagctgacattcattatgaaacgcacataagatatattacgccggatacaggtaatatatagagaatcgtgtgctgcctgagtaaatatgtgtacttaagaatatcttgcgcctccatcgttagcgtgactaacgtatatatttggattgtataaagagcattagatttctttatgttttatgggcctcttttcaccttttggtcattagagtctacagcatatttatgtaggtatggcgttgttggcttcccagcttgacaagaaattatccacataaagacatataagtatttgttttcatttcccatattaatttaagtttatgggttttagctctcctagttttccctaatataactaggagatccgcaaa

SEQ ID NO: 2290 - DNA, 684 bp, Unknown
  Description of Unknown: unclassified Picornavirales sequence
tggccatagtattgcgggttagcgtcccattaagattttaatatagctattcacaaccttaatttctttctttgattgaattaagccgctgtgtttccctttccgcacaaccactttgtcttcttttgttgatattgtgccgctgtgcccccttcttttcccctgctctttttatgacggtttagttagtaacaacttgaggaatagggattcaggctccagcccctggaatctatcgcactgttaccttgggagagaccactaccattaatatggtggcagaggtttcggtctcagtgttattcaaatacagttgttattagcggcgttcttttcggatgtctcttggtgatctcttacactagcaaagattgtaggaacgatgcctttggattgagctcttttgcatttacggattcacataagtcacatacctttaaatgtccctctaggcatgttaattagagggaaggtatgtatcagaatgtgtctatggtaccctgtatgtcaatggttagacatacacattagggatacggttatggcccaggaaacgttggtttgcctgggttatacataacacaaacgctcattgcgagcttcccttcttatgatttttctcctttggcgaatggaacgcgcgtcttcggaccgtaagtactaatagccaatcccacaattgaa

SEQ ID NO: 2291 - DNA, 685 bp, Unknown
  Description of Unknown: unclassified Totiviridae sequence
tcccaagctctccttctctacggcgaaagggcggggtgacatcaatttcggatatcgcccgttgatgacttcacctctaaccctctggaatgcacttaaatggcgtagcctgacggtcccttctagccaaagggtgaaacggaagaaggctacagtttctgtgtctgcattgaagtgaccttgtgatctaacaccctgaatacttgttagttcaattgtcttatttctggctcaataggttcggctaacgcgggttgttcctaagcctatacatagtcgtggctgtcttgtcgatcgtaaacagtgacagcgtgactcatcgtgatcatttaaagtattttattgctggcagtaggttgttgctattaagtctgaattgttccgtttgctgtgctttcaacatttaagcttacccacttattgcttgtggtatttgtagtacgtattgtggattgtcaggtgagtttttggtgcgtgtgccttaacacagtcttagtgcagactacctcactgatcgtaaagtggttggtagtgtcactcgagctagtttagtatcactccttctattagtggttgctgtgtcagtttttgtgttttcataatatttaacttcagactacttcactgatcgtaaagtggtagtagtatccaagcccgttgggatctttaactttaaaccttaaca

SEQ ID NO: 2292 - DNA, 685 bp, Unknown
  Description of Unknown: unclassified RNA viruses ShiM-2016 sequence
cacgggaattcccgtgtgcagtgtaagttagattacttggcagtttttgccctaatagaccatagacgtcatcctgggcatattatgcccattgtgaccactacgtctattagtttttctaacacaaccaatgttttgttctaagtattgatcgtgctaaactagcgatccccattttctttgagttgagttatattattacttgactctttactctattttaagtagggtttttagttagcctgccagctagctatttgtttgtcactattgtgacacttgattcttcagattgaagatgtagaactatacctggtttctgagttcaggcgatttaatgttctaatttattgtgatttgtagtgaatacagcacactaatagaagttccgtcaatcttactattagttctccaatattattatttggagatatcagatcattttagatttttacaaataacgtacgaactctcgttagtgtatgtgtgtgtaggccggtaccgtatggataaatccgaaatcctgatcacatatgcactagcgcttgtagaacgctatatgaagcaatctgaagaatagggttaagcgagaaccccgttcatcaaatttcaagaccaccactcctgtatgaaaagaaagtttattagtatattatatcgtttcaagtggtgaaaaattgacaat

SEQ ID NO: 2293 - DNA, 686 bp, Tremovirus B
cgggattacccgtgcggcgcttttggacgctctagcttggaggcgtaatatccagctatcgtttgccgtgatttacggctattttaattaataaaattcaaaaacattgtgcccttcccccaatacgacctggatcttggtcgtggctttagactcaccatcagtgtatggtagtactttgcgatattatgtcgcaatggcccagattgtttgtcatactattgggccctctcttgtggcccaatcttttctttatgtttgtttcttagggtagtctgtgttaccaagccgagtgctcgcgtgtggcatgattagcactatcactagggtggtgtgagtaggcgaaacatacagagtggttgtcattctcatgtggtaatgttctgcatttcaacccttacaagtattaaggtggtgtatgtgtgtccgtagtaggctacgggtgaaactacggggctaacaatttagtcagcaatgtgaatagtggcggccaattgtgcaaatcaaattgataatcgttgctcaattcaacgcctgggaactacactaaagctgcatacttgccactggaggatttgttaaggggtggttcattatatcacatgaggattataccgccccttctacgggcgcttcagacacgtattagttttcccattataaaacaaatatgatatagaggttat

SEQ ID NO: 2294 - DNA, 687 bp, Unknown
  Description of Unknown: unclassified RNA viruses ShiM-2016 sequence
gttttttattattgtttatatgtaattgtatttgtttatatgtattatgtgtagtgtttcgtggtaacattgttattgttacctgtaaaaatattaaaataacaatataagttggtatacttgttaactgaagttttgtagaatactgggttaatctggatttttgtatgaagcaattgccgagtaagatgtcgtcctatagcttatcaaaatgttcttcggaatagtttagtttcataaccttctgtaattcatatcactgagagaagcttttaaagactttcaaatacatgttacggggaaactttactgggtcgtgccgttgtttaagctagatagatatatcattggaccttacttggactgaacttttgtggattcttcttggtaggttagcaaccggttttattaattactacctttcgtttcgagaaatcctcctttggaccgccaaaggatcgtcgattctatgaactgagtgtacatacgttgagacgtttcgaaatgttctaattaatatgacatctgcattatggaagttttcaagtggttaatcccaagtttccatggttctgccgccgaataactgggggttctcatcccttaagtgatgacgctggaaagacagcggactgatggaaagacatcatttttcagatttaaagcttttatgactagtacaactta

SEQ ID NO: 2295 - DNA, 688 bp, Unknown
  Description of Unknown: unclassified RNA viruses ShiM-2016 sequence
acacaaatacgcacatcactaactcaaatagtgaagcacgggaaagtgtgatgtggacagggtgtcgcctttaaacctagcttttcagctttactactcaggcggagccagagaggtgcttctattgcagtgcgtgggaccgcactgcaatgtaattagtcccgctagttctacagcgaataccgatcagttggatcgagactcagtcactgtttgtgatcaagtggattctcttgccattaataatggacccgagaccactggtgtcaccgagtttgtacaggaggcttgctctcagattgacgtgctaggtgcacatcacgtgcccgcgccgttatctggtcagagccagtttcaggacttgaaggcctatttctcccgaccacgtctcgttactaatggtaacgtcacaagtgtggggaggattgcggccatcaatgtcacgccgggcatcctgttggctacgctttttcccgatggggttaagcggttgacaggtgtgtatggcatccgtttcactttggtgtttacgctgcaggttgcggctacaccattccaccaaggtttgttagcattgaactggcagtatgaggttagttctaacactaacgaagcttatgtgcgcagtgtcaatagtgagactgccaccaatcttccccatgttagacttgacctcagtgtggacacg

SEQ ID NO: 2296 - DNA, 688 bp, Unknown
  Description of Unknown: unclassified RNA viruses ShiM-2016 sequence
gctcttccgatctccctggagaggtgtaattgtatctcttcagagtattttttggtgcgtgttcccgtagggtagtatactgtgaggttgctattcgtaggggcatgttaagaataatatatatattatcatgaggagttgtttaagccgtgtgttatcgggcttctttgaagtagtatattttctttgatttgatatgttacattttgaaagcgatcttttcgaatagtgatgtgcaaatatacagcaacgataatttacacctattttaattcttgtacgaagattttatcttcaattaagatggagtcagttaaacccaacagcctctaaagtttgaggaaaaagaacaaacgttggtgactgtgtcccatataattgtatttgattaatttaggaataatttggattgctagccttgtctgtggtacgttattggttttagcagcggccatgcagttttgaaaacacagatagtctaggcatctattagctgtagaatcttttgattcgagttgtattggcaatttttggttgacagccccctatcgtcctgggtaattgttcaatatgacgtgcaagtgtatgcaaagagccgattctatataagctcagctatgttaccccaagttgtacgcgatggtatcaaatccttgggagtaaaggaacagagagatagacttagttc

SEQ ID NO: 2297 - DNA, 690 bp, Unknown
  Description of Unknown: Astroviridae sp. isolate coa196ast2nc genomic sequence.1 sequence
atcaaggtatacccttgatgaggagggttgatagtgtaccagactatattgaggcttatttgagagcccatgctgctgttgaagtgcgtctgcgtgacgctcttaaggaagtatctcacctgaaaatgcagctgatgattgctgataggaagaaagatcgggctgagaggaaagtagcaaatcttgaaacctggcgcagaataagaaatgctactttcctctcagcccgatctttcttcctatcagcaatcatcagctgcattttcaggtgagatacttccttaagagcgtcacgcagacgcacttcaacagcagcatgggctctcaaataagcctcaatatagtctggtacactatcaaccctcctcatcaagggtataccttgagagacaatcctgacttgaaaaaactcctcacctttcatggcataagccactgtgaggttctggagaaaaaccttgtcagttctcagcaattctttccagacattagtagtgccaatagcactcctccaaagagtaaagagattctgggttgctacgccagatatgacctttgaaaggccagctggtgtggaacgatccatctcctcttacgctttggaggagtgctattggcactactaatgtctggaaagaattgctgagaactgacaaggtttttctccagaacctcacagtggcttatgcc

SEQ ID NO: 2298 - DNA, 691 bp, Unknown
  Description of Unknown: unclassified Dicistroviridae sequence
tagatacacgtcctacttatgtggctactcgtggtgcaggttgtttatcctgcaccacgagtagccacataagtaggacgtgtatctacggcactgacggactaattatgtgttgaggatatcgacggatagatttatgaaataatatatttctgacggcgatattgtcatacgaaatcccccataggcgttatctacggcactggcgaatatggactaaaaatgtttaccaaactgatcacttagagatccccaaccacacataaatacacttataaacgattgataacactataacaatttgtaggcaatattttattagaatttaagcataatgatgttagtaacctcatagtaacctagatatatttgtttgacaaatatcccacagttgagtgaaatcaacaatgggccgtttaggcaatgttatgagaactgaggcgttaaattttgacaaatacaatacctgacaagtcccttttggattgactaaatataagaatagtatcaatagtttttgaatttaaataagttattgtagatgaagacatgtatttcttgcaataacctctgtatttcttaaactatatgcaattactcggtggtacttgcatcttgatcgaagttaacctttattcttatattgctgtgtcggagcagtggtattggcgccggactaattaacataaac

SEQ ID NO: 2299 - DNA, 691 bp, Unknown
  Description of Unknown: unclassified RNA viruses ShiM-2016 sequence
tccctagggatgtatgaaaattatccttagggcttcaagccaaatcgaattggatgattatcgtcatcctctttgctttgtttaaagctataaaattctacgttaaaacatttgattctcatttttaaacgttttgagtttctacacactttattttactgccgtgcacagtataaaagcatgtttcagaccttagtaatgtggtctgtgtaatttacgacattgcatatcgtttcggatcaagtacgttaaatctctgttatgctaggtaccagagacaatatttgatcctttcttaaatcttaacatacgctagaatgttagatttgagttctaaatacaatagttttcagtgcggaacggaatccccctgaatgttatatcacgtccagaatagataaacccagcagtatggaagagtatcttagacctctgattataacagacagaacaattggtccaccccgagctgtattaacgcaacgtaccgcggctatgattgttacaataccgaatttatattccacgtttaggcattttaccaggatgtcaaggtagctgactgcacctaacttttttcgtggaccctatgttttcgtgaggtagaatctcatttttgacacatattttagactatttatagagatagtagataaacccttgacttagcacccaacgcttgttcctaatt

SEQ ID NO: 2300 - DNA, 692 bp, Unknown
  Description of Unknown: unclassified Picornavirales sequence
tttgaaaggggctgggggatgtatccccatcccccagtgtgtatgccatactgcatagctcgcctatgccctatggattcacaaccctttcatataccctccctacccaaccccgtaaccacatgctttactccgcttggggttttgcggccccatgttgtgacgaaatggctacgcaatcaatgcggctaatggggcctgccgcttttaagtggccccagttagaagtttatgcacacccgcccattaggaggccaccagccaggtggtcagagggcaagcacttctgtttccccggtgaagtttgataagctgtgcccacggctgaagcagacagatccgttacccgcctcactactacgagacggctagtagtgtgtaatatccgaatttcattgatccgggtgttccccccacccagaaacgtgtgatgaggagcggcacccctcctatggcaacatagggcctctcctgcgctggcacacgggctctatgagcatgaaatcaggagaaagtcacacgaagaccttattgtgctagtgttgattcctccgcccccctgaatgcggctaatcccaactccggagcgcccgctggcaaacccgccagaagagcgtcgtaatgcgtaagtctggagcggaaccgactactttgggtgtggcgtgtttcctttatttcctttgtatttgtat

SEQ ID NO: 2301 - DNA, 692 bp, Unknown
  Description of Unknown: unclassified RNA viruses ShiM-2016 sequence
ggtgtagggcctaaaaaccctacacctaattttatcatcatgtcgttgttatttatggacgcctgttgagagaagtattttatacgatggactcccgttgcgagaagataacccatgattttgtttcagatgtttggtttttagaccatacatttaattattttatgtgttttgtttttaatatgtgaaaagccccttagtattaaattgcaattaacaacataattcggcctttgggcttcttttatataaaataaataaaaatactcgttaccgaacggggtctttaaatagattgacaaactattttaagatgtataaaatcctactaacattgtgtagatacacgtacctattcgagagttgaagcagtgctattagatatgcagataaaagtgagggttgcgagctaataactcgtcctcatggccaaaagcatgcctctatcttttagcaatactgtgtatagtacttcagtataatgtgggcaagtgtattctgtcaaaacggtttaaacatatttgttccgtaacacaacaaatacaatttatgacgttggaaagcgttagtttccgagtttttctggaagcaagtttacttacaatcataaactgctaccattcaaaaatttttatttcatttatggtcacaatttaagattttagaaaagcgttcatatatttacatacaaa

SEQ ID NO: 2302 - DNA, 692 bp, Unknown
  Description of Unknown: unclassified RNA viruses ShiM-2016 sequence
aggctggatcaattaattaacaataatggttgctgctatgaaaactgctaacacaactagacgtatcgtacgtcgtactattcccgtcggtaaacctcgcagttcaccgactcgacccacggtacctgtcgttaatagtgttaaaaaacgagcgaccgaaccaattattccagtcacctcacttagttttagttcgttaaattcatatttttcatatgcttcaggtgttttgttaaacaccgaatttttattatattttattgtggctatgtttgctatttttaactatcattcaatgcctgaaaattcctacgttactaaaattgttagtaatatcttttctaaggccagtgcttatgataagtgtacgtataccacgtttattatggcttttataccatttattcctgtcattttaagcgtttctagtaatatgcgtattttatcggctattttatgcttcgcattttataaatttttccctgaaaaaacttattatgaatatttagtttttgctacgtgcatttatttagctgtaaaaacgaagaataaagtatatagatttatttctattatcttattagcatttttgtattttatacaatttgctttaccattccctacggacaatacacttacgtgtagagctcctgcatcgaaaccaaattagaatgtaagataatagttaagtt

SEQ ID NO: 2303 - DNA, 693 bp, Unknown
  Description of Unknown: unclassified Riboviria sequence
tttaacggtccgacagaccgatatgtatcgcagctcttttacaaactggaaaactgctcttttgcatactaggatgaaactgtggatcacgtttgtcaaggttacggccccatacactcctgatttccgagcctcttatgcagaatcaagtcccttttgtagaacctgacgtacaatgtcaaccccaaaacccaaactttttgtttttgttttgtcctctttataaagaagattgttgtggcttataaaccgcaggttttcttttagatgacagaatacgctgagaaaacatagacttttggtagtaggacctccgaaccctttatgtttatgcactactctgaataacgtattaatattttgttaatcatctaacacactgatctcgtgtagatccttgcgcatttggttagtaaattattgatacctattcaccccataagcgtatgccccgaatgaatttagaccagaattttaacgactattggaatatatgaattgacggataccagataatgattattgtcagcgagaccttgtagcagaacgcgactgctaatatgaatctggagtacggatgtttttatgactcaaacagttttctcaaaactgagagtaggatggatttccgacctcggcaggtaaagcttctaggcctgaccgttgcatcactgaagcagccaatgtatcaca

SEQ ID NO: 2304 - DNA, 695 bp, Unknown
  Description of Unknown: unclassified RNA viruses ShiM-2016 sequence
ctcccggtaaatatatatacacagttaatagaactaactgtgtattatgtttgcctggaacgagggcagtatcccaagtagtgtggtaaccatttagcggtcccagcccacgctgtctcgtggtagaaaatgggtaactttttagggaagggtaaatccatccggtcatataattcacgcctttcaatgacatttgccaggtcacgctgattacagaagaccggtttaagaatagtttattgaggacatccatcattcaatgttcagtactataacctctcctctgaagacagagcgaaagttatggattgtttattgtatagtaaagttttgcgtgagtttgcatgcaaagcgtccccgtattattattcacaatcccagtggagggattgttagtcatcacttccacccatgcgattcgtgtgtggaaggtccaggagagtgcatcgtagacagctggtggcaatatacgtaagaccaccatgtcgcacgctgtagtggcgtgatcatccttagttaattgatgctttcatcttaacttccggtatgggccacttaccgttcatccattcataggtttcccgatataacatagtttgaacgccttttcaacacgatctactagcatcttcagtgggtaacaccctggagggaaaactagagaagccgttaacaattgaaaagattagtagact

SEQ ID NO: 2305 - DNA, 696 bp, Unknown
  Description of Unknown: unclassified RNA viruses ShiM-2016 sequence
atatttaaacgaaacgtaattaatgcgacaaacattagttaaaacgttgaaattctttcctttgtcactcgtcattgaaccccttaattctttgttattacttttaaatcatcatttcacccctctaaattttcaggttgaacgcgtttaggtaagtctggacaaccgattatgtgagacgtaactgccctcatgtaatttgtgcttgtcttcggcccctatcctgcaactacctttatcttattatcaaagtctttagtcaattcctgcgtacacctccaaagggtgccttagtgcagacgagatctgtttacgttcgagaacaaccatgtacttgggattttccgcctaataacgtaacaagagatcgctaaagatagagaaataaggtataaatgagatagtaataatatatgaaattaagcttagtaaatggataccgcgagatgcctatatctataaataggagaagcttagtggaaaacggcttataatagttttctgacaccccaatagaattggtgttaaaataattctatacactttttggatatagtgttaaaacaatcctctcattccacactgaaagtggaattcaaatactttcagacactgtttttataatttcgtgtaaaacaaaaattataacactttgtgaagtagtgttaaaataattctcaaaaacccaatgacaaa

SEQ ID NO: 2306 - DNA, 698 bp, Unknown
  Description of Unknown: unclassified RNA viruses ShiM-2016 sequence
cgccaatatttcgtcgcctgtcttgcgttaagatgatgcttcagttgttggtctgcttgagtgtcgttggtctaactgcttggctgtgtgattatttgtttcaggtttatgatggggtacgcaggtggattcgggtacgacgtcgtgtcgccaatgttgtccgtaaggtcaacaatgacgttctcgaggttatagctaccgtggaagctgacattgcggctgatatcgatgcgtctactgctagtgctgtagatgatgaggtaattgaccgcactgtagttaaaaagcggaaggttaacaataaacaccgcgcatcccatttccgttcgtggttggttcgtatggcaaaagcaaaattcggacgggtccatgagactgaggctaacagactttgtgttcggaaatatttgtatgatctttgtgttgagcacggcgtggttgtgcgtcatatagcagagaatatagatttcgcgaccgcattagtttttgtcccaatgtcttatgagattgaagctctggcagttaaacacaccactgaggtgatggatcttaaagcgattgctgagcggttgcagccgctcggtcgatgtgcttgatggggccccgagaaaagggaggggatagacactaagccttctgtttatcccggcatcactcccaaattttcggggaaggcccgtccacgcaaatatctgact

SEQ ID NO: 2307 - DNA, 699 bp, Unknown
  Description of Unknown: unclassified Picornavirales sequence
gttttgtgggttatcccccactttatgaatgtcactgattttgtattttatgatttcatagattagaatatcttgtacagacactcatatttatttatctacttcccgcgttctgcggttgctcttaaataaattaaattgagcagttttatatattgatatgatgaattgttaggttccccatgtggaataaacaagaatttgtattctaaagatttagtatttcgaaagattgaagcgtcctaatattttaaagtgctcgctattacacaagcgttgttatggtgtaaatagtaaacggtatagttgatgtagcccggtttgcagccgccctataatttgctatatgtcagacaaacgcgatcgtattgtataacctcctttgatgatattaacgattgaacatttcgtatgaagctggacttaccaccagaacttggatttcagaatgattaacgactttcggcttttgctgggagttgctccaaggaagagttcttccgatttgaacatgcccgagaataaatcattggcgttgtgcattatttggcgattctaataacggtttactgaacgatgtaggaatttagttgttgtaatgttgaacgtattattcacttacacctatttctgggcatcctttatggaaaacggagtcaatacccgacttgtattagaacaggggaggcacttgctaat

SEQ ID NO: 2308 - DNA, 699 bp, Unknown
  Description of Unknown: unclassified Picornavirales sequence
tgtggttaacaccacatgcttgatttgtttggccggaagccagacttgatttcaatttgcgttcattcgcacctggatgccatttgatgacaataacttgcgtgcgtttacgggcgtacgtatagacattaacatcgaaacatcttgtggctcataaccacactgaaattcaattctaacctgacaagatgaaagtatctatccccccctttttgttttgtatatgtacctgatggggcgatgtagccccatttatatttcattgatcgaggaataaataccaaaatatcatcactcgacaaaaaaggagtttggtcactgcccctttagtttcaatccgttctggtaataaactattgataatactccacaaagaaaatacaagaaaaagaaaagtgttttgagaagatgctagtaatttacccttgattaagatcattagtgtgtggtgttaagcacccactagataagcagagtcattctctgtaatcgttttgaacccttcgtcatcgattttgactagtaaaactatcaattcaggtcgtaaactcgactaggtctgtaccgccattccgaagaatatggcgggtatgccccacaacagagggatgaacaaaatatctaaccacaaaccagacacaacctacgatagactcaccaaacgcgcacacaacgatttgccccatatcagcacatatc

SEQ ID NO: 2309 - DNA, 701 bp, Unknown
  Description of Unknown: unclassified RNA viruses ShiM-2016 sequence
ttcacggacattcttttattcttcgctgcttgtgagaaaggagcagcaagtcttatggttacttctcatttgtcaatggctaaatgccatgagtgtcatttgtataagtagaaactttatatttatatgtttataagagaacgattacccaggtttgcaaaagctatcaaaccccctctcgttgggagagggtcttcagttaagcgatttctatgaatttgcgatcgtcctgaagaggaagtgaccttcaataacatttgtcagtgtaaaagtaaacatctttttagtgcgtgtgcgttcacaacgtatgggcaagtagaccttgcgttttgacagcaaccttattgtggattgcctactagattacatatgtttacctattgaaatgcctctttggaatatacgagaccattggattacaatgagtttctctgaatgagtgcggaggatggaagagtgagtattgaactacaatgtacgaaatcatggtactataggatttccgatcagtcaatatgtcactaatggacctgctgaacacagggtataaaatgttctgagtggtgtaaagctgcaaccacgaaaaaccatgtcgggtttgtactaaaacagcagtagtaggaaagcactgaccggtgcagttcccccggagggtaacaccccggagacacctcgagtaatgtcgagagtgtgccgacctt

SEQ ID NO: 2310 - DNA, 704 bp, Unknown
  Description of Unknown: unclassified Picornavirales sequence
tggcccttcccttcccctttcatgattcccttggatttgactcggattgtttgactacccttcttcttaccacattggccctagcggccaccggactgacctactcccatggcaagctgaacgccttcgcagcggaggtcccttcttcggatacggttgaccactgcataagtcgcgggcccaagtgagcttttggactgacccattttgttttctggactgccaccgccaagaattgcggagcagctctgtgtagagagatccttcctttaggccgaccccgtgtcccagcacggtagtaggactattggagtgctttgcacatctgcgcctagtgtcagatgagccagtggtgtcacaggaaaacgggacgcgattcgctatccctaagcatccctcttcggaggtaaagcgcctgtggcatacggtgggatcgtgccttcactcgagggccgggaaacccaccctggactggtgcagcttgacagagtgtcggccggcactctggcactagtagccggttgttctgggatatgctgttctcttacctctcctccttcaaatcctcctctcataccttcccccaggctttttcaaaagccccctcccacagagtcctctcttggattctctctcaaggagcccctcaccaccgtggctcctacctgcatgcaaccctgccctataacatttatgagcaggac

SEQ ID NO: 2311 - DNA, 705 bp, Unknown
  Description of Unknown: unclassified Mitovirus sequence
gtaacaacggaaaacgaactcaaaatcttgagttcagctcttgtgagcactaatttggtatttatactaggttacgcttatgggagttcccacaagtaaagtagcgtcgacgattacactgttgacgggacccgtctctggcgttgagagggcccgggggcaacctcgggggaaaccgaagtcactttctcttgaatgagaatgatagaggcatttcaacatccagaacgtaagtccgatggcaagcgccatcagtcctacgaaatgctgcggccccctgctttgcaggggaaaccgaagtttaattttaaacttaccgtataaaacggtagtttgtacgtttgtcaagttgaaattaagtaggatcaatatatatctcctagaacttgatatttatgttcccgcaagtatggcgcttagtttcctttgtaggaaagtaattcctattcccagaccatttggtcttcgaggttataggttatccgtagggactaagttaaagtcataccaggggtatcaagatggagttttaataaaaggctgagacgccgcttcccgtgagggatgacgcatcaggaatgcccgtgagtagaccccggaccggtgtaatacggtaccgtagtggctgaaagagccatatctacgaatctcctctcgaaagaggggagaaacggaaactatctgagtgctccttatatatataac

SEQ ID NO: 2312 - DNA, 705 bp, Unknown
  Description of Unknown: unclassified Carlavirus sequence
ttagtgtagcttaggtattgctattgtattgaatatttatggatgtgattgtagatttgttgtataaatacaagtttgagcgtttaagtaataagttagtgtgccctatagtcgttcactgtgtgcctggggctggcaagagtagcttaattcgcgagttgttagaattagatagtcgcttctgtgcatacacagctggtgtagaggaccagccaaggttgagcgggaattggatcaggaagtagagcgggcaacaaccggaaggcaaatttgtggttctggacgagtacactctgttgactgaagtgcccccggtatttgcattgttcggtgaccccatacaatcgaacacaagcgccgttcagcgtgctgactttgtgtgctcagtgagtagaagattcggcagtgccacgtgcgggctgttgcgagagttgggctggaacgttcgaagtgaaaaggctgacctggtgcaagtatctgacatatacacaaaagaacccctgggcaaagttgtgttcttcgaggaggaagtgggttgcttgctgagatcacacggggtggaagcattgagcttgcaggaaataacaggccaaactttcgaggtggtaacgttcgtgacttcagagaattctccagtgatcaatcgagcggctgcctatcagtgcatgacaaggcatcgaacggctctgcacatcttgtgtcctg

SEQ ID NO: 2313 - DNA, 705 bp, Unknown
  Description of Unknown: unclassified RNA viruses ShiM-2016 sequence
aggggcgagcagatccattctgtggatctgcaccccaatatactctcttcaggtcatctgactcatgtcacaaagtcagagctgacctgggagggtgatcagctggtcgacagcgaggggcgcaaatcacaacagctaacaatacacacaagaacaacaacagacacaagcggtgaggtgacaattaaacaggaagatgcaggatttgaagacgtgagtgtgctccaagcggtagcgaccacgctggacaacaatggtgacgatgggagcgatgacatcatcagcattgaagaagccagtcccagcagtgacactgaggacaggccagtagaaccacaggctgaggaagaggaagatcaggatgtggtcgttggagttgaagaagaggaagagcctgtggcagaagactgggcagcagaggtagaggcagctgaagaagaagaactaatagagctggcagtcgaggcagaaagtggccttgccagtaagacagtattcaacacagagggcatcaagaaagttgacaaactcactgtgttgaacactgtctccacattctaccacctcaacagagacggccacacatacccagcagcacaagtgacatttagctttaaggatttcagcagatttcctgacaagaactacactgaggtgaaggctaagggcttgcctacattgacagtggctgtgcttccagcagaa

SEQ ID NO: 2314 - DNA, 706 bp, Unknown
  Description of Unknown: unclassified Iflavirus sequence
ggaccgtactttgtcgacgttttgaacgatgacgaatcggtatacgcttcggtacctattgttgcaagttcgttccctattttcgatttgcctgcccgaatttgactcaaacaattgtgacatactatgtctctgtttgaaagcactacacgagtttgcgcccagcatgtatgttttcaagtcttttgtataagtctgcctctatagtggttttctttgaccttaaagccttgtcaaccatcctatatgctgcatcgagacttgatgtcaatctgcctctactacgcaaatgtctagtaattagttataaggttttactattttccctcatttccaattttagtttgtagtgtatgtgagtatcattcttactccgactgttaagagaaaccaatttatagtcgttaaatatgataaatggaatgaatgatggtgtcattttaaaaacactcttctctataggcgtaagcattctcgctcttagagtcgtaaagaagaaatgccgtgtctatcagtatgttatgcgatttattttctgccacgcgcttctagtgcaatctagttgacatacagacattgcctaccactcgcgagggtcgaccggtagtgtaaggagtaagtgatgatttccgcttattctgtaccctttgcctggtgaggacagatcctgactaattttaaatataaatgaacactagcttccaag

SEQ ID NO: 2315 - DNA, 706 bp, Unknown
  Description of Unknown: unclassified RNA viruses ShiM-2016 sequence
atgcatgtatatttttattcatatgtagcattatagaatgtaacacatatgcttatgaatcgagtaaaatcggtcacggcgtcactgtggtaaaattttaataatgttgcaaaaattttttagattacatgcgaccaaattaatatatggttttttacaataggttgacctcctattgtatgacgaatttttacaaaattcatttggtttaataatagataaattaaattaggaacgcgatttttaaaatggtatgtttaatcgaaagactaacacgtgagtaccgaaaggaaagactcatctgaacctaatcgattaaacgcttaatgaaatatatttaactcagttgttgttaccacaatgcaacaattgttataatcaacaaatacatcactaccgtggtttttaggtagtaaagcagtttcgattgcagactgtattgttttctttaggttaagagagtttatacactctcaaaacttggatggtttctttttgaagaaacgaatccaatccttaaaagatgtcatagccgtagtaagctaacgcacgatatttatatcctgttagattataccatcggctttatatgataagtacctgaagttagttaccgtgtaactaacgtccagactagtatcatataaaggcctgtataagcatgctgaagcgcttataagtgaatattttaagatcaatgtgaaat

SEQ ID NO: 2316 - DNA, 707 bp, Xincheng anphevirus
acctattttactcatcattttacagcggtgtttataggtcgcttaatcaaaacttattcaatcaactttttgattaatttctttctttcattttctttaataaaacccgccggtcatggaacaaaataacttgagcgcattggagacattttataaatatattgaagaagtctttgtgctatctgggattcaaggatttgtgacagctgttttaggctatattcaagataattggcaaaggggaggtctgattgcaggttctgattctgattcctgcaatccattttggatctcccccgtaattagaaatcaagacgagtcaagagtgactgaaattgttagtgaatattcgagtcccggaagaaatctggtcgccatgctggttaaaaggaccgtgacaaaggaaattgatagtgttagttttatattaggatttttggctgctgtagtcttggtaatcgcctacattctgataaggatggcaatccaaaagatatgtgacaaaattaagggtaaggctagggatttcattaatagttgtataaggagtcatagggcaaatgttttagcccaatatgcagttgaaaaaggagatcaacaggatctttagaaaaaccctccggtcaaacaacaagtgatttgatagcagttagcagagatttagcaaacgacagatcaaaagttacttcaacagaagaagagttaat

SEQ ID NO: 2317 - DNA, 707 bp, Unknown
  Description of Unknown: unclassified RNA viruses ShiM-2016 sequence
acaaaatgccccctcacttccggccgatatttggcgaatagtctcatgactactgcataggtcttcgtacctggaggattcgtgtagacagccctattattttcctacgggactatagtcgggtgttcgccggtatgggttatgagtttcaataaaccctatttaactgtctcttaaagactttatcttttcattctgaaatcccttaaggatttattgcaacacctgcatcatttgttttggacggacgccgaaagaaacaaaatgttgctgtcgcatggcaaaggactctgatagtcgtttgaagggcttctccggtatgaagccttcgaagtagccaacagcattgtggaagtttggggtcgcgcccaggtggaagcagttgcaagtcctacgatgacgtcctctctcacttgtaaatattgaggcatgtcttcttacgacttgttcgtctaccataagctactgcgtaatcggtttgtgatgggggtcacttactgtagcaggataaacgtgtgatatataatttaccgtatgttttgatctttccttggcggaagcggttaacccgtcattgtatgtaaccacgacttaacaaaatttcacttaagaaagaaagtcgtaccggaaaacgcacccccttgtttttgtgtagccctgccgaacgccgccatttgtggtatcgtcagtggcaaaataagaagaaa

SEQ ID NO: 2318 - DNA, 708 bp, Unknown
  Description of Unknown: Bat Paramyxovirus Eid_hel/GH-M74a/GHA/2009, complete genome.3 sequence
caaagatcagtatggtcacctgagcccatcctccacacattcccacgactcctgagtctcgaccccgaagggcagaaatcacaactgacacgaaccccaaaagacaaaaaaagcaacctagctcacatctcaacccgctcactaaacaatctcaattgactgaacgctacatctccaatagattgcgataagccttgctaaccagtttatcaaacagctttgggaattttactctaaatctgaacttttggtcaactaaccgaatattaatctctcaaactatcatattaagggttaatcttgactaaacaaaacttaggaaatcagggcttatccgaaaaagacaaccaacagacgccgaaaatcaacacacacaaggaccaaccacagagaaaagaagaagcaacaaacacaggagagacccccaagccaccaccagaaacaccacatccaaggcacccccaccccccaacaccccacgccacagcccgtccacagaaagctccgacggcccggagacccccaggaacccggaaaccacacaaagaaacaggaccatcggcactcccagagagaccgaaaagaagatcggcgaccaagttcgaaggaaaagcgagacatccaaagaacccgagaaacaaaacaattcgactcacagcaagctcagtcagcaagcaatatcccaggaaacaaccctggtacagcaca

SEQ ID NO: 2319 - DNA, 708 bp, Unknown
  Description of Unknown: unclassified RNA viruses ShiM-2016 sequence
gaaacacctagggtgcttccctaggtgttgtttttgctttctttatagctttgacgttatggatatcctacttgtacgtatccatatcctcttagtatctttctttcggcaaagacactcttttacccgttgctttttccttctttgtaagaaattagtttgcggagttattactaccagaatctgattttggctctgtagctctgtaaccttttatgcttacccttacgaacttggactagtcttctgattatgagcttgcctatcgattaattaagacgatcttatattctctttagaaactgacttgtcttcggtcagtggaactatcaacctctaaaagaaccattcatggaccctttctatgttttgctccccttaggtatctccgaggagtgctgggaaatcttcataggaaatgctaacagaatgtctagtaactgaacaaatactactctaactttattgttcaacaaactctatataaggaagtggttattatatagttttatgtcggtggctccaccggaaaaccatgtacgcgcttagacttagaaatctacttgattcgtcatttagatagtatagacttaagaaatgcgggctgatatgcgctgaagtcatatcgctcaaagtgttcaccgagcatagtagtgaacacgggtgctgctttccctgtaagcaggttttcaaaacccctctatttat

SEQ ID NO: 2320 - DNA, 708 bp, Unknown
  Description of Unknown: unclassified RNA viruses ShiM-2016 sequence
atgaccgtaaactgcacatcctaactcatggcgattcaacaacttgtacaggcgacttttgtcgttggtattgctcaatcgtgcatcatcaaaccgtttctggcttggaggcgtcgcagaagggctctgattctggatgccaaggatgatttgaacgtgttgaattcaccatccacccttaagactcccttgaatgccttcactgaggtgcattcgcattccatccgtcgtggtgttgcacctgaggtgtcggagatgacgacaatcaggagacggcagcacaaaaccttttgtgcgaagtgggcccgggccgccaaggttcggttcctctttgtacagatgtgtcaggacactccccttaacaggggggctgttcacaggtggttgttgggacagtggcgcgagacgtatcggacgcagattggtagtgatctgcacaagatggatgtgttccttcgggacactatagagatggcgttcttgcccactgatgaatgcgtggcccaggacaagaagtccagtagggaggtgaagaagcaggcacgcatggagttttataatgagaggaagtttgtggagggatggaaatagggatgcctggtgcaagttcctggttatgatagcagacccgttatagataacataccaggggtaagggtgcgagcactggatgatgataagggtcagaagaaggagcggttcgttgtc

SEQ ID NO: 2321 - DNA, 708 bp, Unknown
  Description of Unknown: unclassified RNA viruses ShiM-2016 sequence
ccgcgcccggcatgtttatggctttgacgaagatgagttcgagtccaatggccgaaccattatagtccacgacagtaagatctcaggcgatcgcgctctgcgccgccaggagaatgagcgtatggctgacatcgccgcacaacggaaagctctgctgcgcactcgtgatcagattgcgagtgagcgccgtgagcttgaacgtcaaactcgctcatatagggaaaatctccaacggaaacgggaggcgcttaaagaggctcaaattgaagcccaacggcgcctcaaagaactgaaggaggccaagactgctttcctcaaagagcatgaggccaaagcagccgagctggaccgagctattaatgccatgtccagctcactccctagtgaaagcaaagaccatacgcatgaggattttcggcggaggctgtcaccgggccagcccgagccagaaagtccggtgaagggaaagaaagttacatttcaatcccagggccagcacgatacgaagaactcgaaacctatcgaaactactcaggaatccactggctcgaaagcaccccccagctcatcggaaccgaaacgccctccgttgaagcaccactcacctgggtcggaaactggaaaactaccgcgccgccggaaaaggcgccgcgcggcttcgaaccggaagaagcaataaaagtccttccgggactttccggttatgtc

SEQ ID NO: 2322 - DNA, 711 bp, Unknown
  Description of Unknown: unclassified Endornaviridae sequence
accccaccaataggcgctgaaggccaactaaagcatcaaacattaatcgcatactatctgagaaggctcaaatctaaggctaaaggagaaccaaggctcgaagaaataatttctaaatatgaatttgagcaaaaacaaaatttgacacatacaataacaacaagtggaaaatataacttaagtggaattatacctattaaaaacaattatggaatattactagataaaggcacaattataacttacatacgggaacaagaatgttgggtattaacgcataaaccagtaacaacccactttattggcgataacgatggaaatatagccaaccaatcgagacaaggtagttatgaattaagaaataaggataaatcaaaataccaacatattccagctgaacctgtcattaagaacaccttgacaaaagataaattaagacaactattagaaaaaaaatatacctataaaacaaaaatagccccacacaaattagattacactactttaacagatggacatataaatgaagaatggaaaaaatttttattggatgcttatgatgactgttcgtttatacctgacaatgggaaaatagccgtgtatgggatcataccaggccagttagatagggacccaggtgatgaagattactcaatatggatatgtggtgccaaaccagatggaagacacaaccgaatcaatgacatagtt

SEQ ID NO: 2323 - DNA, 711 bp, Unknown
  Description of Unknown: unclassified Umbravirus sequence
atgtgcggtggcaattttccctgtcgtgcgctacgacattaaagacgcgtatggagagaccagttgtgccaaggcaaaatgtctgtaaactttggtaacttggacgtgaatcccctaattaacgatacaaagctggggcgtccacacaccatggggcggagccgttcattcggaaagatggtagagggccaattccctcgcatgcagcgcccatgttcaaacggcgtggtggcggttggccaacaccccttcatcgggatgttggtgcccccaacatatggctaagggggggccaacgtgctaatcccagcggtaaattctcgggattgactagggagagaccaagactgatggaaagacatcaaacgaggtgattgaacctgaccgggagagagttcccatgactggccaagcgcgcgtgggcgggacaaccacgcgtacaatattgtcccacgcttatgaggcgtctaataagtgtgtaaggtaagacgagtttcgaggtcgttggcgacccgagatttatgcttaagacgtgtttcgaggtcgttagcggccttgagtacccgctctggttggaattgcctggagggtaaatacgcattcctggctctggaaagacagaatcttgactgctggaaagacagcggcgttgtctggcgcttaaggggcagccccccacagggtgtggtggacgacaccagatgatttagt

SEQ ID NO: 2324 - DNA, 711 bp, Unknown
  Description of Unknown: unclassified Marnavirus sequence
aagtgtgtacaatcggtttgttaaccaattatacatacattattactaggggtggtaaaacaccctagcatggttatagccgaccatgtgccctctccttccaattagtgtaggatgaagcggacctactgttaaatcaacaacggactggtggctctttggactgtataagtaagcgacagcatgcaacgtgcagtggacaaagatccatgtaacacgttgtcataccggtgagcttagaaagaggatattggcaatcccgcgggacgcgcggaaataaattcgttccaccccaacccacgttttgcatattgttagtgttgtgagtaaaccagaaaactctcttatatgggagcatcgcttatagagcgactccggaaacttaaaacaaacagattgcggccaaaacttaaataacttgtatattcaagccaataagatctggaatagtgggcaaagccattaactttggaaatgatctctaggagtaacagcatggtacctatccgaatcgtacaggtagtgccgacgttaaaccatgtttggtcggagtaatgaaccgatctcctttagtgattgtccttagtgaaaactttgtgctaggctgtaactcagctagccggaacccccccggtgaacgaaataggggtgggaaagggacgcaggaaccctgaaaagaaactgcacacgaatcagatacaaacgaataca

SEQ ID NO: 2325 - DNA, 712 bp, Unknown
  Description of Unknown: unclassified Picornavirales sequence
tattggagcagccgcaactttgggagcatcattgggagcagcgtctatacaatccaacacagctaaagagaccaataccactaatttaaatttccagcgagatgtcattagtcagggtgagaagtcttttacggatgctggactaccaaaattcatgtattatggaggacaatcagcaactcagccaaacaccctcttgcaccttggtggatctaatttctatgaacaatcgggtgttaacgcgaatttgccacatttcactacgggaggttattctcaatggaaccatactggaacaactcagcaacttggtaaaaactcagctagaactaactcagtacttgacggtgcgcctcacctctacaacagctttgtcagggaaggagagactgggcccccacgccttggatatggtgattggacagttgtcccacacccgacagcgtactctgatcagtcgattcagacggatagagcgatcacgtctaacttctctggcggccccgctaagccgacaagaaatacaggcacaaattttacgtcaactccaatgtctcaacgttcaagctataatagccctggaaggtcttcagaaccgccaatgtctgaagcagatatcgttaaaggattgtatgctatgagaataaggtaacgtacctcggctttcgccttcacgttcgcaaatgcattagccatagaaaattatatagtc

SEQ ID NO: 2326 - DNA, 714 bp, Unknown
  Description of Unknown: unclassified RNA viruses ShiM-2016 sequence
gcggctagttgccgcacgctttgtagtagtatttgtacgttataattatcaggttagaagagtactaatactactctctaatctcacatttaactatagatgattacactcaaaaattatatttcatacgtccaagcacgatacgcttacacatacgctttaggttaagaccgtaccatcttaacctttatttcttttggtacttggttactatgtacccgtaattcactagacaatggtctagcacataacaaatcgtcaacttagagagcgttacgtttgctcatgctgatcacataagcatccactctcaagtttttatttaccacgtcatcaataagattgacatcgattcttttctaaacgactgttttgtattgcgaaaagtcatcccaccaacttataaaccctgaatttatagatcacacccgcagtagggttgaacgtgatctttttcattttatttgttggaacaatcgggacttttcggttgcattaatccgacgaactggaacaagttaacaatatatcgtttttgcaagtataatttcaggtagtctacaccgggctactagggttgttcgcagcacccgtcctttaaatacctctgactaacgattgagatagactagaactatgtccataatttggtaactgacttgttgaataataaaatcttttgatcaaacccccagacttgttttcaaaataatc

SEQ ID NO: 2327 - DNA, 715 bp, Unknown
  Description of Unknown: unclassified environmental samples sequence
ccgggccccggcttatcttcccacaacgctctcgcatagtgatactataggttagctatgcgggagtgacaggcttgcaaacgtggggttacgcaagttgggcctaggtaccccttggggtgcctaggtctgggcgggagccaagccacggcagtaatgtcgtggcgcgattttctaggagattcctagagtctcctagaactgacttacatctttttataaacttcttgatggcaataccccattaatctcccaatattataaactctatagagtttctttgagagtttgcgtatgtataacgcaaggtttctctctaatgcgttgggtttggtcggtattgcgtcaataagtttataataactggtctgtcagcccgttctgattttgtcctgtgttcttcctactctttgctttgtgtgttttatttaaagccgactgtatgaatgtaagcttatttctaagcttgcaggccaaaatcgtcagcaaggggttgatagccttgcgatagggcgtgctaagtgtgggaaaccactaaatgccgagagactgcaacggccgtaattcatatggtgcacagtcctcacctactggcgggtagctccggcttataacaccagttctgtgctatctttggatatttggaagtattttggaagtgattcgatttgtgaaagtaaaagtttggaagttctttggaagttttcgaaagcgt

SEQ ID NO: 2328 - DNA, 716 bp, Unknown
  Description of Unknown: unclassified Mitovirus sequence
ggggtagactctcgtaaagagagcctatcacgtccaaagactaggacgtagatgatcagattcatcgtaatgtgacatcgccgtaacgcaaggctacggaaaggaatgccgagagaataacttactctctgcaacccttagtgtaaggagtgtgtcgttgggtgttttctgaatacctaagagtagaactcttatgttaagatctcagccagggttagtaacctggtgagcaatcgaagcataagtgttcccacttatagtactcctgttctcctccataattgccgtcaaaagcaagaaagagtgcaaaacagaaccgtactagacgtccccgcactgcctacgcgatctgtagaaggtaccattggaggtccttccggggcggaatttcaccgctagtgaacgaaacgatttcgatcgttctctgaaactgtgtgcgatttccattaaaatcagtaaacaacgtataattattaacgatacttgctgatggacggataatccactgtaaaccttaaaggtaccttatggtatatcaggttaaaaactgatgaaggggtaaagcaattcaccccaatccataaggaggtctacctgactctcctagagtagctgcggccccttgaagtgatgtagaaatatataacttcttaaccttcgtgagggaaaccgactttgacacgaccaaacttgaggcaacctacaattttaaattt

SEQ ID NO: 2329 - DNA, 716 bp, Unknown
  Description of Unknown: unclassified Riboviria sequence
tagaatatacaaaatatcttcccttagctgtagtaacaagatatgctgagcctataagggtaacaacatttgctgctagagaagtgcacaaacaagtggagaggagtgtagggctcaggttaagagccttcaacagattagctgtgaaagcatccccaacctgggctataaccccagttgagggtccagcttttgattgtaccggcatattgccgaaaatacaaaagcacaaaaacgataacgatacacgtaatacgtatattcgtttttgtgcttttctcaaaagtacagcttgtttacgcgattttctcaaaatcgcattgttttcgcgcttttctcaaaagtgcatctgtttattcgattttctcaaaatcgaatttgtttatacttttctcaaaagtaattttattttatagatttcttcaaaatctatatttgttttatcacttttatcaaaagtgaatccgtttattagattttctcaaaatctaacattctatcatatttataaaatatttaaattttcctggcttcttcaaaaccaggaacttttgttggatattttgtccaacacattattattaaattattttaacacaagtattaggttttacctgatatatgtaaatattttagcgctttttataaaagcacacagtttacatacttggactattcgcataaggatttgccaagtattaagtattttcggcaat

SEQ ID NO: 2330 - DNA, 716 bp, Unknown
  Description of Unknown: unclassified RNA viruses ShiM-2016 sequence
gggaaaacccctccgtgcaaagtaacgctcctcaaggttcgtctgcgactaagcccaatgaactgtataaacccttgaagttactttgtgcaacatagtgtatttctcacgtgctttatttaacttcaactcttctgtattatcagacgcaagcgtagattgataatacttatcgagttgtcgaacacctctgatttatgaacgatctcagttgtaatagagagaacatttattgtattagaggccatatttattgtgatgctagtaataatcacttcattttgaatgtgtaaagactgctgctgcttctaatttatttgctctataggggtcatcccatcctatagcataaattatttgtggaaattgagttagtaataacacagccgctctgctagtatcactctatctatggtcctattacaatacttgctatcttagttcaacctctacattccggcagagtgtagttgtaactcaatccagcggctcgaccccgttggatgccactttataggcgacgcctagtaaaacctgtgaagaccttgggtcgatcagagctcccaatgtggatacattttaacagaccaagcaattcaagcaaagggctcacttatgtgaaaatacctccttgttttgtggctccaagtggatcatgagcccccactagaatgtagatcataagtagtgtactgatcactgaccctgtctgagga

SEQ ID NO: 2331 - DNA, 717 bp, Goosefish actinovirus
cccagaaaactaattgcaaactcaaaacctcaatctacatgaagccgacagtgacactcttaaactggttgtcaaaagctaaacttggggcaaacgcagcaagcaacgaagaattctttgttgtcctctgcttttggcacggttacaaggcgattgggaacgaaagtgttgttagctggtggagaggtgcagttaacgaagggaggccacaagaggagaaagtgagcgaagcagagtttgacgaagcgattgaggctgagagtccattaaggaacatacagataaccagaggcggaccaagtggtgaaatcctgtaccttgcgacatctgaagagacagttttgtttaatcagcaactgtctgatcaggggtttgattgtgcaagttgatggaacagattttgacttgggctgagaacaagggtgtaggataccatacattaggagaaaaagagaacaaagtgttcttgtgttgctggacagcatataataatcgcggctccaggtcaacttgtgaacattggataagagaaggttgcggaaaccaaacagagactgaattccaaaggattagaactaagttctcttggtgtcacagtctcgctacttggtggccacatcatctctctgggacaaaagtcatcatttgggagaaagccgttcccggcacggtattcgtaagcccacttaagaagcacgagacaacaagtcgatagtc

SEQ ID NO: 2332 - DNA, 717 bp, Unknown
  Description of Unknown: unclassified RNA viruses ShiM-2016 sequence
cgtggattaacacccacgcaatgatgcattcctcaggaattcctcggaagctattgatgattgaactggctttctacggattccccagaaattcctcggatatagtgaatgattgaactgagcatccatcgtttgcaacgcattttatttctaacgccggagacggctttaaacatctacccctttatgtattgtctataccgcgtgcgcaagctgcacgtgagtgagttgtccggccccagggctatgtgattcgtctaagttaataatacctctcgacgacgaattcacaaccttggtaggtcggttgcggcttatgccgctctcttataaacaaataaaagaaataaaaattagaaaataccgctaaaacaaaacaaaaaactttaattcgaacgtacattttgtacaacgcttatatatttctattttctgcggtatacgtaatgaaagtcatggttgatgactgtatagatcgatgtcatattggattatggaaatccactcactgacaaaggatcaaagcctctcagatttgacgctttgacatgtacacgaatcctagtttactagtatggaagctatgatctttcgttcatcctatatgtgaaaaccagatagggtaccctcgatgtactgaaactcagatagagggatgggacctcgataaaagaccctattaaatgaaagttacttacgatataacgatataaaacg

SEQ ID NO: 2333 - DNA, 717 bp, Unknown
  Description of Unknown: unclassified RNA viruses ShiM-2016 sequence
gcctgacacgcagacctagccctctttgcctgccgtacacagtattgtacgaccattcagcagggaactcttagagtgcgagaaatcgcggagaacaacgtttatcctgaaaccctaaacctgcgacaaccatcatgggttacgtttttttttgagtctgagagtaataacatgtacccgaactctgagtcagtctaaaaacacgcggtggagtggcatgtcaaccgttgtgtctgtggggtgccacccgtgtaataggacaagataacgaggggagagagtgggacttaccggtaggacgttgagtataaaccttcagttaaagtaaataacggcataaatatggaatcgaactttaatcaaactgataatagggatgtactagtcaacgaaaattcagttgatatagtggacgagacgtcaaggttagttacagatgtgttgtgcgtgaacacattgtacgctaaagtggaacgccactggatttggaccattggaattaacgtggttctgttgtgtgtagtagtcatattgggaatatggattggactattatacattcagcaacaggaacacgtttctgaaatcaaaaaaatgaattacggaattggaatgatgaaaaaatcagcaaatgaatcggaacgtttgctgttggaagtgtgcaaggctgagttcggccagacagcttccatttgtgaactcaactggctctagtta

SEQ ID NO: 2334 - DNA, 718 bp, Unknown
  Description of Unknown: unclassified Iflavirus sequence
ccagcgtgcgcatctacctcagggaagaggtccgatttcatatctcagtttcttgggatatgttgtaattcggatagtagatcctacctttggaatatgggtaaaagttatatttccaaaaattcaataaatatatttataagttagttcacagggctataacctaccccttattagtaacaaaataaataaaatactcggtactgaccggggtatattattgtatttatagagatcaaatttagtagttcgtgggaaaactatggtcgttttatgaattatcgttctttggaggtatccatttactggcttggtcagtcaggctcgattattcattttatattttgctctctactcttacaatgtatatgtataaatatagttttaaggcaaggcatagataataaagatatgttagtaagtaaacaagagtacgcgacgttatgttgtatgaaaatagtcattgacttaccagtagccctggcgtaaccagtaacatagctattggctcttgtcggaagcaaccgctactttattatcgtatgtgacagatttatctacaatacgtgttaacctttgtgttagaacctcgatgatatgtgtatccatagacttcgggtatatgctttctaaaagcatgcacgtacttctgaaccgtcattatgagcgttagacgacgaaggaatatcgactcatttccctttttaaaatcttactt

SEQ ID NO: 2335 - DNA, 718 bp, Unknown
  Description of Unknown: unclassified RNA viruses ShiM-2016 sequence
cctggcgttggcataggattagttagactaacttcacacctccctcctcatcccgattagttagttttgcactataccggtttttggagttccagttctgcctgttggtgtgtaaacgttttgagccaggttcaatatgtgtgaaaccgagcggggtcctgcactttgatcaccagtaattcttcctgagaagtttccgtcgctctatgggagatggcagcattgtgcaactgtacaacggacgtacagtggatctgacaggggcgtcgccacgcgtttgagagacgtgttaataaatatggcggccgggcctcttaagcgcgcctacgaggagcgtccaaccaagcgatggataggtggaggtgttccggagccccagcggtagcttccaccgaaacatagtctctctaggggtccgagcatatcaacgggtaacgggctgtcactcctttccttgtggaatctgtaccattctgatgcgaacgcggtacctagtacctcggtccagtcagacttctttttggacgtgtatgccaatggactgccattcatcggcacgcacacatgttatgctgtccctccccctcctgccgctgctcctccggcacttccacctccggtgtggtcgtgcaccaggtcagcggtgacaatagcatactttttagtccataggaagcttctcccctccccaccaattcgggacctcaccgttcccgga

SEQ ID NO: 2336 - DNA, 721 bp, Unknown
  Description of Unknown: unclassified Picornavirales sequence
tttcacaacgaaaatggccgctgctgcacttgctggtgccgctctttcaggaggttctaatataatcgcatctttaggttcaacaggattacagtcttatacatcattaaagttacaaactggcgaacaaaaatacaatcaaaatgttatggacactgccacaaaagcttttactgatgttggtttacctaagtatatggcctatacaggaaattcaggttctcttcatttacctggccaacagtaccacgtttctggctccaacttttattcagctggccttgttggtcaatcagttccttttttatctactccgtatcaagcttttactcatacaggaagacctaatactaccgtaaatcaaccctctgaaagaagagcaggattaggtgtgtattcacaggtacgtccctggaatgagcctcaaaatgtaaatgagctaggaaatacttcttaccaaaatttgccgataaatagggctctaatggcaagtatggctcggaatgagaaccctaccggaaacatgcaaactttgccgaaaacaaattttacaagaagtagttttcctactgccactccattacaaaattttgtaggtagaaatactgaactgcatcaacaggcagcccgacttctacaatgacctgcttagtctagttgacgtctggtctattttctttccaatcacttagtgtagcgcttgtattggttaatcttaatt

SEQ ID NO: 2337 - DNA, 722 bp, Unknown
  Description of Unknown: unclassified Orthorubulavirus sequence
tcaacaaagttattctgtaatataaactaatcttatgagtgaaaagatacccacacaaggtggtcgatagacaaacagcaagagcagcaactgcaacaaaacttcaagggaaaaataattcgagaaatataataaattgacctcagagcaaacacaacatcgatccacaatagtcaacacaatcaacaatactccatgaggcttcacccatcaacagcaaaaagcacagtccattaagcagagcccaactcgcctcatcctcaaccatccactgaaagaaaaaatacatgaaagacctttggccaccagatccaaacaatccagcacaaaaattcaaacaaccgcaacactccattcggcctcaacaaacaatccgccaatctgtccatcattcccacactgacacacaaccatcccattcctcaccagcaacttaatccgcaagtcaaggaagattctccatatatttagccagtccgtcaatccgacacatcatcgtattttttaagaaaaaagagagatgagcaattgatacattctattttccatacgtatagtaaacattaaatcatggattcaccatagaccaagaccagaaattgaaagatcagaatgatcttgaacagcgatggataagcattgagaaacaaaaaagatagattatctccaacaacgaatggcacaaagcatccaacaacaggggggaagagagcacccccaag

SEQ ID NO: 2338 - DNA, 722 bp, Unknown
  Description of Unknown: unclassified RNA viruses ShiM-2016 sequence
ctctcttacaaaattttgaaggatctatcttcgatccatagaatacattattgatttgtattttatctatgtaaggaaaacagcactttcgttttgccggattatggaaattaattcggttatagtacgaaatggcaaaaacgacggtaaccaatcagagaatttcattattcttttgattgaccccgtggctttaaacatatgcgtgatagtatatgttaagcaaacaaaacattttgggtaaaaccaaaaggttccatctgttaagaggaataaaaatatttaccacttttatagtggcggttttcactaggtatttagtgttgctcgtgaagcaatcctagaatattaaacgaacatcttttacgaagcacattgctcgcttgtcgaagggttttataatttactgaaaaacgagagaagacgcatgctagaagtatgtagttgctccgtgcacaccaccgcgcgtccgcagtttaacgttctctcatatctttgcacgagatatgtttgacgaattagaaaaacaggttttcgaaggagaccgttttgatttacaggtacgtgaaaagtaacctatagggattaggtacggcattcagactctcatctggacgtaagtccgctaatactataggccaagatctcaatcggattggctaaatttaagactattagttttttaattttagtaccaaaacaacaagagcccaaccaacatc

SEQ ID NO: 2339 - DNA, 723 bp, Phyllomonavirus phyllospherae
ccccagacatacagccagcccagcatcctccttgagatttcacatactgtctcctgtcccccatccctatcacgagtccggatggagaaatataaagatccgagaagagacacaatgtatccttccgagatcaaaagttctgctggtaaaagagtagctttctttgtaatgcctaccggacatggaaagacgcatcagcacagtcctgaaagagggatatacgatgccgccaccatagttcctccgagcggaactgccttcctccgttttgcgcgcgatcatgggaagaagacggggaaatgggacacttatgaccgagagtggactcgtcttcttgtagaatatgtggagagtacaataggtaatatagtcgttatgattcctcattacgcaaatggtattcgtgcagggtgggtagatatgggaggagctatcctgaccaggaaagcccttgaacataactttagagagaggaaagacaaccttgagtcatatgaatattatagaatggttgaaaagaggcgcggtgctcctgagtttgaatctaacaaagaacttgaaaagtgtttgctattgaccgcagaaaggtggattgttcgaggaatagacgagccttccaggattccctatctccttgactactaatcagtacgtctgtaataactattaagaaaaaattcgagaatagactctcaaattgaaaatttctaccaagattacatc

SEQ ID NO: 2340 - DNA, 724 bp, Unknown
  Description of Unknown: unclassified Lagovirus sequence
ttgtgagcaaactgaactcacaaaaagtgtcgttctgaccttgaagtcgcaccctatgactattcttgacgcaatgatcattcaaaccaaaagaggacttccaagtggcatgcccttcacatcagttataaattccatatgtcattggttactttggtcagcagcagtttataaagcatgtgcagagataggtctccactgttcaaacctgtatgaagatgcccctttttacacgtacggtgatgatggagtttatgccatgacgcccatgatggttagtttactgcctgccattatagaaaacctccgtgattatggtttgtctccaactgctgccgataaaactgagtacattgacgtgtgcccattaaaagatgtggcattcttgaaaaggcatttcaaaatgacagacattggttgggtgtctttgctcgacagatccagcatcctcaggcaacttgagtggtgcaaaaccagcaaacggcacatgacactggaagagactcatgaccttgcaaaggaggaacgcggtgtacagcttgaggaactccaagtggtggctgctgctcatggtaaggaattctttgacttcatcaagccagagttgatgcgccaacaagcttacacgaagttcaacgtgtacgactatgacgcagcttggaaaattcttgcagatcgcaagagggtcgtctcggtagtacctgacgacaattttgtgaatgtt

SEQ ID NO: 2341 - DNA, 724 bp, Unknown
  Description of Unknown: unclassified RNA viruses ShiM-2016 sequence
ggggggaggggtaaaaccctcctctccttttggcacgaacagagattcctccttgttaggttaagtcctggtggtggatcactctcccattaggttaagtcctgactttgactgtccctctgtgctatgtcgagattccttgtgattaagtagtaagtcctgaccttgggttaccccactgttaggttgtaagtcttggtcccaactaaccctcggcgtggctgtgtcgaactgagaacctttatttgtttagattaggacaagcgattttctttgtcgctataagttcgtcaggcattgcttattgcctgtccctttctatctgtcccagagtcctgtgactattcttgtcccaaaacattgtagctgctagtaccatcgtgtgttgattattacaggtaacagcgtagatcttcactggcaacagtaaagcacgacagcggaacgcagagcactatggtgtactaaggcacttatagtttctaactctatctttttcgacaaccggatgcgcatgacgggattccttctttaggaatgaaagggtaattattgcgtagtcgggtttaccggctattgtctactcgttgtgtgttaatgttcgcttccagaacagtccgaaagtgcactctatttctttcttcagtgtgtactgccacgtgttgtcttcttagtggcatctctttaacccgctagggatcttttatttttgcaattttaatat

SEQ ID NO: 2342 - DNA, 724 bp, Unknown
  Description of Unknown: unclassified RNA viruses ShiM-2016 sequence
gtaaacttttagtttacatcagcctttaaggattcctcatgggattctttatttcaattggattgaatagttactttaagtactttttgatcgaagaatttattcgacggtcttaatttattttccactgttctttacattttgtcttatgcaagatttttatttatctatcaccggatgaccggagtgaatattaatttacatgatctttctcactatgataaaagtgtcgttttattcattttacgttaaaatgtttcccctttaattatattaattatttccgtatagttacctgagctataattcaggagtttgtgcaatacttgcagttaacactgtaagattgataaagattttgataaatcacatactgtccccaatctgtacacaaggatgtatttatagtcgtagtttttattctatgaagtagaacttacatgaatattattaacgaaagtgtgaacaggatttatttctattataggcgcgagaaaccatatcaattatgatagtggtaggacgtggttagaaagaatcagtttccaacacatattagtttttattacatagaacacgatgcacaataacgaaaaatacttattaaatacgtgcaccatacttgtgatgctgatagaatttcccaattagacaatgactcaacattattgatcgacgtggattacgtattctaaaaagctggtgctgttaacctaaagagaat

SEQ ID NO: 2343 - DNA, 728 bp, Unknown
  Description of Unknown: unclassified Iflaviridae sequence
gtggggggaaaccccacgttctgcaaagtgtaataacccttaagcccgtttcatacgtacctcactaaattgttatgaccactggaggatgctttgtgttatcggtctaaccacggccgagagcaattcatttcgtagatagtgttagtaacatgctggttgacacatacctgacgtcaataagtaaaagactttgtagaatgtagttcgaacccattacctttaaaacccaaaaccaaaactttcttatcaattatgaagaggattaaacccctaatataattgttcgtgtcattgcgttcaatgacttaaaaccatgcactaaagcaagtttaattttacgagcttttaaaatttggcaaatttttgtaagtgtagctactcaaagttttcgcagactttgttttaaactgtaatctttagatataattcagcgactgatatttgcgagatatcggaacgttttatattctattgaccagtgatattaccttaattggttgtatcgagacatagtaaggactataaccttctctcaaacggtgtgtttattagtatttcagaagcacaaacgttttcatattttatatgttggtacttgagtataagtatccctattttgaaacccttaatggaactgggaaccattattgtataaaccccttaccaagttatgatcgtagtttcttggtggaccgttaaatcgatcactactcgtgggaacaatt

SEQ ID NO: 2344 - DNA, 728 bp, Unknown
  Description of Unknown: unclassified Picornavirales sequence
ccacgtgtgtatgccaacctacatggactcgtgcatgtaggttggattcacaaccctttcataaccccccccttttaacccaacccttcgtaaccgtacgcttcactcgcctttgggtatagcggcccaatgtgctgaagaaaaggatacgctataaggggccaacgggtggtggcccttaagaccacccaacctagaagcttgtacactcgggcaatagtgaggcccacatccagtgggtcaagcccaaagcattcttgttccccggtatgatctcataagctgtacccacggctgaaagagtgattatcgttatcccactcagtacttcggagagcctagtacaccacttggaaatggaagtctgtgatccggggttgaccctgaaccccagaaactcatgatgaggctaaccttcccgaacacggcgacgtgtggttagcctgcgctggcatgaggcctctttgtaggcagactgaaatggaagggtgacgaagagccgactgagctactgttttattcctccggccccctgaatgcggctaatcctaactcctggtccagtacttgtaacccaacaggtggctggtcgtaatgcgtaagccgggagcggaaccgactactttggggcgtccgtgtttctcaatattattcatttctagcttatggtgacaatttatgattgcagagattgtgctgtatttgtgtctgagagaagaagtaacaat

SEQ ID NO: 2345 - DNA, 729 bp, Unknown
  Description of Unknown: unclassified Hypovirus sequence
tgcctgtaaaatccttcaggtgtttccttttggaaactaggagtgagaacaccacgctttcagtggtcagtatttgtatcgtttgtgttcgaatactactggctgttatcttttgttctcgtgagctttcgctcgtggcctttggccggaaactctattgagttttgtgggatttcctcccgtgggctttgcccgtggcacttgtgccgtttactccgaaatgagtgaaaactatttcaaatgcatgttaagacctcaccgcaaagtgtataaactaacagaaggcataaaacctgatgaatggagtagaccattcacggagaaccttattaggctgcctgtataaccgttcttcccacgactttatcaatcacgtagactgcggtccataatcgtgtttaagttgagactcgtcagcggagtcaagaacagaacgttaaaataacgctgattaacatgctttcaacatcttccggtggacgtttactggttaactgtatttggtttaaatttgaggtgtgacccctaccttcaagctaatttgacacgaccataccctgcgtaactagaaacctaacaagtcgagttcgaacttgagggttgtgttatgatatggtggaatcgtcaataatgaaccttgttaaagagccaattagcacaccgtgatgctcggttttaaaattttagaatggctgacccggcctagatgggtgtgtcacgtccaagaac

SEQ ID NO: 2346 - DNA, 731 bp, Unknown
  Description of Unknown: unclassified Caliciviridae sequence
tcccgtataagggaatggacatattgagttaacaatatgccattcccttatacgggagtgagcccacgaccgttggggtttttaccccaccgttcgtggacctcatttctgcttattacttcccccactttcatcggggacgttccttttgccgcacacccagtgcggcaggaggtaacgagtttattttgtatagttgttattagtcacaccggagggcgtgctttacgctcttaagggcttaacccactccgttgtgcctgtcacttgtcgcttgacggcggctggtctagtacgggtctagttagtaccactcagtggtcagggtgtgccgcccgttgaaggctggtattcccgcgtgagggggctaccgtggtaacacggtccttgcgtgtgtgtgagccagtatgctctctggagctgccattgtttgggaaagctcttccccgaacaactaagtgcctgatggcctcatttggctgattggtgctctcaagacatgtgccggaggcaagcttgttggaaccaccagcaagccctgaccggtagctaattagtcccttgacggcatcgaatttttcctttttccttttctttttgtgaactgaatatagtgatttgtgtttagtgcttttgtgcctttgtcacttttactttgtcaaatattagtgtttgtgcatttgttttaaactgcaacttgttgttaatttttggacaatttgaacttagac

SEQ ID NO: 2347 - DNA, 731 bp, Unknown
  Description of Unknown: unclassified Picornavirales sequence
tttgaaagggccctggatataatagggttaaacccctattatatccaggaattgccaacccataatccattgtccatcaatgttttatgggggggaccctttctcccctccccctccaaataccttttacccctctgtaaccaagagtgtgcaaaatctatttactagcccagaattgcggcttctggggaggtttattcctcatgcctaacaagatgttacgcaaactccgggctacggccctgggcttttgccctaaagatttagaagtttacactatcgtccaacaggaggacaacaaaccagttgttctaaggacaagcacttctgtttccccggtgagactggatagactgtacccacggttgaaactggttgatccgttacccgactcactacttcgagaagattagtaggaaactgtgaaactgattccattgatccggatactttccccgtatccagaaactactgatgagggttgacttcccgactacggcgacgtagtgtcatccctgcgctggcagtaggcctctttgaggatggaagatgtggatcggtaaccgaaggtcctattgagctagtgtttatacctccggcctcctgaatgcggctaatcctaacccatgatctagtgctcacaaaccagtgagtagctagtcgtaacgcgtaagtcgtgggcggaaccgactactttggagtgaccgtgtttcctattttacttttgtttg

SEQ ID NO: 2348 - DNA, 732 bp, Synodus synodonvirus
accctaagtgatatcactaactgattaagcaaaacttaggatgaagcagttggaaaacagtttctcaacatttaaattgtgcatacgtatctactttgaaaacaaccacctggggaagagatggatgattatacaccaatcaaagatattatatcagcagaggccctttctgacctgacagcaataataattatcattttacagatccacacggagctcggaatcaggccttatcctttcagtccagatattcatgatagatttcgagtattgtctatcagagctagtgatttcaccagacttagcataagaaggagggatctccttaactacgggatagactcgttacttggaaaggctgaaccgaatccgcagattgcttttgagcttgctagagttaggctgctcttagatctcctaagaaaatacacccacccttatatagagcctgacacaaagaaaacaaaccagaaatgaattaagatctctaacgatccgatatcagatgagttcggataacatacagatgattaacacctataaccttcttaatattgcatttgaacaaaaagaaattgatatcaatctgagtttaacaatactgtaagagatcatatactatgattttggataattaagaaaaacttaggattacacattatatacatcattctgtgtgacaacattcatcaaactagcttcaaaggcgttagcctctcaaaaagtgtcagt

SEQ ID NO: 2349 - DNA, 732 bp, Unknown
  Description of Unknown: unclassified Iflavirus sequence
cgatctcgggtttaacccgtgcagtgcttttaatagattttcaatattctatcgtttatctccgactttattgattagtagcgtctcttgttcatttttcagctcgatttttatcgttcgtgattttatgttcgttgagacgttttctgaactttgttagtcggagattttgttagaatatctttttctattaatgcattagtagtttaggtttcttttgcttagttttgtttattctggttttatctccagtacaattggaatattggaaaactttgccttcgtttcaaagagccgggctactttcccgtgcatgttttatttcctgcttactgagtgtaaagcttggttaccgtagatgtattaagttatgtaatgtaatttatgcatcgttaaattctctttacgtattatcgatttatcctccggatagataatgaattaacggattgaattttcggtaattgagtgtgtaatttcaggacccaccgtgagcagcgggtgtagagcgcatatcttggtattagttgttaattttgaatactaaagttaattgatttcttgaacttagtgtagtcatgtcttaccaatgttcaagttacggcaattaattaggtatctattttaacttgacaagcccttcatgcggaagaaccgaagttgtggtagttggctagtattaacagaaaatggggtgcgtgagctacattagtggtgtaactttaattaaat

SEQ ID NO: 2350 - DNA, 732 bp, Unknown
  Description of Unknown: Robinvale bee virus 9 isolate VN3-31 polyprotein gene, complete1 sequence
ggtatcagacccgtcatcaccttagcatacgtaataggtatctttagatcattctaaaagcattctttctactggagtacactctcctatatcaaaagtgaccagtgtatatggttggtgaaccattgtaaacaatcaccgtagctcttttaacgttataaagatggaattttaagctactaaatctctaaaactctgtactcaagccatgttaaggcgaagtaccaagataggggttttaccctcatcttgctcgtattgtgatgcgttggtgcctgatctgggctaacccaatacgtgatacatatacatatatagcactatgtgctactgcattaagaatttactctatgggtataaaaaacataaattacaaactccccatatagatccattttagtgttggatttctaatacactatgatagcattttactatgttagtaagcggataatagcagccgctggtcctacgttacatataatatatactaacctctccgtgaagcaaccttccgacgttactatagaaaactctaggataccctagtaacctctccgctccgagaaaggacgacgttaatactaatcaactgattttgtgtaataaggcgttcgctgaacactagtttaattactaatcatgtaaaagtcaagattgaaggaatcacaaccttaaatagtgatagtctagctagacgataaactcaattaagaaccagagtacaacaat

SEQ ID NO: 2351 - DNA, 733 bp, Kimberley ephemerovirus
ctaattaaaccgtgtacctcaatattatatataatccattgcatgagtaatgaaaaaaatgcgagcgacctttaaactcaatatgaatttttgatataaattaatcccaatttaacaggcatcatggagttttccagatgcaaactgagtcttcaaataatcaattttaaacccattgagattgaaagaagagcactactaggcttgcttgctgttaagagtataaagaccttgcacagaggtaaccaaatgattacaaggctttctgagatcttgataccaagtgcaattgtgaatggagaatttgttgttcgaaatgataaaaagaatggttactgaatctttgtgggggaggcttatggagctatagattcagatgatttaagaggagtcagagaaaaggtgatgaaaattagcagaaccataccattgattatcacaggagaggaatatggggctattgatttggacataacgctagaagattccgaaataatattcttaaaaagaaagaatgagcttgacatctgtgacttacctcgaaaaatgagatttctgcattgagcacaggcatcaaataatacttttattcacgctccaataaatggacaagtaaataaaggaaccaaataaatccttaaacagatgaaaaccttataaacatgaaaaaaatcaaattctcaagctgagacccactgtccttacgataggtaacttaagatcaacaggcatc

SEQ ID NO: 2352 - DNA, 734 bp, Unknown
  Description of Unknown: unclassified Bunyavirales sequence
atgatggtgataaacattgaaactgaaacaaagagctttgctgcgcagctgggcaactctgacaagaaattacagcttaaggaaattttcaaaagaaaattctgtggagacttcgcaagtcaaaaatatatttccttcgggagccagccatgtttggatttaggtggtgaaggtgattgtttctacagatgcatgtactactcattgcctcactcatttcaagcaagttatgcagaattttatagcaatttttctgatggccagtgggttgatgaagctaagatcatcaggttttgtgaaaccttccctgtgaagatttttgtgcattacggtgatgaaaagggtgtgatcaaacaatttggtgtaccataccttctggtggtgcatttgcttctctccaagggtcattacacattgatggggtacaaagaaacggggccttttatgcaaaaactactgatgtcaaataactaccatgcttctgcactgtctgaggatgtttatgactctattagcagcctcggcgtaggcttcatggaggattttgaaattctttgcaaaatttataggtcttgtccgggtttagttaccatgccaaacacaaatgtggaagttgtttcaaaatgcaaagatatgttgttgaacaatcattaccatgaaagaaacaacacagatatggtagcacacatccaagttatgatcaattcacttctttgtactaatccgggcggcag

SEQ ID NO: 2353 - DNA, 734 bp, Unknown
  Description of Unknown: unclassified Sopolycivirus sequence
tcgctttagcggattgtgtttccttaggttaagaacagtaagctttttgctgagtagtaagtaatgcgtaactcaagaaatcccgcaaggtttgaattcttgagaccactgccctgctgagtcatggtctagtaattgtagtgcaatacttatataacagtcaggccactaagaagtaatctcttagtttgctaaagtcctgaagaaacgatggaactagcaattccggactttccatagaggaacctgctaaatgtggatgccaccccagagagctccatttagtatgtcagatataagtatgaatgcaatgaatgatagtggcgaccccctatgggacccctcataggtaagcttggtatgtcaagaacactctcatcctaaagttagaacgatctgttcagctggagtttaaacattatgcttacatgtttaagttgtgcttcagttaaatcttaagccggtttcgtactgggacacacaaaccgttaatcttccattcgtggctagattgtgagtacccaattttattttgtacttaatgctgtttattttgctgtctattgctgcccttgctgttttattatttgctaatttttgcttatataatttgctatttactgctgctataattgatactttaggaatcaatccaatcgtaaaatattgcgttataactctaacttctgttttgcttatttttgctattatttacgaattaataaagattaaac

SEQ ID NO: 2354 - DNA, 734 bp, Unknown
  Description of Unknown: unclassified RNA viruses ShiM-2016 sequence
tagacgtatgtctatgcacactttgttaacataacccggggcttgccgcctgcggggccttgtaaaaaggatactccaataacggtttgactggatagcctccagtcagggttttcccgccggctatgtagcttgccgctcatagttaaattggactccaatttacttggtgttcaggagaagatgaagaagtttgggagttttaagtctgcctgactgtaaaaggcaaccccctccttagccagtgagccatgtcgcaactaaataagtgcctcgctcggccccagtgggaaactggataaaaagactttccccgttttgttagtgaacgaaatcacacctatatcgtttgatagtaagcaaacgcatgtttggcagcgtgccctttgccactggatacgtatgtagacgtagcgatggaggacctgctccagcaggtatcaacgcaagggatttgaagaccttgtagcgaaatcgcatttaaatagaatcgtggcggattctagcctatctactaaggcctcattttgtatgcaagtactcttgtgatatgcgacgaacacggtaggatgagttcagtaccgcccctaggatgatctccttcggtgacgggaacaaactcgtttatcctgctgctagtaagcaatttgaacgacagaacgtgtgcaaagtgggattccccgctagtcgtgcctagactttaaattggcatttctttttctctttccctcatc

SEQ ID NO: 2355 - DNA, 734 bp, Unknown
  Description of Unknown: unclassified RNA viruses ShiM-2016 sequence
ggcacatgcattaattcgtctgcggacgggaaaggatcacagatagcatgcaccggtggcttttgaataccaccatgggaagtcggggaggcagtttggaaactgtcgagatgtgggagcatgggttacctatacctggcacattcgttcacatgtgcgatccatgcgcggttgtagcagaccgttctaccacgggcttattcttccgtgccgggcagaatgccaatgtcccggtcggagcctgccgcgagcctacagggggccgctgaggtgaaggctcttcagatttccgcatcccgggcggttggggaccagccatccccgtaaaatctgaggattgtactctcgtgctgctaccggaagcttgactgcaagggagtgggcccgaatccggaaggtgaagggacagtcaggtgaccagccaactgtgtgtgaaagggaatttccagcccggggatcacatggaaggtcggagggtacacaaaatgactacggccgagcgccctgcgatagtgggttgacttgtccggggggggacgctccatgccattttggctcgcttttcgtgcaatggatgacttcctcagcgcggggactgttgcccgcgccgccgcggttgctgcggtgttattttcaatggcatcatttgaataattaggcaaaagtgatcctcgacttgaaccgaaaagctcacatataaacattgttgtttaagtgcacgtgacatttcgctt

SEQ ID NO: 2356 - DNA, 736 bp, Unknown
  Description of Unknown: unclassified Mitovirus sequence
ggggccgtgaggctccttatgagtaatcgaaatctcgattaccagcgataaatcgcacattacattgttttgtgtagttcgtcgttccccaacagtaacgaaggggatcactggaggacttgtcgtagctcatacggccggtgttaaggtggtctcggcagaccaaaacctcgttgcgagggggttccctaccagaaatggtgttaaagggaactgagaaagttgctctcccaagagtaaccgtattgcgatataggttatcgtctgccagtcgtctaaggcgcaagccttagaagacgcagtcttctctgctgctgcggcccctgcgaaagcggggaaaccgaagttttatagagcttattaagattattaggccctagggacagtataccaggcactggtcagtagaccaggcgttagtacctgaaccctgtgcgaagaaaccttaagttcaccctaccagcgagagcgtagtacgactcctggaaagagaatttaagaatgtattcacccgaatcggattcaaatctttttggatctgaaggcggtcactggataccatgcatggtgctaaggggaacccgctttggaaagctggttatccaagagctacctagggacgtgaggaataccaagtagtaatacttgagatcctcgccttttacgtgtgggagcaacctcgtagcagttcggctgacgagggacccatgacggaggcaccacctttttccaaaaa

SEQ ID NO: 2357 - DNA, 736 bp, Unknown
  Description of Unknown: unclassified Picornavirales sequence
gtgtccccaaatacgcaccgcgtagcgcttaaactacggtggcccgtcgtaagttgcgcggtggacaggggggacacaggtcagtcccgggttttttaaccgtactactcaggcgggactataaaatatccagagaggaggccaccacccacacgttttatagcggtaagcgtgtggtgtacattccgctgctaataacgataataataccgcttctgcgggatatgtacagcctcgggaaactgaagttgtgtgcgaggagtttgagggccttagcgtcgacgccgatccttctgccacgggcgctactgaatttattcaggaagcgtgcgcggcagtagatgttcttggcaagtactacgcgggcagctccatccacgcaaagcagcaagatttgcagggcctgcgacagtacttttctcggccccggcttgtgggccgaggtactatcaccactggctttaggggtcgcattgcggtcctgaacgtcaacgcctccaacctttttaccactttgttcccgaacggccttgcgcggctcactggtgtctatggggtgcggtttaagatctgctttaagttgcaggttgcctctacccctttccatcagggccttctgtcacttagttggcagtatggctctttgtcaaccagtaccacggtttatcagcgtgcttcgcgcgctgagactgccaccaacattcctcatgtcaggctggatttgtcagaactcact

SEQ ID NO: 2358 - DNA, 736 bp, Unknown
  Description of Unknown: unclassified Riboviria sequence
atctaccaacaaagccatgcttgggaatctcaaaacgtaaccaaagattgagtgatttttctttgcattatactccttctcttttgtgttgtgatggataggcacctactaagtttggcctaaatactcactattccgtccagttttgtaatttcagctccataatctcatattattccacgagggtatgtggcattgtaattgctcatacaaacaagttcctatttttctcttatatcgattttgctgatttaaaatcactatgggcctagagccaacttgctaagatgtccgatccatcagaagatttgcccttagccggtccatcaggagttctccaaggacccgggagattccctagaccattgacccgtcatcatgaatcttttgaagaagaaacaaggcgccgtcttacctccattgaattaagaatcaaaggcctggaggatagagtctccgctcaatccacaatcttgggtgagataaaaagcatgctggaaacactcaccattgcagccaatgtgccgactcactcagtaacatcctatagccaaatccgcagaggccgatcggcgcgcaaaaattagacagccaaaaatttgttcgtaagaactgtcatgatatttggatgtttgctgtattaaaacttccagtcgcatgcacgaagaatggattataccctcctccttccttattatagtgacagttttaacggacaaaaacgagcagagccatt

SEQ ID NO: 2359 - DNA, 737 bp, Unknown
  Description of Unknown: unclassified Picornavirales sequence
cacggattttgtccgtgtacgtctcgcttgatagttgagcttcgctcagctcagagttctccatttgattggaggcattcagggattcgtccctgtacgatctgtatcattacctttactgagtaaccagagaaattagactactctctacctttatgttttagtagattttaaaacctaaacgactgtgccgcccctgtggggttagtcagtgtccttgaactgttgttcgagggagtattaggcgatcttgtatcgccatttttgtaaattattatacagacttataatgtctataaacttagaaaacaaacaaaaatacatatgtaaacatagagtcacatacggctgtgttcggcctatagaaccttactgaacttatcataataaagaaacgcgagttttataaaagaatacattcattaatacctgccttaccaggttctttgtgaatatctcaacgccagagagaagtaaagtatgacaacacaagttaatcatgaccaatgatgaggttatcgattacgccctggtgcagggtagtacagataaattgctgtgggagcaccaagtccactccgtgagatcgaccggaaacagttgctgtcttttattcatagtctaacaaaatgaattaaacaacgtatacactcctaacccgtttctatgcactaataaatatcaaatgaattcaatcaaatgatattactggtgctaactaacacaactgtcttaat

SEQ ID NO: 2360 - DNA, 738 bp, Unknown
  Description of Unknown: unclassified Marnavirus sequence
ttattgctaggtacccctttaggggggaactaggacattatggtttttgtctgatagcttgagttttctcttgctagtttattcgtaggcatacatggaaatgctcgttagtatctgatctaaccccaccatagtatcgcggcttacgtgtattatgctggcaagtggactgctaaagcgaccaaattcttatgtttacgaatttacgaatgaaccaaattttgttgatcacgtccttttataaagtgacaacggttttcgtaataagggctttaccgtttgtaagtaaaaagctactgttgtttgacacactatgttagggtgtgccgtagaacagtttgcgctttgcgcaattgcatattgaagaaaaaataatcaaataaaaagtttatatttacatttatgttttataccggttgatgaccaaccttcacaatatatcctttaaagaagctaatctttgtgtgttatgttatgaaaaccttgttgatggcgccgttttggcttacagtcactgcaagttattctgttcacactgacatcacatggacagccagatgttttcatttggtatgcaccctcggtctttgttttcataataatatgctttaacggtgtattgtgaggtacctcctcagatagaagtgcagagggctgaacctaacagtaaatttttggtatccttgaccgggagaaataatacgtcatccaagaaccagagaattacgattttacacg

SEQ ID NO: 2361 - DNA, 741 bp, Unknown
  Description of Unknown: unclassified environmental samples sequence
ctgaaacctttttctaaccggtcgaaaccctcaaccgcctcggaaacgttgaggttgagtacaggggcgtaaccgtctaggttacgtctccccccagctcttaggttggttagtctgttagcgcaatgccttacttccgcctttgagttacggcagccctaccgggggatacagggttgcttagcccgcgagggtcagtgcttcggcagtcttatgtgggtccctgagtcacataaggcaacgtacaaaagggacatatggagttctcttcgggggtctctatatgttcttatgtactccctatatgaaccttacaacgccaacggttttcattgcccgctttctccccctggagagagatgactatcgaagacggtgtaatggttgctataattagaataagctatacattaaggacttagtattaaacactagggggacgcctctaggagtctccgttcgggcgtgggatgtggtatagcatttcactcggagaggccaaaacagggatcgcctgtgctaacacaaatgtcaactgactgcaacggccatgcttaattgctctcctaggtgggtacagtcgggcccgtcttcaggtgggtcgcctgtccgctattagtatctgaagttacgaagttataattcaaatcgaaaatctttattgcaattcttatttacgaaagcggacgtctagtaaactatcttgggaagcctacgtctggtggtagttgaaaccaaata

SEQ ID NO: 2362 - DNA, 741 bp, Unknown
  Description of Unknown: unclassified Partitiviridae sequence
aggtgttgtcgaagctggccaccagcttcgcagccaagtgtggagggtaccccgttatgctacatacctcctcgaagaccatttgcatgctcctggtcgagtgctgggagttgaagtcgtcgtagtccagcataacgttgtacccctggccgtgtctcaaagctacgaccttctcgcacataccgagcgtgccgtactgccctgggtcgaggaccaccctcctgttcctccacgccttggcaaccagcgacaataggctacgaatgtgtcgagtacccggggcgcggttgctgtggatggttgccctcgcctccacttcgatttggagggtagtcgtgtgggtaggaggggccgcccacgcgcgaaggtaagtgccctgggctaaggcgttccccagtagaacgctcgggcgcggtggcgcccgcggtacctacaagcccgcacacgcgtctgacggattcggcctagtattgccaactaagtcgtcctccccgtagcgcgtgtggcggttaatcgggagagccaggtggagggttatggcgcgcaaacaacacgtcccaggttttaacgttctgggtgcggccttgccacctccttaaccatttaagagactggtgcatggtggtgttcccgtgtcgagcgggcggtcagacacgagctcaggggagtcgaatccccctgagtaacgtggtttatgcgtagcatagctgatacggccgcaggcccactgttactgaatgc

SEQ ID NO: 2363 - DNA, 742 bp, Unknown
  Description of Unknown: unclassified Orthorubulavirus sequence
aatacttcgaggccttgatctcagaatgcaatctctggaagggaaagtggataagattcttgcaacctcggcaaccataacagccttaaagaatgaagtgacaagtctaaaagcaaatgtggccacagttgagggcatgatgactactatgaaaattatggacccaagcactccaactaatgtaccagttgaaaagataagaaagaacctgaaagatactcctgttataatctcagggcccctgagtgagagccacatcactgaagggagtgatatgattgtgcttgatgaattagccaggccttctctaagttccacaaagaagattgtgaggagacctgaacccaagaaggatttaacaggtatgaaattaatgttgatccaactagctaatgactgtatggggaagcctgatcaaaaggcagaaatcgtggcaaaaattcatgcggctactcgtgaggctcagctgttagatatcaagcgcagcatcatcaagtctgcaatataagaaatcttagttgagtacatacctaagacacaacaataattccactacatatatattgaatcgaagtgagcactagggtggataggtcaagggacacatctaggcatcagaaatccgagtcaatctgcactgtccgggtttaagaaaaaaccaagtgtcaagagcatcagataggcacgaacctaacacaccccgagacacaccagccacacacatccgggccgaccagcagcc

SEQ ID NO: 2364 - DNA, 743 bp, Unknown
  Description of Unknown: unclassified RNA viruses ShiM-2016 sequence
gtgggtggcttaggccacgcatagagtttttctagtcatcatttgatgccagtagtagcacttatagtccttaggggctatttagtgtgtttactgagaagtgttacatgtcatgtataatgttgctaaagatgatattgttttaagcacttcgaaattttattgggtatagtagtgcaacgtctactatatcctttctctctaattagagagataaaatcaatatgtccaccttgtactcatttttgagtacatgttaattagtcagtggaggaagaactaaactttgcagagaagaattagtgtttgcaaactaaggaatagctctgcaatttatgcttttaaaaagatgatcggttaattcgccgtcatttcacttcctatatggaagtgttttataagggattgctgtcgtgaaagatatcttgcgtaagaagaacgtgtctaaggggaagaaaaattcatcccctatagttagtaaggaagaaattcgtcagaggaaggctctggaaaaggagcggaaaactaggatagaaagagataaaaccagattgaatgatctggataccgttgtgcataaaaagaaaagtaagaagattgttccctatgagggagatcataataatatcttggatatcccagtgaagcaagatcatgaattcgatgattttctggacaatataccagattcagaattctttgatgagagtgatattccacctgttcataacaacaatgtggat

SEQ ID NO: 2365 - DNA, 744 bp, Unknown
  Description of Unknown: unclassified RNA viruses ShiM-2016 sequence
ccacggtcctaatcgaccgtgtatccttttgaccccgtgtaggttgcgggtgaacgcctcattttgttaattcgaagttctcgggttttcaactgaggtgttgccagtgtggacttttgtcgcttatgtttcctatacatcgacttgtgtgtataggtacaacaacctccaactttaaccttaacctttatttgagtgtttattttaagatgtctctaactcagctctcttgctgtcatggctaatgactcgtgtgtagattgtattggatgtgcccatcgtgtaacgggccatcacttaccacctaaatattagttactcgtcgtggaggctaatagcatttgggagtgatggttatgatttcgatgggtaactggctgcccgctagtggttccggtcaggcccgattgtagatctatgcatgccttattagtaacaaaatccttgagtggtatcatagggtggagccccagggctccggtgtgaacactgcttgaggtggtcccctaggacatgcaccggggagaggctcctcgaggaaccggtggcgaaggctacaggtgttccaactgtagtcggcgtgagacctagaatttcccttggtggagggcccacattaaaaaccccgtggggcagaaaggcaccatttacaaaccatatgaaaattacaactagtgatatagacgattttgttggtacagagagacctgcgattataattgttgatacaagagttattacaag

SEQ ID NO: 2366 - DNA, 745 bp, Unknown
  Description of Unknown: unclassified Picornavirales sequence
ccgtataggcattttgcctatacggagattattgagttgtgtggtttaccccacaccggttcattcatttatggactgcagcacatgttgtgagagtatagcatctctcattgacaatatgtgcggatttaacttgtccttaaatggacttctttgtgcgcttttgattgttttagctataaacaatacaaacctttgtaaaagaattgaaaataaaattataaaaataaatttcaatcaatgttgcaagcgaatacttgcgttctttatgtaaaagtttacactgatcagaccaaactaaaattttgacacgatctaagctgtaatctacagcatgtaaagagttcagtttactgctctttatgattattttaatgctattcctgtatagctgtttttatgacaaataggaacttccgaattatacgagaattcacatctcttggtaacgccttcgggtagggaccaaacccctgacgagactctgtagaaagcgtttctctcagtgatgggaagatattgctcttcaatgaattttgaatttgagcgtcttcttgcatctgttgaaactaacttttgcattgaaagtggccgtttttgaccgcggaataacactttatgatttgcatgactaaatctggccttttattacgccagacaaaaagttgcagtgtcgactgttgagaaattttctctgcaggtcaactgcttggaaagttcttcaactcgtcgatgttaacaacat

SEQ ID NO: 2367 - DNA, 746 bp, Unknown
  Description of Unknown: unclassified Picobirnavirus sequence
tctaattctatttttattcttagtgttcttctaccttattcaaggcgaaacacccaaactaattagattggtcaaatttacacgtagcacacttcgtttgagtgtgaatatgtgtagaatgatcaagctacagtaacacacaaacatccaaccaatgtcacaactaaggaggtgaatctctagtgacacacaatcagctactctactggcagaacgtagagacaaacagagctaacgtggctcgagagactgaaacgcatcgagcgaacgtcgcacaagagactgagactaatcggtctaacttagcacgagaagctgagacaaatcggtctaacttagcgcgcgaagcggaaacaaatcggcataacaaagtgtccgagcgtgagactgaaaggagtaaccggcagagagagtttctcacaacactgcagcgtcagcaggactggcagctggggctcttaaacgagcagtatcggcgtgacgccttagcggaaacgaaacgatcgaacaaggctaacgaagagctgaaccgactacgaacgtatattgatgagtcgatccggagcgaaacaaaccggattcagtcgttagcgaacactcaagctaactcgatacgtcaggcaactctatctgaaacagtaagatccaatcagaaacaagaagcgttatcagcacagcgcaacgctgaaagtgaacgcgctaacttagcgtctgagtcaattcgagaagcgcagaacgctatcgct

SEQ ID NO: 2368 - DNA, 746 bp, Unknown
  Description of Unknown: unclassified Riboviria sequence
ccctgcacacgcgtacgattatttagatctatatctataatatagttacttttaaatgtgaatgtttcattgcaaatttgagagtgacaactcttaaacattgtgatgtaatttgcatattctaagaattatttagtatatatttatttattcgatatttgtgttcggtttgaagagccgtcaacattatatatttttctggaaattcgacacttttatgacttatggtagtaagttgaagatactgtttacagtactaccacgtgaccagcgatggtcttaaaatatatctctttttctacttatcagaatttttcttgaagaaaattcagatatgatgatcataatgattactcagatgcatggcttgccctgtctgttttaccgaatattgataaattattctaccctcatcgactatgaattttacaacgttgccgcttttattaggtaacctcttggttaggttagcgatttgaggatgaagaaattgattatttgaagatgtctttggtattttgatgtattattaacgaaaatgccaccaagcccacccgggtcgaaacggactattgtccttattagacacggggaaccgcagagtcaagggtgatgacactttgaaggagcttgctcctaggtggtcaccatacgtttggaatttattccttattaaaacttgtctcgttagttgaacttataaccctaaaacactcttgtttttggtttatttgttcactcggttc

SEQ ID NO: 2369 - DNA, 746 bp, Unknown
  Description of Unknown: unclassified RNA viruses ShiM-2016 sequence
cttagagggaaatcctgattcatcactgaatcagttccgtgcaacattagttgattccgattaactagcgctgtgctgaacgttaatcgtcgtgtgatctggagagagttaaaatttagactctttggaactaaattctctcttgctgcgacgttatctaaggtaggtgtcctatttaggacaggtacctagggaggcagccccttccaaaaccttaaagagtctagcctgacaactactgagtcatagttgtgacaaagactaagttctttgaaggcgaaaatacctgacttggcaatcacaaaagaataaaccgatcagatccatcggaaggatctaatggttctttcaaatgtgatcgggaagccatccaaacccgtcctgccggtagtaataccaaaggaaaggtggaccttaaaatttcaaaggtgcttgaatcctatgctggttgcataagaatttggcatcagattaattttaaagggtgtttttctttttcagaaaaggcacagatcgcacactttagaaaagtgttcttagggattgagacgagtaagtacccaaaggtatttaaaggtctcctagccgatcgtttttcaattgaattgaatcaggatcgtccagaggtccctatctctggtcatagactattctatccatcttatgatcggaagctattccgatatttaagtggaatttcgaatggtcagagaccaaagacccaacttagactcttctgggactta

SEQ ID NO: 2370 - DNA, 747 bp, Unknown
  Description of Unknown: unclassified RNA viruses ShiM-2016 sequence
actgcgtaggcaaaacctacgcagtttcttttgactcctctcagaggagagggatcaagtaagtcgatgtatcgcattgataaagggtgggctgacatgtaagtcgatgctgtcattacatgtccatcgctttgtttattagttttaagattttcttcgtctccaatttatttttcgaaatatcttcaacaagaaaaattattgttttaattgactgagttcttataagactatgagtttattgtgtatttctctcttatttgaaccctcgtattttatatagatgcattatgtgtatttggattgtctttcttgacgcttttgaaagggtacaggatatttactttctccagttctcgttggaaaggctctttgaatgattgatatatgctgtttcacattgtttcttgcatagtattgtagacataggctcggcacgcattggcacttccgtacagcaactactctacaacgaatatgtatagcgacaatgtaacgttaaccttggtgatgagttggtgataccctcttggttatgtttcagtatatgtttttctttttaaagatgtgtcccgaggccattctttggtttgatggattgatgaaaagaatacagacattttgttgacatttattatatgagcatattatacacacgacgatgtgaaagaacattgacaatatgaaagcatattgactacaggaaagactgttgacaataggaaagactatacatatgactttaca

SEQ ID NO: 2371 - DNA, 748 bp, Unknown
  Description of Unknown: unclassified Totiviridae sequence
caaaagtggcgaggcttttgcccgggcacaccgactctacgattgggagttgggtgtgtccggtctctgcactctggactgctcgcaagtctaaacttaattttgggtaggatggcgaaagcgtgtagcctgaaatccgaaactaccctcatattacatctggattacgcaattgtgcacctgagagactataacatgtacccgaacgcgtaagaatactaaaaaccatgtgggagtggcatgtcatgcgaagcatctatcgttggccctctggttggacgtgtttgaagcggggcgagagtgggttagtccggtagggtttagatttcattttttggactggagagtcagtactcacccgaaacaaacatggaaaacttaacaatcaacacacaaagtagggacgcactagtcaacgaagtaagtgttgacttagaggatgagacatcaaggttagttatagatacacttggtgtaagtgtattatacgataaggttgacaccaataggaaaatactttatggaattgggatgattttggtggcgtgcggagcaatttttgggattatggctgggctcctatacgttcaacaccaggatctgacctcttatgcctctcatatggaaacaaaatggattggattgaataacaggataagggaatcggagtccttattagctacagtatgcaagtctgagttcggacagtcatctgtagtatgttcgcggaattcttcttcttttaata

SEQ ID NO: 2372 - DNA, 748 bp, Unknown
  Description of Unknown: unclassified Tymovirales sequence
gccctgtagtcccttataatctagtaagtaggtaatttagctatagatatatgtttcttccttgtttgaacatgagtatatcagcagttattgacatagtaaataaatcacactttgtaccctgctacccctgcacacaactgccccccgtcattaacggagtaccgggatcagggaagagcacactcctcaaggaattgcttaatctgcataacgtccgcatctacacagccggcataccctacggatgatcccttaagactgaaggcgtactcccactgagtgagttcacaagccgagctaaccatctgtgcatcctcgacgagtaccaacttgccactgataaagaatttgagccattccaggtattggtgggcgaccccttccaaggagctacacaccgtagacctcacttcattgccaccaccagcttcagagtgcccaaagcaatctgcgaacacctcagaagcagagatttccagattgagagtgacaaagaaggtgatctaatcaagggatctccattcaccacagctgttgaaggagagttactgcacttgggccaagtcagcaaggaccttgcacactcacacaacgcttgctcgaaaggtcccacggaagttcaagggcttgaatttgacacagtgaccttgctttaccactcatctgaactatccaatagaatcggattctacgttgcctgcactagagcttgcaagagattgctgttgctctctgatgagcacgt

SEQ ID NO: 2373 - DNA, 750 bp, Unknown
  Description of Unknown: unclassified Sopolycivirus sequence
atggactccctaccaccgcaactcaatttactaattggtacagtgagaactttgcttcttctgggatatctttccttgcaagtggcggcgcaaattgagtccctggcagtagcagtgtttcgtcctctgttacgccgagtcgggtacaacctgctagactcaatcaggactatgccagcttcgcacagtcatctcccgctaacaatcaaggatttgacccatggggagtgaaggactcgccaattattgatgatgacgaacgtgttcaatctaatttggaaactgagacagaaataccgaatgaagctgaggaagggttatcagagactgttgaggcagttggtgaggttacgactggagttgaggcagctgaggcgaccgctgcggtgtccactccttggaccttgctggctatagccaatcaacaactaggccaagcagttagtacagcacatgtgtcaggattgcaacagcaatcctcggcggattacacggccaatatgcagtctcacggcttgaatgtaggtcttaatgcagatcttattcgtgaacagcagagccagaccatttcgaggcagcaggcaggaggttctattgggtctttgcttgggccccttggaacgttgatcggacaggccattgccggatataactctgtgaaccaagaggatttgaaaacagccgcttctttcaacggctatgttaatccccaaatgagtaacatcgttgcttcgcagacaacatctggtg

SEQ ID NO: 2374 - DNA, 750 bp, Unknown
  Description of Unknown: unclassified Picornavirales sequence
gaaatatgtatggagtgtcttctttaagacacttcatatgtatgagtaacgattaatttcggttacgacgacctaatggaaggcgtccctttgagaatcatggcgggatgtcaacccccgcgaagcgatagaatgagtcgcgtgattgaaatgagggagaataaaattcttcggtaggttgttgtaatctctatggtctgggaccatattctaagtttttactgcttttttaagaaaaagtttatcgagagcataactcgtgtgaaagcaacatggtgagtctaacatcagtagaaaaatgacaacccctcccctatatgttatgtaagtatatggcagtgtgccattaaaacaaaaataaaaatctgtatattttatatttcgacaaacagtttgtaagacgttagtcttcaaaaattaagaacgcccctgtgtttattcacttgtagacgcaaaattgtttgatctccattttgtcatcagatatgacaagaaaaagacaaagtgctcaacattagtacgtcttgtaatggttttcaccgtcagaaagatattagcaattcgattttccaacctctacgctcctaaaaggactacgttaaaaggaagacgatggtatgttacagctgcagttgcagccgaggacagcctggcaatctagtaagaacaagagagaaaatgatgagtaggttgtaaactcaactagcatatggtagagggcgaagatagctttaccaatccggggctcca

SEQ ID NO: 2375 - DNA, 751 bp, Unknown
  Description of Unknown: unclassified dsRNA viruses sequence
ctgaccagttgtttctccactccggactgcgatctagtcattaagtcctttcacaagccgccgaatcaagtattaggggagctggtgactgggttgactcagggtgcagtgtgccttgcctggtgagatggacacacaagatgtgaccgccactatagggtccatgaggagttaaatcgatttggtgaacccgtgctaaggttcaccgaccttttaattcaggggatgccgaagggtgaaacttggttactatctgtcttgagtggctgcataaccgcatcaagcgagaaactattcaatgggtagatagttttagcatttggattaaccactaaatgcttatgggccggcaaccggaactgccacattagtatcatccttcgggatgggcgcgttggataccgcgcttgaaatggaaacactgcgctcacattagaggtgagcaactacagtcaagctgggtttttagccaattctcggacactgtagtgggagaccacggtggttaagcatcttcggatgcgttcgtgtggataacctgaatggcatcagggtgtgatcaagtctgagcttcctctttgagatgctttaaccttactcaggggacttgtgagctaacgtaggcgagtatagagtagatgcaaactcgtcgaacgtgctttttggttttagaacaccaaggagtggagagactacacccatacgaattcgggaaaccgagttaacgaatagtccagcccaaagggagcct

SEQ ID NO: 2376 - DNA, 751 bp, Unknown
  Description of Unknown: unclassified Picornavirales sequence
gattcaatctaatacagccaaacagaccaatcagaccaatcttgattttcagaaaagtttaattgataggggagaaaaatcatttacagataaaggattaccgtcttttctttattgggggggatcaagcgcacaaactccaaattctttaatacagttaggaggacaaaatttctatgaacaatccggtgttaattcgaatctcccatattttacaggaactccatacgctcagtggaaccatgttggcacacctaagatccagcaacaaaaaccttcaccctctagctctcaggcacatgcaggagtgtcagctcagtctggaaagtctccagcctttgtatcttcaactagttcaggaagcgtatcttccggagggacagttagtatcaatgttggaaagcataatttcagcggtcagacagatacgacaggacttggaaatggccgttactctgcagttcctccaccaaccttaacgtacaatagcgttggaatccagaatgctgcaaggactcatgattttgccacgcaatctaatccatctgtgagaagtgcctcccaacagacttgggcccggtttgactcttcaaagtccactcaaacaagtttaacgggctcccagtttatggtcgacaaaggtacccaagccaatcctttcaggtactatgccaaccgttgagttcctaggcaatgccgtcactcacgctaatgcacacaaaatcgagttcttatacgataacgcagaaat

SEQ ID NO: 2377 - DNA, 753 bp, Unknown
  Description of Unknown: unclassified Marburgvirus sequence
cccggatactacagcacgattacccacccatccacttcgatatgattcaccctcagatcacagcaatcaaccctatttgaatatccaaaccactatttagtatcctattacttgtcactattgtgtgagacaacataagctatcaaataacaatcacgggcaagaactgggcatacgatggtgatttgagagtattgttcagtgctacaaattcttttttcaattgctataatgatacaactacaaatctccgtacacttgccgcaatactgtaattaacactgctgtatctcttcctcaagccatctgatttaactcaataaacatgacttgattcagagaatatgctgaaaatgttattgattgaacttctcaaatggtgcactatcctactgttttactcaacttggtatattgtaacatatcagcggactctccacttttcttcttgtatattctctataagtcatttacttgatagaatgtcaagtctactggttcagagtctcctcactccaatgaatgtaataattaactgttagcttagatgacaacagttatgaggttatataattactcatggtgtaaaatgtaattcttacctctatttcttctgttttccctctcctttataatatgccaattaagaaaaactaaaaatcgaagaatattaaagattttctttaatattcagaaaaggttttttattctcttctttctttttacaaatatattaaaataataattctcaca

SEQ ID NO: 2378 - DNA, 753 bp, Unknown
  Description of Unknown: White ash mosaic virus replicase, 27 kDa protein, 11 kDa protein,1 sequence
cccatatctttctgcttattacgacccccaaacccttccttttggattgtacctcatcctgcaaaattcttgtttggttccatatggactttcactaccagatcctttcgatgttccccgcttatttacatatatatcttcaggacgattctgaatatgaacggattttcccttttgctcgactacctgatcgttgcttcaataaattatttatgtatagcacatttgtacaaaattttcttgcagacggagactgggcgaacttgttcttcggcgattttgctgttgctcacagcactagtgaccgaggttatatacatgacattgacaagtacgtccacttttcgtatgataatgaccgctttgctaatactttcccactatttcagcgcactgattatctggattatttatttcatgaaccagttccttataatgtacgaaaactcagaggatggtattgtagtgttcgaaacctatcacatcattttcaggaacatgtcgcacgccatcttagtttggaatggcttgcaattataaaattactaaactctccattacccgtatctttaccgccactgttggcgcttcagatgaacaagtttattgtttatttggagcaaagacagattaaagaaatttgggcacttctgggtatcccccgttttgagtgtgtttatttcggcccgggattttagctccttacgaggaagcttgccgtaaaacttaaatcttattttaaaacacttcaaa

SEQ ID NO: 2379 - DNA, 753 bp, Unknown
  Description of Unknown: unclassified Picornavirales sequence
ggagtgctcaaaatagcagattggtgtgtacgaggcttgtcaacacttgctgcaattgtgtcaatagcaggctctgtgtatttaatctatcgcctctttgctaaagatcaaggtccatattcgggtgcgccgcagagaggtctgaaagccccagttccccgtgtggtgaaagctcagggaccagattatgacttcgccatatctttacagaagcggagtctcttccctgtgacatgcttgaatggtccattcactgctcttggattaaaaggaaagtggattctcctacctcgccactgcaaagtgggggaaaccctggatctagccggaacagaatacaaagtgctagacaatgcagagctagaatgtaatgagggaaagcttgaattgaggtgtgtgaagattgatcgtcctgtggatttccccaacattttgaaaagaataccaaagaaatttgaagaacgccaggattgtgttttgtgtgtgaattctgaaaagtttccagggttgacctgcccagttggcaaaatccaaaattggggtaagttgtgcttgtctggtaatgtgacatgtcgcaccttaaagtacaactacccaactagatcaggccagtgtgggggtgtggtcactaaatgtggtgaaattctgggtgtacacattggtggtgatggacagaatgggtatgctacagctttgtatcaacattattttgatgccctagatgatgctatagagcagggccatatagtggag

SEQ ID NO: 2380 - DNA, 754 bp, Unknown
  Description of Unknown: unclassified ssRNA negative-strand viruses sequence
aaatatctattagtatacatactctatagcctagaaaaaacaatgatcaagaatccttcagtcatcatgtcagagtcagaatggtcatcggaagattcttcatctcttcacacttcctcaactcaatgtgatctaagcccacttcaaaatcaatttttagctatgtctgcaaaaatacagaataacatagatagaattaataatagacctagatttacgcctctgaattctcaggtaatcagaaagtgtttcaacgtaaaactttctagtggtgagcttgaacaggggttaaaggatgacggagaggaatggatgttttactcagcacaagacacagtatcaaagtccattccggtgtatactagaggaaagatctttcctccacttttaaaaggatctattgtcaaaattaaaacagtcgaagtccctgtctcttctgagaaggaacatccctataaaactaaattgaaccctatatcggagcaataacctctacattgatcttccagattgataacaggtgagctctaatggggaaacatgtaacctccgcattgatcagttacctgcttcacatacctgtgcgcctttaacattaaccaaattgcttttctactcctttaattaaaataatttagattttgaaaaactgtaaagcttaaaactcactaaatagaaatctcaatgagatcttaatctgtttatctcaattgatcttctcctgtttttactgccccaatccacatcccctgcc

SEQ ID NO: 2381 - DNA, 756 bp, Parechovirus B
tttgaaagggggcccctgcagctcatcagctgcagggtcccccggtggactgggtacacttctcgcccccttctggggtgggggtgtggctcagttaaccaccactgggtggctaccagttttcatagaatagccaatcccgtaacatttgccacctaagcatagtttaacctcctacaattggtcgaagccgcttggaataagactgattgtatactgtgagcctgagtattctcttctgtcttccggttgctctacaaccggataagggctgtacctgggcggtcctactcttcacaggagtctgcataggtggctttcacctctggacaatgcactccacacccactcccacactcaagttagtataagttgtgcatgtgaaatgttgtgaacgcgttgggtaggtgtagcgactacaagtgtgccagcggatttcccctggtggtaacaccagcctctgggcccaaaaggcatgtctctgaccgcacttgtacacaatcccagtgatgcccaccgttagtagtgatctagtaatctgcacttctcaactagcaaaccgtgtgcttggaggtgtaggtatggcaggctgaaggatgccctgaaggtacccgcaggtaacgttaagacactgtggatctgatcaggggcccaccggctctccgggtagaagtcttcggaccttgggttaaaaaacgtctaggcctgtcccccagagggatctggggtttcccttataaccccaatactgacaat

SEQ ID NO: 2382 - DNA, 756 bp, Unknown
  Description of Unknown: unclassified Picornavirales sequence
attaataatacgtatttctttatttgccgtatcctgtacgatactcaggccatgggatggttttcccacaaaaacaatacacaaagttccttaacattcttttgattattttgattctatataacagcttacgtagtactatgtaagtgagctgttattgatttataatttgatttttaaggttgtgcattgacctgagtatagtctaactatacgcaaataatgtgttcatattaaagttggtctttaattagattctaacatcgaatgctttcactttcagatatgaagtctatatgatttatcacacacgttgttatgggtttagcttacgaagtgtgtagagtagtgagattgactattcagtagatcaatcagagcctttacacatgaggtgttttccctattagtagatgtggtcttgaatatatatttcccatcatttccggattttcattaatcggtaggagacaagaaaagacaggttgtgacacctatgagagaacgaacttatgaatcttaatgttagataagtaagttgtcagaagtggacgtaatacaagtcgtatacttatagctgttacctccccctgttaaagatctgatccgtgatcagatttccacattatgtggcgcttagaattatattggcgtgtaattcaagtgacttgtttagtccccgcatatgttaatcttgagagcgtgagaatataattgataaaatacaaaattcaaaaatatttcagatttgacaag

SEQ ID NO: 2383 - DNA, 756 bp, Unknown
  Description of Unknown: unclassified RNA viruses ShiM-2016 sequence
tccgatctatgggtcatgcccatgggtctcattttaacggtcggagcaaccgatagataagctctactacgttcatatcagagatactcgcatctagtttttgctacgtgtcagttttctcgaagtatggatctagtaacttatcagctccaaacaccaaacacaccaaacatcaatcataaatcatttaatcgtgagattttactaagtataaatgtccagtagttctactatacggctgtggtggtacgtggttggcgcttaactgtaacaggttcagtaggccacgtgctgctcattacgcactccagcggaaacaatggttaaattgtatagttagagcaaaagatcttagtaaaattggtgatgcaagtctttcattatgttccgggtagcgaacttgataatttgatttagttcggattaccgagttggaccgagttcattgatggaagcaaccgcattggttatattgcgcaagcgaggcatattgtgatttactttctttggtagtactattcttaggatcaagtatcgagagatactcctttggacaactggaaccccgagaagtaaagttgatcaatatcgttttgcaagtgtatgagaccaatgtatgtgttttgacagtttgccgaaactgtccgtcagttataataatggtagtaagaggttgcacgagacgtaaaccttggctacaccctttgactcctttgtaggtgaaaaggagggttttattcattttaaacttaaacc

SEQ ID NO: 2384 - DNA, 757 bp, Unknown
  Description of Unknown: unclassified RNA viruses ShiM-2016 sequence
ctggggggctaaccacctcccattttgatctgcctcttccctgttggtcagatatgaactttttagtcatatctgaaccggaatgcagttttcgtaaaatgtaacgtttaagtgtctttgtatcgttttgtaaatcaaagtcttaatcaatgttaacttagtattttcagtagaaattacgcgatttttgtcaattagtaagaattctataggcgtagccttagaccttattatggcaatttggacagtgttctaccagtcaatactagagttcttagtattagaactataaaataatactatctcttggaagcagagattgaaaataattccaccccttaggcacctgagacccaattcttaggaatccaccgtataggatttaaaataagatactgaagttaatggaagcgacaagcttgcccgagaggtaacctcgctaaacgaccctataaggattcgacccctttatagtacgatttttgccgctatgggacgatcaccggccccgttacttaataccttctatctttcattgttcacaatcttagtttagtcgatcttaaatgtgacgaactatttatattgatacgcagggtaccctctgattgaatctcaccttagtttaagttaagaggactacgcgtaaccagaccgccaatgctggatgcctatcaatacctaattttgtgatcatgtttgaggggaggatctgtgacaactgccaatttgatcataagtggcctcaatatagatc

SEQ ID NO: 2385 - DNA, 759 bp, Unknown
  Description of Unknown: unclassified Picornavirales sequence
ggagattgcaaatacggtgtatgcagatgtaaataaatagctgcatggtaaattgcatacatgacagggcgtctccaggaaacgtagctttttagctttactactcagggccgtttgtccagagaaatgcggctcttactttccttatgaagctaaggttgtgagtattttgcttcgctaacacagataactttacagttgaggcacaagcgtgccgtgaatggaccgctagagtccttgccgctaatcttacttattatagattgcgacgtgagctttttgaacagttcaacgatttagtttttgatgaagaccagagtcaacctttggttaatgttaacgaggaagtgttcatagtagttagacagtttttgacttcacgtaatgatgccattaatgatgataagcgcttgtcttttgacaaggctatttttgagttgaggcgcgcttgcgcaaaggctttaaagtctacaccaccttccacaccttctgagggtgtttcgagtcacgtctctccatgatgtccagagaaatgccgctcgccatttgagtgtgagaccattcagtggcgtataatgtctcgcttcttctaaaaataattctaacgagggaaacctccgtgacgccgacgttaagtgcgacgaaataaattctttggcaattactaattcgccagagacgactggagtgacttcatttgtacaggaggctgtagaatgtcaggatatcattccagaggctgttaaccttggcacttta

SEQ ID NO: 2386 - DNA, 760 bp, Unknown
  Description of Unknown: unclassified Picornavirales sequence
gtggtgggtgttcccaccacggtttctaagttttcaatttgaacatttgtttattacattatataagtagtgttgttacgacaacacgctatatttttgtaaggaccatttgtttgaatcttttcttagttatttttcctttgtttacgtttttctgtgttagtgtgtttgtgtttgtttagagcttgtattcactccctttctatgtagtgacaagccaaaaatctactatataaaatacctttcatcaagttagtttcaaatgaattccggtttacggttataggatagttgatatattgtgttattgcaatgagttcgtgaaaaccccttaacagggctaggaagaatggacccccgcttaacgggataagttgtcttctcgttctctctttaagtttgttaatctcactttattatcgctatcacaacttcacgaatagaaagtttcagttgtaggctagatacggaggactcagatatggtgtttgtagaagttcacttggtaattcttgtggatggagactcttcgtgaggtcgccctctatcgctgtctgatgaggttgctagtaacactggaccgagtattgtgtgtcgaagccaatttacgaagtagtttctcggcttttatgaaactatccaggacatgaatcgacagttgctcctatcctgagtatcgatcgatactgaatgagtactgaaggttgaccatttagtttatgatttattgattaagatttaagatttaaagcgatttaaa

SEQ ID NO: 2387 - DNA, 760 bp, Unknown
  Description of Unknown: unclassified RNA viruses ShiM-2016 sequence
gcgggattttctcccgcactcttatttcaccgacgttaatcatagcccttgctatcatcaactttgagtgatatatgttcctattggtagttgtatactatacggtatacccgtttggctgcaattacaatagtgcaagatctatgattgttagccagtagggtgatatctgatcccacaattatcaatacttaatagactttgattcttccagtctataaaattagaatcaacaaacccaaattttatgtagtaatgttttgttttgtcttacaacttataccttgagtttataaaacacacctttgctcgttattataaaaatattattatttatgagaataaaatgtgaaataggttgttctgcaaccacctggttgggctattaccacgcccctgacttaccagtgtttcagtatggagaagcccgggcgatttgccaaagggttatttgtattgaatatcacattaaaattagtacatttgtttaatatatgaaattattggtatcttcgtttagttcccaatagacacttttaagtgagtcgtgcagacgttcgtttttcggagtcaacttgacccaataattttaatatattaaattcgagaagatcaatgctaatttgatgtgagtttcgagaggattgagcacccttgagaaaggttttacatttgaagcttataatgcgatggtaattttatcgatagcagctaaacttcgactttatatgttttaaaaaacttacctttaatcaatgat

SEQ ID NO: 2388 - DNA, 761 bp, Unknown
  Description of Unknown: unclassified RNA viruses ShiM-2016 sequence
ataaaatgcatgtataatttttattcatatttatatttatgttatgtaacatatatgcttatgaaccgagtaaaatcggtcacggcgtcactatggtaaaataatatatatatagaaaactttttcacgtacatgcgaacaaaaagatttatagtttttcatatagggttgacaaccccatatgtgatggagttttcacaaaactccatatgtttgatgacaaaataataattatttgatgcagtttattaaaagatctaagattgaattgtgattctattttaaactttatatggactaacacggatacgagatttatctcgaaggtatctctggacatcgtataaaacggagagtagaatcttctgataaggactactggcctcaatacaatgtatcacgagcgttgtattgttgtatctcaaccatcacaccactactagtgactagtagagtagtaaaacagtttcgactgaaggctgtgatttttcttttgtggcgcgggtttatacactcgtaaaacaggcttgtttcttttggaagcaaatgggccatcccatgttatgtcataccagagtaggctaacgtacggtgcttgcacactactagctaataccatcggatcttgtatttaagtacctgaggattgagtgtcgttggaaacgatacgagctcaatcataacagactagtaaatatttgatgcctgtattagcataccgaaagcgtaaccaaatgaccaatcatggatcaatgtgaaat

SEQ ID NO: 2389 - DNA, 762 bp, Unknown
  Description of Unknown: Pythium polare RNA virus 1 PpRV1-OPU1176 genomic RNA, complete1 sequence
ggattttaaagggggtaagacacctttaaaattcgtccgatttgcgcttgtgccgtggtttgatccgatacgttcgtctctccgcttgccgctgccagtctggaaccacggtccggaaagcatgccttctctggaatccaccgctgaggtcctctggttacaaatcggtcggcaggttcgcctgtcagcgtcgtcgaatgagcgaagttgacgcttgcgatctactctgacacccgtaccaccggtacggacgttatgaccctcgtcccgcccgtaaggttctacgttatgagccagttaacggtcttcgccgaaccgtgtacaaatgaggccccggactatccgcctatcggatatgccaaggtgaaagaacctgacaacagagagagagctgtgaccgctgggagagaccgctgacggcagtagatctgcaagcgctaaacggaatccggaccggggcgtgacacttggcaaagctggggagttttcgacgagcttcctattgcaaccttgtggatcgaacagtgttcttagttttccaattaagtgcgattaggattggcccgaggggcgaatgcaccgtatgaaggatacgcgttgggcgtgtattactgtatgggaagaagcagattatggattctctgtgttcgtctaagaaacttggtaactggtcagtcctagcgaggcaagggagtggtggtttagtcgatgagccacctgtgggtaactggaccccttgcgttaccgtcgcattgaaggtga

SEQ ID NO: 2390 - DNA, 763 bp, Sclerotimonavirus illinoisense
ctgctgtcgtagatcgagatggacctctgaagagtggcatgccgaggatgttttactccatcttccggctcagctcaggtgcctcgctcaacccgcttttgatcatcactcgatttgcccgaaagtatccgcagttctatgcggagtttcccgatctcgagaccgagtttcacgccgctgcgcatgcgcttgctcggttctacgacgttaacgagaagcgtcggatgtatctgaaggtaatcttcggaagtgattacgtccctgtgcctcgaactgatgtcgactctcttttgggagttgctgtcttcaccttgcagcaaaccgagcgttctctgcaaaactacaacggcggcaccctcagtgtagctcatcgagagaaacttctctcactcctcaatgtttccgccgcaaaggaggaagacgtcccggagtcctaagtctccttctagtctcgcactgtactgtcattggtgattaaataaaacttaggagagaatcaattcgacgtcgatacgatgctttacgataagtttctgacatatgtcatctccgtcgagctactagcgaatctctgcgagagagctggtatcgaagaatccggaccgaagaaagaagatgttccatctcgatgcgtcttgccgattccttccgtgcctatcgagcatgatgatcgagagagagcaaagttggttgagctaactacctcttcgtcagagcgtctgtaacgcaaatataataaaacttaggagacaaataaatcacc

SEQ ID NO: 2391 - DNA, 764 bp, Unknown
  Description of Unknown: Ipomoea aquatica botybirnavirus strain pt078-rha-1-newwen-plant _78,1 sequence
agatgtgtataagagacagagtcccaacccgttccaccgaaggtaggcacaaaaggtgggtgttaccacaccaccggcccctctcagcactagctccatcactggatttgtcgtgtctgctagaccagctccatagcagatggtttgcttattatcccgcattccgcggctggcaataaaaggcgaagcctgtgctttggcttttattgcaagccgcggaatgcgggataataagcaaaccatctgctatggagctggtctagcagacacgacaaatccagtgatggagctagtactgagaggggccggtggtgtggtaacacccaccttttgtgcctaccttcggtggaacgggttgggaattccgtaaggaccccagtaatgtccgtgcgacggggaaaagctacaacagcctgcctgtaacctgtaagggccaagggactacccagagtgtaacgactgcgaatcgtttactcagtatctaggaacagtctacttcccacaactcaattgagtttctggtcgtcgaaagccagagttaaaactgtgggcggtgttcgaccttcacaatcttagtaaccccgatttttgcgatagatcaacttttgaatatcgcccggcagagtgagttaatccaacagccacccatctacataaacaacaaaatatcggaaacacaccagcaccctcgaaactaggcagagcgatttaatccaacagccgcacgctaactattaaaacaacaaaacataccatctgtcaac

SEQ ID NO: 2392 - DNA, 768 bp, Unknown
  Description of Unknown: unclassified Sopolycivirus sequence
gttgggataagctccaattctagtttaacccgggatgtgcttttgttgcccgaagattcaatttggtgagccgtaagtcagcccagacaagcgcagtaaccaatgcgaatgaagttctccttgagcgaccgagaaggcgcgcaggtgaagatgtatcacttagtaggggaggttattaaacgaatctgaaaagtagttttaatgaagttgtacttactattgccccacggattgaacggaaagaaaccgtcatacccagtgctgcaggaacagttactagacctttaaaagtaggcgggccaagttactgcagaatagttaattcaacggatttaagatgaaaagtaagaggcagtgaacaccgaagcgaaacgtaaacgagataaaatgaggccagatgcccaagtcgtaagctccaccacaacccagtggaatggagtaaagctcagaagggttctcggatacattagacattagtcgagagtctccctaccgcacttggggaggtaacaaactcttagcctgtgacgttggattgagagcaacataggttataaattaggaaacgctttcaaaattgctctgggcaggattttcaaatcagaacttcctgctttaaataaaagtgcacaaataagtctatatattttatgtcagaagattttgataaggagattttgctatttacaattaaagcttctatagttgttttacttgtttatatttcagctttatctttgatttgtataattgaaaaccgaatttaca

SEQ ID NO: 2393 - DNA, 768 bp, Unknown
  Description of Unknown: Dicistroviridae sp. isolate fcc172dic1 genomic sequence.1 sequence
acttataatatcttacgggcctacgtggcctacgctagtacaatgtagtatagcagggacttaaaggtcctttcaaaaccaatataggctcggaaatccgaagtacaccctataccagcatttacgcaggattgcgtaaaggtcaatgaaattaacaataagtatatcgtatacaagagattgtatccacaaaaaaggagccgtaattcctaatgagcagcatatagcgcggtgtgacgcggtgtgcgaagggattataggttcttttttgtggatacaatctcttgtatacgatatacttattgttaatttcattgacctttacgcaatcctgcgtaaatgctggtatagggtgtacttcggatttccgagcctatattggttttgaaaggacctttaagtccctgctatactacattgtactagcgtaggccacgtaggcccgtaagatattataagtattttattatattttattcaccccccacattaaccccagttaaagctttataactataagtaagccgtgccgaaacgttaatcggtcgctagttgcgtaacaactattagtttaattttccaaaatttatttttcacaattcttagttaagattttagcttgccttaagcagtctttatatcttctgtatattattttaaagtttataggagcaaagttcgctttactcgctatagctattttatttattttaggaatattatcacctcgtaattatttaattataacattagctttatctatttata

SEQ ID NO: 2394 - DNA, 768 bp, Unknown
  Description of Unknown: unclassified RNA viruses ShiM-2016 sequence
cggcataccaacgcacgcccaatgtttgaccctcaagctctggcatttagtctgtttatcttggttaatactcttcggaggggtacaagttcgctgcggctgaaagcgggaagctctgtccttatggggccgaacccttgtcgttatgggggggaacctatgtccttatgtggggaagccttgtccttatggggccgctcttacgagagtgtatctttttgtttttagttttaagtctgcttttagcacttaggtcgtagaaagctagattggcctaagtccttctttctctcttttactattttcctttctttctttctcttatgtagtggtgatctaccttcttcacccgtggataaatacacgttaaactttgagattccattctttcaacttgatgttttgtcatgttcctttagtacgttcggagggtaaaacctctttcgcggaacgagattatgtcatgatgagattgattgttgtctgtttagaatgatgtctgacatactgctgtcagtttgatgaggagttctcataacctctaggcgacttgagattcgcccttgttcattgcaatttgctagtacgtatacgtggttggtctgatcatttgcgcagttcccgtgacaggaactgtgtgtatgtgttcagatgtggagactaaatccaactgctattaggttacgtatcagctcgtcacaattgcttcgttcaagtttgctcgtggggtagtgctatgacccacctgttttgctctcacaacattcg

SEQ ID NO: 2395 - DNA, 768 bp, Unknown
  Description of Unknown: unclassified RNA viruses ShiM-2016 sequence
tatgcctaacggcataccatacagtgtagaggaattttgatatcggcatctctatagaacaagactgcaagccagaaacatgactatagacttaaccgagaagttttcaatttacacaaccccctgggatcaaaccctcttgtctgtccagactttaaatggactcgcctttccaattaggccagacttttgcttttatcgaagtaactatatagatactagcaaaggaaagcggcgtattgtattaacacgaaacgttgtgctgtgttttgtcgaaacaccataataaatcaacaaagacgacctatcgctaacgaataatggacgaagaattcggacttatttactatgacgattaagcgggcgtatatgtttggtattacttaacggttttatcgaccatgttacccgtagttataggaatagacgttttggacttcacctaggatagccctgaccggcttacccgacggattgaacgagacggctatttctatgagcctttagattgacaaacgtgcaagtttttgtcgcatcatattgcgcgctttgcgattttcagtaatggagaaagcaaggacttcgacctgacccgttccacggtacataatctggttatatatattagaacgttagacatgtattatgctaatatatatttcccgggcctgaaaaccctaaagaaccctaaggacgacgatggcaatcgatgagtgatatgacgaggaccgcttcggaggcggacttgtattggcggacgcgttagaa

SEQ ID NO: 2396 - DNA, 769 bp, Unknown
  Description of Unknown: unclassified RNA viruses ShiM-2016 sequence
tatatgattaaaatcgtatttatttattatttagttgttcctttataatttgcagtagtgcttacgttagcactttgcaattttattttggaacattaaatttataagtatttacttttctagtcttatagctctgtttgtgtacctggatgtgggaatacattccaaacaatttcaagggtttttttgaatatcaaaaaccctaatcgagtatcgccgtcaagtcttagcagttttatcgctaaggttactcgttccctcccttttggaggagctctacggtttgacggtcttaatttgtccattttccatttggattttattaagaccttttttgttttagtacactttttctagttttattgttttgctttgcctcttttccattgaggttttagcttgatgatttaatttttcttccctactatttcttttctctttttctacctattctatctctacttctctattgtttagaagacgttgccttttctattgaaaattctttattgcgctcttaaatgacctttatttgaatttaatacatagattttggttttcttattctttccgcaattgtccgcaccttatatgtggggttggttggttttccagaaaccagcgctgtacgagatatctttctcccaattagtgggagtttcaacagcttaagctcgccaaaactattttttacgacggagttcgtactaccctggttttgaaatgaaagtggtggaaaacagccgaaaggcacagggggagaggagtc

SEQ ID NO: 2397 - DNA, 772 bp, Unknown
  Description of Unknown: unclassified Polerovirus sequence
atgggcaagcggcaccgtccgccaaaacaaacggcaactccgacatccccgacgccgctacaagcgcaccaccaatggacagaatggtcgaacagatcatcacggctatggtggggagaatcaatctctcggagatagaggagaagatagtgagcagggtgtctcagaaagccctgcagaagcccaaacaaaagaagcgcggaaggcgtggagggaagaacaagcaaaacagttcacctcctacttcaacgcaatctacaagtggggcgcccaagaaggaggctgccccccaggcttcaggaagtgtgggcacatcccgcgctactaccacccccgcaccagaggcgaaacccagtgggggcaaaaactctgccaagttcatcccgagctggcggagaaaacagcaggattcggctggccaaaagcaggatctgaagctgaactccaaagcctgaatctacaggctgccaggtggctccaacgcgcggagtcggccactatccctggcgcagaagcaagaaagcgcgtgattgagaaaacagtggaggcatacagaaattgtgtaactaacgccccactgtgctcccttaaatccaaactggattgggctggctttcaacaagatatccgtgaagcagtccagtcccttgagctagacgctggtgtaggcattccctatatcgcgtatggcctccccacacaccgaggatgggttgaggaccataagcttctcccagcgctcactcagctgacctttgaccgactacagaag

SEQ ID NO: 2398 - DNA, 773 bp, Tropivirus A
ggggaaaaccccctacaacttttttcgcgcagttattggaatctgcgtaggcaataacatcgatgtcgctactctgtgcttcggtgcagagcggcctatgtcgcatgttgccaacatcaaaattctgggagagtcgcgaactccttaacactgccttgcctcgacggagccgttgttatagtgtcgacgggatacaaacattaaactaaacccacttgcctcgacggaaccccttaccttttattttattttatagtatgaaagtgaatcttgtatgaatgttcatagaaaactgcaaatgagtaccacgtctaacatgagagaatgatactggagaaatccaagtttagaagtcactacgaatcccagcggaaacaagggaattctgagcttctaataggcgtttaagactatttgcaaaattctggtgcgtaagtgatattttcattgcgtagaacgctggtaaccactccggctagtataagcattgttagtcacttattatgaaactccacactatcctttctggagaagcacacaaacttacatggtaaagctagaccattatcttaagcggtgagtacactgcaaccttgtaacaatgcttgtatgactactttttgtatatcttgagcaatattgttgaggtggacatgtccaaaggtaatgttgttgggaatggaggggtccattttcccgtgcacgtagtgtactagtattgggtgatagccttgcggcggatcaaccatgtattttaatccgttgactttcac

SEQ ID NO: 2399 - DNA, 774 bp, Unknown
  Description of Unknown: unclassified Potexvirus sequence
gaagaatcagagaccggttctgcccaaaacatatcctcatcaattgcgaaaagaccccaacacaaatctctgactttgtcaaagctcagtgggacttctctgactttgcatacgccaacgacttcacggcctttgaccaaagtcaggatggagccatgctccagtttgagatcatcaaagcaaagtttcacaacattccagaggatataattttaggctacatggacatcaagacaaatgcaaaaatcttcttaggaaccctggccatcatgaggctcacaggcgaaggacccaccttcgacgccaacaccgaatgcaacatcgcgtacacacacttacgattcaacgtgccggaaaatgttgcacaagtgtacgctggagatgattccgccctctcaaaggtctgccctgaaaaagactccttcaagcaattcgcggaccgactcaccctaaaatccaaaccccaggtgttcccgcaaacacagggcgcctgggctgagttttgcgggcttctaatcacaccaagaggaatcataaaggaccccgtgaagctgcacgcctcctgggtgctggcaaccaaacttggcacactgcaacaaatcaaatgcgttaactcgtacggtgaagacctcaagctttcttacgaccttggtgaccatctacaggagctcctctcggagtcccagtgcagaacccaccaagtcaccgttagggagctggttaagttcgctggaaaagtcgaaaagcatcaagcagagatcagatcagtggcca

SEQ ID NO: 2400 - DNA, 775 bp, Unknown
  Description of Unknown: unclassified RNA viruses ShiM-2016 sequence
gtgaggatgaacctcacatgattcttttatggctcgttgatgagcaatggtttaattaccatttttcaaatgatgcgagttcgcgtgctaatgattagcagtggttttattaccattgccttaatataatttagcataggcggttttgttaccgcttcattatttcatatcaattcattttgtataactttgtgtgtattttctttttgttttaattttgttatgaacgggcttacgctttagccaagctatacgctacggcagtacggtctaatgactagagagactgctagaatttcaattttgaaacaggatgattgtactttcagccaatgatttaaactttttgataaaaagtgcgttacgttaagttgcaaatggtgtctgattcagactttggttggtcggcagaattcttacgaccttaatgcggcacattagctccattgcgggagtttaggccacaatttattgtgtagtgtctatgtaacaagacggtgtgagagatctttgatcgtggctctttgataaaaggcgttttttgcgaggcgtataagatttggattataggagataccaataaaatcataaaaatcggtgggtatcactttaagtagcgagaaagacatgccttcccaaaggcttagtttagggtgctgcttacactcgcaagtgtatttgcattatcttgtggatatttaagtggacttaagtattcgtgggaacaagataatggcttgtactacctcggtaagtttccgatgacgcgacgacg

SEQ ID NO: 2401 - DNA, 776 bp, Unknown
  Description of Unknown: unclassified Picornavirales sequence
atttggtagcccaaatatatatagtttattatctaaatgctttgtgcaatatagcacggcatccgatctattatggttgtgtcaatatttgacgctcactatttgttattacaatggaattgaccggattttccggcactattgtatatcaaatatgagtagagacaatgagacacttcgactgtattagtcgatgttagagagtttgagctctagtatttagatttaatctatagcatagattatttctgatggccctgattcgtggcattaataaaattaccaatcgccccccctgcatattacaagaaagtaaatcagtttttaactggcattattaaatcgtgtatccttttggaataaatccgtacaaataatgtttttacacaaaataacagaaaaatagataaaagtgtccaaacaaaaacatatacatatatatatacatttgacacagaacacacaatttttgtgtaggtttatggaatagttttcactgtcgaaagctattagcaaacatcgcaaacgcctctccaaatcgaatcacttatgtggtgtctgaagatttgacgcgaatcgtaaagatgtggtatagtacagtaacagttgttaccgaggctagcctagcaagttagtagaccataaactaaccttcttttgttacagcatcatgtaagagtcaagatgcagatttctatatctttaaatagaatatctctatactgggagaaaactacgtcaccaaaatccagatacaacagacaatttacacgata

SEQ ID NO: 2402 - DNA, 777 bp, Unknown
  Description of Unknown: unclassified Iflaviridae sequence
tttaaatctagtgcataacatcgcactagttatattttggagataagtaccataatatatttaaagtttgcattgctttcaatcgtgaaacattccttcagaattatttcatgctattaaccgatgagccgtgagtaagccctacaagcgcagtaaaaggtttttagaaagagttttcctttagtaaaaaggagacggtacgattataaaataataccttccgcatttattagcaatgccgaggtggagaagtaaagtggaaagttaatttgatactagtaataatgaaaaaaataattatgtaaaagtgggaatgaggctaaagattgccaataccccatgatcattcgcccagctaggcatgtaccgagctattagaaagaataattataataaataaatattagaagatgattaataagtactaatgaacgcccatggaagacccttttaaagggagatatattatcgatcatttagttaactcaaaaataagcggtttggaggactttaagcctataactcctagagcatctatttgtggaaagtgcagtgcgcatataattatatccgttgtattatttaaacagtcccattacatcgtgctggtgtgggatagcagctggtaattgatatttgatcctaatgaacttggtattttatttggactacttttcaaaacattgggcaggaattttaaatcaaaaactcctgctttaaaatcagcacaaacaaataaataaatacttaaaactttagaacatttcaattttaaat

SEQ ID NO: 2403 - DNA, 777 bp, Unknown
  Description of Unknown: unclassified RNA viruses ShiM-2016 sequence
caggggcactccccctgcacttcctattttaacttcatatgagacgtggttactccatatgtcgtagtgatgtaagtttgctgtatgattgcgaacaccgtaatgtgcggtagaacctctctcacaaaacaaccaagaaccacggtgatactacccgtgttaattgtagtacaaccccaaccaaccccaacctgttagcttaaacagtataaacctcgagcaactcgtgttaactaacgtagcgatattatcttatgttattttagtcaacaacttctttagtgttgagtcctagaagtaaaacaacactcaacttcattcctttgtattagttattcaggatcacctagaattatcgacgtaatcttttattttatatgtctacaaatattgatatggaaaatatgggacgctttcggtttccaatggtgagattcggatactcactgcggaggttggataacttaaagttttctgaagcttaggttcttatcactgtttatatatcttatatattcgtcggagctctgcctttcgtattctccctcagatatggtatgaaaatagactatgtcaattcatattcctctactgtgaaaatatataagtgtataatacatattccctaacacagatttagtcaccccattctttattagtaatcaacatataaatattagattcaaccgtataagacttggtgttgaatgaatcactttacttagatagtaatgaggccaaggtaagagctttaatcttccaacagaaacaaacaaa

SEQ ID NO: 2404 - DNA, 778 bp, Unknown
  Description of Unknown: unclassified Betachrysovirus sequence
gaaaaaggcttctcatttttgcacatgtacgagcgctctccactaaacacgttaggcacaccaggtaacgcccaagacccaacagctagctaactgcccaccacaacgccccactcccacgcggccgctatgagcaacagggtgccacgtggtttcgctcacatattctccgacttggataccgcgagcgcttgggacaacgcactgagcgaggttgaagaacgcgagccggacgagagcgtggttattgagggcgaccccgagatctacgagacactgcgcagtcacggaggcccgccgcccgactacgaaactagtgagatagctagcgtgtacggccaaagagcagccccacccccgccagtggctgggtgcgcccgcaaccgctttgcccgcaccgagcgccccgcaaaccaccgcgaagcgccgcagaggttggctacaccacctcctcgcccccgtcgagacactcagttctacagttcggactggccggggcgcgacgctctacccacacgaggcggcatcgaggaacagacggcgcgcgttgaggcaaggaaccggtggctgcaggctgaattggacctattaacagaggacgacctgcggttcaacaacacacagcacagagcgcgtgccccatccgtacgcagagagtccggattataccaacgcgtgagcgagacagctgctcgagaccggcgccagcgcgaacgccagcgtagcaaccgagggagtagcaccaacggctctggcagcacactcgtgcggtacggcg

SEQ ID NO: 2405 - DNA, 779 bp, Unknown
  Description of Unknown: unclassified Bacillarnavirus sequence
tcctgcattgaccacatgcagggtttttcgggtattagccgttcttaattgaacgcaaatatttcgtttatttacgctatgaactccaacgacctggagttatttttgaactgcgtaagtaacgcagtttgatcaaaatatagtttagatttaacatttcgaagttttttagccgacatttttatgtcgtggtaggcaaaccattgccggtgacagaaatcccattgatatagtcacttaaataaaaccgttccttttaggaatgtgagcatttcagatttgggcagtgaatggggccccaaatcagtcgcacaattgcggcattacgttttaacgtttatcgtagtcaaaacgttgatttttacttagtttgattgtaaaactaatgtgtgttacgaaagaaagtcgactcactgatgagtttattgtgttccttagttggttacgctttaggtggtttgccaatcccacctttagttctcatttgagatataggaagacagtgaatgaattattagtaacgtaagtacgtccatttttgtggagcacgtgtaggtcggtaccgtatgggtaaaaccgttaacctgatcgtgtaaaacattgatgacacatgaagagacaagatttctatttagagatagggaagccaaacccgcacaaaaaatagagcaaaggtgcaatctacgagcctaatgtatttatacaaaccgtgagtccactaaccgaaagtatttacaggatcaaaacgagtttacagtggaaatttggtaatcaggaat

SEQ ID NO: 2406 - DNA, 779 bp, Unknown
  Description of Unknown: unclassified Picornavirales sequence
gggatttatccccatgctgaatttatcccactctaaatattagagtgttgtactcctctttggcccaccattgtacggggtgtgtaccgtacactagttatagtaagtaccactagttcttggttccttctcgtgttagtgcacacgttcttgcgctaagttttctaacttttctttgtctaaactttaaatatgtgcttcttttaacctggaggtctatcgtatttgtggagaaaagctattctaagcaaggaaaacaataacactttctatcttctttgtttctgggttgtcctcttaaccaagctggtcccatgggggcgtgggtaaatggccctatggattagccatagtggttatgtaggcgaaataaggggaacccccaatcatgttgtacgttgagttgttcatggtaactgctttatatacatatctataattgcccataagaggtaggctacgggtgaaacctctattgtagacggtaaggctgcggtaaagattttctttcaacgcagggggaccgctgttctgcagtgggaatatataaatatttatgtactgtgggtggatgactaggctaaggcttgattgtttaggggtgcttaggaagttattagaggaaggggttcacttatatgaaattgaaaaaggatgaacgctatcccacctcaaacttcctgagccttttcttggctctttcaggttttaaatccccaaatgattaaaatatatgatatagatacaaatattggtttttgttttgctgattagtagca

SEQ ID NO: 2407 - DNA, 779 bp, Unknown
  Description of Unknown: unclassified RNA viruses ShiM-2016 sequence
acgcattatgcgtatgcggggatcatcgagatgccggattaacttccggccagttggccttgaggaggtcagcctcctttcgagctagagtagcactttgggggttcgccccctctgtgctagttttgttttgtaattaaatttattcttttatgcaggtatcgaccgtgttaaaccagcggtcatcgacctgagaaggtcattaaatatatctaccaatcttttgtgatagagacgtaaaataaacctataaaaataaattgcgtccaatgtattgttattttgtcggtctgtagccggcactatatgttgtatgttaatcacaggctttttactgatcaaatggaagcctaatatgtccattagaactaatccgtaattaacggtaatatgagtattatgactgctcgtctaacagtcatagctccgcctgagagtgcaacgtaatgcaatcaggcttgagtcgggacgaattatcccgaccacatttgaggaacgccttcgggtagggcctcaaccccagacgagactcagtagcaagcgtaatgtgagttgtgcttaggtatagcctcattcatgaatttggattttgagcgcctttgtgcaacagcattgctaacttgtggattgagggtggccattgtgtccatggaataacacccaatgatgtccttgattaaatttcattcgtgagactaaagatgctgtgtcgactgtcgaagatttattctttgcaggacacctgcacggaataatctttgactcgtcgttcaataacc

SEQ ID NO: 2408 - DNA, 780 bp, Unknown
  Description of Unknown: unclassified RNA viruses ShiM-2016 sequence
gcaggtttccctcacacggaaacctgcgcacgcgtattaaacaaccattgcatctgcaatcacgtcttagcattgctagtaagttgctttaaacttgctagttgtcctttgactagttgtatgatccgatggactttaatatataatttaattatatattttaccggattaatggtacgacttggaccgtgtgaagtaaacagcttcgcacgttttcttggatttaaccatcgatttataggatggtcactgatgtatatcagttattttcttataaattgattcttgagcgagttttcttttaaaactgcatgcgaagcaatttattgtttcgtagattcgaggtgacattgatcgtttgacctaataaggcgactgaaaaaccaccggcttattagttagatcttggatgttgcttatgtaccgcaggggtcttatccgccccctcctgtaagctactgcacgggtagactggtgtctccttttaatattgtttcagacccatgcgagtcgagtattagaaggctgatcttccggcgactgtgtagatggagctaatgaggatggcttactctcctcgtcatcggaacctaattgctgggacgtcatcaaatacttgggcgatccagttcttgagcggcattattcgcacaggtgaaaaagtcctgctggtctagtgctagtgtgcctcgctcgaatctctgacaaggtagtctttatggttatctataggagttcgggaattagggtgtgaacgagaactaaatttcattttttacg

SEQ ID NO: 2409 - DNA, 780 bp, Unknown
  Description of Unknown: unclassified RNA viruses ShiM-2016 sequence
ataggacatcctttacggatgtcctataggctcttttcttatgtcgatctacagtttgaactgctgtagcagtcgcatgagatgtattcatgctatcagttaatttgactttattaatagttgcgctcttctgggacactatttttattgtccctttagagattgctatatgaagtcctcttggacactcatttgcattgtccaattgtttaacgctagtattactttattctcgttggcagagtactgccattataagttttgaagcttagttcacttcatgaaaggctttctttcaaaaaccctttcaacccccccttttgggggcttacatgttcaaatctttcgttcggggaaagatttattgtttgctcccggcttcctctaattgattttagtgaaagctgatttatttgatgtaattcgcttagtgttttatgccctaaagagaatcccacctttactatctaacaaccgtttaataacctcgtgacctaataagaacgtggaacgagtaggaatgatttagtttaggaagaattggtctcttggagtataatttatcagacgtacttgaacatatttagctcaataccaaatagtaaccttacgtttaagcacgtgaaccacacgtgtagggtatgtagccgtgcccgatatttgagtaagaagtgctatttgtgagatacatataatgatatttcagttattaactttttgatattttaggaagttttgtttaggcctggtgcctaccgaaacctcacccagtttctaatt

SEQ ID NO: 2410 - DNA, 781 bp, Unknown
  Description of Unknown: unclassified viruses sequence
ctggcgacaaatgtcacaggtgcgttcgtggaagacgtaaaatctctaatagattattatatcgctagggctaattttactaacactaccatagattacgataagttgagcgaagttctatcgaatgtaaaaattaacgtaaccactacgcagtctaaaccgtcgttttcttactaccgccggcttatagattactatatcgaccacgactacaatatcacacaccatatttttggtggcggttctatagttggtgataggactaaaaggtttacgttcgctggattgttcgagagctccattcttgccatagttagaccgattttacatataatacacgaatttttcttggaatttattgaacccttattagaacgtttgatagatatattcgcaaaaataacattaccattagttaaaacaatatttactttttcaaaaactttgttcgaacacatatacaattacataatcgaaaacgtacctgaacagacattgatagactttttcgaaagatttttaaaatttttatacagaatattgcatgttgttgttgaaaaatttgtagacattctaataaacactaacactacacataaaatttttgagtttgttgcactatatttaattctgttttactattttaaagcatatttcttatcattaattatcacaatagtaacttttgtaatcattggcatagaacgcaccgacgaacataccataatggttatattaatttttacttttctattgattcgctgctacactaacccacgaa

SEQ ID NO: 2411 - DNA, 781 bp, Unknown
  Description of Unknown: unclassified RNA viruses ShiM-2016 sequence
tgacgttgctttcgggcgacgaggtaccgtgcgcgacggtaggacagctgccccggcggccgtaggatacaaggttggcgtctgttcagtatgaggtgaaaccatggatgtctaagacattgcattggtactcctgcggatggcacttgattccgaaaaccggcgtggggactttttgggcgcatgctgtgggcaggcatgtgagtagtgggcgctcgtggttttttctcagctctggtgtcgcaaccaccaccagcatattctgttaaacagtgtgctgtgtgtccgtgccatagtgtagagctgacccgtgctgtagggctgcattatggtatacgtgagagtgtaaaatagggaggccagtccctgcccgccaaattaccttccgtggtcaacccagcctcgaggggagaccctgagccaattcgtggacctgctgcggccaggttgaaggtgaaggccacccgactccgaatgccaacggaaaacagtcgggcatcctaccagcctatctggatgaacctgatgccccgcacgagagtgtactttaggggataggggagctggaggatggaggttacggttccgtgtcatgaagtgtggaagcgatgcatggcacgtaggcatccagaggccgtgggcggtcattgtgatcatggggtcactgagtaccgctcgcgaattttcatccacgttagcatcacattgtcgcgcagaggaagagtcccagtggtgttgatgtgtgagacgtttgtgtcggtgtttgccattcattacagag

SEQ ID NO: 2412 - DNA, 782 bp, Mirafiori lettuce big-vein ophiovirus
aaaaggaaaaaacattgcatcaaaacagtaaaaacattcagtcacttcaaattttgactatggactataacaaagatctaccagaaaatgtaagaacagtgactaaaggtgaaagtaatgaagcagaaacggttagcaaggctgattgtgaaaagtctaatagtcttagcattcaattgttcctcaattatcatgttaaagagattacagttaatgattcaaaaatacaaacaagaaatatctatcttttaaacttgttaaagggatatcaaactagttacaaagaagtaacaagattcctgttcggttcttggttacttttcgaagaggagctgcagccaccctttaacataaaagccatgataataattgacacgaaccaagaattagtagacgtctcagaatacaaaggaatcgagctaattctagggaatgacatacaatcgtgtattgattcattttatatgcatatttacaaggaagatctaattatctttaatgaatcaggagactttatgttcctgacagatcattttaagattccaaaatattttgcaagactggatggacaacaaataaaagtcaggaaaattattgaaaaaagatatttagaagtatctaaagggaaaacactcaaggagagaacttagctgttttaataaaaaatcaaacaaaacaagtgagaactacaaccaagatcaattaagcaagtaaaaatagtgatatcaaaacaaaaaccaaccttcaagttctttgtcatactcctctgcataacgttaata

SEQ ID NO: 2413 - DNA, 782 bp, Unknown
  Description of Unknown: unclassified RNA viruses ShiM-2016 sequence
atattgcatttggtcctgggatgacattaaactcatccaaactccggaaccatctgtagtataagtttaaaatggttgtgttgtattggataccatatgtgttgaatttttgatgttattttgtacatatataggcttgcatcacatagacattctcccagtgggaatacctgtttttacaggaggtctcgtcaaccacacaaatatcatgcggaaagtgctttgagtagagcacttatcctaagttcataaaattacttactacacttaatactaataccaaaattgaagcggaaggaggctccgcataccaagtctccaaaacctctcgcgattcgaaggcgcagacagtcaactttgttgatggcgatacgccttggtcgtatgatattgtcgcaactcctgacgcgacgaccaagctctctggattctctgatgccgaactcggtgacttccttagccgacctatcaagatcaaggaatatcagtggacgcctggatcttctttgtcagttacgcgtttcagtccgtggacggaattttttagtaatgctgatgttcttgataaaattaatcgttatcgtaacttgcgctgtaatttgcgcctaaaagttctcgttaacggaaacagtttttattatggacgtgcattgctaacatacaatccgtacattgccaatgatcaagtgactgtcaatcgtgcatttattgctcaagatttgattcaagcgtctcagaagccacatttgttgttagatcctacaacttcacaaggtggtgag

SEQ ID NO: 2414 - DNA, 782 bp, Unknown
  Description of Unknown: unclassified RNA viruses ShiM-2016 sequence
tttagctaggatagttagatagcataactatgaatagatcaggaaatagacgtggtaataatggatctgtgcggttaccagcacaaattttggccagagcgctgacgcaacaaatgaacaacaagtcagcaagaaaaccccgtcctcccaaaagtaggcgaaaacagccgattgcacctggcaatcgagggcttcgtgacaccttcgtgttcacggttgattcactgaaaggcaattctgaagggaccttaacttttggtcctagccttaaggagtgtcctgctttttctgggggagtgacgaaggggtaccacgagttcaaagtggtttgggttaggttcaccttcatttctgaagctgcctcaacctcctctgggtcaatggcatatgagatagatccacatttgaagttgacaaaactgtcctccaccgtttttaaattcggaataacaaaaggaggatcaagaacctaccgagcctcgcagatcaatggcaatgaatgggtatccacttcggatgaccaattcaggtttctgtacaagggcaatggagacacaactacagctggtagttggcaagtgacaatgatggtccatttccagaactccaaataggtagacgacgacccggcacctgctccggtgccacctccatctccacccccctccccctcacctagtccacaaccaacaccagatgatgagagattcattgtttacactggtgttgcaacaactcgcataagagcaaagacaaccgatgatgcattaattctcaacccg

SEQ ID NO: 2415 - DNA, 783 bp, Unknown
  Description of Unknown: unclassified Iflaviridae sequence
tattttatacccccatgcttcatggcagatgcatacagtggagatgcatccctgtcaaagcataccctcttttagttataagattttattattattatcaaattaggcctaagtataatataataaaatgctcgttactgaacggggctcttttgagtgtataaaaatttggttagaatgtaagtttgatgactccatcactcgcggagttatatatgaattaaagaatgtatgggcattccctcacaaatatgaaacatgaccctataattatatcgggaagtactcctatggcgtttatgttgctacttactgtatacatatttcggcattagttgtcaccatgcaagattctgtcctctattatgcatttgtataggccatccgacttgtcgcctaaactatacagatgtgtattatgataatgtttcgagtactagaactacttattagttattccatatatgcataatcatggtattaattgtgagattcatatattttgcgtcagtcgacacatggtgttttataaaatggggttgcattgtaaacatttcaccgtcttcgtcgatcattccatatttttttttaaagctcaaactcttctctttatctatcttttcggagtggcgcccgagatttataatctcattaaattgagagtaaattgagccattttgtatttcctttcttttcttccgtaaaatgtttagctactccgaccaccagggataggtcgatcatccacccccaagaattacgaatcagatacaactaaatacg

SEQ ID NO: 2416 - DNA, 783 bp, Unknown
  Description of Unknown: unclassified RNA viruses ShiM-2016 sequence
ggggcttttcccccatggctctcattttaacggcaaagataatcatgccgatagttaagctctcagtgatcttagatgtgcatttggtatacttagtttcgacttttatgcttcttgtacaatctattacactgttggtttttcatgatttcaccctttaagttgaaaaacttattttgattttgattttcgaatttagaagtaagacccctttgtttgacttaacttttgttattttgacattgggcaatccactgacttttgagaatcaccccttgtggttagaagaccacgtacgtaactttagcatagatccttggatagctagttacggcgacgaagtctacttacactttaatttactaagcagagagaaagtgctgacaaattgatttagttcgatttgtcggaattgccgaggtccctcacagaaacccgcctctttagtattttatttgttgtagtagcaggctttgacgatgaactgatataagtacaaactgatcctttggtcggaccccgttcacaagtcttggaacaacacatcgcgaggtgtgccttggccggtaatcatcgctatggttacccgtggacaattgggccccccggctgcgctagcaagcaggaggaacatatcaggaattcaacgaagtatcttttacctgcgttttaataagaaatgcaggagttgataaatagggcttaaactggaagcgagactgcagcggctaaagcagcagtaaatggtgccagtgtaggtgttttctctttttaaatctcatt

SEQ ID NO: 2417 - DNA, 784 bp, Unknown
  Description of Unknown: unclassified RNA viruses ShiM-2016 sequence
gctcttccgatctggggaaacccccctgttctcttttgaaagctgaagtattggattttgcgtgatttattgagttaccgcagtttcatctgaatttattccggattttgcaaaatgttcttttgtttaattgataccagcgggattttatctaacgaatctagccacacttttaatcattagcactctttagtacaacggcaccaaccaacccccccttttatcattttaatattcttctgtgacaggcgccttagcgcagtcagtgtttgaggattctttatccatttcggaccgcgttatctatttatagatcctttttacgatttcacactgattgtttttaacaaccatcacccttatatttacgtgtacaaaaaattataaaaacgtcgcaagacaccaaaaacaactgtcttttcatacattagatgcaataataacactgatgaattagactatgaatcagatttacctatatgatactaaaacgtcgccgaggcataaagagcggacccaaaaggaaaacctacgtcaagtattatatctgctgatcagccatcttttttattttgtgcgctgtttttgcggacactttgtaaatgctatgtcgttgctgggctcacttttcgagcaataattactagaacccaaaaaatgaataaaggtcttacgggtattcttaggcagcaactttcattgtcaatccaaacatgtttcggtgtttggttctagcaattaatccttcccacgattcctattttaactctttttaacattcacg

SEQ ID NO: 2418 - DNA, 786 bp, Unknown
  Description of Unknown: unclassified Hypovirus sequence
gggttccgactaaggtgctgtttacagcttaatcgggtgaacgcgcccaacttcaatgggtcaccaatttgggttcgtgatgttcgaaccattggaggttaaatattttgcgttcgtgtcacattgtgacgtgacctatttaggtcgtagggtgagtccctgtggtccattaggacggtgcctctcttggggcgttgcacgaggtgcagcatatcaaaagtaaaatcaccaaaaacaatttaaaatatgaaatgataaaatttgacctgggacgtcattaaactcacggcctcaattgccaccgctcatcggtctcagtgaaggggtgaaagcggccacggtcgttagtaaatataactgggaatgagtaggagagtctgggcccgattaccagttggctgatattaagcggatagattttaaaggttcacctccaggctcaatcggactgagatccgttgtcggcagtaatgagtgcaactcacaattctggctaggtaagacgaaaagacgttaaaacctgaggtgttcgatcaactttaagactatttcggttaaatatggctgggtgggaaaggtagtaagctacccaaaaccttaggctgagatgtcactttgtgtccggtaaaactccggggaagcggaaaaatgcacgctgcacatgacacgagagacacttgactgtactttggtcccgaacgggagcacatgggggtcgatgacaattgggaaagaccaattgacttggcagtggaaagaactgctattcaccatgatcacatataa

SEQ ID NO: 2419 - DNA, 786 bp, Unknown
  Description of Unknown: unclassified Picornavirales sequence
acatgggcgtttataacgccctaccagtcctctttgaacgtgtgctgtccatctatcagcgcaccatggtctcacgaccatgttgttcaataggtattctaatccaatccctattctcccacaaaccttcttgtaactctgttaagccttttacatccatgtaatttaattttctccacctaaaaggatttcccccatggtcctttttggctcgaacaaatgctacatagggtcttgttttctccccctggctctcttgccagggttccataccccaattcctctatttccatgatttttcatcatggtttatttttactgtcttcttattttctgaggtgaccaactcctaagccgactgggtcgcggaagcccggactcctcgcatcactagggtgcgtagcgatgtaggcgaaaatattggttgctagatgcatacatatagtgaattgatactacaccaaactctgttctttttgaaactagctattttctaagtaaggtaggctacgggtgaaaccttaccattgcaggtacgtgaaccgcaacggacatttggccgaagactggtgtacccacgtcagttataggacctcttcaacgttggtggacggcatgtcactgattagttaggctagtgaatttaagttcagggggtatcttttagcttaagcgtgtattctagtaggacttgcagagcctccccacctaggaggatctctgtttatagccccttttccttgttccgttagttttccacacttttacaatatttgatgatttgtt

SEQ ID NO: 2420 - DNA, 788 bp, Unknown
  Description of Unknown: unclassified Torovirus sequence
tgacgtattcttagttgattttgaagccttgaaataaagcttttaaaccccttttacggtttgtccaccatacggacattgttcagaccgcagtgtcttgtcaaggaggttcagccttgacattacttctctgtgaggaatctactcagaaatactgcttgcgtactagtagttacaagagttgacacttagtacttacaagcgggttcaaccgccctccggaacggtggaaactccctcccgaacgtgcgcttgacgtgaccaatttaggtctagctttctgagaaatactccagggctgtatttgaccacatctgttattcatttgtggttgtccacaaccaaacatcgtgtgactcacctccagctttgctgcaggccttttggactaaacgagtcgcacgttttgtgactagttttaggacttttcacactcccctaccgccaacctgattcttttcatccttaagttttgcgtttatacgctattttcttacggttggcagtttgtttggttgtttgcacagtttcttttaataccaatttttactgtgctcttagtttttacagctaaggctgttttttatttactcaagttgcttgaagcagcttttacaacactagttttagttttaattgaaaagttaaagggcgtcaggaaacaacgcagacgcccttcttgtggtgtctagttagtcctaatctggcaaacaaatatcaggttgttgactccctttggagtgagacctacgagtatcagtttgcttattttggacacccatataaaa

SEQ ID NO: 2421 - DNA, 789 bp, Unknown
  Description of Unknown: unclassified Picornavirales sequence
tttagtgttgatgggcttggccgcaggtgcttcagcaattggcactgcggtcaatgctggtatggctgctaggggacagaataaagctattgaccaacaaacttcagtcaataacacaaatttgcagatgcagaaaaacgctatgaattatcaaactctaaattggcaacgtaatgtagatctgtttaaacagagtggattacctggttggatggcggaaacccaaggtggaggtagtggtaatgttgcgtttaacgatttccctaaaataactcaacaagtagctggtaataatttctcttcagcagcaatacctggaaatttagtgagcgattttggcaattctatgatgcaacaagtgatgggtatcgctaattaccagtacatgacaaaacaaggttttggtccaaaagtatctaccatgtcacaaacagatcgcggtgacattaatcctaccagcacattttcgacccaaacagagccaaatcctactgggacctcgatgactgcgactccaaacacccctgaagaactttggggtgatctgggaggcacagtgcctagtacatcctcaacagtagctatgcccgatgcgtctgcagccgctgaggcgattccagctgcagcgccgattgaagaatagccctagtaaacgtgttacttgtgaaaaacatccgcggattttttcacgatggtacagttgtcaaaataaatacatgggcttgaaagacttgaggatttactttgaccttttgtgtttcttggataataaccttgaaatattcaaag

SEQ ID NO: 2422 - DNA, 789 bp, Unknown
  Description of Unknown: unclassified Picornavirales sequence
acccctggggcccacgcggcgccagtactctggttcgcttagaacctttgtacgcctgttttccctcccctaaataaattaagatcaccactactgtggggagtagtccgactccgcaccgatacgtcgcaccagtgaactggttcgcttaggacctttacacggagtagatggtgttcccttcccccgtaacttagaagcatgaaccaaccgaccaatagtggcgttgcatccagcagcgcagcggtcaagcacttctgtttccccggcgcgaagcgtcgttacccgcccagcctactgcgggaagcctagtagcaccccaattgatcgcgcggttgcgttcagccacaaccccagtggtagctctgaggaatggagctcgccgtccccccacagcaatgtggtggcttgctcgcgcgtgtcctcgggttcactcaaagagtgttcaccgcaacatcaagtaaggtgtgaagagcctactgcgctaggctggttttcctccggagccgtgaatgctgctaatcccaacctccgagcgtgtgcgcacaatccagtgttgctacgtcgtaacgcgtaagtcggaggcggaacagactactttcggtactccgtgtttccttattttgtttcaatattttatggtgacattgactgatatctgtgaatttgctcgctgcccctgaatattgccttatattacttaatagcatttcacgaaaacgacccagctttcaattgagcttattaactttgctgtatctttaaaccagatccacaagtcggtgtaca

SEQ ID NO: 2423 - DNA, 790 bp, Unknown
  Description of Unknown: unclassified RNA viruses ShiM-2016 sequence
cagaataatagctacctgcaagtcattattgacttgcaggtagtattttatgtaattgtgcctatgtttatgcatggttctacggacctatgtttatgcatggtcaccaaacatttattattctgggagaaggatactcctccacattatgtggtaaaaaaccaaatcacggcgtttaaaggcctgaattgcttttagcccactccctttctatggagtgaccaaaacggcggtagggtagagattatatctccctagtccgcgtctttgctgaatattgattcagaaaggaatggcaattcattgtgatgaagttttaggacagactttaaaatgtcctcgtgtgttatgttatatgataagagcagtaccagattttctgctctacatttgctctatgatttttcataacatatcgtctttaagattgtactttattgattagtttttgctggtttagacctagctattaaggtgagtcgcccactctgcatacttacgagtatgtcgaagtaacgatagtctttttagtaaagttgcgcttcagatggatcgtgatcaccacctgatactgtctttttaacgaagctctgaaagtttaaatacttataaagcatgtgtttgttaaagagaccaccgtcctgctgttgttagttaaaaataaccaggttaccgaattcatatgaggaagtctttaagaagatatgggggttggtactcccgaacggataattagtacctgattagttaagaactcgtgttggtcgtgcgttaacggctgtgcccattg

SEQ ID NO: 2424 - DNA, 792 bp, Brevicoryne brassicae virus
ttgaaaagatcgtgtagggtatttaccctacatgatctatcatattcttttcatgacgacatttgttcttgacatgcaccatatttgttctctttgaggattcttatggtatatgttacaggattcttgtcgtagtcgtttggatatgattattggcacgtcccgctgattgcgtaacaatcaacaatttagtctataagctttcttttcaaaatttaaataattaattcgctctaacaacattagaattcttctatttcaattatactttattaaccaaaaatatttagctttaagactagctttgtgagctttgcacacacgtcatttatgtattacactttagaaggtaccataaatggacaatttcggttgtcttggctgatacgataatcagtttctattctaaggcttcgggtgaagtgtctatcccgttgaaattaacaccgctggataagagtctttaaacttactatctgagattgtatttagtacaggcgatagttttatgtaatctaggctggagacagtacgattatataaatctagtttaaagaatttctgtttggtttgtgtatggcatattcagtgattatacgtaatcactgtctcgtttataatgtttaatatttttcggcaaacggaaggttgtagttactctgagagatttaataccgtatctaatagaatttagaactcatgatttgttctattagtccagcatattgctataccgtattattttgcctttagtagcgttttaaccaactgacttattagccgcatttacct

SEQ ID NO: 2425 - DNA, 792 bp, Unknown
  Description of Unknown: unclassified RNA viruses ShiM-2016 sequence
atattgtacatattgtcctgggaagacgtaaaactcattccaaccccccggaactattcgtgggatgtgtaagtttaaaatagtcttgtagtattggttaccgttaatctgtaaatttttgtgttatttgtatttctttctggcttgctacttgttgacacttccctcgtgaagtacccgtatttacgggaggtttcgtcagccacacaaacactatgcaggaagtgcactgagcaatgcacttaccctaagttcataaaatagctttctaatataattaataataatgataataataataatgaaggaggtgccgcgtatgacatttccaaaatttcaaatgaaacaagtactcaaacaactaattttgttgatggagacagcccttggtcgtatgacattgttgcaacacctgatgagacaaccagactcgcaggtttcactgacgcacaattaggtgatttcctcagcagacctattaaaattaaagagtatcaatggactccgtcatcatcgttgtctgtcgcacgttttaatccgtgggctttgttttttgcaaatgctgatgttcttgataaaatcaatcgctatcgtaatttacgttgtaatcttcgtcttaaggtgttagtgaatggcaatagtttttactacggccgtgctttactttcttataatccttttgttacgaatgatgaagttacagtgaatcgaacatttattgaacaagatcttgttcaggcttctcaaaaaccccatttgcttttagatccgacttcttcgcaaggaggagaa

SEQ ID NO: 2426 - DNA, 793 bp, Dobrovirus bufonis
ttctgaagaaaaccccgggaaaggaacaaccccgagtttttctccctttcgacagccgccacactgtctcatcagctgggataggggctctgtcgagccccccggcccccaggagagagaaaaactctgggcaagagattttgatctccttattgagaggaagatttttggaagattccgggagcgggaattgttcttccgggcgagaccgaccgtggcccatcctcggataggtcgggccctctcgggactgctgtcgccccggagactctcggagatggagatgcctcggcgcgggtggcctcggtccaggaggcgaaatcttccgtttcaagtcggaaccgatggagtcccccttgggtccttcgaaagctgaaagaagttggaaaaatcgggcatccggagaacctggaaatggactttgaggagagtgttgctaaggctttttacctgtcctgtttttcccgatttcccgcatgtggctcttccgcaaagaggggctccctgaccgttttgtccttcctcccctccgcgcctttcccagttttgctccgggaaagaatttgacagtttcttctccagatctctcgattcccttagggccaaactagcccccgggagcggcgcgttctcgtcggttccctccccccccattactaacaattaccgtctgagttcattgtccccaaatcctcaaacgggatcgcccccgggctgcagcgggagtctaaaaagccttttggcataatagttctccgctgagtcggaggcgcggtcccctatttttgaggaa

SEQ ID NO: 2427 - DNA, 795 bp, Unknown
  Description of Unknown: unclassified RNA viruses ShiM-2016 sequence
taaagtctccatgcgcattatgcgcgtggagacttaaattgaattaattggcattaatatatgcccttgaaccttgtttacgagctatgaagggcattatgatgcccccatacctcgaaggaaagaagcaagctttagatcctttattgtaggatcttagtttgatttaagttatttattttattattctactggggggtggtcccctacaaaaaccacacactatatgtatatggaaaccaaaacgatggtagtagactctctgttggagttgaagtccatggccttaatggcaagagatatcgtggaatgccaccacgataaataaattaaataagcaacacgaaataattcgtgcattttatcggagtaacccgaagtgcgaaagtgctcgaaggtactcgtgtatatttgatatgtatccttgttcgggatgctgtctagtagccactgtcaagcctagcagtgtagtattataatatattacatcattgatagtatatacgagtataggcggagagcagttagtaacccttgtccgaagaggaaaggtaggtgcaagcagtattgtaagccttgttgcctgacacatagtctaaggaaaggtcggtctcgcccgttagaagtatcggattgtttagagtagttatatcagtagacgctcgttcaaaattgttaactgaattcttaatatttctatagcagaattaaaattgcaataggactcaaattagaacaaaagttattataaagaattaaaacgatatttttgaggtaaattgacaaagacagaag

SEQ ID NO: 2428 - DNA, 796 bp, Unknown
  Description of Unknown: unclassified dsRNA viruses sequence
tggataaaaggccgacaccttttatcccttctatcaattctttttgatagttgttttctaagtcacatggtagcgaaccacaattcgttctttgacgttgttatgaactcatatcatttccataacgtaattcgatcaaaagtcttggtggtgtgtacttcctcacaccttgtcgtttattttgatgcactagcaacgacgtaaaatgcatcctattttacaatttcctttcacacgtggagttaaaccttcactttactctttttcaacgtgtgcctagcattgtatttgaaagctaagtaccctgtgtcatatgaatcacacatccttgtgatatttctagtggtcccaagctcgtttcagccgagtataagatgacagtccctgctgttaattgtgtcatctttagtcccttgcccccctatcttcgtttatttgaagatagataggatttggtttagccacagtgttctatacctagatagctgcgggacgtgattccccgttgggaagctatttctaaaacaatcacaaaaacaggtataaaattaaaaatcacaaaacaacttaaacatgcatggttataagcatgtgcgtgactgagtatgtcctaggttttgcctaagatggaccactacttcacgttgttataactatttgaatcatacactattcatctgtgcctcggaccggccttgtaggaccccgacccatcatgatttctatccgcaccaaacatgtcaagtcaggacctcaacgccaatcccccgttgtgccagtccattgattcatccct

SEQ ID NO: 2429 - DNA, 797 bp, Unknown
  Description of Unknown: Dicistroviridae sp. isolate fcc172dic1 genomic sequence.1 sequence
cctgcaggtattacctgcaggaggtctgagatctggaattcgtcgatctgcgacgacaggctggttgtttactagctttgttgttgtttttgtgcgtggaaacacccgtttcatctttgtatgtatgtatattagttactatatgtttgtttgccggtgtcgttaaaccggccatgccccgcatatgcggggctagtttatgttgtaaatattgtatcctataataacgtatggtccctgttcggaccagtgtatgaaaaagtggactattttgggttggagcccaacatggaggaacttaccccagtagtttgaactggggacccggggtcggtttaacgagccggccccgtgagttctggattagcatggcgctgtccacataaatacgtacgacctttattttagaataataacctttgcggatgccttagggtgtacgcagtatacagacgacaggtcaacattgacgtttttggagttggtccgtgcctctgtgctgatcccgaagcacatgcgattaaagaacgacccgagatatggtatcatcatttgtagttgtacgaagcgtatgtatctgctattgtgtaaacatagtctggtaaagccatgatttatagcatggacaggccagtttgtggtactgaagcagtagatttgttagcatttcgttagtggattgcaagtgatggtagcgaagtccccaagaaattagatgttgtccgatatttgagcacgcgacttttgtcgcgagctcaagtcgtcagttgttactgacgaacttgagactcgcgttt

SEQ ID NO: 2430 - DNA, 798 bp, Unknown
  Description of Unknown: unclassified RNA viruses ShiM-2016 sequence
cggacgttcacgtccgtatgagatatagtttagttggcagcttagcccgctgcccgggttttacctgtattttaggtactgtttaggtttgttcttgaatgggatcgcaggatacatggtagaaccatgattctgtcccatttttgaggaaacctttctgatactgttacgattgacttctatataaacgttttttaatgctctgaggagtaaaccttataagaaatctagggagtccaccctacgacaaaacaaaccccaatgctcatgagggcctgcgcatgtcgcttttattgtgtagaccttccgtacgtcgatgagggaagtttaggccttgagcaagcctttagaacttcttaccttactttcgagtgaggtggcccacagtggtgtggacgttcttgattggaaatgatcatattaggtcatagtagtgaattatgatgatgttatgcataattcgaacttattgaaactttgatatggtaatgtcggtttaaatacgcaaaagtgtgtgagactagagtactcgactttgctaccgaatggccctgttattggaaatgatatttgtatcgatggcgtattctgattctgcaggattcttacttatgagatgtgtgagttttatccggtcataagcctaattatcatagtgttggatgtggtgagggttaatagcccaccagcttctatgcaaaagaacttagctggcccaacacgccagacgcctagccttcgggagggaattttatcgttactaaaaaccaaacacagagcggggagagcttgctgaca

SEQ ID NO: 2431 - DNA, 799 bp, Unknown
  Description of Unknown: unclassified RNA viruses ShiM-2016 sequence
gacatgtcactccagaattcgctgcccccgggtcggtcagggggtggcatatggccgtggagaaggccttggtcgaggagtgtcggccatgcatgtgtggggggccggttgcccaccggtcgagatgggggccctcgagacattgccgactcggggataggcgagctcaccgctgaaacccttggcttattctttcgtgcgggcgtggtgtgacgtcccgtcaaaagcctgctggagtatcggcactcctgaggtgcaagccagtacgcgctgtgcttcgaggtgggcacagttcctttgccagggacgaaggcgtaccaacgtcactcaccgtgccatccagagcaccaaccatttgtggcacgggcgtgtgagtcaggataccacatctgtgggacacccctggtgttgtgtggaaatcggaccgcgacggagcacgccacgtcgcaacgggcaccgtgggaagcacatattggggaggcagagtgacggggaatggactacggcaccgctgcgccgcggaggcgcctgccctcgccattttggcagacggcagatacaccccacaattttgatcgattttccgcgcacacccgcgtgtcggtgcgaccgactgccaattttgggactgtatgaagcgcgtctgttctcgcgcgtccgtgcctatagcggacatcacggtccacaagagacaagtgatcccacaccgactgaccgagctccggcagccgccgggggaggttttgcacgaaggagttgagacgttcggggtctggagagagtggtaccgtcgtgtgcc

SEQ ID NO: 2432 - DNA, 800 bp, Unknown
  Description of Unknown: unclassified RNA viruses ShiM-2016 sequence
tgcaactgtgctttgcagcacagttgtattacttacggataatgtaattcggtatattttatcgattatgttgttgttaacagtttatgacactctaaatgagtcttacatactggcgcctaccgcggcttcagtatgtaatcaagaagaaagttccatcgactgtctaacgacagtcgtggtttctctctttatttgtattataaattgctaatatcacaattatattattccgtatattactgtgtatttctgtatcatgtgtaatatgttttctaatcacaggatgcttggtcaaggacttaaaagctcccgatagggcaccatgggagaactgattattaattcagtatcttaaacagcagtattgtctaaccacgactagcctgcgtctattttctcttttagttaaaataggacaagcctatcaccttgcgtttttgttaacgcccactagttccgattaaccaagtggttaaacttagaagttaatcaattaagagatgcattggagtcctctgctccattactctataaaaacctaccccaaagagtagaacttgagggatgatatgattatagcctaactaactggcaccataagtgaaaacgttagtccccacacatgcccggtcgtctcttgtgacggacggggaatcgtagggtcatgatcctcacgacttgaaagagcttgctcttagcaaaggatatacatcacggagatctaaggatcaatgaagtgattaaaacgtggcccgccgtattgaacatacaaacccattaatttcgggtttagttca

SEQ ID NO: 2433 - DNA, 800 bp, Unknown
  Description of Unknown: unclassified RNA viruses ShiM-2016 sequence
gtgctgcagcgcgtaagcgctgtagcactccataggtatttggacctcaaccggtccaggtatcactctacatattatatgtgggcgtttcgacgccctgctgtatttttagagcgttaggtcgctctgcaatattgcgggcgtcaagcccgtagcattgtagaagcacagtaagattttggaactcttttaaccaggtatcgatggtgttaaaccagccatcaccccctttttgtcctgagctggacgctaaacatgctcgattgtcctatagtaagacattaaactgctttttgtccatgagtaagacataaaatcgctcaatagtcctagatatgacataaaactttctgttgtggctttaggaaccacacactagacttaaaattctgtattgaagaaatgttcggatgtagagatttaagcaacctctctgcaatacgcaatatgtaagacgtatatgtcgattgttgtgcaccctctatgatcgttccacagaattaccgagccccgtcgtgtagcgagcacctcggcggatgattagttaagccatgtcgaatatgtaccgaagcgatcctgcgtttttaataaacaatgatcttcggagccaattacatgacatgcccaggctactatctgcgacgctgttaggtacgagtgtaagaaaaatttcttatacgttgaattttgatgttcgagtgccatttaaggctatcattataggttattcctatgtacttgatgctagccaaatttaaaacctatatggtcagttgtgaactgtgaatcactcggcttgg

SEQ ID NO: 2434 - DNA, 801 bp, Unknown
  Description of Unknown: unclassified Mitovirus sequence
ggggtagactcctaagataggagcctatctcggccaaagacgaggccgatgatgatcagattcatcatatgaagatgacatcaccacaacgcgaggttgcggttaggaatgtcccttgattagtaaccaaggcacaaccctttgcataaggaagtagacgttgggttgaaatacctaagatccataagatttgaagagataacatcaatatcaaaccatatgggttatagtatgtcgaccttctattctatctggtgtcgaatcagattagaaagacaggacgaaccgtactagacggcccttatttgcttttgcgatccgcagaaggaacctttggaggttcttccggggtggaatatataattccggagatcaatgactttcgtcattccaaagattaagtgttgagtgctctgatcggctgtatgaaaattacagtccttcatcctagcacttctttaatggggtgacaattttacaaagttattgtgaaccagaattggtattccaataagcatatactcatacgcttattgttaatcacgatattgtatatgtggaaggataatccaacaggtaaccttaatggtacctgtgaggcaactctgctattaatacgcagagtagaggtaagtaattcacctcacccttacaggaggtctaccagactctcctagagtagctgcagccccttggacctaatgtgaaaacattgggtccttaactaatcccgttaaacggagaagagggaaactgacttttacatgacctagttaacgatacaacctttaatcacaaaat

SEQ ID NO: 2435 - DNA, 801 bp, Unknown
  Description of Unknown: unclassified Picornavirales sequence
cagtgtgtatgccatccctcatagcatgcctatgactgatggattcacaaccctttcataacccctcccctaattcccaccttgcaaccatacgctttactccgcttcgggttttgcggcccgatgtcgtgaagaaacggttacgcaaacttagtggcgaacggggcctgccaccataagtggccccattagaagaatgtacgatccgcccagtaggcggccaccatccaggtggtttacgggcaagcacttctgtttccccggtgacgttacataggatgtccccacgtctgaaagtgactgatccgttacccgcctcaccactgcgagacggttagtacgatgtaatagctgatcaccgttgatccgggcgttttccccccgcccagaaacatgtgatgaggagcggcatccctcctatggcaacatagggcctctcctgcgttggcacgtgggctccttgagcacggtgtgatgtgaaagtcatccgaagaccttattgcgctggtgttgagtcctccgcccccctgaatgcggctaatcctaactccggatcatccgccggcaagcccgccggtagggtgtcgtaacgcgtaagtctggagcggaaccgactactttgggtgtggcgtgtttccttatttgtttggttgattgcatatggtgacaattcgttgtattgacgtttgccacttcccctgcaaatattaccaaaccaggtgctgtttttgtgctaactcctgccttactattaccaagaaattttcagagtcacttattccctcggttgtttggagcata

SEQ ID NO: 2436 - DNA, 801 bp, Unknown
  Description of Unknown: unclassified RNA viruses ShiM-2016 sequence
cgagggggtagtattaactaccccctcggtatatgaagtcatagacgagacttcttaatttacacttagtctattctttggtcgtatggtatctacgggaccatgcctcacgacgtccaatgtcaataagtggcgctgacacgctagtccgctataagcgggtcactggccatgagatgaaaagcctattctgaatatgattatttgtaagttatttacattcgcgaaccccataatttgagatacagtatgttcgcttcggagcatcctggagcattaacggttaacagttaccggctcgaaattgcacaacaacatcgtgcatcttgaccatttactttacgccaatgatggagtaaccatttcaccgacaagctagtactcttgtacgaaacactaggattgaaatgttcgaaactgattttagtattgtaggtcaccactttttactcttacgagagaggacgtagctttcccacaagcacgtaatagtgatgaaaattcaccattaagggagcagtaagcgctgtctgaacaaatgctgcgtatgtgcacacgcaatagaagaatgcacccttttaccttgccggtgctctcgcgagcatcgggttcaagtccttcacgaatttccgttgattatgacgattgtcccagattttctggttgtacgataagagtcaactgataataggaagtagtgaacttaattgtttgcaatgtcccttggaggcgcccagacatcaccaaagccatcttttggctttggcgttatttgggcagaacctggttaccgaaactatc

SEQ ID NO: 2437 - DNA, 801 bp, Unknown
  Description of Unknown: unclassified RNA viruses ShiM-2016 sequence
cttctttagattagtagtaaatatttgtttctgttcattggaaaactatcagtaatataattattgttgttatgactgatgtgcccaatttttggaacggtaacgactgcgtagcatcccccaatgtaggactacgtagacgcttagtcggtaattgtagctattgatagttacatttcgtgacaggttgaatgaatattaaaaataatcatagtacaccaatttgatgtaggccaacccgttgtttgtatatgcatgtttcatatttgcgtttatatacatttgacaaacagtttttcgtaaaaagggctttactgttgtgaataaagctcgcgccgttttgatgtggtaagttaggccgcaccgttgggcgcacgagatttgaagaaaaaacaaaataaaaagaaaataatgccaaagaaaaaggtagcagaactaccatgtatgtttaaaagtgctggcagcaaaccttgaatgcaatgttggagcatggtatgagtacactgactcgtattgatataagaggttttctctgcatagtcactgcaagttatacggttcacactagtatcatatgttacaaatgcgtttgttgagtagttgtttagtttttaatgcgttatgcaccctaggtaattagtcaagtagtatgagtgatcatgtgcgttgtttttatgttacgtccagggtaaaagtcccaggaacagtttaccgctcctgtagagcgggtagccgagctccgggcgataaacgcagcacgcaaagaccagagtgaacacagttaagtaataagtaagtaat

SEQ ID NO: 2438 - DNA, 803 bp, Unknown
  Description of Unknown: unclassified Partitiviridae sequence
ggctcgtcccaagtcgagcttgcaattgctaattcattcctcttttcccctctccaccctcaagctctaaagcaattatagcaaccatgcagttcgagccgccgatcaagccagccgacatgaccattaagatcactgatggagacaatagcaaccaaagcatcgattcgaatggcatcgtgattggccgctggaagaccggtctctttggtttcaccgattcgatagtgcccaatggcgtcatgtcttgttgctgtcccggtcttgtggtagctcagatatcggctcgtcttggctttatgccattttattacgtgctcagtatctttggagggctttatctagtagcacttattgcggtgacaacccacagtcgctttttcgactttattatatggttgtgcgttgtaatatcggccctctccatgatgcgtttgcgctggcgtattcgatcacttttcagtattcctggatctcatgctgaggacgccgccttcagtttttgctgtggatgctgctcgatcgcacagatggcctcgcatgttgaatcgtatgagccgggcactttttcatttgccccacgcgccacacttcaaggctactcactgaattaaggctttattataaaatagaccatcactatttgcctggaggaagatgggtacgcaagggtacagatataatctctaatactatttacataggcgatttccattcgaaactgaactccgtaactcaatctttgctatactgtcgcaaatttttcagctcttcctacgcttttttcgtaacctctacccact

SEQ ID NO: 2439 - DNA, 803 bp, Human orthorubulavirus 4
tgcaatcaaagcattagaggtgaggttagacaggatcgaagggaaagttgacaaaattatgctcacccaaaatacaattcagcaaacaaaaaatgacactcaacaaattaaaggctcacttgcaacaattgagggcctaatcacaacaatgaaaataatggaccctggagtcccatcaaaagtaagtcttagaagcttaaacaaagagccagagcaagttccaataatcgtcactggtactggcgatgtctcaaaatttgttgatcaagacaatacaataacacttgatccgttagcaagacccattttgtccggaaccaagcaaacaactgatgaaaggagagcaggtgttcgtatagatgcacttaaaataacagtatcagaaatgattcgagatctatttggagactgtgataagagcagaaaacttcttgaatcaataaacatggcaaccacagagcaagaaatcaacctgatcaaaactaatgctcttagaagcatcacttaaactatgagatctatgaaccacggaggtcacagtgacccaaattcactcaatacgccaagcaatcaaccccacactcagaagggacaactgcaccgcatccctaagaatcgacaccaactcaagcgacggcgacatcaatcatcacaaaacaaaatacagaacatcagcactgcatacaaaatcaccccccggcacacataattcatcgaccgacagattccctccatgacattacaaagtatttaagaaaaaaaccaaaagtaaggggggacccatcatccaatcgactgtggcc

SEQ ID NO: 2440 - DNA, 804 bp, Unknown
  Description of Unknown: Weivirus-like virus sp. isolate cra070shi3 genomic sequence.1 sequence
aaatcccctccattagggccggtcatctgcaaccggtagagttattttgtttatcttaggaaaacgtggcatctcaacaccaaaaacctgtaaaaaagggctgtttaactcgcattactgctaaagtacggtaaagctaaccggtaaaaagacccgggggtggaaatcccccgggctctttttaccggttagctttaccgtactttagcagtaatgcgagttaaacagcccttttttacaggtttttggtgttgagatgccacgttttcctaagataaacaaaataactctaccggttgcagatgaccggccctaatggaggggatttctgcctcaaagtttcacatactaagttgtgagtgtcacgcactttacgcgtttttagaattagattagatatccgacttactacatcaggacattaggtcttttcacattttccgttcgtctgataatgaccgctgttggttaatattttgatgggtttaacccactaactccaaccaggcattatttttcgttcacattttccattaaaactaagaatgaccacgtttggatacgctgtctgctttgaggtttttgcttacattgaaatagagcgcggctctaattactcattgaagcaaaggctagcttagtgacactggggccacacttcttgtgttatcgcttagtaacgcgctacggcgtcttcccccactatcgcaatatgtgcgggatttagtcaggggcagtgcctgacactttattgcgtttttctatattttgccgttttggacggccccacagctggtaacacct

SEQ ID NO: 2441 - DNA, 806 bp, Unknown
  Description of Unknown: unclassified Riboviria sequence
taaggcataataaccgaagttacccttaaaaccaacattgaaaacaatattctacctaaaagtcgtgtgtacatatatatatgtacacacgacttttaggtagaatattgttttcaatgttggttttaagggtaacttcggttattatgccttacggtcttcattgttaatggttttcgcggctcgcagtccctaattgttgaattgttcttactgatacgttgtcttcattgttgatggtaagtagagtggtttttcagaagatagctctattattactgttttcaatgttgatggccttcgtttggactttctttattaatgacggtaatcaaagattacacccaattttagaattaaacttttaagtagggtatgctgattttatcctctctcttaattgattttgatatctggtaattgatctcgaaagaagatgcgtcttctggatttgtaatagctgggccttaagatcgtaggtgttattacatggggaaacacattactttggttgatgatgatatttcgatgatgattcatgatgcatgtgcttgtattaagcctgatacaagaacttactaatttgcatagtgcaaagggttagcatatgatttctctgatgtggattttgacactgcctttgattaggatgtgtggatgatcttgaagcatcattggatgtttatgcgagcgtgttgtttaccaatttcaggatatgtggaagcggttgtgtatgatctatacgcacatttagttcccagagggcgttgtcgtctccccctaagcaagggagaaacacgtggcac

SEQ ID NO: 2442 - DNA, 806 bp, Unknown
  Description of Unknown: unclassified RNA viruses ShiM-2016 sequence
cccgccgcccttcaggcgacgagtggaggtcacaagccctcataaactgtggagtgtaagacacatgccctttaaaggcatgaagattcttgcttattttagcagatgaatcatactagcttgctttacaatattagcaatcgagccagaccacgaggattgaacttcaattgaaaatgaaggacggtccgaatgccctcactttatagagaagtgtgccctcactttatagagcagtagcgttttccctcactctataaagcagatccatattataattgttgccctcacttgattgaatatttcaagccagcgaagcaagttggtgtggtcccggcgtgttaggtgagccgtttaagacatctaacaaatatttagtttctttcttttctcgaactaaattctttacttcaatcgctgaaacttgtatgtgacttaacttaggccagcatattttgtgtaagcgcagtgatagtctgactctatccgaggaatcactacctcgttaaataaatgtggcccggccagggttatccaagcctgagacttcgaaactctcaggtggcatacttcaagcggagcgtaagacctaaccaccgttggctagtggcgcagtatgagcgaattaatggattgtagcaaagtagctttgaataactcctacgatcagcacgcaaccgggttttcgtgccccggcattatgcaactcatattaacggctagcaaagtctatgtccttgtgtggacatgtgtgtgtgggcccttaaccgggttatttgattaggctatattcgcgaccatatatt

SEQ ID NO: 2443 - DNA, 807 bp, Unknown
  Description of Unknown: unclassified Sopolycivirus sequence
tacacaacaatcaatgaatttacccccacgtgatgtagttgtgcctaacgttcctgaaacacaaactaatatgggaaccttagaacacactggattacctattgaacctatttggcaaattacggatatacctccggattttaaatggatgactgaacaatggaaatttcacacaacttttgaagtaaaagatacacaacttcctggagatgttatttatacaacacgcgttgttcaatctgatgcaagtaaggattctaatttaacattggcacaatggcatgatattccattcgcttgttctaagtggtggaatggaaaaatttcttatcgttttacgatagttaaaccccctcgtgttgttggaaaattattaattcgatatcgtcaagattgtttcgataaatggaatgctgttgatgctcctagctctggttgggacatcaaggattcgaaaatgcgctcaattttgaaagaatgggacttaggacaatcatcacagtttgaatttgatattacaggctcaaacccaattcgtgcccgacccacccatctttatgaaaataaaccgcaaatagatggaactagtttaagtttaaacgatgttgctgaattccgaacaccttatatcctgtttgaaatgggacgtatcagcatagaagttgctcaaaccatatcacctggtggaatttttccgagcaattatatagttatagttgagaagtgtttgaaggatagtgagtttatgaccccaacggacccccgaactgatcataaattgactttatataattctattactgaatc

SEQ ID NO: 2444 - DNA, 807 bp, Unknown
  Description of Unknown: unclassified RNA viruses ShiM-2016 sequence
ctccacgtgcgcgatttgcgcacgtggagttatagtgtagttggcgatcttcttcgcccgatttaagtgttaaggtagtgctattaagcgttacgacgctttctagttctgcacttaatacttttttttgttttacatctttatcatacccgttccctgggatagtgggaccccctctgtcatgaggtaagacattaactgagattagacaggtctgtgaagtatgtcaaacgtatatatagtaataccgatttcttatgcctctataggaagatgaagtatttaactggtggtgtgtacttgtttttaacaagcgcgtcctttatggattcacactttatcacctaggaataggtgacaccaagttactcgtaagagagactatcttgtaatcggtcatgaattgataattcagactcgattgtaaactgatctttattgatcactctagcgcctacttggcgtattttgaaagagtaaggagttcgagacgtgccctactagcatgggccgacgtaatggtcaagcgaaactcgatttatctcattagttccggtgagacttcagaatcacatatcttgagattggcactcgatgatagattgtgagctacttgacaaatataatatttaggacactttaactagcatttagcaatagttttatcgcaatgtttagggtattcagaaaccttggtatttataccgtaagacgatttatgagttatttcgcgaattttagtgtgagtgtgatgtggattatttttgcattcgagggactaccatccttttattttttgaacacagc

SEQ ID NO: 2445 - DNA, 810 bp, Unknown
  Description of Unknown: unclassified RNA viruses ShiM-2016 sequence
gcatggggacgatatccccatgcgatcggcctgtgttaatcagactctgttatacctagtgtcttatttggcttccagtaagacacaatttggtatcagacaataattaacaaaacaaattaattttaaggtataattttaagtaacttagttcaaagggctattaaacccctgattagtaacaaaattataaaatactcggttctgaccggggtaattcttttaacaataatatatgataattttatcgaagataacagttagcacctaccagatggcgctgttgcgtagagtataacccccaactctacttcccaactttgataatttttaattatatttttggagaattatgtataaaaattgaggaaacccctcaggtttaactacgacggcgaattaagatgagcgaaagtaaagtgcttaccaaggaggcgtaataatagggacccctctaaccagcaaacactggacgttacttaaggtaagaattacattttattagtagccggcttatagtaggcgtttaaggttaagcgacaaccctagtggtttacagtattctagcctatgtgctaatcctcgacggcagtagatcgctggcgatcgggaatatacctggatgtgaattaagtaaatctataggtatggatactcttctgaccctccagttttacactgtactaatcagctgaggaagagcagattatttcctttttttttcttcttatggtgacaattttatgatttatttataaagttgttatttaatttgaattttattgtattgacttatatattttatttaaa

SEQ ID NO: 2446 - DNA, 811 bp, Unknown
  Description of Unknown: unclassified RNA viruses ShiM-2016 sequence
tatgcaacttcctattgaagttgcatcgagtgttgctgtagttatttgtgagctacgcattaaatttgactattcactaccaaagtagacgtcaatgtccctattggacttggctatctgctttatgttgtattttgaagcatctttgtgttgctcttctgagtagcatgaagtgttttcacctttatatttagttttttgcaatcttttgattgtcaaaccactaccctagtaaaattacatcggtaattcgtctttatgtttgtgggtctcaccacccactacttgtatattatatatgtttgatcggcattggttataaaaatttttgtatttttaattaattatttgtttaaaaactgtcaatgtcttaaactagtctttgtttctcatcttcggtgaaagttgttgcactttgtgctgacgacttttattatgcgaagtaggttgtatctgcctgagtgaggtacgtattcaaagattaagactgttcgaatcctgtagcgttccgtgattggtcttgagccatgagccgtccgcgtaacaaggtaaacagtaaacaaaaactgtaatagacttattatttaacactatcgcagtactgctctgatcaagcagttgattggtttcgcaagccatgacaaaagggtcatctatgatacagaaaatagacgttaagcaaggtccgaaataccaagggtcccgcttcaaccgatgaagccctggaaacaattattctctctgctgtttgaagtgcttaacaaattctcagtcattctccactgagtcttcttaattcacttccataatc

SEQ ID NO: 2447 - DNA, 812 bp, Unknown
  Description of Unknown: unclassified Riboviria sequence
gacataaacgctaaaggcaagataggataagtggaaagtcacttctgacgccataaaaacatgcagtccctggaatccactatgacagttaaagaggctggagagctgttaaaccttatgctcacgcatcatggccaatctcggagggatatcctcattctgttcgctgactttttcatgaagatgtcaacggttgtagcagaaaggtcgtcaagtgcatggtctgagcggatgtcacgagcagcagcttgtttcaattctgtaaacggttctatgagaagtgaggaattcagtaaggagcgccttcaactttccactgcaatcatagcacttagtagcgcaacagatgccactccgacgctcgatttcttccggttgaacacaccagagatcctgatagaggttcaatctttccgctcaatgcaccaggttgatcaattgtccatccaactctctatgaggtctgtatttatgttctggcttgcattcgaccaactcaggattatcgaagagtcgcgctctatagtggaagatgcactggcaatgagcttgagtaaatttgtcgaagagaatgcagtagtagcaaggtggttttcattgatgatgacagagaagttcgatgcttccatatgtacctccgtactcgatgatactgtcatggtgatttccagatgattctgcgagttttcctttgtcgtccgagattcatttccatatgatcttaaaaaaactaagagaatgaatcatcacgattttatcattataagtttaagaacaatcactctcagcgaactacagattactacagaatc

SEQ ID NO: 2448 - DNA, 813 bp, Unknown
  Description of Unknown: unclassified RNA viruses ShiM-2016 sequence
gggtgaggggaattcggggcgtatgccgcgccacagtggcgtaattggcagcccctgcattaggcccaacagaaaaacctaaagagggccgcattttttccgggcaccgtgggcccggtgaaggggagcggcagggggacaatacctgtcgtgagatgaccgcctcgcatgtaacgggagtttaccgtctcacttggagttgtgcgagttgtaccgcgtcccaacgggagtgtcagccttgttcttccagccctagccggtccgcagccggtgggtcagagcctgagtggggtcctactccgcccctgaggtgtggccttgcacgaccgtggatatgggtcccacgtgggtttcgccagcccttaagtcgtgtatcccgagtcccccattgggaatggcccctccagagcgtgtacattttgagcgctcgtacgaggaacgtcgaagctggttgcaggcgcgaaatcgcctgcagttggttaggggaccagtgatgatgtctacggaaccgggggcggcggccgaaaccgccgcggatgacgcaggagaagcaacgtacccgatctgaccgagcttgagccggcgatggaaggacgggcaacctgctgtgtgagggtgcatcgcgtaataccgaccttgtcgggcccatcctccagtcatccacccatgtacagtctgcgggcgtctggtgtgcgaacccccggcccggtccgggcacaccagacgcatgtatagggccgttttggccatggctcaggcgatccccgcctgagacggttgttttgtttgttttcttttttttgtttggacgtg

SEQ ID NO: 2449 - DNA, 815 bp, Unknown
  Description of Unknown: unclassified Picornavirales sequence
tcccgcgcacgcgaaagcgtgtgcggagttgttgttgtagttggcgtttatacgcccatcatgagttcaaagtaccttctttgctgcgttacgacgcagccccgaagttcttttaacttttgttgtttacgatatttatcagacccgttccctgggatagtgggacccctgtcatgaggataatcattactgacgttagacagacgtatgaagtatgataaattgtaataagtaactatgaaagagtttattcctcaaactcttaatgattagtttactaaattggtgtgtaccttcctttacggaaggcgcgtccattatgtttttaacatttatggattcacattttttagtctagtaatagactacgatttagttcaggtaagactgacttttctggaatcggttatggattgataatcctgacttgttttcaaatgatcttgattgatctctcttatgcctattaggcgtttatttaaagagtaagacgttgaattatgtacccttctagcatgggtagacttaattgtcacacattgttcattaagactgttaattccggcagtcagtaagaattcagtgttctgagggttggcacccgatgatgacactgttgctactttaatttaaacaaattttaggacatacatttaatttcacaataaattattgtcgcgaagtttggagtattcaaaaactctgtagttcgctacgtaagacgactttatgttttgtgtattgattttgtatgagagagctatttcttgtattatttgaaatcgagaaaccactccttttatcttggatacagc

SEQ ID NO: 2450 - DNA, 816 bp, Unknown
  Description of Unknown: unclassified Iflavirus sequence
aatccctccatacatcttaccctacaagggtcgtaaatctgttcaaagttaatttcaagcagagaacagtagatattttatttaattttaagacatactttagttcacgaggctatctatttattagaaccctctattagtaacaaaacattaaaatactcgtttcagaacggggcttcattttgaagtgaataaaatatttagataacttagtaagtacctgaacgaattataaatagtaaaagaacgagttcgttaggattgaatcgtaaattttaaataattcaattactatatgcttatgccaggtatagttctttctatatatttgacttattatatattatagtgtactagtctacataaatccattgtagatgatgaatatggcaagttggaaccagattactcatattcttgtggcgtagagtgctctccaaagctctacggtcccctataattataataatgatagtatatagaggagaatagtatcgtttctcttttgaatgagtataagtacgtaactttagtattcgaactttataaggatctcgtgggaacgctagactgcgacttaagtgaatagcctttaatcacttagtacaatttgtttcagtataaacatgtaggccggcttgctacgtccgcagaggagtcgttaactatttatcattttggtaacttagtcctcagacggtgacggatggaaagacatcgattccttttatatgcagacaacaattattgatttgattttatttccttgtttgatatacacttgttttatttccctttataatcaattttgttaat

SEQ ID NO: 2451 - DNA, 817 bp, Unknown
  Description of Unknown: unclassified environmental samples sequence
tagtgtgacgcctatacagcgtcacagatcttcctaccgaaggttggtgggttactatgcggagtcgcctgtcgagggccatccacaggagtgggcaaccctcgggagatgaaccggtgaccctttatcgctccgcttgggtcccggccctacctattttctcgttcacctggcgaggaagtaggggggtgggcgtatgcctgccgtacgagtaattgtacggcgtgatttcggtggggtacttagccttcctgctaggttcctcaccagaatttccccactagatctatccaatagttgtgggcagggtctatttttgcccagtgtatatggaaacactggagtctcttatagggtctgctcatgagagcactaactaagtcgatagcttactgatagtgagtaagtactccttatataacaccttatatgaccactcctgcgaaatgcaggggtacctgaagtcttacagcgccgagacaatgagattctcggtggccaaaacgtcggtttggtatgaccagggcgtgctaagtgatctggcgctcgtttaggcggcggttccatatgaaccccaccggctaaacttgcttccttcattggataagatctaaatgccgagagactgcaacggccacaatgttgtaggggaacagtccctccttacgttagggtaagggggcagttggtgccttcactgttataccgaaagatttatgacaagcgatttccaagtgattttttagattgagaaccgagcgagcaaatttgaaagccagcgttaagttgagaaaactattcgagcctattgggcgtt

SEQ ID NO: 2452 - DNA, 817 bp, Unknown
  Description of Unknown: unclassified RNA viruses ShiM-2016 sequence
cacgtgattcccggaatttttatcggcgttaacgcatattattacatttattagtacgtataatagcaatattgtattgtattagttagtgtagtatgtgtgttggtgtctggaatcgttactaagaaattagtagtttataagcagaaatgcttattctcaatttttatgtaggtaatagggaaaccgtcaaatgcagtcgtagggaataaataacttacaactgatacctacattaggattcaacgacgattacatagttgtgattttcgttgtcttaggaaatccggaaagtatttacataatataagtacacgtagttatcttgaagggtacccctcgtccgtaaggaagtcagttgtttccccttctgactagagccggtagctgactaagcccgatacgccttaactgtgttagtttaggacctttggctgcttagagtaacgtgctctcccaatggataggaactgcttttacaaattatacatattgagctataatgatttagctactcatttgtcgtgggtgtatgtataaggcgtaatttctaactcctatttggaacatggctagtttcgccgctagtggtgttgtcgtaaggccacagaggtaatgaaagtatttataagaactaaattaacggaacggattcaaatggattggaacatggactcaatatgaagataataatccaataccctcataggcagagtgaaataagagatagttatccattcaccgtctatttgtcgtagacacctatgtaacattggtgattattactcatggagagatatacgggcaacccccaaat

SEQ ID NO: 2453 - DNA, 818 bp, Unknown
  Description of Unknown: unclassified RNA viruses ShiM-2016 sequence
gagcttccagtctatagtaagtccgcattgaacggccttatgataagtcttctgaagagttttgacttcaatgagtcgatgtttgagcgaatgctcacatccattttgtgatcacttttgtgatatttgttttaaataaatttaataaataaataaaaatgatatatgttaatatttgagcttggtaaagctacaatattgaaaatacgtttgagcgccaatatattgggtttgagcccttggccgggtgtcgtgattaataatcccatgccccaattgttgttgtttagcgtatttgataattgtaggatagagaccatacagcgctatacttgctgtaaagattatatactacagaagttcgtaaatgtgcttattgtaggagctctggaatatggtgcgcgttaaataggcgcaagtttcactggctttgtttagggtatttacctgacttgatgtatataattgtttatcaacggatgatatggaaaaggtgacgttctcacttttagatcgcagtcatcatagcactcctggaggaggctatagtatatcgcgaagacgtcattttgatatttgacggttaaggcgtaaagaatccaccctgttatagaatagatacgagtcgcacgtcgcgccagtagtgattctatattaaatgtgatcacctccttatttctcttggaggtttctagttcgagactacaggcattcagccaaccccccactttccaggaaacaatagagatttatatatttattattattattataatattcttcattcattcatttctctattgttcctattttatatc

SEQ ID NO: 2454 - DNA, 819 bp, Unknown
  Description of Unknown: unclassified Iflaviridae sequence
ccccttttcatcttcacaataatatctattatgaatctacactactagttggattttcattgccttacagaatacgtatagtgtattgctggactagatggtgtatgttgatatagaattattttgaagtaaagccccaaacaaagcaaccccgctctcttttagttcttaagtttaattattaatttattttaagttccctcccctattccaatatccctattatcctttagtttaaacaagttgataggcctgggaaccctggagactttgagaaaaacccataatgatttagcaatttcacatggaactgattgagtgactaagtgcctaaatgtaggttgagtttcgacaaaaagcctttacttagttagacaacactccgatgttaatctcggaatttcttgtgacggtttctatatttgttcctgatagtcagacgtatagattctaatgtacaagaccgaagacttaactacgtttagtggtagtatattatacacggtgtatgaacgatttattcaagtaaaagccgtgagttatataatatatatatcagattgttgagcttgatagcgtgcgaaacgtgcagtgattgtgattttggtttatcttgaaaagtatcatagaaaaatattaattattaatgtgctatggatagatgcgctacgccccaaatccttcagagctatcccacgactggcatcgtgtaattaaatgtggtaagttaatatgagatgactcactgtgtgcccggttgctttgctagtttgttcaccgtaaggaagaaactagttttacaaaccttccaattctttt

SEQ ID NO: 2455 - DNA, 820 bp, Unknown
  Description of Unknown: unclassified Riboviria sequence
tcattaccttgttgtttattatgataagctagagtcggcctctttcatagtgacttgttttgacgtagttccccgtatcgtagcattgctgatacgttcagttttcgacctaggcatctttaatgtagttcggttgtagattcagataaatgcacaacaaaatggttgtaaacaaccagaaaggaactctttgtttaattttcttaaactttgctaaagttttagttattctttgaccctggctcgttattatttcgcattactagaaagagaaatatgcgtgagccataaagttaatttattaactatgctttagaccaccttcttctgtaacaatatcgcagaagatagtcccgtaaatgatgattcactgaaagggcagtggtaacaccaccgtcggaatgaaccttttaacaggggattgacccgagtccttgacaacccaccatttgtagttgatactatatcctacaccatgctttatgggagcaccatccacggttcattagtagttcgcgaaattgaagaattaaacctgttatgaaaggatttagtaggacacgacctgtcttgatgtcattcgagtaggagccgttaacaatccgaaaggtctaagtaatgcagcttaattccataggtttctgcgggattgtcatttcgcctttctcatctccttagggaccagtatgctggtccctttggagccctttcatagtgcgctgattgctagtaacaatcagtgtactaagtttgggattctttcgatttaattctttagaggaatcccctcgcccaactttttatcatacagtacaacatc

SEQ ID NO: 2456 - DNA, 821 bp, Unknown
  Description of Unknown: unclassified Torovirus sequence
acgtatctttagaagtttatgaagccttgaaataaaaagctataaaccttattacggttagtccaccacacggctaaattttcagtgcgcagtcactagtcagggaggttcagccctgtcttttacttctgtgtaggaatctgtacagatatattgtctgcatactagtagttacaagagagtgcatttagtacttacaagcgggtcaaaccgccctccggaaaggtgcactttccctcccgaacgtgtgtagaccgtgaccattgtgtctagctatctgtaacaaactatacggttgtattttactcaactttaaggcttttataaaacttgcaagtgccaattttggcatttgttctttagccttttaaacctcacctccctacgggcaggcgcttaagcgactaaacgaggtatagccaattagttgttactcccctccagctttgctgcaggcccttagtttgggactaaagtgagtaaacatactttttggattacatctttctaaactactgccaaactgttgttttatatatttaagttttgcggttttacgctatttacttacggttggcagtttgtttggttgtttgcacaattttttgttataccaatttttactgtgtttttactttttacagttaaggctattttttatcttcttaggcttgttgaattaagtttttccactttaataatttggcttatagaggttttaagaaaaaggaaacaacaatttagacgtcgttctttagacgtctaaattttaaatctggccaataaatatcaggttattgactccttgtggagcgagactt

SEQ ID NO: 2457 - DNA, 825 bp, Unknown
  Description of Unknown: unclassified Luteovirus sequence
tgataactttgcaaggtcccaaataggtagacgcagctccatcaccttcacccaagcctgacccaaaacccagtcctcctccaccttcaccgaaacccgcaaaggaaaggcgatttttcgcctactctggtataccaaagacgaagatcaaaactaaaggcaatgacgactccatcattgcctcctccaacttggagcagcaggtcttccggtatatagaggcaaacaatcagaaagacgtcacgttgaacgcgcgttggtattcgacttccacagtgaagaacaagccaatgattgtattcgacgtgcccgctggtgattggtttgttgatttcctttgtgagggttacatgcctattgaggcaataggtggtagtgaggaccagaagtggatgggaattgtagcgtacaacaatgataccgcggatatttggtccgtcggggtgtacgacaatgtctcaatcactgagctcaacataacttcctcttggaagcttggtcacaaagatttagagctcaatgggtgtcatttccatgacggtcaggttgtagagagagatagcatcggttcatgtaaagtatcatccaataccggtggatctctctttttggtggcaccatccattatgaagacagcaaaatacaactactgtgtctcatatggcgattacactgacaaaaccttggagtttggttttgtatccatggtgtttgatgagcgtgatggagctaacaccgccgttccgcacattagaagagagctcaagaatgttaaatatcttcggccttctcctgtgcgtctgaacgacggcggtgattatattg

SEQ ID NO: 2458 - DNA, 826 bp, Unknown
  Description of Unknown: unclassified Hepeviridae sequence
actacacttcaccagaaagtgttcaaaaggtcctgccgggtaaacccgacagggccttttgaacactttctggtgaagtgtagtatcgccagtgggtttctccagccaaatctggaggagcgggctgcagcgtgactgcagtggtgtgacccggtaccatgattctgggaaatggtgtgaatgagaagtgtgattgagtgtttagccccgacccactggggtttcgctactgttggtgcagtggttgagcattgtggggtgaaataggggatacttcttttaggagcagtcttttagccatattggctgtgacatttaaattcttaatacgtctggttcttgataccagcgctcatttcttctttctatcattcttctcttactggctgtctaactgccaagagctgctaccgctgcgcccggcggggttaactccaggactagcctggagctgtggccgccaaaaagttagatgctgtgactaaccaggcggtgagctctcctccagtgtccacattgggggtccggtagcgatcggggtcgacaggtaggctacgggtgaaacctgtctgggttactactatgtaggagaaccactggagcgctaagcacgcggacatttgtgagatccaaagtcaggcaaaccagcttggtatgggtcaaaaacatctcaacgcgagtggggcggtgtctccagggccccgcgggacctattcccctggtgtggcgtagctggagctgcgcccaccttcctgtatgcagtactccccttgagggggctaatcaggggcatgttaggttttaaaccacaacagtgttgaagttc

SEQ ID NO: 2459 - DNA, 826 bp, Unknown
  Description of Unknown: Apodemus agrarius picornavirus strain Longquan-Aa118 polyprotein1 sequence
tttgaaaggggtgcggatatcatggcgtttctcgccatgatatccgcacattgcaaacccatattgcatacccactgggtatgcattatggggaggcccctttcacccctccccccccaattaccttttccccctctagtaaccatacgctttactcagcgtaactactccgggttacgtgatgaagaagaggctacggagattctcgggctacggccctggagccactccggctcctaaagatttagaagtttgagcacacccgcccactagggccccccatccaggggggcaacgggcaagcacttctgtttccccggtatgatctgataggctgtaaccacggctgaaacagagattatcgttatccgcttcactacttcgagaagcctagtaatgatgggtgaaattgaatccgttgatccggtgtctcccccacaccagaaactcatgatgagggttgccatcccggctacggcgacgtagcgggcatccctgcgctggcatgaggcctcttaggaggacggatgatatggatcttgtcgtgaagagcctattgagctagtgtcgactcctccgcccccgtgaatgcggctaatcctaaccccggagcaggtgggtccaatccagggcctggcctgtcgtaatgcgtaagtctgggacggaaccgactactttcgggaaggcgtgtttccatttgttcattatttgtgtgtttatggtgacaactctgggtaaacgttctattgcgtttattgagagattcccaacaattgaacaaacgagaactacctgttttattaaatttacacagagaagaattaca

SEQ ID NO: 2460 - DNA, 827 bp, Unknown
  Description of Unknown: unclassified Partitiviridae sequence
tgtataatgggtttggaatccatatacatcctgaaatcgttcattgttgcatcgcgagctggagttatcgcgggggagtttatctcttctagggaaatgatggcgtgacttaagaccgaaaagtgtcgaaaagcgttggaccggcctctgtttacaagccgcctctattatgaatgtgctccttcctctgttagtgtgagagcttaagttattagcctaggtgacgccgtagggtgctctgtgcccggggattgttgctgtaaaagagtactgaagtgcaatcggctcagaaaggctatataagagtgcctttgtcaaacggcaacctgccgcttagttggtaatcaccagccccctggcgcctaagttaagcgtctcctaacccgtggcgtaggtatctaaaaggagctgtgcaccgtatagctggaagtttcggggggtgacgtcgctgtccatgtgacacagtaacccagggtgccttcgcaagggtatacctgtggtgctatcctcactcagtcggccgggttcaactcctttatgcttataccaagatatttcctacattatatcatactatagggtgctagttatagttttattcttaatatatcgataggccaaacattcttagtttgagctctttcgtgcatttttctcacatatgtacatatgtttcactatttatcagaatactcgaaaggtataccgtactgaaaaatcggataaagaggttgacgatctaatatggtttctcaaattggaaggacgtccgaaatgggttagctttgtaatgaagtgaccagggtgaggcatgatgccgccacttc

SEQ ID NO: 2461 - DNA, 828 bp, Unknown
  Description of Unknown: unclassified RNA viruses ShiM-2016 sequence
gggagagaaccatggattaacatccatggttctctccctacatatgattgtgtgtcgtttcaccgcgacacccggcaatcatacatattcattgcagatctcgttctgctcttattttacgtagatatagacgtgttgaataggggtagaacccctaatcgcatttgctgtatttgctttaagagacctatagaataggcaatagcttaatctatagattatgagaatgtatattaatatgatatttagtcaccactccggaaattaaccacttctaagtgatgaccgtatgaatgaaacagttgtggctactgttttgtacgtttatgccgtcaccccagagagtcaactctgagaataaatcacccacttctgcgagaagttgtagcagcctgtaaggacgagctgtgtttcgacttgttcgcatagattattgaatctcatgaactgaagtttaatgactgataattaacgcttgtaaggttttttaatcgttggaatcccacctattagtttcgatttcgcttaactgatctccacccgcagtagggttgaagagagatcatagatctaacgaacttttaggaagaattggtccaccggttttaatttgactgacgtactagtacttactataagtgaacaatatagatttatatatgcacgtttacctcatgacaacctgagtgaggaggtttggtcacctaaatttaccgtgtctctgtatgaattttgaggttatcgatagttgttctactgatgtgattgagatgatatcgtcttggtttgtttagcccgttgaggttagtccctattcccactaaaatt

SEQ ID NO: 2462 - DNA, 829 bp, Unknown
  Description of Unknown: unclassified RNA viruses ShiM-2016 sequence
gttacctggatggcgcaagtagaagttgctttgctcagtatacttgttcatataataactaaaccttttatgtaaacctttttatatgtgtttgtgtatgtttattgtgtttgtccctacactgtgtattaggacctctatgtacgttgtcataagtcccacagtaaaacaaatataatatcaggtaattctcatgtatcaatatctctacgggtattggggaagttttcaagttttgggtgccgacgaagatgccgacgacttaggaatcaaaatgcctttatggtcatggggtgcttaatatgctatcatacctcttgcggagcttttaaagccgttcaaagtccctgtatagcagcacctcgtggggtcatgccgttgttttcctatggctagatatagctactgtccttcgttggggaaccgccctctaggcgattatgggtcctttactgatgtggttattataattggttcacaatgttcgagaaatccttcttaagaccgcttaagaatcgtcgagaccgtgaactagggtacacgcgtggagacgttccgttgtgaatcaattataatcgacatggtattggtcatgagagttattgggtctcaccaaccctcggagtaatgtatccgaatgtcctgtaagttgtttttgagcaacctcttcaggaaggtgggtttctcaccaaagaggcggatgtggccggaacccggtgacgctactcaataagagtggggctctgcggagagacgtggtgacaccttggaatagacagggatttttcagttccaaattagctttcatgtgtttgtacaaattaaattt

SEQ ID NO: 2463 - DNA, 832 bp, Unknown
  Description of Unknown: unclassified environmental samples sequence
ctcgtgcaatggggcccctgtcccctgaccatacctacccgcctccgggccacctgagtttctgtacagagctcagacccgggggtaacaggccccattgcacgagcaggtaggtctcggggtctacccctgtcgaagttccggcttcggcaggggctgggcgtaagccagccatcagagcgatctggtggcgagatttggcactccgttaacacgtttgtggaggcggagtgttgattcacccaatagcattcttgaccatcatgggttttcacccaccctttccccctagctataggctttggggtaagggtgtgtgtaaaacccctagtagccgattgccatctgcccacacaggctcatttgaaaaagcaccgaaagctctgcggagcaccctctatcccctgcgggatttgaggaagtttgaggctcttgccttgcctccaattgatggaggtggccaaattaccctctgatgggttcgagaggtaagctaagttggcttggtagttaggcggttgtactgctcgagggcaggtttccggctgctacctttaaggtcataaatgccgagagactgcaacggccgcaatagggtagggggacagtccctagttgagttaggtcaactggggtggtttgagcgcccccacaggtaatccacacacgttaggcgagtttttccaaaatatccaagttatccaggtgatcttcgagtgtattccagacgattagagtgtttactccagatttttaaagtgtacttcaagggaatttcgtataacaagcgtaaaaaccgttcttttaagaacgaaccgtatttattgttgag

SEQ ID NO: 2464 - DNA, 832 bp, Unknown
  Description of Unknown: UNVERIFIED: Macaque picobirnavirus 0 ORF1-like gene, complete1 sequence
agatgcatatggttttactaaacctatgcttcaaaaactcgagccatttgtattcaaagtggttagagtagaagcaacaacaacatccgtcacagaaaggaggaaatagtgtgacaagtaatcaattatcttatctagcgaatcaagaaacggttcgacacaatctagccgttgaaaatgaaactcatcgctacaacactgaagcactagctgaactaaatcggcataacttagctacagaacaaagtgcgacagtaacaaacgcaataaacgataacagccagaaggaaaacgctcgacacaatttatctcttgagcagatacaagcattagctcaaggtgaagtcggtagacacaatcaggcgagcgaagagttagctagcagtagtttgtctgagcaaatacgtcatgcgctaatttctgaagatactcagaatattttagcaggagcgcaggcacttaacgcgcaaactaatgcgttgagtcagcaggagacagccagacacaacttctcacaagagcaggtttctaattacactgctatggagcagcaccgccataaccaagcaggtgaagaactgtcatctgagagtaacttgttaagcggacagagaagtttattagactacacaacaaaacagcagaatattgatctgcaaaataatgtccttgatgaaacaaagagacataatactgttaacgaaatattaacaggggttgatcttgctcaacaaattgtaaacaaaaatctcgacagaagagatagaactacgaattccctatttaatggaattttccgaatagggtcaatggtaaaataggagggcatacc

SEQ ID NO: 2465 - DNA, 832 bp, Cardiovirus F
ctagactttctaccctcttgaatggcgaattccagagtaaagtcacctctgccttgccgctatacacacccaaccaatcgattcggccccacgtgtatagccccttggtcaagtgacctcttacgtctggacgcggatttaagacctgaatatccgctgaaagttaacaccatgtttgccccgattatgtgatgtttctgctcttgctgggcggaacatccgtcgggatgccaaagcaatttgtgtccccttctttctttggacttcggtcccccggtcgaagccgcttggaataagacagggttattttccctccttcctctcttctactttgttaagctctatttaacaaaagggtatgtctggcccctcccttcttggggaatgtgcgcggcggtctttccgtctctcgaaaagcgtgcatgccagatgcaagagaaggtgaagaaagtaagttgtgtctaacgttaagacaggaacgaatgtgtctgtagcgacctctcaaaggctgcggtctccccacctggtaacaggtgccgcagcggccaaaagccacgtggttaacagccacctttgagagcggtgcaaccccagcaccacactttcgttgttgttttctcactaaccacaactcgcttctctgaagccctcttgtagagttgccaagaatgtccagaaggtaccccggtccacgggatctgatctggagctccatgcgtgtgctctacacacgttcgggagttaaaaactgtcacagcaactccaaactaggtggtcctagttttcacttttatttgtcaagtcatatggtgatggttaaaggagaacgaca

SEQ ID NO: 2466 - DNA, 832 bp, Unknown
  Description of Unknown: unclassified RNA viruses ShiM-2016 sequence
cccggcaaagccgtccgggtgcggctttgtacgagtgggcggtggtagaccgctcgctcgtggcgctagaagtgacagcgcggagcccgacattggtgaaacatgaacgctatagagttctatcggcccacgggccgggcctcactgtccatacgcctgggggtagtcctttgcggacgctatccatcgcgtcaatgtcagtggggagctcggggtgcagggagggtaccggtgttgcattgggatagactgttttgcgcgaaaacgcttgggtgtcgaccagatttatttctaccacaacatggctttaattagcgcgtgtggcagggtctcccttgtttaatctacggcttaggcagctcattggcattcacggtatttactcttatgcattagtcaccgcacgttgaggggcggttggaccacgggtagaattctgggtggtttcatcattcctgaatccggaaacgggaagttggcggcgataatgcctatacgacctgtggcccggggactaaggcggtcaaatcaaagaaaccgcttttccaaagccagctgtcctttagagggaggctggcccacgttgttagtgggtgacatatctttctgaactctgagctctgctcacgtatttttctttggcacacgtagggtccctcccgcttacagataagcagcttaaaacgtattgctaggtagaagagttctatctaaggccacgaaaagtccttcgcgtccgcgagtacggtgcttccctcgatcagcacagcttgaagcttagtatcggtgataccttgaagaaccagagtttagaaaacaacttttaccacag

SEQ ID NO: 2467 - DNA, 833 bp, Unknown
  Description of Unknown: unclassified Sobemovirus sequence
gatggtagagatgggcttgtgtgacccggtgcggctttttgtcaaacaagagccgcacccgtctcgtaagttgaaggaagggaggtatcggcttatctcctcggtctcaatcgtcgaccaattggtcgaaagaatgctctttggagctcagaacgagttagagattgctgagtggcaatctatcccttcaaaacccggtatggggctttccgtcatccaccaagctgacgcgatattccgtgacttgcgagtcaaacataccgtgtgtcctgcagctgaagcagacatatctggttttgattggtccgttcaggactgggaattgtgggctgatgttgaaatgagaatcgttttgggctctttcccacccatgatggctagagctgctaggaacaggttttcatgcttcatgaactcagtcctgcaactctcaaacggacagttactccagcaagagctgccggggatcatgaaatctggatcttattgcacctcctccactaattcgcggatacgttgccttatggctgagcttattggttccccatggtgcatcgccatgggtgacgactccgtggagggttttgtggagggggctagggagaagtatgcggggctggggcacttgtgcaaggattacaagccttgtgcaaccacccccacaggccagttgtatgccgtggagttctgttcccacgtgattaaacgcaataaggcgtttcttacatcatggcccaaaactctgtataggttccttagcacgccgagggagacgctggaagatctcgagagagagcttgcatcctcccccatgtggcataagattcagagtt

SEQ ID NO: 2468 - DNA, 834 bp, Unknown
  Description of Unknown: unclassified viruses sequence
gagcttacgctccgttgggtatccctctcatacgctgttatgagacggaagggggtgaggtgttttcggattaatagcccctaaatcccaaagaggcttgtgaaacttcctgttctaaatagtcgtttcacaggccggtaatgctggaaggttatgggatgcaaccaccagtccccgcgagggggtgcgcttcggcggtctatagcagatctcgtaccggctataggcgaaatacgtaagtattccctgtatgaaaacccaaacctcctcgatcacaaaccgcctttatccccagattatagggggccctataaggccccatattaatctacgtgtacgtactactgcgagtttcgacttgtgaaatgtatgaatcactgtttactggctggactatcgatcgaggtttcggttatcataaaacaaaaactcagctgtgttttgatcaaatatcaaaacagcggctgggagtacctttcaattattgtcttcgggcaataactgatagttctttgcaagtaactttataggtagcggccttagttagggcgggacgtcctgggtggcgcgatgctggccaaaatctgttcgtcagtgctaaataggagttgggcaagtgcctgcttcttaaacgccgagagactacaacggcctcactgtgggaaaggatcaaacgacgtgatcccatggtgactaattttaggggtatagtccccctctgtgctaggaggggcttcctgcatactctatatctagcatatcgttacgatctttgaattttttacgcgctttaagtcttgagaacctactcttgggaattattttcggataatt

SEQ ID NO: 2469 - DNA, 836 bp, Unknown
  Description of Unknown: unclassified RNA viruses ShiM-2016 sequence
accaacgccacggcttgcccgtggaatgcattaattcgtatcgttgtaattaagccattttggctaaagtcccaggccttgaggaggaaatgcctcaggggagatgacgtaggacaattgcatacccaggggatgttccgcccctctctccttgtccggggttctgaagggagaaaccctaacaagtcaggcttattcttgacccctcgcttgatgagcgcaagcagggtgcagcctgccggtccagtgggaaggagctggcctgaggtgaaagtcgtgccgaacgcgggttgacagccgcgtagggttagccgccttaatcggtacaggagttccccctctcccgcgcatccttaagggatgtgaccccagcacccaagccgtaatggcgtggaatgttggaaggggaactaaggaatggttgcgccgtgatccagcactgcttgacaaatctggactcatctagcagcaggaatgtgtattctaagccctccgacctctgacgagactatcaaacatccaaggtagcacgtgattaggttcaagtcaagtcggtgaaggtggtttcttgagccccaccttttggaaacaccaggagttgatcgccctggctcggcgccgaacggacagattcatttctgcccgatagttttggccgcgctcgtgtggagtacacattttggatgagatgtcagtgtgcctagctttcgcgagctttgcacacacaacgctctgtatatagtttcacttgtattccgtggaacgtcgaacatcgatggcccacgtggacctgggcgaagacctagttgtcgtctatcaagctttctgttttttct

SEQ ID NO: 2470 - DNA, 837 bp, Unknown
  Description of Unknown: unclassified RNA viruses ShiM-2016 sequence
gtttatagcgcatgtagagtttttttgaagattgatcaacctaaagttgagagatgagtatacttcgtgtagatacaaattgtgaaccgtgttcgcatatacgcgaagtatatgctttcacgtttcatgcttttgtctgcatgagttatatgtcattatgagaatgatttagtttgtctcggtctttgaaaacgtttttacggttctagcagaaactaccctcgcgaagtagggtccatctgtagtcctttcggacaaacgtgttaaccggaacacgtcgtaatgttgccttaattggcattttcacgggcttcttgacttttgctccggagcatcagttatatagaagttgggtctgacgagcccttcaccatagttgtgtacgtcttagatatacactacttgtccatatgtttggacaatacatagtttatggtttagatatatatatctatgttcaagctgtttgtcagcccaagggatcacgccattgatcctcctttaatatgggtgtaaatttcttcgcactttggaaacagagtgcaagtattggcaaaaaccctaagcctgtgatttgattcaggatagccaaacgatcttcaagatcatactttttcagggggcgaaatacccagaataatcaatcctgcccgggttcgcaagaacacggggtgttaacctcatgcaatgtacaagcgctgaccttcgctctctgcttggtacttccgacgccgtcattggttaggacatgtggtgctgggcaaccagaaatgaatcccaacacgggattcatggtttctcagcattgtgacatcttgtttgcaatgctgatttatc

SEQ ID NO: 2471 - DNA, 840 bp, Unknown
  Description of Unknown: unclassified Iflavirus sequence
cgtattttgaccgtatcgatctgtttatataatagcgacgtattttagtgagaatcgtttccttatataatatagttgatatgtgatatagtcaatatacagaagaataattgtttcctggtaattcatagcaaagtaaaatctgtccctattgtctatactagttttaagttttagttttaagacacctttcttagttttaaattttgtttgcatgttaatgttgttgaatctgcgagaaaatgttgattttgtatgaatgaaattttcctattaagttaggtccgtttgtgtttgaatgaagagtatgtattagtatgtttgtttctattcctaatccctcctttgtccttgataatctttattattagtaaattatgtagtagaactctaccggaattcgattttgtatagttcttacctgcagcggttagatgaagaactactttttctttaattattgagctcagccctgtgacgttgtatgagagtatgcttttgcattatctttactgaacgcatctatttttataggttacgatttgcgtgtttatgcattatgtcggtttaaccctataatagaagagcgttgtaatagagaagcattagaacttccttgtatgattagaatcagatcctggtaaagcaataattatagacgaagtaaagtacaattgacatgccccggtagtgaccttcagacaagtccccctctgaagttcgaatcattttctaaagtaataaagtattatcccttttcctctttttatccttggattgatttctttatttggacacgaccactgcttgtttttatgactattttgaatattttatgat

SEQ ID NO: 2472 - DNA, 840 bp, Unknown
  Description of Unknown: unclassified RNA viruses ShiM-2016 sequence
gcggagcatgcttgtggtgtgttgagccattttggctcgcgctgtgtcgctaattagcattttgctttaattaaagtcccaggcctcagggaggaaatgccctgggggagatggcgtaggagtgtgcatacacggggatgttccgcccctcgctccaactccggggttctgaagggagaaaccccaacaagcctggcttattcttgacccctcgcccgatgagcacgggcagggcgcagcctgccggaccagtgtggagctggcctgaggtgaaggccgtgccgagcgcgggttagccgccgcgtaggattggccatccttaatcggtataggaggggcccctctcccgcgcatccctaagggatgtgaccccagcacccaagctataatggcgtggtgtgttggtagggcctccaaaaagtggttacgatgtgtcccagcactgcttgacaaatctgggcgcacctagcagcagcagcacgtttccaagcccgccgacctctcacgtggactatcaaacattcacggtagccgttgacccatttccagtcatgtcggttgtggtggctttggcttgagcgccaccattaggaaacaccaggatttagtcacctgcctgggcgccgaacgggttcgggattcttcccgtccgccgatagttttggcccagatgtgtgggaatgtgctgtgggtgtgggcgaccttcgattattgcgtcgttggtcttttgctctgtaaatagcgttcaacttttcgtggttccataagcggcccacgacgacctgggtgaggacttagtccgtgctcacgccgttgcagtgtgttagcatctcttccgcg

SEQ ID NO: 2473 - DNA, 842 bp, Unknown
  Description of Unknown: unclassified RNA viruses ShiM-2016 sequence
catgcacagcggttttcccgctgtgcatgtgtcttcacgttgatttttcttcgaatgcgtttattcgcattttgtcttttgaatcaactcgtattgtaagtgcaattgcttgctgtgatatttcgtatacacctatagcctttgtgcacgtgtgtagacgactgtttcagtatgtttgaccattttcaatacaaacaacaagttttatgacatttcttgtgaacaaataaatgtcaccaccctagagcattgctactaagctttgttagtagaagttgtttagagtcaaaacgacggacctctatttagagaacccgtgtccgatggtgataagaactttaatcgccccgggtgagttgccctcacatctttatgatgtgtagggcgctctcggttagtattgtggtggattttataaatacgtcagatggctcgacgttaaagcctatggttgtgaatcaaccagcagaagggaaaagccaacccaaactgctttgttaaaaactttgccgaatgcggaagtaccgtgaagcaaaggacggtaaccaaacttacatgtgactgcgacggaatagcatgtattttaatccaataacgttcaccagcccaggcgggaacctgagctcaaatttatttgactcgttggttaacgccgagaaacataatcaaggtgatatgtccatgaagtgggaagcttgcttcctgtgggtatctcggaaagtttggcccggaatttattccccccaaatgagtacaccttggtcagatagatgaagtacgcactatttttagtgcgtgtttcttctatcgtgtttcatggctatttatcatttaaatagatc

SEQ ID NO: 2474 - DNA, 846 bp, Unknown
  Description of Unknown: unclassified Bacillarnavirus sequence
gaaatatatattatgtatttcgtgctctttagcactgatctaagaaggatcttattatagattgttactttgtagcacaggaccctttttagggtcctatgttagatcgtctaactttgtatattaagatgtggacatttcagttaactattgaattacgtattatgtaatcttggtgctccagattggtaatctggagcttccattgtaacttagaattaataaatatctaaaatttaccaccttgagtgtttattctacgaatattcactctttgctctcagccttgcgctgagagcttttgctccccatttatggggagctttttgctctacacttttgtgtggagctttttcctgcctttatggcaggattttcgatgttttatctgagtcgactacggtcaagtgtttatactcagacttatcatcacctatagaaatttcaaaaattttattagttgaatttctatgattcgttacctttataagaatggtttcgtatgttcgaggaatcccctcagtactatttagtaattttgtttattaaaatctccgacgaaaggagagtttatcagaaatagaactttagtgccgaaataatcggtcctcggctacgttttaagcaacgtatcgctacatttatattatattaggtattcgcaataccatttagagattatgtatcgtttaagcatcagttaccgctggtgtagggtgttggcactcccgacttttaaatacctctacctcttttgtgagccgatatcactagattttcgtaaactactattacgattgttttaaatatagtttttcaaacacaacccccctcttcacttttatc

SEQ ID NO: 2475 - DNA, 846 bp, Unknown
  Description of Unknown: unclassified Picornavirales sequence
cgtatattctaccattttggtaggatatacgtgagtattagtttcgacctttacgggtcaaggataattttaaaccttctttatggaggactgaatttgattgcacaattgttgtgaaccgtaaggtcatttcaactttgtttatatcaataagtcacttattttgatttgtttttaaatgtctttgatcatttaattctaaaatagagtaaactatattatcaaatctgtacgggtcttttcagacccaaataactaaatgaaaccaacccttttatgtttatatgttgtagtgcgtttattttacacgcattgtttttataagtaaaattagttgatattaatctgcctttcttaagttcaaatcttttagatacctctcgtcggaaagacagcaaattaattattttctattgttgaagtttagtggatatgtacttcttgttttccaaacatccatcataaaatattataaaatatgcccctaaaaagagccaagtattgtttaatacatttagtattgtttaactcatttatgtttcttttgcagaaaactttttataaaattactacacacagaatagaatatttctggtgtgaaatctattagcaaatctcgcaaacgcctctccgttcttttatggacgacgcgaatcgtgtagagatgataagttacagcatcagttgatgccgaggactatctagcaagttagtaaccctgtgtggaaaattttatattaataccacatcaaagtaagagtcttagatgtatgttccagtgcattgcactggatatccttagcacgggagaaataaaactgcaccccaaaacctattagtacaacc

SEQ ID NO: 2476 - DNA, 847 bp, Unknown
  Description of Unknown: unclassified Picornavirales sequence
gtgcaacccctcatctcaaccaggtgatttgaggtattttaattcctggggttcctggcgaagaagcacaactctcgccttgataccggtgtcggctagtagatccgatggttcacctggtgcgcagcccgttccttaaaccatttaatattgcaccttgtaggactgagccctcctgcaagtagtttagtggcttactgaagaaacatttcaaaaaacaaacttaggtgtctacaatcaagacacctcaacccctgttgttcaaacaggtacaacgtcatttgtggcagatccggtgtcggccatacaaagtgttggcaggtcccaagatgtgtacgatttgtacacgcctaatagcacaagcaccattgccgattacctggctaagccatatcaagtttttgccggtactttcactgttgttgattcaattggagctattttgtatgcttcagacacaaaaccgtattatacaaattcattgaaaataaataagttgcaaggcttctttggtttgcgttccactttgtgtattcgtctggatttaaatggcacgccttatcatgcagggcgtcttcgtttatgttattatccttgtttttccctcaatgtgaggaaggggagtgctcacatcacgaatgccattcctttgtctcagttacccggtgttgacattgaagcaaatgagtcgtctgttgttctgcgtattccgtatgtagctacgtcacagtttatcgaactgactggcggagcggtcgactggggtcgtgtatatattgccgtcttgtccccgttaaggacaggccctgacaatttgctcgaggttaattaccgcgtctggacatgg

SEQ ID NO: 2477 - DNA, 847 bp, Unknown
  Description of Unknown: unclassified RNA viruses ShiM-2016 sequence
gggggacacacccccacgcacaccgtagattaattgagacatcagttagtcttgttggaaccagttgtactgtcttttggagagttacgactctcctccagaccagacttcatgttccatcgcacttttctacaaaccattattctgaggttagccacctcgtgcaacggctcatagacgcatacatgctcagtatacgtataaaatctatgttgattttacagaaaaacatagtcgctattatagcgcaacaaagctaaatactagataatttctgtattattagaagtatttattcctatgaattttaaaggaacgggcggcacccggctatgttggtttatgttatgtttatttgcgcactccacgcaagattatttaaacatgtcctgtctggacactttaggttgacacctagtaatcggtcgaattgataattcacctattacaacatcgaactcattggagttccatgttccgcttcgtttgaagcaatccggagtgaggcgtttatttgcggacctgtcttgcagggttatcttaaaggataacgcaaatgattaggagtattgaccggtactcagtcggaattattgtagataggtgtggcaacccatgacctacaataagctactggaatgtgaatacgttgtcgggctacctctcgggagaaatcgtgagacttacgcaataggttcgaggtatccaaaaatccttactagtagtgacactgttgtgtgtcttgctagtgtaagccgtttggtaacgactattctgtttggctgttggaataaatttgagggacgtgtgtaatagtgaccacgcaccttttatctttgatatcgca

SEQ ID NO: 2478 - DNA, 848 bp, Unknown
  Description of Unknown: unclassified Carlavirus sequence
catcgtgtgttttcaacatgcggtcctgtgtcgttttgcgccctacatgcggtacattgagatgaaagtgcatgaggtgctaccaaagaattactacatccactcagggaagggcctggaggagctggatgcttgggtcaaggaagggaagtttgacggtatttgcacggaatctgattatgaggcattcgatgcatcgcaagatgaatttatcatggctttcgagctggaattgatgaagtacttaaggctgccaagtgatctaatcgaggattacaagttcatcaaactagcttggggtctaaactaggcaatttcgccataatgcgcttctccggggaagcaagcactttcctgtttaacacactggccaacatgttattcactttcatgaggtataacatacggggtgatgaattcatatgctttgctggggacgatatgtgcgcgtcgcgaagattgcaacccacaaagaaatttgctcacttcttggacaagctcaaactgaaagcaaaggtgcaattcgtaaacaaaccaactttctgtggctggcacttgtgccccgatggtatatataagaagccgcaactcgtgctagagagaatgtgcattgcgaaagagatgaacaacctgagcaattgcattgacaactacgccattgaggtggcgtacgcatacaagttgggggagaaggctgtgaatagaatggatgaggaggaagtcgctgcgttctacaattgcgtgagaatgattgtgcgaaacaaacacctcatccgctccgatgtgaaacgagtatttgaagtgctttaattagtgtagcttaggtattgctattgtattgaatattt

SEQ ID NO: 2479 - DNA, 848 bp, Unknown
  Description of Unknown: unclassified Riboviria sequence
ggtgcaggaaaactttttcccgacgtgtccaaaatttcctatctagtgatttcgatattaatactcctgaacaggaggccattcgacgcatttttgtttttaccaactataaaaatgacgttgaaaaatcgaaattacgtaacttatccagtgaacgatgtactcctgctacgtttacttcattggatgagtcttttctttatgttgatttttcttccctttcaaaatctctcaaaatcaccagggaaccttatgatgcagtatctgcatatattctttatttcctttttgatcctattcctattgaagtatggaaattcattcctacaacaatcttttggtcagagaacttatcaattccattttcacaaaataattattctaatagaagctatcccacgcctactatcatttcgaaattccgtgaattatttccttctccaggcggacgtgcttatgaaaaatctttcattttacctcatgatgttctttcctctcttgaaaaacctaataaaactaagaatctctacagactcatatctcgtcttcttcatgtgaaatgggagcctaatgttgtttctggtcttttacttgcttgtatttccttgcctactttagatttgttctttaccatcattattaattgggatgagttttggcaatgtgataagaaacaattagttaaagtgttaaaggacttacatactgggattcgtcttacattcagtcttccaaacggagttaggttgacctcagaacagactagacatcactacggtctcgatgcactctacggccggtccgacactttaactaatttttctgcaaaagatgaaattgctcaaaga

SEQ ID NO: 2480 - DNA, 848 bp, Unknown
  Description of Unknown: unclassified Riboviria sequence
tgagatttacgcgcgagcgtagatccgccctagacgagtggtccaactggcagttaaagctagccagggactgctcgggtcaaagctagtcagttgccgagtggcgacggcggctgatactagagaaggcgacaccaagtgtggacgctgactcgcacgaccttaaacgtcttgggtgcgcgtaactgcaggttttggcaagcttgtagcctagcgtgagcttcagtgtcatggttaagtcaagaacataaaccggatagcactggagccgaaaggcgattacccgtagaagctggctttgccggtgtagtgttctggtatggacacgctaggggtgggtcgtcggttgtttaacgcgagtggggtatgctaaagcattaaccacttgaggcttagcgtgaaaaactaagcccgcgaatgaccatgctaatcggcaatagccgtgtagttgtgcacacaactatgtcacaggggtggccctgtataccggtatcttcttacggtatactaccaagttatgttaacctgcggtgcgatgaataagtatcagaagcagggtgtggcagcaggaggaattctgttgttgctaacgtacgctcaactggcctcacggcagcgggtaagaaccgtatgagttgggtggaacgtgccttgggcgatagacgtccagggtggaacggccggataacttggggaagcagaaagctgcggggattgaatggcctgcctacgggtgcctgatagtgacggaacatattggataacgttaatccaattttcaaataattaacctctccgcagcctagcagctgggatacatagcgggttaactactattaacgataaag

SEQ ID NO: 2481 - DNA, 848 bp, Unknown
  Description of Unknown: unclassified RNA viruses ShiM-2016 sequence
gtcagacgttaatattactttgtttaaagagtcttattattctcgttatctaacttattattcaatggtctccgttcatatagttgcttatgctatatgttccgcgattttctgacctaataagatgcttggttaagaaccataaaagtccccgcataggaatggggtggccttagggtctctacaacaacggtttcggcatttgctgagcccgtgtcttgatttgatttgtgaacgcgtaatttaaattttaaaagcattctggatcaaatctagttgccaattgaaatttagttaaacgcatattcattttttattcgaggaagaactatgcattgcgtgagtgtttccgcaaaatgaattggtgggatattccccatcacccaattctaaatctttacaattgcatgaatgtgcataaacacatttgaaacttaatgagtagcattagagtttaaagattgtggtttataccactttataacagtttgttttacaaggttagatctataacggatttccgggggtctagcgcggttgccacagactcaacatcctttctttttggaaatgatagtgtgtttgttagtgtacattactacggttgtttttatttaatttgggaccaacttttgttgaacttacattgatttacggatgtcaaccagttacaatttctttagtctgggagatagaacgccttgtaagtagactaaaactacagatcgggggcgcggattaatgctatcgtggacaatgatgtgtttcattgatttgtctggaaactttgtttcttccccttaaaaaccggcattccaactgcttttaagcatagtcgcgtgcagaca

SEQ ID NO: 2482 - DNA, 850 bp, Unknown
  Description of Unknown: unclassified Picornavirales sequence
atagtttcactctggaggttacacataagtcaatttcttgaaatacacataacatagacgtgtcaattagcagatagaaatatggctttatgtgtatatatgtaattttgaatttgattgcgtgtattgtccattttctacagatagggactcaataattttgcagtgcgctccatctcccattagtgctgtataaattattccttttcctttttcccttccctttggatttataatgtgcttatgtttcacttgcataagcaaacttaaaattatatattgtattgtgattttccaatagtatataaatttaagtagacaagttgtgaacttactcttcggagtattttattctcttctgatatgatttggctttgtattttttcggatgtttgatatggcatgtgaactgattgaagggcttcggcaatatgtgaggatctgtaatggtatccaaatattctgatagtattacgcgtggcgaattgagatgtgacttattttaaaaagaaaactcactcacacatcactacgagtcgtacgtaattaactaaccgagttgtcccccctgttcactatcggctaacctgatgcctccaggcgttccgtcggaaacttcatcgctaagcctagcggctgaaacttacaatcaccctttccactgttttgttattgcctagtgcgagaaagacgcttttagatcgtgaatctataagctggagtgaagtacgcgtgagacatgtgttctgcgtatgaaccttcataacaaaattagtggtcggctattgacagtaagaccttcagtgactgcgaaaatggatcaagatgcccaaccttgaccaattggctg

SEQ ID NO: 2483 - DNA, 851 bp, Unknown
  Description of Unknown: unclassified RNA viruses ShiM-2016 sequence
atataattgattgatttcaattatattcgtttgacgtgttcgcacgttgggtgaaaatcctgtttccgagatttatatatgtatttgaaccattagctcttttagttcaaggtacagctaattctggcctttgttctactaaacaagattgatttttggattcttttaaggccttttcgtacagctcatctgtgcgttgacaagcttgaccgatgtttcaatgcattttatttttcccggaacagacataaccctgtttctacagcagacctatctgctatatcaaaggaaccccctatatgtttacagaaaaatattccactaaatgtagtgaagaagaatgccccgttggcactcttttaacgggaggacataaacctgattctttcaggcctgcccccccgttttacgggaggacataaccctagcttctactaggcctgcccccccgtgtatcagggcccctgccctgatacctctgtttttactttgaggcatttgtaagacctcaccagattcatattgttataaaaatacgaaaataacaattcctcaatatgaacgttccagattggaataaaaaataatctataccctttggtaatttatgtcgatctaagtttaactcgttccactttgtttggttttactcactgcaatctatgatgttcacagtataccaacttatgaaagcgcttgatactttatcgcgttatgcaccctagtcttttgtgacgccggtttgacatttcgacatattttattaaatacttatcaggttaaagtccagatatatcccaaggaaggggagaaataatactccatttaagactcagaattacaattttaag

SEQ ID NO: 2484 - DNA, 853 bp, Unknown
  Description of Unknown: unclassified Nidovirales sequence
ggtatatataatatacctccagacagtgatcctgtcaattgtgaaaaccatatttgttaaccagttaaataactgtttgaccgcctgctaaagtgggcaacttgtttttgctaaaccccaagacagtttagatcagtccaatttaatcaaacaaaacaattgaaatattttattttattgtcagagtagttaactgattgtttgagaattagtgtaccagcacaaccactcagccagcctaccaaaggcccttggccacttcccctctcacgacttataaaagtcgccacccagataatctacgaaagtagacatcactcctatttccacccataggcactaggagaacaggataaccccgaaaggggcatcctgcctgtgtctctcacattcgctagccagatatcttcacagactctgctaggcttgtgacccagtccgttcccaaagaccgttacctcccgagtagcgcttaggcgcgaaagggaagggagtacctcccgagtaagcgaaagctgaaagggacgggaaccacggcaagactaatcttagtcttacagtgtgggcaatctggtaattgtccccaacaatcaacccaatttgatgtgaaaacatctaactcggttggcttctaactagctataaactaggatatctcttaacggagactccgaggagggccaccaacagtccaccagtttatagtaagcaacaacaggggcgatcttccaagacacctctcaccacaagacacaacaacagtcttgtgaagccgacaatattgtctacggacgtattatcgagggttttaaaggaggagttagtgattaaactaatttcaacaccaataact

SEQ ID NO: 2485 - DNA, 853 bp, Unknown
  Description of Unknown: unclassified Iflavirus sequence
atttgttcgactatacaatagcaacttatctttgtgagaattgtttccttgtttagatcgacttatgttggatgtagtcaatatatacgagaataggtgtttccttgattttattcgtttagcttagcttctcgcgtaatttcaatagcatggtaaaacgtatccctgttgctacattttagttgttaagttttagtttttaagaacaacttttaatgttaagaaattttgtttgcttgttagcgttgatgaatctgcgaaaaaatgttttcaagtatgaatgaaattttcctatttagttaggtctgtatgtgtatgaatgaagtgtgtgtattagtatgttttgtttctaacctttacccattcctgttcctttgtaattcttcctctacaagtaattttgttagtagtacttataaagaattcgatcgtatatagaccttacttgcagcagttagatgaaggtctacttttcgattagaaattgagctcagccctgtgacgatgagtgagtgtatgctttaatattatctgtactgaacgaacttaagtatataggttacgatttgcgtgtttatgcattatgtcggtttaaccctatcttaagagatcgttgtatttgagaaattttagttcttcctcgcttgtttagaatcagatcctggtaaagcaatttctttttgcgaagtaaagtatatgtgacatgccctttatatgacctcttgaataagtccccctcaagagtatgaatacattatgaaagttttggaataattaccctttcccttcttttccctcgactgttatcttttggacacgacccctgctttgtttaattgattttatagcaaat

SEQ ID NO: 2486 - DNA, 853 bp, Unknown
  Description of Unknown: unclassified RNA viruses ShiM-2016 sequence
tgtatatatttgattaactatcaaatatattcacgttttatgaaaggatgttgcttttagcaacatctaggaagtagtgcttacttctgacctatagcctggttttggcacgaacggataccgtatcgtcataatgcaactgggcctttatggtaccgcctcttatcattgtacgataatcactcgaacaaaccaactatagtcctggcacgtgcgtatgcatgccgtcactatgcagagggccttgaaggtaccgccactagtcattgtactgtaattacacgaacaaataaagcacaaccccatttaagttccctattcctgggttaaggaatgacgaactatcgtctaagcaaatagtgtgttgataatcactaaactatcatccccccttttttatgttaaatgtcaggtgtttcctgaccttcctcacaagggaatgcgttcttaacaattttatattgttaaacacactagtctttttagacttttattatctggttttatgaatactttgaccatgaccccatactacagaatgcgacgttcgcgtttgctccatagtatgtaatttcaaaggtatgttgtgggtttccaaccctccttgttttacgcgttttgccgaacttgatattataataacaaatttccatgtgcctgggtgtacttgaagatggaacgatgaactgtttcctatcacttcttgatataccccgcacctctgagttatttttaaagaatattgtttttagcctttatgactgcaaagatcagcatattgtttacgttatcccctatgtatgttaagggacactattaattgtagaaacaagtaacatatgtccatgacgct

SEQ ID NO: 2487 - DNA, 853 bp, Unknown
  Description of Unknown: unclassified RNA viruses ShiM-2016 sequence
ggaactccctgtaggcctcaaagcctacaggagttccctagagaaagtatattgtgtcgtttgaccgcgacacccgatatatgctttcacagatattcggattttatattccttttcaatgtgaaaaacattggcactggtaagtgctgtcgttactgggatgtgaaatcccggttcgtagtattttgctatatgtgtttaaaggagtctttgtatgctgctaacgcggcttcatcgcaaagtccttatttcatctgttatatttcgtcaccacccttatggtcacccgtaagtgatggttcatcatagattctatttgtggcgagtagagtttattattgatgtataccaccccggagagtcaacttcgttacgaaaatcaagccccttgcgctatcatgtattaggaaattgtaaggaacgtttcccgtattacttgatagtgtcgattgatgctaactcataagattggcttcatttgaggattatttatactagatggtttagtattcgtgaagaatcccactcacattatatgatttcgcttaaccaccttcactcgcagtagagttgaacgaaggtgtagatctaacatttttgtgagaagaattggtcttctcggagctatttgctcaacgtaccgagacattattgatgtatacaataccatattttacaactacgttttaaccagggacaacctgacctggagagtttaagccactcaatttttccgtagctctgtctgatatgtgaggtaatcattactcagaagaagtttcaactatgatgcagtagatatcgtagtattgtttagcccttgtggttagttccctattcccattttgaaatc

SEQ ID NO: 2488 - DNA, 854 bp, Unknown
  Description of Unknown: unclassified RNA viruses ShiM-2016 sequence
gggagagaaccatggaataactccatggttctctcccttacatatgtttgtgtagtgtaccgcactacccggcaaacatacatattcattgcagtacttgttctgctcttattttaaaatgcgtaaaggcgtgtcaaataggggtagaacccctaattgcacttcctttatacattataagagacctatacaattaccgaaaggcaaatgtatagattatgagaatgtatattaatatgatatttagtcatcactccggaaaaaactaattccgtaagagatgaccgcattgtcagctatagttgtggctactatagcatatgtgaatgccgtcaccccgtagagtcaactgcgtcattaaatcagcaccttctgtggaaaatcatagtagcttttaaggacgagctatgttttgatttgtccatatagaacattgaatgttattgtatgacattggatgactgagatttatgcaaattgttttgtattcagatgagaatcccacttttagtgtgtattactcgatttaacctatttccacccgcagcagggttgaagtgagatagtagagttaacgccattcgaagaagaattggtctcgtgtgtgtactttaatccaccgatatagagctatgtcaataagcctcttatgtggagctctggtatacaatatgcgtttatttaagtacgtttacctcatgacaacctgagtgaggaggtttggtcacctaaatttttcgtacctatgaatatttcgctgaggtctcacacagttagaaaatcgattgctttagcaggatttgttcttagttttgtttagccctttgaggttagtcctagttcccatttaaatc

SEQ ID NO: 2489 - DNA, 856 bp, Unknown
  Description of Unknown: unclassified Riboviria sequence
atgcctgaaaaggagtggtgaagatccaaaccatgttgatagtgccttgtttagcctcggagagcagttggcgactgtttgcaagcgaatgtttattatagtatttactaaagtatcatgtacctgtatcgtttacgttgggtacatagaagtggcgacgattcctgccttgtacttactatattagatttagcccgaagtttccgttgtaagatagctacttatatcaatccaaatataaatgtcccctttattttttataaagagtaatttcccccataccgctgaaagtgtctacaggtacgaacgttattaccagaatttattttggattatgcggaatgtggagtgtttcatgtatgtgttgctctatttactgtgtgaatgtgtgcgtatgtgacaggacctcttcttaattgaagaggacagacgagccaacttgattttcttgtaaaaacatttactgaaagtgtttctatctatgatttctacaactaggacctgcccgtgtagcctctggctagtagaattctccttcgcgagttttcgaacgctaatgcctcgtgtttgactcacttaagcctgatgagactttcgatttctctcaggagggtgttttctctctgatgttgagcctagaatgataagatagaagtgcgattaagacctgttttcggattattgacggaaccgttttccttgaatgtgattgagtgaagttgtctacctaacgccaaaaggagccatgtcataaactttgtttggccaccgatttagttaggaagttaaactctatgtgttcgccttaaccggcccaaaacccctttttgctggcgagtgcccaaacccttaaaca

SEQ ID NO: 2490 - DNA, 856 bp, Unknown
  Description of Unknown: unclassified RNA viruses ShiM-2016 sequence
ctggtggcctgtgtgcaattaattctttgtgttcatgcctcatcagcattgaacagtacttcaatattttgattatcaattctttgcacaccgcccaatgtatccagtgaaccatggctagacagcggattgctttgccaactgcggacgtcatcgtgccgagacgttaaaacgacgcatcgtctactgccagcaccgatgttaactgtgcaggaccccccagacaaaggaaaacatgagcgcactcgtacgtggattaaccaagtacgcgtgtgctggccttgccctggccactgtctatgctgcggatcaattggtgaagaggttccaccggcgacgcgctttgctgcgtgatgctaaggaggaccttgcagccctcaattcgccatcagtcatgcgtgggcctggtcttgaccaggtcccaggggtggtcactatgctggagcgccaaggcgttgctccagtggccgcctcttccaccactcatctcctccgaaacaaccataagtacttctgtgcgaagtgggctcgggcagtgaaggctcgctttgagtttgccaggatgtgtgaggacaccccccttaaccgtgctgctgtccataggtggctcctttctcagtggaaggagcttaagaacagcgctgggaaggggatgccgttgcatgtcatggacctttacatgaccgatgctatggacatgagcttcctgccaactgccgaatatatgcagagtgagtctaagagggcagttaggaagcgcgcccgcatggagtactacaacgagcggaaatttgtggagggatggaaataggggggcctagtgagggtaagggggtttgataccgtcccgcgattt

SEQ ID NO: 2491 - DNA, 858 bp, Unknown
  Description of Unknown: unclassified RNA viruses ShiM-2016 sequence
ccatgccagaagacgaattcgatgttggccccgttcttttggggcctcatctgcatttgaatttattaagggagcgtcgggggaggaaatgcccccggtggagatgacgttgtgcgcaatatgggttgggggttcaaagcatcacccacccaggggatttcaccgtctcatccgggcctgcgcactgaagggggccgcaccccgagtcagccttgttcttctgccacgtgtttcactgtgcacggggtgagagcctgtagcggcgtgtcgagccccacgcctgaggtgaaggcttataggagactggatttcacccccagtttaggattggcctcctttaactcctatacccgagatgggcaatgcggtaggcaccccatgatgccccacatctgttgatgagttgttctttttaactctctcagatgggcgtagggatacggggagaagtcgaagctggccgccaagccgcaaggcgtggttggttggttacccatcctgtgttgaatggcgcggtaccgaggcctggcgtatccaggtaatgctttcaagaacatggttagagcctcgacggttgaggaaccggtcaccgaccaccgtatgagccagcggggaacccttcctgttccaggcttgttcgacccatgtttaagagagtgttggtgtgtatagaaatcagtgacgatgcaagtccgagcaggcaacaaaataaaagtaaaatatgcctgctcgtccattgtatagttttttccggacctgattctgtatgaacaggcacaagcgactcccgcttgagacgtgtatagtttttccgaaacgtcacagtagtgttcatccgagtgtacattctttaagaga

SEQ ID NO: 2492 - DNA, 859 bp, Unknown
  Description of Unknown: unclassified RNA viruses ShiM-2016 sequence
cgcagataaagaactccacgtgcgcgtttcgcgcacgtggagttattgttgtatttggcgtttgactacgcccagtgtacttgttatgtagtgagttggggcgttacgacgccccctcttcctgcattagcagctacattgacttcaatttcatctttatcatacccgttccctgggatagtgggaccccctctgtcatgaggatagtcatttctgacgtaagacagacgtatgaagaatgacatattgaatataggtaacattgacgaactatgcctctaagttcgaatgatatgtttaccgaattgatgtgtaccttcttttgaaggcacgtctactttcttgatgagaccgaccgaaaggcggcacttgattgtagattcacattttatgtttctcgtgagagaacacaattcggtacaggtaagactgacctgtctggcaatcggtcagagattgataatctcgactcgatttgttgtgattttgtattgatcactttagcgccgagaaggcgtttgcaccgagagtaagcggtacgagacatgccctactagcatgggccgacgtaatggtcaagtgaaacttgttttaggctatctgttccggtagtcacgcagaattaagtgtactgaggggtggcacccgatgaaggcacttttgctactttgtgtaaacaaattctaggacatcattttgatattttgtcaataattttatcgctatgtttggggtatttacagaaactctggcttttgccgtaagacgatttatgagacattatttgagacttgatgtaagtgattgatcttttgatcagtaattcgagggactacgttccttttatcttgaacacagc

SEQ ID NO: 2493 - DNA, 860 bp, Unknown
  Description of Unknown: unclassified RNA viruses ShiM-2016 sequence
gctataggtctacctatagcaagtttcattcctgaagcagataagcctctcgaggatattaatttgattttatgttacactgtatacactagatgtgggtgttgttactcacacactagaagacggtggactaaagattttattatatattgtatacaatcaaccccaacctattggttgaaggcttccagacgttttacgcctagctggcaacaaattagtcaccagcgatccaaaacgaatttggagtgggtttgacatcccactaagaaattgtcctgcatagcagggaaactaacgtctggccaaaatcctattattaggtgcgcagcgggttcgctttaacctgccactcttgtttactgtcagtccgaaagagtaatagtcggacagaatatgtcaatgaattgaccggaatgaggaccaagttgattgagcctcgccctccgaatgggccaagaatattttcttatattcccacgtatatacacaatttagcacaatagtgtattaacccccttattgttttggggcattgaatattgtgtatagactttgtcatagagtcacacttgtggatattttctgctcgaaacgagtagatagggagattcatcacacaacctggataatcttttgattataaaccatatggaagtgtgggttgaagctcaagtgtgactggtctgagagcgtctatttgatcagtagacagcgcttgatgaagaccgcagttggtggattaacaaccacttatggtatatggcaacctgtgtgaacagtttctttactctgatcgtgtgcttcgtgcaccagggtaaagtattgtttgacaggacttgggacttttctatacaaaa

SEQ ID NO: 2494 - DNA, 860 bp, Unknown
  Description of Unknown: unclassified RNA viruses ShiM-2016 sequence
gcctgcgcctcgataacagtggtattacgtttcaccccgtgttgcttgcatttaattaaagtcccagggctcgaggaggaaatgcctcgggtgagatggcgtagagttcttataaaacaggggcacgttccgccgtcccctcctaactcggggttctgaagggagaaaccctaacaagccaggcttattcttgacccctcgcgtgatgagcgcacgcagggcgcagcctgccggcatggtgtaggagccagcctgaggtgaaagccgtatcgagcgcgggttagcagccgcgtaggatttgccaccttaatcggtacaggagtcccccctctcccgcgcgctccctaagggatgcgtgaacccagcacccaagctgtaatggcgtggcctgttggaagggggactaaagaatggttacgatgtgtgccagcactgcgttttgggcttcggttcattacaagacaaatctggacatgcctagtagcaagagtgcgtactctaagcccgccgacctctcacgttgacgtcgtactgtggttcgcccacggacgcagctgatcccgttcatgtcatgtcggttgaagggtggtttcttgagccccacccgtggaagcaccaggagttgatcgcctggcgcggcgccgaacggggagtttgctcgcccgatagttttggccgcgcacgtgtggagtacgtattttgggcatgctgctgcgtttgaggatagtcccattcgcaccacgctcttccttaagggaaatgaattgttttagttatgttgttactgtttttccagtgatgccattttggcacacgaagacctggagaggacacagtcgtcgtcttgagttgcttcaaca

SEQ ID NO: 2495 - DNA, 861 bp, Unknown
  Description of Unknown: unclassified Riboviria sequence
gtccaaggggtttgaaggctcggtctaccactttgtggggataaattgtaactgcgagcaatggttgttggtttcaccctgaaacccgtggcggctgttaccccatctttgagttggtggtcacgctgcaaacgggctttcggtgaagccgtcctggagtctccaatactccagtctctttgctgctatgacagtagagaggtagagtcgtacaaggcggatcgcgaaatccgccatgacatccgtgaatccatgcgcacacatatgggttatggtacggctgctacttgtgttgagaatgtgatgttggaaacgtttaacaccaccggctatgatcttagcaatttctcgaccatccggacccagtgcgcggggttgcggaaaaccatgacacaatgggacgaattcttccagttgaaaggggttgacccattcaaactggtggacttcgagattctacccacttgtgttgtgcccaagttcgctgcgtcaatggccttgatgctgagaagcaaacttggaaggttagcaccaaatgatgctaacacgctccttgtggagagggagtacttgcgggtggcaaggaagttaaacgtgcgcgatgtggacatcgtcgcgcaccagcagttcgtgatgaatgctgtgttcggtgaaacgttgctggacagtgtagctttaaccaggagtcgcattccaaggtggatgcggtgggcgttcgaggtggaaacaccgacagcgcccgtccgcgtctgctaggggtgcccactcactgtgcgtggctgtgacactaaggttgctgatgagttgttagaacagatcagaacccaatgtctcggcaagttgtgcgcgcgcaggaatggg

SEQ ID NO: 2496 - DNA, 862 bp, Unknown
  Description of Unknown: unclassified Tymovirales sequence
ctcacgcgccgttctacctgactcccacgaagatgagtctaccgacagcacaccccaaagcgacaatctcacaacctgccgctctgaggctagccctacaaccccggtccttgaacccttacccacctccgctcttgcacccgcccaaggcacttccgctgatctctatgaattgcctcctttcgtggctcaggcccccctcggtggcgccgccacctcggccgcccctttttgcacgcccgtcggcccgtcgctctctgaaccggaacgtccgtcagcgtcgagccctctcgacagcgacgtcagcgccgcgcctggcgtctccgagcctttctaccttcttcacaactttcccgccgccagcgacattctctggcccacgcgtcgacgagtcaacggcgcttcgaaccttcccgtcccacacaacaactgcctcctcgttgccctggccgaagttatccctactcagtctgtgcgctcactttggacccgcctatgcgagctcctccctgactcacaactcgacagcgaggagatccgcacaatcggtcttagcaccgaacacctctctgcactcgcctggagccttcaggtccatgtcaccgtcgtctctggcaataccagcacctacggcaatccactcgcctccgctaaagaccattacaccatttattacggcaacaatcacttcagcgcccagagggtgctccgcggcgccactccccaaaaatatcgcccggtccgacattcagactacgcggccttacacaagttcaccaccaacagcgggcatcgcctccccttcgacaaatttcacaagcacaccgccgaccgtcatcgtgccaagaacctaatctccaac

SEQ ID NO: 2497 - DNA, 862 bp, Unknown
  Description of Unknown: unclassified Picornavirales sequence
gtaggtcatgtttgttgaattggaggcgaataatttccttgccgtctctaaacgcgctagtcagcgtggctttgcctatgacgaacctcggaagcataaccgagctatcaatattgctgaatagattacgtagatctattttaaagaagaatacggaccccataatacacatagagagatttgatcgtctatatgatttgagatgacttctttattttgtggttttttcgggcttttatttaaaagctccctcgggttggtctcccgagtgctttcgacattagtgtctaatgatataacgtttgagaagatattcagcccatcgtacgtacttttttccttatacggtagccccgtttggaattatttacttactggtggtattctcgcggtaaaatgactttctttttaattttcctttgtaaaatattaaatttttctctacctattttcattctatcatttatgtagttatctttctgtgtttcatatcactcggttttactgttggcaacacattgttttttacattatctcactcggtctacatggtggtacttcataacatttcactcggtctacaaggtggtacttcattttcattttcattggttatttgtccattgttgcgcacttcaacggttgatgtgtaattcgttgttttcccccagcgtgccgtagttcacggtaatatcatgaacatccacgagcgactgagcaggattagctttgacgttgctatcgccgtatattttatataatccgcgtgcggcaaacccataagtggtgcggaaagaacaaaaacatggaccattaaggccgtgagcatctttgtgatactactacaaacaaaaagcagacc

SEQ ID NO: 2498 - DNA, 863 bp, Unknown
  Description of Unknown: unclassified RNA viruses ShiM-2016 sequence
ggttaacaccgcatagcagtcactttctcaagaaaatcttcttagaagactttcctgacatgaacgatttgttagagatttataagatttatttgtgagtatagtactccttgtagctcggcgaaatcgtagagtgcttaactattgatatagtcaattctccttgcagctctacggatttgtctggagcttgattttgatatcattagacactttaagtatctcctaatagctttttcatgcagaaagttttaaactaaagtaaccaacaccttttgtatactgccatgttggcagctagatgttcctactttgaagtcgttttataccgcttctggtagtgttttatatttgttttaaaatataaaaatcgcttgtgtgattcccagtagggaatttctaaatagtggactccagagatgagtaatggccactttgatgaacctagaataagcagttgacgcgagatagcactttgtgtgaaacggtcctgtgataaaaagagaagccgcctgagtgggctagagcgtttggaagcgttcgtcatcaaagatgaagaccctttatgggtaggatacaccaaatattgcaccaggcaatgtgcaatctgattttactatttgagtcagttaaaaccaaggttgaaggccaccttgaggtctctgcggcagaaatcaccgttcaatgacaaattctctcgtgtaaagtgagagagacaacagcaactattttcatcagttctattacactggtgaatcttacataggataatagagcaacttcccggtagatgtacccggatattaacgagcacgccgtagcgtgcacatcatgaaattttgtctttcccattccattttgga

SEQ ID NO: 2499 - DNA, 863 bp, Unknown
  Description of Unknown: unclassified RNA viruses ShiM-2016 sequence
gatctccacacggtcctttcgaccgtgtggagattcagttaatttcttttgtcaaatagtttattctcagaagtgcatactatatgcttctgagactttatgtgtagtaagtcatactttagagttgagttattacactctactctactttatgatatatgtatgctatacttaaagtctatcagaattgtacttctgttagtgagatatttgatttataagaattacagtaatcgaaaccccgtcatttatcgactttctgtgtttgaaatgtcgcacagatcgtagttcctaaagttagacataacataatttaaggattgtcaaggctaatgattaagttgttaactttcttcttatgatttagttgtactttttaacttgatatagcgcacagcaccgtgcgcttccaatccgacctcttaggtttaatttgttagttcagtaaccgtcaattattgaatgtttacaaattaacccatttgtttattaacactatttaaacatcttatttataatatttttgatttagacataggacttatataacctgttgtatccccctactatatttcatacttgttttaacggaaaaccgcgtaaagagacgtataggattcccagagaatttgtcttatagtagaagaatcggccaatggagtatatttaacgaaacgtacatcgagatccaatgattgtcggaatatattaccaagatatgtatagtttaaggcatcgtacaccgcgatgttaaggtcgtcttacctgatttttaattacctctacttggaattgacccattaatagagtaaataattagtgtttatatattgtgatttacaataaagtattttgacgttttt

SEQ ID NO: 2500 - DNA, 864 bp, Unknown
  Description of Unknown: unclassified Mitovirus sequence
gggtgtagccggtagaaataccggttacatgtcaagttactagagcttggctctaatagacctgatgtaggagtttaactcctgaagggaaagtccgatcttggaatggttggacctaactattagctcacctggaatctagcaggtttgtgttcagaacctacctttggagcagggaaccgtaaatgggttttcacacctatgagcccggttaaagcttaacagggtgcccggccagggcctctgacagggtagataagtaatttggaaacaggttactaagaaaggagagagggtaatccgaactcctgccttatagacagaagcgaccgctcttaaaccggagcgaagtagtagagatgattctctgaaaggacagctggcaaagtcagttgctagattcgtaacgaatctgggagtcaaataggtagggtagcacccatccttactataaggtcccccgaaggggataaactgatcacaaggaccaactcattagttaaaaggagataaggtgcttgggtaaccgagtaccggggtaactgggatctttcgatccaacgattgaaggaaattacgagccttattcctgttagtctgacagggtaaggtgagaccaggtctctggcaaactcatagagttaggaccaaaggtggcgacaccgaactgaaccacagttgcctgcggcctgtccggactagtggattccctaggctcatgctgagcaagaggattcaaaggtccaagtaacgaaatcaggaagagttctgggtagccctgtatagggcatcttgagctttaactgaggacagaaaccgaaggtttcaataatcgacgctaacggtcaattcaatctactaatt

SEQ ID NO: 2501 - DNA, 864 bp, Unknown
  Description of Unknown: unclassified RNA viruses ShiM-2016 sequence
aatttttctgcacatttattgctagcgccttccctcggcgtaggacggtttgtctatcatctgtctgttcaatgccaaaccatgatgatcacgtattgtcatggtatgtatcagtcttaagactgctttgaggttttcaaatagagggtttgcactagctttgctggtgcttttggggagttatctccccttttagcgttattgcctcatgaaaagggctgtaacgcgtagttttcgctgcttttgactatgataaaagcagcatatttgcctttatggcaaagtcttttgttcttgactttactaagaacaataataggctagtatttgttgtaaatacgtatcgttccacgtattgtagtaaaggaacgcatgttttcaacatgtagggtgcaaatcccttgctggctctttgcgttttgatccactttatgccagtattgcctattgtatttttgagctttggatcagctcagttaagttttaaaaagaaataaaaattaaaaaatatctgtccaaataaaaagattatttttgtcatatttgttttaaaagctggacagcaaacagccattttaattaggtggagaaatagattttctctggttgttattatacgttttatgttcttaactgtcactgcatggaatatttccggttcacacaggttaaggacatagccaccctgtgagtttccggggcatgtttcaggccttgtaacgtattttgcatgcttcatttgattttaatggtttattcctggtaggtaagagtccaatcaggtcttccccgtgggatcacggggtatccctttgaccgggagaaataatacgtcatttacacgcctagagacacgaaacatta

SEQ ID NO: 2502 - DNA, 865 bp, Unknown
  Description of Unknown: unclassified dsRNA viruses sequence
gaataatagacccgaggagggtggcctgattcgagccaggtagcccctccgtctgttatgtgatgtcctaaattgttgggcctcacctcaaggtgcagagacgattgcactggctgaacctcggccgtaaaacgaaacccggtgctaaatcacaaccacttcattctttcattggttgagcgggtggatacccaacacttacagatgttgggacggttcagcgcgcgtaagtccgttagggtagggtggctttatagcatttagccacaccaggccagcggcgcgtagcctaacatttagaaaattcgttcttccattaataacggtatgctccgttagggagaacgatgcttttaaatcgagcgtgcagcaactccgacctgggcatgtcgttaaactacctaccttatcttcgggtgaagctggtccccggagatccgacaaagccagtgcagcctcctgtgattaaaccagcgagtagggaaccgacgccgacttccagatatggtcgtccgccgagggtgtgccaaccgatcagcgcttgcgctgccagtgtaaaaactgcgctcttgagattagagggttggtgctaacgtagagatggtgtccccgcgggcttgttcctcgtagatatgcgagggagcggcttttgcccccgatccgcgggcatatactaccactcgaacgtgctagacttaaaaactctagtggagagacaacacctaccgccccgacctgcgcaatgtcttcgactgttcaggaattacgccatggcgcccccaagtagcaatgcttgggccggtgtggttgtatagggcacagaaagagtccgctctcccttcatatcccctgaagggcgggaacg

SEQ ID NO: 2503 - DNA, 866 bp, Unknown
  Description of Unknown: unclassified RNA viruses ShiM-2016 sequence
ccacattaacttccgccccacgcacgccgcatgtggtataatattactccttactttatagttttcatttacacagtatactgcttcttgtttatcctccatatggtgttaaatatattagtagctcctataattgtactaatccttctcataataatcttgataattgttgcaggctgcttttccacagacttgagtgctaggtgttcgcctgagttgcctttatccaaatgctcaacacaacaacagtcagctggccttatcctcaatccataggatttgtgttgtatatatacgccttgtcgatacttatttcactatttgtatatgagcttttaaccctgctgcaaacaaagtccttcttgaggtttactatttacttgtctttcatactagggctggcttattacacacatcattatatggtacataatataaacaccattgatagttacaatcaaatgactaatgagtgatatagtagcatctatttccaatctacagagtgatagtctaaacttcaggtatagattcattatactcacaaccgtatcgctaagcagcatattaatcaacctactatctttgataggtttattaatttgtgagaagcattgttacttacctgtcactaactacaattgtgaagacatagactatatatattatgagtatatattctctcattacccttttataggattttacaacactttcagtagagaaggctgtgatttttatgttactttctataataaaatctgtgttagttgtgattcatcatcccgttgctataagctacaaggtgaaataacaaaaataggaaattgttttgctctagtgaaaagagactttagtgcttcagt

SEQ ID NO: 2504 - DNA, 867 bp, Unknown
  Description of Unknown: unclassified RNA viruses ShiM-2016 sequence
tgcgtagcgttacacgctacgcacgcttattttatatctcgtttatttgatttatatatatttatttagggataaatatgaagatttctttgagaaggtaggccttggcttagatttcaatatttcaatattcgagatccccttttacacccccctcttttctttttaattggctggtgttcaaaattatttattaattttattttattattcgtattagtatgtttggaaatctttaactattacgaatttcattaagttggagtttcaaaattttcatctcgttccctagattatgtatgggaaaaagttcgtaccctaacgatttattcaatgggtaagtttgattggtataaacacgttttcaattttataactaaatatacttgttaataatctcttttattagagttatcctgcgggatgtcttagacataaaattattaataaaggtatttattataaaattagatttctatccggtttttacttagatcatgggaaatctacagtttctataaagtatgtagtcctgttaattagagggcctcaaatattaggtacgcttgatatttgcctctaatgaggaggggaaaaactaaaggtgcgattcgacatcaaacctactcctgtattcatattcgtacgcgtaagtgcttgggatggataattgaatactgtcttatgtaatgtctggatgtaaaagatatgagcaaagtagcaacgtcttgttaaataactcctcttatcggcgcgtttagtcctagtcgcgcagggacacattcttatgttatgtttgtataagatcattatcagccaccgtgcatatcccctcagaaatagcccgtaaagtacgatttatataca

SEQ ID NO: 2505 - DNA, 867 bp, Unknown
  Description of Unknown: unclassified RNA viruses ShiM-2016 sequence
attttatcatatttagttttgctccggagaaaaccgggtaacaaatggacgacctttaattgtgagacacatgggggttggagccaacatgatattagagatcatgttcggtagatcatcttcggtctggcggtcatagacttccagggcttgatgtcgtccatggcgtgaataccagttaggtctaaaggcgtttgaacaaacaaacagaaaaatgatggtaaaccatcaccacctttacttcgttgtttcatcattgagacaggcgtgaaagaatgccatccgtggagtcgctttatacatactgcgctattctgaccaatattcgacatactagaaagagaatattgcttattgtagaccagccatatgagtgtaatcttggtgcagtccttgttacactatgatttcaactgccacgtaagtgatcgcgtcactatagaattccaaaaacattgttttgttctaccgtgtcaatttatcatcaggatacaatttttgcttaggcattcgatggttgtcgtcccttccatcgaacccgcacctcggagaaaggtgtgctcccacattacgtcaagttaaggtaaagctgctgttataacataatgagaatcaggagatcatttcctatggattagatattacgatttctgtagtatcctcatcatctgtatggatttgtaccaaatgtagttgtgtttattaagtggagcccgatacacttgggtcgtgtgatgagtaaacaagaaggtttggtcaccatttcttgttgggattatcgaggtccgagattttgcgacatttgaacaaatagtttgagagaattcccacttccatttattctagtgaattatagtgctttgcatt

SEQ ID NO: 2506 - DNA, 872 bp, Unknown
  Description of Unknown: Posavirus 1 isolate Ishi-Im2/JPN/2016, complete genome.1 sequence
agaatttccaattctcatatcgtagactggctgaaaagttggtcttgacgtcgtgaaaatggcgttatattttgagtgtaagggtttcctgaaaaggtaattcttatattgctgtgaaaacggctttctctttttatctcctcaaactccttattttgcattctggctgttcaagcggcccaaatcgcaagcgtattacatttccttgcgtgcgtacccgaaaatttattgaatttggcttgaattataagcaatgcttcttatagcggacactttgagaatataatgcttgcatggattaatgtatactgtttcaaataacaaacctagacacgcagttgcgttgatggttgtatcaatcacatacgggtgttgaactcgtgttaatcctcgatcgctatatgtttgcctcctacttccaataaaatagattacatacgcgacatgcctttgtggtttacctattggcctctgtcaaaaacaaatcgttcgatttgtagtttcctggcctaaaaagctgggcgcggtctggctctcgtcggatggaaaggtccatcaatggctggttgagtgtaagctccggtgttctggttgtcgcaattccagacgtcgtaataacctatattgcatctgactctaattcttgtggctctactgtatctagttcttgttctactaactctaacaatgctactggttctatgtttgaaaaactctcctatgtcaatatagataatgtccttgatcccgatatccctcacatcactgaagttcatcgcaagcggatttcagatgatatcctcgaatctcaaggctgtacttgctctgaacctattctcactcctcgtgtgtttactttttcaactcttggc

SEQ ID NO: 2507 - DNA, 872 bp, Unknown
  Description of Unknown: unclassified RNA viruses ShiM-2016 sequence
ctaggaggcactcttttaaacactgtagatcggtcgggtaacagcgcagcgatacaagattcttccacagcccttcaggctgactggaagtttttcaaaatttcaaaaccccaacacttttaaatgtgatcactgctttccactataagactgcttgaacaacagtacgtggttagttagatttagttttaagtaaagaagagtaaaacatcaaagctctgacacggatgccgagcctgtgagtaagccagacaagcagcattaggcagaagtggtaaacgttcaccttgagaaacgtggacggcgcgtcaacgaagtttactttataagccatttgcaatcgcgtcgtgtgggaaattggaatgttttcttttatctaaagttcttgagtataaacaacccgaaaaggccgtagaaaccatgaagattacggacgagggggcgacaggctagttataactaagttatagcgaaatattagtgcccagttgtttaatatgaaagaatcgcggatttaagagaaagtaccatcgtacctgcgtaaatcgtataagaagattgaaatgagtttaagcaccaagcatacctagcgggttgcgactaggcaagtctaacttgacgggaaatttaaagcctcccatggtgtaagtaaatagcgaaagcgagggtctgacagtgtgcaagctcagatgctaacccttagttgttcttatttagcaaataagattaccctaaccaggtaacgacgtcgaaagccaatcaacataggtaaaatcttttaggccgttcatcaaaattaccctggcaggactttcaaaaagaacgttctgctttcaaataattgcacaacaataaaacaagtgaataataaa

SEQ ID NO: 2508 - DNA, 875 bp, Unknown
  Description of Unknown: unclassified Picornavirales sequence
tctagccgcggtatggcaaccgcggcgcccaggccccgcctgttgttggtccttttcttaacccacttttgtggctattgcctgtctctgcttgcatacaggcatgtgtcctttagtgagttgtcttggactgtatacatgggcctcggtctttgccacctctcccatttttcaccacttttgtaactaagccttctttctcgccacaatataacttgtcacactagagagtattttctacttggcggctctctagggcttctttatgaacacagtgttgatcactgggagtccaccggctacgctaagtttccctttcccccactgcctcacggcagttgggttcttaccctcccaccccctcccactttctctaatctttgtcttctttcgtcttgtttttctgggttgtccccgtaaccaagtcgatcaggccgccagggtctgaatactagtagcaggattagcctcttctagggtagacgaaacacgagggataggaagaagtagatttttgagtttagtttaaggtgcccttaactgggtaactgtcttcaggtctttgtattcgatcgcgcggacaagagtaggctacgggtgaactcttgtttttgttggagaaatcctcataatgtagtgcgacctgcaagtgcattgattggccgtttggtgcattaagttgtgccttacggacatcctctaacgcttggggtacaggagtgctacaccgctcgcgagtacactgctctggaggcgggcctttcattaggctcacctctctcttctttctagcctgcaaggtgacgggctcttgccccgatccctgtcggccgcttcctgcctggcttttaggttttacccactttatagcattg

SEQ ID NO: 2509 - DNA, 877 bp, Unknown
  Description of Unknown: unclassified Mitovirus sequence
cccaggttgtgaaacctggtaacatgtcaagtgactggagcttggctcgcagtgtagcttgactgaagggcttagaagcccggaagttaagtttgactctctcttctaacgaggatgagttctacacctgttaacccatctgaaatccagcaggtactgtttctatacagtcttcgtaacagggttgaaggagacacgcccgcggacgtgaatcttcttgaaaagtgaacttgggctggggccaccacctaaggcgaagacccatgaaggcaacaatgccaaaaaacataaagagattttctgtaaaagggatttctcgccatatgagacagaagcgaccgggttccctgcccgaagtagtaggaagtgtcagcgcaaacgcgagctagtttatactagtccgttcggccgaaagggccgttgggcactacaggttggttagtaccatccttacttatatggtcccgagagggataagtagaaacaggagaccaccctatagtgttggaccttagaatcgagcagttgtaaaactgtttgaggggcaaaaggattatggatctaggtgtcttacctagtttgtagtctatctaagctaaaactacttaggaaatggtcaaaggaggcgactccgatctgtaccacagaaacctgcagcctgaccgaagaaccgggatatccttaacaggaccccttgttcgccagaacccctaacggggaaggtaagcctttaaaggtaggtgagacctcctggtgatctattcaagtaaataaactccgaaggcccgttggtagccgaatggcatcatgggagataaagagggtcagaaactgaaggctatctattaactaacaatggaacaactaactctacatt

SEQ ID NO: 2510 - DNA, 877 bp, Unknown
  Description of Unknown: unclassified Picornavirales sequence
gcatgtcattttagtcgcgcgagggggacgacgttaactacccccgccggaatactaatccttagacgttcttccctttggattaagtaaatcttaattacttttaaatggctaatagcgatttaccggaatttttacaaaaatacgtcacaaattttcccaaggccagttctggattgaacaatcaacaaaagcaaagtattgaagaattgagaaaacttcccattcaggatacagactcacctcgtttaatttgcttgaagtgttttcctgacatctctttcgagtctatgctaaaagaagaggtgtttaagtgttgttggtattcatatttagaacatagcagtcagtggaaaaatcatgtccgtgaacgatacgaacgtagtcgacgaattcgtgaagaagagtctgcctctgggtctcctgaggccgattaattttgggacgaaggacattatctgctattatttcttgtgtgaatatacgcgggaagaaaatccatgcccgcttaataatcaacttgtagcaaccaattctcttcaagaaaaattgtgtccattttgtcaaagtaaacgtaggtgtgtcaaagcagaataccatattaataataaattggctgatgtacttccaaattcaatcatttttacagaaatcgaagaccacactaagtcgttgagaacattgtactttaaaggattttatccaggagacgcaactctcacaggcaagaaccatttcaacattcgagccgggtacaattatcctgacggtcgctgtgtggaatttcatcaacgatatggacctcctcaaaacaattatctccgaactcaattcagctttggccactccccctgccccccaatcagaggaaatggag

SEQ ID NO: 2511 - DNA, 877 bp, Unknown
  Description of Unknown: unclassified Negevirus sequence
cagactcccgaaccatataccaaattgctagatttagtatttaccaagtaccagaacgtcacactacaaattctgcaagatcccgttattcaaaacctcacatcttacctcacaaagaatctcacattgaattttacagcagaccctatagattacaacgctttgtccgcactactgaaccgcacccttgaagctttggtagtgaggttacccaacatgtcacagaccaccgattacaaaaattttgccaaagttatacatcaatccccatcaaacaccttatcattttggaaagaaatcatagactattttattgagcacgattacagtataactcacaaagtttacggacaacctgggacgaaaaagcggttctctgttgtaggctatttggaaagtgttttattgaaagttgcccatcggatcataggtacgttaaaggccgtgttgcacgatatcatagaacctatatttttaaaaattttacgcaccatagtatctcttaccgccgaaattgttaccgccgtatttcacgtaattaaggcattatggactgaaataaagacggccgtcatcgataatcctgagttagttcgtcatttttcaacttttgttaagtgggtcgttcagcttgttcgcgacgtttcccacgttctcgtggagcatctcgtcgagttgaatgaacagtataaggttgtggaattggtattgctatttgtcgtgtgtgttaggtatttgcgcggttacgtcatatctgcgtttatagtggccgccgcaggataccattttggatacgaacgtgtcacggaacataccataatagttatattaattgttattttttcatttatacacttcctatttccagatttaaaca

SEQ ID NO: 2512 - DNA, 877 bp, Unknown
  Description of Unknown: unclassified RNA viruses ShiM-2016 sequence
cccgtatgcacatttacatgtgcatacggggattattattgaagtgctggggattctcccagcaagatttttacacgagtacgctcggtatttatcttttgaatgacataagtacgcttttgttattcattcaaaatattattttccgaaatttctttatgtacgtttgtgggtatctaataaccctctttcatgaacagaaataaaaagtttagacctaggtatagcagaggagtctttaaaaggccttactggtcctgatcatgaccacttaaactgattattctaaacagaattcaaacttatacactgtcgggtgtttaaatacgatgtgatgaaaacacttataaaacatagtgtcaactgatacacttgtacacttatatacaagagatctaagctgtaattaacagcagctgctttgttaagtttacttctttgcagtgttttaacacggaattcacatattcctgcatctaaatgcaaatgtgatctttgcctatgatatgtgcatagctgcaccgagttaacgctgaacgtctctcacaatcgtgagaactagtatgtagggaacgcaaaacaaacgaggctcagtagcaagcgttttgaatttattaaggtaggcttgctcatttatataaatgagtttcatatctggaagtaatgaccccagtatgatgagaggccttagtagataagataagctaacttgtgagttgaggatggccatttgtccgtggaataacatccaatgatgctcctgacgaacgttctttagcctaaccagctatcgaacccaaaggtgctgtgccgactgtcaaagattttatctttacaggacacctgtacagatatctttgacacgttgcatttaaca

SEQ ID NO: 2513 - DNA, 877 bp, Unknown
  Description of Unknown: unclassified RNA viruses ShiM-2016 sequence
gttagtagcccttcttttataaccccgtaacaaaaggttaaacccttgggaggacctgaagcacctaaaagcgcaagatggaaaagctactaaaacaaataattaagaaacagatgttataaaacatcacaccagcaataaaacattaacgttaactggttataagaactccttgagaaagagtatcccagttatattcaaaattttaaaagaggttacttaccaacttaaccgatatttcaaacgagcgcccgagttagccagacaaggaccagtagggagaaatagtaaatgttcaccttgagcaacacggaaggtgcgtgaatgaaggatttaatacaaccgtaaataatcgcgtcaagtgggaatctttacagagtgtagataagagaaaatttttataaactagagtccgaaaaacgactgttccgaacaaagtgttcacgaatacagttgtggggcgccaagcgagacaaattaaattttgtttgaccagttagtcccagctcttttaactattaaaattggaaactatctatcataaagtagagttagtacctttgtaaatcgtataagaagaatagttataggttaacttatttaggcttatttgacggatagcaatcaaactactagtattagtagacgggaaatttgaagcctcccaataaataagttaaatctagcataagcgtgaggccggcagcgtgtgagaccggataacacctcatagttcgcgacattgaatgtagagcaacataggtattttgtttcgaaactcgttcaaaattactctggtaggaattcaaaaattgaacatcctatcaccaaataatcacacaataataaaacaaacttaaataatcatatatcaata

SEQ ID NO: 2514 - DNA, 878 bp, Unknown
  Description of Unknown: unclassified dsRNA viruses sequence
tgaataaaaggccgaaaggctggattttcagagcatcgctccgaagtccagctaccttttatattgtccacttaattagctagtggatgatctcaggtcgggagacaatccggccagtgtagtagggggcaggaaagaactaagcacgtgcttatcggttgagctcacccaacttgggctaaactgtagcgtgtggatactcaaggtgtcaaggtgcggtcaacatgcaaacacgaccagttccgaaaacatccacaaaccttgaggcctactacagagcgtaagaatgctagggtagaaagagctggggctataacccccggatctcttatcaggccagcatcgctcagcccctctttttgtgtaaatcccacccggtctagcggagtgggacgcatataaaatgagcgtgtgaaatcgctctaaccgtccaagcacatgacactaaactgtactcgcccaggatatggcgttaaactgtaccatccgcttttgccagcggttaaaacaatggcttttcataacagccgcgtgtgagtccgcgggataataagtgttctaacagactcaaaaagacatcctatttccaagttttcgtcgctacgtcaaacgtcggcacttcttggatctggtggggtaacatacacgtcaagtatggtgtgaaccggggctacacaactaccggggagctaacgtaactgcgctggtgctctactttcaacgtgcttcaggaccgaaaccgtccgtaaaccaatgggttgcacagaaagtaaaggcgtagggaacgtgcctgggacaagaaccaggtggacagactgacactcaccagtgccttcccgatcgaaggcagtagcaaacagtcggtgcgggaactccgc

SEQ ID NO: 2515 - DNA, 879 bp, Unknown
  Description of Unknown: unclassified Iflavirus sequence
cagggattttatccctggggctctttgagaagattcactaacactgcgttgtaagataaggaatactgtcattactcactcacctcctagatcattcgaaagaggtagtatgatttcagatatttaaactcgttacggcactgtggtagcttgcttttcaaactcgaatcaccattcgtttcacaaaattcgatttagtagtatgtctcattgactttacaagtaatcatataatacttgttgttttccatttgaggttttctacctcctaaatttaatcaaaattatgggttttcttcccgtgaaattcttttagtttttaggcgcttttcgaactttgtgcgaaacaaagcggaccgtgatatatagtggaagttcaatgtgaggtaacggaaagataaccgctgtgtaaaataggacttattctatgtgtgctctttgagaaattctttacctagtattttgaatgagatacgatggggaccacatagttttatcctagcttctaatatactctcgtatctgtttggagcgattgagaatagtagaagccataagttacttctgtgcacttgctagtaaaacggaaactagtcacctcttagcagtgagatactgttaccgggttggcatccggtatactgacattgatggaggttacctgatactggcgcagagctggtatggtgcattggatgagtgcttgcattcgccagtggattggtgtcggctgcacgcttataacgatgaactcgaagatgggatacctgtttaggtccttagtgagaagttatttgcctgtagacctcccttgtaatcgatgaaatctccggtgcataaaacgggctcagtgaagaacacagctactttgatttcaat

SEQ ID NO: 2516 - DNA, 881 bp, Unknown
  Description of Unknown: unclassified Sobemovirus sequence
gttgatacaactaggtctttgcgacccagtgcgtctcttcataaaacaggagccccatccactcaggaaagttcggactggcaggttgaggctgatttcatcggtatccctgttggaccaactggttgagagggttcttttcggttttcagaataacctcgagataagccgatggaagcagtgtccatcgaaacccggaatgggtctcacttctaaggagcaatccgatgcgttgtgggacgagctgaagttcaagtccaccctagcccccgcggctgaggcggacatatcgggattcgattggtcagtgcaacattgggagctaatggcggatgtcgaaatgagaattcgactcggagacttcagcaaccttgctgcaagggctgctaggaacaggtttacttgtttgtcgaactcggttttccaactgagtgatggcaccctgatttctcagggactaccaggcctaatgaagtccgggtcttattgcacttcgagctcaaattcacggataagatgcctaatggcgaagatcatcggctcacgatggtgtatagccatgggtgatgattccgtggagggttgggttgacaatgctgtagaaaagtatcatgcacttggtcatgagtgtaaagaatactcagcatgcgcccggacatacgtgagcgggagcggagaacaaacccttcaaacggttaatttctgctcgcacgagttgtccgagggtaagtgtcatcttacgacctggagcaaaacgcttttccgattcttccatagtacggctccgtgcattaggagtctggaaatggaattagcgggcagcccccagtggcccaaaatctatcggtacctgcgtcgggtgggcttagcgcccgacaaag

SEQ ID NO: 2517 - DNA, 882 bp, Unknown
  Description of Unknown: unclassified Marburgvirus sequence
cattaagtgtgcaatgatgagaactttaagataattgctactgagcccttcttctgatctactgaaatcaacttgggagatttttgagaagctgataacttaatgtgaatcaacagtttacgtattatcgattattatggtttgagattcaactgttatcatcgtcaagagtgacctttcctatttgatgcattaatgttttaaactacctcttaagcctttgtggatggtctcaatatgcgcgtaagggttaatttaaagagatttcttgttgcatagtttttcgtgttactgatttaggcttgaagacatagttaagactggccgaaaatgctctccagtcaactccatttcctctcaggggagacgtgctgtccaaagagtcttaatccataatcaaccattgcaagaattaatttactttttccgttatacttatctacattaattctttaaatgtccagcattattaacaacttgccttacttcaatcttttggatgcaaatcataaggaaagatgagccactttccctctaccctaagctaaggaaatttctcttatcagctcaaaatatgatccgtcaggtcacgggccattcataatctgtttgagcgtgaatattgatcaaataaccaaatgatgttgcatttgtatagacgcaattatcctttattaagaaaaagacaaatagaacacagatagttgacaaaattttactttgataaattttgcgaggaattataaaaatcttgaaggataatttatagtagagtagaatcgaagaacattaagtgttctttgttagaattattcatccaagttgtttttgagtatattcgcttcaatacaactcctctttatatttgatttaagatttaaa

SEQ ID NO: 2518 - DNA, 882 bp, Unknown
  Description of Unknown: unclassified Riboviria sequence
gcgccgtaagcgcgaaggaggacacaggtacccgatgctgtactgattaattcaggcattttgcctggtaaagtcccagggccatgggaggaaatgcccatggcgagagagggaagacgacattgcaaaaccagggtttgcccccctctgccggagtcgtccgggtgttggtagagtccacccgtagaccgaggcttattcttctacactcactgtgcccgtagtgagtggcgagcctgctgacgctgttttttccggagcgtctgaggtgaaggccgtgcgagagggggatttagtcacctccttggtttggccaccttaactcgtactgaacggggcccaggctctttggcacgccttttgcgtggcaacactggctaccaaccggcgacgggtggatagttggaagccccgaatggaatggctatgatgcgacctggcgcgacggtggggagtctcgttctgttacctggtttcgccaggagattgactccgtcacaccacatcaatccagggccatgctgttgacaccgtcagcacatccccagtgaacctctcatgttgagtcagggccgacgcattttgctaggccaggcagggtcgagccccttaaatagccagcagcgagcacgttgcctgatgcagagtgattcctattcatattatgttcactgcctcccattgcttgagggggagggttaagggggaggttgatcacctccgggactagtctgaccggttaggcatggttgactgtgggtaaccaatcccacttagggcgttttgcaacacttgagcccgtttggctcatgtgacctggtatcaccaccggttacgttactttaatcacggcgctgtctgccgtcattgcctttattaaag

SEQ ID NO: 2519 - DNA, 885 bp, Unknown
  Description of Unknown: unclassified RNA viruses ShiM-2016 sequence
cccaaaagggtctggtctatgtggcacccgattctcggtgcgggtccttgtttgcggatgccttgggccggccggggatcgttgcgacgggcaggtgctagccctagcgtagcctccttctacagttctcctggctgtgggaggaggtcggactgatgtcagctgcttgggtaaccaagcagcgtaacccgagcactctccttcgggagggtgtaaggtgtgcgcacactcttacacaactccttggtagaaacggcatataaaaaccgtggttatagcaaccatgggagactttttacccggccctttctagggcctatagtgatgccgatgtgaggaggtggagtgaacaggagataacaacatgcaactacaatctgagaatgcatttcaaaaatgacaccctcttgtagatgcccgtgtagggccagccaaaacgtcatctaagggcggggagctcgcagcgccccgctgatggatagggcgtgctaagtgtggggtttatttaatcctgctaaatgccgagagactgcaacggctgccaaaggctacaggggcacagtcccgtcgtacaggtgcgggcgggtgtttatacctgtagtgagtctgcgattttgacgagtgatattaacaagcgatattccaagttccaggtccctgagcaccttattcgagctatcttatatttcatacaaccattgtgtgaggcgttcttctaagcgttccgtcgcgtccttttcaggacgttagatttcgagtgtctttgaagtgaattaaacagttcttttcagaactacccaatcgcccttttcagggcggcaaggtttcggtgttttcaagtgttttcagttaggccatccaatttcaaacgcttctacttgttta

SEQ ID NO: 2520 - DNA, 887 bp, Unknown
  Description of Unknown: unclassified RNA viruses ShiM-2016 sequence
gccgtagtgccaggttaacgtattaattaatgtgcgggacacgtatgagccgggcccgtttgggtcacgcggcacttgccgcattaatacctgttggttgacacagagccggcagggtccacgcgtctcgacgtttgcttcggcgggcaggcgtcgcaacacagagtgccgctggcgcgtggatgtgagaccgttccttgtttattgctttacttggataggggtggcggcgcggatgcgccggcccgagtcataccccgaaggttgcctcatgcctgagtagcggagggtagttccgtgaacagcctggaagccgggtagcgccggtgacggtgagggcgccgctgttaaccctgtgcgtgggttggtccctttggagggggaacgtaaaatggcggttccgttgtgtgagtggtgactcgaaggattcgagcctgcgaggccggcaatgctgcgcttgctacgcagcaaccgtgaatatgtgggttttcggtctggatgtttcgttcgcgtagcgcgcgcgggtgaataatcgcctagggaggggcgacacacacggacaaaatggaagtgcgggggtaacggcccgcttaacgcactgcatgggggacgcccccccctttcgcgtgtttcccgcacgccgtaggatattgcatgatagtctgctgggagtagcaaacccgttacagacccgtagtcggctgcggcgccgacgaatttaaagtattgtaggccatatttcaaaactgcgtcgagaacactaccgggcgggccggtggtttcctctaaggtgcatctgtgtcgcactcggcgccacgcctttttctccggctgccggtgggggcagcttgcgtttttcgtcttcgcaatcgggagtgtttttagcg

SEQ ID NO: 2521 - DNA, 890 bp, Unknown
  Description of Unknown: unclassified Riboviria sequence
cacgggttaatcccgtgcagcgctctagtagtatttcaaattttgaatcgttacagtgcatttttgttgactaattttgttatctagttcattgtcagttcgatttatcgttcgtgactataatgttcgtagaattttcacctttagtcttcgttaaatgtattgtttgttacaaaattctttgactactaaactttaggttagttatatattatagttaagataatttatatatatattataacgaaatatagtattaataaaatataaaatacaaggtaccgaccttggctatctctaacaactattaatgtaagtgttatgtattttcactgtcggccagtccaagctcttcatgggcgagacaaacagtgacaggagcacaatcatccctcctggcaacaagtacctctcacacttttattaatagaatgattgatagtgtataaataataattttaaggcaaggttagattgtattgtaaatgtctacgagtagatgaaacggtctttgataagtgtgttaaaatggggacccctccaactggtttgcagccagcgcctactgccaatagacataaaacgacataatcgaaagtgaccgctttatgtgcaatgctaacgaccactcttctgtaatggagggagtgtaattcggctgggcaagtcccaaaacctcgatgacgtgtttatccacggacttcgggaatatatctctaagatatagtcgaacttctgaaacttaaatttacggacgttttagtaggaagattaaaacgtgtccatttctttcatttcttttcttatggtgacaatttgagtgattatttcagagaatttgcgcaaatttataaaagttatttcccatacacatttttattcctatcacc

SEQ ID NO: 2522 - DNA, 891 bp, Unknown
  Description of Unknown: unclassified Mitovirus sequence
ccggccttcctttctgtccctagccaggcagataaactctcattcctatctaaatcctaactccggtgaggtctctgttaacgctgagaaccggcaaaacgcactcaatcaatgagttggccacttgtgatgatgcgtataacccttcctactcttggctagaggaaagaagggtttcctatacatgctccctcttttcctttccaaagtatgttactgtccctaatcttaaacggctgagtagattgtctctctagtatcagcaatgcttgaccatcctagctctcccgaagattgatcgcttctgggtcttggggtgtccgagataggaacggacataaatatatcattaattacattcatgaagtaagactcctcttaactccctactctactctagtcctaacactgttgaggctaaggtaagactgcggtcttcttagatcaactacttgtccctaattgcttccacttcataacaagtctcggctatcacgagcctcggctccggtagagttacttgagtcccttaagtcccaacgtccctgtccttaatacatctctctgttccctttctctctttcaaaactcccctctgactccttgaaagcgtagattcaggtcttggtaagcgtggcaaggttaataactcacaaagacttgtaaaccgcaaatccttattagtagaacataaatgattgttgaagataagaaggtctacccctcatcacttgtagggtcaacatgagtgtgcccgtcttgggtatgttactaattcggtacctatacggggggagattaaagcccgcacgtaccatccctaatcgaagatatctgtgtgatcagattttaatggacttactatgataagtagtacagcagttttcagta

SEQ ID NO: 2523 - DNA, 897 bp, Unknown
  Description of Unknown: unclassified RNA viruses ShiM-2016 sequence
gtgtttaaatttaggttaataccttcttttaaacactgtatacacacctaaaagcgtaaggtacaagaatcatacaccacctaaaagcggactgtatgtttaaaacaaaccccaaaatccaattaaaacaaaagcctagtcagttaatattaatctgatttaattcaagagatgtgggaagtctcgataatattaaccttttagttttaagttcaaagaagagtaaaacaactaagctctgacctcttagccgagccgtgaaccgccaaagaaaacgcagtaggcgacgagggtaaacgttcaccttgagaaacgatgaaggtgcgtaatcgaaaacttaattaataaattcatctcttgacaccaagttgagtgggaaaatttattagtttgaaactcagattgtaataaaattttgaaccgaaacgataagatttctatgaatgaataccttatcaagggtgcgccaagctagttagattaaattcgaaacgaaatactagtgcccattcaaaactataaaaacaattgaaactttaaactaataaaaatgtaccttcgtaaaccttgctcttttgagagatggatattataacacataattgcttgctagcgggtagtaactagccaatttattgaaggatgaaagccacatcccattatgtgattaagttagccttttggcgtagtgcaggaaccgtgtaagccctgataaaccactatagattatgacattgaattcagatcaacaaaggtatgcactttcggaaacccattctaaattactttggcaggacttcaaaattgaacgttctgctttcaaataattacacacaaaacaaaactttatttttcatttcaacttcgtttaatttgactttgaattaataatcaatt

SEQ ID NO: 2524 - DNA, 898 bp, Unknown
  Description of Unknown: unclassified dsRNA viruses sequence
ttgcatgcctgcaggtcgctagaaaagacatggttctaagtatagtcgacaacggtctattgaagatctcttgcagatggaagatgccgttgatacatagccaaccttagtcgttagggtaactatgtatggagagagtttagtcagtctgatctgaagaactactctctgtcgaacgataacagccatttcattttcattttctttcttttcatttttgttccattaaattcttatttatttcacgttctgcgggataagaggccactaccgcgatagaaattagtgtggaattaagcatccaatcaagaagcagaagtccaacagccagttggatactgtaagctggaacgggattcatgtccgtgcaaggacctaccccctctacctttctggagctccgtgcctacaaacttacctgacctagttatgcctagggtggtatgctgcgtaggagcgaggagactggggagatgcgggacattaagagtaggcaccgagtgtaacgactgcgaagctttgttcttggttagggaacagtctctccggcatacccgggggtgatagcatgcttgtgggtcttaattggctcgctgcttgtaggttaagtaaccttcttttcctccttttccactacactagtagtgacgataaaggttgctccttcctttcacttcagttattcttccgccgtcagcgaggaaacagttggttgcaataatcttggacttaagtgtttgagatctattgactgctgcgtacaacgttgaggtatcgtttgattgatttggattcttcccgcgctaaacggttaattttagtatcttgaagtggtagccccacaaattttcaaactagcgtgatttgagacgccctgagtggttaatcgcgtttaaaa

SEQ ID NO: 2525 - DNA, 900 bp, Unknown
  Description of Unknown: unclassified Riboviria sequence
tttcaccggcccttggttagggccgggacccttggttagggtcgttaatgttgtgttttgggattcgatgagagcaccattttggtattttgacaccgggcggtacctttgcgcgtggggcccgggtgcgaccagacacactcacgttgttgctcgtcaacgtgaggcaagatggagtgcggacgtctggcgcatgtgaaagatccgctcccctgcttggggagttgcgcggggccatatgccttaccccgcggccgacgataatgtctagctggtccgtcggcgtgaacccttatgcctcagtagctgcggtgctgcgcggtgaagagcctgggagacttggcacgtcttacggtgagggcggcgacttgccttcttggttgggttgggagttggagagctcccgtgaaagtcgtctggtgtggcggtaggccggcgaagcttgcgaagtatttttacagcaagtggattggcgtctgagtatcccgctcgggtgtctaatggttacgcatgtgaatacgttttgcatgcagaatacctccgtcatggcgttgtccgctttgtgagggcacgacctggtcgccgtctgtttggcttggcagagcgcgcgacttaccacaaaatgtctacggtttataaaacctcgtatgtggctacacccacttattaccgaatcctgagcactctttccacacgtgatcttttacttgcggcagtattagatcctttttcatattatgcccacacgtccatccttcgacgtgccgcactgatttgggcttgttttgatagtagcagccagcatggcttaaggtgcaacgcgcagttcactgctactctacgatatcgctgtcgcggttctggcgtccgtgactcagaaaacaatcatcgtcattcagt

SEQ ID NO: 2526 - DNA, 901 bp, Unknown
  Description of Unknown: unclassified Caliciviridae sequence
cgatatggcatacgtaaattctttactcttatttttcctatccctccacaagatggctcacgagcttatcgtgtggagtctctttggggtacgggcgcgggttagccgcgccccaactcccctctttatttcagttaggtcccccacttcccggtggcctggctgtgccacctatacacctggcaccacttttgtggtctcgctgggtgaaggccccattggccgtctggtcacagcacggcccaacctagtacccacgaacgcacccaactgagcgtcgcggcgtcatgaggcgggcggagcacccccctggtaacagggtcctcccgggccacaagccacgtgggcagggcgaaggtgaaggaagggtcccccgacccaacctcaagcctgaacccgcgttcaccctcatgatcaggcaaacccagcctggcggttgtttgttagtattggcgaaaagctggcaccgactgttcccaagaccacccaatggcaagggggctggtgagtagatgccctgcaggtaccctttcggatctgagcaggggcccttgactataccgttccggtaaacagggggtaagaaccatgaaagcgcagcccccacaacgggttcgtccaagggaggggtacccaccccgacctcacgacacccgtcatttcctttttctttttcctcttgtttatggtgacaccaatggtttttgagtctctggcgacttttgtttgtgtttggctcatcttctttttccactcaattcgcctgggcgcacaactcacaaccatttttggctttttgattcgctatttgattggcgtttttctttggctttgtttggagtgcgtggactttagaccctggtttctttatactgactctgcatggtccagatagaatatc

SEQ ID NO: 2527 - DNA, 903 bp, Unknown
  Description of Unknown: unclassified RNA viruses ShiM-2016 sequence
ggactctatataggtttcacaacctatatagagttccatttgattagatattgtccgcttagcaccggaccatgcttttcttaattttattgaatacttacattctgaataagtatagtagtctcctctcaggttattactataccctgtttggagtgtctactttattcctaataagtttcaccccttattagttatgtttaagttttagtgtctataagcaccttggtattaggttctttgaccctattaccaatgagtagcttacctaagtatacgtttttcgaaccgtataaattgcttaatgtattcattattatttattttatctcgttgataaagaattatcaaaaataagagagtttgctaaacttcttaaatcgtctacaaggcgcagtttattttatttctctgttaaaaatattaaccaattttattattgcttcaacggtaaatttgtacttgattaaaatcaggagtacattacccgtgtttagcttacgatttacgaatttaattaaattggaaatttgattgtaatgatttagatttgacatttcaattgcttagagaaatcccactttattaataagtttcatttacgataaatgcactcgcaaaggacgagtaaagcgcattttagatgtataactgttattgaagaacaattggttctctggattttgattaatgcgacgtacagcatgttataaatcccaatactctttaaagtacccttagcttcagcacgtaccagcgtgtagggagttgcttcccgtgattcatataaggctatgctttgagatgaggcatttagattgatagtttcaactttttatttatttttgtgattgttatttgttagcttttatagttactgatattaaccctttctttttaatc

SEQ ID NO: 2528 - DNA, 905 bp, Unknown
  Description of Unknown: unclassified Iflavirus sequence
cgcgggtttatcccgcgcagcgttgtagagcataatttcactaatatttcaaagtgcatgtctattgtaaattatttgtgttagttcagtttgtatgttcctaaaggttcgatacttgttcgtaatacagagatgtttcctttgatggcatgtatttgaatattagctttgtatgtttacgtcatagttttaaaataaattattttgttagttattgtatatattatatcattgtatagtattaataaaatataatactcggtactgaccggggctatatctaacgacttattattttcacatcatgtgttttcgtagtcggcctctatataattcctttcagtgggtattagtaactacgacaccggcataatcacccccggtggcaacaagcacctctcatgtgtttataataagaacgatttatagtgtaaaaataataattttaaggcaagactaatttctattgcaaatgtctatgagtagatgaaacatagtgaagaagtaagtgtgttaaaatagggacccctctaagtggctaaaaccaccgcctactactttttcacgtattatgacataatcgaaaatgaccgctttgtgtagaaagttggtgaccctcattctgtcatggaggtgaggttaatccggctgagtttatctcaaaacctcgatgacatgtgtatccatggatttcgggaacatatctctaagatatggtcggacttctgaaccctaaatttacggacgttttagtaggaagaataaaacgtgtccatttcttattcattttcttttatggtgacaatttattgagtattaacattattttgtttgtttgattctatcacttttacagtcttgtgtattctttccactttattttgaatttattaaatctttaaaaa

SEQ ID NO: 2529 - DNA, 906 bp, Unknown
  Description of Unknown: unclassified RNA viruses ShiM-2016 sequence
tctgtagattcgttcttatgaacgaatctacgcatatgcttgttttggctgcaaaaaacagccacttcgagaagtcgaagccatacatttagtaaatcgccgcactaccgtagcggataaatgatggtggaaaccatcacgaagttacgaatgtatgacaacgcgaagttatttccgtaggagcgctcactccgaatataaaatgagcaacacgtggaaaggaaaaaccacgataaaacaaaccggcaaaccatttgcctatatgtaatttgtctatttgcttttgcaaagagtaaccagggttttaacccactagtgtacaataagtttaaatcgaaagatacctctcgcaaaaacactagcttttataaagaaaacataaaacaaataaaaattatcgttattatgctatctgtatgctgaggtcacagctttacaaaagacctattaggtgatctattcaccttgataggagttaagacactcctccaacaacagtcatcatttagtccgtggctacttagagccacaaccaaacaaaccggagtggaaccggttgacacagccttgtgtgcttttatagcaccttggcactcaccttgtgagtgtgtcaaacctttagagtctcatggatataatacctgagaattacataggacacaaggaattagacgcgaaagtccacctcagagtggtagacgccccttagtttgttcctcctgttgaagacaacctttgacattactttgactagacaattaggtcccgatgaatatagagtgattagactcttgacataggaaagcctctgattgttgaacccttgtaatggataaggaagttggaaatttgagtgattcttggagaaccggtaaaaatagccgggcccttgacttgtaaatcaac

SEQ ID NO: 2530 - DNA, 908 bp, Unknown
  Description of Unknown: Riboviria sp. isolate nut157pic1nc genomic sequence.1 sequence
ccgtgggacttttcagacccgagctcaatcaactcgccatgatgcctgcttgcactattcattctacatatggcccgcttctggttttgactaaaaagccaatactgagctgcgtcaattccgataaaccgaactaaatcaatttatcagcacttcgttccagattctgtagggtagaagttacaagactacttcacctttcctagtggatagcacataagaaagtaaacatgcgttgatttgtttttgtgtttgctatattgcttcataggtaaataagagaagaatgggttcaattcaaacaaaagcatgctcgtgagtgaatcgaagagccgtgttctaatattatttagagctagacagcaatatcgtaaacacaaaaacaaatcaacgcatgtttactttcttatgtgctatccactaggaaaggtgaagtagtcttgtaacttctaccctacagaatctggaacgaagtgctgataaattgatttagttcggtttatcggaattgacgcagctcagtattggctttttagtcaaaaccagaagcgggccatatgtagaatgaatagtgcaagcaggcatcatggcgagttgattgagctcgggtctgaaaagtcccacgggtattcaggtgcaggttctcttgaaaggttttacttctttgaagtaaaataagacaccgagaggtgtgtcctggactatgctggttaccttagtggatatggcttgatgaactgagataagcaaacattcgtgtttgttgcttgagcctttgattgatgtatcgattttagtagatggtttgatgaaactcctactgcgagatatattttaacccttttatgaaccgacgtggaatttggtaagaagaaagggcgaacgatggctttttattttctctcatt

SEQ ID NO: 2531 - DNA, 909 bp, Unknown
  Description of Unknown: unclassified Picornavirales sequence
cgtatcccttatgggatacggaccttttgttcatgtcgatttataatcagcactaaatacgtttagtaacgccattgtaataggacgcttgtcgactattatatataagagaattattacgcgtatcgtagtgtgaacatttcataacgccattgtacgtatcgtacgtttcaaaaccgcttagatttgttgtcgtacgtgcgtatatataagagaattatgccgtgttctggttatttattgatgtgttcatcaaaaacttttgataaaacacccattttatttcatttgtagatatttcatcattttagcttgtaaatatttaggtaattatattttgaagtgaatattatctgccagggcagcactgatatccaattatctgacctgacagcactgttattcatagatatttaataaaatgagtattatttgcctagacagcttatatctgcctagacaacactgtcactcaccaaaaacattttataaaatagaaaatggcgatctttgcatcttgttgcaattaagccaccaaaaatatatttatttgattaatgacaatatgtagccttttatcatttggcagatggatgaaggattactcacttgttgagcgtaccaattccacccatttgactataataaattagcgtatcatgttatcacccttattgttgttaataacctaggagtccagactcatatcacgggttagatgagataaaactggttactgcgtgtcttgcatagggctgcagcgaaaaatttctatgcacaagtattggatcttgtaaaaattcacgctttgacttttgagcgatatcacggtcacccataaattttcaattgtacaacctgcccacgagagttaacgttattttgtgtttattatacgattttattaca

SEQ ID NO: 2532 - DNA, 910 bp, Unknown
  Description of Unknown: unclassified Picornavirales sequence
aatcctagggggcccctattttaagggccccctagatcgcgtgtcgtacgtcttacgacttttcatttattattttatttgaagaatttcctataccgcccttcctggcggtttcaacatcatatgtaatatatttttgtcttaaatttagttttttgatattacatatccccgttattgctcatgtgtgtttctcttgaagattcacgtatttcgaaacaatttagttgttattctattgtcctggagcaatatcgtattcagcaatgcgtttagattatgccaaatcctttggcgataacaaactcagagcacctgtcgcatagacaggccccccattccatgatatcatatcatgttcggataattagaagttccgaacctctagcttttattatgagctgcttaaatattcataattaacccaccccatgcagagtagactgtccaaacatttcgttattcaagactttttatagctcgataaattgtcctctgactctcaatcttatgcgctagaaccgaaatcttagcttagttctgatcatcctatatttgatctgatgactataatagttagactcgaacctcgcttagtctttaaagaagaggtaaccgtgtattatttttaatcttgctttgctagcagattgcttatactacccacggtaatattaggattgcaaggccacattagtgcctcctgtttattacccggtatttcaaaaccacggtctgaccgaaacttgttagtagtacttgcagaaatcagcaacatgaatctgtaagtggttatgctacaggatctttcattaggtccgcaaaactttcttaaggtttcaattcccagcgtcctttcgtcttagttttatactacttcactggatactaaaacagttttaccttaacc

SEQ ID NO: 2533 - DNA, 911 bp, Unknown
  Description of Unknown: unclassified RNA viruses ShiM-2016 sequence
cttgctatgggtcaaaccatagcaagttatactccgaagcagataagcctctcgggagttagtattgaacgattgtccagtgtgacgatttcgaattttatagatgtcctattggagattttctccagtcgaacttactagatattttatttcgtcatatttgggttttcttttagtatatattgtgttaaatcaaacccccccccatttttgagggaagtctttctacgtttttagactagccagcaacaattttgtcactggtgaaccaaaacgacggtatgacaggtttgacatcctgttgagtccgtgcctttttaaggaattgaacgtagagttctcaaaattacatttactgtggtttcaactgaaaagctctgtaagcagtaaaatgtgatttttgatagtgtttataagtaaaatattacttggtttagccgagtcctaggcgaaggtctgtgattagttgacctctatgcgcgacttacgagttgtgtttaagtaacaaggcgtcataggcttagccgcgcttatttgatagacgtgacgaccatctcgttatgttcatatttgtagatctgaagagtcatatcagactgattatttgatcaatcggtgtgcttacgctcaatatatgccctaagggagcaatctctccgagtcttacgagtccgttgagtgagagtgttatacaccaaatattgtgataatgtcatgagattatctactctaaatcttgtgttaaatatgaaccacctcttgattatttgtggttaaaataggcgctttactaaaagtagtaatttgaacagacacatgaaaagtggttttggtgattgccataagagcaaaattttcacccatctaggccgatgtaaaccttcccgtgtggaccgcgtgcggaacggggt

SEQ ID NO: 2534 - DNA, 913 bp, Unknown
  Description of Unknown: unclassified Picornavirales sequence
cacctgacgcctgtctcttatacacagcgtaaatcattaaggtgcaattaatcaatagttgcacaagaaatcctgggaggtgactcccaggatttcttgtgcaactattgattaattgcaccttaatgatttacgcctacttggtgttgacacggctttttatttcacgccgacttttttgcgaaacgcatagacgccgcattcttgtcgacacggacttactaagcacgctgactatatgtagacacggatgatttttgtttagatctgactactggaaagacagttgactcaaggaaagacttgaaaaaccccacattaccatacttaattattgtataagtggttttagtcgctgacgtaaccactacctctggattagttttagtcgttgacgtaactattctcctaggttaagtatttcaagaatatcaatcttggtacttttatactttaatttatttatcgataatacattagggtgttgttctttaagagcagcccgaccataagacgaaataggacacttggatatttattaccggtacttctaacttcttattgaggtaaggttttcggaccctcactttctaagatgcattagtacttgttgtaggtacccctgttatcagcctatgcccccgcaagaatcatacaaattcttttgaatacgatttggtttgacgacgaggcgcactatgactctataccgttaagtaggagagggacatttctatattatacttaggttgttaccatctctcttggcatatcggcctatgccagttatagtgtttgtaagcagtacagcgtaagtctgcaagaacttcgtaggagtatacctccgaacctccggttaaaggcgcgcacgataataccggttgcataaaaactgagcgcacaatgtatcaca

SEQ ID NO: 2535 - DNA, 913 bp, Unknown
  Description of Unknown: unclassified RNA viruses ShiM-2016 sequence
gcccatacacgcattcacgcagtacatagcgtcttggcggctgcgttgggtggcaggacagcctacccgttactactcagaggattcagagagtaccaagacacttacattggcttgtgcgagccatgtatgtacatagtagcacgcgacagatccagcaagaattgaagaatgttccactataagtggattagatgtacccagcaaagtccttgataatgctggagtcctgtttgctgatgaggcgagcatatgcgcggtggggcctggtggctctgagtcctcgtttttgcttgccgactccggtttgcaagatttgaagagtttcttttctcgaccagtcttgtggagtaggtccactttgagcacgaccccggctgtgcttacaacccacattttgacgtggacggagttgaacaatttgactccatcttggtccactaggctgcagggtgtcaggggtattcgtggcactttggtgtttaccgtggaacacaacgctaatccttttcaacagggattgctggttgcctcgtttcagtatggggacgaccagtataggcgggggttacggccatcattgtgtacgcagttgcctcatgttaggttagacattgcgcataacacttcagcatcactcaagattcctttcaggtcagagtttgagtatattggaagcgcctttagtgaagttaaccatgtttatggtactttcgctttgactcaggtgctgccaactccctctttgcccaattcatccttacctgtttttaaggtgtatgctcattgggaggatcttgaggtgtttggtagagtgccgctcaatggcaccacatttgtggttcctcagtccggcgccaatgtcaagccgcgcggattgactccttctgatagggagttagaggataatggc

SEQ ID NO: 2536 - DNA, 916 bp, Unknown
  Description of Unknown: unclassified Flaviviridae sequence
caggaagttagttattttctgtgtgtattaccacgtgctaggtaacaatttttctattgttgttatcggtatatttgtatttagtttttagtttacattatatgtttagctaagtagcttttaataaatgtctgggataggaaatacctcttccaaaagtagcactaatcagttaggtagaaatttgcttaaacaaacagtgtataatagttcacttctctcttgctattatagacagccagtggtcatttacaatactgaatcgacttgcgaccgaaactttacaggagtatttggcaatatattttatgacattacccctctaaaggaaggcggagtcaggttatcatatcttgaccctttacttgctaggacttacaacgacccgaaaactctacagcaaactcttgtagatcagggtatcaccggaactcatttggttgggaaatcggtggtatatgtttgtgagcaggacccacaaataccagttcctgcttctcctccaggttggttttactctaggtagaccatcctgtagagtcacagacaatcgttgttattgtctttacggtagggtttggattgagaaacctagttattgtgaaggacttgctgattataacagtaagattgtaaaagcagtattatctaccgatctggaaccagatatgaatgcctctcaggcaatttctaagtgtttcggttccccaaagttggagtttgacttcacaaggtggacgccggaatacaaagaaactttatatttgtgttccatcctcttcatatactcattttttatgagtagaaatctaggaatttctggtctgggtttagccgttggcctctgtaccaaagccctagatataaagaaaacggctttaattgttctggctataaccgggtttagaacaaaaca

SEQ ID NO: 2537 - DNA, 916 bp, Unknown
  Description of Unknown: unclassified RNA viruses ShiM-2016 sequence
ggacgacaccgcgcggagtttcagttctaattgctgggtttgcccccagcaggctttgttccttgcagatatttctgcctagcttgcagttcccgggcaaaacccggataaaactgtattgttctaggatgaaattactgtattgtgatacattgtttattgaattgaaatggagttagctgctccttttttaatgcgtagcccctaggttgactacgtcgtaacaaaaccgaaccccccccttgtgcattggggggcttcggcccctcatgtgtgttttgtatattattgttcccaatgccgtttttgtggccttgtgccgcaggaattgtattcctgtatattattatttaacttaaaaaccgccttgcggagaaaaatttaaattttgggaggaaacatgtattagcgagaaaaatttatattgtatttttatttaactcaaaaatacgttaatacattggtacacacacattgtcaactaaccaccatcgtagggccgcccctacttgtgatggtgtgtgaaatttcagtgcttgaatgactgagagaacctgtaattgtttggttcttaactttgtgtggacagatctcttctaacgccgatgctttaaaagcagcagaggttactaagcggagatacttaattgatctgacagtctcagatgagagactagctggctggaaccagcgaagctaagatcagcctcggaggaaagaggtgaagaggacctaagagggtctagcagatggagtattagcatcgctaatgcgtagtgtagaattgcgaatcttaaatcaatccccccccttcaggtaacgaaggatcaggaagcattatctcattttgctttactgctgctacaaaaagtcagattattattatttgccttatctagtttgtcagtcccccatc

SEQ ID NO: 2538 - DNA, 916 bp, Unknown
  Description of Unknown: unclassified RNA viruses ShiM-2016 sequence
gggcgagggtaattttgggtgtacgcttccagcatgccaccaatgtctcataaagcaataaagagaggcagggtttgtggtgtgttgcaatgagcggcccattgcatgtcagcattttgctgagtctttttccgcggtccgtgccgcgatgaaggggagccaccggaggataatgccgtgtggtgagaagaccgctcgtcgactataagggggaatttaccgtctcgcccagtgctgtcgtcgaaagccttgatccagaggttaggtcatccttattcttcaatcccgaccctgtctgcagcaggagggttagagcctggaggagcccagcactgctcctgaggtgtggctttgcgtgtgcgtcgatatgggtccgacgtgggtttgccagcccgaaacacgtaccccgagtcctccctggatatggcacctcgagcgcgagaccattttggcacgcgagtaagaggaacgtcgaagctggttgtgcacgcgtaatcgtgcacagttggttaggggaccagaggtgatgactacgctcccgcaggcagcgtgcgacaacgctgcggtgacgaatgagagacgaggtgaaccaagggctgcgagctccgagccggcccaagtggctttgggaatccttgtcctgtgaggttactctcatgtcgaagatcccgctttcgcgggtgaccgccctcaagtcaccacccatgtacagcatctgcagcgtcgcgtttccactttttgtctaccacggattgtagagtggttgcgcgatggtaccacggaacaaaaatcaaataaacaattgaaaacctaaatgcaaagattcattgttttgtttcggcgcaggcgatccccgcctgagacggagtcactttgtgacagtttttgtttgttttaaagcgcgtcggttttgctc

SEQ ID NO: 2539 - DNA, 922 bp, Unknown
  Description of Unknown: UNVERIFIED: Potato virus S isolate 18-1113-2, complete genome.2 sequence
gttcacaggtaaaagctcgaataaactgtttcacagagagaatgccgcctaaaccagatccttctagttcaggggaggtgccacaagctgtgccacctgcaccacctccgcgcaattcggaagggcacagatccgcgcaatcggaggcgccagggcaaaatgaagaagccatgctggaacaaaggctcgttcgattgattgagcttatggctaaaaagaggcacaactcgacattgagtaacatctcctttgagataggtaggcccagtttggaaccaacacccgagatgagaaggaatccggaaaatccatactctcgattctcaattgacgagctgttcaaaatggaaatccggtcggtgtcgaacaacatggccaatactgaacaaatggcacagatcactgcagatattgccgggctcggtgttcccactgagcatgttgctggcgtcatactgaaggtcgtgatcatgtgcgcaagcgtgagcagttctgtctacctagaccctgcaggaactgttgaattccccactggagcagtccctttggactccataattgcaatcatgaaaaatcgtgctggactgaggaaggtgtgcaggctgtatgccccggtcgtctggaattacatgctcgttcagaacaggcctccttcggactggcaggcaatggggtttcaatggaatgcacgcttcgccgcttttgacacatttgattatgtgaccaacggcgccgcgatccagcctgtcgaggggctaatccgtaggcccacgcctgaggagacgatagctcataacgctcacaagagcatggcaattgacaagtctaacagaaatgaaaggctggccaacaccaacgttgaatacaccgggggcatgctcggtgctgagatcgtgcgtaaccatcggaatgcagcaaacca

SEQ ID NO: 2540 - DNA, 922 bp, Unknown
  Description of Unknown: unclassified Ampelovirus sequence
gtattgtcctagtaggtatcgaacccgacaatcccaatcctaccattgctttccatttcagatctgaaatccactcttcttctctgctctcagctctcgggcatctcttctcgctttccttcctcgttaagacgcgctgaactacagttcgtctgtctttcctcatctcaaccgcttcttttcctttttctctcgtgtcttaactacgctctcctctagctcattttctccctttactttttcgtttcctttctatcaggggcgaaggtttttcttcatctcttaacctgtcttttcctcattctgctttttcctttctttctcgtcttctttttgtgtcgtaatacttcttcgcatactctcttccgctttcatttcctttcatcactctttctttttggttttctcatctcttctctttctactgcttttctttcttattcctttcttatctctctttacctttgtttcttctctttgttttacatatctctttctttttattttccttatttcgttttgtttcagcgggttttttcttcttcttttctctcgcactatccactgtttttccttatttcttcacttttctaactctcttttctacacgttttccaccgtctatttttatcattttcctttttgttcgtctaggttctcttcttctcttacccaggccttttccgcatataactaacatttcctttctctaaggatcttgggttttgtttaactgttgttacgttatcatctttgtgttcggttttcctttctttaattttagtttacctctttttcttcctacttacttcttttcttttattttaactttccttttaatttttctctcttgcttagcttttctttcttttcgtcgcctttatcttttactcttttcctttcattactttcaacccaaaat

SEQ ID NO: 2541 - DNA, 922 bp, Unknown
  Description of Unknown: unclassified Riboviria sequence
cctcaaggcacgcacgcttattaacttatcagattatatggacgattatcactagtattgataccgctaaaccaaccctctcttcttttaagattggaggatgctttagtaggctctctactactgtttagtctaaatatacgctggtatgacctttatatatttaaatatccttttataattaagttaacaaggtggtaccttaagtagcaccattaggttaccctatagtcgtaagtataggttaagaattttcttcttaaattatatttaattttagttgtagatacccaaaaaaaataataaaattataaaaggctttgccacaaaaaaaattacatttagatttttgtttatttttgtatgcatattttttgtttgttcttactaatagaattaagaatcaaacaataaagtagcgctatattttggccgtttctgtaacagattccgcccgagtatagtatagtggttatgagtcggagttccactataaaccaactcaaagatcgcttagcaccggtaaagtgagcggggagtgaacagcgaataaagtagctgtaggcaaccttggctcggcctgcacgtacatgtctatgttgtaggtagtctaaccaactctattacccgtggtttgcatcggaccctctttggatgtttctaggaccccttacaggtattaaagtactgacaatgagagtaacactaaacactgttagacgtaggcgcggttggtttagcagcaggaagtagtaaacctgttgcgtcgcgctcaattgaggcgatccgtaattgctggtccccgttagattttatcgtagtcgaaatctaactatagtgtttattgtgaaatcgtgaggaaatttgtcttgtaagtagaaaacattcaccttcttttttctctttttatggttaaatatat

SEQ ID NO: 2542 - DNA, 926 bp, Unknown
  Description of Unknown: unclassified Dianthovirus sequence
gaacaaacgttttaccggtttgtaaattggaattctcgaattcgccagtcgccttcttcgtatcaaggatctggaatttgaacggtatctttatcattttaatttctacttttcgtaccagtcatgggttttgtcaacttttcgctttttgatgtggacaaattgatggtatgggtgagcaaattcaatccaggcaagatattgtccgctatttgcaacttgggtatagactgctggaaccgttttcgcaaatggtacttcggtctcaactttgatgcacatatgtgggctgtcgatgcctttatgccactcatgccacattacacggagcagatggaacgcgtagtcggcgacctctgcagcgaaaccctagaatccaaattagaagactgtctggaattggacacttccgtcaaccagtattttgacgaagaagtgtacaaagaggatgacaagggcgtgatgaaactccaaaggagtgctgccaggaagcacattaaacgtgtgcgaccaggtatgatgacagcagccataaaagctgttgagacgaggatcagaaaccgccatgccattttcggagataacatgggattgatagacgaagctgcagttagagcaactgccagtgatatctgtggagagttcaaaataaatgaacaccacacgaggacattggtatacaccgcagcatatctttccatgacacctgaccagaagtccctagacagtgtcaagctcgcctataatccaaagagtcaagccagaaggactttagtgacagccgttcgtgagaacaaagctgttgctgggttcaaatcccttgaggatttttaggcggtccactcagctttccggttgaagatgccccatatcctattttaggcatcccggaaatcagggtagctgagaagcgggccagtagagtc

SEQ ID NO: 2543 - DNA, 928 bp, Unknown
  Description of Unknown: unclassified Sopolycivirus sequence
tgagaaatacaacaaattttgtacaagctagtttaactattcaaattacacttgctatgactgtgatgcgaaagttaaatatttctaagatttacgtatatgacaattcacacttctttgacaatgcaacgacacacattacagacaacgtacgatactctaaaagacaggaaaattacgctgtcctttctaaagccgcccaacaaactttaacgaaagaaaactatcgatctcatacgaatcatactcttctttcagatcatataggtttatatattacattgtaagtatggatactttgatcgcagtttgcggattgttatccattaggttaggaacagtaagcccattgctgtggttcagtaatgcgtttcatctcaacaatcccgtaaggtttgatggttgagaacctctgccttggcgagctttggtctattagttctagtgcaattgctgcagtacagtcagggacccagagagtaatcctctggtgttctaaagtcctgaagttgagaaggactagcaatccggatcaaccagagtggaaccctttaaacgtggacgccaccccagagagctccgtttatcgtgtcacctgcagtaatgaatggaatgaatgatagaagcgacccacctagggacccctctaggatagtcatggtatgtcatgaaagactccatcactgggttagaacgatctgttcaactggctttggaaagcttggcttgagcttatctagtctagggccagtataaaatataagccggcttcgtactgggacacacaagccgttagacttctttttgctagtctgtgagtacccaatttttacctttaaatttatgctgtcttattgctatctttgtgctgcctttgctactttactgctgttatttgtgccaaactactgctagaataatcgttgct

SEQ ID NO: 2544 - DNA, 930 bp, Unknown
  Description of Unknown: unclassified Iflavirus sequence
gtacgtatttcgtacgtacagatccttgtaggagtttcaataattgttaatttcagagttagggatattcccgccgctagtattcacaatgaatctagtcgccagtttatctaaacctttggggtttctcagttatctttcttcttcatttccttttccaggatctcacaaaattcaatttgttaacttcaattttaattttcaatttgagattttaatctccaaaatttcttctaaattatgggttttctttcccgtgtaattttcaatgttgttgtgttttgaaaatcagaaaatcaaacaaagatgtgaatgtgtgtgtgaatgtgaacaagtcgagtgattctcgacagcgtatttctgacgtttaatacttatattaagattagttgaaaaacagtcgtcctgagtagcagtaagagcactagggccattttcaaaggcttaagagatgaactcctgtttctaatcaattctatgggagacatgctcttaagttgactggctaattgaaattgagtattttagtttggattgtgtggtctagttggacagacccctaagggaagtgccagtacctagaaattcgtaaggctatctttgtaccagctatatcgattaataaccggtatagttacgtctgggacccctagagggtttgggatcggcgtaccatgcagttttagtggcttcggcacttacttaaagtatgtgggaaccccatggaacttaggtagagcaagcgcattaattttgcgtagtccaatatagggacgtctattcctcctagagggaataggtagagagtcaacaacgtcatagacgaggtaattccgccataatatagtctggacagctagaatatggaagggcatctctacatgtagggatgggctctcaaaaccgatccggtgacgcaaggctgcctta

SEQ ID NO: 2545 - DNA, 935 bp, Unknown
  Description of Unknown: unclassified Riboviria sequence
taaaattttattcgcgatgaaacgcctccttcctgatgcacatcaggatacggagaagatctctgagattgttagagataagaatacaacattgtacggagctattagcgaggttagtaacactgacgccctacaggttgatctctcagagttccgagctcttctccgtcgctttaatgaagacgttgaagagtttcggggtgcgcaaaagttcttccagaccactttggattctttaggagggactgtagatcgcctgaatggttcttttgtggacctcaatgcttccttaaatgttgtaaaagaagatgtcaaacagctagatatagctgttgatgacaattcaaaacaaatccttgttttgatagacgagaataaaacatatgagtctaagttggaagctcttgataaaagagtttctaaacttgaagattctaatgtctcgataaatttggggatttaatcatgtttgattttcttaaaccatattttaaacccccgcctcgtaaggttttctctcgccctatggcccgtgctgccaaggatgagagtatttctgatgttataaaagaacgtaaccttactgagtatcaagctattgaacaagtgttctctgaacgcttatcatcgatagagaccttctccccgtccagacgatttcttcctctacacgacgaccagaaatataggttccatagcctaaaacttgagcgggattatgagtatagtgttatcaaaggtgttctctttgatcaggtctttttcggtacaacaattaagcttgacaacttctctgaagttattatttacccttccgatccagaagttgcaccatctgatcctaaatatttggatacagtgattattatcctggtgaaggtgaatggatctgacactccggcatccggagtgtataaaatttacagtctaatata

SEQ ID NO: 2546 - DNA, 936 bp, Unknown
  Description of Unknown: unclassified Iflavirus sequence
cgattgtatcagagttttcaaattaattaatgagtctcttaagtgagttttatatttcttgagtttcatgttccgaaaaggttcgatgattatactcttggataatatttaatgacatttttggattggctcattattaagtcttttctctgtacttagttaaggtttatttgcttttaaattatatatattatacaacttatatgttttaaaaattgaaatactcggttcagaccggggctatatctaacaacttgtaataaagaatttacctattttcactatcggcctctcttattagtcttttagtagcatagagaaatagtgacatgagcataatcacccctcatggcaacaagtagctctttattttctattacaagtatgatttatagtgtataaaaattaattttaaggcaaggcaacataatattgtagatgtctatgagtagataaaacgtagttggaatgtgtgtgcgataaaatggggacccctccaactggctaacaccagcgcctactacatttcaacatattgcgacataatcgaaaatgaccgctctatgtgttatggttgtgaccactattctgatttattttggaggtagtgttaatccggctgagtttatctcaaaacctcgatgacaagtgtatccttggacttcgggcatatatctctaagatatagtcggacttctgaaccgtaaatttgcggaggctttaagtacgaagaataagcctgtccattttcttttttctttttcttatggttacaatctcagaatatactaaagcgttttcattgtttattgttatttcaattattctcaattgcaatcctattacccctttgttttatttttattccaaccttataattcttttgctaattgtttctcatactgattttaaatttgtatcaaaatatttttgaag

SEQ ID NO: 2547 - DNA, 942 bp, Unknown
  Description of Unknown: unclassified RNA viruses ShiM-2016 sequence
tagttgatgtttaaacatcaactatacgcgatatatggagcttggtatgctcctaccaatttaaaactagtaccaaataagggctgaaacaatgctacggtgcttattggaacaatactaggtaattactactacttgctgaaacgtaagatacggtgagtactgtaattttcactttggtttcaccaaacttgggtaacaccataaccttcagtatgaattttgtatgaatgtatgaatgaatattgagtacggtataccgaaagagactagaaagttgcataaattcttgcaatttggtgggattatgacacgaccaccacccttgagtttacgaaccgaggctttgtttgaaatctctctaggtattactggctgtgggtatatgaacttataagtaacagcatatggaactcttagtacgcttgggtagtatgaggagccgtggggaataaacttggtccacagggagtagcccgaacgctgacctgacgataggctgctatgtccgactataaacctattcaattaggggtggcacacaccatgcactagtgcgggacaggaacggttgacaataaggaggccttctctaagcccttacgggggtgaggaagcggaacttcagaacagcttgcggaaaagaaggaaatatggtctgagaaagtaacttatatgcgacgccggcccttctagttaaagggaattgcctatggacgagatagattaggtaattaccatcggcggctgggtgcaccgatacatagtacggagtgcgcttcacagtggacttatctacacagtggagtggatcttagcttagtggacagacagacgtactaagcgacctagatctcccaaagataacgactttatgggcgtagtccggtcgtgcaggggttaccccgcggacaacgcaaattttcttccaaactttcactt

SEQ ID NO: 2548 - DNA, 945 bp, Unknown
  Description of Unknown: unclassified dsRNA viruses sequence
gcgaccgttctttagatctttcgttcggacccccccagcccctggcggggcgtcaactttccacacgtcttagtttgctaagcggaccagccacaccgacacaaagagcttcggctctgggaaacagggcagactaccgcgatgtgcttacgatgatttgtggttagagcgcgcctcttgctaattctgaggtggtgccgcgcgagctttaggcccttttgttcggaactccaaaaataacttggctttccgctcagccctgagacaatagggttatccaacgacttggctattaatataacatcctccccactaacgaatcgcccttacactaacttagggtctttccgggggaaaggaacccgtaccgccatatttcaaaacacatggcttttcatggtccggggtcgttggagtaggtatgtgtgttagcggcagtgagtatatgaagcggttcatcgcggatttcctgctgagcaccctacgcccgaatttttaggaagaatggctcttaagaactaggtagccattctgcccttaaaatttgagggtgtggttatacgcgtccagcatgacgttaaaaggcacacttcgccttaggacggcgaaaaactcagctctgtagatctagcccgtgatccttctgcagtatcaacatatcgggaataagcatcctgtcgagttctggaaagcttgaactcagcggtggggtaaccaaggtacgaacttgggtgtgaagccattcaagacgtggatggtggagctaacgtattagtggatgtcatggtacggggtataggtccgggattaaccacccgggtgaacactaactcgccactacgaacgtgccagccttcgggttggtggacagactgacactcaccgcgccaagtcccggctaagggcggcgcagcaaacagtcggcgtgggaattattaccgcgtg

SEQ ID NO: 2549 - DNA, 945 bp, Unknown
  Description of Unknown: unclassified Riboviria sequence
ggtcaattaaggtgacgaagatttcgtcattacacgaactgccggcgccgggaccgaatgtccaagtcttgtgcttcaaacagtccgaaaagaaggagttgaagcatttgaacgcagtaactatccatgaattttagggtcaggaaagtgcggtcgtctggatcgtgagactatcatcgctacctaacgaacagatctgcaagagtgaagaacatcaggtggtggggattacaagacataagaaagagttaatatactacacggtcgtagaagacgatctcgcaagattattaacccaccacatagacgaaaccacactcaactccgccgttgggtcgttgaaaggaggaatgcttgaaattcagagagacgaagctattcttcaatcatgggactgtcacgatgtctctttcagagcggccataatcgattgcggggaagaggacctcccgtcgacaaaaatttcggaacccttcaaggaaccactcgcttgtttcaagcccggtcacgttactgcagacatattttgacgatctttttcctggaagatcagctgagatccatgatttcgaccaatacctttgcgaaaattccactaaatcatatgttttggaaaatgccagttttgggggaaaaggttgggtacctagggcacagttatatgataagaaaaggccctctctgttgacatccattcaatcaaaaagggaaaattccctaaatgaggtcttacttgcctttcaaaagcgcaacggcgcggtaccggaattggctctggattccgctattgaccaagaagcgagtgttttggtaaaaaactttgtaaacacagcggtggacaagtcaagattggatttgctgagacagtttcgagaggaccaaactgtgctaaattcggcgcagattcgagaatggttggactcacaaccacccggagtcgaaaac

SEQ ID NO: 2550 - DNA, 946 bp, Unknown
  Description of Unknown: unclassified Hepeviridae sequence
gaccatagcccatgggagagttggacaagggatatccgcatggtcaaaaacaactgtggctctgtatggcccgtggttccgggcgattgagaaggctattgtggatcgactgccagacaatgtcttctacgcagacgcccagaaccctgatgtttttaatgcggcagtctcaggtctgacaggctatcaggtctttgagaatgacttctctgagttcgacagcacccaaaataactattcgctgtcgttggaatgtgcccttatgactgaggccggcatgcctgagtggatggtacgcctgtactggctcctccgatcagcctgggtcctgcaggcgccgaaggaggggctcaagggctattggaagaagcattcaggtgagcctggaacactgctgttcaatacggtatggaacatggccatcattgcatactgttatgattttgttggagagtgtgtatatgcttttaaaggagatgattcagttgtttgctgccaacgttacatccggcacggccgtgcagacgtcttgatcactggctgcggtctcaagttgaaggcagcctgttcttacataggtgggtatgccggctccatcgttgcctgcgggtgcggcgttgtgccggatatcatcagatttgccgcccgcctgacggagaagaactggaaaatcgctgataatgatgatggtaagagggcggctgagttaacaacagcagtgaaggatttcctggcaaaactggagaacgtgcatcatctggccataactttgggggcccgctatcacaacaagcctgtcgggctgctagtcaacctcgtcggtgccctcaaaacaatcgccgagggcaaaggccacctgaccaagcagattttaccaatcttgactctattgaaggggtttgaatgaataacatgtctttttgtgtggtatgagtgggtgtgcaga

SEQ ID NO: 2551 - DNA, 946 bp, Unknown
  Description of Unknown: unclassified Riboviria sequence
tacacatagtcaataaagaagaatgggcccccatccttctttattgactatgtgtattattttatgactagctcgtttaaccttccagcggaagctctgtgccagtatttttcatttaggtgcatgttagcatttttcttatttgcccacgtactctgtaattcattaaccgaccagcggtcgctctgttggattatgactgtgcaattttgttccctcttgacaatcttattcttatttgatgacgactttttaggccctcaattcttggattgatattttgttactacccggatattattatgatcttgtatcagaaccacgccgataagctcggataatattatccctggctctgcaatttattatgacgactattgagatgaacactattggactatgacttgacttattatttgttatttgtacgttagaatcaggcaagcttgcctatcctgtttacttgtcgattaatctaggactgaacgttaatacgaactacttatcgagtaggtaacccactaccgaaattgtggctaacccgaaacattaagtagaatttttgtatcgattattaagaactttgattatgaaaccgcactcagtgacgcaagtaatactatgaaagaagaaacggcttttatagtgattaggacgtgaacgcaaaatcgtaatgtttgcctatacattgacgatttgttctgtctgagtagttattacgttatagaattcctaaagtatcttggaaccctcgtattactctcacacttgaggaggtgtgttagtattaaggtaatccattgatatgtgaagaattcgactaacggtgttggtatgttaccggtaaggtttgtactatgatgtacttaagggaccagttaggttaactcttggtgccacggccaagacccgctcaacgcgcataccgcatgaatggaaatatttt

SEQ ID NO: 2552 - DNA, 950 bp, Unknown
  Description of Unknown: unclassified Negevirus sequence
gtgtcattctgacacacatcactcctctgtcacctatgagttttacaacatgacctttgtccctcagtcccttgctctgcgcgaacctcttcgtctctacaacaaggagtttaccgtcttgaagaacctcgttcccgtttccttcttcgagtggttcttccttgtacgttcagacgataaccgatttggtattgtgcccaggatttgtgacgaactttttcgcaactcaaccaggttgccaaagaatgtgcatgttagacgtgagggcaacgagttctgttttgttgaggtcagccacgactcctatacgtgtactcccaaactttacccgaatgttgcaactttgatgatggtccatgactttcctgttgatttcgacgacgtgcctttctcgcagggctcatacgcgtcgaccaacaataaggctatgggcgctgatcagtacctcgccaacaacgtcgcttctaaagtgtatgtcgttgacaaggtgggtgggtcttatatggtcacttatgacccccaagactactctggtccccgcttcattgttcgcagccacgggcatgttcccacggagaaaccgttctgttttgaccttgctacacactacgcgtcgcccattcactctatctttgcacacgtgacgaagttttttcacgaagcgctggtgtatttgttgcagttcctgaaagagatcgccgccgatctcgccctggtcctcttcaaagtcatcagcgaactatttgagattctcatgtcgatcgttccgtacaattcacatttctacactgcagggcttgtgtgtcttttcacgtatttccttttgcgtgacttgctcatctcgtccgttgtgtttttctgtgtgtacagttttaaaatctacactgattctctcatataaatgcttgttgaaactcttctcattttcttcgcgatcctcgcatactgcc

SEQ ID NO: 2553 - DNA, 950 bp, Unknown
  Description of Unknown: unclassified RNA viruses ShiM-2016 sequence
tatgggagcgcttttgcgcttccatatttctattttaaatacatcttcggtactttagggctctcctttaatgttcttgccttgttaattcaccaccattactgcacccctatcttatcagagtgactcggttacttagatgttctacttaaccttgccccttatggcaacaggaaaagttccaaaactgctcgttccgggagattcccatccggtaaaaacccaagaccacactcaacatccggagtgtctaaacccaaggacgaccattgataatatttgtaaaattcatttcaacgtacttattttaaagcatcaagcgtcattatgtcagttgattaattagtttcactgattaattgagataacaaacaacttcctaaatttattttaagtgttttgagttgaagttcacaaatattatgcgatcatattactaatcaccgcctatttccatatcttccgatgaattccgtacaggaatgtaataatttttgttatttgtatttaatttataactttgatctatgctcatcccaccgtttagccattattaggttctgttatgaaactagtaattattgtttgaaaaccagtagttccagcgcgtcgtggcctattgacccccaaacaaagtctttgtctttccctaaaggtttggtcacctataagtctggctctaacatcgagtacagcaagtctgcccaacatttgttgcatctgactctgggggcaacaaatgtggcgggataaagttacaaacctgataacacaggtagctttagcacaaaaccccacattcccacccgagtaatgtcaattttattattttatgcactttataactatgttatggcaaatttattataaaaatgtatttcaactatccaccttcttctttcacctttactgtcgaaactcttttccagtcaagaaaatcttaatgaaaa

SEQ ID NO: 2554 - DNA, 952 bp, Unknown
  Description of Unknown: Beihai weivirus-like virus 21 strain BHZY60867 RNA-dependent RNA1 sequence
gtccgctgccgtgcagtttaattaattcttttcgtgtgagctgcatgagtcggctccccctgtggggggcattttgtggctacggccacacaattacccatcggttgacacagagccggtggggtccgtgcgttacggtgtgtgcttcgacgggcgcacactggacgaaagagtgccgctggcgcacggatgcgagtaccgttccgagcttagagctttgctcggataggggtggcggtggcgagccattttggctgagtgacgtcatcggcccgagccataccccgaaggttgccttatgcctcagtagccgagggtagttcggtgaagagcctggaagccgggtagcgccggcgacggtgagggcaccgctgttaaccctgcgcgtgggttggccccttgggaggggggctgtaaaatggcggttctgttgtgcgagtggtggctcgaaggttctgggacctgctagtccggctctgcggcgttcactgcgtcgcatccgtgaagacgtggggaccgttccggatgttccgttcacgtagcgcgcgtgggtggataatcgccgaggaagccattttggcagaaggcgacgcacaacagacaaaatggactggcgggggttacggcccgcttttacgcgttgcaggaggacgccccctccatctttcgtggctcacacgacctagttttgcacgcccggtatgtttgtgggagtagtgacccgtgacagacccgtcgacttcaagtcggcactcaggaagagactggctcacccgtggttttgagcctgcttccgtaattaactacttaccctaaaacgagccgtgatttctctggtgggggccagagatttccttcaaggtgtatctgtgtcgcactacggctcatcacgttgcgtgtctggctgtctttgtcatactgacgccggatttgtcgtgctttcgttgtgaca

SEQ ID NO: 2555 - DNA, 955 bp, Unknown
  Description of Unknown: unclassified Rhabdoviridae sequence
agtttcctttaaccctatctctccaacctgaacaagcaaacacacacgctccgccaacatagaagacagagagccaagacaagtacaccaacgcaaccagcaacttcttcactttcaacacaaaaggaaaatcaacacggaatgttcctgcgaagcatcattccccccctccgcacacccccaattttgggaaataaaatagctttgatcaatagataatccctcacccgaaatcggaataccgcacaacaccctcgatcccaattccctgcaagctccaagcgatccagtttaagccaaaccacaataaaacccttcaagcgacaaagataaaggaccgtcaaacatagacaaaagttcaccagacccgtcacaaaaccaaagataacgacactccgtatccagccatccagttagaactttatctacaaacagttgtaataattcttatgatctctatggtctcattatccccagaatatgtctctcacaaagcaatgccagaaccacacaactatcacaccaaaaaaacctcggcacaatcaggctcattaaacaaaaaaccaagaatttcgcaaagatccagctccctcgtcaaaactccaaaataaaattagcctggcaagtccacaaaacaccgtcacaaacacatcccagtatatcaccaatatctgcccccacacacgcccctccccaaaaaagacacaccagatgtgataagcaaatccctgtcaattttcggcaaacaagaccccttttgcttctttcacaaccaaaagcaaacaatcggaaaacagcccacaaagcgaacacccatcagcatactccggagttcaataaggaaatttctaaaacagactgtttcatactgcaacagtccaattgaacattacattaccaatttatttgagaggaaaatatataaattgcacaatagacatttaagaaaaaaact

SEQ ID NO: 2556 - DNA, 959 bp, Unknown
  Description of Unknown: unclassified Picornavirales sequence
tggagatccctctatcttgcgagtcactcaagttcctggtcgtgtcgaatatgattggcctggttggagatttggccatccaaatttttcttctacaacatctgaaattttggaaaaaccatttaaagcggctcaagcgttagcaagtggtggtgttcactttgacaaaaatggacacgctcgagtggaaattccatattactctaaattcgaacgcttgtttactcaatcaactaatccgtcgaataaggatgaccctaacgggttccaaaaatctatatctttaacagattctattggtatggtgtatattactgggtcttatcaaatcgatggtacactcacattttatccgcgagtgaccctcgagattaatcaggcgattggagatgatttcgaatttcaatatccgaaagcagtgccttgttttattgtagaatggtagttgttatattatgggttcttggtcttgctctgttattatcatgtatccttactggtataataggttattattttttaagattagtacatagaacatataattatacatgcagaaaaatacaaaaacatacatttagcttaggtgatgaggagatggcgcctatttataagccaactactcatagtgttcttgttccagtgcccttgtcctgacccttagtaccttacccagcatgaacgatctaagactaaccgagtggggtgcgagattaaaacttggtaacaagttctctcactatgaagccggggtctgatttagtagtgtgacaagtgggaacctggtgttcagcgtgctggagtccataacctctcccaatgtaaattctgcgtgaggcattggcaaagttgtgggtggctctggtggtccagtccggagggctagaagtcttcgagtccggagggtatcgtcaccgcccaatcttgtgacgtctttcttttaaatttactctacaatc

SEQ ID NO: 2557 - DNA, 969 bp, Unknown
  Description of Unknown: unclassified Riboviria sequence
ggttaatcccgtgcagcgctctagtagtatttcaaattttgaatcgttacagtgcatttttgttgactaattttgttatctagttcattgtcagttcgatttatcgttcgtgactataatgttcgtagaattttcacctttagtcttcgttaaatgtattgtttgttacaaaattctttgactactaaactttaggttagttatatattatagttaagataatttatatatatattataacgaaatatagtattaataaaatataaaatacaaggtaccgaccttggctatctctaacaactattaatgtaagtgttatgtattttcactgtcggccagtccaagctcttcatgggcgagacaaacagtgacaggagcacaatcatccctcctggcaacaagtacctctcacacttttattaatagaatgattgatagtgtataaataataattttaaggcaagattcagattgtaaataatgtttataagtacatcttatactcctagtaagagtccttaatatatatagacggtatactgggcgtaataatggggacccctccaacctgcaaacacaggacgtaaccagtgacgctagattatgagtataagacgaaagtgaccgcttatttatagtcgtggatgacagaaattctattagatagattttcttaaacgcgttctgatcgtgagaatacttttgcgagttactcatggcggagatcgtaagcagatccagactggttacggtacaatacctaaatgatcttacagtgataggtattacgtgtcttactggcatcgagttcgactgttacgcggatgaagcagcgtagctgaatttttcattttctttcttttatggtgacaagcgatattgaaacattttcgatattttccaagtgattaattgcatctcttatttcatttttaattgtgacttatattatttcaacaatcatcaaca

SEQ ID NO: 2558 - DNA, 970 bp, Unknown
  Description of Unknown: Larsen virus isolate Antarctic83 RNA-dependent RNA polymerase gene,1R sequence
cattttatgaaattacgacagaaggctttatcaagctgggaaaggccaaaggttttggtttttcgcagaacattggtaagccataccatcaatcatatagggatctgtattcaatcgaatggttggatactgtgacctgctatgagtggctgacgactgagttaacccttattaatccgaaggccgcttacgctaaaagtttgggcttaacaaacccatttcttatagtgaatgacctgatcccctggtcctttgtagtaaactactggactggtcacgagaagtggctatcctcactggatgcctttctcggactgaaacgtgagaacgagtgtaaaacgacaaaaatcgtttactacactgagtactcacgttgggataatcggaatgatccgcccactagggaggattatttaggggactacacgaagttcgatagaactgtcgaggagataaaagctcctgggcttacagacagagtgaaggcttggcctttctcttcgcagaaaagggccgtcaacatgtctgtcttaatcgcatcacaatttagaaatctttaattcctaaaaggagtacaattatgcaagctaaaagctttacagttacaggcggatctggtgaactcgaatttgaggttctatgtccagcgggcccaaaaagccctgctgaatttcgccttaagaatgaggagaaatccccactcttagcaccttacctttcagttctggctgacaaagtgaatcgatcttcctcacggaaggtttcaattctcttcgttaagccaattgaacaagaaggacaacgtgtcggtcaaaacgtttttaccgttcaagcaaaacttgatctgcgtagaagcgtcaccgatgcgaaaaaggacgttgaagatctactggctatcataaaccaggacgacttcaaagaaatcctcgcaaaagcaatttcaccaaattaacaaccggagttatttatt

SEQ ID NO: 2559 - DNA, 971 bp, Unknown
  Description of Unknown: unclassified Iflavirus sequence
tctttaactcatcaactgtgacttacatatacgcaagtatccctgtaatttcatcacattgatgttaaaatcatagttaattactgtaagttgaagtatccctctttgaaatactatacaactgagtaaccctgtctatgatcttaggtttaagacttagttttaagaaatttttatttttaataaccaatttgtatgaatgttttcatgtatgatacgctgcaactccaataaggattgtacgtgaatgaatgttttccaaattgtgtgaatgaagcgaagctcaaagaagtagtacgatttattccgaagctttgagaagtagtagcttttgtatgcttgacgtaacgtatgtttgttttattattaatttgtgtgttttagttttaagaagttctcaatttattttcttacttcatttgctccaattatttgtttgagccaatttgaaactgcatagtctttattaagttacaaagtttaatttatgcctaatactgctgattcccagccttagtagatcttgatggcaggcttccaacttgttggtaaaacaagatatcaagatctcttcttctacttttacagagctcagccttacgaagcgatgtgatagtttatacttgtgcctagagcgtaacctctgtactcatagaaatactagttagaacttgtttcttgcgttataacgtattgttgagatatcagagcatcgtgtcgacttgttttctattgcaccgtgagatgtaaaacctggtaaagctgtaaaactagagaagaaaaatacttcggaccggataagagtaaacttcaggataagtccccccctggagctaggtatattttaacacttataaagattgtatgttttagattgaggatggattcttttgtatcacgaccactgctatggaccttgactaagggatgtgtgcttgcactgccctaattttttgaatttgttttatgaa

SEQ ID NO: 2560 - DNA, 972 bp, Unknown
  Description of Unknown: unclassified Sobemovirus sequence
gtaggcacggcgatcttgtgtacatagcagtagcagaaaggctaatagcgctgtccgaggccgacttggaagcccatccgaagcccagcgatttagttcgtttgggtctttgtgatcctgtgagattgtttgtaaagaatgagcctcaccctgccaataaggtgcgggaagggcgatttagactgatctcatcggtatcgctggttgatcaactagttgaaaggctgctattcgggccccaaaacaaggcagagatcgctttgtggcagtcggtgccttcaaaacctggtatgggattgtcacagaagtggcagttcgaggcgctgtggaaagatttgcaaatcaaacacgccagtgcccccgctgctgaggcggatatatcgggttttgattggtctgtgcagaaatgggagttagaagctgatgtgtgcatgagaatagaaaggggaaacttccctgcaagaatgaggaaagccgccttgaaccgcttcaagtgtttcgccaatgctgtgttccagctaagcaacggcgagttaatagagcaaggcttaccgggtctaatgaagtctggtagttattgtacctcgagtactaacagccggataaggtgccttatggctgaaataatacaagccccgtggtgcatcgccatgggagacgactcggtagaaggatatgttgagggggcccgtgagctctacggagaactgggtcacacatgtaaagattacatcccgtgtgctgctgagggagagatcctcaaggaagtgaacttttgctcacacagcatagctgcggatcgttgctatctccaatcctgggctaaaaccttatttagatatctggaacaccctgacgactttgaggagttggcagtggaattgcagggctgtccgcagtggccgcggatatacaagtacttacgtcggattggaagagtctccgacaaaattcccgaaccaagagaagaaa

SEQ ID NO: 2561 - DNA, 973 bp, Unknown
  Description of Unknown: unclassified RNA viruses ShiM-2016 sequence
tgcagggttaataaccctgcacctcgcgattgacgatttggttagattgtgcgcattatgttgaagattcgggctgacttatctttcgagatttttcagctcttcttattttcatatttttgcgtaactttttagctttttctgatatcctagggcttggaagtgtgcccagattttctatacacttaccttcagctccgttcgtgaacttgcacgttcggttctatttacactctcatgaatactgtagtgatgagtaaacaacacagtactaaagcttcgctattcattgaagctatgacaagataaatgtctaaacaaaatgacggtaaaactctacttagaagtgattccgtaaccatacgatttggtaaatatgaatagcaatttttgtatttttaatatccctctaacccagggatttgtatatgtatatattttacacatgttgtagagctcttgttgggctctttaaagaacagatgattactagtggagataaaaataattcgaatgttacacaagtttttaaataaaatctaaaaacttcactagttggaacctcagcgcggatagcgattactgatcgagaaattcgtaccactttgtgccatcgatatatcgatcttatggaaagcagcaaaccatggcgatccggaggggatcaccgcgttgagaggatggtgtgcaacttgactcgtggaggctgctttgcagtcggtcacgtaagagatctgcatgtcatgaggtaaagtcaagcgtgacctaagcgcttgcgaccattgatcaggttaaaagttcgggtggggcagctggtacagccaggccgtaggggaacgggattcggagaataccgccaatcaagcttcagatttcaaagaagcattcggaagccattatctatttgagttatcttttcattcaaaatcatcaactattataatttgctgatatcaatgaataagacaccaat

SEQ ID NO: 2562 - DNA, 975 bp, Rubivirus rubellae
tccgcatttccgcgcgatccagaagatcatcatgcgcccctgcgcccgcaattccttgtggccgctggccatacggagcccgaggtcgacgcctggtggcaggctcattacaccaccaacgccatcgaggtcgacttcactgagttcgacatgaaccagacccttgctactcgggacgtcgagctcgagatcagcgccgctctcttgggcctcccttgcgccgaagactaccgcgcgctccgcgccggcagctattgcactctgcgcgaactgggctccactgagaccggctgcgagcgcacaagcggcgagcccgccacgctactgcacaacaccaccgtggccatgtgcatggctatgcgcatggtccccaaaggcgtgcgctgggccgggattttccagggcgacgatatggtcatcttcctccccgagggcgcgcgcaatgcggcactcaagtggacccccgccgaggtgggcttgttcggcttccacatcccagtgaagcatgtgagcaccccaacccccagcttctgcgggcacgtcggcaccgcggccggcctcttccatgatgtcatgcaccaggcaatcaaggtgctttgccgccgtttcgaccccgacgtgcttgaagaacagcaggtggccctcctcgaccgcctccggggggtctacgcggctctgcctgacaccgttgcgccaatgctgcgtactatgactacagcgcggagcgcgtcctcgctatcgtgcgcgaacttaccgcgtacgcgggggcgcggcctcgaccacccggccaccatcggcgcgctcgaggagattcagactccctacgcgcgcgccaatctccacgacgctgactaacgcccccgtacgtggggcctttaatctcatctactctaaccaggtcatcacccaccgttgtttcgccgcatctggtgggtaccccactcttgccattcgggagagccccagggtgcccga

SEQ ID NO: 2563 - DNA, 976 bp, Unknown
  Description of Unknown: unclassified Iflaviridae sequence
tggactcgtattttgacctcagccgatttgctgtttgagctagatctgatagaaatgcaagataactggcgtctcgactgttgtagtcaaatgtgttgctagatctgaaagaaatgtaaccttttgatctttagttttaaggaattttaataaacttaaataaactattgcgaacgatctccaagaagtaattttttgtaaagttttgtgtcttgttgaagccgaagcgaagtagtaacgaaagtgaagcgcggacgaagcagtatatcaagcacatgttttaaaattcaaaattaacatatagtcacgacctatttcttcgtgtatccattgtgcatatggagaaataattgttgcatatagtcacagtctatcactctgtgtatcctggtttgtatttgcctcaggagaaataattgttaccaaatacatcccaaaaaggggttaaagtttatccctggccatttgccttaaactgattctcgtgcgtgtcacaatttggtcaccgagatgatgtaaaactcttcacaataaccttttgtagcaatggaagttgtgtaagtattatgagtagctacctaggttttgcaagtgcgtggaataactcgtcatcttttagtgaagaactctgcaccgtaggaatcccttactgatatcttagcgctgataggcttttgtttacggacaaagtcgacagttaagatatgggctgggcagaacttaagagtaggcctgagaaacctgctctgagttgcggctcctgtacgatattcatttgatgacttgtgtttctataatcgcaaacacttagacgtcccccgcgcggtaccggctggacgaagaagtacctttatggtaggccgttctcccgtcgaacgacgggatcaaacacccaactaggtcctgtgtctcgccgttctcgtcttctcggcgactcactttcatctcaatttctttttctctatattttttcaaa

SEQ ID NO: 2564 - DNA, 982 bp, Unknown
  Description of Unknown: unclassified RNA viruses ShiM-2016 sequence
gccccccccaagatactcacccaagtgtttaacaatcttgcttgaactgactacctacaaaaccggctgctacagtgactgtaacagtgtgtgagacataaagtcttaattactcactcttgccttaatcactgttatcaaagtggatttgacattctatataatcctgttttacgcagtattaatagccatcacatttgctctgttatactgctatatgaagtgattatgggccacaattcaggagtatagggtgtcaccaaacactattggacaccaatgtctggttgcttggatttaagttcagcactagaactggtatctgtgagggaatttgctgagaggattaataaggaggagtcaaaccttcaatcctttgtgagactattttattatttgaggaacaaagggttgactagtgaattggagaacgaatatagtagtatagtgaaaaggattgatgtgctgaggcctatacaagttctaggagaaggattaaactgttatacactaaatcaagaagtattatctaaatttgtcgtaagattgactattcattcagtggtgagtgatactggcttcagtagtaacagagtgaaggtagtttgtaagggaggaaagacagaaaaggtaaccggtatacaagctgtcagaaaagtactggaaccttgctataagaggagtagattgctagatagactcagcagaggctgtgaagcagttgtactttgtcagaagtggtttgtgacacttaaggtcattaaaagaggtagtatcagtaaactgcactgcctttgtagggatataaacatcacattgaataagaagcagctgagcttcttaggtatttataaggcaggttacgactacttctgtggggaattaaacttcttcctaactctgctagattatattagtggaggtagttttgatagaggcagtaacagcacacacataaaagaattgttgggtaaactaagtg

SEQ ID NO: 2565 - DNA, 983 bp, Unknown
  Description of Unknown: unclassified RNA viruses ShiM-2016 sequence
tgcatacgtacatatttgaacatattttaacgtaatagtgtgaatgtttctttatattatgtttactctctttaagtatgatagtgttattaatgtattgagtggactataaaaatcagtgttatattaatttttggtatgaatataacacgtttatttgcgtatggattttgcgtccatatgaatgattttaagagaggctattgagttttatatattacggttttgatgttcaatgacaatgggaaagactataaatttcgttttagattttataattaatgtgtgaatgtggtagttcaagggattttatactcctgaatagtaacaaaattataaaataaacaaaaatattatgttagatttagttagtacctagacgatttaatattagtaagatgaacggtacgttaagattaagtttttacataagaacaagcttaattattatatgcttatcccagtgagagtatattctttgagatgtattatacataaaataagtgcagacagtgtaacaaaaatccagttatgctgcgttataagcaagttggtaccagatgactttataactttctggcacgaaggattattccccgacttcgtggtccccttattctatgtatgatttcatttttttgaggtatatttcttgcgtaggatttttaattctgagggtaagtacgctgctaagtaatcagaacgtattattgatcctgtgggaaagctagactggatcagagaacaatagcctttaatgttcttgaatgtatgtatttgttccagtataatttgtaggcaggcttgttacgttcgcagaggagtctttagtttaatgtaatttacatataaatcctcagacggtgacggatggaaagacatcattttccttttttatgcagattttatattgatttttcttgtttgtcgaagttattctcagtgttttatccctttaacgtttttctttaatattttgtata

SEQ ID NO: 2566 - DNA, 984 bp, Unknown
  Description of Unknown: unclassified Sobemovirus sequence
agaggcacttagaattagttgctttgtgtgttaccgagagattgttcttactcagtgaagctgaggatctacacaataaatcccctgtggacctagttcagatggggttgtgtgacccagttcggctgtttgtcaagcaggagccccatgcttcccgaaaggtgaaggagggtagatttcgcttgatttcatccgtttcgctggtggatcagcttgtagagcgaatgcttttcgggccccaaaaccagcttgagatcgctgagtgggaacatattccctcaaaacctggtatgggcctttcgctgcaacgacaagccaaaagcttgttcgacgatttgagagtcaaacattctcgttgtcctgcggctgaggccgacatatcgggttttgactggtctgttcaagactgggagttgtgggctgatgtagagatgagaatagttttaggaggttttggacagaagttgtccatagccgctagaaacaggttttcgtgcttcatgaactcagtcttccagctctcggatggcacgcttatagaacagcaactgcctggtattatgaagtctggttcttactgcacttcctcgacaaactccagaatacgttgccttatggctgaacttattggttccccatggtgtatagccatgggtgatgattctgttgagggttgggttgatggtgcgaaggacaagtacatgagattaggccacacgtgcaaggattataaaccctgtgcaacatccatttccggtcgcttatacgaggtagagttttgctctcacgttataagggaagatcgatgttggttggcgtcgtggcccaaaactctgtataaatacttgtctgagggcaagtggttctttgaggaccttgagcgagagcttgggtcttctccccactggcctagaatcagacactatgtagtcgggaatactccatcgcccgacaaaactagattagaaaatttaagtccgagct

SEQ ID NO: 2567 - DNA, 985 bp, Unknown
  Description of Unknown: unclassified Riboviria sequence
actgccagacagatgaattcaccgtgccaccgtgcacggttgctctgaatttgtagggagcgtcgggggaggaaatgcccctggcggagatgacgctgtgcacacaacgcgactactgatctaagcatcagtgagtccgggggattcttaccgtctcgtccgagcttgtgcactgaagggggccgcacccctagtcagccttgttcttctgccacacttttcactgtgagtgtggtgagagcctgtagtggcgtactaagctctgcgcctgaggtgaaggcctctgggaaactggatttaacccccggttgggactggcctcccttaattcccatacccgagacggacaatgcggtaggcacctcttgatgccccacaccagatgtgagtcggcctttttggacttgcacaggtggatgtagggaacgaggagaagtcgaagctggtcaccaagcagtaatgcgtggtgtgttggctatccgtccagtgttgattggttacggtaccgtggcccggcgtttttccgggtgatgctatcgagcatgtggttagagctccgacagaatgaggaaccggtcaccgaccactgttgagccgcagggaacccttctgttccggcttgtttgacccacgtgattagagaaacatcggtttgtatagaaatcagtgacgatgcatgcatccgaagccccaaataaataaaatatagcggcttctgtgtacagtgcaggcttggtccatccccacatgaactccttcgtggttaagcgacattcgatgcgttcggaaactgcttctgcgcggggtatgattgtgtgggggtggccagactttgcccagggttggacgtctatcacgtggttaagcgacttccgatgcgttcggtcactgcttctgcgtggttatgcccgttctgacgctgccaagcgactcccgcttgagacgtgtatagttttttcggccttgccgtctgtttatctgagtg

SEQ ID NO: 2568 - DNA, 987 bp, Unknown
  Description of Unknown: unclassified ssRNA viruses sequence
catggacgtaatgtccatgcagagaattataatacttttatcagatatatctatgatattgtttcaagagttcatcttgaaactttcgtatgttagagcttgtatattgttgtcaatgtatgggttcttcccatacaacttcatatacaagatatttttcatacgctaagtttcgtaattgatagaatctcttgttgctttaagtagaatatttgatgaggtgttattattcgccccagttttctatctgtttacagctacgacttaaccattagtcgataacgcaggctgtatcctagttcagtaaagtacatagaatgcaaagatatttagactacttaagctactgataaagtttatactttcgcttttgatgtagatgttcatttacttaagtatagcgctctgaaccgagcgcttttgtttatgaaagaatttaatcaactctttcacccggccacacatctttagagatgtttatgacagtattaatttgtttaatactcgaggccaaatttcggtgtttttactaattgcaagatgtctacggactgccaaaatcttgtgtatttagtataaattcctctcccattttagttttaactatgaaattcttttattagttgactatttaggtttaggactttaacactgctcgaggaatccccctttatatgtgaaaattgcgatttaacacatactcgccccaaagaagggtttagagatgttagtaaaagaataacattttagagaagaatcggtccttggaggtgttttaatggaacgtaccccaagatcttattataaccggaatatacaaaggatgtatgtataatttaaggtatagttaccgctatgctagggccgacatgcccgatttttaattacctctacccgatgttgaccagtcaatatttttaaactaatgaattagttttattctaactttggaggaaagttatttggcacgccctttctattttaatc

SEQ ID NO: 2569 - DNA, 988 bp, Sanfarnavirus 1
aaaataatgcatgaaatatagattttatctatatttcatgccacatttgtgacccttgagaaggtcataccgcattatgcggttctaagttaataactcacttcagtccagaagactgttaagtagttctgacggtggaaagccgtcatctgttacattattagttataataggatgtgtactcctaactagacgatctctacccttaagtcggaagccagcgtttagtgctgagtgcttccgtcacctttggatgacaaatcgtctacttcgactcattaatccgaaagttacctaattttcgtaacccctgtgtctgtgttcagtaaatgacagacagtttgagataaactaaaaatctcccaagtctccacaagtgacatcaatgatctgaactttatttttgacgtttgagatggtgaatgaaggccttgtgcctgtcctcactcttctttaatctttagtaagtcagtgactaacttgtgttatcctagttgattatactaggcttatcgttttctacaaaattttgatgcaaaatcggaacgaatttattcgtaacccgtgagcgtttcaaggtctttgcccttgatcctaaattttttgctatatttcgtgtcgtatcaagtcattttattaatactttttgacttgcctgaacgatgatgtctcgtttgggaagctgcgtaagcagttaactaacaaggtataccagaggatgtaatccccttccagttaccccttgtgttttgaagtactttttcgtaacttcgtgacattcgacctggttctaactcagatgtttgataaactttcgaactatcactgtgaaaggtgctttagcaccttacttgaacccgtcgtctaacacggacatcgttaacgtatgtagaatactatgagagatgttaaattcctcttattgaccacattggaaggcccttagaaaaggcccacactatagactggtgtctaagtccatcccgcc

SEQ ID NO: 2570 - DNA, 989 bp, Unknown
  Description of Unknown: unclassified dsRNA viruses sequence
ggcccgatagttaccaagcgcgcggtaatagactttaccgcttcagcaattcacgggtgcctacccctagtgtggatgaaggtgctcgcatttataatatagtacataaatatttgcctaaccacaaagttttaactggaggtcttccttcaagtagacgagctggtctcgattatttattgccacctgccctgaggagcggcaacgaaacggctggtccgttggcaggtagtacgctggacgtacgtgctcgaggcggtcctcgactcacggtcacgaagactgaggtcggtgttactgaggtaggagaaaatgttcacggtcccaagaatgaggatagagccctgtccccgcatgagactattacacgttctctttccggtgtttcgctgatcggaagtagtcgtggtagtgatgacggttctgcttcgtccccacggccgggtggtgttaccacctgccaacccccctcccctactggattatcgaggcaggcagtcaaagataactatgtgggcggtgtcgatgaaactacccaagctgcggatgtgacatcggcacgtatcggcaagcaagctgtgacaccggaagtatctgataacgaacaacctccaagtggtatcagatgggaacccttacgcagacaaggggcaaagttcgtcctgctcatcccgagtggagaaggtaaaacatatttggccgagacgtatcctgagatcttcaccgatcacgatgccctcgaggattacacaattgaggtccaaccgtacattgagcaggcacgcgaaagtggcgactggtcatacatcgatgcggtccaccgccggagtagcgccaagtgccaaacacctgtactactatcgtggaacgtttcgacatacgatcatacccgcttcgtgagtctaggtgcgtatttattgcgccaacctactaacattcgtgaaaacgagaataaccgtgccgctctgatcgcaacccacgattattgt

SEQ ID NO: 2571 - DNA, 992 bp, Halfbeak nidovirus 1
ctgaaaagcatcccctaaacttcagttaaacgctgattccgagaaagaaataccctgctttctcagctacaaaatctgtctggctcatagtgctggttaatcacatcccccgtggtgtaacactgtgacacatacaatttgtagtccctctccttactctacccccgagtgtctcttatcggttactcaaaagttgtgtttggtttgtccgcttttcggattttgtgttagaattacattataaccttatcctagtttgtgttgtgattatatgtaaaaactcttcgtgtgaaagtttgaaattttgtgtgttcttattgtacctctttaacccacatatataatttctggcctcttgccttacctgtaggatttccaaagcctaaagtataatctccccgctagaggtctgttgtgtgaatcagaccattctttaacgtaaagtcacccgtatcgacgctaccatcacacagtaggatcaagattagctccggcagccctggggcgtcttctttgatacaacatcacctttgctggtgcttgcaccgcttgggtatatttttcggtacttgcaccttcgggtgttgtggcctcttactagtttttctcccccttacgtaccttcgccccttgggcccggagtccctgtaattggcatcgcaattgtggtgtcaccctaggcactgcctttattggttctgtctaggtcggtgtggtaagggtagaaaggcgataaacaccgtacattgtttattctattttatagctttcgctactgacttctatgactgattccctcctgtacttagcctcccacccggcggcacttgtcactcttacggctgtggttcttttcctttacctgtatgctggttgtcgtgcattgtttttagacggtgtgaagttagctagatattgtggaactcctctttgttggggtgttaagtgtctctgttgttttgttagaagaggtaagtcacctcgccaagaag

SEQ ID NO: 2572 - DNA, 994 bp, Unknown
  Description of Unknown: unclassified Hypovirus sequence
tataggtgctgtaggtctccccgtcgctcaccattacggtgttagcgtacgagctcgtgcgttgtatgcacgagtaccctacagacttcttaggtcttgtcgaccctgctggttgcgccgtcgtcgttagacggactctattcggacgtcatttgttttcgtccaaccccccttccaaaagactgcgtggagcggtcaatctagttacgggctgacagtagtggtgctgtcactaaggaacaccaggctggcctcagaggaaaagctgagtaataacaaacccgttaagtgatcacatagcctcgctagcatgtgacacagcgctatgactctgatgcgtcaggatgcactagcatcccaggaaagagtacgtgagacaatatgaacacagtgcgtgacctttgttcacctgtgcgattttggctccctagctgtatgccgcagcgacttgtcttgggttgatgtcgaataacccacgtagaatcttatccgaaacctctccacacacaaccgtcgacgcagcgacgttaaatacccggctatgcggaagtaccgaaagtcgggcgggcgtcaaatctacgccttaaggtcaaccaaaactttgcaattgcatcgtgtgtcagatgacacgaccatgagtcctcctggacacttctctagcttgctagagttgcccgccaccacagctgttataggcccttcggggatggtgcgactagtgttagcacccgtgtgaaagagagggcgcgttacgccctataaacgcttgttaggatagctttcccctggagaggagggactagtgtcgatgaaaacctcacaactcgaaagagtattgaagagcctcggcgcgtcaatcttaaaccaaacacccagtgccatttaaaacccgaaaagggtggatggtataaccaaagttctcaaaaggagccactgtgtggagtgcgacgtatagttcaccaggtcagccatagggttgtttacaaaacaacaa

SEQ ID NO: 2573 - DNA, 1000 bp, Unknown
  Description of Unknown: unclassified viruses sequence
tcattccacagtggagtgtttgctgacggtgagttaaaatttttgcctctattcttcttcgcgaagtgtgttgatggtagcatatgcatccattattaaagacaagctgtgccgggtgtttcgttatatgtggacacgaagcgggtaatcctgtggaaaccacccccatcagaagtagcaccaaccggttatcgtggccgatttggtagttagtacctcgcggtagggcttcggcccgcgtaagacactagcattaggcagcgcagagacagtcagaaccatggaggccgtaatagccgttgaagtgtgatgatcctccagtgctcgggcgacgtgcagtacctaggcgaacgcgcgtaaatcttttgaaataagggtataagtgatatgacgaggcgggtagcttgacaaccacctagataagtcgaagaatatggaagaaggacgagaacgagtaagaaaatagaaaagcccaactttggcaagtttgtagaggatggggtgttttaggtcacaaatatggagtagggagcttcggcgaacctgcaaaacctacacatagtgctataagcgctgcccagcgtgaaaggccgtgatcataaccgtacgagggggcatcgagactggacctgtcgttacagcaagggtagacatttggggaaaccggcgatgctcatcgggtgtcgtgtcgctcctacctaaacttagagatgttaagttctggcggggggtcaacctatgtcgtgtcatttcgggtcaatttcactcattggaagtggaatccgctaacagagcatgcacggacgacgtctgtggtcaagcaacctttgtttgggaagaatcctgttatacaacttctacggttccttcgtctctacgaaccaatcgaagtctactgtttacctatctcgatgttactttacgacacacctccacgtgatcagtccgtcaagttaggtcacccatggtgaaaggcgatgtatgctaagaactcgaagcc

SEQ ID NO: 2574 - DNA, 1000 bp, Unknown
  Description of Unknown: unclassified viruses sequence
ggcagcgcagagacagtcagaaccatggaggccgtaatagccgttgaagtgtgatgatcctccagtgctcgggcgacgtgcagtacctaggcgaacgcgcgtaaatcttttgaaataagggtataagtgatatgacgaggcgggtagcttgacaaccacctagataagtcgaagaatatggaagaaggacgagaacgagtaagaaaatagaaaagcccaactttggcaagtttgtagaggatggggtgttttaggtcacaaatatggagtagggagcttcggcgaacctgcaaaacctacacatagtgctataagcgctgcccagcgtgaaaggccgtgatcataaccgtacgagggggcatcgagactggacctgtcgttacagcaagggtagacatttggggaaaccggcgatgctcatcgggtgtcgtgtcgctcctacctaaacttagagatgttaagttctggcggggggtcaacctatgtcgtgtcatttcgggtcaatttcactcattggaagtggaatccgctaacagagcatgcacggacgacgtctgtggtcaagcaacctttgtttgggaagaatcctgttatacaacttctacggttccttcgtctctacgaaccaatcgaagtctactgtttacctatctcgatgttactttacgacacacctccacgtgatcagtccgtcaagttaggtcacccatggtgaaaggcgatgtatgctaagaactcgaagccttggttgattgggccgctaccctctggggtccgtgcacggtctatttagccttggttaggggacaaccctgcagcaaactcaccctctggagaatcctttctttatgtatgaattacgcggatacaaaatctacaaaactacctaaagggccttgcaagcgggaaagccaaaaacgtcgatttcgaggcactcgaacggagagttgggaacagcgtgatctacttctcgactcccgtcgtcgaagtcggcgtgact

SEQ ID NO: 2575 - DNA, 1000 bp, Unknown
  Description of Unknown: unclassified viruses sequence
ctaaatcgcttcaaactgatggtgaagggtgatgtgaagtttaagggcgactcagaagcgttggaggagtttgctccgggacaaaacattgttttccacagccgactagtttgtgcgcacttcgcaagcgtattttgtgagctagtgaacaggttacgctcaatatgtgctccaaacgtaatattattcaatggcctatccttcgaagactttgcggcacacgtggactcatgtttggatggtgaacccctctataatttcaagagtgacgaaatagacatttcaaaatacgacaagtctcaaagcactttaaccaaagccatagagcttgaggtttacaggagattgggactggatcaacgcattcttgatgtgtggggatcgtcagagttttatggtagagcaaccacgggttcaagaagcttctctgcggagatattcgctcagaggcgtactggtgccgccaacacctggataggtaacacgattataaatatgtgtttattggcccagagcacagacccgagactctttaaggtggcgtgttttgctggagacgatagtctactaatctatcgaaagaaacccaccatacactttgagtactatgagacaaagttcgacttcgacgtgaagtattacgactctgcggcaatgtacttctgtggaaagtttcttatctcagatggggagaaaactcgaattgttccagaccccatgaaactttttgtgaaattgggaaaagagcggccctgtcatgattctgtattgttggagaattggaggtcattttttgacgtcacgaaagcgtatgcaaataacaccgttttggaacgtttggtggagcaatttgcattgaaatatacagaatcaccacaggcttatgcagccttttgtgcagtgaactcaatcagaagcaatccagaacaattcaagagattgtggttttctttgtatagtgggttttcgagcgacatcaagcaaagattgaggtgacttc

SEQ ID NO: 2576 - DNA, 1000 bp, Unknown
  Description of Unknown: unclassified viruses sequence
tggtggggggttgggaaaaaataatccaaccccacagttgacaaaccaagcacagcgcaagaccaacaaggaaaattagtgggttattgtaagtgaacccaatcgagtatattgatcgagcgaacgaacaagatgtgatgtggcaaggcgtgtcgatgtttctaccatcctctgaattatagctgtgtgcggagtaattatgatggagctaagtcgtgcacttcccttgtgtggttgactggtggccgaggcgatttatttcgtgggcggtacagttaacctagtggtaatgcagcacggtagaccttttagtacataagttgccgtccggtcctaagcccgggtacatgcagaaggacacgcgttaagctgtaacgcgggttatgtcacagcagactccgacagaatctgcagccatccttcggcccccaatgcgcgggcagatgagtgtgatggatgcgggacactaacggaggttccgggtaatgggtgaaaccgagccgacgcgaaagcgacaggccccccggacatagggagcccactgaccctgaccgccaacacaaaggatgttggccagggaggagtggtaaactatgggtagtgacaacatactagagcaaggtatgttgattgcaagacgcggacggctatttaggggcgaaccctatctaaaacagtctagtgtaaccccatgcaacatgggcgcgctagctgggcaacgggaagggtggttctggaccgtagttcgtcgacatctgacagggcaagccccttgagatgtacacgaggctcgagaggacagaggcgcgcgtcggtctccctgacaaggaggcttaaggtgtaaacagcgtgtttgggagttagtggatattgaattctgtggatgcttacatcgcctaggtattaaattacggacgatggaagtgttcacaaagttccttataccctgcggccacggtcattgaccctaagcccgagctcccttcatgactgacattcg

SEQ ID NO: 2577 - DNA, 1000 bp, Unknown
  Description of Unknown: unclassified viruses sequence
ctcttgacgccagagttgctagtctccgtggtacatccaagaagcactctggggagccaggcaccatgcttttcaacactatttggaacatgaccgctgttttccacaccaccagtttcactagaatgaccctctagctcttcaaaggagatgactccgttgtgtgctgtgactccagcatgcccaccccaattgctaaggagttcatctctcagaacgggctcgtcatgaaacagaagacgtcccacctcggctccttcacatgcagtctcgtcacccgcacaagttatgtcccggacgtctacaggttcgcttgcaggctgaacaacaacgacttcacagataccaagcgcatcgaggatctccagagggccacagacgatttcatcaagagagcgactgtcaccaccaactacgggttccacttgctcgatcaacggcagatactacgtgtccttcggacaccattgagtgtgtcgttggcttcctccaagattttgctctcaccggaaaaatagacctccaaacatcatacaaaccaattttaaaatattaaaataagagaagaaattaaataagttggacattagttatgtgcgcttgagatagatacagtcactatggcagattccaaagcagtcgctccttccgtacaatctaaaccacgtcgcactaggcgtccaaagatggacccttctcagatcccagatacagtcaaaaccttccgtctcacaaccgaccctattatggcacctccacctggtgaagttgattcacttctctacacatcaggcctttcacctgcagttgtcctttccttctccccattcacctcccccgcagttgtcttcgccgccaactatgagaatacaagatcttatctttcaaagctactgtcctctccctagcaccagaagctatttccagttacaacctctctgtcgtctggttcccagatgcatcagaagggcccacctctcttcaagctacaaacttgtcc

SEQ ID NO: 2578 - DNA, 1000 bp, Unknown
  Description of Unknown: unclassified viruses sequence
cccgtgcgggtttttctggtgctccttatgcaatgggcaacaaggtttacggtatgcatctgggtgcttcctctgaaaacataggctacgatgctggctacattctcatgaagttgaggggtttgaccgagtcatcaactgactatttcgagaaactcgtggacaacgctagacgccgcgggcgcaagcttgtggtgcgaaacactggtgatcctgacgttgttgaagttttcgtcaagggtcactacgtgcgtcttgaccgcgatctcttggaaggttatggggatgaggttgagtcagccacttactctcaggagagtgttagtcagggaaacggaaaggggccccgtgcggatgcgcggggccctgggcagaagacctctccggtccctgctcccgtcccgagtgggcaaagttctcccttaaccccgaaacagccgcaagctgcgacggaggagaagggtacggagtcccccgcatcgacgcctgtgccatcaagcagtcgttcgccaaccacgtccgcatccgtgaagcccaaggctctgctcgaccagcagggacgattgtcgaaagatgtcttgactgtcttgagcaaactttcggcgaatggaggttccggcctcaactcggccgaattgaaattgctaaggcaatacgcgaactcgactttacctcaacacccggttattgtcagttcagtggctacggcccaaccaacggtgccatcttaggatgggacgggttggactttaagcgtcgggatgtctatgaggcacttgtctctgcggtggagtatcgacttgggcaactcacacaaggaaaactagtctatgatcccatcaagcttttcatcaagcaggagccgcacaaacgggctaagctggaggaaggccggttgcgacttatttctgccatctctttggtggatcaggtcgttgaccgagtgttgtttggccgattggtggagagggttctctccactgttggccgaacaccttgc

SEQ ID NO: 2579 - DNA, 1000 bp, Unknown
  Description of Unknown: unclassified dsRNA viruses sequence
gtttctaatataatgcaaaccccgtaagttacgatgactggctcggccgttgtaactgagtatgttgttgaggtgagtgtaatgagcaggaccgcccggagaggatagtatttatccctcattgtagcttccaggatcacgaacgttagtctaagtattgacggttacttgcagtatttagttctggccggaatgacacacatggaccgtcctttatgtggacggagggcgttacctctaaacctagactctgcgctgcgagtcaggatgaggatgctacttcaatgtatcttcagcctgacactactgcagtgtcgggtctaggtttaaattgagccaccttagtgggtttcaccagtatgaaagaatatactggcacccgtgcaggcaccgtttcccttgggctgggagaaaaacgcatccggttcgaaacaccctaattggttaggcttctgcctttccggccactcatccgtcattgagttctattatgtttccttccctcgtagaagccgggggcacatcatgtggcaacgaaactaggcctccgtagcaatctcacggttaagatgattatcgcgcggctgaaaatagggacggggcgccgtacccgcgcattactgttaggcgtctaggcaaatattgggatagaccccagtagtttccacgcgcggtagggctggccgctaaatataaaacacagtcaaagtcatcgcggatagtggcctaaccagccgctagacctgctcaagggttccggaattcgcaagttttctgggtgtgctgtgtagtagctggacagagtagctgcacggtgctaacgtatgcttaggctgtccgccctaagtagaacgtgccgaaaggtggtctatcgtacgtaacgaaggagggacgtactgggtttaatcccgaggtagggagcgcctgtaggtggaacgactgcccctgagttgaatgcacggttgtgcacgcggaacagtctgctgggcatcccccagtg

SEQ ID NO: 2580 - DNA, 1000 bp, Unknown
  Description of Unknown: unclassified dsRNA viruses sequence
gcccgtgaacaccccctgtcttcctcactgggacgatcccaccagtataaaaataggtccgtctggctgcatgttaaacagcccaggtcagcgctgtcacgctgggtttatcacctaacaatacgacccctcgcatcacgtcgtaaaactgtgagagctcgtccattgctggcgacgaattaaacagcgtactgcaggcatggggtgtttaaaaggtaggttgcttaggctgtatgttgccgatatgatacagaaacccttcgcgctgatcaaaccactgggctcaaacaaaccagtggatgctgcagtcggtcaaattcacttcgttgaagtgcttcgggtaactcccgaatcatgaggtaactagtggaccgtcaacccctcatttactaccacacttgggacttttgagagcttccttgtgtggatatgttataaaatgagtgttggttcggcgtttgcgcgtcgaatttctaagattaacacctggtgcgcactcctccggcttcggccgggggtgtgcgtagcaggagtttgttttagaaatgcacttattcaattaactcaagtcctaggtatgacttaaaactacctccccccgccctaggtatggcataaaactaccttccttggcaccgtgaagtgtttaaactagcaacctcggtggcgtgggtagatatgctcagccactataagcgtctcgggcgtgacggttattactcaaaaatcgccaaaatccatcgtgtgagcgggagatgaccctgccggacgggaggtaacctagatgtcaactagggtgtgaccacaatgcggccaacgttgtgcgagctatcgtaaccagggacggtctggatgtagcgtacgggtgcaatctctaatgcaccacttctgttgctacccctggggaacgagccatgcttaggtatggtggacagactgacactcctgtcgctaagtttcatagcgcaccaaacagtcggctgggtctacgggcccagtg

SEQ ID NO: 2581 - DNA, 1000 bp, Unknown
  Description of Unknown: unclassified dsRNA viruses sequence
aaatctcggacggtgccgcgcgatcctaggcacttttgttcggggcgttgtatctcactcagcgtcctcctcagccctgagaccatagggttatccgacgacttggctataaatataacatcctccctttagtggaatcgcccttacaccaacttagggccttttccagggaaaggaacccgtgccgccgcgcaattcgcggtttaccatggtgcggggttgtcggagtaggtacgtgtgctagcggtagagagtatatgatgcggtttttcgctgatttcctactgagcaccctacgcccgaatttttaggaagaacggccctcaaaaacgagaaagctgttctgccccgaaaatttgaggggtaccaccatttacgtccagcatgacggaaaaaggcataccaaactctggtcactcgcgccctgggcacggcggtaaactgcaccatttgcgtgatctatatggtcgaaatagtcgcacacctcgttaaacctcctactgcacagctctattgatcgagaaccctttagtgggaatgcagagctcacactcggcgtgtggtcaggataggtgaggttggcttccgtttcagcgcatcctgtggtgagccccacacacataagctcaaaaaccagagtcctgccgcctaatacgcgggatataaaggaagcggaggggtcattcgctataataaaattagatcaaaagcatcgcggatagtgggctcaccacccattagacctgctgtagggttccgattcggagtaatccgatagggtgtgctggtagctagctggttagagtaggctatcggtgctaacgtatgcttgggctaaccgacccaggtagaacgtgccgaaaggtggtctctgcgcaagcccgaaggcgcggtttgctaggtttaatccaagcggagggagcgcccgtaggtggaacgactgccccacagttgacgcaaggttttgcacgcggaccagtctgccggacaacctccggtg

SEQ ID NO: 2582 - DNA, 1000 bp, Unknown
  Description of Unknown: unclassified dsRNA viruses sequence
agttatcagtctctcatgttcgtagcgagtacatgagtatcacagctgaccaggtggcaggctaagaggaattcgagggtaaaagcagggtatccaacttcacccatcaagcaactatcttcgtgttcatttctccatcgtgctaaggcgacggtgtgtcatctctaattcttgattgtggtagcgattgtgctaaccatacaagataaaagccctcagttataaaccctgcagcctattacgtacatagccaggggcgctaactttaaattgagcgctgtaactgtagcctgtcaggatgggagcagagtctatatggcggtagtcgtcgtgatctgcgcatagccaacctctgtacatctctattgtgtcgcaacccttcagtgggaacggagagatcgcagcgaccgtgcggagcgtctggtgtggtgaccttcttctacaactatttccatctgtctcgaggaaagccgggacgtcagtaaactaggcccacgcatcaaaggcgtctaacatgaggctactaatgacaaaggcttaatcattagattcgacacgctgcccggccgtgcagccgctgtattcataaatcggcaatcgcttcgtctagtgggaactaaccattcctacgtccggtgtgagggttctccttttggaggtgtccacttcagatatcgcacaggagtttctgatttgggctaacgtatgcgtgtagctgtgcgtctacaagtagaacgtgccgaacggtggtctctgcagtgtctcgaaggcgcagatacttaggatagaatccaagcggagggagcgcctattaggtggaacgactgcccccatttccgatgtacggttgtacagacggaccagtctatcgggcatacccggtgaagcgaattcatatcatctagtggtgtccttaattaacggcgtcactttaatcccaaaaattgttgattagtgaaatttaagttagaagcttattttacgactctcttcacccacc

SEQ ID NO: 2583 - DNA, 1000 bp, Unknown
  Description of Unknown: unclassified dsRNA viruses sequence
aaatatgcacgccccctccctgaagcttaatagtagtgatacccttggacctgtccagggccgcacgctgggcccgaagtagtcttcctgaaggcttaagagtttaggactcacagccgaggtaggtgactgggcttcaacacctctatggttcttttccctcctttggcacaggggggaactgattaaatagaggcatagcggtgacaatcgctatataaatatgacctactcgtagggccgcgagtataaataaggcttgccaagagcatcgcgtattcaggattaccagacctgaagtcctctgtcggggttccgtccctagtcatgctgcatgggttgccatgcggtaggctagcacacgggtgtgtttctaactggctatgcagagtaggttagaaatgctaacgtatgcttaggctgcatgtcctaagtagaacgtgccgaagggtggtctctggggcgagatggtgtcagctgctgggctatgtaaatccggggtgtcttagcttaaccagtatgcgggcgtgtgtagggtagtggcttgtaagtccgggggtagtcgtccaactaacagtgtcggctacatgcttagccttaagctaccttgcatacatctcttaaccggagggagcgccttagtaggtggaacgactgcccctgacggtgacgcttggtagcgacgcggaccagtctgcccggcaccaccgggtgatgctcttatgccatatcgccgagagataacgaacggcgctagcccctagatccgggctggctttctctccgcatatgctagggtggccagacgtcccttgactggtactcacttccgggccgcggcggcctttgtcacttctttgtccttccacggatgccagccccgttcaccacatcctcatcccctaggaaacttggggaaagtagccggtgtatagcaactctcaaggggtagtgggaggagatcggaaaaatcgagtcataaaagcctgcacgaaacatt

SEQ ID NO: 2584 - DNA, 1000 bp, Unknown
  Description of Unknown: unclassified dsRNA viruses sequence
ttgggcgcgaatccagctagtgtagtagggggcaggaaagaacgaagtacgtgttaactatatgattcatccaacttgggtcatatacagcgtattgctacccaaggtgtcaaggtagtgtgtgcgatttacaacagcagcactactaaaaaacatcacagaccttggggcctactacagagagtacaaccgttagggtaggtaagggcaggagctacaacctcttgatctcttaccaggccagcggctctcagcccctgttttatatttactcctccccggtctagcggtgggggagtggtataaaatgagcggtcgcgctcacttgaattaatcttttacgtttacgcgcataaaatcaggacacatctcttgtatactttagtatatcaatgatgtttttgttttatgcgattaatcgtaagagaacttctttccatccgcctgtatgggcgggataataagttcaccgccttggtcgaggcgcaaacttgtatgtgcaaaggtgagctatatgctcgaaatagtcgtaactaacacacagccactacctgtagagctctattgatccggaatcctttagtgggaatgcagagctcacaccggacctgcgggtatcttcggcgttagggacttctgtttcagccttgaatcatttacctttataccttctctgaggcgcctgggccgggcgcgatattaagtacaagtcaaggacatcgcgggtagtggtctaatcagccgctagtcctgctggagagttccaacttagttgggtgtggtgcatactagctggatagagtaggtatgtattgctaacgtatgccggaggctatccgtcctcggtagaacgtgccgaggagtagtctctgcagacccccgaacgcgtggggtctttacttaaatgtaggcggagggagcgctcgtaggtggaacgactgcctcccagtcgaatgcaagattttgcacgcggaccagtctgcccggcaattcccgggtg

SEQ ID NO: 2585 - DNA, 1000 bp, Unknown
  Description of Unknown: unclassified dsRNA viruses sequence
gcactaaattgataagtgaggtccgcaaatttgcagctacgccagcaatggcgtatgctgaacagcctcccgtcctggtgcgacctaaccaggggagttacaaattgccagatggcaagactgtgcgcagagcgcgggtcgtgtcgtctggtggtaacgccactcggaacagtgaggtttcgagaacttccggcccccgtcggaacgttaaaggtgcagtgatcgggggttccggtggagggggatcgtcctttcgcgcgggtgtggggaaggagagtggttctcacacggacgtgcagggtatcgtaagcggcgcgcttacgatggccaagcacccaagagtgatggcgaagtcactcttggcgattgggcgcgcagccctgaatgctggcagcgaggaggccttggtctcgctagccagatcgatccaagcaaggcaaaaacctggagtaggcttgggtccaaaggagcgggtgggcttatctgatctgatcagagaaggcatcggttctggagaactaagagtgggtgatgcaagaaacctgctcaagatagcgccggaggttgaaccggtgctcccagctgagattaagaatcagctgggaaattacaaatctttgtcgtttggcgaggttgaggtagaagttctatctccccggggcgtcgaggaattggagaaagccagccctgagttgactgatagcgctgcatatgaggcgcaatttgacgcagctgggcaggcgacggattttgctttcgagccaatagcagaaggcaagggccacgcggtgggcgcggcttataaagacgagggtggtgcccgactgggggtgctagatgatgttgaagccgatccggctttaaactaatctggcactcctcgtgcgcaccctttggcgaggcgcgtgcccgattacttttcaaatttgcctgcccactatttttaaaagaaatagttggttttttggagagtctcggttgcgatagaaccattacacgg

SEQ ID NO: 2586 - DNA, 1000 bp, Unknown
  Description of Unknown: unclassified Hypovirus sequence
agtcttatctagtcaataagacacaagtgcagaaggggagtttatccccgcctgttgttcagctaatcctctcaaaggaggctcaccgctgggaagcgctgaggaattcgcgattaaataccgcgcgttcatgaagatgacggagtaaaccgtcatgctgttcatcataaacattaaatcttttggaacttaaaggtggattcaaccaccgagtgtgatttgagcctaaaagccatcgaggctgaaatggaaagctcagattgtgcgagcccccttagggggattttgttctgttcaaagtcgttaaaacaggagattcaaccgcagagatgattacgcatcgagctcaaggtggggggaacaccggtggtttcaagactacgctctgcggatggttgcctggactagggcagttgacgatgtcctcctagttcacgatgaatgacgatgcttttgactatttggcatatactaaatagtgacgctataccgggatacgaaccggaacccctgctcggagagctcgtttgatccgacccaagttgcctatacgacttccctaatcttaagacaccaacgcgtaccgtgctttgcctgaattctgacgctgagactcttagagtggctgaagataatctggtccaacggccttaattgcgaacggtcattgcttaaagccccccgaaggttcaaccacgtagggatctataaaggcgatgaatgaaatagtgccaggcacctcggtgtttgttggccgttcaatgtttctggtttaattttgtggtccaccattccgtaagtgaagccccaatcggtgggttaatacggtcgcgaatgtccaatgagtgttaaggatagtcatggttataatgctaaggattgaacacggttttatatcgtctggcgccctctccaaggatggcaatttgttttgcgaggaaccctagctataagaattgggagtccctcaaatgtacgcaggccaatcatcgatgcctgt

SEQ ID NO: 2587 - DNA, 1000 bp, Unknown
  Description of Unknown: unclassified Picobirnavirus sequence
gtgtagaacaatggttttacacaaaattgaaaacattcaatcaattctgctcctcagccacgcagttacactgtgtgtttgtagcagcagaataagtcagaatgtgttaggaggtgacacttatgactaagaatcaaattgagtatctaaaattattagaaactcaaagatcaaatgttgcaaatgagaagctcacggcaacaagagatcaaactactcgagaattaggatttgctaatctcgcagagactagtagacacaatcgccaaactgagcaacatgccgttaatgttcttggagaaactgcacggcacaatcttgctcaagaagctttaacttcaagatcacttgatgagcaggagaggcataatagagtctcagaggatttgggatatgccactctggacgaaacgtctcggcataatcaagctgtggagttggaaacttctttgcataatagaaacacggaacgtgagcaagtccggtctaacaaggcaaaggagttcgaaacttatcgatcaaacctggctaaagaagttgaaactagaagggcgaacgttgctagagagcaggaaactgcgcggcataacaaagcaacggaaaagcaagcttctgctgaactcgagtattcctatgccaacttggcagaacagcgcaggtatcactcacagtccattggtttgggctactctcaattggaggaacaggctagatctaaccttgccagagaggctgaaacccgtagatctaatatctcccaggaggcactacggggtaagcaactggctgaagaggaaagatccaatcgccaggatgaagccttgacctcataccgaaaccgtgagcaggctaggcacaatcgagagtctgaagagctagaggagatcagaactagaagccaaagggttcgcgatcttacctcaggatacaataatctaatgtctggtgcgatgagcggcatcagaagcgctggtatgctaatacccttattcggactgtc

SEQ ID NO: 2588 - DNA, 1000 bp, Unknown
  Description of Unknown: unclassified Potexvirus sequence
aacaaaaagaaaattggtgaaatcctctttgaaaactataagagagccatgcaactcccaaatgacccagtagcattctccagggagctttgggatgtgtgcgccgacgaggtccagaaaacctatctgtccaagcccctccacatgatcaagaatggccagaacaggcagtctcccgactatccaaaaaacttcatcaccttgttcctaaagtcacagtgggttcagaagcttgagaagctcgggctcccaaagattaagcccgggcagacaattgcctcctttcatcagatcacggtgatgctctacggtaccatggctcgctacctccggagaactagagaaacattccagcccgccaacatttttatcaactgcgagagaactccggaggatatgtccaagtgggtccgtgagcactggaacttcaccagaacctcctacgccaatgacttcactgcctttgaccaatcccaagatggcgcgatgctccaatttgaaatcatgaaggcaagattcttcaacatccccgaggaagtcattgaggggtacattgacatcaagtgcaacgccgaggtgttcaccggcgtcctttcaatcatgaggctgacaggagaaggtcccaccttcgacgcaaacactgagtgcaacatcgccttcacacacacaaagtataacataccaaaggaatgtgcacaactctttgcaggagatgactctgccctcgacttctcaccagaagtcaagcccagcttcaggctgattgaaactgaactgtcactgacagccaagcccgtacttaaaatgcaaattcagggacaatgggctgaattttgtgggatgctcattacccctctgggcgtcgtcaaggacccaatcaaactctgggcttcatgggtgagggccaggcaaacaggcaagctcaaagaggttgcggacagttacgagcttgacctttgcctagcataccaacaccgcgatctgttgcaagaggtttttg

SEQ ID NO: 2589 - DNA, 1000 bp, Tomato blistering mosaic tymovirus
tggaaagcttgccaaactctggccctcatgcatgattacatcatcttaatccttggtccagtcaagaagtatcaacggatcatagatgccagagatcgccctcctcaaatttacatccactgcgggcacactcctcagcaactatcctcttggtcccaatctcatctgaaaggctctgttttccttgccaatgactacacatcttttgaccaatcccagcatggagaagctgtagttttagaattgctgaaaatgcaacgcctttcttttcctcctttcttcctctctctccatcttcatctcaagacttccattgagacgcagttcggccctctgacttgcatgcgcctcacaggtgagccaggcacctacgatgacaactccgactacaatctggctgtcatttattcgaaatactcgatctccaatcatcccatcatgatttctggggatgattccgtaatctgtggttctcctcctctcaatcctcagtggcccaatctccagaaactgctccacctcaagttcaaaactgagcagtcagaccggcctctcttctgtggctattatgtctcccccctcggagcatgtcgcaatcctctggccctcttcgccaagctcatgatttgcgtcgacgacctaaccttgccagacaaggtcctttcttatttgtctgaattctcagtcggccacgctttaggtgactcagtcactgaagtcatcccatcgcacctcatctcctattactccgcttgtcatgacttcttctgtcgcaactgctcaccttcccaaaagctcatgctgagccttgatccaatcccagagtccaagctcatcaagttaatcctcaaagttcgctgggcttcaaaaagtttcttttccatgctcccacaaaaggccagagacatccttgtttccactcattctttccaatccatgccttttgatcctaaagtttcccaactagagtcggaattgcttcccaattacaattgacacg

SEQ ID NO: 2590 - DNA, 1000 bp, Unknown
  Description of Unknown: unclassified Benyvirus sequence
ctttactgtccattgctgctggtgggagcggcttgtttttcgcgcgggcaaaagtaaaggagttcctgctgaagatgaaaggcaatctgttcaaacgtgatagtgagcctgacaacacaggcggttttaccggcgactggccgtccaggtcgtctggagaaatttctttacaagagttgagtagaccatcaccggagttccaagctccacggcccctatctccgagagtgagggacattttagacgatagacacctggatgtcttatatgccctccgtaatggtttggcgtattgtgccgggttgtatgggttcacagacaaattcttggcgatcagttatgcgttacaaaccgacaagactctaatatctctcctggaggacgatagtcccttggacgcgatcaagccatcagaagatgccatattggcgaaccatgagtctgaaattgcgctgctacagagggagctggagttggaaaaactcaaaaacgagttagcgttggaaagagctagggcagagattgaaacattaaaaatgcggaaagacgtgcaggcccaagaagaactaaatgagttagccataaaggaacagagactgaaagccgaaactgcagagttttcacggaacaaagaggaggctctcacaaaattggctcagatggacgcagactcatatcaagctagacacacgggaataaccagcgttgctagtattaccggtggatatcttatgggtagggccatgcgcgggcctaagatgagtgcgtacactgctggggttcagggggtttccaatttaagttctattgacagcagcagggcacgcgctaattcaggttctgttttaagtgggtctagggcttcagttgctgcttctgttcctattcagcctgtaacagctagtactgcttccagcagtagggcggggtcgaacgtttttaccattaaggatctaggtagtggtagattacatacacctccacccttttcacctgcagg

SEQ ID NO: 2591 - DNA, 1000 bp, Orthohepevirus A
aaggtgtgtggaccaaaagaaacatttgtccccggtcggcagctgcagttctatagacagtgtcgggattgggtgtcagcaggtttttatgtggaccttagagagctctgcttcgatcgtgagtacgcctgcccatgcctcccttttgagcgggcagtgcgtaaaggatgttgctgtgtcgcccgtaagttgaaacaggtttgtgggtgctttatgtctgatgttgtggagagtttagaggactcgtgtgaggatctgacagccgacttttaccccaaaccagaggtttacgagcccgctggcttggataattggaccatccgcgctctcacggacgccttccatcaggcctccctgcgcgccgtgaggaccggtgcaaaactggctgggtggccggagatagggttggcattctatatcgcccccgtgggtattgtctttcgcggcgagcccctactaggcccccccggtcgccgattagaggcggggccttattgggctgatgcgccgccgccgcccacgccggatgaagcgccatatcaaacaccggtgagcccggacggccctcccccgcctgcatcttggacgccggggccgatctccccgaggtacgttctccctacacctgttacgtaccgtgggcatctccccgggtctgcaggcttctgggagtcgtcctccgcttccacacttgagggctctctgagtcgtcacacatccctccagagtgtcaacttggaccccccccgtaaccctcgagtccagccggtccagagggtattactggagttgctcccggatggggcggcagtttatgaaggggatcttttcaattcagattgcttctggcttgtcaatgcggccaacgcccaacacaaccccggagggggcgtgtgcggcgcgttttacggacgctttccagaggcctttgaccgaacccaatttgtccaccctaacgggtcggtggccgcctacacagtgacacccaggcccataattc

SEQ ID NO: 2592 - DNA, 1000 bp, Unknown
  Description of Unknown: Hepatitis E virus rat/R68/DEU/2009, complete genome.2 sequence
actgcggttctcaacttggatttcactgataaggcatgcactaggataacattctttcagaaggactgcaacaagtttaccacggatgagccagtgctacacggcaaggtcgggcagggcatttcagcgtggtcaaagacccttgtggctctgtttggcccttggtttagggccatagagaaggcgattgtggacacactgcctgagtggtgtttttatggggattgtttttcccaggagaaattggaggacgccgtggccggggcgaaagcctgccgcgttttcgaaaatgatttcagcgagtttgacagcacacagaataatttctctttaggccttgagtgcttattgatgaaggaggccggggcgccccagtggatgtggaggttgtaccacctgctccgttcggcgtgggttgtgcaggctcctcaagaaagcttgcggggtcgatggaagaagcattccggtgagcccggtacattgctatggaatacagtctggaacatggcagtcataatgcattgttaccgttttgatgggttagctgtggccgcatttaagggtgacgactccattgtgtgctgccgattctatcagcaagagcctcgagccgcagccctcatcaccggctgcggcctcaaattgaaggttaacttcggggatgttggctcgtacgcaggcctgctagttgcctgtggtcttggggtcacccctgacgttgttaggttcctggggaggctctcggagaagaactggggtccggtgaaagagcggaaggaagaccttgaacagtccgtgcgtgacttcgtggcaaggttgcgcaacgtcactgctctgtcgtgcctgctcgccactcgcttttacaagctggagcccggcctggccctcaatgcagtcgcaggcttgaaggcgatcgctgaaggccgcatggagctgaaagagtatacctggcctgttctccagctggaggggaagaaggaataacactctggcccgtagc

SEQ ID NO: 2593 - DNA, 1000 bp, Unknown
  Description of Unknown: unclassified Tobravirus sequence
gatgtgaaacctaagactgatttaacaccgcaatttgaatactcagctctacagactgttgtgtatcacgagaagttgatcaactcgttgttcggtccaattttcaaagaaattaatgaacgcaagttggatgctatgcaaccacattttgtgttcaacacgagaatgacatcgagtgatttaaacgatcgagtgaagttcttaaatacggaagcggcttacgactttgttgagatagacatgtctaaattcgacaagtcggcaaatcgcttccatttacaactgcagctggagatttacaggttatttgggctagatgagtgggcggccttcctttgggaggtgtcgcacactcaaactactgtgagagatattcaaaatggtatgatggcgcatatttggtaccaacaaaagagtggagatgctgatacttataatgcaaattcagatagaacactgtgtgcactcttgtctgaattaccattggagaaagcagtcatggttacatatggaggagatgactcactgattgcgtttcctagaggaacgcagtttgttgatccgtgtccaaagttggctactaagtggaatttcgagtgcaagatttttaagtacgatgtcccaatgttttgcgggaagttcttgcttaagacgtcatcgtgttacgagttcgtgccagatccggtaaaagttctgacgaagttggggaaaaagagtataaaggatgtgcaacatttagccgagatctacatctcgctgaatgattccaatagagctcttgggaactacatggtggtatccaaactgtccgagtctgtttcagaccggtatttgtacaaaggtgattctgttcatgcgctttgtgcgctatggaagcatattaagagttttacagctctgtgtacattattccgagacgaaaacgataaggaattgaacccggctaaggttgattggaagaaggcacagagagctgtgtcaaacttttacgactggtaat

SEQ ID NO: 2594 - DNA, 1000 bp, Unknown
  Description of Unknown: unclassified Alphacarmotetravirus sequence
gatctgagcaggtgggacatgcacgtccaagttccgctactcaagcgagtactggaaatatacagtcagcacgtgacgtgcccgctactgctggacatgtgcagcaacctcctcaagaacgtttgctacacaaacaagggtatacgataccacgtcgatggaggaatcatgagtggggatatgacgacgggcctagggaattgtattgcagtacttgttatagttatgtccttccgggacgttataagaaggcttgctaccacgagcgaaagcaacacgctcgacgtgctgggggaactgccctcaagtacggcaacccaagatcaggagttagtccggaccttattagagataagtccccgtcttcgggccgctcagttgacactggggtggctcagcatattagacgatggcgacgaccacgtgataatttgcgagaaacaacatacgtggatttgcgagctagtcctccctctgtggtggacagccatgggtcactccctgagagtggacggcacggcggaagacttcgagagcatagagttctgccaacacaaaccatggaatggtgcaactcggcttaccatggtgcccaacccagcaaaagttttgcccaagtcttgcacggtgacagggaagtacatcagcaaaccccagtcgtatctacgtactgtgtggaccgcccgggctatccttcacgtggatatcccgcttttgggcccatttttccagaacaacgccagacagttgtctggggcccctctaatggaggtcatcagttcggagtttcagcacatcaattcgtccctacattacctaatgagataccacgcgagtggtatgtacctgccagcacagcagaaggtggacgagatggacagggtgctgttttggcgaatgtgggacatttcgccaacggagcaatgtaaatgggaaacgacacttgctcccaaaaacaccaacgtttccgatattgactggccgtcagggtattgagatc

SEQ ID NO: 2595 - DNA, 1000 bp, Unknown
  Description of Unknown: unclassified Tombusvirus sequence
cctgatgtcaaatcactagggcagcagctcgactcgttccgtgctacgaggataaactcgcattggggtcagaggtggccattgatgcctgaccttaaacaaacgccggcttggctcgactggcccccgtagaggggctaacccccactttattacaattatggctacaactacatcgaacccagaaactgcctccgtttattctttcgatgctcctaagcctacaattcgtttgcgccttcccgggaaaggatgtgccacttgtggcatgtccaagcctgtggaagtagcgccagtggtggtacaaaacgacgctcccgtgtcgatggagcatcatgttcaaggggtcaaggctcgtgtgggaccgtggatggcttttaagatgttgttccgtggctatgttagcccggtggcacaactgaaggccaagcacgccctcgagacttacgacaaccctgattatgatgagccctctgatcatttcacggatgtcgtcagcggttgccgcaaccagggtgaggaggcgatccaggcgaagcgcaagcctcgcagggataacacttcctggtggacggtttattctctgcttgcacatgcagagtttaaccgcccctctttcacgcgggcgaacgaaatggtggtgtctacttggattcgcaagcagatggctgccgacggggttaccagggtagactgtgccaaggtgctgggtgccgctactcggatggcatttgtgcctaccgagtcggacatctttgccgcacagatggctcagacccctgcgttccgcaagagagaaggtgaggcaaacaccaaatggtggactgcatggtgggattgcagaccgcgtggctacgaaagtagccaatagggtggcccagttgctgtaccaggaagggaagccggcgtttcgctggcccccaccccttccagtttggtggtacatcgcaaagtgggacatgccaatcgcgttcgacgcacgtacttggtggggcaaggg

SEQ ID NO: 2596 - DNA, 1000 bp, Unknown
  Description of Unknown: unclassified Tombusvirus sequence
aagctgttgatggcgtattcggagagacgacgtgcattaagggatacacagccgatgaggtgggtgcaatttttcgggagaagtgggataggtttcataagcctgtcgccattggtctcgatgcatccaggtttgatcaacactgttccgttgaggctttgcagtatgagcatagcttctacagggccatgtaccctggcaacaagctcttgggcaagttgttggactggcaactccacaataaagggaaaggttatgttcctgatggaactataacctaccgcaaggaggggtgccgtatgagtggggatataaacacttcgttgggaaattatctattgatgtgcgctatggtacacgggtacatgcgtcatttggggattaatgagtttagtctggcaaactgtggggatgactgtgttcttatactagaacgcagaaatcttaagcaggtgcagaagaccctaccggagtatttccttaatttgggatacactatgaaggtggagccgcctgtatttcaattggaagaggttgaattttgccaggcacaccccgtacagtttcaaggtggttggaagatggtccgaaatgtccgcactgcgatgagcaaggatgtgcattgtgtcaataatatacgcgatctggcgacgaggagagcatggagtaatgctcaacaccacggtggattagcactcagtgctggtatacctgtggttgagaggttctactccaggttcgcactatatgatgtgcctcgtaagcatcaacgcattgacactgtcactaatgttcacaagtggcgtggatctggtggaagttatgttgtgactcctgaatctagggctagcttttgggctgccttcgggttgacgggggatgagcaactagctttggaggaccgtctggatagatgggagatggatctgtttggagaggagggtgttgacgctcatgagcccagcatcctcgactccgccgtagcttgaccaagcgagac

SEQ ID NO: 2597 - DNA, 1000 bp, Unknown
  Description of Unknown: unclassified Polerovirus sequence
gtgagccttgttgatcaactggtagcccgggttttattccaagaacagaacaaactggagattaatctctggaaagctataccaagcaaacccggaatggggctgtctactgactcccaagtgatagagttcatcaattctctgtcccacctcgtgcaaataccagttgaagacttggtatacaattgggaaaagcacgtggtgcccactgactgctctggttttgactggagtgtttctcactggctattgacggacgaaatggaggttcgtaaccgtctgacacgcaacaacaataccctcacaagaaagctgagggattgttggttaaaatgtttatccaatagtgtgttggccttttctgatggaagcctgtatgcacagcgtgttcctggagttcaaaagtctggaagctataatacaagctcgactaactcccgaattcgtgttatgtgtgcttattatgcaggtgcttcctgggccatagcaatgggagatgacgctttggaagcagtggacactgacctatcagtgtataaaaatataggtttaaaagtcgaggtttcaggacaactggaattctgctctcatatctttgagaagcctgacctcgccattccggtaaatgtaggaaaaatgttgtacaaattgatatatggctacaacccggaatgtggatcgattcaggttctcaagaattatatcgacgcttgcacttcagtgttaaatgaattgcgtcatgatcctgaattagttcagcttctctactcgtggcttctccatccagtgttgccacaaaagtaagcgagtaagagaagcagacagatagccggtatcagttgttgcaatagccggagtcttagtcaacgtacaatcgtgaaaattgattataaatttctcgccggatttaccgcgggtttcgtgacatcaattccaatatcagtttttgcgatttatatcatctacctcaagatttctgcccacgttagatcaatagtta

SEQ ID NO: 2598 - DNA, 1000 bp, Unknown
  Description of Unknown: unclassified Luteovirus sequence
cagcaacggtgctcagtggttacgataattttaaacaggggagattgatcgctggtaagtggaacaaattcaggaatcctgtggctattggagtagacgcctcccgcttcgaccaacatgtgtcgacggaggcgttgaagtgggagcacagcatctacaacaaggtttttggggaccctctgttgcgtgacttgttggactggcaaacagtaaacaagtgcagtctttttgttgaagacaagatgttgcgcttcaaggttaagggccacaggatgtctggtgatattaataccagtatggggaacaagctcatcatgtgcgggatgatgcacaactatttccgtgaacttgtagtgaaagctgaactttgcaacaatggtgacgattgcgtcatcatctgtgaacgcaaagacgaaaagaagttcgacggattagggaaatggttttgggagtacggtttcaacatggctattgaacctcctgtatactccctagccaagcttgaattttgccagtcccgaccggtttgtataaatgggaagtatagaatggttcgtcgtcctgattcaattgctaaggacgccaataccatgctcagtatgcagaatgcagaagatgtgaagagtttcatgtctgctactggtcaatgtggtatgattctaaattctggtgtccccattttagacgcttaccattctaatttgtatagaggttcgggctacaagaaggtatctgagagctttattgatcgagtcatatcttatgggacagatgagcgcctccagggtcgacggacccgtgttgaggaaccagtaactatggaaaatcggttgagttactgggatgcttttggggttgatccgcaaacacaggtccttgttgaacgttatctcaacaatttgcggatcggatgcgaacccctgggagtgaagatagtgactcctcttctcacaagcacgttgcttgaaataccttattttaaacctcttaatttagcacc

SEQ ID NO: 2599 - DNA, 1000 bp, Unknown
  Description of Unknown: unclassified Luteovirus sequence
aaagtcccacaattctttccggttacgatagttttagagtaggtaggatagtggctgcgaagtggggtaagtttcgtgaccccgttgctattggagtagacgccagtcgtttcgaccagcatgtctctcgacaagctttgaagtttgaacatagtgtttacaatgggatcttctgtgatcctattcttaagaaacttctcaagtggcaactcagaaatgaggttgtcctttttgtcgaagataagatgctacagtttaccatcgatcgaatgcgaatgtctggtgacatcaatacttcaatgggcaacaagataatcatgacaggactcatgcatttgtacttccgagatttgggagtccaggctgagctgtgcaacaatggggatgattgcgtgattatctgtgacaagaaggaccagcgtaaatttgataatcttgccgcttggtttttggattttgggttttccatggctattgaagatccagtttacgaactggagaagcttgagttctgccagggacatccactgtgcatcaacggcagttacaggatggtccgcaaacccgagagcatgtctaaagacgcgcactctatgcttagcatgaaacaccacgaggatgtcaagacattcctcagtgccacggcacaatgtggtctcgttcttaactctggggtaccgatcctggaggcgttccataggtgcttataccgtacttctgggtacaagaaagtctctgagggtttgataaagaaggtgatcagttatggtcaagatgagcgactcggtggcaggcgtgccattcgcgaggaaccagtaactatgggaaataggatgagtttctggaaagcttacggagttgacccgagaacacaggtccttgtcgaacgatatttcgacaatttgacggtcaatatcgaactccgcggtgtaaagaacttgacacctcttttacaaagcattcttgtgggagtccctgacttccctgatttcagccaaat

SEQ ID NO: 2600 - DNA, 1000 bp, Unknown
  Description of Unknown: unclassified Luteovirus sequence
atgcaaatggcgccacctggaatgtaggtgagtacaacaatgttaaaatcacaaaacttctcaacacctcttcttggaagaaggggcataaagacgttgtgctcaacggttgccattttaatgacggtcaaatcattgaacgcgattcaaccatgtcgttccactgtgaagtgggacatggcggaggtacaatcctcctggttgctccccctgtttgtaaaagtgacaagtacaactatgttgtctcttacggcgagtataccaccaaacacatggagtttgggtccattgctatatgttttgatgagaagaatgatggagcaagagcagggaaattcttgggcgctcctttcccccgtgcaggtcacgtggtgcgtgagcaacaaacagaaattgcccgatttccagcaggtagcgacgtcccgattgtaaagatcagtgacaatgactttgctacctctacacaaccagctgcacatattctccctgttccttcatctgttcaacttcctgacgatcctgtctctaagaaggtgcgatcttggatcgagaattcgagcgaggatttgcgcctggcgcgtgaagctgaacagactgacagcgactgggaaccccttccaccacctgcaccccctcctggacccaggcaattgcccaccgacacctcaggtgccactcaggctatccgcaaccagatcctgcgtgatcatacgcagccctactctggccctggtactccgcccgtcttcgatgatattgaggatacgaggtcaaccacccgtactgaaagttcgcggcggagttttctcagtggtgtcctcagaccccagctcaaaccaaagagtaatttgcgtccgacttcctctctcccgcgtaagctaactgctgaccaggaggcacgagtgaaggctgtgcgcgagtcttttgggtctgccgctgctaaacgtcttagagacgagtttcttgaggggaaggtcagtcccgatcagatctactgacc

SEQ ID NO: 2601 - DNA, 1000 bp, Unknown
  Description of Unknown: Torilis crimson leaf virus isolate RL5 genome assembly, complete1 sequence
ttaagtgccggtgtgggggttcctttcatctcgtatgggaaaagaacacaccgtgattggattgaaaaccctaccctcctccccgtcctcgcaaggatgacttttgatcgattacagaagatatcagaagccaactttgaaaatatgacgcctgaggagctggttcagaatgggctctgcgatcctatacggcttttcgtaaaaggtgagccgcacaaacagagcaagcttgatgagggacgctaccgccttatcatgagtgtgtcattattagaccaattggtagcccgggtcttgttccagtctcagaacaagttagaaatagcgctttggagagcagtaccctctaaacccggatttggcctttccacagacgatcaaactgaaaattttgtagattgtctagccaagcaagtgggtgagacggctgatgaagtaataaagaattggccacaatatttaattcccactgattgctcaggcttcgattggtcggtctctgactggctactcgaagatgacatggaggttcgaaaccgcttgacccacaactgcacccccctactaaggaggctccgtgcaggttggctcaaatgcatttccaactctgtcttgtgcctttctgatggcaccctgctggcccaaacaaaacctggggttcaaaagagcggatcttacaataccagctcttctaattctcgaatccgggtgatggctgcttttcatagcggtgcatcttgggctatggcgatgggcgatgacgccctggaaagcgttgacacggacctatccgtgtataaagatttaggctttaaagtcgaggtttcagcacaactggaattttgctctcacattttcaaggagagaaacctcgccattccggttaatgtcaacaagatgttgtacaaattgatttatgggtacgacccggaatgtgggaacgctgaggttttgtcaaattatctcagtgctgtggtctcggttatgaatgaattacgtc

SEQ ID NO: 2602 - DNA, 1000 bp, Ollusvirus culvertonense
caagtaatcacctataacaaacttgatagacaagattatctaacttatcaccagctctactatactctaaactttgtagctacccgatttgtgagctccactctacaatagatactagagtaggttatctctcaactggatcagagacctcatcgcgtatgcttgtgagtgttctaaattggttagtcacgacaagtgtactagctcctctgtacctctactttactgggttgagatttcaagacctatttgtgtacactccgatacccgtaggtatcgaccaacataccgaactggccacattcggtgcaagtgattgcaccaacaccgccaacacggtagcggctacattttccattactccttcagagatctgctaccttagtgcatccttaatcacttgtgcatcactatactttctatatcaatcttggaacaccatgcataagtcagtagtaagaagcttagaggagatccgccggaaagcagtggagcaggaacagaagttgccccaggtgtccctgactggtctggaagatatttcagctcacctccagggtattaccaaagagctgaaggagatacgcttgcagttagaattattaactgatcaagtcaatcaacctcctactagattggcagcaaccgcaccacctttaccggcatctacaccaccagtaatttcttactatccaaacttaaatgtcccatgaatagtgctgagggataaccctggactgataacacggatttgaccatacaaatatgaattgcttcatccattgcttctctctagttattacttagattttagattctatgctttaccttactccaccacgaagctatactggtttttttagttgctattaatctcccttgtatttgttctctcccctgcttgctttttaaaaacttactatgccaactctaacaacactcagttcaaatccatcagtaacaaatgtgatagacaaattaactattacaaaagatagta

SEQ ID NO: 2603 - DNA, 1000 bp, Human orthopneumovirus
caaatcaacttacaacagatacttcaacatcacagcacaggctgaatcatctcctcgcatcatgctacccacacaactaagctagatccttaattcatagttacataaaagcctcaaatatcgcaatcaacactaaatcaacacatcattcacaaaactaacagctggggcaaatatgtcgcgaagaaatccctgcaaatttgagattagaggtcattgcttgaatggtagaagatgccactacagtcataattactttgaatggcctcctcatgcattgctagtgaggcaaaacttcatgttaaacaagatactcaagtcaatggacaagagcatagacactttgtctgaaataagtggagctgctgaacttgatagaacagaagaatatgctcttggtatagttggagtgctagagagttacataggatctataaacaacataacaaaacaatcagcatgtgttgctatgagtaaacttcttattgagatcaatagtgatgacattaaaaagctgagagataatgaagaacccaattcacctaagataagagtgtacaatactgttatatcatacatcgagagcaatagaaaaaacagcaagcaaaccatccatctgcttaaacgattaccagcagacgtgctgaagaagacaataaagaacacattagatatccacaaaagcataaccataagcaacccaaaagagtcaaccataagtgatcaaaatgaccaaaccaaaaataatgatattaccggataaatatccttgtagtatatcatccatattgatctcaagtgaaagcatgattgctacattcaatcataaagacatattacaatttaaccacaaccatttagataaccaccagtgtttattaaatcatatatttgatgaaattcattggacacctaaaaacttattagatgccactcaacaatttctccaacatcttaacatccctgaagatatatatacagtatatatattagtgtcata

SEQ ID NO: 2604 - DNA, 1000 bp, Unknown
  Description of Unknown: unclassified Orthorubulavirus sequence
caaagagtccagccaggccgatggttatgaatatgactcttacttagcacaaaatgcaaaaaccaacattctcaaaaggtggacagatgtaagcggggatgttgagccgatcccgatgaaccccgaagtgtttaagaggggggcagacctcaccaagcccacaaatcccaatccaggtcatcgccgagaatggagcattgggtgggttgggtcaacagtcaaggtcttggagtggtgcaaccccacctgctctccaattacagcaacatcccgatactatgaatgtgtctgtggaatctgccctaagatctgcccccgatgtgtcggagattatggacatgttgagacggctggacgcaaggattggctcagtagaggcgaagatggatcggattctagcagtaggggcgactgtgaatcagatcaagaatgaagtcagttcattaaaatcgatcactgccacaatagaagggatgattacaactgtaaggatcatggaccctggcaccccgagccatatgagtgcaactgaagtaagaagacagttgagtgacgtcccactagttatcagtggacccggtccagtcccccaacttgaccccagaagagacttaattgccttagatgagcttgctaggcctaaggttgtgcagagccccccggttgcttctcccgcaccctccatggcctcccagctaagtgatggcacccgcatcatgatccttcagatgataaaagaatgcgtctctgatccgcttgaacaatccagatttgaaactaaattgagcagctgcacaaccgaggaccaagggaaagcaataaagatggaaatcttacggagagcaacctaaaaactagctgacacactgctcaacatcaaccacccctgcaacccacccacatgcgcaaccgcagcccagagcacacacccaacaccgactcaatcaattaagaaaaaacataggcccgactggctgcaaacccagtcggaaccccggcc

SEQ ID NO: 2605 - DNA, 1000 bp, Unknown
  Description of Unknown: Bat Paramyxovirus Eid_hel/GH-M74a/GHA/2009, complete genome.2 sequence
agaacaaatcaagaagatccctgcaatggagaagaaactatcagacattgaaaagcttctgcttaaaaccaatactgcactctccaccattgaaggacatatcacatcaatgatgatcatggttcctgggaaaacagtgaacgaaggagagatacaaataaatgagcagttaaagcctgtaattggaagaaaagatggtgtgtacgacaaaatgatactcccacgagtagacaagaaaatctcacttgtgactgatcgtacacctctttgtgatgatttcaaagaagatccttacgtgttaaatgagaagcttatccttgaccccatcaatccaagcgtaaccaatgcctcggcgttcatacccagttacgacaatatatctcctgctgttcttcgatccctcataagaagcaatgtagaagacagagagacacgagtggagttgattgagttagtgaatcaagcaagaaatgattctgaactcaatgagatactcgcattagtcaatgacattatagattcaaatcagtctggtgtgtgattcccaaaatcactcaactaactcaacaaacaacacacaatacccgaagtagaaaacaatgacactagatcgctacataactgtttcgcagtagctgcaatagggacacatgtaaatcaccaccgattacacccaccaatctcaaatcacagctgttcacgcatctttactcactgcttaagcaatgatatatgcaagtataattaaacaaaacttagggatcaagcacgatccaacgccggagagcgacaaagaaaaaccaaaaccagagaaacaccaaccaatctcccaacgaaactaagaggaccccacaacagcgaaacccatccaaaaggaagaagtcaccccaaaacccaaacccgaaaagacaaagaccgtcccaccgctacatcagcagcgcaggagtccaaccagctgaggtcaagaggaggaaggaacagaagtagttctacggacgaa

SEQ ID NO: 2606 - DNA, 1000 bp, Unknown
  Description of Unknown: unclassified vectors sequence
agcaatacccgaaaacgacccccctcataatgacagccagaaggcccggacaaaaaagccccctccagaagactccacggaccaagcgagaggccagccagcagccgacagcaagtgtggacaccaggcggcccaagcacagaacagccccgacacaaggccaccaccagccatcccaatctgcgtcctcctcgtgggacccccgaggaccaaccccgaaggtcgctccgaacacagaccaccaaccgcatccccacagctcccgggaaaggaacccccagcaactggaaggcccctccccccctcccccaacgcaagaaccccacaaccgaaccgcacaagcgaccgaggtgacccaaccgcaggcatccgactccttagacagatcctctccccccggcatactaaacaaaacttagggccaaggaacacacacactcgacagaacccagaccccggcccgcggcaccgcgcccccaccccccgaaaaccagagggagcccccaaccaaacccgccggcccccccggtgcccacaggtaggcacaccaacccccgaccagacccagcacccagccaccgacaatccaagacggggggccccccccaaaaaaaggcccccaggggccgacagccagcatcgcgaggaagcacacccaccccacacacgaccacggcaaccgaaccagagtccagaccaccctgggccaccagctcccagactcggccatcaccccgcaaaaaggaaaggccacaacccgcgcaccccagccccgatccggcgggcagccactcaacccgaaccagcacccaagagcgatccctgggggacccccaaaccgcaaaagacatcagtatcccacagcctctccaagtcccccggtctcctcctcttctcgaagggaccaaaagatcaatccaccacatccgacgacactcaattccccacccccaaaggagacaccgggaatcccagaatcaagactcatccagtgtccatc

SEQ ID NO: 2607 - DNA, 1000 bp, Human respirovirus 1
aacgaagagtcagcagccactccaaagaacaaccacaaccacagaaaaacaagatacacaacaaacaatgcaaacaacaacacaaaaagtccaccaactcccgaacacgacgcaaccgcaaatgaagaggaaaccagcaacacatcggtcgatgagatggccaagttattagtaagtcttggtgtaatgaaatcacaacatgaatttgaattatctaggagtgcaagtcatgtatttgctaagcgcatgttaaaatctgcaaattacaaagaaatgacatttaatctctgtggtatgcttatatcagttgaaaaatcacttgagaataaagtagaagaaaatagaacattacttaaacaaattcaagaggaaataaattcatccagggatcttcacaaacggttctcggaataccaaaaagaacagaactcactcatgatggccaatctatccacactccatataattacagatagaggcgggaaaacgggaaatcccagtgatactacaaggtcaccatcagtcttcacaaaagggaaagacaataaggtcaaaaagacaaggtttgacccctctatggaagctctaggaggtcaagagttcaagcctgacttgataagagaggatgaactgagagatgacatcaaaaatccggtactagaagaaaacaacaatgagcctcaagcatccaatgcatcacgcctgattccgtccactgaaaaacacactctgcactcactcaaactagttatcgaaaacagtcctctaagcagagtagagaagaaggcttacatcaaatccctttataagtgtcggacaaaccaagaggttaaaaatgtaatggagctattcgaggaagacatagattcactaactaactaaacatgaatctacaatttcaaccagcaatcaaaatcaatatccagagccaactcaaaaagctccctcaaaacaattaagaaaaacttagggtcaaagaaattttgcccggagaaaggaa

SEQ ID NO: 2608 - DNA, 1000 bp, Unknown
  Description of Unknown: unclassified Sobemovirus sequence
gagctggtagagaaaggtctctgtgaccctgtgcgcttgtttgtcaagaacgagccacacccacggaagaaattgcttgaacgcagattcaggctgatctcttctgtttctctagtcgaccagctggtggagcggatgcttttcgggccccagaacaacaccgagatttcgacttggtggcagtggccctcgaagccgggcatgggtcttctgacccctgaacaaatccgtttggtgtgggacgacgtgttccagaagcaccaggcccaccctgcggctgaggcagacatatcggggtttgactggtccgttcaggactgggagttgtggtcagacctcgcgatccgtataaacagagggaatttccagggaaacctcaggagagcggctatcagccgctactactgttttatgaactctgttttccaactctcagatggaactctcatccagcaggaattgcccggactgatgaagtctggctcttactgcacctcatctacaaactcgcgcattcggtgcctcatgggtgagcttatcggctcgccgtggtgcatagcgatgggcgacgattcagtggaggggtggattgaggggggccagtccaagtacgccgcgctaggtcacacctgcaaggagtactacccatgtaagaccagagggcgcgagctcttggaattcaacttctgttcgcatttgatcaggaggggtcatgctgagctaacttcatggccgaaggcgttgtttcgctttctgtccagcaagcatgaggactttgaggatctgtgggttgagctccacacgtgcggggtgtggggccggatcgaacgatatctgcgtgggatagggcgtgtctcccacaaagatagccaggaagggcaagaaaaccaaccccaaccaggggcagcaaggaaagaagaagagccggcgtccacgtgggcgttcggcggaaccccagcttcaacgggctccagtggctcaggcctcccggatatctggg

SEQ ID NO: 2609 - DNA, 1000 bp, Unknown
  Description of Unknown: unclassified Barnavirus sequence
cgtgcgcaatggcgcgtgtgatccggttaaactattcatcaaaggagaaccacactcgcagaagaaaatcgttcagggttttcttcgaatcattgcaagtgtatccctatgtgatcaacttcttacgcgtacgattagtgcgcgtcaaaataagactgagatcatgaattgggaaacctgcccgtcaaaaccgggtatgggtcttcacgatgaaggtcttgccaaactctccgagaatgctcggagaatactaacggaaggtcgcatcatggcgactgacctatcaagctgggactggacagtccaagaatgggagctggaggtggacgccaagaggcgtatattactggccgggattgatgaagatcacccaatggccaaactcttaatggcgcacgcccacatcgtcgccaactcggtctatgtggattcggcgggtaacatgtttgcccagacaattcctggaggtcaactctctggggattacaatactggatcatcaaactctgcgatgcgtgtaatcgcgactcaagctgctaggcttaaggtaaatcaagaactttaccttgagcgcatttcggctaaggagttgcttgtatgctcaatgggtgacgatacactcgagttggaagtcaccggcgtgccagaggtcttagaggagatcgggcatattgttaaggatgtggaattccatgagacactgcaagatgtagagttctgttcgcaaagatttaatgcggacggttcagcctatccagtggattataacaaaaccctttacagattcctttcgcacgctcccgacgacgtagagtactcctcctacaaggctcagctcatgtacatattccgacacatgaatcaggaggctcgcgataaaattgagcacacagcactagtccgggttgagcgggctagaaaattattctgtgagaaaaacaaattgtaagttaatatacaccatatctactgtgcttcgacatatatttggtagcttgca

SEQ ID NO: 2610 - DNA, 1000 bp, Unknown
  Description of Unknown: unclassified Polycipiviridae sequence
tcagattcgagttatcgtgaagttcagcaaaattcttttattcccgcagatactagcatgttccggcatattgagttgacaatgccatatgaatatcccaccccgtggtatgatcagtttgcctggatgtcccgtagagtaactccctcgcgttatgttagaagtggtgacatttctttcgacacattcgcagccccccttacaaatgagcctcatggtgacaatttcttcgccatgggacttcgtggaaatcttgcagccacccaagaaggagctcagatcgagttcgagttagaatatcgagctgtggaagggtttcagttcgctgatccttaccttccaccagcatattttgcaagtactcatcgtgatctcctcattaatgactttgacaagattaagcgggttccagatccgactttgacttcagatggtcttagtaaaatcactaaaacaggttccaggactgtaagatctgtttcatctcaatctatagctcaaaggagaaaggctgatttgaagctagatctttctggaatagatttaggagaagatactgtagaccccgtgatgcctagtggatatggatctcgcgaacgggaatttactttttagagtttaggtcatttttcattcatgttcattttcagttttaaaatgaaactcttcatgcataaccatgagttggctaattacgtgacggttcctagttatgagcaatctaactccgaatatagaggtgaaactcttgacggccgggaacaagtagcgtgctttagtcgagcccgtaagattgaccaacgcaattcttgtatcagaaaaaggagtttttatccctagactcattgtatgtaatgctgacctagtcaagtcttaggacgcgctgtacaataaacgtctatgcaacgtctcggtgggcgttgcattcagggtgcagtctaacctgcattactcccttgatctgtgtcggagcagtagaattgtgggcggactaattaac

SEQ ID NO: 2611 - DNA, 1000 bp, Unknown
  Description of Unknown: unclassified Polycipiviridae sequence
atctaatatggtaggtagtatatttggacccgcaggagttttattctcctcaatcgcttcgccctcggatttcgcatcacaatttaatacaaattatcaagttgaaacaccatctggcgcctttgtaaatgctcaagatggatcaaatattaatgcagatagttatgtcggtagcaccagttagaactccagcacaggcaccattacagcctatgcaaccaaatccccagacagcctgcggaactttggatgacggatgtgtttataacactatggatattcatttaggaggacaacaacctaatgaacagttttgggctgcacgtagtgaatattgtaatcaagtacaatggaccactcagcaggccataggaacgaccctggcaacgattgatgttttacgttattgtggagatgatatgaataaccctgacaaccttaatgcaaatggaggattacaaactagatccagagcatatggtagagtaatatggccaagatggttaattacgaaatcgtcgacttatatctctgtctctgttaaatatgacttctggcttcataaaccagtaggtccagtagtaggaggtaagttgaggatatcgtataatcctggtataagaaagaattggaatactgtgctaaatagcattggaagcactattgattcctatcaagattctctgttcagagaaaatttatgggaatgggatgtaaaagcttctgatacttttagtgtcacacttaatggcaatataccaactaaatacattactagtaccataccaagtacaagattttcagaggttgcagatccacgcgagtgttttccagcatttatgacaagttttggaacgttagagattagtgttttgaacaattatgtagcaggttcagtttttgctgattctgtatttatatctatttataaatcatttccgtctttacaagcttatatagttcgtggccaccgaaatgaccaattcttaactgcaattta

SEQ ID NO: 2612 - DNA, 1000 bp, Unknown
  Description of Unknown: unclassified Sapovirus sequence
aagcaatggaaaatggggcttcaccatcacacctccttccacgcaggctccagagggctcgtggcaacagagctggtggttatgccgtgggtatggtgattgttggttcggcacaccaggtcaaccgccacttcacggcgcttggcacaacttttggctggtccactgctccttatgagccaatgcggtgtgcgtttggtggtgtgcacactggtactgacacctctcccaaaattggctattattgggaagtcgggtccgaccaacgtgggcccatatttccccatatagtcaatcattggccagattttgctgtgaacaacacctactcatggccaggctcggagtttgtccctcaaaacgccattgtcggtacacttgtctcctttgctgacaatggtgatgtgtccgagaacgaggtggtacccgcatttgcggttacaatgaacactccttccaccagcactcgaggcaccgtccgtggctcatttgacccatccaccatgcatttggtgcgtactaacagcactggacaaccatctgggtggccatctggcccaaacaatgggaatggatatttcacaccaatgtggggacatggtcagggcaatgctattaatgataaaatcaccaacatggagggtgtgaattacaccttcggaggctctggccaaaacaacattgtcttgtggattgagaggatcttctccgaccaccccggaaaaacaaccctgtactcatctcagctggacagtactgccacaatatttcaatctggtcctgtcaacatccctgagaacatgatggccgtgtataacgtcaccactaacggagctgacttccaagttggcattcgacgtgatggctatatggtcacttctggagcaattggaacacagcaagagcttgaccccgacacttctttcacttatgttggacttttccccctttctgcctcacttgttggcccacatgggaatgctggacgggcacacattgc

SEQ ID NO: 2613 - DNA, 1000 bp, Unknown
  Description of Unknown: unclassified Iflavirus sequence
tcaaaccttccaacctttcttagttttaagttgtatcgattgtatttgtgtgattattcataataattgcccatcttttctttcgcaaatacatctcttctctaagtgtgaatgtttctgaacgttgtatgaatcagtttttctcttccaatttatcgaacttgtgtatatgtgagtgtgaactaatttttgattctttcttttcgtttcgatgactaggactgattaccctaccattgatcctaacaatagtcacgacgggatagactccgtgcagtgtttttagaaatccggttggactccggtagcacatacgatgacaccacactagccagagtcggcgtagtcgtattgtgttgtgttccctactagagacccaaagcagcgttctcttattcattatattcttgtgattctgaaatgaggtttgttgatttgcttgtggtagtgttgattgagacccgtttccggtaagctgcttggtatcgtgatggcatagtgatgcttgatctgaaatcacagactcgtgttgtcgcccgctacataatttaaacgtattatggaactgctagacatctactggtcaaatgggagaagcaacatgaggtttgtttcttttgtttgggatcacggataaacagcttttaagaagtccctgcgctccctagcttgcagctctatagcgataagtcaagtgaagttagtaaactcttcttagctggtaatgagtatgtgctatatatcctggataagtcccccccagggttgatgctaatggtaggtgcacaacaggcaggtgcacctttgtcgtgggatgtgaattcgttctgcccgggcaccatagaatgactagtgagtagcaatcgatgtagtaccctttcaatccatatagtctcaaaattacctggcagttgttttcaacgtgaacacaactgctttcgttctgcctaatcctatattttaaagtttttttttaaattttgtttgtttgtgttacaat

SEQ ID NO: 2614 - DNA, 1000 bp, Unknown
  Description of Unknown: unclassified Iflaviridae sequence
aggtttattttgaagcgttttgttcgattccgatcgaccatagaaaaggtatattatgttcgcatctgtatcatcgcttcaaatttaaagttttaaggctttttattattggagaacttttgaaatttatttggtgagcctttagtctttgagttcgatacttagactatttaatttccagatatctatcgtccaagtagaatctgaggggtttaaagcaggagccgtgagtcagcccagacaagcgtagtactgttttattccgaagtttgcgttgagcgaccggcgtcggtgcgtcaaacaaaattccgaatggagttgtggttcgagcgagtatctatacacgcggatcatgtgggaagttttgcttactgaagttttcaatgatatctaacattggccctcggatcaacctaaagactggaagtacccgaccaacgcccagctagtaagagtttaaatactcgcgagcagttagttggcaatgttatttggatttgtttatgaatgtttgagactccgtacctatacgatgcgttgattaccatcagaaaaagctctagtaatgaaataattatagcggtttcctggactatggtgtaatttcagttacatagtgactactttacaatcaaagcctaaacaggcattactataaaagaaccgtcgtgttagcattgtgtttggctaacatcccaacgatagttggcgacattgaactgagagcaacatacgttaccaattcgattatcgttcaaaaagctctgggcaggaatttgaaaaatcaaacttcctgctaaagttaaacacacaaaccttattttattttcctaatttaacgtttacgttattttatgtcagttgttcgtttgatagaagaagttgaagaaaacagtgaagaaatacatccgtttcaacaacgattacaagaagcaagtacaaatttccaattacgtcgatcaaattatccaataggcacaacaagattatacaatcaaca

SEQ ID NO: 2615 - DNA, 1000 bp, Unknown
  Description of Unknown: Iflaviridae sp. isolate rfb094ifl1 genomic sequence.1 sequence
aggttatttaatcggtgacagactgtgctctgcacttattatttagcataacttgtacatatataagaatctaattttaaatgaacttacgaaaatcaacagtccacctgaagattgattaggtttagtatagaggttttaaatgatttcgatcatttatataaaagatgtattatattcgtatctgcatcatccttttatttttaggttaaacagccttggtgacggcttgagttctgactatgtacacccacgtagccgtggtaccgcttttcagaatccaccctggcctctctcctttttaagggagtttcctggagagagtaatttgcaccgccagtatcgatcttacgataactcctcccttaaaagcaagacatagtttgagtatatcagacaaacgttatattatctagttgcatcctcaatgaacaaggtattctgcatccttaactcgcaagggttattgaagcctcatatggacgagtccaacccatatgaagtgtccagttactttatttcgcctctcgcaagggaaaagtaaagtaatgcactaatattgaccttcaaggttgttggttattattagtagagcctttgataatataatcgtatttgaattctcctaaatattgtgtatgtaaggcgctcacggtcccgttggggtttatgcatcatgtcggccacgtgagtatgaagtggttctagtttactatgatactgcaaggcaggccggtgtggatacaccaaaaaccaaaacataaatacacctttagccatcttttgccgctttctgcgagttttctgcgagttttattattccccaaagccattattagctaccttttatgtcaacagtgcgattaatagaagaagttgaagaaaactgtgaagaaatacatccgtttcaacaacgtttaagagaagctagtgcgaattttcaactgcgacgatcaaattatcctattggaacagctcaactttatagacaaagagaaca

SEQ ID NO: 2616 - DNA, 1000 bp, Unknown
  Description of Unknown: unclassified Picornavirales sequence
gcagtgagcaaattccattgcagtcgaggtttagcctcgccattcgtcttttaaaattagtttcttttaagatgctagaagataaaacacggtaaaaaattgtatataacgatataggtctggagtatagtaatcaatgttaattcgttgcattggtgataacgacatactgtatactcccaactttcgcgccggacgattccggatatattgtacgtgataataatgtcttcttaattgagactgactttttaagtcaattaaacaactctaccagagcctacgcgttctatctctgacacgggatagttctcagggttgaagattccataggtcttcagcctgccgaaactctgtgctgtaatgtagggtcgactaccatctacctatttaggtttgaatcggtctgagataatttcaatacacgaccggccttaaaatagttcttcagagccaccggatggttagtttagatgtggcatagcgaaaaacgcagcacactgatgatattctttcaaacgaattttgttccctcacgatcggtgaggacctgcttcaagcaggagataatggatttttgcttgcccctgttatattagggcaagctcaagaaactcatgtacatggacctactattgtacgtgattttacagattgggacgcctttaatttgtggcaggtcccagatctttattatgatggtccggaagcagatttagctgaacgagatggttttaataactatcaaaatgaagcaaatttgcgacagactataactaccgtcattgaaaaagatctacctccttatgaggtgttgatttttagtgatgaagaagaaagttctcgaactttcttttcctgtgagtcggataatgaagggtacactccttcgtcttctgattcacaagaacagatgcctgatatcatatatcagatgccctttacagctacttctatacaaaaagaacctgaccaggttcagcagaagttagttaaaagg

SEQ ID NO: 2617 - DNA, 1000 bp, Unknown
  Description of Unknown: Picornavirales sp. isolate H4_Bulk_Litter_22_scaffold_31 sequence
ccttcaatagaaaatatgcgtaagttaatttgtatgttttaattttagactaaaaatataaacattctgtactatcaagttagtatatgtaaaatctttatcagacgatcaatctgattataaaagatttgtacatataaaaccttgtgtttgtacacgcttatgacgtgagaaagtgcattgagcgatatcaatgtggatagcttactatagctatccgttagtcttgaacgatcaaattcaggagctataaatggacattagtccaaggtctttaatcatgtaggaccttctttttaagtaaaggaaacatgagaaccacacatgggaagttattgccctcatgtgagtccagctaaatagtttggcattaggtaaagattgcagtgagcaaattccattgcagtcgaggtttagcctcgccattcgtcttttaaaattagtttcttttaagatgctagaagataaaacacggtaaaaaattgtatataacgatataggtctggagtatagtaatcaatgttaattcgttgcattggtgataacgacatactgtatactcccaactttcgcgccggacgattccggatatattgtacgtgataataatgtcttcttaattgagactgactttttaagtcaattaaacaactctaccagagcctacgcgttctatctctgacacgggatagttctcagggttgaagattccataggtctttaacctgccgaaactctgtgctgtactgtagggtcgactaccatctacctatttaggtttgaatcggtctgagataatttcaatacacgaccggccttaaaatagttcttcagagccaccggatggttagttcagatgtggcatagcgaaaaacgcagcacactgatgatattctttcaaacgaattttgttccctcacgatcggtgaggacctgcttcaagcaggagataatggatttttgcttgcccctgttatattagggcaagctcaagaaactc

SEQ ID NO: 2618 - DNA, 1000 bp, Unknown
  Description of Unknown: Picornavirales sp. isolate H2_Rhizo_32_scaffold_97 hypothetical1 sequence
acaagatagtggagcttctcaggttagaccgtgtaatgacgttacctgagtgatatgtatcccaactattgtttataacaatgaaccgggttcttggtatggtgtgtgagggtcagcctcaccggagtaatgaaccgtacgaccaagaactgctggaatgctttgttattcacacttaattgtgtgcaattgtgagttgccatacaactcgcgtatattaaattttacttgtttttggataaacatgataacacatatctttcattccgattatcccatgtcggggatatgatagaataaaggagtgtacttgatatctatggcctggagctagtatgtccaggaataaccaactatcaaatacggcaggaggaattattgtctagccgacaatcctctgaagatttaggttaccagccaatttagattgaaagattatgacccagaagtcgctagagctactaagctcgcgcacgtccgtgttttacaacaacaaagagaccagttcctttctcataggaaggagcaggtccaagaatttggagccgattttgtcttggctcagttcttaaataagactgtagaacctatatctacttctccgggcgatataccagaaaagtataggagaggaaactttccaattcgagataattatttgtctttatcgttacatgatgaatataaactcgatagtgactctattcgtcactactccttaaacgaccgaagctcgaggagtcaaaaaagagctaatgataaattacgtgaaaagtatgatcctaaatacttagtagcagtggttcgggtgctcaaaaaacctgaacctaccgaagatcagttacgtcgtcttcgaagattttggaatctccttgagggggttccagaatttgatattgattcactaaaacaatatttctttactgtaaatcatattttgtttaagaacaattggttttccaaagttgaaacttggaagtcaagaagtttctttacattt

SEQ ID NO: 2619 - DNA, 1000 bp, Unknown
  Description of Unknown: unclassified Picornavirales sequence
ataggagatacataacaaagaaaataataaaaattcttttgtacatatcaaaggtattggtttgactgagcacttggcgagcgagtgcaaggttgcaatgtcttaattcacggttttgaacatgttccaccagggatcgtacctgcatgttttgtcgccttaagtggcggactataaatatactatactcaagtggtgtgagtgtatgtttgtagcgcagttcgagagccgaataattcttaatattgaattgtgatgtgttatgttttgtgtagtttgtattttaattgtatgcgtagtaccaaacgctcttttgtgtgtttatgcgatcacacttactttgttggagcgatacgatcaacgaagttaatgtcttaatctaaggcctttgccgcatgtggaagaaccaatccggcatcgtattataccccaaccgctaatgaggttggatgagggcaaaatcgtagctcatctaccttctacccttttaaaatggaggagagatgctatactagggccactacaggggcccgacccccaaacctacgtggtgatgtgtgactttggcgagatggtaacttgccttgtccggtaccatatgagctacttctacattagatatagaatgacgcgtttagctgaagacccttagtacctccggtgaaagttgtgcccggaatgtggttgaatatatcttgtggttttagagtagttatgtatgggctggaactgttgtacacactttgatgagtgctccgcattttccctttgcgaataagagcacaatgattctatacgtgaagctgatacattttcagagacttatcgtgaatgatatacgtttttgtagatttgaagggccctgaaaaggtttaccctagtctgaattcctatgtcttagcggtttgagatggaatgttgttgcctatagtacgtaaggttgaacattgccataggcaatcctcaagggattggcttggcgatgtgggaataaacttca

SEQ ID NO: 2620 - DNA, 1000 bp, Unknown
  Description of Unknown: unclassified Picornavirales sequence
tgcagtaaccgctgcagtgaccagtttttaggtccctatagtttgacctagaggtaatctaacagcaaatagggattctccgttaaatcggaggccagctaggaggccaatctttgtggaagccttataggtggcacactggttgactatcggcctatccatgtggaagctatcccggtttcataccggattctatagtggcatatgtgtagactaggctcgtaatatccaaggaggcctgttgcggtcttaaccgtagcagactatcgtttgttgttcttaggctctttgcgttctttgggaagttttttctttgtccatttgacccaaaaacccagttcggcccttatgttatgttgatccggtcctttaggcctttgtgtgtgtaccacgtagtttaatagtgcaccttatcgtatggataccaagtgcgattcgtattttaagattggaattttgcgccacacgtcgtatgttgcttcacgtgtcttgtagtgtttatacttagacattattcgtagtttaataagtagagagtgagcctcgatttattcgtgacactgctctcacaatcattgactaatatacaggtattggaactatcttcttatgtttcagtaggctgatgtctttgaaatccctttttatgggtgtcccccacttttaggctgtcagcgatcttgctgccaggcaaaattatagagggctccgattgggtgaattgtgaattaccccagtatgagtttaaacaaatacccgcacagcaccatctcaaattattgatggagcgcaactcggtcgccttgtaaccgatacccccgaaacaaccgcgaatggtaacaattccctggtaccccccccggcccttatcaagcacaagaagtctgcagaagaaattaaatttgaatctgtagatcctactttatttgatgagtggattcaaaatgttgagattgagcaagaacctccaaaatctattcatagattgcggaaatgtttg

SEQ ID NO: 2621 - DNA, 1000 bp, Unknown
  Description of Unknown: unclassified Picornavirales sequence
ttgtcctttttaaacataaattagattgattcttctcttttgagatgtagaactatacctggttactaatttaagtcgattttaatttcattattttgcatttgttttagagcgcatgaagctcactgaataaggtttcagtcaattccttttcagctcttatttatataagatataaacattttcattattttggaaaataacgtaataaatttcagtattttatatgtgtgtaggccggtaccgaatggataaatccgatgtcctgatcattatataccttattgcttgtagaacactatatgaccgaatttgaagaatagggttaagaaagttccccgttctatcaataacaataaaccacccttcatgagaaaaaagttacttacagaaaataaacgaattattggtggtaatattgacaacatgggttttattttaaaagaaaaaatggacccatcctccgcaaaggagacgcgacgaattaagtttcgacgcaaaaaaatacaacgagcgcgaagcagctcgcagaccttttaaaaataataaggtttggaaaaattcgcaaaaatggaaactagagtttgaaactcttcctgaactggatatcatttccgaagagtcctatcagccacactttggcttagagactatttcagcagcgtcattttcgattgacgctttggcaaaatttgccaatattgatattccagataaagttttaagagaagtagaaggagttattcttcttctagtaaatctttcacaacaaagtacaccattgggtgtcattacgtcagttttgacttgggctcaaggtcgtaccacaaaatcactttttaaaacagtgaaaggatttgttgaggaacttctcgtttcaccacaatcaagcgcaaccccagattggttggattgtcttcgtgatgtccgccaaaattggcaattgtgtaagactaatagagcattcaaacaagtgtcaaaacttcttggttgtctcgtc

SEQ ID NO: 2622 - DNA, 1000 bp, Unknown
  Description of Unknown: Picornavirales sp. isolate H1_Bulk_30_scaffold_14 RNA-dependent RNA1 sequence
gatgatatcctctccttagtgaaagtattctaccgtttgtaattgaaaattgtaaagttggtaaggtatgtcggattcactggtattttaatacctctaccgctgatcgaatggtgtaagatcagggtcatgcggggcagtgccgcaatgctacaccatgttcaacccttttgtttgacgcccccagggcttccgaacacacatggaaaaactaaaccccccctcctctttctcgattgaagttttgaacagagtaagcgctctgccaaatgtggatttgactgttgatggcaaaatgctcccagttgttggttcaactggcggtggtcctcgcaagccaaagttgcctgccaaggacttgtgcctccgtgaatgtgcacgtgaaggagaaaggaaaggtgcagtgaacctgaaagagaaatctagtaaggccttttccaataggggaagcgttgagccggtgggttttactcaatcccgtttgaaagcgaaagcaagtaatagggagcagagtcttcaaaggcattgggatacgtcgggcattactgccccccgtcaacatcgtgaaatgctgcagcgtttagctgcagagagacgcgttgttgaagaatggaagagcaagggaaaagttgaacgtaagcgagagattctgcttaagcgtgataagcgttctggcgttgggattgagttccagagaggtaggtttatgcctgcttcgccggaagatttgttgcctgatgcagaagctcaggcgaggactgatattttacatgcgtgcaccgagaataaaatgccgtttgttcgtgatgttcgtgacattttgcacacatctgcgatggcacacaggatgatgactgagtatggcgaaggtgaggatcacagtgagttatttgagtttttaccaaaacatattagttccaagttgaaaccccgttcttttgagttacttgacgttgaatggcagtctggtaaggttttaccagctgttgcaggagtagcc

SEQ ID NO: 2623 - DNA, 1000 bp, Auricularimonavirus auriculariae
cagtggcggaagtccgacaccagctcggccaggcaccgacgcaggcggtgatgaatgctcttgcagctcgcggggagaccgcatcccagacggccccgacgccagagtggcagcccgaagagactcgcgaggctgacgacgaggacgacgcgttccaccacccctcatcgaacgcggacatgatggagaggatagagtcgctgtcgcagcagctcgggagcctcaccgagtggaagtcctccatcgaggagaagatgcaggccctccataacgatagcaagagggccgcggacaacgcctcgtcgttcgagagtcgcctcaaggaggtgaacaagggcattcatagccgtctcgaccgcatgtcggaggccttagagagcctcgggaagtttgtcaacacccagcggcagatcctgccgcagcgaccccgcgcgccggaagcacaagcgccagcgtccctacctgaggacgtcaaggtcgaggtcatccacccggacgctggctccctgctggatgcgcctggccgcgcgtcgcaccaggagcagctgctcccgaggtccctacgtcccgcgccgaaagcgcctgagacgtcgaagaggacgacggccgaggacaagaagaagttctcagcagacgctgcggcggctctagcaactcgccaggagtcgtcccctcgcgcccgcgccgcgggagcgaagccgttcgaatccacttcgaggcggaccgcgcttccccccccgcctccccctatcgctttcgacgactcctcggacgaggaggacaaagaggaagtgggtgcggtcgaggggtacgacgaccttgagtgagctacgccctgccttccgtgcgtcagcgccacgatagcagctcgagaatgtacttgtaagattagacgcttgaggatgccggcctggacgcgcctctatcactttgatgatctcgccgcttagaaaaaaccaagagacaaatcgatagatattgtctctggtatctcgccgtg

SEQ ID NO: 2624 - DNA, 1000 bp, Auricularimonavirus auriculariae
agttgcttgttccctttccgcagatgttaaaaaccaaggagacaaaactgatgattgcgtcttggttgaacgctcagcagccgcgcgccgggataagcatctccggagggaacgagtatgtggagcagtccgacttcgggtccgagcccgctctgaccggccagatagatgacctcagcgcgatctacagcttgtaccagaagcctaacaaggtcatcgtgggggcggacgtactgccgaaattcgcgcactcggtggatcaagacgctcctcaccccgcccctcatctctggaccgaggatatccgtgctggcacctggcatcgtggaggtctaaccctggctcagtgcgacttcccgaatgtcgatgctgttcgacgagagctcgtcaagcaaaactcttccgagatggagcattggaccagaggactgacagcaattcgcctcgtgaaacgcacgcacgctctcgtccggaagattcacaacctgcttaagagcactctctgggccttgatgactcgcgtgtacatgaacagcacgacggacgctgacatccatcgtctgctcgaggagaatcgccttgagtctcactccctggcggagtacacgacggcgatcaaaggatacacggagcatatgcacgagatggtaacgacaacctcagtcgtagtccctcagtctgctcctccgccgtcgtctgtctcctcgttgtcttccctcccgccgcctgatgcgtactcccccctccgaggggctcctctcctccctcacttccaggagcatcgcaaccgggcctcaacccccagcactcctcgagctcgctaagatgatgtgataaggcgttgcgtgctctcgttagaggacgctcgcgtacacatctgatttatgatctgttagaaaaaaccaagaggaacaaaaatgcagctgcttggtctggtaccacacagcgtgagacaaaccgacaagcattatcgcgtctgtcgatcgcgcctccggccact

SEQ ID NO: 2625 - DNA, 1000 bp, Unknown
  Description of Unknown: unclassified Riboviria sequence
gttctgctccccctgatgagctgggaccgaaataagctggacttatcggggtttagactgttgtccttccacacttcggtgaccaggatcgacatctgcttagatagccagatagtgcatgtgtgttcgagcatcgtttattcgattggctcagatgttcacaatcacttacaaccctatctatttgatcactaattccgtaccacccgtagcactaccgctaggtaagcgcagaacatcgaggttgtcccagttatgggcgtattggtaggggagtcactgttgtctatgacgcatcgaactcgtcccagcgatccattaccctagggaacctaactgcatgcgaaccatcaggttttaagctatacatgggtggtaggttatattaaatagaggtatcagtgctgaccgtctagtcctcagtatgacgttaaactactcaccgtctgtatcttgggacattaaactacaagtaggtattctagcgagcatgctgatccggcactcgtagaaaaggaggttcgcaaccttggaacatatctcgttccttaaccagtattgaataccattccatccgttgaccggggctatacggtccatcagtgtaattagtataatagcgagtaatggacatgcggtttaaacttggatgtagaataagtagataactgctttctattatggacgggctcacctactgtggttacgttgttctgaaacatgttggttctaaatcatgattggttcagtcttcttaagcacttacaaagtgaccgacccttccccataatatgttagatccaaacagttaatcgaagtatctcatcgacataacgattaaaaatcgtgtttaaacttagcataataaagttactttaagttatatgaacgcgcaggtattttgatagtttatcctaaatattaaactatctcggccggcttgttgtttgcggggctagaaatacgaagcaaggatcaccaaaaacttttttactcaatc

SEQ ID NO: 2626 - DNA, 1000 bp, Unknown
  Description of Unknown: unclassified RNA viruses ShiM-2016 sequence
aggtttgcacatttgcatcaagtcactcttgctctccacttgtgttaatccgattgattgttaggaaaactgaaatcgtccagtattcatccccctttgtaacatatcttgagtctctcttgagttccttagggcatatgtctctgacgtccagatacgggattagtagtgttttccctgaatctgagactaggcccggaatgggtagacctacaccttggtggatctcatatgcttgtcacgctactagctgtcttgccgttgagattggcgttttaaaagagaattcccaacccccaatttatccctacctatttagggcgatgtatttgtgaaagcttgcatcgccaccattttacacacctttttgattagcaaaaagaccacacatgaaatatcatcttgttgcactcctatgggtggttagtcttggactagcaatttgataattttcatcatacactatgtttacacattttactttgttcgtctacacatttatatgtttgttttcgttctgagagacatttagtgcagatttatttgcctctctaatacatgttattaacttttagtctgtatctttctcttctactatttatatttcctttatcttgttttagaattgacgctgtagagtggtctcattccccttcagcaagtcttttaagacatcctcctactatcgatgacgaaaattgtcccccaagagttaactagttaacgacactcttgggtactgaagttccgttcgattgtaagacctagaagcctgttttatgaatactatcttagataagaggcgttagaattagtcattgattagtttacaaataacgttagatgcaagtaggacctacttgtatactattttgttgtgaataatcaaagactctttgctaaaatctctcgactgttagtccatttcgtcgcggacaactaagataagatcatattacaatgctgaaatttaactaggcatgtagagcgcacataccgt

SEQ ID NO: 2627 - DNA, 1000 bp, Unknown
  Description of Unknown: unclassified RNA viruses ShiM-2016 sequence
taggtacttggaaggaatcagatgattagctagaaatgagtctgaccccgatagatttcgggacccaacacttgcgaacttatgctttaattcgcagcatgtagggaccgtggacttagtcttgtttgttctgagtgaacttacaattctttgctccccctcatgtaggaagaaagcaaaacgtagaggtacagtttctcctattaatgtacagaagaaacgaaaattctcaacgatggtattgactatgtcgaatccatgtccaactggatcaagttgggattttgatgggcttttagtttagccctttagtacagtaaaactacagcaaggtttgattagccttgagaagttcaattaatcacattgtttattagagaattaattattataaaactccagaaaaatatgtgtattattagtgtagagttagcatcactcattagaagatgccagttcgtttactgatcactcatccgaatagaaatagatatgagagaactatgtcctaattaaggatgcgtcaataaggtgctggagatgctggtagatggaaaattgtccgccagcgacggctatgcttgtataagctccctggtaaatcaagtgtagttacctcatctttgcagtacggaagtaaactgccgaatttctttcccagggtcgggaggggccctagcgggcacctcgtctgatctcaggactaaagccgcttgagacgacattctttttcaaatgcggatacccgtatcctcgtgagacctttgtcaattaagttcagttatttaacactgcgcgcattgatgatgaaactcaggaacggattctattcttggatcgtaagaaagtctgttttaaataacaatctcctggttaacggtgattaagcctggggtcgccttgtggttttcacaatccccccttggggtattgtgttccgcaaggctgatctttcaagtatcagccgtggaacattgtaccctcccactttcatgagaat

SEQ ID NO: 2628 - DNA, 1000 bp, Unknown
  Description of Unknown: unclassified ssRNA positive-strand viruses sequence
ataataatggccatgttttagcttgtcaattttggttgaattgttgtgttgcaaataagattgccgttggactgtcatctgttcgttttaaaacacaaactgggagagatagtgtttttacgatgctaaagttttctggtgcgttgcagttttcaaagtatgaacgatttccaaatggtgcatcagtgagtcttaatacccctgctatctttgacacgttgtgtgctattgctgctgctgctgcttatagagatagacttttggagaaaacccatgggcataagatggataaaaggaaagataagattgtggaggacttttctactgctaattggtcttataatgattctagtactgcttatcacaagtctgtcgtgctactcaaatcacttttcagacaaaggtgtgttggtagaaataaatttgaacaatcttataatttaaaatgggtaccagctggcacaccaattttaacacttggtgatactcctacccttggttctcttaatcttgctttatctacttcttgtcttggactttggatggagggggcgtttctggttagtcaagacagattgactgatacttttaaatatggtgataacactttaatgtttccagtagatccttgggatactcctgttcactgtgatggatttctatatatccctaggaaaaatggaaattttgatgttgtaccgtataaatataagtgcagacagtttgtatttggagatatagattctaccattcgaggtaccagatctgatatgcttgctttcattgattctgcactacaattttataagtctaaggaaggagatgaaatcgaatgtcctggttggctcgatgttgtaaagaagatacttggtgacaaagccgccgaagaattacatgacacacacgataaggaggataaaactgttaaaccaccgttgggcgataaaacaactgaaattggtgaaacttctggtggtgtggacactgaatcataactgat

SEQ ID NO: 2629 - DNA, 1000 bp, Unknown
  Description of Unknown: unclassified Negevirus sequence
ccgaaaccgaacttgactgtggatgcaaccaaaagttacttggcgttgcagaccattgtttatcacgaaaaacccatcaatgctatgttttgctccattttccgtgagataaaaactcgggtcacattgtccctaaagaaacatgttaagatcttttgtgatatgtcagctgaagattttgagaatgtgttgaacagagacatacgaccgagatcgttgtccccttttctcgagaagttggaaatagacattagcaagtatgacaaaagtcagagagaattggcgctcgaattcgagtgtaaattgatgtcgtattttggtgtcgacgcggatatcgttgaattgtggttcaatgctcacgtgttaaccgaagtgtatgacaaaaccacgaagatgagagctcttattccgtatcagaggaaatcgggtgacgcatcgacattcattgggaacaccttgttcttgatggctgtcgtgtgtgatctggtgcctgtatctgaacttgagcttgcattgttttcgggagacgattctctcctatatggtcacgatatggatgtttatcgtgattcgcaacatttcggtttgaagttcaatcttgaaattaagtttttctcttttgaaatgtcgtatttttgttcgaagtttctgttagttgtcaatgataaatggacgtttacgcccgacccagtcaaattcatgactaagctcggtcgacacgatctggttaatcctctacatgttgaggagtaccgtatctcattcgttgacactgttagaaattatcgcgattatcatgtatgcagaaacgtggcgaaggctttaattgagcgttatggaattgtgactgatcacacatcttttttgatgtctctggacgatatgacttcaagagaaaatttttctctgttgttttattcgttgtcaggtgataaaatcgactactctattactttcaataaagacttctaatctacgagattcgttcatataagttaaa

SEQ ID NO: 2630 - DNA, 1000 bp, Unknown
  Description of Unknown: unclassified RNA viruses ShiM-2016 sequence
gcacatttttctgattgccctttctttgggcgtaactcgttggcgccatcgtgaacaaatttcgaccgacgtctgcctgctacgctttgaagagaaggtggcctcaattcaatgcttatattgcttcagcccgaaacgacatactcaggataagccctgtttattagtgggtcgttgtaatttgagatattgagttgtggtgtttaattgtctcaattaaactgtaaatatttttgttttcttttgttttgttcattttattagtacaatagttttatttttcttttgtttcatgccggtacctatccgcgtccgatgtgggaaagcacttcactagttgatcttagctttataaatctatcaagcggtattctagtgggctaggtacgtcttggtagtctcacttttgtgagtgcagtattaagcccggacctcgctcaggtgttgtcagtaaggggattcgtccttctgaaacttcgtaaggcgaaaagggaagtacggtttttgcaatagataggagaaatagcagtgtgcctttaaagtgctgcaaataaaataaaataaaaattttggtttaatacttcccgggactcatttagataaggcggtgtgcaggggtgacctcctatcggatcgaattatctccgactggaaagagagctgtaattgtaaacttcccgagggaacaggattatcgtgatcctggtgtgtaggcccattaacgttcgactgtcccaacttagcggcaggaaataagaaaaattcggcgttagtaaaacctatgatctttgtcccattcgagccaaagcatgtttatgttaggcttgacggttattgttgctataagaacctactgaagagatccccttccatcttttaaataaccagtaggtcgcagtatttcccctgggtgctctttggacttgtctgggggtttgggaaggcaactcatgcgcctccctcactctacgagcatactaataagcatggggccctcttc

SEQ ID NO: 2631 - DNA, 1000 bp, Unknown
  Description of Unknown: unclassified Riboviria sequence
gacctctcttaaatccaaaccaagagatcaaaatttggccatagagaaattgtcgttttgcaatcaggaagtccgcatgaaaggatatgcaagaacctcagtggtcattcgcctttctgaccatggatgtgatccggcggtggctcttcaatatgtgctaaaagagaaagcagaggatttgatgttgggtgacggcctttccatcgataagaaggttcattggttactaacaaaacatgagcccgcacgaaagctccttggggcactttcggcatcagcctacaactagcacatgaaaaaaactaacagacctcactatgaggcgcatttttggtcgcttgctgcccgaagctccgaacatggctgttgttcctgcggcccaagcaggcccggtccgccgggtcaatgaccccctggagggatgggggcgacaattcgtgatggtccctcccgacccacaacccgttcccaacaccgtcaccagcaccacctatgacattgtaggtgagctggtggtgaacacacccctccagtccgacgatctcgtcctcctcggccagatggccatgaatttccctcactactatcaaggggatatcaccatgaaacctttccacaccgctgtgttctgcctgttagtgtcagaactcagatgtcggaccaccctcttccatggccgcattttcgccagtcgtgtggcggaatgtgtgaccttccagggagaacccagagagctcccccatggctcatctgccctgttcagagaaacgttcacctggcccctgcgaggagaaccttacgtctgggccgtgaacatctcttggactagatcctacatgccgggggtcgccctccatgagttcatccgtccccacgtcaaccccctcatgtcagccctaggcgtttccactcgttggaatggagtggataactacctggtcctcgtggcctagggtcccatttgcaatatggaccatgaaaaaaactaacagtcctcacc

SEQ ID NO: 2632 - DNA, 1000 bp, Unknown
  Description of Unknown: unclassified RNA viruses ShiM-2016 sequence
accactctcttcaacagagtgtactaatcacactttttacgtagtgagatttgaaactgtaatcgacagtcgcatacttataatctcaagtatgtagtaattgagtagtcctagaatttggattcaattttgaagaaaatccgccacgtggccaaggcgaaacttggcaagtgctaagcatggccgcacgttactgatcaaccacacgtggtagatccgcagccgagagagacggcacccggagtatttttgtttgtaattagatagattcattgagaacttatttccttcgcgccctgtaaaaagggaattggaatttactcagagcgtcaactgagtagtacgaccgcggtatggagcagcggtaatttagaccaatgatgttcttttatgaacatttataccagacatttctgatacataattgagagatggatactcaatcttgcagtaatgttccggctagtaggcaataacccaaaggcttgagggtcgcctgactagtataagaaaaatccacgaatggcgctggggagggttaatagcccccctagcatcaaatagcaatgaagttactaaaagcgtaaaaaccggacgaacccctatttccaattggagaaacacgaatcaaagatactgtcctacgtggactttgtccactaggatcagtgaaaaggtggaagatggacgttatgtgtacctcgaggatattctgttttcaaacaaatttttcgaggattcatacacagaaaggtgtattaaagatagtttcttaatcgataagagtgtaaatcgattgaggaagaaagaggcggaaaagcgctctcgtgattatcacagagcgtgtattaacccgtggctcgctgggaagaagcgagtcaagaaaagacacagtgatagtgaaaggcgttatcgtaggattttggaacaagttcgtgaacttacagatgtttcagttggttccaactgcaatgacgattcaattgactggtctgatgat

SEQ ID NO: 2633 - DNA, 1000 bp, Unknown
  Description of Unknown: unclassified RNA viruses ShiM-2016 sequence
attttctcgtacattttaagtttttgcgcgactttattgtcgcgtctttcacacgcatctagtgtgtgtgtgtgttatttttctaaataattgtttttcagtatgtttttagcatacgcttttcaattattatatgatgtctttgtatgactttattgttgtacatccttttgaatttttagtgcgattttatgttcgcacattgtgaccaggtttatacctggtcattttattcagcacgatctctgatatcgtgcagtaattctttatgtttgttagacataataatgtagtatggaattttgtaaaatttcgctcaaaagattgtttaagtgcattgtttgacatgtgtgagactcgagtactcgatgttatacaaatatgtactaagactttctttaagtgattgttataagatctctagctttctggaaacagttgactacgaagtcgtaataagcacattattcctaatataacatgaagtggggaattttaaccgctatacagtcgaatttactttcgattctgagtggctgaagtgatctttgtgaagctacccttcttgaaatcttacaataacctggaactcattggagttccggatactattggttttcgttgtgaaggatgcaagatcttagaaagaaattcagcagtcgctaacttacctgctcacgacgttgaggaggtagatttgactgtaatatgttaaaaggactaacagcattatacctattatagaaagtatcaataaaatccatttggtatggtaggtatgtgttccgctctaactaagcgtgccgagaggcagtctttgtttgaggaggcgttgttcccaccgtctccaagtatacgcccacgcgggagagtatgcaggtgaaacataattcggggtcttccatgaatatgggagttggaaatcgactgatcggtcgagcttctgtaaaaaacaaaatagatcgctcaacaacaaaaaacaaacaacaacaaacaaaat

SEQ ID NO: 2634 - DNA, 1000 bp, Unknown
  Description of Unknown: unclassified Riboviria sequence
agagagaagataaaagactccacacgggtattccccgtgtggagatcaataaacttttatcagtagtaacaatttgttactcaagtctgcgaatgacttttattaggtattcgaaactctttatatacaaccatgtctattaggggttttcccctaatagttatttgtttttctgagtttcaatgaattgttaataaatgttatttaaacatacttgtttaatgtattgaaaattctattgatgtgtttatgatcgaacccaagttttttcatctgtaatcgtttcacttttcgttaagaaatttgtcaagctggcgattacgtagtccttctggacgccaagcttatttatgaaccgaattggattataactggattatatggcattagtcttagttgtaattgttctttaacatttcgattccggtgaaccccggaatttgttcaggccttctggccacctcaaacgcttgcactcatgcatacagaagcgtttttaaaatatgtctgtacgatgtaatactgtaattacagaacttatcaaataaggaagaacctatattgatatttcatctcgttgtaatgcttagcgcttgcaataagagccccctcgtttatacggctgaaaatagtataaacctagtttaatatcacgctaagatcctgtgatattcttaggtaacctatcttatgatatggggaccgacccttagacaagactcattagtcggcgtattgtctaaacttatagttaggaagtaatgaccctaatttcacttgagaattcttgttggaaaactattaagttaaacctttaccaaccgatgtacttagtgtagcgcctctgcctgcggcgaataatacatgcttaaagtacgtaagtaagttcatcctcttaactgagtggtgaagcaaagcttttgtgtcgaagcacaattggattaccaattttgcgggctttcgcgaattggttcctctgtgcttgtcgctttcaaatttt

SEQ ID NO: 2635 - DNA, 1000 bp, Unknown
  Description of Unknown: unclassified RNA viruses ShiM-2016 sequence
aatcaacagcgatccttcggcatgaagtaaactgaccaaaatagaacctgatctaggtgtttttaagtcatggtaagtccatgagaccaaaaacaggcgttgctaacccgttacgaaaaagcggaaattattatcatagggatgatttgcaattcccaatggttcagactgcatatgtttgcggcatacacaaattcggttgtgtaacagctgtttattttgattctttgtctatagaaaatagacgaacttcctcctgtggcgcccggtaatagggtaggaggtacattgggcgtggaaccccagtgtgagtgtgaacgacttggagctgtgtcccactattgtgggtttagactctatttgttagtcattgaatcaattgaaccagcttgcctatgatcttacctatccacgtaggtattgcatggcaagtgctgtccttgttatagctgatgaaggcttgagtcagcttaacgttcgaggtaagtttgtagctctttaagagctagtgggaagacctggcgctgtcgtggattaatcgtcccttcagcatcaatatagcattgaagttagtaatagccaaaatcttttatccagaccatctttttcttcggatttagaattgcctttatggctttttaattgttggttgctacttaatgtagcaattagtgtgtacactattccccgtgattgtttcatttgggatattgtgtatggtgtgtttttcatttgtgtttttgtattgaccatctatttgtatgtttacagcattttattgatttggaaagctatatttggtccgcggcgtagaacttttgaagaacaacttggattcaggttaccgtcgtttgttacacctgattttgttgcacgggagaccactctgctattagcgttgaaaacgagtgtttcttcgagtcggaataaggcaggtgtcatatcagcgttggtatcttacgcacaagctcacagtcaacgttcccttttgggtcactta

SEQ ID NO: 2636 - DNA, 1000 bp, Unknown
  Description of Unknown: unclassified RNA viruses ShiM-2016 sequence
agggaatttatattccctacataccctatactttttagttgtaatctaaatgatgactctcttttgcagagaccctgtataaagatcgagatctgcgtctcgtgtttcagtcctaggattacactaggaggttagcacgggagcatgaaccatttattttgctcaagaaatttatacttttattcttttgtctggtttgctgaagccgaaatttcagcaccccctttttgcctgttatcaaacaggcccccgctttcgagcgggtgattggagactgtacaatcttgtgctgtctccatgctccggttttccggagccgcgatattatatcgcaaatcctcaaccgaggataatatcggttggtcccaatttttactcatttggataatgagtccctatttttgagtaggtgattgaagtgatagcacttcacctgcgcttccgagcgcactgctccctttgggagctgcagtatttatactgcaaacccccagccgagggttgtttcggctggttccattatattgatgtatctttaataattattttacatttgtttttgaattgcaaacggctcttctataacattcaaaagaaacccttgattcaaatgtttacatttgtaacttatgttttctgataccttatatactggtaaaatagaggattagcgtacctctcctcaagtagtttcagctcactctctttgagagaactgacgtccatattgtgatctagcttgattgatataagcggtaagtcaattaagcccattatgatatgttcggaaaattgtacacataatatacaggaagactatgtcctatggtgtgtacttcagtaagaccttagccggtcgcaattgttacgtgaataataggtagtcacgcgtaacacatttcacttgtggttgactcccacgagtgatcttatctttattgttactaaatttttacaacccgcttttgatcccgtcttcactgattttcgggattcaact

SEQ ID NO: 2637 - DNA, 1000 bp, Unknown
  Description of Unknown: unclassified RNA viruses ShiM-2016 sequence
ttttattcgcatcttgtagtgttcgcgagaaagaatctactatttagtgatcacaaacatattgggttgtttgtttgtgttcacccgaggtacgaaatgtaccagtcctgtttattaatactttggggataaaaagcagaattttctgcaccgtatacggtattgaaatgtatagtcgatattttaaggacattattaaatggacgtgaaagtctgttgaaactgctctgttttgaatattgctgtttgagggttgggaaaccctacttttgttgcgatggtagcaaatgcaccgtttagaccttatgacatttcgagtcactattggcttctgggaaggttgattaccagagtacgtgagcctagatctaacatgaggaggattgtgctggagcttgagaacatttggctagttgcgcatgttctgacaaaaacatcaatggggaaaggcgttaggccccacgtataagacagaagacacgttgttatcagaatttctttaaaccacatttatcacgtcaacccactccacattatttgtttagtttcccgtaaaccaatttttataggcgaacagccttttgatgtttattatgcagattttaaatttttaaataaagtagcgtatgtagttgtttcatattgttgtccagtagaaacactaatattgacattaaatgaatatgtaaacaccgaattaatagagttagaagagccattttatggcaattattttatagattgtaaacccattcgaagcggtttgaccgtttgtgcttatggggatattacaggtaagaaaattacaactaacattggccgtttatgcggaggttatcgtgatccttatcgcttgtatcatattattttgcaatgtgagaaacaagtattattagagaccttgaaacttcaaggtgatgaagagttcgcagaacaagttcgtcaagaacaatataaacaggtgcaacaagataaagtttttagaaacatattgcgtttt

SEQ ID NO: 2638 - DNA, 1000 bp, Sclerotimonavirus alternariae
gatccttccacggaagattacctcttcgccgccaaggttgatccgatggaactcgcagcttatgctggaattcttgcatatgcgattggcaagcagccgactgcggagaacatggatgcgttcaactctcgccggcgcaacgccatctcccaattccttcctgcaggcgatctcaagatcttcgttgatgattccgagttcttgtccatcgacatccttggcaagattcatcgtgcgttcaactccgtcacgatcgatcgagcccttgtcatgagtgcgattgtcgacaaggatgctgctctagttcagggacgcgagaaggtcttttacatcatcttccgtctcggatctggtgcctcgctcaatccattgctgatcatcacgcgctttgcgcgcaagtacccgtacttctattccgagtttcccgatctcgagaccgaataccatgccgcggctcatgcactccagcggttctttgatgttcccgagaagcgtcgcatgtacctcaaggtcatcttcgggagcgcctacgttcctgtcgatcgcacggatgtgaacgaacttctcggcgtctctgtctttgcacttcagcagtcagagccctcgcttgccaattacaacggcggaactctcagtgtcgtccatcgccagaagttgattcgcctcttggaggttgcttcaactaatgacgaagaaatccccgaggagcaacttgctgagtaagtgtttccaccactcatctccttattaaatccaaggatttaataaaacttaggagtaatcaataagatgaagctcgctgatgcacttcgactgtatgtcgaaatgttcgaactgattaccgcactcgtccaacgcgtcatggacgataagacattcgaagatactttcgacattgtctcacttgactaagttcacgtactcagttgcaagagttatttaataaaacttaggaaataacaaacgcatcgtctcgcactcaacctactcattaagaaat

SEQ ID NO: 2639 - DNA, 1000 bp, Unknown
  Description of Unknown: unclassified RNA viruses ShiM-2016 sequence
tcccagatgccatcgcgcatctcaacttgaatcctctacggtgaaaagccgtaccacatcagcctcgaccgataattaaagtaggtcatccgttttctacgaccaactggctgatgtgatgttcaacgtctacagccggtccatcatgagtatggacgtgcaaaacctgagtcgccacctttcgaagttggtgtgatagtcgtaggccgaccctgcctagcagttaataaataaactagcgtgagcctgcgataagggccaatcctcgggatgatctacaagtgattacccgcactgaagtcaacaaatttgattcgtttccacctgatctggagaaaccgatttgtaatggcttgcgccacggcgaagagtgaataactctgagtggctgccaccttgacattaagtgtgtgttctacacctgtattattaggacatgattatggtcctgtttatgttttctacaacctacgctgctaatcaacgctcatcgagcaccgcgtgcgattggagggactctgtttctctcctcttagtagtttgctatatatttatattgtctcgtatagacgtcaacccgcgtctctaaataaagctggataaaaagatgtattattcatattttcatatcacatcgtaccacatttatgaggggaaactctggaatggcattagccggtcagagtataaagaaccgtcagaggggatgtgcgagtttccagtcacattagtgatactggaccacattaccgcgccctggggacttagaggtacagtggtgtacgagaggtgtgtgttaggcgtagcctgcactcactttctcctctgcccaccgaggcctagtcatctttatacaatgcctagagaacaaccaaatgaattacagaacacgtgaaagtcgagttctaggtcggggcccctgaatgggtccctatcccagcgacggggagaaataatacgtttttaagaccaagtacgacataccatttaccgatttatc

SEQ ID NO: 2640 - DNA, 1000 bp, Unknown
  Description of Unknown: unclassified Riboviria sequence
cacatcggtggcttgcgagggaactcactgcgctgcaggaaacacccaagtgcgttctcgcaaaagcaaatcaccaagcatccgtcggttgccgattggcaatcgctgggcctttatcccccctccctccttcgagcgggggggtaatgtgtgaatgtgataatgacggcttaggattcttaagccagagtgaatgtgatccgacttacggatttgggaaggcaagtgcgtccactgagcggttagaacgcctctgggcaaaggccgggctagtcccccggtaacacaactgcggttgttgcaaagataggtgcggtgcgcgaactctggctcctgttatacaggagtacagttacactcacgactctccctatcagagcacttgtcggctcaaatccgacatcggatgtatgatggctccccgagctaagcaactcgggttggggtgtgaagccgaaaggtcaccccgggccaatgcgtgggcggcatgaaactgccccatcggcaagtaagctgtgcatcatgccgatgagtgctggtcgaacctggggttggaccaacaaggaagaactccgtatgggcggggtgtggtacgtagaggaacttggagtgctgtactttcaggtaagcctggcaggaggactataaggatttagttcggcctgtggcctttggagggcagggcgtcttagcgcggcgagcaaggggtagtacaactaccgctcgtcgggcgggcgggtctaggtctatggctttaagtatagcaacaagaaatcgcgtgccacccttgttgcttcaatctcagaggcgaggactgcgcatgggcggtgtgggcacagcccacaccaccccacctctcagcggggggagggggcgtaaggggcgccctccctgcctagagcatcggatgcagccccccacttaaggaccagctacgactcattgatttattgattattgagtgtgaatatagtgcgattcagtgcgattattgtcctag

SEQ ID NO: 2641 - DNA, 1000 bp, Unknown
  Description of Unknown: unclassified ssRNA negative-strand viruses sequence
atatgctatgttctcgcactcaactctatctcgcatcgcaggtgaagaattacctcgggtatgtagattgctccaacagatgatattagatccatactgtgcaatgttatccaatccgatccccgtgcgaacatatgcgaatatagcatacattgcctgtaaactcatatataaatctaatgttgttgccagtgacttgaccatgaaggtcactggatatgtgaacaccttacacacaatgatcacaatcgatcaagggttgttggatacagatgttatcaatatacgcgaatcacagatccaaatcagtggagatagagcttccttagtgaaggtgctggctaagcggcacgggtatcatataagttccgataaaaacaccatttttgagaaaattgaaccagaacctacatcttcagttcaatctacatcgcaatatgacatgctacctattaaaactcatgatatgatgattaatgacaagaagtatagagaaattgatattggagagaagtacaaggacatgaggacaaaagaagacatagcttttttcaacctgtgtcagcaattcaaaaatacaatgatgcaaacagtgattcctgacggcgcttcttatatccccggttccaaattgacacttactgaagatgagcataaatatctacacctcgataagtttaatgaagaaccaacggaatataaaagcactcaacacatcatcaccgataacatacgtaggtcaggttcggttttaatcagtgatattttgtcattagctaagggagttgggttgaattgggctactactgtagcgacgcctgtgatgcctgctgcttcttccacccgagcagttgttagaaccccggctgaagaggaggaaatgggcatttaataagtgtaaacaacgtgtatcaggtttttgatcatagcctcttaaaggatatgtggtgagattgcaagtgttttcctgattattttaaaaccaactctggtgtttacc

SEQ ID NO: 2642 - DNA, 1000 bp, Unknown
  Description of Unknown: unclassified RNA viruses ShiM-2016 sequence
attagactacccttcgaccatttgatttccatgctaatgcatgtactactcatatcgtgacaggataagagttaatatcgtaattaacgagaacccatcaatggaaattggccatcctctggtagaggcgtgtaaagaaccacgttagtgaaacggagtcgacattaggtccgtcaaccctgatatttgcgcacatgcttgtgtgcatatagcgaaatatgaatctacaagattgagccgaataaaaatattttgtagtgatccgtgttacggtaattttccgtctaagatttgtatgataccaggtatccgaaagctattgctggaggaccttgatgtaacatttatatgtagaccaacatactatcattccgatattatcgaacattaactataatataaattgtgaaactcgatgagctaggtgacacatttgtgtttaatcatctttgacatttgtcaactctgaggacgagaggagcagcggcacaattcatttgtgtaagaagcaattttgttaatagttattaatggtgtttgatcttgattcccttgggaaaggaattattgcatccacctaggatctatgcgtttggaaagtaaaggttgatattccatatcgtattgcccagtcacaattttgtggcccggtcggaacaggctaataccctgagctcggacttacatctgtaagtgaccggtatacctatcagttacgagtaccttcaaacctagtaaaccgctatattgcaacgaggaatttgttgataatcgtgtcctgagaactgatgctaacatcgttttggagggatacgaccctgagttggagtgccaggtaggcattggaagctttgtgagtattggaactggacttgatgtcctatccaaagcttcagggattgatataccagattggattgtcagtgagatagaatcaattatctgtttgtttatctctcttactggacaaacgactacgcaaggtgctttagccacaatt

SEQ ID NO: 2643 - DNA, 1000 bp, Unknown
  Description of Unknown: unclassified Riboviria sequence
gcaagcctatttggtactgtttcctcaagaatgaaattctgaaggaaaagaaggtcagtgagaatgacatccgagtgatatcttgtacagatcccgtctttgtgcgtataggagctgcgctggatgaacaccaaaatgctaggatgaaagcaaagacagagacgcatcatgctcaggtcggttggacaccctttaggggtggccttgacaggcgctgcaggcgcctcgcaaagaaggacgtatttgtcgagcttgattggacgcggtttgatggcaccattcctccttggctcttcagaagagtcagaatgatacgctggtatctcatgaatggagaagaccgcgagcgctatggagacctagcacggtggtacaccaagaacctgttgagtcggttcacgctgttcccaactggtgaggtcacactcatcaagaaaggaaatccttcgggtcagtattctaccactgtagacaacaacatggtgaatgaattccttactgctgctgagtttggctacctttataggaaggccaatggccgcctacccactgtcgaggagtaccgggcgagcgttgacatgctctgctacggagatgatagactccttggctttcgcgcggggttcgtcgactacgagccaaaggaagtcattgacttctacaagcgcgtcttcggaatgtgggtgaaagacgagaatatcaaggtggcgccctctcttgagggacttagtttctgtggttttacccttgtaagagtgaacggccggtactatggtacgatgcaggccgataagatcttgcagagcttgaagacccccacgaggtcattgcctgatgtggagtcgctttgggggaagcttatttcccttcgtatacttttacaccatagcgaccctaagcacaaggagtaccttgacaggcagattgccaaggtggaagagtacgcccgtgctgaaggtattgacctacccgaagtcgggcccgacttctataccaccat

SEQ ID NO: 2644 - DNA, 1000 bp, Unknown
  Description of Unknown: unclassified Fusariviridae sequence
tggtgctgaagagtgcttttgccgaaacgtcaagtacaccatgtatttattaaatactaggccttttgtatggctatataagttgtttttggtcttgatgttaattttgttattgacctcaggagtctgttttgcgtggcttggcgtaggctttgccgctgtgattttggtttttctcgccagtaatgctagccttgttggcatagcttttattggactgtttggaccttttgcacttatttattgtggcttcatctttgagcaagctgtgcgtcgtgaggcacagttgatcagggacgttggtgctgatacagctctgtgggcttttcttgataagaagcccattggtttcactatcttttcaaagctcacattgacacatgcagttttggcggggcatgataagtcaggccgacttttgtctgccagttttcgtgtcttgggcctaccacaagaaatacaagatatggtggaacctgggattcttactatggcttcaaggctctggtccaatcttgtgttgaatgttgactctttatatgatggcagagcatcatttatcgtgagtcttgctgcttattggtacttgcaacgaaaattttctgtttttctttggcgtaggtttgaaacctttgtcaaagttttgtggattgcatttattgtcttgtggtttgttaaaccacaacacttcctttttgccttaatgcaggtttttagaggtgttgtctttttctcaaaccgtgagcgtgtttctgtcttttcattgtggctcaagtggcgtctcacacatttaattgtgaagttgatagcatattttgagtctttcaatgcctcttttcggaaataccatagtgagcaactagacagtagcagaaagactctctctgcacattttagaaattttgtgatgtctgctgctgtttatatttctgatttgggcctaccttcttatgttcgtggtggtttcgtgccttacaataaggaaactttggaacaatca

SEQ ID NO: 2645 - DNA, 1000 bp, Unknown
  Description of Unknown: unclassified RNA viruses ShiM-2016 sequence
atggaatttccaaatacagacgacgcgatgttgtttcgttaacgcaatatatgtacttcgcagaggattcgcgtttcctcagcggcaaatacacagtagtgctgtgcgcgtaaccataatgggttacaacacgccgttttagtactgaatttatttgaagaatacaagaacttatacccaggcttgcggctaaaaccgtttgggtattcctcatattatgggtgcgctgaccctaatgaggagagtgatgtacgacttggagcagtattgcaatcatttgattgtatgagactgtattctgacaatattggaagactaatttatccggtctaagattgaaccctcccacatgttcgatgggagtggcgacttagatgcgtggcttgtttaactggtgcgaaagcttgagcaccgacctttcgagcaaagattatagaacgaaaaatggcgcctgaggtttgggttaacaaccccccaggcatcaataaagcatgaagtctctgaaagccaaactttgaatcagatttcactctctcttctccaagagagagctacctttatttcccgtcaaaacattgactctgttaaagagtcctgtcatgactattctttgaaattgaaagatttcttgagcgaaattgctcctggttttgaactaccggaacaattcgctttcttgaaggagcaaactatagcttctctgaacattctactcggtctagtgaaagatttatatgctgtcactaaagaccaccttgccgacattggatcggctctcatccatgttatcaatttttacattggaacacggaattctaccaactggacggatgtgtccattggttttgtgtcgttgtgtttgtccttattcaaattggataccattaaagattcagctaagtacgttcagcaaatcgttggtgtctttgtggacaagcttcgaacttattttgtgaagggcgaatctgccgagaaggagattcgttcgttttggtcggac

SEQ ID NO: 2646 - DNA, 1000 bp, Unknown
  Description of Unknown: unclassified RNA viruses ShiM-2016 sequence
cctcaaagccaatagctcagggacaatcaaattcggaccggatttatcggcatgtccagcgctttcaggcggaatactcaagtcctaccacgattacaagatcacagctcttacggtcgtctacaagtctttcgcgtcctcaaccacgtccggtgctatcagtattgaactcgacaattcgtgcacacaatcaaccctcggttcttatgttaactcattcaccgtctccaagacaggaaccaagaagttctcggcttcccagattaacgggaccaagttcatctcctcgacggtgaatcagttctatctgttgtacaagggttcaagtagttcaactgatacagccgggcaatttgtgatcactattagggttgtcaaccaaaaccctaaataggtagaagaccttccacctcaaccaactccaaccccaacgccgcaaccacagccagaaccacaaccgacaccgacaccagttccatcaaaacagttcttctgctgttacaccggaatccctattgtcaacatatcgactagggaaacgtctgactcaatatctgtaggtaagttatccacacagaccttcagatatacatctgatgaaaaatctgaagacagagacgttagatcttggtggtacagcaataacaatgtctctgcacaagcagctttcatatttcccgtcccaaaaggggagtacagtgctacagttgtttgtgaaggtttacaatctgtagaccacattggaggcacggaagatggacagtggatagggattatcgcttattctgatgattccactgacaactggggtattggtagatatcaagactgcacaatatcaaactaccaaaaccagtcgtcttggcggatagggcataaagacttgcaacttaatggctgtaagttcactggccaggctgttgagagagatgcattttgtacattccacatatcagcaacctccaacgacgccagtttctacattgttgcgcctaggacc

SEQ ID NO: 2647 - DNA, 1000 bp, Unknown
  Description of Unknown: unclassified ssRNA viruses sequence
gccgagagggagattagaacaccgcgggctcgaacatcagtatagcgagtcattatgggaatgaaggtagtccgaccacggatatatcgcaagttaccgcgaacttcattttcttgtagggtgggcttccccgaaggtgtgaccttatggttcagtaggcgttcactgcactgaacgttgaagagctaggcgatgtactgacatctgcggaggcggttagcggttgtggtagtcgcgccgtccggtgagggccagagcaacatggagtagcgcccatgcgagtttgccagctcggacattttgttttgctcccccagacctgcatgcgcattctgaggcttggatcggcatggtcgaaggtgcgtggtggggtggttgcctgaagcaagtgtggttaagtgattctaggtattattccgtatgaatcttatgggaaggcggactcattgggttgagcctcgattcccatgccacaagcaacccagtgggaacggctacgggtgcgcttaaggtgcagcttggttatgtaagagcgagttaaaggagcggggttgtggcttgtccgtccccagaatccttcatcaagtccgcgacataacctgcaagtagcatgaattttgatgcattagtgcttaagcataaatggggtccactaactatattggtgagatgcgagtgtcattcgtttgggacaacttaacaaaacacttttgttttgatgaatgtgtggctatgcgtgttaatcctaatcaatttacgattattattccaagtgagtatgacttaccagccgatggaacaaccggggctggatatattcattctgttttgtttggtgaaatgcgtttttcatctattagacgattacgatatgcaagaaatcaagccatactaaccgttgacactatacccattcctcgtagtgaggaaagtgcttaaggcacaaattttggagtctagccgctgacaattttgttcatgcattcccaggtcataattt

SEQ ID NO: 2648 - DNA, 1000 bp, Unknown
  Description of Unknown: unclassified RNA viruses ShiM-2016 sequence
aggaccccagatgtatccaataccgtaataagcggtatggtttacgtctggccacctacctacacccgcttgaaaaatatgtaatgtcctggacccgcaacggcactcacatctttgccaaggggaggaacatgaggcaacggggtagggatatcgcccacaaatttaacaggtacgaagagtgcgctgtggtctcccttgatcatagcaagtttgactgccatgttaatgaatccctattacgtgctgagcattggttttacaatcaatgctacggttcggaggagctggaatttttgcttgagctgcaggttcgcaacaaaggcatgactaagaatggcactaagtacactactagagccactcgtatgtcaggcgatcaaaacactggtctaggcaactgtttgatcaactatatgatgaccaagcagttgcttagtaagttggggatagggtacgatctgtacattgatggcgacgattttctaatcttcatggagaagagacacgtcccactcatcgacccgagtgcttattccgtcttcggtatgtcaacgaagttggagagtgttgcatacaccattgaacatgtggatttctgccagtgcaggcccgtattcgatggtgtgggttacaccatggtgcgcaaccccgagagaatgttagctagactaccctggatagtaggacctgtcgaggatagtcgagctaacgatattgtattctctactggacagtgtgagatcgctcaaggcttaggtctgcctattggccagtacatcggccagcgaatgtgtgagcgaggtgggaagatggttcgcatcagacatcgggcgtggttggagaaaatgaaacctggaaaactccaacctatagagcccatgggtggtgtgcgtgagagctatgaaagagcttggggtctgtcaatagccgaccaactgctaattgaacagactagtctggtggaacccgaggagcatttcgctccgggtattctaca

SEQ ID NO: 2649 - DNA, 1000 bp, Unknown
  Description of Unknown: unclassified RNA viruses ShiM-2016 sequence
gcgtcgccaaaggccttaaccatagacaacgcgcccaattattaatcgataagttagcccgtttcgaagatccagtcatactttgtctggacgcccacaggtgggatgctcatttgaaaaagaggaagttagaggcagaacatctagtttatgtcctctgctccgctttttatgagctagctgaattgttgagaatgcagttgagcaacaagtgtcgaacccgcaatggcgttaaataccgtaccaaaggtaaacgcatgagcggtgatcttaacacagcacttggcaactgcctgatcaatattctaaccattctttgggtgtttatgggtattattatcgattttatggttgatggagatgatggaatagtcatcatggagcgcaaagattggattaagtttaaagatcaaattaacgaaaggtatggtaagactggattcgtcatgaaaatggaggtcgttgaccgattagaagatgttgaattttgcaaatcaagagttatacgtacacatttaggtcccagatttgtagtctatccaaagcatgtcctcagtgggagcacggttggtgtcaggccacggcatggtacttattgggttaagcgcatgcgagccgacgcgataggtctctacgccctataccaaggtgttccgattttgcaggactatgctctggctacactcgaagccacacagcaagtggtaccagcagaccttacaggagaggatgcatggtttcaatttagattgcatccagcgtataattatatggtaaatttgaaaaagattgacatcagtaagttagaccaattcatctcaccccaatctcgagttgatttcgaaagagcctttggaatatcaataggtcagcaaatgctaattgagcatcaattgagacaggcacataaagggtacctctgtgaggtcgcatatcttaagaaacatccttttctgttcacagtcgaacaaaccaggcatttattactcaaactttggta

SEQ ID NO: 2650 - DNA, 1000 bp, Unknown
  Description of Unknown: unclassified Riboviria sequence
tccacaaagggggccaccctatcggaatccgcagccgggtggctaccagcccgaaaacaactatctgccggctgggcctgatgaccaggacagaccctacaactactatgcgccactgcgcgacatctttatgagaccacgcttacccaacctcttgggccccactatcaccatcgctgcttcggcagccatgaaggccatgccacacaacttggtctcaggggtcgtgaccacctatgccaccaaatatgcttataggagcatctggtccacagcctactatctagccggtaatgccctcattagtgtcagtcgcatagccacaattgctgctgctgtccgtggcttgacaccaacagccatgactgccagcattgcaatgagggcagcagactttggtggcaatctgttgcaacacgcagcgcgggtaactcatcctcgcgcaatgcatgtggcggccattgttgatggtaccatggccgctgccaacagacttgcctacccaatgctctgcatcggggctgtctggggactgtatgtcctggccaggcatgccatagagccaccaccatatgaggcaccacctggctgctatcccaatggtggccccatcgtggagattacgcaggaagaggcccccaatcgtgaaatggtctttacctgtccagcacccctcgcccggctagtccaagagagagtgctgctctgtgagagggacccaacaatcatccagaaggtcaaatcaattgcctcccgctggtgcgatgcagctggcatccaaggaaaccaacgctatgccgccatctgtggcgctgtagcctctgccttgaccgtaccagttaatgaacagctggtcttgcaactctcacagacacatgcagttcaaacacagtactcaagactagcacgctatctctctggcatcaaacacacccatgatgcctggtggactaagtacttctccatcaggcgctaggccaggtggagggatgctgactgc

SEQ ID NO: 2651 - DNA, 1000 bp, Unknown
  Description of Unknown: unclassified Riboviria sequence
ttaaagacttctccatgcgaaacatcatatggcttattgaattctgctatactatgctatctaacatttatacaaaaactagaaaaatcatacgccgcttacttaaacgtctcacaacgagcacatgctcatccctcacagcgatactggcctgccttacgttattctgtcgcgaaattcatcagtatgttagcaatttccagcctggtaatacccctacaggtatacttcttaaccctgtcctactctgcattaaacacatggctgaattcatacacaaatctattccagctatattcccgtcggtttatgcctggatcaaccacgatccttatgtcagcgctatacaagattctctcatctccgaccatggaacaactattcaaactcagaactctcagctggatattaagtttgtacaacatcgcattggcgctgtatttcggattactacagaatcagataccaggtatgtatactgcggagatgaagtcacagcggatatccatatggctaagcgaggagcccgctatgctccagttgatggaactagtacctttgaatgcacatccgaccctgatgagacccttagtaaggttgatgagacctacattacgacaattgtaaacattgtggaagaaaaactgaaagacaatgagaaaattgcggaatttaccctagtacactttgtacaaacagtacaatctactggtacccgaattaggaagacacgagcagatatcagtcctgaatttatgagtaatggtgcctcttaccaaaatagtggcaaactttctatagacgttaatgtcgcaagacaaatggtaactcaaagagccactccaaacctggtccaatctcaccattacggttttctctaccttatggcctatgtatcaattaactccgagcaaagcgtaaattttcaaacacaaaaacagtcgattgcatcccggatttaaaaccccgaggcatatccacagtagtagtaaagaaatac

SEQ ID NO: 2652 - DNA, 1000 bp, Unknown
  Description of Unknown: unclassified RNA viruses ShiM-2016 sequence
attagcctaatacgtgaagtgtatgagccgggccctccggggtcgcgctcggcggcggtttaggtagaggtgggagcgcacggcccaactccctaggctgccccgagcaacaatacctgttggttttcgacacagagccttcagggtccacgtgtccggtgcgcgcctcggcgggcgcgcactgcaagacaggagtgccgccggcacgtggatgtgagaccgctccgtgcttattgctttgcgcggataggggtggcggcacggcgggcattgaggagcaagggccggtgctcctcattgccgcgtgccggcccgagccataccccgaaggttgccttatgcctgagtagccgagggtagttcggtgaacagcctggaagccgggtagcgccggtgacggtgagggcgccactgtttcccagcgcgtgggttggcctcttgggaggggggccgtaaaatggtggtttcgttgtgtgagtggtggctcgaaggacacaggcctgcgaggccggctctgcagtgttcgctgcgctgcaaccgggatatgtgggtactggtctggatgtttcgttcgcgtagcgcgcgcgggtgaataactgctggatggctgcacggcgggcattttgccgcgtgacggcttgaaggtggcgcacaacgacaaatggcatcgcgggggtgacggcccgcaacaacgcgcgtgcagggggacgccccccccattcgcacttcacgatgcatgtgggtatgtggacttagcgaatccgttgcagacccgttagctggtggcggcaccagctgaattcaccacattacaaaacaaaaatcgcaaaacgaaacttagcgacggggcaagccccggaagataaaaatagcataagtaaaacccaggcgtcctcctcaaggtgcatctgtgtcgcattctgacgcctggtcgttgtctccggctgccgccgggggttgaacgctgcgaagtgatttccgtattgctggtcgtgaaacg

SEQ ID NO: 2653 - DNA, 1000 bp, Unknown
  Description of Unknown: unclassified RNA viruses ShiM-2016 sequence
aggaaaaggccttaataatgtgcagcgtgctttccaccttgaagccaaaatggcagacttcacccacccagtcgtctactctatcgacttgtcacgctttgaccaacatgtatcccgtgaactcctcgagattgaacactctgtctatctttcgtgcaatagcaatgactattttcgtaatcttctcaaggagcaattgaacaacttgtgctttacgcgcaatggatggggatataaagtgcgtggatgtcgcatgagtggtgatatgaatactgggttaggtaactgccttctcatgtacctcatgacaacgtcagctatgaggtaccttggcttagcaaagtatgagctctttgttgatggtgatgacacgctaataataattgaggaacatgatgagtggaagctttcgggcctcactcaagagttcctccgttatgggcatgaaatgaaactagaaaaccgtgcgacctcaatctccgaagtcacctggtgtcaggcaaaagtcgtatatgtcgatggcgtaccaaaatttgtggctaatcccactaaagtcctttcgacagctgtagctggggtgcgccattggcatgacaagggacgccaaaacatgggctattcccttggacaatgtcttttgtccttgtacgcgggtgtgcctatcctccaggctttctgtgaatctttaacatcacgaggtaggtggaatgatgaggtcatgtggcgcgactggatttatcggctaaccatcgaacaggcgaagaacgcaaaagttcgcgaggttagtatcgaaacccggttagctttccaacgcacgtggaaaattagccccgaggagcagatggctgtcgagcgccaactcctcgactgggatataactgcagatccagtatggtgccagtcacaagtgcgacagggttggttcatcgaccctgatattcgtgctggcccatgggcgcgcggtgggtatgacaacccactgacaacgttctagtccact

SEQ ID NO: 2654 - DNA, 1000 bp, Unknown
  Description of Unknown: unclassified Riboviria sequence
gggtaggttagcatctgccaccatgatcgtgtgttaggcacgtaaaacctacgttgtcagtacggacatcgttaccaaaatcgtacggagtgacgtctccatctcagtcatccgtggctggacaaatagctaacaccttttcactgttactatggccacaactaccgattcaccgctactgcccgtcgggctcaacactcccaggttgtccacctggaaccgcgcactcattgccactaagaagtggtggcaaaatttgtgcgagaaatcggaagttacacagttgttgtgctgtgttgacgccactgaggccgacaattatcgtcgagacactcgtgtgcgatcagagattcgcgaagctatgcgctcgcagatgggcttttacggtcagcccacatgcattgcagcggtcatgcatgaaacaaagcaggagcataattatgctctgggagctgagcaggaggatgtcattcgtatgactgccgctcaatgggatgcactttttgtgcaataccgcttccatgcgaacacaccttcagcccaaattttggctgtggcgaagaaggtggttgcaccggcgcgtgttgtgccgaagtttgcagccgccgtcacgctccacatcaaggccaaactgggtgtgctcgccaagaccgaggcaaacctgctgcttgttcaacgcaagtatcttgaggtttgccgggaccaccgtgtgcgtgatgttgacgttgtgtcacacatgcagtttgtgcagaacgcatatttcacggaagatgtcctcgagcggctcgccaaaacgcgacttcgcgcacctgcgtggttacgccttttcgaagagaaggagcgtaccgccacgcttgaggtgtgctgagggcgcccggttcgggttcagggccagaacacaagtgtgtcaccacagcttcggttgaagcgtgacaccctgtgtgctggtaagttgtccgttcacaggaacgggctgctcgcaaaaccacgccaatttgtg

SEQ ID NO: 2655 - DNA, 1000 bp, Unknown
  Description of Unknown: unclassified Riboviria sequence
aaccgcaggaagatgatgtgtctgtagctgaattaaatacccacttttccaatatgatcaataagcatggtcggaaaggctacaaactatcattcgacgagggtcagaaacgagtcggattactcaaacgtcccatgaactgtacttggaacaaatttctcagtttgtggagacggcctgtctgcgtgatggataggtggtgttcaaaatactttgacgtatttcgtcttttcaataaacttgttatttttgatgtttatgagaagatagattctgataagtatactgtaatgttgaaacataagatgcgagcgaccaaatattgcagccgcgctgatgttcatgctgtcatcgatttcaaacatttcgaaaagatagtcgattgtcaacattttatctacaaagaatttgacgtagctactaagatgcttagggccgcacaaccaaatatttttgaactccaccaattcatggatgttgaaacagctgaggccgaattgacgatgaaagagagtaagttggaattagaattgttcatccaactcactcatattggtttacttgatagtacgatgacacctgaagatgcgcatagggcgatagtaaggaatgcaaaacgtttatgtactgttaactacaaccgataccgtcatttggtcacaaaccatcttcaagtgatgtcacttcattatgctaaggcatacttcaatcatcagttacttgaagttgtttcaactctggattttcaccgcgcctccccacaaacacgcgattctttgcgcttggttatcgctcacgggaaattagagagctttctgcacctattcaaacgaaaaacgggcttaagtttagaaatgttaggaacatcaactttcgtcctgttcgtggtgtggaaatggtttctacgggtcctcatgttgaggggtattgcttacctcatatcgacacaagagaccctgcttccctgtttgatggcgtgcgtgcacgtatggggaaagtg

SEQ ID NO: 2656 - DNA, 1000 bp, Unknown
  Description of Unknown: unclassified RNA viruses ShiM-2016 sequence
tcactactacgctttcgtttgtgtgggaacggttggggtcatattattcagcgaaagttctctgtttgtttaagcgagtttcgctgcatgcctcattacaatgaggtctacgctgtccagctttattccagctgcggccgctacatcatccaccttcgattcaggcttatagtcacgcagcgctcctctttggtagtgagtgttgtgcccatagccattcataccaccagggccacatgagtagtggcgcttctatagcgcttacatttctagtggtcatcctcatatttgcctgcgggtttttcattcagtggtgtctcatcaagcgcaactagtagccatggcaatttcttataagtttgtcgcgccgctggccattattccttgctattatgcgggacgctgggcgctcgtgaggtacggcaactcacatggctggtgggataccaagacagcttgctctgatgctgtcattggcattgccaccgccattgagcagcggtctgccggtagggacccctccgaccttctcagggcgttggagttcgacggggaggtcgctgacaatctgcacgaggagctggccgaggctgcgttctacgagcgaaagtcctacgagagccggcacttctaccgccactggattgcagccgttcgcatggagtttcctcttcggagtgatcgtccatccgataaggcctgcatgacaaagtggttggtgggcaagatgagggcaaagggcattcgcatcactcacattgaggatgctgtgccccggatcgtggcaatggccatcaaccccagccgtgctgaggttgaggctagggagatggccgaggctgccgatgcctggcgaaccccccccgcccttacgtgggtggagtggttgctaggcatgacgccgaagccgacttccgcgtcgaagtgggaatagtggtgccctgtggctgcgcctcagcgtgctggcgatgttggtggcattgcgcgccatctcgccgac

SEQ ID NO: 2657 - DNA, 1000 bp, Unknown
  Description of Unknown: unclassified Riboviria sequence
tcccgtgtcaggcacccccagttttcggccttgaagcacaactgcatccccacattggatagcgcagacatatggcgaaatgctaagtacccatcgagtccgtttgacagttgcaatggcctggcacaacattgcccagtaaagtcatccttcccaggggctgctttaatacattcagattattatctgagttctgaggacttggcagccgtcatcaggtcgcacactttcatagtcacccacccatttgatggggaggaagggtgtttcaatgacgagttacattggaggaaagagggaccgtacatacgtgcgtggactgatgatggcacgccgtacaagcacttgtaccaccattgggaggctgaggggtgcataattgggagacatggagccgccacttacgtgagggtgcacagggggccgagcatggatgtgtactactgctttccatcaccaggcgtctaccgatcagacgacccgctcaggttgagaaggagtgacgaagtgctgatgcaccgattgcctagcgggaatttttattcagtgactaatggtagtgcgaagatctatgaccccgattttaaagtgttgcaagagataccgcatggcatcttacaacgagtggcagccaggtgtgggacagccgtccgtgatgagaagtttctaccggcgctggttgcttatacaacaacaaggttcacagcagacaaccaagacttgcatgtggtggaggatgtcatatcggtggccctgcggcatagcgacatgtttgccttgaatgtgtcttccaggtacattaccaatttcgatcccatgcgaatcaccaactttcagaggctggtgtgggtgtggaatgacttgcgctccagcttgagagggtattggaggttgcccctgacaactagcaacccactagtcaaccgtgtcactaccccttgggcatttagtcgtatatccgtcaacagttacgttcgtttcacccattatggactggtag

SEQ ID NO: 2658 - DNA, 1000 bp, Unknown
  Description of Unknown: unclassified RNA viruses ShiM-2016 sequence
accaaagtgcaagagttcgtttgtgcctcggagcaggtagtcgagggagactactcaaacttcgatggcagcgtgtccgcggatgctcagaagtgcgtgatgaacgccgtttatcacaggtatttccggagtgagttccaagaagaactcaccggctacaccagcatgctcatcacttgtcctgctaggtccaaaaccttcgggttcaagtatgacgctggtgtcggagtcaagagcggctccccaacaacctgtgacgcaaacaccgttctcaacgcctttctgcaatacatagccgtaagacggacactgccagagctctcaccagaagacgccttcctccaaataggattggcgttcggggatgactctctttgcaacagtcagttctccaaggcttggaccaaggcagccacccaactagggttcgcactaaaagtcgaaaagtgcgctcctgacacgggtgtgacattcctggcccgggtctacccagatgcgaaagcaagcctgacctccttccaggaccccgtgcgcacattacgcaaggcacaccttaccgggcgggacccaaatgtcccactcccggatgccgcgtgcgatcgcgccgagggttacctggtgaccgataaggagactccggtactgggtgaatacttccggttcgttttgcgccactatggaccgcaacggaccgcgaaggtgagagccgacagttgcagtgagaagccatactggctgacgcaaggcggaagctggccccaggaggcaaaggacttcgacttgatgctacactgcatggcagcacgcacaagcttcgaggtcgagaccttacgcgccatggaacttcactacaagagcgcgaaggacccctggacccccttaccttgggtgctgggagatgaggacccgacgcgggatacgcttaacgccgagggtctcccaagcacgggggcggtggactcacgtacatatgaaaaggacgtggagagagtaatccgtg

SEQ ID NO: 2659 - DNA, 1000 bp, Unknown
  Description of Unknown: unclassified Riboviria sequence
tgagtgtaaaaatgggaggcccgtcccagtccaccgaattaccttctttctcacacttcctcggtgtgggatatgagccaatttgcgggccgctgccgggcggctgaaggtgaaggccacgcccacgccacgacccgtggctattcggggcgcatcctgcatcctatcgggattaaaggttgaaggagcttccaagtaacccaacaggggctctggaacctagatgcagggtgggtgactacggcccgacgatcacggaatgagcacccgtgtgtcactcatttgcacggcaaggtgggcatgccaccgtgtagagtacgtcggttgggaacatgtcaagaggtggcttctcggctaagccgatggccagggttttagagcgcatgtatagaatgttgctagtgtttgctgtagtttttggtgtgttagaaatcttttgggttgcgtttgggtttgggtgtgcactccttcaaattaataggttacccctcgcctactgttgcaatcagcttcgttctcggtgagctcaacagcgactgtcaaccgacgcggtgtggtgagccgtcattggaggagtggtctcctttgattggcacgtactctagccaagaggtgcgactggtagaaggcatcgaacattgttaatcgtcctgtcttgtcattctcgtccatgacaagtttcgcatagaggccgtaatcagttcgattctttcctgggtgagctattcctgcgcttgtcggaataactctttgcggtggaagccacatcggtgagctcaaatgtgttttgggtcgcgacgcgggaagcggaggaggggccgaaaggccactcgtacgaagccaagggtattctgattgttgaggttgggtcgggcagcacccatcgccattcctcaatccacatgatttcacacacacactcacacagccacaacagcggcatgtattttcaagtgtccctcgcgcattgggtcttaggattttcggaacattcttcacc

SEQ ID NO: 2660 - DNA, 1000 bp, Unknown
  Description of Unknown: unclassified Riboviria sequence
gggggctggcgtgcgctagcgttgtcaaggacggcaagctggtgcgacagaagttattgcaattggatgagattgcacggggcgtggacatcactgatgaccacctttacgaccccgtgcagtatctgtccatgttcgagttgggcccattggagccgagcttctcgaacgtggcaggacggctctcaaaagctgttgagtacaacaatcgcgcaggcctcccgctcgaggatctgcgacaaaagcttattgagtgcgtgtcgagtgggcagaagtgtgcgaaagctcagggccaacccggtgcacaccattcccaggacaagggaaagggccggggagcgcttggacgcagcggtaagggggggcagacagccgcctcccaccactaggtggtcatagcctcctgttgcaaacacgcagtgcttcggcactcgcagcaggagggcgttggagcgtggggatcgccgtcggtgtgggaatccggcggtgacggcgtcagtcgtggggggttcggcccttatacgacaggctgatgtacgaagtaactggtggcttaggctaccaccagcgaaagaggcccgtggctgcggtcgcctcttttggctgcttggttgttgaccgaagtgagttgcgctactttggatgttgaatttagcctagtgcttcattcgacgccagttttgcgcgatttatcaacaatcgagttccccgaaccgacaccctgtgggtgctcagcttggaagcgggtcgtgatatatgattagcaaatacgcgggctatacttgagccgtccgtgatcactgcaacggataatgtcacgccgtggaaaggtgaaccacctatcacgttggtaagggtaacccggccgggatgggagcacattcaccatgtgcccggccactccatgtagctcaaaggcacagattaaccagctacaagcctaaaggaacctctcctgaacgcaccgctgtcgaacgacagctacaacgactttttcgct

SEQ ID NO: 2661 - DNA, 1000 bp, Unknown
  Description of Unknown: unclassified Riboviria sequence
tccttacaggatgggttaaaagcccttgaacctgttaaagctacatttttgcgtacgcgcaaacgtgatagtttcactgatgaggatacaatcataggttccccttacgggtcccatcaattgtctccttgtactgccagctttagtcgtgagactgtggctcgtgcacaagtgtatactattttaacagctgaacaggcaaaaatgaggcgttacttacttggtccagttacaaccgcatgggaacttgttcctttgtcttttgttgttgattgggtcgtacaagtaggcgattttatcgcttcatttcgtatgctccccaaagagtcacagggaataactttttctgtgaaagataaggtggaaattctagcggtcgctagtgcagactctaaactaatcatacgttcggacggttatattgtgtccagaattgatggtagacagagtttgagctactccaagcaacgttacacgcgcggggtaattccaaatgattttaaacatgaaatcccggttggcgttcaaatgaacctgtgtcgtactattgacgcattttctctcgcttataaaatcggactaagccaattaaaaaggagacattaacaatgtcacaatacaaaacgcgtactcgcggagaagccaaaactgtgcttgttaatccgtcaagctataaatcaacgcttgaggttatccacagtttcaaacgagacacagcccttaatcaggaccaagtccgaatcggtgttgcttcggcatatactgatgtagttaaaacctgcaaggactcctgtggcgtgccacgtcgcgagctggttaagcttgaaatgcctgttttattaggcatggacgaagcttattacaccagaaagaaacaacagctgactgacgttttagcgtcgggtcagaaacttctcgaagcattcgatgatgtgcagattggaatcattcctgatctgaacgtcgaagctactgtcgcttaacaataaggaatataatt

SEQ ID NO: 2662 - DNA, 328 bp, Unknown
  Description of Unknown: Picornaviridae sp. isolate ybw202shi02 genomic sequence.1 sequence
ttcgtccgaccactacatccaaccaacctcctcgcttgattggttgaagtatcatactgtccgtggtcccaaaaccttttacatcgagattctctcatcctgtgctagtgcccatttacttctaattactactcgaaaaccttcttacatcagcgagagcgccgactttgagacaccaacttgcgttgagctacccgctcctctagacgtctccattccccttcgagatcgtcttgttccgaagaaagcatatgacaatgcgtttgtctatgttcgtgctgttcgcacccttcgcaagactgatccagccggctttgttcgcacccag

SEQ ID NO: 2663 - DNA, 354 bp, Pegivirus B
acgacgcagtctcaccaatggactggcacggtccacaggagttgtcccttccggtgtgaataaggggccgtcacgagcggtgacgtaaaactgagggagattaggccagggtaacttggcgtgcgtacggccacgtcgcttctagatttcaatgccactcttgtggggcgagttgtcaaggccagcacggcggggcccccatactggttgggggtactcaatcgcctagtccagattatgccatgtttcccccaggcgggcgtagcgctacatgcggccaagaggaaaatccctatgggtgacctcgggggaaccttttcttttttagcggtcatggggtggtgtaccgcaacc

SEQ ID NO: 2664 - DNA, 365 bp, Unknown
  Description of Unknown: unclassified sequence
ccatcatcaaatatatacggagttttacgacacatacaacgacgcatgcgcaaccccacctacggttgcccgcgcatgcacagttgctgacatgcgcagtaaaaccaggaaatgactttgcattttcaagaaggtcacacgtaagcggatctctccgggtttttaaggctttttaagcatttttaccggatttttgacgtttaattattatctaaatgactcatctcatccctttaaatgtgctaacctgcaaggggacggtagagctgctttcctgcgactggtggaggtctgcgttggtttcacagtgggtaagtgagcctttttctgcctacttttatttctagacagattctgagtggctt

SEQ ID NO: 2665 - DNA, 383 bp, Unknown
  Description of Unknown: unclassified Pestivirus sequence
tgtataaggaaggggtgggagccttccctatacttgtttacaaataccatacagtgttacagcagtgtgtagtttactatgcaggtttgaagggcggggatagtctgtgccagcagacgtgtaccagcacttcagaaggaacctgcaactgcgaaccgggagagcatctagagcccctaagctgtgagtacacagcagccgtcagagagtcagctggaaaggatcacccacctggaagctctcgtggacggggtcatagaccaagggcaactctattgaggaggtggggtacctcttcatacaccccagtggtgtgatgtgctgcctgacagggtcccggctgatggcccggctagcagtataaaaatcagttgtaatggcac

SEQ ID NO: 2666 - DNA, 397 bp, Unknown
  Description of Unknown: unclassified Picornaviridae sequence
gtaggttatatggagttcatgctcgttctgaaccgggaatggcacaacccgtagtaggatcttgcctctgccatattaatctgcgcctgttgcttctagactatgggctgctaaggatgatgttggaactcctttttggatattccatatcaagtcaactgtttcacctggtgtacgctggaaatccatgctttaagtcctcatccggaggtggtgctgaaatattgcaagccacggatgactcttgaagcctggtgccgctactaggtgttacaccctttatgggcaaatgttgaaccttagtggacgcgtgagatgggaatccacgcctggccatagactggctgataagctcgcggctgatcgagttgcaacagtaatcagttgatttgccact

SEQ ID NO: 2667 - DNA, 415 bp, Passerivirus A
tcctcacccatgcttttcctacccccaccacgcccgcatgtttactgctttccttgatgctgcccgtgactacttccatgacctccccaacccaaacctcaaacgccttaagctatcatgggctctctatcaccaatccccttccttcccacccagaacccccccctccctcccctacaacgtgtatgagcaagacgagtttgacaagctcgccgaagccatgctcacccactctcccttccccacatcccattacctcttccaccccctcccgtccaacgcccgcaccatcgtcgagcgtgaggctgactgggatggctgtgatctagaaaagaaatggctcgacctcgtcatagaggacgatgccaagttccttctggagaacggctctctcccgtttggctccacccttgcc

SEQ ID NO: 2668 - DNA, 415 bp, Passerivirus A
tcctcacccatgcttttcctacccccaccacgctcgcatgttcactgctttccttgatgctgcccgggactacttccatgacctccccaaccccaatctcaagcgtcttaagctgtcctgggccctttatcatcaatccccctccttccctcccaaaacccccccctcccttccctacaatgtgtatgagcaagacgagtttgacaagctcgccgaagccatgctcacccactctcccttccccacttcacactacctcttccaccccctcccctccaacgcccgcgccatcgtcgagcgtgaggccgactgggacggctgtgatctggaaaagaaatggctcgacctcgtcattgaggacgatgccaagttccttctagagaacggctccctcccgtttggttccacccttgcc

SEQ ID NO: 2669 - DNA, 425 bp, Anativirus A
cccccccccataccttttccccctctttaacggcaatggttaatggactaaggataaaggattatggacttatatgatgtgcccgacatggaattcgggaaatctggatctaagggttacctcaaaggtagtgaaattccctcgcaggggtatagtagctagctttgtgccttagtgaagggaccgtgtgttctagacatggtagttgtgtaggtacaagaggacttcatttgaatatcctcgatcccggacctaaattaccttgtggatttccggaggaatttaggaaaccacctccttcgggaggctagtaggagcttacatgactctcggattgggaagtccgagctggaccatgactgggtgatagcctgccggctggcgcagttcacatggtatagtcagttgaaaataaatagaaaatc

SEQ ID NO: 2670 - DNA, 430 bp, Unknown
  Description of Unknown: unclassified Picornaviridae sequence
ccacccccctttcaacggctggcccacgatacgggccacaactttcctatcatcttctcatttcctataggttcggtttaatggttttgacttctgcattaataatggttttgtatgtggatgaccgtactatggatttggtgtgttaagctcacgttaaaaagctaggtggaatggatttgctacctggatggtcccccaggattaatggtaactccctctttcaccgaagtcaggaggaagagtagatgcttctagagttctgtgctctgtattacacagcaccgctcagctggcgtggacttccggccattggttgagttgacactaggagtagccagtactgggataactggcctggtctatactgctgataaggtgggttgcctgaccctctaaacctgactataattcaggctgtcttgatgcg

SEQ ID NO: 2671 - DNA, 461 bp, Melegrivirus A
ggcaagttgatatactggctctgatcacggactattctggtgttggtggacactctctccacaagtaggcgccgtggagttcatgctcgttctgaaccgggaatggcacaacccgtagtaggatcttgcctctgccacgtgcacctgcgcctgttgcttctagactatgggctgctaaggatgatcacagactcctttttggacaatctgtgtcaagtctactgttacatctgatgtacgctggaaatcctcgtactggaggcaatacctggaggtggtgctgaaatattgcaagccacaggtgtgtttctagtcttggtgccgctatcagatgtcgcaccctctacgggcaaatgtagaaccttagtggacgcgtgagatgggaatccacgcctggccatagactggctgataagctcgcggctgatcgagttgcaacagtaatcagttgatttgccact

SEQ ID NO: 2672 - DNA, 493 bp, Foot-and-mouth disease virus
cttgaggaatacttgtacaaacacgatctacgcaggtttccacaactgacacacacaccgtgcaatctgaaactccgcctggtctttccaggtctagaggggtgacactttgtactgtgcttgactccacgctcggtccactagcgagtgttagtaacaggactgttgtttcgtagcggagcatgatggccgtgggaactcccccttggtaacaaggacccacggggccgaaagccacgtcctaacggacccgtcatgtgtgcaaacccagcacggcaacttactgtgaaaaccactttaaggtgacactgatactggtactcaaccactggtgacaggctaaggatgcccttcaggtaccccgaggtaacacgcgacactcgggatctgagaaggggactggggcttctttaaaagcgcctagtttaaaaagcttctacgcctgaataggcgaccggaggccggcgcctttcctttaaactgttttaactta

SEQ ID NO: 2673 - DNA, 502 bp, Enterovirus J
aaaacgatcgttacccggctatctacttcgagaagcctagtaacaacattgaaactcttgagcgttgcgttcagcacagtaacccctgtgtagctttggctgatgagtctgggcactccccactggcgacagtggcccaggctgcgttggcggccaaccgatccgggcaaccgggtcggacgctcacttgtggacatggtgtgaagagcccattgagctagatagtagtcctccggcccctgaatgcggctaatcctaactccggagcaaacgcacgcaacccagcgtgtagtttgtcgtaacgcgcaagtctggagcggaaccgactactttgggtgtccgtgtttcctgttttaccttatttggctgcttatggtgacaatctagagttgttaccatatagctattggattggccatccggtgaatagatctcgatatattttattgcacagccttttatagcttgaattcataagtctcacttcaactcagaagtaatc

SEQ ID NO: 2674 - DNA, 506 bp, Foot-and-mouth disease virus
acgaaacgcgccgcctcttttggacttcttgtacaaacacgatcttgaagcaggaatcctcaactggcacacccgtgcaactgtaagtttcgcctggtctttccaggtctagagagatgagcagctgtactgagactaactccacaattggtctactagcgggtattagtaacactcactttgcttcgtagcggagcacatgagcgttgggaactcccccatggtaacatggacccaacgggccaaaagccacgcctcgtgcctcatgtgtgtgcaaccccagcacggcaatttgtttgtgaaacacaccttaaggtaacactgagattggtacttggtttctggaggcaggctaaggatgccctttaggtacccggaggtaacaagagacactctggatctgagaaggggaccggggcttctataaaagtgcccggtttaaaaagcttctacgcctgaacaggtgaccggaggccggcaccttttcccatctacaacttttatct

SEQ ID NO: 2675 - DNA, 507 bp, Foot-and-mouth disease virus
acgaaacgcgccgcctcttttggacttcttgtacaaacacgatcttgaagcaggaatcctcaactggcaaacccgtgcaactgcaagtttcgcctggtctttccaggtctagagagacaaacagatgtactgagactaactccacgattggtctactagcgggtattagtaacactcactttgcttcgtagcggagcacatgagcgctgggaactcccccatggtaacatggacccagcgggccaaaagccacgccttgtgcctcatgtgtgtgcaaccccagcacggcaacttgtttgtgaaccacaccttaaggtaacactgagactggtacttggtttctggagacaggctaaggatgcccttcaggtacccggaggtaacaagagacactctggatctgagaaggggaccgggacttctataaaagcgcccgttttaaaaagcttctatgcctgaataggtgaccggaggccggcaccttttctttttattaactttaaatct

SEQ ID NO: 2676 - DNA, 507 bp, Foot-and-mouth disease virus
acgaaacgcgccgtcacttttggaacacttgtacaaacacgatctaatgcaggtttccttaactgacacacccgtgcaatttgaagtttcgcctggtctttccaggtctagagagacaacactttgtactgagactgactccacgattggtctactggcgggtgctagtaatgactttgttgcttcgtagcggagcatgcaagccacgggaactcctccttggtgacaaggacccgtggggccgaaagccacgttctctgaaccttgcatgtgtgcaaccccagcacggcaacactgttgtgaaacacactttaaggtaacactgagactggtacttggtttctggagacaggctaaggatgcccttcaggtacctcgaggtaacaagagacactcgagatctgagaaggggatcggggcttctgtaaaagcgcccggtttaaaaagcttctatgcctgaataggtgaccggaggccggcaccttttcctttaacactacttacttt

SEQ ID NO: 2677 - DNA, 508 bp, Foot-and-mouth disease virus
acgaaacgcgccgtcgcttgaggaagatttgtacaaacacgatctatgcagacttccacaactgacacaaaccgtgcaacttgaagctccgcctggtctttccaggtctagaggggcgacactttgtactgtgcttgactccacgctcggtccactggcgagtgttagtaacagcactgttgtttcgtagcggagcatggtggccgtgggaacccctccttggtaacaaggacccacggggccgaaagccacgtcctaacggacccaccatgtgtgcaaccccagcacggcaacatttctgtgaaagctactttaaggtgacactgaaactggtactcaatcactggtgacaggctaaggatgcccttcaggtaccccgaggtaacaagcgacactcgggatctgagaaggggactgggacttctttaaaagtgcctagtttaaaaagcttctatgcctgaataggcgaccggaggccggcgcctttcctttaaactgtttcaactta

SEQ ID NO: 2678 - DNA, 512 bp, Foot-and-mouth disease virus
gcgcacgaaacgcgccgtcgcttgaggaatacctgtacaaacacgactcacgcaggtctccacaactgacacaaaccgtgcaacttgaaactccgcctggtctttccaggtctagaggggtgacactttgtactgtgcttgactccacgctcggtccactagcgagtgttagtaacagcactgttgcttcgtagcggagcatggtggccgtgggaacccctccttggcgacaaggacccacggggccgaaagccacgtccttgtggacccaccatgtgtgcaaccccagcacggcagctctactgtgaaaaccactttaaggtgacactgatactggtactcagacactggtgacaggctaaggatgcccttcaggtaccccgaggtaacacgcgacactcgggatctgagaaggggactgagacttctttaaaagtgcccagtttaaaaagcttctatgcctgaataggcgaccggaggccggcgcctttctccttaactaccacttctta

SEQ ID NO: 2679 - DNA, 514 bp, Foot-and-mouth disease virus
gcgcacgaaacgcgctgtcgcttgaggagaacttgcacaaacacgactcacgcttgtcttcacaactgacacaaaaccgtgcaacttgaagctccgcctggtctttccaggtctagaggggcaacactttgtactgtgattgactccacgctcggtccactggcgagtgcgagtagtggtgttgttgtttcgtagcggagcatgatggccgcgggaactcctccttggtaacaaggacccgcggggccgaaagccacgtcttaacggacccatcatgtgtgcaaccccagcacggcaaccacaccacgaaaaccacttcaaggtgacactgatactggtactcaaccactggtgacaggctaaggatgcccttcaggtaccccgaggtaacacgcgacactcgggatctgagaaggggactgggacttctttaaaagtgcccagtttaaaaagcttctatgcctgaataggcgaccggaggccggcgccttttccacaatttaatacttctttt

SEQ ID NO: 2680 - DNA, 516 bp, Pegivirus B
tcctttagaattaatggaacgctaggcttccggcccgaaagccgtggatctcccctgacagggttcttcgggtaaatcccggggggagtggtagcggtattagggtaggtcgtaaaaactgccccagtggggctacctagttgttaccggcaggacgaacggcgcgtcctgaaggactggcacggtccacaggtgtggtccctaccggtgtgaataaggggccgactcaagcggagtcgttaaactgaggctctagtgtcaagggtaacttgggcttgtgtacgtccacgtcgcttctagagttcaatgccagcactaggctggggcgagttgtcaagggcaacaggcgcgggggtggattattgttttccaccactcaatcgacactcgggtaatatgccatgctccctcccaggcgggcgtcgcgctgcaggcggcctagaggaaaaatccgaaaggtgacctcgggggggacctctcttctcttagcggtatgggtgtggtgttaccgcaacc

SEQ ID NO: 2681 - DNA, 520 bp, Megrivirus A
ttcgggacactggatgggcgactcggtggggctgccaccccgtcttgacttctcgttgttgaccctggaattctagaacattctcttgtcttctgcgtctggtccacggacggactaattggaatgtttattggttaagcctcgttctgaaatgccctagccaatgggctatagtaggatcttggtgtttccagtgaacctcttccgaccatagtagctagagttatggctgtgtaggatgtgggtaagaccgctttttgcgtatctcccacaagacaccggatcatgggtgtgtccgctggataaggctcgaaacctcccaactgacggtggtgctgaaatattgcaagcctaagttgtgtagaggcaagtagatgcccgccgcgacatctgtgatccgcccgtctgggttagtagtgtacctacatggacgtggggttgggaatccccacctagcataacactggttgatagacctgcggctggtcaagttactatggtataaccagttgaaatggct

SEQ ID NO: 2682 - DNA, 522 bp, Foot-and-mouth disease virus
gggacgtctgcgcacgaaacgcgccgtcgcttgaggaagacttgtacaaacacgatctacgcaggtttccacaactgacacaaaccgtgcaacttgaagctccgcctggtctttccaggtctagaggggcgacactttgtactgtgcttgactccacgctcggtccactagcgggtgttagtaacagcactgttgcttcgtagcggagcatggtggccgtgggaacccctccttggcaacaaggacccacggggccgaaagccacgtcctaacggacccaccatgtgtgcgaccccagcacggcaactttactgtgaaaaccactttaaggtgacactgatactggtactcaaacactggtggcaggctaaggatgcccttcaggtaccccgaggtaacaagcgacactcgggatctgagaaggggactgggacttctttaaaagtgcccagtttaaaaagcttctatgcctgaataggtgaccggaggccggcacctttcttttaaaccacaactatcctt

SEQ ID NO: 2683 - DNA, 527 bp, Foot-and-mouth disease virus
tttgagaaatgggacgtctgcgcacgaaacgcgccgtcgcttgaggagacttgtacaaacacgatctacgcaggtctccacaactgacacaaaatcgtgcaacttgaaactccgcctggtctttccaggtctagaggggtgacattttgtactgtgcttgactccacgctcggtccactggcgagtgttagtagtagtactgttgcttcgtagcggagcatggtggccgtgggaaccctccttggtaacaaggacccgcggggccgaaagccacgtcctaacggacccaccatgtgtgcaaccccagcacagcaattttactgtgaaaaccacttcaaggtgacactgatactggtactcaaacactggtaacaggctaaggatgcccttcaggtaccccgaggtaacacgcgacactcgggatctgagaaggggactgggacttctataaagtgcctggtttaaaaagcttctatgcctgaataggcgaccggaggccggcgccttttcactaaccactacttttt

SEQ ID NO: 2684 - DNA, 529 bp, Unknown
  Description of Unknown: unclassified Picornaviridae sequence
ttctttgaaaagggtactgggggggtcgattctagacccccacctagcccttttccccgtcagtggggggcttactcactgggcatctgttaatctggcctaactagattgacaccactcccttggaacgtaactccacgctaactcactggctctacgcacagacacacggtctttctgctatccccggggaagataccagatggcgaccggctgtcccagcggcctagtagctactcgggttgagtacccaccacggttttgacgcctgctaaaattcaagagacagaggtaggggtgcttagtgtgtgggggaagttcccacaagcgaggcaaagcattgctccctcgcgtcaccgggtgcaaggtaaattggctggacttccgctctacccttgctactcgccctcttcggagggttcgaagtgacactaggtatacgcatggttgggaaaccatgcctggcctactactgggtgatagcctggcggcgggtccgtctcttggcttatacccgttgatttgggat

SEQ ID NO: 2685 - DNA, 529 bp, Foot-and-mouth disease virus
tttgagaaatgggacgtctgcgcacgaaacgcgccgtcgcttgaggatgacttgtcaacacgatctacgcaggtatccacaactgacacaaaaccgtgcaatttgaagctccgcctggtctttccaggtctagaggggtaacactttgtactgtggttgactccacgctcggtccactagcgggtgctagtagtggtaccgttgcttcgtagcggagcatggtggccgtgggaattcctccttggtgacaaggacccacggggccgaaagccacgtcctgacggacccaccatgtgtgcaaccccagcacggcaactttaccacgaaaaccactttaaagtgacactgaaactggtactcaaccactggtgacaggctaaggatgcccttcaggtaccccgaggtaacacgcgacactcgggatctgagagggggaatgggactcctttaaagtgctcattttaaaaagcttctatgcctgattaggcgaccggaggtcggcgcctttccattaactatcactcactat

SEQ ID NO: 2686 - DNA, 532 bp, Foot-and-mouth disease virus
ttgagaaaaggggcgtctgcgcacgaaacgcgccgtcgcttgaggatgacttgtacaaacacgatctacgcaggtatccacaactgacacagaaccgtgcaatttgaagctccgcctggtctttccaggtctagaggggtaacactttgtactgtgattgactccacgctcggtccactggctggtgctagtagtggtactgttgtttcgtagcggagcatggtggccgtgggaatccctccttggtgacaaggacccacggggccgaaagccacgtcctaacggacccaccatgtgtgcaaccccagcacggcaactttaccacgaaaaccactttaaggtgacactgaaactggtactcaaccactggtgacagactaaggatgcccttcaggtaccccgaggcaacaagcgacactcgggatctgagaaggggactggggcttctttaaaagcgcccagtttaaaaagcttctatgtctgtgtaggtgaccggaggccggcgcctttccatttaactattacccaccat

SEQ ID NO: 2687 - DNA, 550 bp, Unknown
  Description of Unknown: unclassified Aphthovirus sequence
ttgtaaccgcacggtttgccttcctgggggaagtaaaacacccacaagcttgacagttttgcccgttttcacgagaaatgggacgtcagcgcacgtaacgcgccgccactttggaatacttgtacaaacacgatcttacgcaggtttcccaactggtacactcgtgcaacttggagtttcgcctggtctttccaggtctagagggacgacactttgtactgaaaccagctccacgattggtctactggcgggtgctagtaatgactgtgttgtttcgtagtggagcatacaagccgcgggaacccctccctggtaacagggacccgcggggccaaaagccacgttctttgaaccttgtatgtgtgcgaccccggcacggcaacactgttgtgaaacacatcttaaggtaacactgagactggtacctggtttctggagacaggctaaggatgccctccaggtaccctgaggtaacaagcgacactcaggatctgaggaggggactgggacttctataaaagtgtccagtttaaaaagcttctatgcctga

SEQ ID NO: 2688 - DNA, 555 bp, Unknown
  Description of Unknown: unclassified Picornaviridae sequence
ctgtgccttcctggtcataattggctccggctggttttgacttcggaacactggatgggcgattcggtggggctgccaccccttcttgctttttcggtgtgacattggaattctagacccttctttgtccctcgtgtctggtccacatacggactaaatggaatgtttgccagctaagcctcgttctgaaatgcccttgccactgggctgtagtaggatcttggtgtttctggtgaacctcttccgaccatggtagctagagctatggctgcgtaggatgtgagtaggaccactttttgtgtatccctcacaagacaccgggtagtgggtgtgtccgctggatatggctcgaaacctcccaactgaaggtggtgctgaaatatcgcaagcctaagttgtgtagaggaaagtagatgcttgccgcgacacttgcttcccacccttctctgggctagtagtgtacctgcgtggacgtggagttgggaatctccaccatgcatagcactggttgatagacctgcggctggtcaagttatcatggtataaccagttgta

SEQ ID NO: 2689 - DNA, 562 bp, Enterovirus A
ccaccaacccaggtgggttttccgtcaagcacttctgtctccccggacttagtaccaataggctgtacccacggccgaaagggaaaacgttcgttacccggctacctacttcgagaagcctagtaacatcattgaatgtctcaagtgttacattcagcacaaccccagtgtagttcaggtcgatgagtcaccgaattccccacgggcgaccgtgtcggtggctgcgttggcggcctgcctgcgggtctcactcgcaggacgcttgattcatgacatggtgcgaagagcctattgagctaggtagtagtcctccggcccctgaatgcggctaatcccaaccacggagccatgcgctacaatccagtggtgttgtggtcgtaacgagtaattctgtggcggaaccgactactttgggtgtccgtgtttcctgttttatttaccttggctgcttatggtgacaatctagagttgtcatcatatagcgattggattggccatccggatatatcttttgtgtgatttacctcttgctaccaagcaattgtcacttgttaataatacc

SEQ ID NO: 2690 - DNA, 566 bp, Pegivirus B
cgtaggcgcctgggggttcgggtgcaagccccgaaaccgacccttacttcgaacaaccgttctagaacggctgggtcaactccccctttagtcaaaagcccagtgttgctggggtgccagggttcttagggtaaatcccggccccagtggatctgggaatatgataggaggagcggtgcggttcgaccaccgcacgggaccactgaccggcttgacgaagcggctagtagttgactagggcacggtccacaggtgtggcgtaccggtgtgaataacggcccgtctggagcgacagacgttaaactgaggggggtgtgaggatggcaacgcggcccgtgtacggggacgtcgctaaataccttcgggaacagctatgcgggttgtcaaccccagcggtggcgcggcctacctactgttggcaggtgccagttccctctcaccctcgcgaaagcagcacggggccccccagctggcgcagcgctacatgcggcaagaggaaaatccttcgggtgacctcggggggcatgtcccaaccaaacatgatactaggggtagcaactgccaag

SEQ ID NO: 2691 - DNA, 570 bp, Unknown
  Description of Unknown: unclassified Picornaviridae sequence
agatgtgtataacacacaggcccccttttcccgaccggtttggcacaccgggcggttaccctgattagatgtctgggaattgctggacttcagtggctattgctgctgtcttctggcttttctgaactgggcatctagttgggttctttgccatccacactctaattcccattacgttttctctaccccttgattggtctaactggttaagtgactccttgcctgcttttgactattcttggtgctggtggacactctttccacaagtagatggtatggagttcatgctcgttctgaaccgggaatggcacaacccgtagtaggatcttgcctctgccatactcatctgcgactgttacttctagaccataggctatataggatgatcttggacctctttttgagcatcctggtcaagccaactgtgtcttgcaacatgcacgctggaaatcctcgctagaatgaaatcctgatggaggtggtgctgaaatattgcaagccacatcggctttcattctcttggtgccgctgtgttgctacacaccccatgtgggcaaatgttggacctat

SEQ ID NO: 2692 - DNA, 579 bp, Aichivirus A
gccaggtcgcatcgcctggttggtgaccaaactgctagatgctcctccctttccctcggggttggcgcaccgccatccctgcatcctccccccagcctgacatgctacaggctgtgcaagaaccccgcgaaagctgccaccgtggcaattgtgggtccccctcttgtcaaggcacagagtctttctcccttaaggctagacccctctgtgaattcagaggcggcaactagttgtgccactacatgcctcagacctcggtcgcggagtgctgttccccaaaccctgacactgccgcgtgagtatgctgcttggcaagcattgcctggatggtcgttccgctggggctgccaggtctggtaacagaccgctccagtgtgcgtagaccatctccagcttcggctggtgctcacaaggtaagactcggtgtaaggttcatgtgccaacaccctggaatgagtgaaaactctactgccctaggaatgctacgcaggtacccctgctcccttgggagccagggatctgagcgtaggctaattgtctgtcgggtagtttcatttcccaccctctagactgttcacc

SEQ ID NO: 2693 - DNA, 581 bp, Unknown
  Description of Unknown: unclassified Enterovirus sequence
ttgtgtttgagtgttgtatactgttattacggtaaccttatacgccagttttatatcccccttaccccaatgtaacttagaagtttgtacataccgaccaacagtaagcaatcatccagattgtttaaggtcaagcacttctgttaccccggtcagcgttgatatgctccaacagggcaaaaacagcaatgatcgttatccgcaagatgcctacacagagcctagtagcactctagaagaattctggttggtcgctcagttgcaaacccagcaatagacctggcagatgaggctggacgttccccactggcgacagtggtccagcctgcgtggctgcctgcacactcctttggagtgtgaagccttaatttggacagggtgcgaagagccgcgtgtgctcatcttgagtcctccggcccctgaatgcggctaaccttaaacctgcagccattgtttgcaatccagcaaatatgtggtcgtaatgagtaattgcgggatgggaccgactactttgggtgtccgtgtttcttttatttccatttgtatgcttatggtgacaatatatgatatatattgacacc

SEQ ID NO: 2694 - DNA, 584 bp, Unknown
  Description of Unknown: unclassified Avihepatovirus sequence
ttcagctggtatggcatgcatgcatcgactgcttgggggtgtccctgacccccttaattcaacgtctagcccacgatacgggcaccctatccagtttatatccctttacctcccatggactgacttgtatggatttggatctaaattggattatcatttatttgtggtggttagccaaccatgctctggtgcaatgattccatgtattcatttggctaggtgccgacctaggaggtggtgctgaaatattgcaagccactggtgtcgttacttagcatctggatgcatggggttgattgcattctgtacagaggaaggctagcttatgccttgggctaatagtctttgttgtgaaacggattaccggtagtagcatcttagaccaccaaggttataggtgagtgtgtggtctagagtaggcacacatctgtccaggcacatgtacattgttacaactgctccagactagttcctgagggacagatgttgtggggggcttgggaaaacccccttaacctacactgcctgatcgggtcgcggctggtcgagtcccacacactataataccagtagaccttcatgca

SEQ ID NO: 2695 - DNA, 584 bp, Parechovirus B
ggtcgaagccgcttggaataagactggtgctgttcacagtgtgttcacgatctatgcaacttctgtcttccatctgtgtctatgcaggtggataagggctgtacccgggcggtcctactctccacaggggcctgcgtaggtggctttcacctctggacagcgcaccccaccccgcctactgagtgaagggcatacggcttttctattgcgaattgtattgaagtttaggattaggtgtagcgaccacatgtgtgccagcggatctcccctggtggtaacaccagcctctgggcccaaaaggcatgtctctgaccacacatgtgcacaaccccagtgataatcctttttagtaaatgcttagtaacagtggattagcagtgctcctcaagctcagtagggcttaggtatggcaggttgaaggatgccctggaggtacccgcaggtaacgataagttcactgtggatctgaccaggggcccaccgggaattccccgggtagaagccttcgggccttgggttaaaaaacgtctagacctgtcccccagagggatctggggtttcccttttaaccccaattattcaat

SEQ ID NO: 2696 - DNA, 587 bp, Unknown
  Description of Unknown: unclassified Picornaviridae sequence
caatagggtaacctattgtaacttggacttattactttatcatatagtttattgtttaaatcggaactagtgtattatgtttaaataatatgtgttagcctttaaactttattctattatttgataaggttcaataagtttgtatgactagatccagtaactattgctcaattttaaaacaatcttaaaaatctgtatgaaacgcagatcaatttaatattttagaactacccgtatttatataggctcttctaaaatatgaattgttatcgaaagataccttattattggttgattaatttcttaatgtgcatggtggcacctttaataagtagatttccgtcattctctatttagagtacttttggacgttaactaatgctccattcagtctagaatgtatgataattaaactctagattgtataaactatcattatcgcaagtaccacatcaaataaaacttatgaaaaaccgcaattactcgatgataactttgctcctgatgttagtgatattactaatactaactttctcgaggaaagggtagtcgaaactagggaagcatatccatcaacatctcttact

SEQ ID NO: 2697 - DNA, 591 bp, Sakobuvirus A
tcacgcgcttttccggtggtcacccaccgttagggagcgccagcgttcgcgcttccgctaccaggtgacacactcctttcccctcccccattcccgttcccatcctctggactggtttctcctcacgattgaccagcagctgggagctgttaccagacgttggacagtaagtcccggatgcactatagggctggtggctagtgcttggtaagcactcaacgccatacctaatgtgtacctcggcttgccctcctggtcgtggtgaccggctgtttctcttcccttggctctagacgggctggtgtcctaccaccaccgttgcatgcagacctccccctgcgcactcgaacgccctgtcccagcagggttagtatgtgctgtgcagatctgcatgtgacaccccatccactggtagagcaggaagttgccctagctaacgcggcaagtattactttccgctacacgtccttgagattcctcggacctctggaactagggtgactgtgggcttgggaaaacccaccttggtcctgtactgcctgatagggtcgcggctggccgaccagtggatgtagccagttgttttgggat

SEQ ID NO: 2698 - DNA, 593 bp, Foot-and-mouth disease virus
acgaaacgcgccgttgcttggggaaaacttgtacaaacacgatccatgcaggtttccacaactgacacacaacgtgcaacttgaaaccccgcctggtctttccaggtctagaggggtgacactttgtactgtgattgactccacgctcggtccactggcgggtgttagtaacaggactgttgtttcgtagcggagcatgatggccgtgggactccccccttggtaacaaggacccacggggccgaaagccacgtccagacggacccatcatgtgtgcgaccccagcacggcaactttactgtgaaaaccactttaaggtgacactgatactggtactcaaccactggtgacgggctaaggatgcccttcaggtacctcgaggtaacacgcgacactcgggatctgagaaggggactgggacttctttaaaagtgcccagtttaaaaagcttctatgcctggataggcgaccggaggccggcgccttttcttttaccactactaaatttatgaatacaactgactgttttatcgctctactgcacgcttttagagagattaaagcacttttttcgtacacggacacaaggcaag

SEQ ID NO: 2699 - DNA, 593 bp, Unknown
  Description of Unknown: unclassified Megrivirus sequence
acgatggcgtgacgaaccatcgtgcgtgactctgctaagtcgtctgtgcctctcgggcatgttgtggctccggctgcaacatgcttgggacattggatgggcggcttggtggggcttagtcaccccgtttaggactacccggtttgatttctttattggattttgggactggtccaccgacggactaattggtatctgcaaggactaacagcctcgttctgaaatgccctagccaaagggacgtagtaggatcttggtgttccccttgtagctctgccgaccatattagctagagctaggactgtgtaggatgttctagacctctttttgagcaatctaggacaagactccggatctagatgtgtacgctggataaggctcgaacactcccgcgcgttaggtggtgctgaaatattgcaagccgacgtgtgtgtagagttagtagaagcccgccgctacatcgaaatccgccccttccggggttagtagagtacctgcatggatgtgtggttgggaatccacaccagtgcctagtgctggttgacagacccgcggctggtcgagttaatatggtataaccagttgatttggca

SEQ ID NO: 2700 - DNA, 610 bp, Unknown
  Description of Unknown: unclassified Enterovirus sequence
ttaaaactgggcatgggttgaccccacccatgccacccaagtggtgtagtgctcttgtatttcggtacatttgcacgccagtttgccaccccttaccccaagtaacttagaagcatgtaactttgatcaatagggagtggtaagccataccacttgagatcaagcacttctgtttccccggctctagaggaatagaccttgcaaagggttgaagccacgaaagtcgttatccgcacacatactacgcaaagcttagtatttccttgaaagctcgccggttggtcactccgttaataccccattaacagacctggcagatgaggcaggaaactccccactggcgacagtgttcctgcctgcgtggctgcctgcacaccctctcgggtgtgaagccgactagtggacaaggtgagaagagccccgtgtgctatgtgtgagtcctccggcccctgaatgcggctaatccaaccccacatctgtcgcacacaatccagtgtgtaggcagtcgtaacgggcaactgtgggacggaaccgactactttgggtgtccgtgtttcctttatttcttttatgaatgcttatggtgacaatatcgagtaatattgttacc

SEQ ID NO: 2701 - DNA, 611 bp, Unknown
  Description of Unknown: unclassified Enterovirus sequence
ttaaaactgggttgtggttgttcccaccacaatcacctacgtggtgttgtagtcttgcatttcggtgcatttctatgccagttttatctccccagcccccgtaacttagaagaaaagaacacagaccaataggaggtggtcacccagaccacttacggtcaagcacttctgtttccccggttgatctagatatgctttacccgaggcaaaaactaaatcaatcgttatccgcaaagtgcctacgggaagcctagtagcactctgaaagcctatggctggtcgctccattgcaaacccagcaatagacctggcagatgaggctagacgtaccccaccagcgatggtggtctagcctgcgtggctgcctgcacaccctcatcgggtgtgaagccagaaagtggacagggtgtgaagagcctactgtgctcactttgagtcctccggcccctgaatgtggctaatcctaaccctgcagctgttgcacacaagccagtgtgtatgcagtcgtaacgagcaattgcgggatggaaccaactactttgggtgtccgtgtttctctttattccttatgttgacctatggtgacaagtgtgcaattcacgtttgtcact

SEQ ID NO: 2702 - DNA, 613 bp, Rhinovirus A
ttaaaactggatctgggttgttcccacctagatcacctacagggtgtagtacactgttattacggtaactttgtacgccagttttatatcccctccccgatgtaacttagaagcaagcacaaacgtccaataggcggtgattatccaaatcacttacggacaagcacttctgtctccccggcaactgctgatatgctccaacagggcaaaaacagcggaagtcgtcatccgcaaaatgcctacgcaaagcctagtatcactctagaaggtgtgtggttggtcgctcagccgtgaacctgacggtagacctggcagatgaggctagaaataccccactggcgacagtgttctagcctgcgtggctgcctgcacaccctcacgggtgtgaagccattcattggacagggtgagaagagcccagtgtgctcattttgagtcctccggcccctgaatgtggctaaccttaaacctgcagccaatgcacacaacccagtgtgtatttggtcgtaacgagcaattgcgggatgggaccaactactttgggtgtccgtgtttctttttattcttatcatattgcctatggtgacaatatatactgttatatattgttatc

SEQ ID NO: 2703 - DNA, 615 bp, Unknown
  Description of Unknown: Porcine pegivirus strain ND/33/2017 polyprotein gene, complete cds.1 sequence
ccgctacccccccagcccgtgtaccggccctcgggccgcacgggatggggggggtagcgggggccggaggcccccgcgttctagaatggtgtgatcggttgccgctccagcggaaagcgggcgggatctagtggttagggttgttcgcgtaaatcccacactagtggtacgctcgtataacgtgggagcagccgggggggtcggccccccccctggcagctgctgagcaccggacgaagcgcggggggtgaacgctaacccgcagcccgggatgccaacgttaggcacgtcttggctggaagacgttaaacacagggccctccctcaaccccgatccgagaccagagttcaaggtacgccgcccttttaaaggcgttactcgtccaataggtctctccggcgggttgtcaaaccttgctggttccggtgacggttacgaggcagggcggggtggggatttaaacccccatccggcacgggggtaccaagctcggcacgcccagcacgcgtggcgtaggggaaaaatcctgcgggtgacccctggtaccataaagtaattaacatgagcatgccgctagggtgtgctttttccttccttgggaaggcggtggcacc

SEQ ID NO: 2704 - DNA, 615 bp, Rhinovirus A
ttaaaactgggtcgtggttgttcccaccacgactatctacggatgtagtgctcttgtattccggtacgcttgcacgccagttttgtcacccccccctacattgtaacttagaagattaacacaaagaccaataggcggcaatgaaccacattgtcaacggtcaagcacttctgtttccccggtcaatctagatatgctttaccaaaggcaaaaactggagcgatcgttatccgcaaggtgcctacgggaaacccagtagcattctttatttgatctggttggttgctcagccgttaaacccaaacggtaaacctggcagatgaggctggaagatccccaccagcgatggtgttccagcctgcgtggctgcctgcacacccgaaagggtgtgaagccttttcaaagacagggtgcgaagagtctactgtgctcaccttgattcctccggcccctgaatgtggctaatcctaaccccgtagctgtggtgtgcaatccagcacattcgcagtcgtaatgggtaactgcgggatggaaccaactactttgggtgtccgtgtttctctttttccttttatatatgcttatggtgacaattatacggatatagttgtcatc

SEQ ID NO: 2705 - DNA, 615 bp, Rhinovirus C
ttaaaactgggctcgggttgtacccacccgagctgcccatgtggcgtggtgctcttgtatcccggtacacttgcacgccagtttgcctctccttaccccgtaacatatctagaagaatgtgcataacggaccaataggtggtggcaacccatgccactgacggtcaagtacttctgtttccccggtgtgatgtggaatagactctctcagggttgaagccataagcatcgttatccgctacgtgcctacgcaaaacctagtagcattttgaagcttacttggttggccgctcagccactaacccgtggtaggcctggcagatgaggctgggcgcaccccactggcgacagtggcccagcctgcgtggctgcctgcccctctttgaggggaagccatttaagtgacaaggtgtgaagagtctcgtgtgctccacgtagaatccttccggcccctgaatgtggctaatcctaaccccgcagctattgcacacaatccagtgtgttgatagtcgtaatgggcaactgtgggatggaaccaactactttgggtgtccgtgtttcctgttttctttaaatacttgcttatggtgacaaatagtgtatactgtttgacacc

SEQ ID NO: 2706 - DNA, 616 bp, Pegivirus E
gacgcgcatcccgggtgaaagccccgggcgtacgacctggttcgggatgattcccgttctcagtgcggaggccccgcaaaccgagccgccctgtaggcaacttctagaatggggagttaactcctggcactggcccgaagcatgaactgatcgcggtggcagggttcttcgggtaaatcccggccgcgtgttgtgattgtgttagggcaggtgacagtcggcagggtcgaccccctgcttcaggaccactgtcttcctggacgaccgttgctgaaaaagggccgccacggtctgtagctcgccgacgcttctaattcaggccggaggaccacgctccgtaatcgagcccaagtactcaaaccccagcacccctgggtcacgccctacgccgcccttttaacgcttcggctaatagggtctatccggcgggttgacaaagggcgcagggttacctggtactacgagcttgggtgtccctgggagtaatcccagggtgccatgctgcagcgcaggcgggcgagggtggtgcctcggcctaggggaagagcgcaagtgaccccgtgctgcataaatcccccccctttttttctacatgggtgttccatgtgccgccaag

SEQ ID NO: 2707 - DNA, 617 bp, Unknown
  Description of Unknown: unclassified Pegivirus sequence
ggctccccccccacctcgcgcggcccgagggccgatacgcgggttgggggggtagcgggggccggaggcccccgcgttctagaatggtgtgatccgtcgccgctccagcggaaagcgggcgggatctagtggttagggttgttcgcgtaaatcccacactagtggtacgctcgtataacgtgggagcagccgggggggtcgaccccccccctggcggctgctgagcaccggacgaagcgcggggggtgaacgctaacccgcggcccgggctgccaacgttaggcacgtcttggctggaagacgttaaacacagggccccccctcaaccctgatccgaggccagagaccaaggtacgccgcccttttaaaggcgttactcgtccaataggatctctccggcgggttgtcaaaccttgctggccctggtgatggttacgggagggggtggggcggggagtagaagccccgcccggcatgggggtaccaagctcggcacgcccagcacgcgtggcgtaggggaaaaatccttcgggtgacccctggtaccataaagtaattaacatgagcatgccgctagggtgtgctttttcttccttccttgggaaggcggtggcacc

SEQ ID NO: 2708 - DNA, 617 bp, Grusopivirus C
gccccgacgagtcccgtgggatacctggtacgtgccaggaaaatcccacgggactcgtcggggctttacccctaatttcaacgttggtccacgaaacggccgttctttcttttttcttctattttcaatcttgactccgcactgatcttttggttctagacacaggcgcgtttggttatagagtaggatttggatatagttatgagagggttagccaacccattctgaaccactttaagtatgtcaatctgaattcatcagtaatatagcacaggaggtggtgctgaaatattgcaagccactgttttatttatatgaagaattcaagaacctacttaaggtggtgatgaaaaggctaggtttatccatagtaatcccttgttctgaaaaggtaatgcacagtccttagtaggatcttgggctctgcaactggctctaaaccgaccaatctaggtagaggcactaggtgtaggacttgccatattgtattacaatctggtaccgacaaaatgtctggaaactccacactgagggtgataggggggggccccttcacagttgtgctactgcttgatagagttgcggctggtcaacttagattggtataaccagtagaa

SEQ ID NO: 2709 - DNA, 620 bp, Unknown
  Description of Unknown: unclassified Aphthovirus sequence
taccgcccatcccggtgttaaagggtgtaaccacaagatgcaccttcgtcccggaagtaaaacggcaatttcacacagttttgcccgttttcacgagaaacgggacgtctgcgcacgaaacgcctgtcgcttgaggaggacttgtacaaacacgatctaagcaggcctccccaactgacacaaaccgtgcaatttggaactccgcctggtctttcctggtctagaggggtgacactttgtactgtgtttggctccacgctcggtccactggcgagtgttagtaacagcaccgttgcttcgtagcggagcatgatggccgtgggaactcctccttggtaacaaggacccacggggccgaaagccacgtccaatcggacccatcatgtgtgcaaccccagcacagcaacttttctgcgaaactcacttcaaggtgacactgatactggtactcaaacactggtgacaggctaaggatgcccttcaggtaccccgaggtaacacgcgtcactcgggatctgagaaggggactggggcttctataaaagcgtccaggttaaaaagcttctatgcctgaataggtgaccggaggccggcaccttttctttacagccactgacttt

SEQ ID NO: 2710 - DNA, 622 bp, Enterovirus C
ggacgtcagtacaccggcattgcggtgcccttgtatgcctgttttatattccccccctgtaactctagaagaaaatgaactctgagctcaacaggcgttacgtttccagcgtgactacgagcaagcacttctgtttccccggttgcgccctatatgctgtgtgaacggcagaaaggggcaaaatcgttatccgcttgactactgcgggacgcccagtatcaccatggattgatttgagagttgcgctcagcacatccccagtgtagcctgggccgatgaggctccgaattccccacgggcgaccgtgtcggagcctgcgttggcggcctaccctcgcctcacggtgagggacgctcacttcatgacatggtgcgaagagtctactgcgctagttaagattcctccggcccctgaatgtggctaatcctaaccactgatcctgtaagtacacgccagtgcccagcaggtcgtaatgcgcaagtcggtggcggaaccgactactttgggtgtccgtgtttcctttatttccttattgaatgtttatggtgacaattgttgagtacagttgttgccattattgcattctacaaacagtgaacaaaccacacaccaatatagcaca

SEQ ID NO: 2711 - DNA, 625 bp, Unknown
  Description of Unknown: Eotetranychus kankitus picorna-like virus strain EKPLV.abc9,1 sequence
cctattgagaagtgaactttcattttctatacaaagtgctatatttcgagcgacagtgtaaaactaaacaatagtgtacataacttattactcaaaatatagttaagacaaaagtcctctggaccccagtccagaggatctttgtcttaactatattttgagtaataagttatgtacactattgtttagttttacactgtcgctcgaaatatagcactttgtatagaaaatgaaagttcacttctcaataggagtatgtacttagtagattatataacagctgattattattggctgaaataatccgtaataatcgtaagtcgattatataagactacacgctcattttgtggttatttcaaatttaacaacttttgaaaccactttcattttaagatgtgtgttctatttatctagacgcatattcatattcacttgtttagtaatttcaccctactaaactcgtattcacgatacgtattttccagaattagtttactaatgagattatacgcattaacattttcgttagacttttgatacatacaaatctaacccttgtttggtaggcaagtacaacctactggtttcccgagacctatgaggggcccaataaatatgaaag

SEQ ID NO: 2712 - DNA, 625 bp, Enterovirus A
gctctgcagatatcaatagcaggcatggcgcgccagtcatgtctagatcaagcacttctgtctccccggatcgagtatcaatagactgctagcgcggttgaaggagaaaacgtccgttacccggctaactacttcgagaaacttagtagcatcattgaagctgcggagtgtttcgctcagcactcccccagtgtagatcaggtcgatgagtcactgcactccccacgggcgaccgtggcagtgactgcgttggcggcctgcctatggggcaacccataggacgctctaaagtggacatggtgcgaagagtctattgagctagttagtagtcctccggcccctgaatgcggctaatcctaactgcggagcacatgccctcaacccagggggtggtgtgtcgtaacgggcaactctgcagcggaaccgactactttgggtgtccgtgtttctttttattcttatattggctgcttatggtgacaattgagagattgttaccatatagctattggattggccatccggtaaccaacagagctattgtttacctgtttgttggatacgtccctctcaatttcaaagtcattaaaactcttgattatatattactcctcaactgtgagaa

SEQ ID NO: 2713 - DNA, 627 bp, Avihepatovirus A
tatgaaagtaactggaaactgggaggatttcagggggaggtaaaaaaggtatgacaagggtgcatcgactgcttgggggtgtgcctgacccccctaattcaacgtctagcccacgatacgggcaccctatccaatttgtatccctttacctcctatggacagacttgtatggatttggatctaaattggattatcctttatttgtggtggttagccaaccatgctctggtgtaatgattccatctgttcatctggttaagtgccgacctaggaggtggtgctgaaatattgcaagccactagtatcgttacgcttggcctctggatacgtgggattaattgcattctgtacagaggaaggctagtctatgccttgggctaatggtctttgttgtgaaacggattaccggtagtagcatctcagactaccaaggttgtaggtgagtgtgtggtctagagtaggcacacatctgtccaggcacatgcacattgttgcgattgctccagactagttcctgagggacagatgttgtggggggcttgggaaaacccccttaacatacactgcctgatagggtcgcggctggtcgagttcccacacactataataccagtagattttcatgca

SEQ ID NO: 2714 - DNA, 630 bp, Unknown
  Description of Unknown: unclassified Avihepatovirus sequence
ttttgaaagccgggtgcatgcatggccattttccagcacaggttcagctggtatggcatgcgtgcatcgactgcttgggggtgtccctgacccccttaattcaacgtctagcccacgatacgggcaccctatccaatttgtgtccctttacctcccatggattgacttgtattggatttggatctaaattggattaccctttgtttgtggtggttagccaaccatgctctggtgcaatggttccatgtgttcattctggccacgtgccaacctaggaggtggtgctgaaatatcgcaagccactagcgttattacacttggcctctggacacgtgggattaattgcattctgtacagaggaaggctagtctatgccttgggctaatggtcttcgttgtgaaacggattaccggtagtagcatcttagactaccaaggttgtaggtgagtgtgtggtctagagtaggcatacatctgtccaggcacatgtacattgctacgattgctccagactagttcctgagggacagatgttgtggggggcttgggaaaacccccttaacctacactgcctgatagggtcgcggctggtcgagtcccacacactataataccagtagattttcatgca

SEQ ID NO: 2715 - DNA, 633 bp, Unknown
  Description of Unknown: unclassified Enterovirus sequence
ttaaaacagcgggtgggtatcccaccacccgacccactgggtgtggtacactggtactttgtacctttgtatgcctgtttgcatcccttttcccttcacctaacatcctcccccaaagtatattttgcggtaacgttagaagaagtgaactcagtgcaacaggaagtatcaccaccagtgatataacgcacaagcaattcttgttccccggagctggatatagactgctaacgtggtcaaaagtccttaaccgttatccgccagctaactgcgagaagactagtaacatcatgcacatttctagacgttcgatcaggtgaataccccattcactagtttggtcgatgaggctgagagttccccacaggtgactgtgtctcagcctgcgtggcggccaacccgacttatgtcgggacgcctattaatggacatggtgtgaagatcctattgcgcttagctgtgagtcctccggcccctgaatgcggctaaccttaaccccggagccttgtggtgcaaaccagcatttgcaaggtcgtaatgagcaattctgggatgggaccgactactttgggtgtccgtgtttcctttattcttattatttgtgtttcatggttacaagcatagtttgtaatc

SEQ ID NO: 2716 - DNA, 636 bp, Unknown
  Description of Unknown: unclassified Megrivirus sequence
ttcccgaccggtctggcaaaccggacggttatcctggttagatgtctgatggttgctggaacgtggtggctattgctgccaccttctggcttcctttattgggcatctagctgggtcctttgccatattccatctaactctcttcccattttctattacccaggcttgttgtaactggtaagttgactcactggcttcgttttgagactactctggtgctggtggacactctttccacaagtggattgtatggagttcatgctcgttctgaaccgggaatggcacaacccgtagtaggatcttgcctctgccataccaatctgcgcctgttgcttctagactatgggctgctaaggatgatcttggaactcctttttggatattccggttcaagtcaactgtttcatctggtgcacgctggaaatcctcgtttctaggtcttgtctggaggtggtgctgaaatattgcaagccacggatggttcctaggacctggtgccgctatcagatggtacaccctctatgggcaaatgttgaaccttagtggacgcgtgagatgggaatccacgccggccatagactggctgataagctcgcggctgatcgagttgcaacagtaatcagttgatttgccact

SEQ ID NO: 2717 - DNA, 642 bp, Unknown
  Description of Unknown: unclassified Megrivirus sequence
ttcccgaccggtctggcaaaccggacggttatcctggttagatgtctgatggttgctggaacgtggtggctattgctgccatcttctggctgcctttattgggcattctagctgggttctttgccaaaattcccatcttattcttattcccattttccttacccaggcttatttacaactggtaagttgacccactggttttgttcttggacttctctggtgttggtggacactctttccacaagtaagtattgtggagttcatgctcgttctgaaccgggaatggcacaacccgtagtaggatcttgcctctgccacatttacttgcgcctgttgcttctagactatgggctgctaaggatgaccgcagacccctttttgggcaatctgtgtcaagtctactgcttcgtctggtgtacgctggaaatccctgttctggatgcctatgcttggaggtggtgctgaaatattgcaagccacaagcatacctctggactcggtgccgctaccaggtgttgcaccccttgtgggcaaacgtagaaccttggtggacgcgtgagatgggaatccacgcctggccatagactggctgataagctcgcggctgatcgagttgcaacagtaatcagttgatttgccact

SEQ ID NO: 2718 - DNA, 643 bp, Oscivirus A
gaaagggggcccggcggggcaatacccgtcggtccctctttccgtccaagccgcggacgttaaattgtggcacggttgtgcttaggcgcaaccctgctactaatggcggtatccctgcccttagtatgcatgtttgtatgaatggaatctgtagtgatgccccgctttggggtctcagaaacacactacagtgacggctagagttcctctactccggctaccttagtagcgagcattggaagtatattgtgaacagggttccacgcccgataaaggctgatattcccgctcatggagtggacctaggtaactagggccatgagtgtgtgtgaatcagcacccgcaagggataacagtatatggaaggtgctcgtgaaacggcaagtggagttagcagcagctctcagcctcaaggtcagcttctagacatgtgccgcaggtaccccgcaagggatctgagcggtagctaattagtccctggaagttggctgactttcttcttatttctttcttattgtgaattgtgtgcattggcattctttagagtttgggagttgtcttctattggatttatatcttactctgtatcacactcaatcacggctctttggtcagttaagaaaaccatttatagagtaataaa

SEQ ID NO: 2719 - DNA, 646 bp, Oscivirus A
gaaagggggcccggcggggcaacacccgtcggtccctctttccgtccaagccgcggacgttaaactgtggcacggttgtgcctaggtgcaaccctgctactaatggcggtacccctgcccttagtatgcatgtttgtatgaatggaatctgtagtgatgccctgctttggggtctctaaaacacactacagtgatggctagagctcctctactccggctaccttagtagtgagcattggaagtatattgtgaacagggttccacgcccgataaaggctggtattcccgctcatggagtggacctaggtaactagggccatgagtgtgtgtgaatcagcacccgcaagggatagcagtatatggaaggtgctcgtgaaacggcaagtggagttagtagcagctctcagtctcaaggtcagcttctagacatgtgccgcaggtaccccgtaagggatctgagcggtagctaattagtccctggaggttggctgactttcttcctatttctcttttcactgcgaattgtgtggattggtattctttagagcttgggagttgtctcatattgaattcatatattttactctatactacactcaaacacggctctctggtcagttaagaaaatcatttatagaataataaa

SEQ ID NO: 2720 - DNA, 651 bp, Unknown
  Description of Unknown: unclassified Picornaviridae sequence
cggcctcttttcccgaccggtctggcaaaccggacggttatcctggttagatgtctgatgattgctggaacatggtggctatagctgccatcttttggctttctctattgggcatctagctgggttctttgctaatcttccatcttactcttatccccattttctattacccaggattgttcgtaactggtaagttgactaactggctatgttttctggctcttctggtgctggtggacactcttttccacaagtaggttatgtggagttcatgctcgttctgaaccgggaatggcacaacccgtagtaggatcttgcctctgccacatatacttgcgcctgttgcttctagactatgggctgctaaggatggctacggacctctttttgagtaatccgtgccaagtcaactgtttcactctgatgtacgctggaaatccttgttttggatgttatgtccggaggtggtgctgaaatattgcaagccacggacattcttctgaacctggtgccgctatcaggtgttacaccccttgagggcaaatgttgaaccttagtggacgcgtgagatgggaatccacgcctggccatagactggctgataagctcgcggctgatcgagttgcaacagtaatcagttgatttgccact

SEQ ID NO: 2721 - DNA, 652 bp, Avihepatovirus A
tttgaaagccgctgtggtgtagaccattttctggcgcttggctcagccagtatggtctcaccacagtctgcttggggttattcccaaaccccttaattcaacgcctagtcctatcaatataggaccccctatccacttattttacctttaccctccattatatagtctgtttcctggctattgactttggcttttgtttttgacctacgtctaagtctcaatggattttgtagtggttagcctaccaccccttggccactaatttttggctctctgtttggggacccaccacatcttggaggtggtgctgaaatattgcaagccacttgatatgtgtgtgtcctccagacatgaagctttgatgcagtggttttggacaaggaaaggctagtgtttggtctgggcacaaacccttgttgtgaaacggattaccggtagtagcatctagtggttccagtccataacatgagtgtatggtctagagtggacacagcttggatacagacaccttcagtattactgggtgttccagactagttcctgaggtaccaagttgtgaggggctatgggaaaacccctttgatccacactgcctgatagggtcgcggctggtcgagtcccatacactataataccagttgattttcatgca

SEQ ID NO: 2722 - DNA, 653 bp, Avihepatovirus A
gaaagcggccactgtgtagccattttctagcgcttggtacagctagtatggttacacagtgtgcgtcagcttggggccattcccaggccccttaattcaacgcctagctctggcgatacagagccccctatccaattctatgtcccttatcctccacaggttgattgtctttcttgttctgactcaactgcctgttgtattggacttctattggattacccttttgtatggatggttagccaaccatgctctggttactagccattctatggcaggtttggcttgatactggtggatggaggtggtgctgaaatattgcaagccacgtctcccattgtcaatccaacccatcatggaatgtagttggtaattcctgtacagaggaaggttagtgtataagagtgggtctaataccattgttgtgaaacggattaccggtagtagcatccttggtatccattcttatcatgagtgtgtggtctagagtagacatgtattctcacaggtgcatgcagcattgctgagcactccagactagttcctgaggtgggaaatacatggggggcactgggaaaacccccttgatctacactgcctgatagggtcgcggctggtcgagtcccacacactataaaccagttgatttgcatgca

SEQ ID NO: 2723 - DNA, 654 bp, Unknown
  Description of Unknown: unclassified Sicinivirus sequence
tgcaacccccactagtactcgtgcacatccaatggtgattctgccctggcagcatctaagtgcccagggagctcaactggtaacagttgccctggggcccaaaaggctaggtggcaaggacctggtcaagtaaggggttcccaccccgagctgaacccgcggtcctgaagctaccctttagatggaggtttcgcacccgattgccattctttttgcctgaagaacctggctggaaacatttagcccacggatttgctggtttgtggtgattagtagaccccctggaggtacccgttttggatctgaccagggacccgtgactatgccgttccggtaatccgggtttaaaaccatgaacgtcaccacctatcttcttttccttgctttgaattcttttatctgagagtagtgaacgagtgttgatgttccctgacttttgcatttggtctgcattctcagttatacggtttgactgggctgggttgtttatttagatgtttctagagtctctgttggtagctattacacttgttatagtagttgcttcccccagtgagcttcatcagttatttactatttgtgtttataatttcgccttaatcttcctctggctggttgaaatcctagagcttcctaattaccctgccatccaac

SEQ ID NO: 2724 - DNA, 654 bp, Unknown
  Description of Unknown: unclassified Hepatovirus sequence
gtttttcccggacccctctttggacaaccttggtggggggttgtaaattaccccaccctcgtttgcctagagtttaggctaaattccctatagtaccctttatatgtaaatatcaattcctgcaggttcaggtttcttgaatgtgtctctctttaagagcactcattttactctcagaatttctctagagtccagacacttgagggctctttttctcctgcactatcatctcgattccgggctctcgtggtgccaatggaacgaccgatgcgcacgtcggggttaacccacagattagctgtgggctgtagttgctaaaagccacgatctctgaatgccctctttgaatgggggtggtattaactgaacacatgaaaccacattgatcttgctgggagggtaggctacgggtgaaaccctccatattaatactcatattgagagatatatctggtaggctaatgttggcggataaggctgagtttcacgacaaaaagccttcaacgcctgtggaacaggtctcaccagcagcatgccttgtggcgtagtgtgctagggccatcttcatttcaggtgggagctaggagactctccccgtaagggttggaggggtagttcaggtgcatttaggtttttccacattcaataaaaaca

SEQ ID NO: 2725 - DNA, 657 bp, Unknown
  Description of Unknown: unclassified Megrivirus sequence
tttctgaaggcctcttttcccgaccggtttggcgcaccggacggtcatcctggttagatgtctgatggttgctggaacgtggtggctattgctgccaccttctggcttcctctattgggcatctagctgggtcctttgccacattccatctcactctttacccattttctattacccaggcttgattgtaactggtaagtttgacccactggcaatgttcttaagaccattctggtgttggtggacactctttccacaagtaggttacgtggagttcatgctcgttctgaaccgggaatggcacaacccgtagtaggatcttgcctctgccatgctaatctgcgcctgttgcttctagactatgggctgctaaggatgatgttgggactcctttttggatatctcatatcaagtcaactgtttcatctaatgtacgctggaaatccttgtctcagggttctatctggaggtggtgctgaaatattgcaagccacagatgaatcttgcggcatggtgccgctattggatgttacaccctttattgggcaaatgttgaaccttagtggacgcgtgagatgggaatccacgcctggccatagactggctgataagctcgcggctgatcgagttgcaacagtaatcagttgacttgccacc

SEQ ID NO: 2726 - DNA, 662 bp, Megrivirus C
gtgtgtttctgaagggcctcttttcccgaccggtttggcacaccggacggttatcctggttagatgtctgatggttgctggaacgtggtggctgttgctgccaccttttggcttcctctattgggcatctagctgggtcctttgccacatcccatcttattctttacccattttctactacccaggcttgcctgaaactggtaagttgacctattgaccatgtttttggactactcttggtgctggtggacactctttccacaagtaggttgcatggagttcatgctcgttctgaaccgggaatggcacaacccgtagtaggatcttgcctctgccatgttgatctgcgcctgttgcttctagactatgggctgctaaggatgatgttgagactcctttttggatatctcatatcaagtcaactgtttcatctggtgtacgctggagatccttgtcgtgaggctgtatctggaggtggtgctgaaatattgcaagccacagatcagtcttgtaacatggtgccgctatcaggtgttacaccctctactgggcaaatgttgaaccttagtggacgcgtgagatgggaatccacgcctggccatagactggctgataagctcgcggctgatcgagttgcaacagtaatcagttgatttgccact

SEQ ID NO: 2727 - DNA, 663 bp, Unknown
  Description of Unknown: unclassified Picornaviridae sequence
gggggctctcccccacggcctcttttcccgaccggtctggcaaaccggacggttatcctggttaggtgtccgatggatgctggaacggggtggctatagctgcctccttctggcttcctttattgggcattctagctgggccctttgccaaaattccatcttaatcttaaacccattttctatacccaggcttgcttgtaactggtaagttgacccactggcttgtcttaagactattctggtgttggtggacactccttccacaagtaagtattgtggagttcatgctcgttctgaaccgggaatggcacaccccgtagtaggatcttgcctctgccacatatacttgcgcctgttgcttctagactatgggctactaaggatgactacggacccctttttgggtaatctgtgtcaagtctactgtatcatctggtgtacgctggaaatccttgttctggaaactgcgtctggaggtggtgctgaaatattgcaagccacagatgcatttctggtcttggtgccgctactaggtgttacaccccctgtgggcaaatgtagaaccttggtggacgcgtgagatgggaatccacgcctggccatagactggctgataagctcgcggctgatcgagttgcaacagtaatcagttgatttgccact

SEQ ID NO: 2728 - DNA, 663 bp, Unknown
  Description of Unknown: unclassified Megrivirus sequence
gtgtgtttctgaaggcctcttttcccgaccggtttggcacaccggacggttatcctggttagatgtctgatggttgctggaacgtggtggctattgctgccaccttttggcttcctatattgggcatctagctgggtcctttgccacattccatcttactcttttacccactattctattacccaggcttgatcgtaaccggcaagtttgacccaccggctatgttctaagactattctggtgttggtggacactctctccacaagtagattgcatggagttcatgctcgttctgaaccgggaatggcacaacccgtagtaggatcttgcctctgccatgttgatctgcgcctgttgcttctagactatgggctgctaaggatgatgttgggactcctttttggatatctcatatcaagtcaactgttccatctgatgtacgctggaaatccttgtcccagggttgtatctggaggtggtgctgaaatattgcaagccacggattaaccttgcgacatggtgccgctatcaggtgttacaccctctatcgggcaaatgttgaaccttagtggacgcgtgagatgggaatccacgcctggccatagactggctgataagctcgcggctgatcgagttgcaacagtaatcagttgatttgccact

SEQ ID NO: 2729 - DNA, 664 bp, Unknown
  Description of Unknown: unclassified Picornaviridae sequence
agatgtagacatctaaccaggataaccgtccggtgtgccacaccggacggttatcctggttagatgtctgggaactgctggacttcagtggctattgctgctgacttctggctcttctgaactgggcatctagctgggtcctttgccacccataccctatctcccgttatattctctttgcccttggactgttgtaactggttaagagaccctccgcatgttttgtctatgactattctggtgctggtggacactctttccacaagtggatgatgtggagttcatgctcgttctgaaccgggaatggcacaacccgtagtaggatcttgcctctgccatactcatctgcgactgttacttctagaccataggctgtgtaggatgactatggacctctttttgagtatcctggtcaagccaactgtgtttataacacgtacgctggatatccttgttagggtggaatttcagtggaggtggtgctgaaatattgcaagccacattggattttaccctcttggtgccgctgtgttattacgcaccccttgtgggcaaatgttggacctacatggacacgtgtgatgggaatccacgtctctgctatggactggctgataagctcgcggctgatcgagttgtaacagtaatcagttgaaaagccact

SEQ ID NO: 2730 - DNA, 668 bp, Mischivirus D
ttatttttcaaaatgccactggcattacaccatattcgtatggtgtaatgtcagtggttggatgcccagtcctgagggactgtgcatccagtggttaagagccacactctttatttatcaactattgatctttgtaactaagaaatgtaccagagttctattatggctccaaacccattggggtctagaacaagcacttctgttaccccggtcattattggctgttaggatgtacccacgtctgaaggccaagaagatcgttacccggctgttgtctacgggaagactagtaacttttgttgaaaggtaatctcattgatccgggtggcaaccccagtcacccagaaactagtgatgagtgtccacattcctcctatggtaacatagggtggtcgctgcgctggcactagggccttaaggcatgagagaaccaagacacaactgtgaagatccgactgtgcacttcagtattcctccggcccctgaatgcggctaatcctaacccacttgcacacgctcgcaacccagtgagtggtgtgtcgtaatgcgcaagaagtggacggaaccgactactttgggtgtccgtgtttctttttttatttaccaagtctcttatggtcacaagcattagaaacaagatgcctgtgatcactcgcgagacctccaac

SEQ ID NO: 2731 - DNA, 670 bp, Unknown
  Description of Unknown: Human rhinovirus A strain HRV-A76_p1194_sR844_2008 polyprotein1 sequence
cttcacacccgttaaggtgtgcaggcagccacgcaggctaggacactgttaccagtggggaactcctagcctcatcccacctggatctcctacaaggagttgtactctattattgcggtaattttgtacgccagttttatctcccctccccaatatgtaacttagaagctgaacacaaagaccaataggcgacatttaatccaaaatgtcaaaggtcaagcacttctgtttccccggctaaagctgatatgctccaacagggcaaaaacagttgcggtcgttatccgcaaagcaactacgcaaagcctagtatcaccttctagagcatatgactggtcgctccactataaacccaatagtagacctggcagatgaggctaggagttccccactggtaacagtgtcctagcctgcgtggctgcctgcacaccttaacgggtgtgaagccatatgtttgacaaggtgtgtgagccccgtgtgcttgctttgagtcctccggcccctgaatgtggctaaccttaaccctgcagctagtgcacacaatccagtgtgtggctagtcgtaatgagcaattgcgggacgggaccaactactttgggtgtccgtgtttcttgtttttccttatatttgcttatggtgacaatatatatataacatatatattggcatc

SEQ ID NO: 2732 - DNA, 671 bp, Unknown
  Description of Unknown: unclassified Picornaviridae sequence
gccgcaggggataacccctgcggaccccttttcccgaccggcttggcaaaccggacggttatcctggttagatgtctgggatttgctggactttagtggctatcgctgctatcttctggcttctctaaactgggcatctagctgggtcctttgccatccaattctttattcccatctatttttccacccatggactgatgtaactggctaagaaatcctctggttctcactttggccacgcacttgtgttggcggacactctttccgcaagtgaacagtgtggagttcatgctcgttctgaaccgggaatggcacaacccgtagtaggatcttgcctctgccacatcctgtttgcgactgttacttctagaccataggctgtgtaggatgactttggacctctttttgagtatccttgtcaagctaactgcaattacaacatgtacgctggaaatccttgtctgaaagtagatcctagtggaggtggtgctgaaatattgcaagccacactagattctctttccttggtgccgctgtgttgctttgcacccctagtgggcaaatgttagacctacatggacacgtgtgatgggaatccacgtcttggctatggactggctgataagcccgcggctgatcgagttgtaacagtaatcagttgaattgccacc

SEQ ID NO: 2733 - DNA, 672 bp, Foot-and-mouth disease virus
ccccccctaagttctaccgtcgttcccgacgtaaagggatgtaaccacaagcttaccgcctttcccggcgttaaagggatgtaaccacaacgacttaccttcacccggaagtaaaacggcaacttcacacagttttgcccgttttcatgagaaacgggacgtctgcgcacgaaacgcgccgtcgcttgaggacttgtacaaacacgatctaagcaggtttccccaactgacacaaaccgtgcaatttgaaactccgcctgggctttccaggtctagaggggtgacactttgtactgtgtttgactccacgctcgatccactggcgagtgttagtaacaacactgctgcttcgtagcggagcatgacggccgtgggaccccccccttggtaacaaggacccacggggccaaaagccacgtccgaatggacccgtcatgtgtgcaaacccagcacagtacctttgttgtgaaactcactttaaagtgacattgatactggtactcaagcactggtgacaggctaaggatgcccttcaggtaccccgaggtaacacgtgacactcgggatctgagaaggggaccggggcttctataaaagcgcccggtttaaaaagcttctatgtctgaataggtgaccggaggcaggcacctttcttttaattacactggactt

SEQ ID NO: 2734 - DNA, 673 bp, Unknown
  Description of Unknown: unclassified Enterovirus sequence
ggcgcacaggtttccaagcagagtgtgggagcacatgaaaccatggtacaggaataaaaggaaacacggacacccaaagtagttgttcccactataaccacccacgtggtgttgtggacttgtatttcggtacacttccatgccagttttatctccccccctgcaacctttagaagacacgtactttcagaccaataggtggcggccatccaggtcgtcgacggtcaagcacttctgtctccccggtggtactggatacgctttacccaaggcgaaaaccgggcccatcgttatccgcaaagtgcctacgagaagcctattagcactctagaagcctatggttggtcgctccgctgcaaccccagcagtagacctggcagatggggctagacataccccaccagcgatggtggtctagcccgcgtggctgcctgcacaccctatgggtgtgaagccagaaagtggacagggtgtgaagagcctattgtgctcactttgagtcctccggcccctgaatgtggctaatcctaaccctgcagccgttgcacacagcccagtgtgtatgcggtcgtaacgagtaattgcgggatggaaccaactactttgggtgtccgtgtttccttttattcctttacttgcttatggtgacactgtatagttatacattgtcact

SEQ ID NO: 2735 - DNA, 675 bp, Foot-and-mouth disease virus
aaccacaagtcttgcaccttcttgtccgaagttaaaggactgtaaccgcaagctttgaaccgcctttcccggcgttaaagggctgtgaccgcaagatagaccttcacccggaagtaaaacggcaactcccacagttttgcccgttttcatgagaaatgggacgtcagcgcgcgaaacgcgcagtcgcttgaggaggacttgtacaaacacgattcacgcaggttcccacaaccgacacaaaacgtgcaacttggaatcccgcctggtctttccaggtctagaggggtgacactttgtactgtgattgacaccacgctcggtccactggcgagtgttagtagtagtattgttgtttcgtagcggagcatggtggccgtgggaccccctccttggtaacaaggacccacggggccgaaagccacgtctcaggacccaccatgtgtgcaaccccagcacggcaaccttaccacgaaaaccactttaaggtgacactgaaactggtactcaaccactggtgacaggctaaggatgcccttcaggtaccccgaggtaacacgcgacactcgggatctgagaaggggactggggcctctgtaaaagcgcccagtttaaaaagcttctatgcctgaataggcgaccggaggccggcgcctttccttaactaccactgtttac

SEQ ID NO: 2736 - DNA, 675 bp, Unknown
  Description of Unknown: unclassified Parechovirus sequence
cgtcgggccttataccccgacttgctgagcttctctaggagagtccctttcccagccctgaggcggctggtcaataaaagcctcaattgtaacaaacatctaagcttattacatataaccacaaccctggtccccaccagcttaaggcatcttgcaatacagtgggtggactcaggacgcttaaaggttgtagtacataatcttttctaatccaactatgttggagtggtggacagcgcaccataactctatcagtgagataccatgcttgtggaccttatgctcacacagctgtcctctagtcactaagtgtggaaactaatgaaatgtgggaacttagttgaagtacacacttgcttatgcaccaattagccagcggatcaacacccggcaacgggtgcccctggggccaaaagccaaggtttaacagaccctaattggttggttttaaaacctgagcgtgtacggatgctacttagtacctgtggatttggtaactgtgcttatactagttgtaaggccctcgaaggatgcccagaaggtacctgtaggtaacaagtgacactatagatctgatctggggccccatacttctctaaagtgatggggttaaaaaacgtctagagggccaaacccaggggggaccctggattccttttattttatttagacaat

SEQ ID NO: 2737 - DNA, 678 bp, Unknown
  Description of Unknown: unclassified Aphthovirus sequence
actagtgattttaccgtcgttccccgacgtttgaagggaggaaaccacacgcttgcagcaccactcccggtgtcaacgggatgcaaccgcaagatggaccttcgcccggaagtaaaacggcagctttacacagttttgcccgttttcgtgagaaacgggacgtccgcgcacgaaacgcgccgtcgcttgaggaacacttgtacaaacacgatttaagcaggtttccacaactgataaaactcgtgcaacttgaaaccccgcctggtctttccaggtctagaggggtgacactttgtactgtgctcgactccacgcccggtccactggcgggtgttagtagcagcactgttgtttcgtagcggagcatggtggccgtgggaactcctccttggtgacaagggcccacggggccgaaagccacgtccagacggacccaccatgtgtgcaaccccagcacggcaacttttactgcgaacaccaccttaaggtgacactggtactggtactcggtcactggtgacaggctaaggatgcccttcaggtaccccgaggtaacacgggacactcgggatctgagaaggggattgggacttctttaaaagtgcccagtttaaaaagcttctacgcctgaataggcgaccggaggccggcgcctttccattacccactactaaatcc

SEQ ID NO: 2738 - DNA, 679 bp, Megrivirus C
aaaaggggtccgtgggggttctcccccacggctccttttcccgaccggtctggcgaaccggacggttatcctggttagatgtctgatggttgctggaacgtggtggctatagctgccaccttctggcttcctctattgggcattctagctgggttctttgccaaaattccatcttactctttacccattttctctacccaggcttgcttgtaactggtaagttgacccactggctttagttcatgattattctggtgttggtggacactctttccacaagtaggtagtgtggagttcatgctcgttctgaaccgggaatggcacaacccgtagtaggatcttgcctctgccacacttacttgcgcctgttgcttctagactatgggctgctaaggatgactacggacctctttttgagcaatccgtgtcaagtcaactgtttcatctgatgtacgctggaaatccttgtttctggatgattgtatcctggaggtggtgctgaaatatctcaagccacaggtacgcttctggacttggtgccgctgtcaggtgttacaccccttgtgggcaaatgttgaaccttagtggacgcgtgagatgggaatccatgcctggccatagactggctgataagctcgcggctgatcgagttgcaacagtaatcagttgatttgccact

SEQ ID NO: 2739 - DNA, 682 bp, Unknown
  Description of Unknown: Foot-and-mouth disease virus - type O O/JPN/2010-1/14c (CV_d1)1 sequence
gggaggtaaccacaagatttgcgccttcttgtccgaagttagagggctgtaaccgcaaactttgaaccgcctttcccagcgttaacgggatgtaatcacaagatggaccttcatccggaagtaaaacggcaacttacacagttttgcccgttttcatgagaaatgggacgtcagcgcacgaaacgcgcagtcgcttgaggaggacttgtacaaacacgtctcacacaggtacccacaaccgacacaaaacgtgcaacttgaaatcccgcctggtctttccaggtctagaggggtgacactttgtactgtgattgactccacgctcggcccactggcgagtgttagtagtagtactgttgcttcgtagcggagcatggtggccgtgggactccctccttggtaacaaggacccacggggccgaaagccacgtctcaggacccaccatgtgtgcaaccccagcacggcaactttaccacgaaaaccactttaaggtgacactgaaactggtactcaaccactggtgacaggctaaggatgcccttcaggtaccccgaggtaacacgcgacactcaggatctgagaaggggattggggcttctgtaaaagcgcccagtttaaaaagcttctatgcctgaataggcgaccggaggccggcgcctttccttaactattactgcttac

SEQ ID NO: 2740 - DNA, 682 bp, Enterovirus B
cctgtgggttgttcccacccacagggcccactgggcgctagcacactggtatcacggtacccttgtgcgcctgttttaacccccctcccctcagaagtaacttagaagcataaatcaaacggtcaacaggtggcctagcgcaccagctgggtctagaccaagcacttctgtcaccccggactgagtatcaataggctgcttgcgcggctgaaggagaaaacgttcgttatccgaccagttacttcgggaaacctagtaccaccatggaagttgcgcagcgtttcgctccgcacacccccagtgtagatcaggtcgatgagtcaccgtatcccccacgggcgaccgtgacggtggctgcgttggcggcctgcccatggggtaacccatgggacgcttcaatactgacatggtgtgaagagtctactgagctaattggtagtcctccggcccctgaatgcggctaatcctaactgcggagcagacacccacaagccagtgggcggtctgtcgtaacgggtaactctgcagcggaaccgactactttgggtgtccgtgtttccttttattcttatactggctgcttatggtgacaattgaaaggttgttgccatatagctattggattggccatccggtgactaatagagcgattgtttacttgtttgttggtttcataccaaaa

SEQ ID NO: 2741 - DNA, 683 bp, Unknown
  Description of Unknown: unclassified Megrivirus sequence
gaaaagaggccgtgggggataacccccacggaccccttttcccgaccggtttggcaaaccggacggttatcctgattagatgtctgatggttgctggaatgtggtggctactgctgccaccttttggcttcctctattgggcatctagttgggtcctttgccattttcccatcttactctttttaacccatcttctaccccaggcatgcttgtaactggtaagttgacccacttggctctgattcatgattctgtttggtgctggtggacactctttccacaagtagattgtgtggagtccatgctcgttctgaaccgggaatggcacaacccgtagtaggatcttgcctctgccacattacatctgcgcctgttgcttctagactatgggctgctaaggatggtttggacccctttttgggtaatccaaatcaagtcaactgtttcatccaatgtacgctggaaatccttgttactgggtgtttacaactggaggtggtgctgaaatattgcaagccacagttgtgcacctagtcctggtgccgctattgggtgttacaccctttgatgggcaaatgttgaaccttagtggacgcgtgagatgggaatccacgcctggccatagactggctgataagctcgcggctgatcgagttgcaacagtaatcagttgatttgccact

SEQ ID NO: 2742 - DNA, 687 bp, Unknown
  Description of Unknown: unclassified Enterovirus sequence
gggttgttcccacccacagggcccaagcggcgttagtactctggtatcacggtacctttgtatgcctgttttacatcccttcccccgtaacgttagaagaaagcacaaacgacaaatagcaagtccaccaaaccaggtgggtttttgtcaagcacttctgtttccccggacatagtaccaataagctgtacccacggctgaaagggaaaacgttcgttacccggctacttacttcgagaagcctagtaccatcatgaattgtttcaagtgttacgttcagcacaatcccagtgtagttcaggctgatgagtcaccgaattccccacgggcgaccgtgtcggtggctgcgttggcggcctgcctgcgggtattactcgcaggacgcttgattcatgacatggtgcgaagagcctattgagctaggtagtagtcctccggcccctgaatgcggctaatcccaaccacggagccatgcgttgcaatccagcaatgttgtggtcgtaatgagcaattctgtggcggaaccgactactttgggtgtccgtgtttcctgttttatttaccttggctgcttatggtgacaatctagagttgtcatcatatagcgattggattggccatccggatattatctttgtgtgactcattcctagtccataagcattccttgtaatttacacattcatc

SEQ ID NO: 2743 - DNA, 696 bp, Foot-and-mouth disease virus
acgttaaaggggtgtaaccacaagcttgaaaccgtcttgcccgacgttaatgggttgtaaccacacgcttgtaccacctttcccggcgttatcgggatgcaaccaaaagatgaaccttcacccggaagtaaaacggcaaccacacccagttttgcccgttttcatgagaaatgggacgtcagcgcacgaaacgcgccgtcgcttgaggaagatttgtacaaacacgatttatgcaggcttccacaactgacacgaaccgtgcaatttgaagctccgcctggtctttccaggtctagaggggcaacactttgtactgtgcttgactccacgctcggtccactagcgggtgttagtaacagcactgttgtttcgtagcggagcatgatggccgcgggaactcccccttggtgacaaggacccgcggggccgaaagccacgtcttaacggacccatcatgtgtgcaaccccagcacggcaactttactgtgaaaaccactttaaggtgacactgatactggtactcaaccactggtgacaggctaaggatgcccttcaggtaccccgaggtaacaagtgacactcgagatctgagaaggggacaggggcttctttaaaagcgctctgtttaaaaagcttctatgcctgaataggcgaccggaggccggcgccttttcccactaaaccactactaacttt

SEQ ID NO: 2744 - DNA, 697 bp, Foot-and-mouth disease virus
ttcccgacgttaaagggatgtaaccacaagcttaacaccttcgtgtccgaagtcaaaggactgaaaccacatgcttgcaccgccttttccggcgttaatggactgtaaccacaagatggaccttcacccggaagtaaaacggcaacttacacagttttgcccgttttcactagaaacgggacgtctgcgcacgaaacgcgccgccgcttgaggaggacttgtacaaacacgatctacgcaggttcccacaactggcttaaaacgtgcaatttgaaaccccgcctggtctttccaggtctagaggggtgacaccttgtactgtgcttgactccacgctcggtccactggcgagtgttagtagtagcactgttgcttcgtagcggagcatgatggccgcgggagtccctccttggtgacaaggacccgcggggccgaaagccacgtcctacggacccatcatgtgtgcaaccccagcacggcaactttgacacgaaaaccactttaaggtgacactgatactggtactcaaacactggtgacaggctaaggatgcccttcaggtaccccgaggtaacacgcggcactcgggatctgagaaggggactggggcttctgtaaaagcgcccagtttaaaaagcttctatgcctgaataggcgaccggaggccggcgcctttcctttaattgccactaactac

SEQ ID NO: 2745 - DNA, 701 bp, Foot-and-mouth disease virus
ttcccgacgttaatggggaaacaaccacaagcttaacaccgtcttgcccgacgtaaaagggctgcaaccaaaaagcttgtgccgcctttcccggcgttaatgggaggtaaccacaagacaaaccttcacccggaagtaaaacggcaacttcacacagttttgcccgttttcgtgagaaatgggccgtcaacgcacgaaacgcgccgtcgcttgaggaggacttgtacaaacacgatctatgcaggtttccacaactgacacaaaccgtgcaacttgaaaccccgcctggtctttccaggtctagaggggcgacattttgtactgtgcttgactccacgctcggtccactagcgagtgttagtagtagcactgttgcttcgtagcggagcatgatggccgtgggagctcccccttggtgacaaggacccacggggccaaaagccacgtcctaccggacccatcatgtgtgcaaacccagcacggcaactttactgcgaaaaccactttaaggtgacactgatactggtactcaatcactggtgacaggctaaggatgcccttcaggtaccccgaggtaacacgcgacactcgggatctgagaaggggactggggcttctttaaaagtgcccagtttaaaaagcttctatgcctgaataggcgaccggaggccggcgccttttcactgttttactactgtttc

SEQ ID NO: 2746 - DNA, 702 bp, Enterovirus A
tttaaaacagcctgtgggttgtacccacccacagggcccacgcggcgttagtactctggtatcacggtacctttgtatgcctgttttatctcccttcccccgtaacgttagaagaatgaacaaaagacaattagcaaatccaccaacccaggtgggttttcgtcaagcacttctgtttccccggacctagtaccaataagctgtgcccacggctgaaggggaaaacgttcgttatccggctacctacttcgagaagcctagtaccaccaatgattgtctcaagtgttacgctcagcacaaccccagtgtagttcaggtcgatgagtcaccgaattccccacgggcgaccgtgtcggtggctgcgttggcggcctgcctgcgagtttcactcgcaggacgcttgattcatgacatggtgcgaagagcctattgagctaggcagtagtcctccggcccctgaatgcggctaatcctaaccacggagccatgcgtcacaaaccagtggcgtcatggtcgtaacgagcaattctgtggcggaaccgactactttgggtgtccgtgtttcctgttttatttaccttggctgcttatggtgacaatctagagttgtcatcatatagcgattggattggccatccggatattactttgtgtgatttatctcttgctcgtaagcaattttaaatagtttatagcatcatt

SEQ ID NO: 2747 - DNA, 708 bp, Unknown
  Description of Unknown: Coxsackievirus A14 isolate SEN-14-254, complete genome.1 sequence
ggggccggagctctggtgatacgttacctttgtgcgcctgttttatttccctaccccggaacaatctagaagcaacgcgctactggccaatagaaagtgtagcaaaccagctacatcccggtcaagcacttctgtctccccggaccgagtatcaataaactgctaacgcggttgaaggagaaaaggttcgttacccggccaactacttcgaaaagcccagtaacaccatgaaagttgcagagtgtttcgctcagcacttcccccgtgtagatcaggtcgatgagtcaccgcgatccccacgggcgaccgtggcggtggctgcgttggcggcctgcctatggggcaacccataggacgctctaatacagacatggtgcgaagagcctattgagctagttggtagtcctccggcccctgaatgcggctaatcctaactgcggagcttatgctcgcgaaccagcgagtagtgagtcgtaacgggtaactctgcagcggaaccgactactttgggtgtccgtgtttccttttattctcatattggctgcttatggtgacaatcaaagaattgttaccatatagctattggattggccatccggtgtgcaacagagctattgtctactcttttgttggatttgttccattgtcctctttcaccacactaaatactctacagtatatactttcccttaattcaaggaaacgatc

SEQ ID NO: 2748 - DNA, 709 bp, Foot-and-mouth disease virus
aagttttgccgtcgttcccgacgttaaagggagataaccacaagctttgcaccttcttgcccgaagtaaaagggctgcaaccgcaagctttaaaccgcctttcccggcgttaacgggatgcaaccataagatggaccttcgcccggaagtaaaacggcaactcacacagttttgcccgttttcacgagaaatgggacgtcagcgcacgaaacgcgccgtcgcttgaggaggacttgtacaaacacgatctacgcaggttcccacaaccgacacaaaccgtgcaatttgaaatcccgcctggtctttccaggtctagaggggtaacactttgtactgtgattgactccacgctcggtccactggcgagtgtaagtagtagtactgttgcttcgtagcggaacatggtggccgtgggactccctccttggtaacaaggacccacggggccgaaagccacgtcttggacccaccatgtgtgcaaccccagcacggcaaccatactacgaaaaccactttaaactggcactgatactggtactcaaccactggtgacaggctaaggatgcccttcaggtaccccgaggtaacacgcgacactcgggatctgagaagggggctggggcttctataaaagcgcccagtttaaaaagcttctatgcctgaataggcgaccggaggccggcgcctttctctacttactactgtttac

SEQ ID NO: 2749 - DNA, 712 bp, Foot-and-mouth disease virus
taagtgttaccgtcgtgcccgacgttaaagggaagtaaccacaagcttgacaccgtcttgtccgacgttaaagggctgtagccacaagcttgcaccgcctttcccggcgtaaatgggatgtaaccacaagacacaccttcagccggaagtaaacggcaacaccacacagttttgcccgttttcatgagaaatgggacgtctgcgcacgaaacgcgccgtcgcttgaggagaacttgtacaaacacgatctacgcaggtttccacaactgacacgaaccgtgcaacttgaaactccgcctggtctttccaggtctagaggggtaacactttgtactgtgtttgactccacgcttggtccactagcgagtgttagtagcagcactgttgcttcgtcgcggagcatgatggctgtgggaactcccccttggtaacaaggacccacggggccaaaagccacgtcctcacggacccatcatgcgtgcaaccccagcacagcaactttactgcgaaagccactttaaggtgacactgatactggtactcaaccactggtgacaggctaaggatgcccttcaggtaccccgaggtaacatgcgacactcgggatctgagaagggggctgaggcttctttaaaagcgctcagcttaaaaagcttctatgcctgaataggcgaccggaggccggcgcctttccacttaccaatactgtttt

SEQ ID NO: 2750 - DNA, 713 bp, Enterovirus A
ccacagggcccacggggcgctagcacactggtgttacggcacctttgtgcgcctgttttactcccctttcccctgtaatttagaagtatcgcaccacggatcaatagcaggtgtgtcgcaccaggcacatctagatcaggcacttctgtctccccggaccgagtatcaataggctgctagcgcggctgaaggagaaaacgttcgttacccggccaactacttcgagaagcttagtaccaccatgaacgttgcagagtgtttcactcagcacaaccccagtgtagatcaggtcgatgagtcaccgcattccccacgggcgaccgtggcggtggctgcgttggcggcctgcctatggggcaacccatgggacgctctaatactgacatggtgcgaagagcctattgagctagttggtagtcctccggcccctgaatgcggctaatcctaaccgcggagcatgtactcacaacccagtgggcagcatgtcgtaacgggtaactctgcggcggaaccgactactttgggtgtccgtgtttccttttattcttacattggctgcttatggtgacaactgaaggattgttaccatatagctattggattggccatccggtgtccaacagagctctgatttatcagtttgttggctttgtgcctttatcacctacagcctactcaaccttagtgtttttgatacaccttaacaataggaa

SEQ ID NO: 2751 - DNA, 715 bp, Parechovirus B
ggtggggtgggtacgtttctcgctcattgagtgggggcgtggctcaccaaccacacctggttggttcccaggttcatacaataaccacctctttgtaacaactacacctaagcttaatttgcccgcttgaactggacgaaaccgcttggaataagtttggttctcttttgagtgtgttttgtgttagcataatttctgtctctagagtgctttacgctctagtaggggctgtacccgggcggtcccactcttcacaggaatctgcacaggtggctttcacctctggacagtgcattccacacccgctccacaatagaagataatgtatgtctttgtttgtgaaatgcttatgaaacgagtgtgtaggcgtagcggctacttggatgccagcggaactcccctagtggtaacactagcctctgggcccaaaaggcatgtctttgaccattcaagtacacaaccccagtgatgcacacacctagtaatggcttagtaatggacattgattgattatcagacaattgctaggaggcttaggtatgacgggctgaaggatgccctggaggtacccgcaggcaaccttaggagactgtggatctgaccaggggcccaccatggaagcatgggtagaagtcttcggaccttgggttaaaaaacgtctaggcccgccccccacagggatgtggggtttcccttataaccccaatactacact

SEQ ID NO: 2752 - DNA, 717 bp, Enterovirus B
acccacagggcccactgggcgctagcacactggtatcacggtacctttgtgcgcctgttttatccaccttaccccactgtaacttagaagttaaccaaacacggtcactaggtggctcagtataccaactgagtctagaccaagcacttctgttaccccggactgagtatcaataggctgctcgcgcggctgaaggagaaaacgttcgttacccggccaattacttcgagaaacctagtaccaccatgaaggttgcgcagcgtttcgctccgcacttccccagtgtagatcaggccgatgagtcaccgcgtacctcacgggcgaccgtggcggtggctgcgctggcggcctgcccatggggcaacccatgggacgcttcaaaactgacatggtgcgaagagtctattgagctaattggtagtcctccggcccctgaatgcggctaatcccaactgcggagcagatacccacactccagtgggcagtctgtcgtaatgggcaactctgcagcggaaccgactactttgggtgtccgtgtttccttttattcttatactggctgcttatggtgacaattgagagattgttaccatattgctattggattggccatccggtgacaaacagagcaataatctacttatttgttggtttcgtaccattgaactttagagtactgaagacccttaactttatactaattctcaacacagcaaa

SEQ ID NO: 2753 - DNA, 719 bp, Foot-and-mouth disease virus
cccataaaggttttaccgtcattcccgacgttaaagggaggtaaccacacgcttgagaccgtcttgtccgacgttaacggactggaaccacaagcttataccgcctttcccggcgttaacggaatgtaaccacaagatggaccttcacccggaagtaaaacggcacacacacacaattttgcccgttttcacgagaaacgggacgtctgcgcacgaaacgcgccatcgcttgaggaggacttgtacaaacacgatctacgcaggtttcccaaccgacacaacccgtgcaacttgaaactccgcctggtctttccaggtctagaggggtgacattttgtactgtaattgactccacgctcggtccactagcgggtgtttagtagctgtattgttgcttcgtagcggagcataatggccgcgggagctcccccttggtaacaaggacccacggggccgaaagccacgtcctaacggacccattatgtgtgcaaccccagcacggcaacttactgtgaaaaccactttaaggtgacactgatactggtactcaactactggtggcaggctaaggatgcccttcaggtaccccgaggtaacatgcgacactcgggatctgagaaggggaccgggacttctttaaaagtgcccggtttaaaaagcttctatgcctgaataggcgaccggaggccggcgcctttcttttgattactactgctttt

SEQ ID NO: 2754 - DNA, 719 bp, Enterovirus A
ccacccacagggcccacggggcgctagcacactggtgtcacggcacctttgtgcgcctgttttatttcccctcccccccgcaatttagaagttttgcactacagatcaatagcaggtgtgtcgcaccaggcacatctagatcaagcacttctgtttccccggactgagtatcaataggctgctcacgcggctgaaagagaaagcgttcgttatccggccaactacttcgagaagcttagtaccaccatgaacgttgcagagtgtttcgctcagcacatccccagtgtagatcaggtcgatgagtcaccgcactccccacgggcgaccgtggcggtggctgcgttggcggcctgcctatggggcaacccataggacgctctaataccgacatggtgcgaagagcctattgagctagttggtagtcctccggcccctgaatgcggctaatcctaactgcggagcatgtactcacaatccagtgggcagcatgtcgtaacgggcaactctgcagcggaaccgactactttgggtgtccgtgtttcctttttattcttatattggctgcttatggtgacaattgaagaattgttaccatatagctattggattggccatccggtgtctaacagagctattgtttacctgtttgttggatacgtccctctcaatttcaaggtcattaaaactcttaattatatactacttctcaactgtgagaa

SEQ ID NO: 2755 - DNA, 719 bp, Enterovirus B
cacccacagggcccactgggcgctagtacactggtatcacggtacctttgtgcgcctgtttgaccgacccaccccgaatgcaacttagaagcacaacttggatggtcaataggcggctcggtatgccaactgagtctagaccaagcacttctgttaccccggactgagtaccaataggctgctcgcgcggctgaaggggaaaccgttcgttacccgactaactacttcgagaaacctagtaccaccatgaaagttgcgcagcgtttcgttccacacaaccccagtgttgatcaggtcgatgagtcaccgcaaaccccacgggcgaccgtggcggtggctgcgctggcggcctgcccatgaggcaactcatgggacgcttcaatactgacatggtgcgaagagtctattgagctagttggtagtcctccggcccctgaatgcggctaatcctaactgcggagcagatacccacacaccagtgggcagtctgtcgtaatgggcaactctgcagcggaaccgactactttgggtgtccgtgtttccttttgttcttattctaaccacttatggtgacaattgagaggctgtgaccatattgccactgagttgaccacccggtgacgagcagaacagttgcttacctgtctgttggtcacgtatcattaaaccacaaatccttgaacgctctcctattttgtcataacgcccaacacgtcaaa

SEQ ID NO: 2756 - DNA, 720 bp, Foot-and-mouth disease virus
ccccccctaagttttaccgtcgttcccgacgttaaagggatgtaaccacaagctagaaaccgtcttgcccggcgttatagggctgtaaccacatgcttgtaccgcctttcccggcgacaacgggatgtaaccacacgattgaccttcacccggaagtaaaacggcaacttcacacatttttgcccgttttcacgagaaacgggacgtctgcgcacgaaacgcgccgccgcttgaggaagacttgtacaaacacgatctaagcaggtctccacaactgacacaaaccgtgcaacttgaaactccgcctggtctttccaggtctagaggggtgacactttgtactgtgcttgacaccacgctcggtccactagcgggtatgagtagcagaactgttgcttcgtagcggagcatggtggccgtgggaactcctccttggtaacaaggacccacggggccaaaagccacgtcctgtggacccaccatgtgtgcaaccccagcacggcaatttttctgtgaaaactaccttaaggtgacactgatactggtactcaaccactggtgacaggctaaggatgcccttcaggtaccccgaggtaacacgcgacactcgggatctgagaaggggactgggacttctttaaaagtgcccagtttaaaaagcttctatgcctgaataggcgaccggaggccggcgcctttcttttaaacactactagacta

SEQ ID NO: 2757 - DNA, 726 bp, Enterovirus B
ggttgttcccacccacagggcccattgggcgctagcacactggtatcacggtacccttgtgcgcctgttttatacacccttccccaacgaaacttagaagtaaagcaacaaggtcaataggtagctcagtgagccaactgagttatgaccaagcacttctgtcaccccggactgagtatcaataggctgctcacgcggctgaaggagaaagcgttcgttatccggctaactacttcgagaaacctagtaccaccatgaaggttgcgtagcgtttcgatcagcacaaccccggtgtagatcaggccgatgagtctccgcattcctcacgggcgaccgtggcggtggctgcgctggcggcctgcccatggggcaacccatgggacgcttcaatactgacatggtgcgaagagtctattgagctagttagtagtcctccggcccctgaatgcggctaatcctaactgcggagcacacacccccaacccaggaggcagtgtgtcgtaacgggtaactctgcagcggaaccgactactttgggtgtccgtgtttccttttattcttatactggctgcttatggtgacaattgagagattgttaccatatagctattggattggccatccggtgactaacagagctattgtatacctgtttgttggttttataccattaaattgcaaagttctagagaccctcaattttatcctattactaaacgcagcaaa

SEQ ID NO: 2758 - DNA, 726 bp, Unknown
  Description of Unknown: unclassified Enterovirus sequence
acatgggcacccagagggcccacgtggcgtagaactcacgtggcgtagaactccggtattacggtacccttgttcgcctattttaccaccccttccccagaaacttagaagtcatgatcacaaggctcaatagatacttgggcaaaccagcccaaggacgagcaagcacttctgtctccccgggaggcaacgctgttaggctgtccccacggccgaaggcaacgctaccgttaaccggcgtggtactgcgggaagtctagtaacatcattgaatttctttgacgttacgttcagcacacaaacccagtgtgtagttttggctgatgagtgcctgcattccccactggcgacagtggcaggcgctgcgttggcggccaactctcagggcaacctgagagacgtcaaattaaggacatggtgtgaagaacctactgcgctactgcgtagtcctccggcccctgaatgcggctaatcctaactcgggagcatctgcacacaatccagtgtgaagggtgtcgtaacgggcaactcctgagcggaaccgactactttgggtgtccgtgtttcctgttttatttaccttggctgcttatggtgacaatctagattgttaccatatagcaattgggttggccacctggttttgtaagcttgtgacttttagtacgctaaaacacttactataatacaacacagacattactataaaaccacttgaaagagagg

SEQ ID NO: 2759 - DNA, 727 bp, Unknown
  Description of Unknown: unclassified Hepatovirus sequence
tcccctctttgggctactctggctgggggtagtaaaatacccagccctcgtttgcctagagtttaggctaaaacccctttccctttgtaaatacgttcatttgtaaatattgattcctgcaggttcaggctttcttgaatcatgttgtgctttaacacacacttactattttgccataagtgcgatggatggaaacttccatcaaaccttttaacacaggatgttattagggcagtttctcttaatatatctctgggacattcttcggtcccattgtttctcctttctatcttcttgttttccgggttctcaggataccaatggagcgaccactgcgcccggtggggttaaccagaagattagcttctggctgtagctgctaaaagtcctgacgttatagagcgccgtcacggagttagtgattaaactcaggtgtttggaaattcattgatcttctagaaagggtaggctacgggtgaaaccctttacactaatacctatattaggagatgtgttgcataggtgaagggtactggtaaaggggattttcacgatgaacctttcaacagttgtggacccacctcatgcactagatgctttgatttgaagaacacttggggtcacttcccgagtgatcgcgccactaggcgccctcctctatgagttgtaggggtaatcaggggcatttaggtttccacatttaaaagatttatatgattgattcaaa

SEQ ID NO: 2760 - DNA, 729 bp, Enterovirus B
gggttgttcccacccacagggcccacggggcgctagcactctggtatcacggtacctttgtgcgcctgttttatccaccctcccccaaatgtaacctagaagtacaatactaacggtcaataggcggcacagcacaccagctgggtctagaccaagcactcctgttgccccggactgagtatcaataggctgcctccgcggctgaaggagaaaacgttcgttatccggccaattacttcgagaaacccagtaccaccatggaagttgcgcagcgtttcgttccgcacaaccccagtgtagatcaggtcgatgagtcaccgcattccccacgggcgaccgtggcggtggctgcgttggcggcctgcccatggggtgacccatgggacgcttcaatactgacatggtgtgaagagtctattgagctaattggtagtcctccggcccctgaatgcggctaatcctaactgcggagcagacactcacaagccagtgagcagtctgtcgtaacgggtaactctgcagcggaaccgactactttgggtgtccgtgtttccttttattcttacattggctgcttatggtgacaattgagaaattgttaccatatagctattggattggccatccggtgactaacagagcaattgtctatctgtttgttggatttgtaccactgaactataaggtattgaacacacttaactttatcatatcactaaactcagcaaa

SEQ ID NO: 2761 - DNA, 730 bp, Enterovirus B
gttgttcccacccacagggcccactgggcgctagcacactggtatcacggtacctttgtgcgcctgttttatgcttcctcccccactatagtaatctagaagcttgaactacatggccaacagacaacccggtacaccaaccgggccccggccaagcacttctgtatccccggactgagtatcagtaagctgctcgcgcggctgaaggagaaaacgttcgttacccggccacttacttcgagaaacctagtaacgccatgaaagttgcgcagcgtttcgctccgcacaaacccagtgtagatcaggtcgatgagtcaccgcatcccccacgggcgaccgtggcggtggctgcgttggcggcctgcccatggggtaacccatgggacgcttcaatactgacatggtgcgaagagtctattgagctaagtggtagtcctccggcccctgaatgcggctaatcctaactgcggagcagatacccacactccagtgggcagtctgtcgtaacgggcaactctgcagcggaaccgactactttgggtgtccgtgtttccttttgtcttttacactggctgcttatggtgacaattgaaagattgttaccatatagctattggattggccatccggtatcaaacagagcaattatttacttgtttgttggttatatacctctcgataccaaggttctaaaaacactcaactacatcttgttattgaatacgttgaa

SEQ ID NO: 2762 - DNA, 740 bp, Unknown
  Description of Unknown: unclassified Parechovirus sequence
cccgtggcttatgccacgggacccgtgcccccgtccagggggttttacttatgctcaggcgtttgcattatcgcctggatctggctctgggcaccctttcagcccctgggcatgggtttaaactgcctacctgtaacacttaacatctaagaaactgatttgtaaccaaccctggccagatgttgccagcccaagccacttggaataaggtgggcaatgtcacattggtgcttaaaggttgcgtccaaatttttcttttccaaccactcatgtggacggtgtgcaaactccaccgtaacacttctaggtgacttccacacttgtggggctaaagcaccagagtctttgcttcaaccatattgtggtgacagcaaagcatcctgaaattagttagtaatgattctagatccacttctgtggtgctgcatgcctgcggagcaatggggggtgaccctcacctcaggggccgaaagccacggtgtttaaagcacccatgcagtatgcttgtctgtttaggattgtgaacactgaaagtaaggatgatgagtggtcactgtggtcactggttgtcgtacgggggctgaaggatgcccagaaggtacccgtaggtaaccttaagagactatggatctgatctggggccagggagtgatgtactctatacacctgccttggttaaaaaacgtctaggcccccccaacctgggggaccaggttttcctggtcattttgcaaaggaat

SEQ ID NO: 2763 - DNA, 741 bp, Unknown
  Description of Unknown: unclassified Sapelovirus sequence
tcacactcatttcgccccctcaccctactcaggcaacccccaccccttctcttacgggagttagggccaaggatctagtgtagtggtgttgtatccccttaccttaaacccatcccatccaagcggactggtattatggctttagattgaataatggttgatgaatccaaacctgttactcattcaggggaaaaatgaagacattctctatggatttgacttgttacgaccaagagttagcgcttcgcgcgctggccgtatggactgtttaatggttactctatggattatgatttcagggttggccgcccaggataaaaggcaattgtggtaagtgatgttagtcattggcagttgaaacctgcctagaacatctaaggtctacgctgtgcgggccgaagtaagtctaggaacaacagggagtatgctgttttttgctttcacccaacacgaccgtacacgaaagagctagaggcatctggaggcaaagggaaaagaatttcttagcccgaatgttcattagagtccttgacgaatgcgtcccctctgtcccgagggtgaggcgtatggcgcatgctcatggcattactccaaggtgtatctagaggggggggccccctctacttagtctagtgctacctgacagggccgcggctggtcgtttgtgtatggtataaccagtagtaatcccccatggattgctttaactccccctcctcccttcacaagacattctctaag

SEQ ID NO: 2764 - DNA, 741 bp, Enterovirus B
ttaaaacagcctgtgggttgatcccacccacagggcccattgggcgctagcactctggtattacggtacccttgtgcgcctgttttacacgcccctccccaagcaacttagaagtctgtcacaaatggtcaatagacagctcaacacgccagttgagtctagaccaagcacttctgtcgccccggaccgagtatcaatagactgctagcgcggttgaaagagaaaacgttcgttacccggccaactacttcgggaaacctagtaccaccatgaaagttgcgcagtgtttcgctccgcacaaccccagtgtagatcaggtcgatgagccaccgcattccccacaggcgactgtggcggtggctgcgttggcggcctgcccatggtacaacccatgggacgcttcaatactgacatggtgcgaagagtctactgagctagttggtagtcctccggcccctgaatgcggctaatcctaactgcggagcaggtacccacgagccagtgggcagcctgtcgtaatgggcaactctgcagcggaaccgactactttgggtgtccgtgtttccatttactcttatactggctgcttatggtgacaatcacggaattgttaccatatagctattggattggccatccagtgactaacagagcgattatattcctttgtgttggttttgtaccactcaccgtcacgagctttacaacgctaaactacattttgtcattgaacacggcaag

SEQ ID NO: 2765 - DNA, 741 bp, Enterovirus B
ttaaaacagcctgtgggttgtacccacccacagggcccactgggcgctagcactctggtactacggtacctttgtgtgcctgttttatacccctccccctactgaaacttagaagcaattcataccgatcaatagtgggcgtggcacaccagccgtgtctagatcaagcactcctgtttccccggaccgagtatcaatagactgctcacgcggttgaaggagaaaacgttcgttatccggctaactacttcgaaaaacctagtaacaccatgaaagttgcggagtgtttcactcagcacttccccagtgtagatcaggtcgatgagtcaccgcattcctcacgggcgaccgtggcggtggctgcgctggcggcctgcctatggggtgacccataggacgctctaatacagacatggtgcgaagagtctattgagctagttagtagtcctccggcccctgaatgcggataatcctaactgtggagcagatacccacgaaccagtgggcagtctgtcgtaacgggcaactccgcagcggaaccgactactttgggtgtccgtgtttccttttattccaaatctggctgcttatggtgacaattgagagattgttgccatatagctattggattggccatccggtgaataatagagcgataatatatttgtttgttggattcgtgccacttagtctgaaagttttgagaacactcaactacgttttattgctgaatagtgcaag

SEQ ID NO: 2766 - DNA, 745 bp, Enterovirus A
ttaaaacagcctgtgggttgcacccactcacagggcccactgggcgctagcacactgatttcccggaatccttgtgcgcctgttttatatcccctcccccatgcgcaacttagaagcaatctacaccttcgatcaatagcaggcgtggcgcgccagccatgtctagatcaagcacttctgtttccccggactgagtatcaataaactgctcacgcggttgaaggagaaaatgttcgttacccggctaactacttcgagaaacctagtagcaccatgaaaattgcagagcgtttcgctcagcgcttcccccgcgtagatcaggctgatgagtcactgcattcctcacgggcgaccgtggcagtggctgcgttggcggcctgcccatggggtaacccatgggacgctctaatatggacatggtgtgaagagtctattgagctagttagtagtcctccggcccctgaatgcggctaatcctaactgcggagcacatacccccaaaccagggggcggtgtgtcgtaacgggcaactctgcagcggaaccgactactttgggtgtccgtgtttccttttattcttatattggctgcttatggtgacaattgaaagattgttaccatatagctattggattggccatccggtgaataacagagccttgatatacctttttgtagggtttataccacttactcttcgcgttgttgagactctaaagtacattctaatcttgaacactagaaa

SEQ ID NO: 2767 - DNA, 746 bp, Enterovirus A
ttaaaacagcctgtgggttgcacccacccacagggcccactgggcgttagcacactgattccacggaatccttgtgcgcctgttttacaaccccttcccaaactcgtaacttagaagaatagcacgctaccgatcaatagcaggcatggcgcaccagccatgtctagatcaagcactcctgtctccccggaccgagtatcaatagactgctaacgcggttgaaggagaaaacgttcgtcacccggctaactacttcgagaaacctagtaacaccattgaagctgcggagcgtttcgctcagcactacccccgtgtagatcaggtcgatgagtcactgcaacccccacgggcgaccgtggcagtggctgcgttggcggcctgcctatggggtaacccataggacgctctaaagtggacatggtgcgaagagtctattgagctagttagtagtcctccggcccctgaatgcggctaatcctaactgcggagcgcataccctcaacccagggggtggtgcgtcgtaacgggcaactctgcagcggaaccgactactttgggtgtccgtgtttccttttattcttatactggctgcttatggtgacaattgaaagattgttaccatatagctattggattggccatccagtgactaatagagctttgatatacctgtttgtgggttttgttccactcaccaatcgtgcagtttacactctgaagtacattttaatcttgaataatagaaa

SEQ ID NO: 2768 - DNA, 746 bp, Enterovirus A
tttaaaacagcctgtgggttgcacccacccgcagggcccactgggcgccagcactctggtttcgtggaacctttgtgcgcctgttttatcaccctcttcccaaactcgcaacttagaagtaacactttactgatcaatagcaggcgtggcgcaccagccatgtctagatcaagcacttctgtctccccggaccgagtatcaataggctgctcacgcggctgaaagagaaaacgttcgttatccggctaactacttcgagaaacttagtagcaccgttgaaactgcagggtgtttcgctcagcacttcccccgtgtagatcaggtcgatgagtcactgcaatccccacgggcgaccgtggcagtggctgcgttggcggcctgcctatggggtaacccataggacgctctaatgtggacacggtgcgaagagtctattgagctagttagtagtcctccggcccctgaatgcggctaatcctaactgcggagcgcatgcccccgaaccaggaggtggtgcgtcgtaatgggtaactctgcagcggaaccgactactttgggtgaccgtgtttctttttattcctattatggctgcttatggtgacaattaaagaattgttaccatatagctattggattggccatccggtgtctaacagagctattatatatctgtttgttgggtttgttccattatcacacacatcactcaatacattgtatttcattgtgggattgaacacaagaaa

SEQ ID NO: 2769 - DNA, 746 bp, Enterovirus A
ttaaaacagcctgtgggttgtacccactcacagggcccactgggcgttagcactctgattccgcggaatccttgtgcgcctgttttaaaacccctccccacacttgtaatctagaagtaatgcactcttatgatcaatagcaggcgtggcgcaccagccatgtcttgatcaagcacttctgtctccccgggctgagtatcaatagactgctcacgcggttgaaggagaaaatgctcgttatccggctaactacttcgagaaacctagtagcaccagtgaagctgcggggcgtttcgttcagcacttcccccgtgtagatcaggtcgatgagtcactgcgttccccacgggcgaccgtggcagtggctgcgttggcggcctgcctatggggcaacccataggacgctctaatgtggacatggtgcgaagagtctattgagctagttagtagtcctccggcccctgaatgcggctaatcctaactgcggagcacatgccctcaagccagagggtggtgtgtcgtaatgggcaactctgcagcggaaccgactactttgggtgtccgtgtttccttttattcttatactggctgcttatggtgacaatcacagaattgttgccatatagctattggattggccatccggtgcacaacagagcaattatctatttatttgttggatttacccctttgacacttacatctcttaacacattgcactacatcctatttttgaatacgaggaa

SEQ ID NO: 2770 - DNA, 747 bp, Enterovirus A
ttaaaacagcctgtgggttgtacccacccacagggcccactgggcgctagcacactgattctatggaatctttgtgcgcctgttttataatccctttcccaaaattgcaacttagaagaacagtactttatcgatcaatagcaggcatgacgcaccagttatgtctagatcaagcactcctgtttccccggaccgagtatcaatagactgctaacgcggttgaaggagaaaacgtccgttacccggctaactacttcgagaaacctagtagcaccattgaagctgcagagcgtttcgctcagcacttccccagtgtagatcaggttgatgagccactgcactccccacgggcgaccgtggcagtggctgcgttggcggcctgcctatgggacaacccataggacgctctaaagtggacatggtgcgaagagtctattgagctagttagtagtcctccggcccctgaatgcggctaatcctaactgcagagcacatgccctcaacccagggggtggtgtgtcgtaacgggcaactctgcagcggaaccgactactttgggtgtccgtgtttccttttattcttatattggctgcttatggtgacaattgagagattgttaccatatagctattggattggccatccggtgaccaacagagctttgatatacctgtttgcgggttttattccactctccagtcgttcagtccatactataaagtgcattttgattctgaacaatagaaa

SEQ ID NO: 2771 - DNA, 747 bp, Enterovirus A
ttaaaacagcctctgggttgcacccacccacagggcccactgggcgctagcacactggtatcacggtacctttgtgcgcctgttttatacaccctccccccttgtaacttagaagaaacaaacaaacgatcaatagtaggcttagcactccagctaagtctcgatcaagcacttctgttaccccggaccgagtatcaataggctgtacccacggctgaaagagaaaacgttcgttacccggctatctacttcgggaaacccagtaccatcatgaagattgcaaagcgtttcgctcagcacaaccccagtgtagatcaggtcgatgagtcactgcattccccacaggcgactgtggcagtggctgcgttggcggcctgcctatggggaaacccataggacgctttaatattgacatggtgcgaagagtctactgagctaggtagtagtcctccggcccctgaatgcggctaatcccaaccacggagcaggcgctcacactccagtgagtagcttgtcgtaatgcgaaagtctgtggcggaaccgactactttgggtgtccgtgtttccttttatttttatcatggctgcttatggtgacaatctaagattgttatcatatagctattggattggccatccggtgaattctagagatattatttacttgtttgttggttttaccacattaaacattaccaattacagaactctcctctacatcctgttattgaataatagaaagagaaa

SEQ ID NO: 2772 - DNA, 748 bp, Enterovirus A
ttaaaacagcctgtgggttgcacccacccacagggcccactgggcgccagcacactgattctacggaacctttgtgcgcctgttttacaaccccttccccgaaactcgcaacttagaagaacagcacgctatcgatcaatagcaggcatggcgcgccagtcatgtctagatcaagcacttctgtctccccggactgagtatcgatagactgctaacgcggttgaaggagaaaacgtccgttacccggctaactacttcgagaagcctagtaacaccattgaaactgcagagtgtttcgctcagcactaccccagtgtagatcaggtcgatgagtcactgcactccccacgggtgaccgtggcagtggctgcgttggcggcctgcctatggggtaacccataggacgctctaaagtggacatggtgcgaagagcctattgagctagttagtagtcctccggcccctgaatgcggctaatcctaactgcggagcgcatgccctcaatccagggggtggtgcgtcgtaatgggcaactctgcagcggaaccgactactttgggtgtccgtgtttccttttattcttatgttggctgcttatggtgacaattgagagattgttgccatatagctattggattggccatccagtgactaacagagctttgatatacctgtttgtgggttttgttccactcaccaattgtacagttcaaactttgaagtacattttaattctgaataatagaaa

SEQ ID NO: 2773 - DNA, 749 bp, Enterovirus A
ttaaaacagcctgtgggttgcacccacccacagggcccattgggcgctagcacactgattctatggaatctttgtgcgcctgttttagtatccctccccctcaaacacgtaacttagaagaatagcacgctatcgatcaatagcaggcgtggcgcaccagccatgtctagatcaagcacttctgtctccccggattgagtatcaatagactgctaacgtggttgaaggagaaaacgtccgttacccggctaactacttcgagaaacctagtaacaccattgaaactgcagagcgtttcactcagcactaccccagtgtagatcaggtcgatgagtcactgcattccccacgggcgaccgtggcagtggctgcgttggcggcctgcctatggggtgacccataggacgctctaaagtggacatggtgtgaagagtctattgagctagttagtagtcctccggcccctgaatgcggataatcctaactgcggagcgcatgccctcaatccagggggtggtgcgtcgtaacgggcaactctgcagcggaaccgactactttgggtgtccgtgtttccttttatctttatactggctgcttatggtgacaattgagagattgttaccatatagctattggattggccatccagtgaccaacagagctttgatttacctgtttgtgggttttgttccactcaccagttgtacagttcatactttgaagtatattttaatcctgaataatagaaa

SEQ ID NO: 2774 - DNA, 750 bp, Enterovirus A
acttaaaacaaacctgtgggttgcacccacccacagggcccactgggcgctagcacactgattctatggaatctttgtgcgcctgttttataaccccttccccaaaactgtaacttagaagaatagcactctatcgatcaatagcaggcatggtgcgccaatcatgtctagatcaagcacttctgtctccccggatcgagtatcaatagactgctagcgcggttgaaggagaaaacgtccgttacccggctaactacttcgagaaacttagtagcaccattgaagccgcagagtgtttcgctcagcactcccccagtgtagatcaggtcgatgagtcactgcactccccacgggcgaccgtggcagtgactgcgttggcggcctgcctatggggcaacccataggacgctctaaagtggacatggtgcgaagagtctattgagctagttagtagtcctccggcccctgaatgcggctaatcctaactgcggagcgcatgccctcaatccagggggtggtgtgtcgtaacgggcaactctgcagcggaaccgactactttgggtgaccgtgtttccttttattcttatactggctgcttatggtgacaattgagagattgttaccatatagctattggattggccatccagtaaccaacagagctttgatatacttgtttgtgggtttcgttccactcaccaatcgtacaatccatactctaaagcacattttgattctgaacaatagaaa

SEQ ID NO: 2775 - DNA, 750 bp, Enterovirus A
ttaaaacagcctgtgggttgcacccacccacagggcccactgggcgctagcacactgattctacggaatctttgtgcgcctgttttataacccccttccccccaaaactgtaacttagaagaatattacactactgatcaatagcaggcatggcgcgccagtcatgtctagatcaagcacctctgtctccccggactgagtatcaatagactgctagcgcggttgaaggagaaaacgtccgttacccggctaactacttcgagaaacctagtagcaccattgaagctgcggagtgtttcgctcagcactcccccagtgtagatcaggtcgatgagtcactgcactccccacgggcgaccgtggcagtggctgcgttggcggcctgcctatggggcaacccataggacgctctaaagtggacatggtgtgaagagtttattgagctagttagtagtcctccggcccctgaatgcggctaatcccaactgcggagcacatgctctcaatccagagggtggtgtgtcgtaacgggcaactctgcagcggaaccgactactttgggtgtccgtgtttccttttattattatattggctgcttatggtgacaattgagagattgttgccatatagctattggattggccatccagtgacaaacagagctttgatatacttgttcgtgggttttgttccactcaccagtcgtacagttcatactctaaagtacattctgattctgaacaatagaaa

SEQ ID NO: 2776 - DNA, 750 bp, Enterovirus B
ttaaaacagcctgtgggttgatcccacccacagggcccactgggcgccagcacactggtatcgtggtacctttgtgcgcctgttttataccccctacccccacatgtactctagaagcaaggcaaacctgaccaatagtaggtgtggcacaccagccgcattttggtcaagcacttctgtttccccggaccgagtatcaataagctgctcacgcggctgaaggagaaaccgttcgttacccgaccagctacttcgagaaacctagtaacactatgaacgttgcggagtgtttcgttcagcacttcccccgtgtagatcaggtcgatgagtcaccgcattcctcacgggtgaccgtggcggtggctgcgttggcggcctgcctacgggttcgcccgtaggacgctctaataccgacatggtgtgaagagtccattgagctagctggtagtcctccggcccctgaatgcggctaatcctaactgcggagcaggtgctcacagaccagtgagtagcctgtcgtaacgggcaactctgcagcggaaccgactactttgggtgtttttccttttttcttctcttatattggctgcttatggtgacaattaaagaattgttaccatatagctattggattggccatccggtgacgagcagagccattgtttacctctttgttggatttgtacctttgaaccacaaagtcttgaataccattcatctcattttaaagttcaactcagctaaaagaaa

SEQ ID NO: 2777 - DNA, 751 bp, Enterovirus A
tttaaaacagcctgtgggttgtacccacccacagggctcactgggcgctagcacactggtatcacggtacccttgtgcgcctgttttatacaccctcccccctttttgtaacttagaagaaacaaacacacgatcaatagcaggcttagcgcaccagctaagtcttgatcaagcacttctgttaccccggactgagtatcaataagctgtgcccacggctgaaagagaaaacgttcgttacccggctgtctacttcgggaaacctagtaccatcatgaagactgcaaagcgtttcgctcagcacaaccccagtgtagatcaggtcgatgagtcactgcattcctcacaggcgactgtggcagtggctgcgttggcggcctgcctatggggaaacccataggacgctttaatgttgacatggtgcgaagagtctactgagctaggtagtagtcctccggcccctgaatgcggctaatcccaaccacggagcaggcgctcacactccagtgagtagcctgtcgtaatgcgcaagtctgtggcggaaccgactactttgggtgtccgtgtttccttttattcttatcatggctgcttatggtgacaatctaagattgttatcatatagctattggattggccatccggtgaactctagagatattatctatttgtttgttggttttaccaagttaaacatcaccagctacaccactcttctttatatcatattattgaacagtaaaaagagaaa

SEQ ID NO: 2778 - DNA, 751 bp, Enterovirus A
ttaaaacagcctgtgggttgtgacccacccacagggcccactgggcgctagcactctgattctacggaatccttgtgcgcctgttttatgtcccttcccccaatcagtaacttagaagcattgcacctctttcgaccgttagcaggcgtggcgcaccagccatgtcttggtcaagcacttctgtttccccggaccgagtatcaatagactgctcacgcggttgagggagaaaacgtccgttacccggctaactacttcgagaagcctagtagcaccatgaaagttgcagagtgtttcgctcagcacttcccccgtgtagatcaggtcgatgagtcactgcgatccccacgggcgaccgtggcagtggctgcgttggcggcctgcctgtggggtaacccacaggacgctctaatatggacatggtgcaaagagtctattgagctagttagtactcctccggcccctgaatgcggctaatcctaactgcggagcacataccctcgacccagggggcagtgtgtcgtaacgggcaactctgcagcggaaccgactactttgggtgtccgtgtttccttttattcttatactggctgcttatggtgacaattgaaagattgttaccatatagctattggattggccatccggtgtgcaacagagctattatttacctatttgttgggtatataccactcacatccagaaaaaccctcgacacactagtatacattctttacttgaattctagaaa

SEQ ID NO: 2779 - DNA, 752 bp, Enterovirus C
ttaaaacagctctggggttgttcccaccccagaggcccacgtggcggctagtactctggtatcacggtacccttgtacgcctgacatcccattccctactgaaggagaagcaaattgcacgatatcaaaaaaagggggtacaaaccagaaccaccacgaacaagcacttctgttaccccggtgatattgcatagactgttcccacggtcaaaagcgattgatccgttatccgctcaagtacttcgagaagccttagtatctccttggaatcttccgatgcgttgcgctcaacactcgaccccggagtgtagcttaggtcgatgagtctggacgatcctcactggcgacagtggtccaggctgcgttggcggcctacctatggcccaaagccataggacgctagttgtgaacaaggtgtgaagagcctattgagctactcgagagtcctccggcccgtgaatgcggctaatcccaaccacggatcaggtgattgcaatccagcagttggcctgtcgtaacgcgcaagtctgtggcggaaccgactactttgggtgaccgtgtttccttttatttttattactggctgcttatggtgacaatcgaggattgttatcataaagcgaattggattggccatccggtgaaagtaaaacacattatttacctttttgttggatttactacattatccacgttcactctagatttaattcgcatagttcttttgactagaagattttaccaacataaca

SEQ ID NO: 2780 - DNA, 756 bp, Enterovirus A
cagacgtgtgctcttcccgatgtgggttgtacccacccacagggcccaatgggcgctagcacaccggtatcacggtacccttgtgcgcctgttttatgcaccctccccctatgtaacttagaagaaacaaacacacgatcaatagtaggcttggcgcgccagctaagtcttgatcaagcacttctgttaccccggactgagtatcaataggctgtacccacggctgaaagagaaaacgttcgttacccggctatctacttcgggaaacctagtaccatcatgaagactgcaaagcgtttcgctcagcacaaccccagtgtagatcaggtcgatgagtcactgcattcctcacaggcgactgtggcagtggctgcgttggcggcctgcctatggggaaacccataggacgctttaatgttgacatggtgcgaagagtctactgagctaggtagtagtcctccggcccctgaatgcggctaatcccaaccacggagcaagcgctcacaatccagtgagtagcttgtcgtaatgcgaaagtctgtggcggaaccgactactttgggtgtccgtgtttccttttatttttatcatggctgcttatggtgacaatctaagattgttatcatatagctattggattggccatccggtgaactctagagatattatctatttgtttgttggttttaccaagttaaacatcactagttacaccaccttactttatattatactactgaataatagaaaaagaaa

SEQ ID NO: 2781 - DNA, 759 bp, Parechovirus B
ttgaaaggggggccctgcagccgatataggctgcagggttcccctggtggggtgggtacgtctctcgctcattgagtgggggcgtggctcaccaaccacacctggttggtccccaggttcatgcaataaccactttttgtaatctttacatctaagcttaattcacccactagaactggacgaaaccgcttggaataagtttggttctctcttgagtgtgttttgtgttagcataatttctgtctctagagtgctttacactctagtaggggctgtacccgggcggtcccactcttcacaggaatctgcacaggtggctttcacctctggacagtgcattccatacccgctccacaatagaagatgatgtatatctttgtttgtgaaatgctcatgaaacgtgtgtgtaggcgtagcggctacttgaatgccagcggaacccccctagtggtaacactagcctctgggcccaaaaggcatgtctctgaccattcaagtacacaaccccagtgatacacacatttagtaatggctcagtaatggacattgattgatcatcagacaattgttaggaggcctaggtatgacgggctgaaggatgccctggaggtacccgcaggtaaccttaagagactgtggatctgaccaggggcccaccatggaaacatgggtagaagtcttcggaccttgggttaaaaaacgtctaggcccgccccccacagggatgtggggtttcccttataaccccaatatcacatt

SEQ ID NO: 2782 - DNA, 788 bp, Unknown
  Description of Unknown: unclassified environmental samples sequence
cgataaaccggttatggagaccttctttggagaataatattttaaccgttattagctctttagaacttaaaaggatgattaatttctttgcacttctcccgtgctttatagattttacctatatgtgagttaaccctctcactccaatttgccctgagtgggcataaataactgaacgacggtatgtactttgtacgattccgtgaccagatgaatatagctgatgagtatcttagactcagcttgtatcttcattattggttaaccaaccttaccctcattaataaactgaatcccatatgggtccgtttcttgtttcttttgaattattattaaatctgaaaaggtaacatgtagttgtgaggcatgaggtactaccttagaaaggaatagaatttttggtttctctccgtctagaacaatgacggagtctcgcttgaaccctttgttattattgatcgtcacacaccagtgacattccgagtaagcatttatattgactactttgggcttgcacgatcagtccccaggctgatctctccccatcttatatcttgaatatgactatactcattgatctctaatacttagttattacacagcgtttctcttgattggtttcgaaaacgtgcgagagttttatacgcctgttaacccaggtaccatttcgttgatgcgattatctcgcaaaagaaactttttacggccaacatgaatggttagcccccttatagcctagcgatattatttatttaattttcagttaggcatcacaaataattcccacc

SEQ ID NO: 2783 - DNA, 807 bp, Unknown
  Description of Unknown: unclassified Passerivirus sequence
ttgaaagccccacctggggggctttccctgtgctgcgacctgtcgctaaccaagaggcatgacctcaagattggacccacagtcgccacaggtgtccgttgatacgctccggacctaacccggataatgtaacatcaaattatttaagatttatgagcttatatactgttatgaacaccagtaaacatgttagattaagagcaaaacacccccctcgtcaattctagaagtccgcgagggatttagggtagcaaactaggaatctagatgcatattcttgttttaaaacccacgctgcaagtgatctgttcactctcatccaccctcagggtggtcagtgtggtgagtcatagcgacacctaacagaggctaacctagtaactcttgtgaagttcaacacgctgacaggattccacgtccgtttactgctagcattcccgctcagagggtggcccaagtaattggtgctctgagtgtgcgtgagctagtatcccgcgagggataggtgtgttgtaatgacacaagttggtgaaaggtaaagtgctttaggctagctactggcccattggctacgagtagacatgtgcaggaggtacccgctcatcttagcggatgtgacctgtagctaattagtcaatgctcgctgtagaaatcttttccccttttttcttttatatacagagtgattcgcatttgtattgaagattgtgtgcctagtgtatcttggtattatcagaggaagcaatttaaactggattttcaattaggaggattaaaaccttgttaactttttataagcattataaa

SEQ ID NO: 2784 - DNA, 833 bp, Cardiovirus B
tttccggcccaggctaagagaaacatataagttagatttgatccaaatttcttgacgaattcggaacgagatgttctccctcccttgccgcttgttcacacccataactctgattcggccctttgtgacaagccccttggtgaaagaacctctctccttccgacgtggttggaattaacatcacttccgacgaaagtgctatcatgcctccccgattgtgtggtgttttctgccctgctgggcggagcattttcgggttgagaaaccttgaatcctttcttttggaaccttggttcccccggtctaagccgcttggaatatgacagggttattttctttattcttatttctacttttatgggttctatccatgaaaagggtatgtgctgccccttccttctttggagaattcacacggcggtctttccgtctctcaacaagtgtgaatgcagcatgccggaaacggtgaagaaaacagtcttctgtggaagtctagagtgcacatcgaaacagctgtagcgacctcacggtagcagcggaatcccctcttggcgacaagagcctctgcggccaaaagccccgtggataagatccactgctgtgagcggtgcaaccccagcaccctgattcgatggttactctctacggaatcaaaagatggttttctcaagccctccggtagagaagccaagaatgtcctgaaggtaccccgcgtgcgggatctgatcaggagaccaattgacagtgctttacactgtcactttggtttaaaaactgtcacagcttctccaaaccaagtggtcttggttttccactttttattgaatggtaat

SEQ ID NO: 2785 - DNA, 963 bp, Cardiovirus B
tttgaacgcgggacctgcgatagtgccaacccacgtcttttcccactcctaacccggttcccacctcgggtccattgtaaggaccagatatatcatcccttgaatgctggctaatcagaggaaagtcagcattttccggcccaggctaagagaaacatataagttagaaatgattctaatcccttgacgaaatcagaacgagatgttctccctcccttgccgcttgttcacacccactttattgattcggccttttgtgacaagccccttggtgaaaggacctctctctttctggcgtggttggaattaacatcctttccgacgaaagtgctaacatgcctccccgattatgtgatgttttctgccctgctgggcggagcattctcgggttgagaaatctcagaacttttcctttggaactttggttcccccggtctaagccgcttggaatatgacagggttattttcttaatcttatttctacttttatgggttctatccataaaaagggtatgtgctgccccttccttctttggagaattcacacggcggtctttccgtctctcagcaagtgtgaatgcagcatgccggaaacggtgaagaaagcagttttctgtggaagtctagagtgcacatcgaaacagctgtagcgacctcacagtagcagcggactcccctcttggtgacaagagcctctgcggccaaaagccccgtggataagatccactgctgtgagcggtgcaaccccagcaccctgattcgatggtcattctctacggaaccagagaatggttttcctaagccctccggtagagaagccaagaatgtcctgaaggtaccccgcgtgcgggatctgatcaggagaccaattgacagtgctttacactgccactttggtttaaaaattgtcacagcttctccaaaccaagtggtcttggtttttcaactttattgaatggcaat

SEQ ID NO: 2786 - DNA, 992 bp, Foot-and-mouth disease virus
ttgaaagggggcgctagggtctcacccctagcatgccaacgactgctcctacgtcgcactccacacttatgtgtgcgcgcgcgggaatcgatggactatcgttcacccacctacagctggactcacggcaccgcgtggccattttagctggactgtgcggacgaacaccacttgcgcacctcgcgtgactggttagtactcttaccactctccgcctacttggtcgttagcgctgtcttgggcactcctgttgggggccgttcgacgctccacggtttcccccgtgccgcacactacggtgttggggccgtttcgtgcgagtcgatcgcctggtgtgcctcggctgtcacccggcgcccgcctttcatttttaccgtcgttcccggcgttaacgggatgtaatcgcaagatttgccttcgcccggaagtgaaacggcaacttcacacacttttgcccgttttcatgagaaacgggacgtcagcgcacgaaacgcgccgtcacttgaggaacacttgtacaaacacgtttcacgcaggtctccacgactgacataaatcgtgcaacttgaagctccgcctggtctttccaggtctagaggggtgacattttgtactgtgtttgactccacgcttggtccaccggcgagagttagtagcagcactgttgcttcgtagcggagcatgatggccgtgggaacccctccttggtaacaaggacccacggggccgaaagccacgtcctaacggacccatcatgtgtgcaaccccagcacggcaactttactgtgaaagccactttaaggtgacactgacactggtactcaaccactggtgacaggctaaggatgcccttcaggtaccccgaggtaacacgcgacactcgggatctgagaaggggactgggacttctttaaagtgcccagtttaaaaagcttctatgcctgaataggtgaccggaggccggcaccttttctcaattaacactgtaatct

SEQ ID NO: 2787 - DNA, 1000 bp, Unknown
  Description of Unknown: unclassified Picornaviridae sequence
tacccccctgcatctcttgtctgaagcgtccaatatatttggtcaccgttttggacagattgtaacggttctacctgcatctcttttcaatgactggcaaagtgcccggattagatatattaagtctttcgtagttagcttaggcgtggtgaaaattgactttttatatgctaatcaatccaaaacaaatttgcttgcatttttgtcccaccttcgggtgggttctttttagaacaggtttatcaatgtgacaagttgtgcgacctctagagaaaaatgtcaaaatactcggttcagaccggggttttaataactacatatattgatcgattattgaattgtagtcctcgccagttactaccagatgacggaggatgcatctaatatcatcccaaattaggtgtctcccaactttttggtaattaatgatatatatgtgtgtgttaaaatgtataaacacttttaagtaagaaagtgtagcactttcaaggttgtactcgttttgatactggttattttaactttatatataatttcccttttccctcataagtacacccacgtaatcgtggtaccgctatgacatcatacgggggtgaaaagtgtggctgacagtcccggcaacgttaattcggcggcggtttcctgcagtgtattctgcctcgggctccggtatgtgttatctaagataacagtagggaaattatttgatagctggtaatccttatcttaattagtgcagcgacggagtctttagtgagactaccaaacacggctagcttaatgctaacggtccgatgaaaggctggcggtcggaggatcacatatctctaagatatggtcgtgcagtatccgcccggggtttaaggcaacgggtcccctaatgtccgaatggaatccttttcttttatggtgacaccagtactttatttcgataaagtgctttatatgtgttattcctttataatatttttttcaatttattatataaatatctatc

SEQ ID NO: 2788 - DNA, 1000 bp, Foot-and-mouth disease virus
cgttagactgtcgttcaaccacctccagttggactcacggcaccgcgtggccattttagctggattgtgcggacgaacaccgcttgcgcaactcgcgtgaccggttagtactcttaccaccttccgcctacttggtcgttagcgctgtcttgggcacacctgttggggttagttcgacgctctgcggtatcccccgcgtgacggactacggtgctggggccgcctcgtgcgagccgatcgcctggtgtgcttcggctgtcacccggcgcccgcctttcatcccccctaagttttaccgtcgttcccgacgttaaagggaggtaaccacaagcttgataccgtcttgtccgacgttaaagggctgtaaccaaaagcttgtaccgcctttccccggcgttaatgggatgtaaccacaagatgaaccttcacccggaagtaaaacggcaacttcacacagttttgcccgttttcgtgagaaatgggacgtctgcgcacgaaacgcgccgtcgcttgaggaggacttgtacaaacacgatctacgcaggtctccacaactgacacaaaccgtgcaacttgaaactccgcctggtctttccaggtctagaggggtgacattttgtactgtgcttgactccacgctcggtccactagcgagtgtcagtagtagcactgttgcttcgtagcggaacatgatggccgtgggaacccccccttggtaacaaggacccacggggccgaaagccacgcctaacggacccatcatgtgtgcgatcccggcacggcaactttactatgaacatcactttaaggtgacgctgaaactggtactcaaacactggtgacagactaaggatgcccttcaggtaccccgaggtaacaagcgacactcgggatctgagaaggggactgggacttctttaaaagtgcccagtttaaaaagcttctatgtctgaataggcgaccggaggccggtgcctttcctttaactactactactttt

SEQ ID NO: 2789 - DNA, 1000 bp, Foot-and-mouth disease virus
cggtggactgttgttcacccacctacagctgaactcacagcaccgcgtggccattttagctggcttgtgcggacgaacaccgcttgcgcatctcgcgtgaccggttagtactcttaccacttgccgcctacttggtcgttcgcgctgttttgggtactcctgttgggggccgttcaacgctctacggtctcccctgcgtaacagactacggtgatggggccgcttcgtgcgagttactcgcctggtgtgcttcggctgtcacccggcgcccgcctttcatcccccctaagttttaccgtcgttcccgacgttaaagggatgtaaccacaagcttgaaccgccttgcccgacgttaataggctgtaaccacatgcttgtaccgcctttcccggcgttaacgggatgcaaccacaagatggaccctcactcgggaagtaaaacgacaaacacactcagttttgcccgttttcacgagaaatgggacgtctgcgcacgaaacgcgccgtcgcttgaggaagacttgtacaaacacgatctatgcaggtttccacaactgacacacatcgtgcaacttgaagctccgcctggtctttccaggtctagaggggtgacactttgtactgtgcttgactccacgctcggtccactggcgggagtgagtagcagaactgttgcttcgtagcggagcatggtggccgtgggaacccccccctggtgacagggacccacgggccgaaagccacgtcctaacggacccaccatgtgtgcaaccccagcacggtaactttactgtgaaaaccactttaaggtgacactgatactggtactcaaccactggtgacaggctaaggatgcccttcaggtaccccgaggtaacacgcgacactcgggatctgagaaggggactgggacttctttaaaagtgctcagtttaaaaagcttctatgcctgaataggcgaccggaggccggcgcctttctcttaaaccactactacatta

SEQ ID NO: 2790 - DNA, 1000 bp, Foot-and-mouth disease virus
gatggactgtcgttcacccacctacagctggactcaaggcaccgtgtggccattttagctggattgtgtggacgaacaccgcttgcgcacctcgcgtgaccggttagtactctcgacaccttccgcctacttggtcgtcagcgctgtcctgggcactcctgttgggggcgctccgacgctctacggtctcccccgtttgacgggctacggtgatagggccgcctcgtgcgagttggtcgtctggtgtgcttcggctgtcacccggcgcccgcctttcatccccccctaagttttaccgtcgttcccgacgttaaagggatgtaaccacaagctttggaccgtcttgtccgacgttaacgggctgtaaccacatgcttgtaccgcctttcccggcgttaacgggatgtaaccacaagatataccttcacccggaagtaaaacggcaaacccattcagttttgcccgttttcatgagaaatgggacgtcagcgcacgaaacgcgccgtcgcttgaggaagacttgtacaaacatgatctatgcaggtttccacaactgacacacatcgttcaacttgaaactccgcctggtctttccaggtctagaggggtgacactttgtactgtgattgactccacgctcggtccactggcgggtgctagtaacagggactgttgtttcgtagcggagcatgatggctgtgggactccctccttggtaacaaggacccacggggccaaaagccacgtcctaacggacccatcatgtgtgcaaccccagcacggcaactttactgtgaaaaacactttaaggtgacactgatactggtactcaaccactggtgacaggctaaggatgcccttcaggtaccccgaggtaacacgcgacactcgggatctgagaaggggactggggcttctttaaaagcgcccagtttaaaaagcgtctatgcctgaatgggcgaccggaggccggcgcctttcttttactactacttaactg

SEQ ID NO: 2791 - DNA, 1000 bp, Foot-and-mouth disease virus
gttggactgtcgttcacccacctacgactggactcactgcaccgcgtggctaccctagttggatagtgcggacgaacaccacttgcgcacctcgcgtgactggttagtactcttaccactctccgcctgcttagtcgttagcgctgttttgggcactcttgttgggggccgttctacgctccacgttctctcccgtgcaacggactacggcgttggggccgctccgtgcgagcagctcgcttggtgtgtttcggttgtcactcggagcccacctttcacccccctccccctaagtaatgccgtctttcccgacgttaaagggaggttaccgcaagctcagtaccgccttgcccggcgttaagggcctgtaaccacacgcttacaccgcttttcccggcgttacgggatgcaaccgtaagatgatccttcaaccggaagtaaaacggaaacacgcacattttgcccgttttctgagaaacgggacgtcggcgcacgaaacgcgcagtcgctcgcgggacacttgtacaaacacgactcacgcaagattccacgactgacacaactcgtgcaacttgaaactccgcctggtctttccaggtctagaggggtgacactttgtactatgactgactccacgctcggtccactggcgggtgttagtaatggcattgttgtttcgtagcggagcgtagtggccgtgggaactcctccttggcaacaaggacccacggggccaaaagccacgtcctagcggacccactacgtgtgcgacccaggcacaacaaccttgctgtgaaaaccaccttaaagtgacactgatactggtactcagccattggtgacaggctaaggatgcccttcaggtaccccgaggtaacatgagacactcgggatctgagaaggggactggggcttctttaaaagcgcccagtttaaaaagcttctatgcctgaataggcgaccggaggccggcgcctttccattacctaccactacttga

SEQ ID NO: 2792 - DNA, 1000 bp, Foot-and-mouth disease virus
gcgcgtggggaccgctggactaccgttcacccacctacggctggactcacggcaccgcgtggccattttagctggaatgtgcggacgaacgccacttgcgcacctcgcgtgactggttaatactcttaccactttccgcctacttggtcgttagcgctgtcttgggcactcccgttgggggccgttcggcgctccacggtttcccacacacggcaaactacggtgatggggccgctccgtgcgagttgatcgcctggtgtgctcggcgtcacccggcgcccgcctttcatttttaccgtcgttcccgacgtttaaagggaggtaaccacaagcttacaaccgtcttgtccgacgttaaagggctgtaaccacaagcttgtaccgcctttcccggcgtcaaagggatgtaaccgcaagatacgccttcacccggaagtaaaacggcaacttaacacagttttgcccgttttcacgagaaacgggacgtttgcgcacgaaacgcgccgtcacttgaggaagacttgtacaaacacgatccacgcaggtttccgcaactgacaagaaccgtgcaacttgaagctccgcctggtctctccaggtctagaggggtgacactttgtactgtgcttgactccacgctcggtccactggcgagtgttagtaacagcactgttgcttcgtagcggagcatggtggccgcgggaactcctccttggtgacaaggacccgcggggccgaaagccacgtcctaaccgacccaccatgtgtgcgaccctggcacggcaactttactgtgaaacccacttcaaggtgacactgatactggtactcaaccactggtgacaggctaaggatgcccttcaggtaccccgaggtaacacgcgacactcgggatctgagaaggggactggggcttctttaaaagcgcccggtttaaaaagcttctacgcctgaataggtgaccggagccggcacctttccttttgaactaccaatttta

SEQ ID NO: 2793 - DNA, 1000 bp, Foot-and-mouth disease virus
tcgcgggaaccgatggactgtcgttcacccacctacagctggactcacggcaccgcgtggccattttagctggattgtgcggacgaacaccgcttgcgcatcttgcgtgaccggtcagtactcttaccaccttccgcctacttggtcgttagcgctgttctgggcactcctgttgggggccgttcgacgctccacggtctcccccgtctgacggactacggtgatggggccgcctcgtgcgggttggtcgtttggtgtgcttcggctgtcacccggcgcccgcctttcatttttaccgtcgttcccgacgttaaagggatgaaaccacaagcttgaaaccgtcttgcccgacgttaatgggttgtaccacacgcttgtaccgcctttcccggcgtcaacgggatgtaaccacaagataaaccttcatccggaagtaaaacggcaaccacactcagttttgcccgttttcatgagaaatgggacgtctgcgcacgaaacgcgccgtcgcttgaggaagacttgtacaaacacgatctatgcaggtttccacaactgacacaaaccgtgcaatttgaaactccgcctggtctttccaggtctagaggggtaacactttgtactgtgtttgactccacgctcggtccaccagcgagtgttagtaacagcactgttgcttcgtagcggagcatgatggccgcgggaattcccccttggtgacaaggacctgcggggccgaaagccacgtcctaatggacccatcatgtgtgcaaccccagcacggcagctttgctgagaaaaccactttaaggtgacactgatactggtactcaatcactggtgacaggctaaggatgcccttcaggtaccccgaggtaacaagtgacactcgggatctgagaaggggacaggggcttctttaaaagcgccctgtttaaaaaacttctatgcctggataagcgaccggaggccggcgcttttctaccaaaccactactgacttg

SEQ ID NO: 2794 - DNA, 1000 bp, Foot-and-mouth disease virus
cgcgggaatcgatggactatcgttcacccacctacagttggactcacggcaccgcgtggccattttagctggactgtgcggacgaacaccacttgcgcacctcgcgtgactggttagtactcttaccactttccgcctacttggtcgttagcgctgtcttgggcactcctgttgggggccgttcgacgctccacggtttcccccgtgccgcacactatggtgttggggccgcttcgtgcgagacgatcgcctggtgtgcttcggctgtcacccggcgcccgcctttcatttttaccgtcgttcccgacgttaaagggagataaccacaagctcaacgccgtcttgcccgacgttaaaggactgtaaccgtaagcttgtaccgcctttcccggcgttaacgggatgtaaccgcaagatttgccttcacccgggaagtaaaacggcaatttcacacagttttgcccgttttcatgagaaatgggacgtcagcgcacgaaacgcgccgtcacttgaggaagacttgtacaaacacgcttcacgcaggtctccacaactgacacaaatcgtgcaacttgaaactccgcctggtctttccaggtctagagggtgacattttgtactgtgtttgactccacgcttggtccaccggcgagagttagtaacagcactgttgcttcgtagcggagcatgatggccgtgggaacccctccttggtaacaaggacccacgggccgaaagccacgtcctaacggacccatcatgtgtgcaaccccagcacggcaactttactgtgaaagccgctttaaggtgacactgatactggtactcaaccactggtgacagctaaggatgcccttcaggtaccccgaggtaacacgcgacacttgggatctgagaaggggacagggacttctttaaaagtgccccagtttaaaaagcttctatgcctgaataggtgaccggaggccggcaccttttctcaattaacactgaaatctta

SEQ ID NO: 2795 - DNA, 1000 bp, Foot-and-mouth disease virus
acgcgggaaccgatggactgttgttcacccacctacggctggactcacggcaccgtgtggctatgatagctgaattgtgcgaacgaacgccgcttgcgcatcttgcgtaaccggttagtacctttataactctccgcctacatggtcgtcagcgctgtcctgggcacacccgttggggaccgttcgacgttctacggtttcccccgtataacaaactacggtaatggggccgcttcgcgcgagccgatcgcctggtgtgcagcggctgtcacccggcgcccgcctttcatttttaccgtcgttcccgacgttaaagggttgtaaccacaagcttggaaccgtcttgcccgacgttaacgggctgcaaccacacgcttgtaccgctttcccctgcgttaaaggggtgtaaccacaagatgtaccttcgcccggaagtaaaacggcaatcacactcagttttgcccgttttcatgagaaacgggacgtcagcgcacgaaacgcgccgtcgcttgaggaagacttgtacaaacacgatccacgtaggtttccacaactgacacaaaccgtgcaatttgaagctccgcctggtctttccaggtctagaggggtgacactttgtactgtgcttgactccacgctcggtccactagcgagtgttagtagcaacactgttgtttcgtagcggagcatgatggccgtgggaactcccccttggtaacaaggacccacggggccgaaagccacgtcctaacggacccatcatgtgtgcaaccccggcacggcaactttgttgtgaaagccactttaaggtgacactgatactggtacccaaccactggtgacaggctaaggatgcccttcaggtacacccaagtaacaagcgacactcgggatctgagaaggggactgggacttctgtaaaagtgcccagtttaaaaagcttctatgcctggataggcgaccggaggccggcgcctttcctttacctattactgttttc

SEQ ID NO: 2796 - DNA, 1000 bp, Foot-and-mouth disease virus
cgtgcactgccgggaaccgatggactgtcgttcacccacctacagctggactcacagcaccgcgtggccattttagctggactgtgcggacgaacaacgcgtgcgcatctcgcgtgaccgtttagtactcttaccactttccgcctacttggtcgctagcgctgcttttgggcactcctgttgggggccgtccgacgctccacggtctcccctgtgacggactacggtgatggggccgcctcgtgcgagttggtcgtttggtgtgctttggctgtcacccggcgcccgcctttcatttttaccgtcgttccggcgtaaaggggaggtagccataagcttgcaacgtctgcccgacgtaaaggctgtaaccgcaagattgtaccgcctgcccggcgttaaacgggctgcagccacaagatgaaccttcacccggaagttaaacggcaaacttgctcagttttgcccgttttcaggagaaatgggacgtctgcgcacgaaacgcgccgtcgcttgaggaggacttgtacaaacgcgattcattcaggttcccacaaccgacacaaaccgtgcaacttgaaacctcgcctggtctttccaggtctagaggggtgacattttgtactgtgtttgactccacgctcggtccactggcgagtgttagtaacagcactgttgcttcgtagcggagcatggtggccgcgggaattcctccttggtaacaaggacccgcggggccgaaagccacgtcctcacggacccaccatgtgtgcaaccccagcacggcaactttactgtgaaaaccactttaaggtgacgctgatactggtactcaaccactggtgacaggctaaggatgcccttcaggtaccccgaggtaacctgcgacactcgggatctgagaaggggactggggcttctttaaaagcgcctagtttaaaaagcttctatgcctgaataggtgaccggaggccggcacctttcctttaaacaactactttca

SEQ ID NO: 2797 - DNA, 1000 bp, Foot-and-mouth disease virus
tgtggggaccgctggactaccgtccacccacctacggctggactcacggcaccgcgtagccattttagctggactgtgcggacgaacgccacttgcgcaccccgcgtgactggttaatactcttaccactttccgcctacttggtcgttagcgctgccctgggcactcccgttgggggccgtccggtgctccacggttcccacgcatgacaaactacggtgatggggccgcttcgtgcgagttgatcgcctggtgtgtttcggctgtcacccgaagcccgcctttcacaagttttaccgtcgttcccggcgttaaagggaggtaaccacaagcttgcaactgtcttgctcgacgataaagggctgtgaccgcaagatgataccgcctttcccggcgttaattggatgcaaccacaagatgaaccttcacccggaagtaaaacggcaaattcgcctagttttgcccgttttcaggagaaatgggacgtctgcgcacgaaacgcgccgtcgcttgaggaggacttgtacaaacacgatctattcaggttcccacaaccgacacaaaccgtgcaacttgaaactccgcctggtctttccaggtctagaggggtgacattttgtactgtgcttgactccacgctcggtccactggcgagtgctagtaacagcactgttgcttcgtagcggagcatggtggccgcgggaactcctccttggtaacagggacccgcggggccgaaagccacgtcctcacggacccaccatgtgtgcaaccccagcacggcaactttactgtgaaaaccactttaaggtgacactgatactggtactcaaccactggtgacaggctaaggatgcccttcaggtaccctgaggtaacacgcgacactcgggatctgagaaggggactggggcttctttaaaagcgcctagtttaaaaagcttctacgcctgaataggtgaccggaggccggcacctttcttttaaacaactactttta

SEQ ID NO: 2798 - DNA, 1000 bp, Foot-and-mouth disease virus
gcgggacccgatggactttcgttcacccacctacagctggactcacggcaccgcgtggccattttagctggattgtgcggacgaacaccgcttgcgcacctcgcgtgaccggttagtactcttaccactctccgcctacttggtcgttagcgctgtcttgggcactcctgttgggggccgttcgacgctccacgggctctcctgtgtgacatctacggtgatggggccgtttcgcgcgggctggtcgtctggactgcttcggctgtcacccgacgcccgcctttcataggttttaccgtcattcccgacgtaaaagggaggtaaccacaagcttgaaaccgtccggcccgacgtaaaagggtggtaaccacaagcttactgccgtctttcccgacgttaaagggatgaaaccacaagacttaccttcgctcggaagtaaaacgacaaacacacacagttttgcccgttttcatgagaaatgggacgtctgcgcacgaaacgcgccgtcgcttgaggaggacttgtacaaacacgatctatgcaggtttccccaactgacacaaaccgtgcaacttgaaactccgcctggtctttccaggtctagaggggtaacactttgtactgagtttgactccacgctcgatccactagcgagtgttagtagcggtactgctgtctcgtagcggagcatgttggccgtgggaacacctccttggtaacaaggacccacggggccgaaagccacgtcctaacggacccaacatgtgtgcaaccccagcacggcagctttactgtgaaacccacttcaaggtgacattgatactggtactcaaacactggtgacaggctaaggatgcccttcaggtaccccgaggtaacaagcgacactcgggatctgagaaggggactgggacttctttaaagtgcccagtttaaaaagcttctatgcctgaataggtgaccggaggccggcacctttccttttataaccactgaatac

SEQ ID NO: 2799 - DNA, 1000 bp, Foot-and-mouth disease virus
ccacacttacctttgcgtacgcgcaggaaccgatggactttcgttcacctacctacagctggactcacggcaccgcgtggccattttagctggattgtgcggacgaacaccacttgcgcatttcgcgtgaccggttattactcttaccactttccgcctacttggtcgtcagcgctgtcctgggcacgcctgttgggggctgttcgacgctctacggtctcctccgcgtggcagactacggtgttggggccgcttcgtgcgagtcgctcgcctggtgtgctttggttgtcacccgaagcccgcctttcacaagttttaccgtcgttcccgacgttaaagggaggtaaccacaagcttgataccgtcttgcccgacgttaaaggctgtaaccataagcttgtaccgcctttcccggcgttaacgggatgcaaccacaagataaaccttcacccggaagtaaaacggtaacttcacacagttttgcccgcttttaccagaaacgggacgtctgcgcacgaaacgcgccgtcgcttgaggaagacttgtacaaacacgatctatgcaggtttccacaactgacacaaatcgtgcaacttgaaactccgcctggtctttccaggtctagaggggtgacattttgtactgtgctcgactccacgctcggtccactagcgggtgttagtaacagcactgttgcttcgtagcggagcatggtggccgcgggaactcctccttggtaacaaggacccacggggccaaaagccacgtcctaacggacccaccatgtgtgcaaccccagcacggcaactttactgcgaaaaccactttaaggtgacactgatactggtactcgaccactggtgacaggctaaggatgcccttcaggtaccccgaggtaacatgtgacactcgggatctgagggggactgggacttctttaaaagtgcccggtttaaaaagcttctatgcctgaataggcgaccggaggccggcgcctttc

SEQ ID NO: 2800 - DNA, 1000 bp, Foot-and-mouth disease virus
gtccctgcgttgcactccacacttacgtttgtgaacgcacgggaaccgatggactttcgttcacccacctacagctggactcacggcaccgcgtggccatttagctggattgtgcggacgaacaccgcttgcgcttttcgcgtgaccggttagtactcttaccaccttccgcctacttggtcgttagcgctgtcttgggcactcctgttgggggctgttcgacgctctacggtctcccctgcgtgacagactacggtgtttggggccacctcgtgcgagccgctcgcctggtgtgtttcggctgtcacccggcgcccggctttcatcccccctaagttttaccgtcgttcccgacgttaaaggactgtaaccacatgcttgtaccgcctttcccggcgttaacgggatgtaaccacaagataaaccttcacccggaagtaaaacggcaacttcactcagttttgcccgttttcgagaaatgggacgtctgcgcacgaaacgcgccgtcgcttgaggaagacttgtacaaacacgatatatgcaggtttccacaactgacacacatcgtgcaacttgaagcctcgcctggtctttccaggtctagaggggtgacattttgtactgtgtttgactccacgctcggtccactggcgagtgttagtaacagcactgttgcttcgtagcggagcatgatggccgcgggaatccctccttggtaacaaggacccgcggggccgaaagccacgtcctgacggacccatcatgtgtgcaaccccagcacggcaactttactgtgaaactcactttaaggtgacactgatactggtactcatccactggtgacaggctaaggatgcccttcaggtaccccgaggtaacacgcgacactcgggatctgagaaggggactgggacttctttaaaagtgcctagtttaaaaagcttctatgcctgaataggcgaccggaggccggcgcctttctctaaccactaattaattg

SEQ ID NO: 2801 - DNA, 1000 bp, Foot-and-mouth disease virus
caactggactttcgttcacccacccacggctggactcacggcaccgtgtggccacttttctggactgtgcggacgaacgccgcttgcgcatctcgcgtgaccggttagtactcttaccaccttccgccaacttggtcgtcagcgctgtcttgggcactcccgtcgggggccgttcgacgctccactgtttctcttgtgtgctagactacggtgatggggctgtttcgcgcgggctgatcgcctggcgtctaggcgaacgcccgaagcctgcctttcacccccatcaccgtaagtaataccgtcttttccgacgttaaaggatagcaaccgcaagcttgctgccgtcttggccgacgttaaagggctgtaaccacaagcttgcaccgccttccccggcgtaaaatggatgtaaccgcaagaagaaccttcacccggaagtaaaacggcaacgttcacacttttgcccgttttgaagaaatgggacgtcagcgcacgaaacgcgccgtcgcttgaggatgacttgtacaaacacgatctacgcaggtatccacaactgacacaaaaccgtgcaatttgaagttccgcctggtctttccaggtctagaggggcgacactttgtactgtgattgactccacgctcggtccactagcgagtgctagtagtggtatcgtcgtttcgtagcggagcatggcggccgtgggatctcctccttggtgacaaggacccacggggccgaaagccacgccctaacgggcccgccatgtgtgcaaccccagcacggcaactttaccacgaagaccactttaaggtgacactgaaactggtactcaaccactggtgacaggctaaggatgcccttcaggtaccccgaggtaacacgcgacactcgggatctgagaaggggactgggacttctttaaagtgcccagtttaaaaagcttctatgcctgaataggcgaccggaggccggcgcctttccattaaccactactcaccac

SEQ ID NO: 2802 - DNA, 1000 bp, Foot-and-mouth disease virus
acgcgacactagggtgtcgccctagtgtcgcgtaccgaccgtcaccggttgaaacgctactgctcagacctctggctgtcgtacctctattaggcaggcaggaaccacccttttggggcccacgcgttttcgcccttttggggcccgcggtcaccacaccgcgcctccactaggctgacaaccgtgcctcctctaggctgacaactgtcgcccttttagggcctacgaccttcaagttacggctttagcgtccctcccgctgccgactcgcctacgtgaacgctagctcgtcacccgacggcctacctttcacccgggccgtcttaaagaacgtctccgtcttttccgacgttaatggattgtaaccaaacgctcttgccgtcgtgtccgacgttaaaggactgtaaccataagaaacaccttcccgcaggaagtaaaacatgcacaaagtaaccagttttgcccgttttcatgagaaatgggacgtccgcgcacgaaacgcgccgttgctctttgcattcttgtacaaacacgatctcacgcaggaatctcagaccaactcaacccgtgcatctgcaagtttcgcccggtctttccgggtctagagagacaaacagttgtactgagaccgactccacgattagtctactggcgggtattagtaacactcactttgcttcgtagcggagcacttgagcggtgggagtccccccatggtaacatggacccaccgggccaaaagccacgcttcatgcctcaagtgtgtgcaaccccagcacggcaatttgattgtgaaacctatcttaaggtaacactgagactggtacttggtttctggagacaggctaaggatgtccttcaggtaccccgaggtaacatgcgacactcgggatctgagaaggagactgggagttctgtaaaactgcccggtttaaaaagcttctatgcctgaataggtgaccggaggccggcaccttttccttttaccacaactaatttt

SEQ ID NO: 2803 - DNA, 1000 bp, Foot-and-mouth disease virus
atcggcagctcttgcgttgcactccacacttacgcccgtgcactgacgggaaccgatggactgtcgttcagccacccacagctggactcacagcaccgcgtggccattttagctggactgtccggacgaacaacgcttgcgcacttcacgtgaccgtttagtactcttaccactttccgcctacttggtcgttagcgctgcttttgggcactcctgttgggggccgtccgacgctccacggtctcccctctgtgacggactacggtgatggggccgcctcgtgcgagttagtcgtttggtgtgctttggctgccacccggcgcccgcctttcatttttaccgtcgttcccgacgttaacgggttgtaaccacacgcttgtaccgcctttcccggcgttaacgggatgtaaccataagatagaccttcacccggaagtaaaacggcaactacactcagttttgcccgttttcatgagaaatgggacgtctgcgcacgaaacgcgccgtcgcttgaggaagacttgtacaaacacgatctatgcaggtttccacaactgacacacaccgtacaatttgaagctccgcctggtctttccaggtctagaggggcgacactttgtactgtggctgactccacgctcggtccactggcgggtgtgagtaacaggactgttgcttcgtagcggagcatgttggccgtgggattccccccttggtaacaagggcccacggggccgaaagccacgtcttaacggacccaacatgtgtgcaaccccagcacggcaactttactgtgaaaaccactttaaggtgacactgatactggtactcaaccactggtgacaggctaaggatgcccttcaggtaccccgaggtaacatgcgacactcgggatctgagaaggggactggggcttctttcaaagcgcccagtttaaaaagcttctatgcctgaataggcgaccggaggccggcgcctttcttttaccattactaaacca

SEQ ID NO: 2804 - DNA, 1000 bp, Foot-and-mouth disease virus
ggcagctcctgcgttgcactccacacttacgcccgtgcactcgcgggaaccgatggactgtcgttcacccacctacagctggactcacggcaccgcgtggccattttagctggattgtactcttaccaccttccgcctacttggtcgttagcgctgtcctgggcactcctgttgggggccgttcgacgctccacggtctcccccgcctgacggactacggtgatggagccgcctcgtgcgggttggtcgtttggtgtgcttcggttgtcacccggcgcccgcctttcatttttaccgtcgttcccgacgttaaagggatgaaaacacaagcttgaaaccgtcttgcccgacgttaatgggttgtaaccacacgcttgtaccgcctttcccggcgttaacgggatgtaaccacaagacaaaccttcacccggaagcaaaacggcaaccacattcagttttgcccgttttcatgagaaacgggacgtctgcgcacgaaacgcgccgtcgcttgaggaagacttgtacaaacacgatctatgcaggtttccacaactgacacaaaccgtgcaatttgaaactccgcctggtctttccaggtctagaggggtaacactttgtactgtgtttgactccacgctcggtccaccagcgagtgttagtaacagcactgttgcttcgtagcggagcatgacggccgcgggaatccccccttggtgacaaggacccgcggggccgaaagccacgtcctgatggacccgtcatgtgtgcaaccccagcacggcagctttgctgagaaaaccactttaaggtgacactgatactggtactcaatcactggtgacaggctaaggatgcccttcaggtaccccgaggtaacaagtgacactcgggatctgagaaggggacaggggcttctttaaaagcgccctgtttaaaaagcttctatgcctggataagcgaccggaggccggcgcttttctactaaaccactactgacttg

SEQ ID NO: 2805 - DNA, 1000 bp, Unknown
  Description of Unknown: unclassified Aphthovirus sequence
agggggcactagggcgagaccctagtgtcgcgtaacgaccgtcaccggttgaaacgctactgctcagacctctggctgtcgtacctctattaggcagacaggaaccacccttttggggcctacgcgttctcgcccttttggggcccgcggctgtacgccgcgcctccactaggctgacaaccgtgcctcctctaggctgacaactgtcgcccttttagggcctacgaccttcaagttacggctttagcgtccctcccgctgccgactcgcctacgtgaacgctagctcgtcacccgacggcctacctttcacccccctccccctaaagaacgtttccgtcttttccgacgttaatggattgtaaccaaacgctcttgccgtcttgtccgacgttaaaggattgtaaccataagattcaccttcccgcaagaagtaaaacatgcacaaagtaaccagttttgcccgttttcatgagaaatgggacgtctgcgcacgaaacgcgctgttgctctttgcattcttgtacaaacacgatcttacgcaggaatcttagaccaacccaaaccgtgcaactgcaagtttcgcccggtctttccgggtctagagagacaaacagctgtactgaagccaactccacgtttggtccactagcgggtgctagtaacactcactttgcttcgtagcggagcacatgagcggtgggaactcccccatggcaacatggacccaccgggccaaaagccacgcctcgtgcctcatgtgtgtgcaaccccagcacggcaacttgtttgtgaaacacaccttaaggtgacactgatactggtacttgacttctggagacaggctaaggatgtccttcaggtaccccgaggtaacaagcgacactcgggatctgagaaggagactgggagttctataaaactgcccggtttaaaaagcttctatgcctgaataggtgaccggaggccggcaccttttcctttttaaaccactaaattct

SEQ ID NO: 2806 - DNA, 1000 bp, Foot-and-mouth disease virus
acgacagtccctgcattgcactccacacttacgttgtgcgtacgcggggcccgatggaccatcgttcacccacctacagctggactcacgacaccgcgtggccattttagctggattgtgcggacgaacaccgcttgcgcttctcgcgtgaccggttagtactcttaccaccttccgcctacttggttgttagcgctgtcctgggcacccctgttgggggccgttcgacgctccacgggttcccccgtgcggcaactacggtgatggggccgtttcgcgcgggctgatcgcctggtttgcttcggctgtcacccgaaacccgcctttcataagttttaccgtctgtcccgacgttaaagggaggtaaccacaagcatactgccgccttccccggcgttaacgggatgcaaccgtaagacacaccttcatccggaagtgaaacggctgcgtcacatagttttgcccgttttcacgagaaatgggacgtctgcgcacgaaacgcgccgtcgcttgaggaagacttgtacaaacacgatctaagcaggtttccccaactgacacaaaacgtgcaacttgaaactccgcctggtctttccaggtctagaggggtaacactttgtactgtgtttggctccacgctcgatccactggcgagtgttagtaacagcactgttgcttcgtagcggagcatgacggccgtgggaactcctccttggtaacaaggacccacggggccaaaagccacgcccacacgggcccgtcatgtgtgcaaccccagcacggcgactttactgcgaaacccactttaaagtgacattgaaactggtacccacacactggtgacaggctaaggatgcccttcaggtaccccgaggtaacacgcgacactcgggatctgagaaggggactggggcttctataaaagcgctcggtttaaaaagcttctatgcctgaataggtgaccggaggtcggcacctttcctttacaattaatgaccct

SEQ ID NO: 2807 - DNA, 1000 bp, Cardiovirus B
tagcatcttcgcggtaaagaacaccccaggggtaacccctttgaacgcgggactgcgatagtgccaccccacgtctttcccactcctaacccgactcccacctcgggtccaatgaaaggaccaaataattcatcccttgaatgttggctaatcagaggaaagtcagcattttccggcccaggctaagagaaacatataagttagatttgattcaaatcccttgacgaattcgaaacgagatgttctccctcccttgccgcttgttcacacccatacatttaattcggcctcctgtgacaagcccctcggtgaaagaacctctctcttttcgacgtggttggaattaacatcatttccgacgaaagtgctatcatgcctccccgattatgtgatgttttctgccctgctgggcggagcattctcgggttgagaaaccttgaatcttttcctttggaaccttggttcccccggtctaagccgcttggaatatgacagggttattttctttatcttatttctactttcacgggttctatccgtgaaaagggtacgtgttgccccttccttcttcggagaattcacacggcggtctttccgtctctcgacaagtgtgaatgcaacatgccggaaacggtgaagaaaacagttttctgcggaagtctagagtgcgcatcgaaacagctgtagcgacctcacagtagcagcggactcccctcttggcgacaagagcctctgcggccaaaagccccgtggataagatccactgctgtgagcggtgcaaccccagcaccctgattcgatgaacgttctttacggaaccagaggatggttttcctaagccctccggtagagaagccaagaatgtcctgaaggtaccccgcgtgcgggatctgatcaggagaccaattgactgtgctttacaccgtcactttggtttaaaaactgtcacagcttctccaaaccaagtggtcttggttttccaattttattaactggcaat

SEQ ID NO: 2808 - DNA, 1000 bp, Foot-and-mouth disease virus
aaagggggcgctagggtcgcacccctagcatgccatcggcagctcctgcgttgcactccacacttacgctcgtgcactcgcggggactgatggactgtcgttcacccacctacagctggactcacagcaccgcgtggccattttagctggattgtgcggacgaacaacgcttgcgcacctcgcgtgaccgtttagtactcttaccattttccgcctacttggtcgttagcgctgccttgggcactcctgttgggggccgtccgacgcttcacggtctcccccgtgtgacggactacggtgatggggccgcctcgtgcgagttggtcgtttggtgtactttggctgtaacccggcgccctcctttcatcccccctaagttttaccgtcgttcccggcgttaaagggatgtaaccacaagataacccttcacccggaagtaaaacggcaaccacactcagttttgcccgttttcatgagaaatgggacgtctgcgcacgaaacgcgccgtcgcttgaggatgacttgtacaaacacgatctaagcaggtttccacaactgacacacaccgtgcaatttgaaactccgcctggtctttccaggtctagaggggcgacactttgtactgtgattgactccacgctcggtccactggcgggtgcgagtaacaggactgttgcttcgtagcggagcatgttggccgtgggattccctccttggtaacaaggacccacggggccgaaagccacgtcctaacggacccaacatgtgtgcaaccccagcacggcaactttactgtgaaaaccactttaaggtgacactgatactggtactcaaccactggtgacaggctaaggatgcccttcaggtaccccgaggtaacacgcgacactcgggatctgagaaggggactggggcttctttaaagcgcccagtttaaaaagcttctatgtctgaataggcgaccggaggccggcgcctttcttttaccattactaaactg

SEQ ID NO: 2809 - DNA, 1000 bp, Foot-and-mouth disease virus
cgactcccgcgtcgcactccacacttacgtctctgcaagtgtaggaaccgacggactgtcgctcacccacctacagctgaacccacaacaccgcgtggccattttagctggattgtgcggacgaacgccgctcacgcatgtttcgcgtgaccggtcaatactcttaccactttccgcctacttggtcgtcagcgctgttgtagggcactcctgttgggggctgttcgacgctccgcggtctcccccgtactgagactacggtgttggggccgccacgtgcgggccgctcgcctggtgtgcttcgactgtcacccgaagcctacctttcaaagtaacaccgtcgctcccgacgttcaaagggaggaaaccacaagcttgcaccaccactcccggtgtcaacgggatgtaaccgcaagatgaaccttcacccggaagtaaaacggcaacttcacacagttttgcccgttttcatgagaaacgggacgtttgcgcacgaaacgcgccgtcgcttgaggaagacttgtacaaacacgatttaagcaggtttccacaactgataaaactcgtgcattttgaaaccccgcctggtctttccaggtctagaggggtgacactttgtactgtgctcgactccacgctcggtccactggcgggtgttagtagcagcactgttgcttcgtagcggagcatggtggccgtgggaactcctccttggtgacaaggacccacggggccaaaagccacgtccagatggacccaccatgtgtgcaaccccagcacggcaaccttactgcgaacaccaccttaacgtgacactgatactggtactcggtcactggtgacagactaaggatgcccttcaggtaccccgaggtaacacgggacactcgggatctgagaaggggattgggacttctttaaaagtgtccaatttaaaaagcttctatgtctgaataggcgaccggaggccggcgcctttccattacctactactaaatcc

SEQ ID NO: 2810 - DNA, 1000 bp, Foot-and-mouth disease virus
agggggcgttagggtctcagccctaacatgccaacgacagctcctgcgtcgcactccacacttacgtctgtgtgcgtgcgggaaccgatggactttcgttcacccacctacagctgggctcacggcaccgcgtggccattttagctggtttgagcggacgaacgtcgcttgcgcgcctcgcgtgaccggctagtactcttaacactccgcctacttggtcgttagcgctgtcctgggcactcctgttgggggccgttcgacgctctacggtctcccccccgcagcagtctacggtgatggggccgcttcgtgcgagccgatcgtttggtgtgcctcggttgtgaccttctcgtccgagtaaaggacggtaaccgcgagctttaaaccgcctttcccggtgttaacgggatgtaaccacaagatggaccttcgcccggaagtaaaacggcaacacacacagttttgcccgttttcatgagaaacgggacgtcagcgcacgaaacgcgccgttgcttgaggaggacttgtacaaacacgatttacgcaggttcccacaaccaacacaaaccgtgcaatttgaaatcccgcctggtcattccaggtctagaggggtgacactttgtactgtggttgactccacgctcggtccactggcgagtgtgagtagtagcactgttgcttcgtagcggagcatggtggccgcgggactccctccttggcaacaaggacccgcggggccgaaagccacgtctttgacccaccatgtgtgcaaccccagcacggcaaccttactacgaaaaccactttaaagtgacactgatactggtactcaaccactggtgacaggctaaggatgcccttcaggtaccccgaggtaacacgcgacactcgggatctgagaaggggactggggcttctgtaaaagcgcccagtttaaaaagcttctatgcctgaataggcgaccggaggccggcgcctttccctatctaccattacttac

SEQ ID NO: 2811 - DNA, 1000 bp, Cardiovirus B
agcatcttcgcggtaaagaacaccccaggggcaccccctttgaacgcgggacctgcgaaagtgccaacccacgtctttcccactcttatcccgattcccacctcgggtccaaagaaaggaccaattatttcatccctcgaatgctggctaatcagaggaaagtcagcattttccggcccaggctaagagaaacatataagttagatttggttcaaatcccttgacgaatttggaacgagatgttctccctcccttgccgcttgttcacacccacacatttaattcggcctattgtgacaagccccttggtgaaagaacctctctctttccaacgtggttggaattaacatcatttccgacgaaagtgttatcatgcctccccgattatgtgatgctttctgccctgctgggcggagcattctcgggtcgagaaaccttgaatcttttctcatggaaccttggttcccccggtctaagccgcttggaataagacagggttattttctttatcttgtttctacttttatgggttctatccataaaaagggtatgtgctgccccttccttcttcggagaattcacacggcggtctttccgtctctcgacaggtgtgaatgcagcatgccggaaacggtgaagaaaacagttttctgtggaagtctagagtgtacatcgaaacagctgtagcgacctcacagtagcagcggactcccctcttggtaacaagagcctctgcggccaaaagccccgtggatcagatccactgctgtgagcggtgcaaccccggcaccctgattcgatggacattctctacggaaccagagaatggttttctcaagccctccggtagagaagccaggaatgtcctgaaggtaccccgcgtgcgggatctgatcaggagaccaaatagcagtgctttacgctgttactttggtttaaaaattgtcacagcttctccaaaccaagtggtcttggttttctaattttattgaatggcaat

SEQ ID NO: 2812 - DNA, 1000 bp, Cardiovirus B
gcatcttcgcggcgaagaacaccccaggggtaccccctttgaacgcgggacctgcgacagtgccaacccacgtcttttcctactcccatcccggctcccacctcgagtccatagaaaggaccaagtacatcatcccttggatgctggctaatcagaggaaagtcagcattttccggcccaggctaagagaaacatataagttagaaatgatcacaatcccttgacgaaatcagaacgagatgttctccctcccttgccgcttgttcacacccacttcattaattcggccttttgtgacaagccccttggtgaaaggacctctctctttctgacgtggttggaattgacatcttttccgacgaaagtgctatcgtgcctccccgattatgtgatgttttctgccctgctgggcagagcattctcgggttgagaaaccttgaacctcttcctttggaaccttggttcccccggtctaagccgcttggaatatgacagggttattttccttatcttatttctactttcatgggttctatccatgaaaagggtatgtgttgccccttccttcttcggagaattcacacggcggtctttccgtctctcgacaagtgtgaatgcaacatgccggaaacggtgaagaaaacagttctctgtggaagtctagagcgcgcatcgaaacagctgtagcgacctcacagtagcagcggactcccctcttggcgacaagagcccctgcggccaaaagccccgtggataagatccactgctgtgagcggtgcaaccccagcaccctgattcgatgaacgttctttacggaaccagaggatggttttctcaagccctccggtagagaagccaagaatgtcctgaaggtaccccgcgtgcgggatctgatcaggagaccaattgacggtgctttacaccgtcactttggtttaaaaactgtcacagcttctccaaaccaagtggtcttggttttctacttttattgactggcaat

SEQ ID NO: 2813 - DNA, 1000 bp, Cardiovirus B
cattttcgcggtgaagaacaccccaggggtaccccctttgaacgcgggacctgcgagagtgccaacccacgtcttttccctcttttaccccgattcccacctcgggtccaatgaaaggaccaaacatttcatcccttgaatgctggctaatcagaggaaagtcagcattttccggcccaggctaagagaaacatataagttagatttgatttgaatcccttgacgaattcggaatgagatgttctccctcccttgccgcttgttcacacccactgttttgattcggccccttgtgacaggccccttggtgaaagaacctctctcttttcgacgtggttggaattaacatcacttccgacgaaagtgctatcatgcctccccgattatgtaatgttttctgccctgctgggcggagcattctcgggttgagaaaccttgactcttttcttttggaaccttggttcccccggtctaagccgcttggaatatgacagggttattttctttattcttgattctacttttatgggttctatccataaaaagggtacgtgctgccccttccttctttggagaattcgcacgacggtctttccgtctctcaacaagtgtgaatgcagcatgccggaaacggtgaagaaaacagttttctgtggaagtctagagtgcacatcgaaacagctgtagcgacctcacagtagcagcggaaccccctcttggcgacaagagcctctgcggccaaaagccccgtggataagatccactgctgtgagcggtgcaatcccagcaccctggttcgatggtcattctctacagaaccagagaatggttttcttaagccctccggtagagaagccaagaatgtcctgaaggtaccccgcgtgcgggatctgatcaggagaccaattgacagtgctttacactgtcactttggtttaaaaactgtcgcagcttctccaaaccaactggtcttggttttccaattttattttatggcagt

SEQ ID NO: 2814 - DNA, 1000 bp, Cardiovirus B
caccttcgcggcgaagaacaccccaggggtaccccctttgaacgcgggacctgcgagagtgccaacccacgtcttttcccacttttaccccggttcccacctcgggtccaatgaaaggaccaagcaattcatcccctgaatgttggctaatcagaggaaagtcaacattttccggcccaggctaagagaaacatataagttagatttgattcaaatcccttgacgaattcggaacgagatgttctccctcccttgccgcttgttcacacccatgttttagattcggcctcttgtgacaagccccttggtgaaagaacctctctcttttcgacgtggttggaattaacatcatttccgacgaaagtgctatcatgcctccccgattgtgtgatgttttctgccctgctgggcggaacattctcgggttgagaaaccttgaatcttttcctttggaaccttggttcccccggtctaagccgcttggaatatgacagggttattttctaaatcttatttccacttttgtgggttctatccacaaaaagggtacgtgctgccccttccttctttggagaactcgcacggcggtctttccgtctctcaacaagtgtgagtgcagcatgccggaaacggtgaagaaaacagtttcttgtggaagtctagagtgcacatcgaaacagctgtagcgacctcacagtagcagcggactcccctcttggcgacaagagcctctgcggccaaaagccccgtggataagatccactgctgtgagcggtgcaaccccagcaccctgattcgatggtcattctctacggaaccaggaaatggttttcttaagccctccggcagagaagccaagaatgtcctgaaggtaccccgcgtgcgggatctgatcaggagaccaatcgacagtgctttacactgtcgctttggtttaaaaactgtcacagcttctccaaaccaagtggtcttggttttctaatttttgttgaatggcaat

SEQ ID NO: 2815 - DNA, 1000 bp, Unknown
  Description of Unknown: unclassified Cosavirus sequence
gctcactcctgtacaccgtgagtccgcgcagtgctgacttaacacttaagtaatgtttaggccgagaattacaccgctcggctcccacctttcaccaccgtgggattaacaggtggtcaatctgtattcctgtctttggttatgtcaaagcaatacggcatgtgcaatggcgcacaggcccaaggcggagatctagacctcacagattgtgttacagattaagaccatgctggatggtcacgttggagactgcatgtggcagtcttgaaacgtgtggtttgacgtctaaccattatagcagtgggtggagtactgcaaagatgtcaccgtgctttacacggtttttgaaccccacaccggctgtttggcacttgcaggacagtaggtttattttctttcagatctcttttctagtcgtgcatgttctgtatgcacgagcggagtgatactcccgctccttcttggacaggcggcctccacgtcctttgtggaactcaaggttgccaagtcactggtgtttgaagtgaagattagagaaacactagggagtttcatgtggctttgccagggattgtagcgatgctgtgtgtgtgtgcggaatccccctcgtggcgacacgagcctcacaggccaaaagccctgtccgaaaggacccacacagtggggcacccccagcccctccctacaaagctttgtgcaaatgaacttttgtttggcttttcttaagcttctctcacatcaggccccaaagatgtcctgaaggtaccccgtgtatctgaggatgagcaccatcgactacccggacttgtgagccttttcacagacgcatgtggtacccaagccccttccctacggggaaggggctttgctcactcagcacaggatctgatcaggagatctgtctccggtgctttacaccggggcacagatttaaaaatttcccaaggcctggcacacaacctaggggactaggttttccttttatcacaaagatgtcaat

SEQ ID NO: 2816 - DNA, 301 bp, Unknown
  Description of Unknown: unclassified Riboviria sequence
acagaggaatcaaaatcgctgaatactcttctcacgcttacactattgctcattattgcatctcctaaggacttatacatttgactcattttctactctagatgcactttccctccctctccatttattcacttgcactgaaaaaaactaacagacttaacaagcctttccgtctctcttgtctggatgtttgcgtctgtgctcttggggttcagcgtcctgggtatattattaacaggagccctattcccactagtccaccgactgacaagccaagtcgaccccaaggagattgaacatc

SEQ ID NO: 2817 - DNA, 304 bp, Unknown
  Description of Unknown: unclassified Mitovirus sequence
ctgtaccttcacaggttcagttaagacgaaatctcgtctttctctcctcaattggagttctatctttagttcttcttctgagagggtcccccagtcttgggtaattaggtagttacatcctaattacttcggccgggagttaggtcaagtcttttgatttgatattgcctcctaaaccgagtgacacccgccatccttccaaaggtagccgcagcccccacctaggggaaactgtaggatagtctctagagggaagtgacgaatggtcgtcggcctggtttagtaacatacaaatcagagtccc

SEQ ID NO: 2818 - DNA, 304 bp, Sclerotimonavirus betaplasmoparae
tcaagcttcgcatgaccggtaagtagttattttcattatttaataaaacttaggattaaaaaataatctagactacaatatgaaagatatcgcagttaatcttagtgtgttagttcattctttggaattattatcgaaaattctttctcggatcgaggaactaaataagtcagaaaatgagctagatgcaattggaacagaagaaacatggaccttagtataaccatgcattaggtttattttataaaacttaggagcaaatcacaattatccttaagtctttttttgtaattgaagtgaaatc

SEQ ID NO: 2819 - DNA, 305 bp, Unknown
  Description of Unknown: unclassified Flaviviridae sequence
caagtacgctcatagttctcgagccaaccacacgaaagctagttggggcctttaaatatggaaacttctagtcgtaaggtggggtatctcccctatgggtggtgaacgcttgttcgctgcaataatggtgagtagtctctagactaatgctacctagtgagacaacgattatctgtctcatgtaagatagcattagtttggcgagccaggttgtttgggagcaaccctctgtcgataaactacacagtctgataggacgcacgaccttgcccattatgtaggataaagaatggtctgtcaacaca

SEQ ID NO: 2820 - DNA, 308 bp, Unknown
  Description of Unknown: unclassified viruses sequence
gcgattggttcaatcgccaatttgagaaagctttaattgatctcgacgtcgcttctgtacccggtataacggccctttctaagtatggcactaccttaggagaaatcctagggtttgatggcaaggcttttgatgcagagcgcatcaacatatttagaatttatgttctagatagattcaaaactttactccgaggagaagaatatgcagatccaattaagttattcataaaacaggaaccgcacaagattaagaaaatagaagacaatcgtcttcgcttgattagtgctgtctctgtggtggatacg

SEQ ID NO: 2821 - DNA, 308 bp, Unknown
  Description of Unknown: unclassified RNA viruses ShiM-2016 sequence
actcagcgacaactcggaccataccgagagatagaaaaggagccagagtcggcttggtagacccccagaaggaaaactgggagtactgggaaacccggcaacccaccgtgaagaggtagattagccagataggaagacgtttggaccttacgaggttgagcgcacatgggcattaatgtcccggtgttagtgattacggagagatggacgcaatgtacccttagcgacatctagacgcctaatacgagaggcggagcgctatttagcgcagggggccagcccgagtgccgccttcaagttatcgagag

SEQ ID NO: 2822 - DNA, 309 bp, Unknown
  Description of Unknown: unclassified RNA viruses ShiM-2016 sequence
taaaacttcttaccccaaaggtaggatttgcaatcgcagtgaccctagcagcaaagttttataatttctatcccaaagatagacgaggtgagcgtactcgataacgtctcagccaatgttaacttggctacgtaataaagtcaatttgatgataattagcgtgttacaacgcgtaaacacaataataaaccaacaaatcgcagagcggcagttagctagcaatcaagtatccacagtgtgatatatgtcaaatcaaccaagatattttcctctagagatttccaccacagaagagatagcagagcaatc

SEQ ID NO: 2823 - DNA, 314 bp, Sclerotimonavirus fusarii
tcatccccaaattccccagactccccacacactgactgcgacagaggtatttaataaaacttaggagtaaactctagatgcgcacaatgacgacctgccaaaaagcattggaggatttggcgaatgtgctcgacattctaacgagatgtctctccgaggctactcaagagaagtctgatttcgaggagattcatactccttctgacgacgtgatttctatttcttctgctgagcaaagtgcattataaagggcaacgttggtattagattatataagtcgtgtattaaataaaacttaggagataaccgcaatc

SEQ ID NO: 2824 - DNA, 314 bp, Unknown
  Description of Unknown: unclassified RNA viruses ShiM-2016 sequence
tatcacattttatttaataggcttaatatatgtaactatttagtttacagcttattgaatacaatttccatttacctaatttataatcatattcgtattaaagtattcacatttttcatagaagatcttttgaattccgctctagatatttaagttttgaagtattagttttgaaagtaataattatcacgattagtaattccagtcttttcgactataagaaaccttcgaccgttcggtaatctctaaccaaagaagtcctgattgtatttaattttagggggtgtatttattcattcgtcaccatagtacaa

SEQ ID NO: 2825 - DNA, 317 bp, Unknown
  Description of Unknown: unclassified Riboviria sequence
ccccagcaaagtctagatgctggataattgacatccgctgggcgaatgtcgtagtagctgagagcaggcaggctcgttttattaatgattttaagccagtcgtttttgcttggcacttgcaggttctattgaaccgccggcccctattggccaactccgctggtcggagcattttagaaattgtttttgattttcctgtcggctggtccgatgagagcggtcttttggccgattttgaatcatctgttttggatattatacgtatccgtattttaaatgactctgaggtcgatgacgagattaccgcgcagcagctg

SEQ ID NO: 2826 - DNA, 318 bp, Unknown
  Description of Unknown: unclassified dsRNA viruses sequence
ttttggaaaattatacgcctctgtttctagagtttcttttccaatgcccatagagtttggtacccatgctcctaagggtttgagccaattcggtaccgggggtaggtttaagcagcgggtttctactccctcccgcactgagttctaccggtattgtaggaccaggctggcaatccggaccagcctgtaggatggatatctcaaggcgatatagttgtcttttcgtggctatggggttagaacggcgctccctactcgatccgagggagcagccccattcgctgtacgcgagactagcacattagctgcctatatctc

SEQ ID NO: 2827 - DNA, 319 bp, Unknown
  Description of Unknown: unclassified Picornavirales sequence
aagtgttaacactcccctcctgtagcttactccacggttatacaggtagtattatagtgggtgcgtctgtgtgagtggtatgtagcagactaagattctttaccaattttgaggaaatggcctcgatcctaacccgattgtgttaccgcctccatcactttgccccatattacaggttatgcattgagtaccgcttcttgatgtatgatgactggaaggctttgtgagatctcgttctcctgacaaacaggttgttatagagttgggcgtccccccgaaaacaaaaacggcaactggtgagctgactgatctagaaagc

SEQ ID NO: 2828 - DNA, 322 bp, Unknown
  Description of Unknown: unclassified RNA viruses ShiM-2016 sequence
atgggcagctatatattagctgcacggtagatacttttcaagcaagaggccagtgcagaccccttggtcgtatccagattttgcctagtgcgttaaaagagtccatcctcgccgggtatccagattaccggaggacctcatcagcacgtctgaagcggaatatatacgatagatcactagagacaagtctagacggatcagttagttggatttctctgcagtctgtaacgacgagagtgccagcagagctgagcgacctctattgatcgctgtgcacacccccgaactgacaacacgagatagaatcacttttcggcccatc

SEQ ID NO: 2829 - DNA, 323 bp, Unknown
  Description of Unknown: unclassified RNA viruses ShiM-2016 sequence
acgggctctgctccgactctggttttgaatccccgttttcaattttggggttaccagagattgtggtgcgcagtggggctatccctaggaaaactagctctagaattagtttcttgaatcagtttagtttaggattagattttagatctcctaacccttctttacacaacgctttagtagcagtcgagagacgtgtctttactgtaggcaaaggcacggagattattcttcccccgcaacctgaggaaaacatttttcacagcttagattactttagagatgctgtggtgagggaagtcggcttttgtaagacctacaccccc

SEQ ID NO: 2830 - DNA, 327 bp, Unknown
  Description of Unknown: unclassified Nairoviridae sequence
cacaaagaaacttacggctcagcaaccaaaactgtgctactggatcattgtttgtgtattaagtgcttcatattcatatttggtaatgtggtgtatctgcatacgtcactttatctccatttgcattatattatctttcattattgtcttctcttagatataggtatagttagtaataagctgtgaaattctagatagttgaactatagtaaactagtagacattaagaattaaatcactgacaagtagcagataaatcattttttcttaaactggaaagtaagtaaatacccacaagcaactgctgacagaatttgatgagtgaag

SEQ ID NO: 2831 - DNA, 336 bp, Unknown
  Description of Unknown: unclassified viruses sequence
aataaattaattggtcctaatttattttctttttctgtgtccgaccagcacaaatgattttgtcgttttgacaataattaaacaacagttactctagaacgtcatctaggaggagttctatgttctaacggttctcattatgaggcgcttgaattttggaataacctttgttacagttctctgagtttttgcacgttttttccattaaaaacgtgcagcctgtgttaggtttataaacactagggaaacgccccgaaagtgcgacttgcagataattgttgtcatgctgcattgtatttttacaacacggcttatatagccttaaccgaagattcc

SEQ ID NO: 2832 - DNA, 342 bp, Unknown
  Description of Unknown: unclassified Metaavulavirus sequence
tcacaatatcttcagaagattataacggcttaacaacaagaccatctaaatactatattacatgcatctatacgattcctttaaaataattaaattaatgacagtgacacaatattacaaaataatcttctagataatcctaaattgccaccctggaccaatttctcattctgatttaacagtgataccttcaccatttgtttttgtaatgatctagtatcagattctattggttttgagctttccaataataaagattttgaaccatcagttctaaaaaaaaccttttgggtgggtgaaatggaacttgggggcgacccctagcctgagaatatcccaaca

SEQ ID NO: 2833 - DNA, 344 bp, Unknown
  Description of Unknown: unclassified Dicistroviridae sequence
tcttgctatcttaggtaaaatgagaggttaaaataagttagtagtgctatttcggataagatgttagttatttaactttactgcttaggatgcatcgtggcagccccataaaaatccagagcccctccctcgtttctagaagattaagtcgtcaatagaaattaaataatagacttgcgtcaaaatataatgataataatcctagtaatagatctgataatacatataatggtagtttaagtaatgaagatgctccccctactccccaaaatgcacaagaacaggtacaaataacaacttttgaagctgatcttgctgtattacccgagcatgtcccaggagaa

SEQ ID NO: 2834 - DNA, 356 bp, Unknown
  Description of Unknown: unclassified Picobirnaviridae sequence
cgcatatcctctccctcttttctcccttccccctccccgacctttttcccctctacggcctcggattgcggactgatatgacgcgcctgacgtggaattcaggaattctggaactgggggacttcgcccaagctgtgaaccggattaccgatgtagctccttgggtgcctcagggaagggaccagtagttctagagcacatgtgaagcactgacaaggggactgcgttgcatatccccgaccccggactctgtgtgatgatgctggattgccgctagcacagagaaaccacccttttagggctcgcagggcagtgtgtagcacctagtttgggaaagctaggctggtgtgtactgg

SEQ ID NO: 2835 - DNA, 357 bp, Unknown
  Description of Unknown: unclassified RNA viruses ShiM-2016 sequence
gggtgcccaacagatgccacaggtcaggggtgtgaatggtctaaagctattgaagagttcaattgtgttcttatcaatgggggtcatagggtgacctttgaccccattgagaggaagcagttgaataaaagctcggaattcccccctgatcgtttgcagtgggaaaccactgttgggatacccaaggaacgtaggtatgttagagtgtctagaataggtcgcgatgtaaatattattccatttaataatgatatacgaactttgcaacgggcggtcgttgaacgagtcttcactgtgaaaagtgatggtgagttttgtcggccaccccgtccagctaaggatcatttccaaaacgta

SEQ ID NO: 2836 - DNA, 367 bp, Unknown
  Description of Unknown: unclassified RNA viruses ShiM-2016 sequence
agagatcgagcgaaacgggtttcgatatatcggaaaaaccgatccaatcagtagaaatgtcggtgcttatggaacaaattcttacattgcgcaaagatttcctgattttgacagaatcgataagctcgaagagtactgcccgccagagttccacacacagcggcaaaacaacacagcagaactccgaagtttcgcagtccattcaaaaataagacgcgaattgttagataggatacaaccgttgacgacccagcaattcaattcggttttggatcgaagcgaggacgtgttttcaaaaattagagttgagatttctgatgactttctagattttgataaggttttaaaaattgtgctatctcttaat

SEQ ID NO: 2837 - DNA, 382 bp, Unknown
  Description of Unknown: unclassified Picornavirales sequence
tgatgagggtcgccatcccggttgtggtgacacaacgggcgtccctgcgctggcatgaggcctctttgaggctggagaatcgggatcggtaaccgaagagccccgtgagctagggttgactcctccgcctccctgaatgcggctaatcccaacccatgagcatccggtggcaatcccgccacaagggtgtcgtaacgcgtaagtcgtgggcggaaccgactactttgggaaggcgtgtttccattttatccattctactgtggttatggtgacaagttataaatctagatctatagcgtttgttgagagatatccaacaattgaacaaactcgcacagttcttttctttggaaggcttttctttggaaggcaaacagtgaaa

SEQ ID NO: 2838 - DNA, 384 bp, Salem salemvirus
acgcttctagaaggtctccaatcactactgttatctttcaatcagtctaatcaccgaacttgattgatttgcttttatcattaaataactcttaaaatcactaaaaaaaacctaggactcaagagaacgagacccaagacagtccgacaagcccggaaccctcccaagagaggaacgaaagccgacaccccgagaacccaccaagatccaacaacaaccgagccacacccaccacaccgccagaaatccagacaaagccccgaaacaatcacactcctagccatccacagcggcctccttcccaacgaattggaaacgccacccaccacgtgtcatccctgacacttgggcataggcaatcaactcactccataagtagtaaat

SEQ ID NO: 2839 - DNA, 384 bp, Unknown
  Description of Unknown: unclassified RNA viruses ShiM-2016 sequence
ataaaattcagtattgaacgtatgggtgtcctcaagccaccgttgtgacaggcgcctacttggctgaactgaatgagtgcctaaaattgtgttgtttacgcaaaccaactagggtattggtggcgagccaattacctgaaagctctagatgatgttgagcgttgttcatttgaggagtacccaaatctttgtgtacgagccgttcctaggaacgttgtcgagcacacattgatgtagggcccgattacaggacatgccattgactaatcagagtgagtacaattttaggggagtccactgtaagttcttttcggcccagtccccgtgtagacgcaactcacaaaacatgttgacaatgctgctttttatttgccctcccttctt

SEQ ID NO: 2840 - DNA, 388 bp, Unknown
  Description of Unknown: unclassified RNA viruses ShiM-2016 sequence
gccgttaaggccccgctgcgctgcttcttcggacgctgcgtactgctttgcagatcccggcctacacccttctcggaggtatgtatgccgtatagtcaccgctgcaggttctctgctacgggccgtttactcggcggtgtatttcttttacacttgacttgaggtcacatatgtccaaggacgagctcctccagctgctttatagtcagcgcgaatctattcagcttatatctcctaacgggggtcgtcaagacctttctgtcggggatatcggtgatgcttcgcgctattctgtttcgcaactgcagggctttactttggcttatgcgagcgtgctttatgaacacgctgacgaactcgtcgcctctagacttcttaaggaatcgtg

SEQ ID NO: 2841 - DNA, 391 bp, Unknown
  Description of Unknown: unclassified Metaavulavirus sequence
cttgtttagttaagttgaacggtgatggttacattcctcattgcacattgactcataactggcgttggtacaattaatctagttgacgaaagaggtcaactagcgtactctaacactaatattaatataaacacttaagcttaggctcacatctagatgtgaagaagcagtcactttaaattcattcaattaaattatcaattgatactgtactgaggcataaccacttacaacttagtgcacagccttattgctttacaatctgcagatagtggtaacttaggtcgaaatttagatttaaatgcataagtgctatactgttgatttaataaaaaaatgggggagaccaccaataaaacagcaactgccgctgctagaagtagacctaatc

SEQ ID NO: 2842 - DNA, 399 bp, Britarnavirus 3
ttctagaatagctagattttaacctatgtattattattgttttatgtttatatatctgaccatcatgtccttaaactgttcggaggcgcactcatgtgtcaacgtgacttatgtgaaaccaaaaatgagctgtacatactgattacggcagtcgaccttagtgtctaccccttaaatagactgacgcttgtgtatatctgggaagcataatgcttgtggctatttagctgcggaggtcctaccactccaccaatgtagagacaggacatcgctctgaggtgagctttgtacccgtgtaaataaaaataccttaccaactttactctaaaacaaaagtctgtggaggactataaactctacacttatgtgccccaatctggagaggttgggatttcacaa

SEQ ID NO: 2843 - DNA, 399 bp, Unknown
  Description of Unknown: unclassified RNA viruses ShiM-2016 sequence
acttgcaactaatcttcgagagtctaagaataagacactaatggctggtcaatccgctaataacggtctacagtacggtgaaactttttctacatcactattctggtaagaatgtaaatatacaatttgtcttatagacacctcaatgtgaaatgacgaacgaaaataacattgttgtattaaagcggctctttttagagttactaatcaagaacgcttgttggcagccccaatgaattctagatgttcaaatttgctaacgattaggctgttgttagtgaataaattaagcctgcgaattttataactgaaactttaaagcaagaacaacgacaaattttaactttcgcatcagaaggtgattccaaccacactaatgtgatagcaaaaagtttgcaa

SEQ ID NO: 2844 - DNA, 403 bp, Unknown
  Description of Unknown: unclassified Botybirnavirus sequence
gcaaataaaagagctgccttttgaagccttttatttgtaaggaaaatttatattgatcgtcattcaacgatccccgctcgggttagaaagcaccacaagcgcagtgacgatcgcttgtgagtagtagtcacactagatggtaaattctatttggaacctcggacactctcaaaccgccttgtcaggatatcagcggatgtgaatagacgtgtggaacacaacgtgcccaccacatcttcaactgctcctgttagtgtataaatcagaaggataggtaaaccgagatctctagagaagaggctacctggcactgctgacgggccgtagtatactacgatatcgggaggaattgaagccttctgtaatcccccagtacccaggctctctagggtaaagtgagaga

SEQ ID NO: 2845 - DNA, 411 bp, Unknown
  Description of Unknown: unclassified RNA viruses ShiM-2016 sequence
gaatgccgcaccttgactgctgtctgtacgtccggaagacctggacccaacaaaaccttgccaggtagcagtgttaacgccaaggaatgcgtttgtcattgtaaacgcagaaccaccaaattattcaactacagcattccagagttgaacgacagctatgtttggacgcacaaagggtgtgtgtgtaacgaactggtggctctaaaacaacggcaccaactcgatgatggtctcagatatgtttcaaagtctaacttgtctagacatctcagaccgttcatcaagacggttagtccctgctcggaagatactgtgattgcccacagtgcaggcgctaagcgtaaactccttctctcggccaaattaagccttgaagtctatcctattcaacctgaggatggcgcggtgaaa

SEQ ID NO: 2846 - DNA, 416 bp, Unknown
  Description of Unknown: unclassified Riboviria sequence
ccccgcaattgtcccaaagattgcggggagcgagcctcggtaatatatttggattagcatatacggattatatttatgtgcatatagaaggagataaattgactgacttaatatttcaaaatgctttactagacattccggattttacaacagtatcattatttcaacacgaaatatcatctaccgagagtggatacacattccaattctgtactgttggttatgcttcctattaccagcatagtagctatttcgtgctatttcaatctaattccgataatttccttccattaattaaagattataaaagtagttcagagtttgcagatgtatctcgcacaatttatgattggtacaaccctacatacgatgatctagactactgtagcttttataaagttgaccaaattaataaa

SEQ ID NO: 2847 - DNA, 422 bp, Achimota pararubulavirus 1
atgagtgctggccagagcattctcaagactcctccaccaggtccacagaacacagaaccccgaatgacaaagaagaggatttgcatcaccccactggacagaaggaaccaactcagatctgctacagcatccacaatcatcacaaagtcagcaatcgcatccttctctaaaaacaaactctctagcttgctcaaaattgcccaacagttaatcaatcatcccgtagatagatagatttccatgctaatacgcttaatgcatttaagaaaaaacttgaggatatatagtctgtatgattgaataaatgagatgggatgatcatcttagaagaaaagaagaatgggcccggaccccataaatgtccggacactctagattccaacatggctctatcaactcatcttagacaagcctattctgtg

SEQ ID NO: 2848 - DNA, 428 bp, Unknown
  Description of Unknown: unclassified Riboviria sequence
ccacctctgatatacaggtgaaagttgtatatcaaaagaaatttttattttagttttaatatctagttcacagggctataacctaccccttattagtaacaaaatataaaaactcggtacagaccggggtattgatttgatgactttaagatggaattttgtttagtttacggaaggcccgtagctcttatcaatccccctaagagttacccctattctagaattccattttaattttatcaataggtatggataaatattagatagtaaggcaaggtacgtatcttatagaaatgttagtaagtacggagaagtacgcgactctagttgaacgataaatagcatctcgagcttaccagtagccctggcgttaacaatagaatagctaaaggcttctcctgaaagcaaccgctactataagatagcgt

SEQ ID NO: 2849 - DNA, 436 bp, Dipteran anphevirus
atctaacaacattcaatttactaaccatagatataagatacatttaaagaaaaccgtagtaaaagtcaaatacagtatacatcgaaatggacccagtatattttactaccacttgtcccagatgtggtgaaggaattaaatatataagggttgaaaaaccacttccaactacacaaaatcaacccaaacagacaggttaaatcattacaaatttttcattttgatattaatcccaatttatttttacagaagcttttacatttctaattatttattatttattgaaacatatatgtctgttcttatcccatctcttatttctttatacatctacttttggacataattaaattattattcagttatttatcattttaacacagagattatgttctagaccctttaatatttaaacaaaaccgtagtaaaagtcata

SEQ ID NO: 2850 - DNA, 440 bp, Unknown
  Description of Unknown: unclassified Bunyavirales sequence
agaacaatcccaaaagctgtactgcctgtgccttttgtattggctccgaagtctgaattgcatgaccaaacatttgtacctttccctatgtcaactgctggtggtaaatgcgaccctgtcatgagactttggcaagcagcatctagaaattacaatcacagacctgcagactatctagcgtcaaagagagaaaggtttgacgagatgtatgaagatgaccctgaagagcagcggaagatacaggaaaagaataaagagaagaggggccttgcccatcgggctaacatcaaaggagaattagctgaagaggacctcaggctgctagcactagatggtgtgtttgggaagaagtttatgagcgatatggaaaagcaagtgaaatatgaagatagcaaaagaccttggaattggaacactgactgcactgatatagatgcttt

SEQ ID NO: 2851 - DNA, 445 bp, Unknown
  Description of Unknown: unclassified Totiviridae sequence
gtagcctatagccttgctcctcttaaggagggctagtatcatgagcgtcaattcatgacctgatatagctttatgcgaaaatatcggggtcaacaatggtgtattctgtgtgacggtagctccggtttccgtaattctagatagttaataactctagttcccttgtggttagtcgttgtaagcgctggcatagatgcactcaaacgatcagacgccgagtcggtgcaaaaggagtggtttggcagccacactctatagaccgattcattctgactcgcctattgttgactatctactactaccaatcgctattgctctcgtcatcctatcagttcgacttgttagtgtctactctcgctctagactaacaaggcttctagttgtttcaactagattcatataagaactgatctgtgacatccaactttcgttattcatcatcaaa

SEQ ID NO: 2852 - DNA, 448 bp, Unknown
  Description of Unknown: unclassified sequence
atcaacacaaatcgagaaaaaaacttttataatggcttctaattcagtactaaaaattagcactcatctggagatgaagtttagagaacctcctagaactagtaaagatgtattaagagccttagaactcattaaagacaattataatgggtttccggagaatttagaaattataatggtgttttatgtattgtcgggattcacatgtaaatatttaggaaaattaggtcaattctatatttataaaagtacattatctggagtatttaatggtaggtgatgggatacgattattcataattatttatcctccgggaaatgtctagataaatttttctgcactagatacagtagctgcaaccattagattttaacaagatgagcgtgaaaaaaacagataacacaaatcatattatatcatcttattataattcgaatctatctgaac

SEQ ID NO: 2853 - DNA, 455 bp, Unknown
  Description of Unknown: unclassified RNA viruses ShiM-2016 sequence
ctagaaatactgccgtactcttgctgactgttagtagaagtgttttatgtgtgacggacggatgtcaaacaaaggttgacatctctctcggcacattccaatacttcgctaaaccccctcctacaacacaatgtattgagcttgttacatctaccgctctagggaaaacagagtgttcccttcctccacactgtggagaagctcaatatgctgaggtcgacagtggatggttttctagagtcggagtctgtcaaggacttggactgacgaaaactactttgcaaggagcaccaactctaattggcaactggctttctgtatataatgttaccattactcgtattcccccagtcatagctgatgaacttgtagtcctttttgaccagaaatccaacgtgtactctttagtaccgcatttctatgttgagacatttttcattaaaacccaagatgga

SEQ ID NO: 2854 - DNA, 458 bp, Unknown
  Description of Unknown: unclassified Picornavirales sequence
aataaaatataaccgttatgtagttgaaattgaggaaacgatagtaggctgtggtcttgtccaactaagatcgggtagcaattttattgtccgattatgttgtccaaggctccttacgccgattactcataacactatattttattataattttaaggtttaatgtgatcttgcacgataaatgttgatgtgaaaacgtcgtgtattgctattaaacttgcgtacctatttaggtttactcatcaagatcgcggagtgcagcccactcgaaatctagatacatcaactattctattagattaggtagtcaatagtttagtataatattacctgcaaattttgaacaaaatactataacaaaaacgcaacaacaaatattgtctttttcctctgaaggagaatgtaacaggtctggagtattaccagatagagttagtattccacgccaatttctgtcg

SEQ ID NO: 2855 - DNA, 459 bp, Ollusvirus culvertonense
atcttcacaggttgcccctaacatatgacgactggcatgattaatgacaagagataccttagttttaagagtttttagagttagaccaaatgtaaccacattccatgaagtactattaacattaaccttagacataagttatgtattatttttctatttgtagttcttaattgctttttaaaaactcacagataaaaaaactcggttaatcaaagaaaacccacctgaaagacaaacaatctacttagattatgtctgctatttttcccaagaattcgaaatttgtatgcatattaccctaatcaggtttttacactagtgacgagtataaaagctctagactaataagaggaccagcccgatacatagatagttttaacagaggttgatggtcgagggagtatgatataataattcagctctcaatctatatcgtagtgatgatatgatccattcaca

SEQ ID NO: 2856 - DNA, 463 bp, Unknown
  Description of Unknown: unclassified Picornavirales sequence
aaaggactgttgtaatacagttgaatcaataagttgtgaatttgcagattgttgagtattcgttgtctcaatcttgtttgaggtgcttctgtggtggtcgcacttctagagtagctaagggtttgacacacatttaaatttcaagatcatgctagtagctgtcgagtcatttttccaaagaaagtccatgggatttacgtgatggacatgggtatgactccggagacggtgtaacgaggcagtaaagatcttgagatggcgtgtgtgaatgactccgccttgcattaatcacatgaaaagaccgttcggatagcggagctgacagtaggcacgtgatgattaatgtgactgtggaaacttagcgcgagattacttgtattctcaatctgctttaaagcaatgatgtgattcaggtgttaaaccaacgattgcatcgtgtgtaattagctagattggaagtggt

SEQ ID NO: 2857 - DNA, 464 bp, Unknown
  Description of Unknown: unclassified Tombusviridae sequence
agagcccgtgagatattttcactcctaatagtagccatgaaaccttgattggtggattggcgaagctaggggcagagatcgctgcacgtagcccatgagtgacacatgggcgcggactggtaatatgcagaactattctagagaggggggagcatacctaacagtgcccaccctggtccttggtaagtttgatggacccgggaaggagcccgaaatactccggagttgcgagactcccgcggccggcgtaatggcgaacatgggaaggtaaggcgcaccctaaatgcgcaagggacggaaaacctaattacaaaccacaactagggcagcagcccgactcgttgcgtgctacgaggataaactcgcattgcggtcagaggtggtcattgatacctgaccttaaacaatgtcggtttggcccgactggcccccgtagaggggctatcccactacaattttcaatt

SEQ ID NO: 2858 - DNA, 476 bp, Unknown
  Description of Unknown: unclassified RNA viruses ShiM-2016 sequence
ggggctgttagataatattagggaatttccaatggccttattggataaactttttaatgcacttattaaatacaagctagaaagtctacttttctcaggatgaatgttcaatactcagcacgagctaaaactgcaccacaaattgacctccgtttctatgtagtggaacgtaatggggaaattctagaagccttcgcaagataccatcacctaccacagcagcaaattgcctattttcatctggcaacacaagaattaggatctactggtggtatcttgcctaatcaacgcttcgcctcatatcgttactccgttccaccaggcttccaattacatccagaattgaataagtggttcaatgccacacccgctattataaaacgtgaagtgctgaagaaacctaacgtcgtcatgacgccaatttgtgctatactagatgctgagctggtgagtccttaccttagataatcaaacgt

SEQ ID NO: 2859 - DNA, 484 bp, Unknown
  Description of Unknown: unclassified RNA viruses ShiM-2016 sequence
aacatgatgtgatcttatattttagaataaattagtgatgtaaaatttgaaatatattgctatcatgttaacagagttacctatttaggtttacttccaagatgctctagaagcagcccttccaaaatctaggaaccatcactcgattatatagtttaagttgactatatagtttaaattataacttgctacaaatcaaaatacaattcaaaatacaacagatgacgatgctagtcgtgaaataagtcaagtacaaaacgtaacatttcttaatcaaggacaagaagttgaagataaagcactccctagcattgttgatattaacccttcatatttaaatgaaacattatacgatgtttctcatgatataccagattttttggaaagaccaataagagtgtggaatggattttttgataatacacaaacaccaaatacatcattggcaactttacgatttccagatgtattattacaaaacaga

SEQ ID NO: 2860 - DNA, 489 bp, Unknown
  Description of Unknown: unclassified Riboviria sequence
gtatatatcatcattatcatcatttcattatcattatcattatcatcatcacgtacgtactacattctaagttctgaccagcttagtcttatttgtcacatgagcaacattttagtgagtgtcggagcacaatcgagaataaagtatcgttatagcgcctcacgaagagtgtggatcacagttcaagtcaaaccgttattgttgtagggtatatgggtaacctcacactacaaacaaccgcggcattctatatttggatgaatatagtaattactagacctcaatgcttgaaacccgttgaactagtatagacaccaattcgttagtgatctagagttttgtaaattgacttaataatttaccgtcggagcccgcaagcccacctggaataattttctaattttcaagaaattagacgttcagccacgtacggctaccagatctaaaagagctcgtaatgcttaattacaccccaaacagattgaagaa

SEQ ID NO: 2861 - DNA, 493 bp, Unknown
  Description of Unknown: unclassified RNA viruses ShiM-2016 sequence
ggaagcaatgtccttactatgactttaaactagtaaaggtagtgacttacactcgtctcgtctagacgtaagtagccgagggtggtgaccaacaccacgtgattactgcggtataaggaatgtgacactttatgggaagaccaaaagtgtagagaaatcaaggattctatgtgatcttgcattcatgatatatggagtaaaatcatgattgtattgctatagaattgtcaaggtgctatttagtttcggtgtcctttggagcagtcctcctaaacaccaatcctccaaatttcaagcgttgtacagacgtcgtttgatcttaatattctggcctacaaatacaaacacaacacccgaagagagcgggaataatttctctcaaactaatgtagaagcatctgctacttctgaagtgcaagctactactatatttaatgatgatgccggtattaccaccagttctatcgacaatcctgcgtccatctatcaaaag

SEQ ID NO: 2862 - DNA, 495 bp, Unknown
  Description of Unknown: unclassified viruses sequence
gtacggcatcattcaccggagagagtgatctcacaacgaataagaaagacgttaagagcgttaacgacacggaaacggacgttttgcggttacctattcaggtcggcttccccgcgatagcagccctatcaaatggagcagtttccaacttcctaagcacttggtcgtgcgaacggattttacatcagaccagcacaaacatttgacaatataccagaaaacacccccaccccctatcttgctgataattcatcatcagtaacagacaacacaggtctatttggaaacacaacacatgagcaaactggaaccactggctttactgatcaatcagtcgaagtagtcgtcaatggcggagacttaacagcaggtctctttgaagatgtagttgcaacagatactactaataccatcgttgattatctatctagatatcgaaaagtttttgactatcacttcggttctaccattggttaccatcctattgcagatttc

SEQ ID NO: 2863 - DNA, 500 bp, Unknown
  Description of Unknown: unclassified Picornavirales sequence
aagaacatattgattaagttctttatattattacgcggatgatggcttgcgtgagggcctaccattcaaacggataatatacatagatcacttttatatgttttgtttttgtctttacatgtattcctttcaagaatatatggtgatgaagtcctgtaatgccattataggttaagaggcaaggtgtcttaatactaggtgaaacatgcaggcaggtctatttaagaattgattgataacgagactattaatgctgtgagttatttcgtgcaaaccgatcggataaacatttggcgacaaatgcctttgggcagagctgattaatttgcaggttaacattaatacgtattgtgcgtcgagcttcttttatagatatcggttgctagtattgacgaaatctagagtttgttttatgggactgctctgcggctaaagtaatagtgagttcctgactttaggcgtttcaagatgaaatcgtcgtttaaattttaaatctcatt

SEQ ID NO: 2864 - DNA, 501 bp, Unknown
  Description of Unknown: unclassified Riboviria sequence
tgagccccaactcatggaattcttgttatagatactaagtcaaaagatgtgacgttaatatcgtagtttactgtggtaaaacgctttaaatgtcgattggtattgacggtgaaatctttgtatataacgtgacgttaggtacagcatcatactccggtgaaacgttttatgtataagtcgatacactaacggtaaagttatattctatagttttctcttcaagttttaaaaatgggaatccccctttattttaattgcatttatattcgcgtaagatctcttcttacatgcgtcttattttgtgttcaacgacattatcaaccgcttatctgggatagcaacccgttaggatgtcgtcatggtgtactacctctagatagttaaaagctagcatgatccttaagcaggagatgattgtatctagagaaggataatagttcttctacggaagcaactattttattttattttatttttaagtcttatcttcaatgtgacctt

SEQ ID NO: 2865 - DNA, 502 bp, Reptile sunshinevirus 1
aaacggaaatgaatgactttgttaagatttgatgatcaagttcttcactaaaatatacactactcagaaagagtagattgtggactttgtattcaaagagttaaacccacgagtcatccttcaacagagtacgagagaactccacactcttcccaattaaaaaatagggagagggagagagattaggcatacctagatctagaagttcagattctcctatctttgagcgtgttgaacaactcccaaaaacctagtcattgaaggcttgagaagaaggcaaagaacacaaatcacttgtttttgaatacttactgtctctaagtatatggacaaagaccccctcatcacaaacattacctcttaattggatgattaaatgccaggttgagatactctaaaaatgaaagaattgaagttagggctgtagttatctatcaggatcacagggtggcttatttttcaaatatattgggttttaataagaaaattgaagggcattaaa

SEQ ID NO: 2866 - DNA, 506 bp, Unknown
  Description of Unknown: unclassified RNA viruses ShiM-2016 sequence
ccctagggggtggaattaaaattccaccttctagagatttttacccttaataaatgggttaacgatgataaatatttgagtaacactctcgtcaatgctcctagagttaacgaagatccaagtattttattactctcgtcaatgcttatttaatattgtatttagttttaagtttttatgtgtcgtggtgacctaaaaaccaaccaatttttaattcataatatcattttaattatatgataacccgtttaggctgtatattttatatgcgtgttatataatatcatttcattaaatttcatatattcattttaatttttgttaggtcattttcatccctaacaaattcctttggttcattttgagtttatgattttattattttgattagatgttttcgatcccctctttttattttaaaaattaaattacaaataaaagataataagacttctaccagagagagcagttctaaccctgcgcaggtagttgatacgtgtgttagg

SEQ ID NO: 2867 - DNA, 513 bp, Unknown
  Description of Unknown: unclassified Picornavirales sequence
gctactcacaaccttgttttctttctttgattgaatcaagccactgtgtttctccccacacacaaccactgtgtcttcttcggttgatatagtgccgctgtgctcccatcccacccattgcccttcttgatgtcggttctgttatttataacagcatgtctctggtttttttctttcggtgatctctcgcactagcatagattgcgagaacgatgcccttgaatcggtttcttcggactaacgaattcacataagtcacatatctttaaatgtccctctagacatgttaattagagggaaggtatgtatcagagtgtgtctacggtaccctgtatgtcaatggttagatgtacaaattagggatacggttatggcccaggaaacgttggtttacctgggttatacataacacaaatgctcattttgagcttctcttcttatgaatttattcatgcggcgaatggaacgcgcgtcttcggaccgtaagtactaatagccaaccacacatttgaa

SEQ ID NO: 2868 - DNA, 513 bp, Unknown
  Description of Unknown: unclassified RNA viruses ShiM-2016 sequence
ttactctacaggagttgacgttttctgtagtgctttagtttggagtagtcgaatctttcgaccccgggttatgagtaaatcctggggtttaaaattttactcgaaactaaatttaataatgaaaaccgagggagtagtaaaccctttacaaattcaaatggtggtattccacaaggactggatggtccgaatcacaaaagagttaactttgctctagaggatacactacatgattatagtgtagcttctgaagaaagtagtgacattacctcacttaggcaacgccaatttctttttgaaattggcgattgtggtaatatttctcagttttgccgtgctcgtcgcgctgctcgttctcttgttcgcttgaagtatgaggctcaatctttgttagagtctattgctgattccaacgttcaagccaatatagttggatttaccgatcacgatgctgggtatgaagcgggtttaatatcagcccgtgatgacagttattatgttagtgatgaaccc

SEQ ID NO: 2869 - DNA, 517 bp, Unknown
  Description of Unknown: unclassified Hepacivirus sequence
cccactagaaacgatcttctagaatggggaaccgcgacaagtgaatcacgatggactaagcgaccaagagtttaagtgacagggttgttcgcgtaaatcccggcttaaattcaaagttgaatatgtccgtacggagcactctagcaccggacgaaggatcgtggacggtgggcgtagggtacacagggtcagctgtgtataaactcagtactgaagcaggatttgggagcattgcagtcacactcaagtggagtactccgcctttaatacccgtatggggcaatactccgaggagggcgggttttcaaacgaaacttgagtaatactttatatggtctcaatatacacttgtggatgtagggaaaccagccatgggcggacccaaggcggcgcacctgacacatgcggcaagagaaaaaatccttcgggtgatctctgggtccattccaaaactatgaattgcgatttgtgcttacctcgtgttggttggctttgaacactaaatacaaacactaca

SEQ ID NO: 2870 - DNA, 519 bp, Unknown
  Description of Unknown: unclassified RNA viruses ShiM-2016 sequence
ttcgtgtttaattgagtttccggtctccataagaaaccggcctacttcctagggattagggagccacgtgtggtacacgctatgcagtggtgcgcaataaaacaccgggtttgatctcctttataatgatccatttgtcgatatatgataatcgtcgcaagttaatatgttcaattgtttattgtttctaggctgtatacacttgtgtttttacttgtaatcccttggctatttagccttactaatcaaggtggggagggtaattccaatacctagattctagatagcctctgaccttgagttaaaatcggaggtgaattattgtgactcgctattactaatacttctcaagaaggtgtcccttgtgagacaccaacaaatacctcgggtccttctgctcccgaggtgccttctcaggcagttaagcagaattgtttgtcaaagctagaaggtgcatcgtccactgcctttcaggaagatggtgctgtagtatctggaacaactagatctgttccatca

SEQ ID NO: 2871 - DNA, 527 bp, Alphachrysovirus anthurii
gactaagatccagtccaccttctagtgtgaccagtctcttattctattggttaatgtctcagcattgtctgccgatacattaaccatatgttactaatcttgtctctctctgttccatttactaagaaaacttgcttccattaccatccaaatctgctcacgttctcacatattcttgttgttatatccacactcgcactcggtacccgtgtacctccatgcttcatactctcgtcttcctctactgcacttctttgttctacatacttcggtatttcctcatccaccatctcattttccaaccggctctccctcctctctggttaatgaatagctcttctagaagcactctgacgtctcccatactggactcactctttaatttacccatcggcaccaactcatctgccactgcacttcttgttaacgcatcgcagtgtataccgtcataggttattcctattatcttatcatgttccactccttttgtaccaatcccatatgcttcatttattcttttatcatat

SEQ ID NO: 2872 - DNA, 527 bp, Salem salemvirus
ttatttatattaaagatcatgttgctcctcagtcagtatatataatttagctgattgacccgaattactacaacccacctttaaagctactagtctttgctcggccaacttttctaattagaataaagtcgctttccttgcagctaataatcctaaggctacagccaattgcttgactcctggaggttacacatgggtaatcatttgagcttgttcagataattacaagctgagattgagacaaaataataagaggaatttacctgtcctaatttaggtttagaagtgctctaagacagttaatcaattaataaaaaacttaggaatcacgtcaaatgaggcacacactgctctagaaccacacccaagcaccccggtttcctcttacacacccagcctgcatccccacaaaaacccaaggctttagcaagcccaagccaagcaagacgaaacccaaaaatcacggttcgactcttacctcattctccaccggttgcaattcagcctcagcatagcctaagggaaat

SEQ ID NO: 2873 - DNA, 549 bp, Unknown
  Description of Unknown: unclassified RNA viruses ShiM-2016 sequence
gcaaaaacctacgcacaatatggccttagtggtgtttggccttaatttatagcctttggttaatcgacgccctctttgaggagttaacggacggccagctatggtcaccagaaaaatagcactttagacaaatacatttaaaaattctatattttcttgaattaagattgaagttcttgaactgaaagtcttcaatgaattgtgcaatgtacgtgtaaacagttccccgcgagggtgtcccacgttcttagcgtttcgccattgcattttgaagttgttgcattagtatgtgatagaaccaatttctctatgacctggactgtttttaactagatggttatggcagtaatctagtagttttgtaccaggcattaactcaactttagtgatattgtctacttgatacgtcgcgttttaaaatttaaggacaataggcgaggcccgcgagttgtcaaatcttaagtctatacccagatggtaaatagtatcactctagatgaggctaactaaagacttcttaaaacttctgcctttctttttccaaaattt

SEQ ID NO: 2874 - DNA, 553 bp, Unknown
  Description of Unknown: unclassified Arlivirus sequence
tagtaattaagaaaaaccaagacgctcaggtctttcatctcttacaagaaaatagaatggcatctacaagctcatcaaaaacccataataccattgaatctgtaaatctggtatatgatttacgtgataataaaagtggattcaattatcgcggtatcataaaattggggagatctagaactgcggaattttcagaacaaacgagaaaaacaacaataaagaaatggataactaaaatgaagattgttcaagggaatcctgtagaacttttaatacaatggagcattcctacaaatcaagatcttgttgaattgtgcttctccacggagatcactagcactgatttgagtatcaatttgggagtccctcgatatgaaataaatattgctgatttggagatcataaagtatgaaattggactgagttcgactcctgctaccaaaactgaactgaactattagggattatttacacatagtatttggcttaattaattgattaagaaaaaccaagaccactcacgtcttattttcctccgtattcctatataaac

SEQ ID NO: 2875 - DNA, 555 bp, Unknown
  Description of Unknown: unclassified RNA viruses ShiM-2016 sequence
ccccctagccgggggcaagaacgcaagttcacctctagaatcacctgtacaggtgcgtatcagtgattggtacgttcttgtgcggctaggggtccaatacaactgctacttgcagtcggacacatttcagtgccggcatgtacgtggcatttcgcgacgcactcagcctaaaggaggattaacattgtgcgtatttcacacaaatataatcaacctacctggttagagtgtcggtccgataaaaacggcccgttaaggtacgaggaaattactgttgaaggtaattccagtactccagatcgacaaataccctataaggctgcaaagccgtatacaagggcagatgtctttctagatagcagtgtaccatctggcgtcccggctggagttagtcttttagacttgcctacagccgacgacgttgttgcatcgttgttatctgacgagcccacgttggcatcatctgtgtttcaaccctttgttgatacgtcggatatccagaatcaggcacttcaaaatgccattgagtatggaaatatcttactccttgtctct

SEQ ID NO: 2876 - DNA, 562 bp, Unknown
  Description of Unknown: unclassified RNA viruses ShiM-2016 sequence
tctaggccgatgacggaatttcgctccttcgggggcatgcacggggaacgtaccttcggggcgtgctggtaatactcccaacaattctagatgcgtactgcgctcagcgccgggcacaccgttaagtgcttcaccctggtccttggtaaggttgatggaccctgaagaaacagtaaatcaccgggagagtgaactctcgttacatcatggttcgcccagttgcaaacgcgtctagagacaactaggcagagcggcagagggaagtgagacactctctgaagcgattaaatccgcgtgctgtccgtgactatagctgccgccagcggggattggcgatcgttaagagaataaacccgcccacgcatttgggaccacattagtggtatagcaacaacaaccagtacggaatctggtcacgtaactttccggccagcccattggtttaccactaccacttcggtgttcttgtggcattgggacgtacgctaccgcgagggggccccgctctgggtgatgagacggttgatggtcccgtagaccacacttccccccctacgacatc

SEQ ID NO: 2877 - DNA, 566 bp, Unknown
  Description of Unknown: unclassified Hepacivirus sequence
gggggcccggcggaggaccaacgattgacgttcttcctggtgacgggaagtctctcgttggcagctccgaaaccgagcgctgcgttaacccgagttctagaatgctacgcgatcagctattcatggacgaagactcgagcggcactagggtaagggttcttcgggtaaatccctcctaatgcttaacgtttaataagttgttgaatactggtttgctacgcggacgaagctcggcagctccggcgccacggtcactggttgtgggttatccgggaacaaaccctccggttgggtaccgtaatataggaaccccataacccgggcctcccgaaaggagctcccggggtaccctaaccctgcaacgggcaaggacatcccactacgccgcccttcaaaggagttactcttccaatatattcttaggcgggttgtcaaagtgggccgcggccgtgcaggtcatcgggcttggggtagccatggggccaccaaggcggggagtccccctactcccctagaccaaaaatcctacgggtgaggtctggtggcactttttccttatattaacc

SEQ ID NO: 2878 - DNA, 572 bp, Myriavirus myriapedis
gtccttcgcttggtaattcaatgttaattgtcctttctgtcctcatgttacatgtgattttcactatctttccttaatttatcaatcgataattcaaaaaattggcagaccgtgttacttgccttattctagaatattttatttgtatataaaagtctgataatgttagtcttgtaattctttttatatattttaattactattcacattccgattttgactaagctgtcacaaagttaattaattaagacaacacaaatgaaattttttctatgtatattatatattcgtgttttaatgtttcaacatgtacaatttacaatgcatttttacaaacatacattaatcaactatttttcgaagagcttatcggtaagctctcaatattgaagtgcagttttacactcatgtacttaatggataccatttttaacaactatttttggcacattctcgtatgacactctatttagtattataaactttattaataaacaccctcggtctcataccaacctgttttaaaagcggttaattactgagtaattttagatttaacagctttgttcaca

SEQ ID NO: 2879 - DNA, 573 bp, Unknown
  Description of Unknown: unclassified RNA viruses ShiM-2016 sequence
caacaatgggagaattacacgtcaatttccgcacacagctccaagttgtcaaagtcaaaagctcagaaccaggcgcaggctattccaaaacaaagcgcaggctattccagctttgatgaaaatggatctgatgaaggggaaggaagacaatgtgaagatgctgtagatggtttcgaagactcaatagttaagaggatcaagaagagtgttgacaatcaatataaggttggaaaggaagagtttctgaatctaggggaaagaaaagaaacacttcaaaaggaacctaagactgaatgtgaacatctcaaatttgagaataaagtgatcaaaaagattataaaagaaataacttatactaagactaagcgtgtggatatcacatactcggatgaagcaactactagtgaactggaagaatatctcaagattcacgccaatgaattgaatgaagctggaaaccaatggtataatattaatccaacatctaatttatctaaatccttacctgagaaagtgaggaagctttatgatgaactgaactttgaacttctagagaagctggattcaaatgaa

SEQ ID NO: 2880 - DNA, 577 bp, Unknown
  Description of Unknown: unclassified Hepacivirus sequence
aacaggggcgagagttcctgttggtgtgtggtggccccacggaccatgcgaagtcgaatcctacgcattctagaatggatgattcccgtaactatccacggaatggcctaccctttggtcaagtctgacagcttcgcggggcttgagacttaggggtggagattccgagaggcctgtacgggtattccggacgaagtgcgataggtaacacggcgcatgtagaccgcgtggagcggcagaacagctcccgtgacaaggtcggttgtcacgttaataaactcagtaacttgttattagctactaggcttgctgtctacggaagatgttgagggaacgtcgcgtctaaagataacaataggctacggcccgcgagttgtcaatcctccctgggaacaggctcatcatctctccaaaaccagttttggctagtatgtgatgtaacatgttaggagaaatccaaccatgggcggacccaaggtggcggccccgacacagccggcaagaggaataaccttcgggtgacctctgggtccatttctcaaagctagagtgggtgtgtgtgtcgtcgtttgcaaag

SEQ ID NO: 2881 - DNA, 578 bp, Unknown
  Description of Unknown: unclassified Hypovirus sequence
gtcttaggggtccctacttaagatcacccattgggtgtttaaaagggatgtgatcaggtttcatgaccaatcataacgtaaccttttggggtctacaatgattccttttggtggagatcgtaatctccgtgagcatagctcgtgtgtttcgtttaaaacacgtgacttgatagtcgtggttagctaccgtgcacctaggtgcgtgccttgctcaggcgtgacctaacggtctaccctatggggcctcaacagtggtgtctgaagacaaactgtcggtattgtgggtggacttgcgttccacgcgtggtattgcttcggctcttattctggctactgtattcgggttttgaagcgtaagctcgttcatgggattgggcccccatgtctggttgatggtcacacatacgtgtgtcggtactggtatctaatttcctttgttatctagaacctggtttgacagcaaacactctaagctttatttgtttctcttcctagaaacatcagccacgctcttgtcagaacggtgtccttttccaagcggggagtagtgacctttagcttgatccgttaaggatgac

SEQ ID NO: 2882 - DNA, 578 bp, Unknown
  Description of Unknown: unclassified Hepacivirus sequence
gagcccatccccgaaagggggtgggtcagccttatggctgtgtggtgtccccacaaaccgactcctaaacctcgctggttctagaatggtttgatgtgttggttgaccactggtcgaagctaactagcatatggtgttagggttcttcgggtaaatcccagccacatgcgaaattagaataagaccggtgtgcaccaatgcctctcttccggacgaagccggtcaggcatggagcacggtatgccgagaggcccgccgcatcagttatcgcggtggcgacagggcacgctgtcgttaaactcagtcctgatacagttgctgctgtgggcattgtctacgacactggtttgcggtggaacgccgcgcttttaaatacacagtagggtctgtcccgcgggttgtcaatccgtaacccagaaggggccgtaacctagtgtcaaaaccaatagccggcaacagcgttctgtggaaggagcgtaagcaaccatgggggtaccaaggtggcgtcccgtgcacaggcggcaaggggaaaatccgtatggtgacccctggtaccatttttttcttagtagaatgtt

SEQ ID NO: 2883 - DNA, 582 bp, Unknown
  Description of Unknown: unclassified Picornavirales sequence
ccgtggggtttaccccacgggatgttttcgacgcagctactgcgagagtgtagcctagtttacacagctagaaatctgtgtgcccttttgtgctcattttgggtgaataaatgatcacgatgcccatatcgttaaatgtgtgctgagggaaactttcgcactgtggcactcttttcggacggatctaggttatgactattgcttgaataaggaaatccccgttctagcggtgtagtgattggcactaaaccttgtgtggagcagtctagaccaacacataatagcatagtgaagttaatggtacgagttatggagtagtcgccttctatatattaggttggccctggtaacaggtctaatatgtaatgggttaatgccatatgtttgacgaatgccatgatgagttaaaggaagataactatgtgaaaggtgtgttggatgtatccctctaaggagcgtggcttacttaagagctaaccctgttttgaatagtacaccagcaaagaagcaagacgtacttatttgaggcagacttttaccaagtttcatattgtgagtagttggaaggttccagaaagcaat

SEQ ID NO: 2884 - DNA, 596 bp, Unknown
  Description of Unknown: Lassa mammarenavirus isolate LASV/H.sapiens-wt/NGA/2018/IRR_077 Z1R sequence
aatgcaagatcatctcaaagtaccttgcagataatgagaagctatcaaggcagaagttagcttttggtccagaccgaacccagaatgttgctcatggagggactgaaactactatccctttgcattgagattgactctgcaaggccaatggatgtgagcataacactgaagacaaaacggttgaatccattctaagtgatcatgggattctcactccagctttatgctttgtggtcctgacggctacaaactcactggtaatgttctaatcttgcttgagtgctttgttagatcatctcccgccaattttgaacagaagtatttagaagatcacaagaaactagaacaattaagatgacttggagtctagacgcaggacaacattttacaatgaacagatacctgattgggtgaatgacaaactcagggacacttattcactttgttaaatactcacaagaagtaatgcactataagatagatatagaggattttaaagctaggaacaaattaaggcaagggaacatagaaagtcaatttgttaagactgataagatgagattattagaggattttgaaagctaggaacaataagg

SEQ ID NO: 2885 - DNA, 604 bp, Olluvirus shayangense
attgatgaacagaaacctctaattggtaatttttttcttaaatcgctgtgtctcgcagtggtttaaaactgactaatcgggcattatcccctaaactgacctaattataccgatttctgacttgattcaatataatctcgaagcatgaacaacatgttaccctcaacgtctcgacgaaccggacagccggtggctgttaatcagttgaggcaaaccgccgtaatggctactaaccctgacattaagggtgcaaatgatacagcacgacaactagagtgtatcaatatgcgtctaactaaaattgagaagactctagaatctatccaaaataccatggagattttgagggcagctgcaggttcacctgcaccaatatatccctctgctccctcattagtcactgaggtacgaggactaccggggttagcaactccggtttattccagcatggacgctagacggtttgtataaagccaaataaacgggctcgtcccataaaaccgttaacagctactcaaaaccttttcaagtgttttaaaatcccttgtttcaggctctctatactcgtgatttcctcgtacaaattcctcgaatctatcaatct

SEQ ID NO: 2886 - DNA, 613 bp, Unknown
  Description of Unknown: unclassified Picornavirales sequence
aatcttcagtgctgtaaagtcaatctaaaatggcagccgcaacagcagtagcagcattaggtaatacagcctcatcatcttcaacagcaggtttacaaattttaggaaattatttaggtaatgctcaaaatttagctaatcaacaaactttaatgagccatgttgagaatacttttaaagagtctggtcttcctcgttatatggcctacactggcactggtgatatgccacagaacaggtatcaggtcagcggtggtaatttctactctgctggtccagttaattctaatttgcctacatttacaactcaggcacaacaagatacacattcaggcagaccaggaagaccgtatgaagcagttccaccttttaatcaattaggtcccaacaatgaaatgcgagttttaggccaaaatgatcgtcaaggtttaggtttcggtcgatataatattcaaaataattttgtagctgggggagtaatgacagcagccacccccaggaatgcagccgctcatcaagcagctgctaggattcttcagtaaaaactttcatccttaaaaacttcggagacccggttagataattgttatatttgtttaagtctagaattaca

SEQ ID NO: 2887 - DNA, 616 bp, Unknown
  Description of Unknown: unclassified RNA viruses ShiM-2016 sequence
aggggccccttcccctacctctcttttcggccagcggcctgctggtcctatgtgtgctacggacttattttcggataccagatacaagttatctccggacttattttcggaatcaccatagataggcaaccaaaaaaccttcgtgtcgtcattatgtgttaatgttacaagcaagtgtttctcccccttgcttggcgaagaaagtctaataacttccttaacaaagaaccctgagtgaagagccggtgtcaaaaccggaattggcggaaattggcttatgtcgaaactgatcagtatttgttaagaaatagtgttagcaaggctatagtattattgcgcaaacgagaattctaaatgagagtttattctgcccaaactgtgttgggagttcacatcgagaggtgtgcccttcgcgagatctgaagcagatattctcactaatcatggatgattcttgtaagcgtggtgtgctataatatcgatttactcaggttagatgaaatctgagcgtttgttataatagtcttctagagaccttgcgacgaaagtaaaggtaagctgaagtgacttccgagccgtgtgaagagaaaacggtcgtttttcccagtacttgatt

SEQ ID NO: 2888 - DNA, 628 bp, Unknown
  Description of Unknown: unclassified RNA viruses ShiM-2016 sequence
tccaggggtgatccccctggactactttgaagtattgtgaaatttttcgagaaggattgtacacatgtgaccgtgaagcgcggtctgtttaacgagcgtccttttcgaaggacgcggattgcatcgttacacgctattgagtaccgacttgatgtgcaatgaatctgttctattaagcttatttcaaacttttgctgttttacagatatttaattattctattaacctcgaccttcatatgtaaaggtggaggcgttggttttgaatatttaatattctgtattgttgaggttatcactatacattattggaagtgaaaatttcctcaatcgaggagagtttggcgttttcaattaaaaacgcattttctagataagtgtcaagaggctctaacgaacttgatattgatacttattttgcactatacacttgtattgttctgaatgccatataggcccaacggaacaaattggtgtctggatgaatttccagctagaccactctagatctgtgattttgtgctttttaggaaaagtaatatctaaagtttttcatggtttttcccagagataggggagctgtgtgaagtttccacagttcactttaaataaaccttgttttctcaaga

SEQ ID NO: 2889 - DNA, 631 bp, Unknown
  Description of Unknown: unclassified Alphachrysovirus sequence
tgataaaaaacaaaaaacctcttcagccagtatctgatcacattttgggcaaccaccgtcgtgttaaatgttgttggaaatatatctggttgattgtggtggcgaggcagatgtgtggtctgggggtacagcctcaggcagtgtcatctgcgatcgtaaatgtctgtttcgcgtgacggcagaacaggctaaaatcgtaatcggtaggcagttactggtggtaatatccgatgataattcttgtgaagtattattctgcccgctgtgtggattgggcgtctacactaacactaggaacatgcatactagcgaagtttacgttgagcacagcgaacttccagtgcctagacagtggtcgcacctgatgtcggcacataagacatgttctaacgcatatgacttgctgttatcgcgtggaaagttgaggacacggcgtaaggcagtcaccggtactcaggtaggtacagtattgtatcgccgagggtcggtatatctagacaacattgggccaattggcgttgaccattagctgaggggcctgatgagtacctctcaggaggacgaaacgccaatgcgtcgccccggggcaagataacagtaccaaaagttaacgtaaggaatcaacaacaca

SEQ ID NO: 2890 - DNA, 633 bp, Unknown
  Description of Unknown: unclassified Marburgvirus sequence
ttcttattgttcaaagttgcaagggaagttatcttcccgagttgatacaaagacactaaacatttcaaaagcatgtatgtgggcaaaacgtaactagaccatcttgattgaagtagtaatttatttctgtcttaaatgtgattttcacttcaaaagagttaaatggtgatagatcaatctttgaaattacccatttatacattatagagaaactaatattactaacaaaaggggtctacctaacgggtatgatcgagtgatcagtctatcttataaaccaaacaattgacttcttactttttaagaatcaactaacagcatagaaaccacatttatccttacgtaatctttggcttagttggaattaacttttgttgtaattcaatacgtttagtcatagtatattgtaggattttttataagtttagaataccttaaatcatacccacaaaaaatactgttttaattaagaaaaactatgaagaacattaagaagatctttctctcgtagtgttcttttactggaagaagtattccaatcttaacttgttggatcagttgtcacttaagttgttatttttaaaattgattcacacaaagtagtttaaatttgtatctagaataaattttaat

SEQ ID NO: 2891 - DNA, 635 bp, Unknown
  Description of Unknown: unclassified Picornavirales sequence
tctcggggcagtcggtcggggcggttagtgccatgtgtagggcgtttaaagacgcaatactattggtgcggccgttactgacttcctgtctcgcaggtcccactcccctttcccttttcatgtcgctatcttctctcccccaacttttaaactggactgattttaacgtgtaacagatgatttgtggattatggatgtctagagatatgatctccgaaacctagcttgtttcgctgttattgacgcatttgtcattcgatggtggctaagtgcccacaaccctaaacttgggtgtggtcaacacatgagtcaattcgtctgcctaattcgccatgaggacagtaacgtaattgctagttagtagaaatcgcattcttgtgtcataggaaacctgtggccgatagttggtaaccactccagcgtttaggactcagagaattttatctttctatgatttaacacaaggactagtgaggagagagtagaggctgtagaccggtttgggacctcattgagtatcccttgcctagtagcaccggctatggactccgggttggaatcccggacttggctctatacttcctgatagggacgcggctggccgcttctcactagtatagtcagttgactttcac

SEQ ID NO: 2892 - DNA, 648 bp, Unknown
  Description of Unknown: unclassified Picornavirales sequence
ttaaaattgtacgtagggaacaaccctacgtacaatggcctgagccaatcagaccctggttttacaccagacaataattggcaaacaaaaacattgggcgctatagcttaacggtgcgtcctgcccccgtatggagtggttgaatataagtgctataccctgaggagggaataatacctaagtctatgagaaacacattatttatcgacgaaaccatttaagctaaatgattatgatttttctataacgacaaacagcgtaaactgtataaacttacaacaacccaacggattacgaaccttaaagtaactgttctagatgaagtctagtagtctccaaatattcccgtgaaacggatgatggacggaacagctctattttaagacgtgaggctttaaatattgataattacattacctgagagccctctttatgaggtttgattattaataaaattagtaccaattcttgatagaatttaagtatgttaacaatgctgaagacatgtatttcgattgttaacctctacatttctatgaaaaggatatgcgagtctcggtggatatcgcattatggtcgcagtcaacctgcagttttattaatcccgtgtcggagcggtggtaatggagccggactactttgccaaaa

SEQ ID NO: 2893 - DNA, 650 bp, Unknown
  Description of Unknown: unclassified Riboviria sequence
cttgttcttacactctagaacaaacatttctggattctccaaatagaacttcttgaaaacttcgggccctccctttatggcatcaaccagggcgggcactccgtattccaacacatcgggcaggcattcccctttggacctccaatagggtgctcctgctgaggcatttttacttgttgtaacatctgccagcaattccgacaggtcttcagcgtgccagcttttaacctcacccaccggcaacagcttctttagagtggctactttcgcgggtaccactcctgtcgggtccacttttatatcgacgcacttacggcttgtcatcaaactaagcctattaacaaatccatcaacggttccactcgagtatatggtgctgttcattgactcggcgacctcctccggagagtacacccgaacaagcccactcactgttgccggtgggtgaggttaaaagctggcacgctgaagacctgtcggaattgctggcagatgttacaacaagtaaaaatgcctcagcaggagcaccctattggaggtccaaaggggaatgcctgcccgatgtgttggaatacggagtgcccgccctggttgatgccataaagggagggcccgaagttttcaagaagttctatttggagaatccagaa

SEQ ID NO: 2894 - DNA, 651 bp, Unknown
  Description of Unknown: unclassified Mononegavirales sequence
tgaggtcctgatcgcctacccctagcccccttgagcagaatctcataatcccttgtgtaatccccgtctgatgcctcctcctcttgaggcagctgttttaaaacctctaccatgggaatgagatacaatgtttagcactaaacctagacgatcaggacacgatgatgacgatgacgacgaggtgccttatgtgcacacccctagtacttcaggtgtcgtcactaggagggtaatgtccttggacgaggtgattcttgccaagctgaataagctcgaggcagcagtggccaagataagccagacccaggatgtcatggcggcagagatgaccaaaatctcgacggtgctggctactgttcaagcaatcggaggacgcgagagtgcatttagaatcagcaagatgtctgatggccctcaggactctaaacggaacagaccgtagctcgtctagaagacctgtggttccacaaaaaccaccataaacaatattaacaaaatgctgttttaagtagatgatcggtccgatctcgtgcaccctgttaagggttagctgtgtctgttttaaaactccttttcttctgaagagaaaatggaaaatataactactatcctttttatcataggagcacgattgctggacaaagcgataaa

SEQ ID NO: 2895 - DNA, 652 bp, Unknown
  Description of Unknown: unclassified viruses sequence
gtgcagtttttatactgcacgcacaatgacccgctaatatatcggattctagtatttctagacaattatatattagacctaatttgttttgttaatattactttcatggtctttaaatgaggcgaaaagtaaatttaaccatcctaattgtttgttagtatatttcatggatgtaaaatgaggcgaatcaaactaacaactattttaatcaattccgaatactatgacgaaaccatttgaatactattcttgacctgattatgatataacgacaaacagcaattattataaactgtataaacttttaataacaacaatggactacgaacctatatgtaaccaagatatcgatgagcaatctcgatcccaatataagagtgaaatctttgagggccgttttggcaatgtatatagacgtggggttttaatggctagtaaccacattacttgtgatgaaactcaataactagtactaattcttaaataatttaatcatgatataaatgctgaagacaagtatttcgatttatatcctctgaatttattaaagaatatataattactcggtggtaattatattttagtcgcagttaacctgcagttatagagcatcctgtgtcggagcagtagtaatgcaacctatcaacgaaac

SEQ ID NO: 2896 - DNA, 653 bp, Unknown
  Description of Unknown: unclassified RNA viruses ShiM-2016 sequence
gatatacacttattagtgtatactttatttgcctgaaccgatgtgagcagtatctcccggagtgcggtaaccatttagcggtcccagacacagctgtctctgtgtaaaacgggtaatttcgggtagggtttattcatccggtcattttattccgtccattatggacttcatccatcattgacattttatttttgtggttggagagctgttagaagaagctctcgtttgcaaggtaggctttattttaagctgaggttgacagatcatatctatacgacactttggtgttaagtgtttagtcctcaggtctagctatgcgattcgtagtctagaccttaatggcagtgaatcgtacagtagctggtggcaatatacgtaagaccaccatactggcattccagcagtggaatgtgacgcatccttagatagttgatgctttcatcctatcttccgctatggggcatacccattcatgattcacaggtttcccgttatagtgcattttgaaaacgtttctattgaacacgactgacaagcatgttgggggaatcctaataggccccaacggaacactcgcagagccgttaacaattcattagagtaaatcgttagtagagtgtaccggtagggcactgtcattgaaaatatttcgc

SEQ ID NO: 2897 - DNA, 656 bp, Ranunculus white mottle ophiovirus
ataaaacaagcctataatacaaatctcctgaaaacatacaaacttttgagataaaatttcaaatacaaaatagtcaaaacatgaatagtgctgattctagaattattccgatgaataaacacaaggaatttgagaaggataagctaagcttgcaaaaaatagtgattaatcctcaattgcaagaaagaaacaatcatttccttgatatattatcacgatacaaaactagttattgctcaaaagaacgttttttgtttggatcatggttaattaacaataacttagtcacttctccttttagtcctaaagcgtttataataattaaaacgtcaaatgagctaattgattatgatttgtttgaaggattggaaatctatttgatcacttctcttgaatttgcaataagttcgtatgctttacatctgttcaaagaagattttattatgcaagaaaaaagaggagaaacctcattgatcctcaattcttataaaattcctaagtactccctaaaacttgagaaatcacaagagaatatcctcaagaaaatcaaagaagactatagttatatcattaaaatgaataaatttaaatgaggagttaaaacaaatcaaccaataaatttgcatgaaaaatacaaaagaatcttgcggcttgat

SEQ ID NO: 2898 - DNA, 664 bp, Unknown
  Description of Unknown: unclassified RNA viruses ShiM-2016 sequence
cccccttttcaacggcgctggcaaattcgccgtattgactattatgccatcctatatcagtcatccgtggcctttatatcgattcatattagtcaaatatttgccaaaactttactttcagtttagtttttcagtgtattttctttttgtgtatgtacgttgtattttctatgtaagcgtttgtcgcgagtgttgaaaattctctacaattacaatgtgtgaaaatttgaattatgctttataactctaccctgtattgtttatctaagtagtttcggttgaatctaaattggtgaatttcgtagatcatgaccaagcattttctctgaccctatgtatgttaaatttacgcaggttaaaagttattttagtgtttttcgagtgagtatcagttgtgttgatgaggcttcaaattttcggttttgacttgacacgtgaaaacccattatttgattctaagtgcttaactgaattctaggctctgtacgattgcttgttaaatccatgctgtcaacatgtgctacgcggctgtagcggtacaatttcctagtgtaaagaatggctggttagaacagtccccctcctaaagggaacctccctggtcgccggagtatgtaaatgcgacaaatgtctagacgacaagtttctttttctacgtatcact

SEQ ID NO: 2899 - DNA, 669 bp, Unknown
  Description of Unknown: unclassified Picornavirales sequence
agagacccccttttcaagttttgtgtgtgattacattgcactttggattacaaaagttttccaagtttgatcacatgaaactgacaaaactcgacttttcgttttgttttgtcttgtattttgtttgcatgtgtaatgcaaatatgtagtactgttatgtacttatatatcgaagctataggtatttaccgaaacctattccatctgatggctatggttgtggttaagtctcataaacttaatcaccattaggtgagcgtctgttgacttaaggaatgatacagcgtttaatctcctagtgtcgctttgatgttgtgtgacatttcaagttctcatacttgtgttatgtattgcggtttggtagttgtcacgtacacaactactgggtttgtttttgcgttcagatgtctagacggttagtttgtcttgttgtatagacccgctttctcactttagtgactttgcgttagtggacattgcgcatcgtgttccctcaaaagcacaaatgaatttcatcgtttcggcagtgtgctgcaaatgttagaccaagttgtcacattgcagtttccggatatttatatccaccgagcgcggacgtgaaaaataatccgacacattatctcttacgcgtataaggggatgctaggattcatttaaatcttacttatc

SEQ ID NO: 2900 - DNA, 670 bp, Unknown
  Description of Unknown: unclassified Picornavirales sequence
aggtggggggggcgcttatgcgtcccccccttcttttcccttcctgtccgatgtcggtctgtctcctgcggtgcgtcgctctatttagagtggtaatccgtgggttcagtactggttgaggatgggttgggtcccattccccctccctttaacgtcgctatcaacttctttgtaaccccacactttacatggactgatttaatggcttttgatgtttttgaggattatggatgtctagagacatgatctccgaaacctaacctgctttgctattattaacaaatttgttatatggtggtggctaaacgcccatgctcctaaacttggagatggtcaccgtatgagccaagctgtctacctaatttgttatgaggatagtagcgtaagtgttagttagtagaaatcgcattcttatgtcatagggaacctgtggccgatagctggtaaccaacccggtgtgtaggacatggagcaagtcaacactctatggtaaacataaggactgatgcgagaagagcagaagctgtagactcgtttgggacccaatttggtatcccttgcctagtagcgcgagctatggactccgggctggactcccggacttggttctgtacttcctgatagggacgcggatggccgtctcgcattagtatagtcatttgcaactcac

SEQ ID NO: 2901 - DNA, 678 bp, Unknown
  Description of Unknown: unclassified Riboviria sequence
cgcgtgcacgttcacacgtgcacgcggatatgtagatttagatctatagcaatactatagttgatactttttgatggatgatatccaatttatgagagtttcgactactcatttttggattatcacatccatacttaaagattgattgttattgagatacatttacttcttcagtacttattaggtttgaatagccttaaataaactacttttctaagaaatagacacttaatgcttatagttgtaagctgcaaatactgtcttgaacagtacaactaccccccttttttctattaatcatcatttttctcgtagaaaatgaagatttgattgtcataattgacatctcagatgcatggcttgccctgtctgttataccggataatatccgttgacgtcttttgtgttttgatgtaaatataacgaaaacaccacacatacacacccgtctcgaaatcactttgtgttactagaggcggggaaccgtagagtctagagttatgtcattttgaaggagcttgctcctagatggtaactatacattttcttagattttgagtttcgccacttattatccttgatagagaactaaaactagtctcgtttgttgaacaattttcttttgactttgtcagaagtttatttgttcactcggttcatgtattttaatttaataac

SEQ ID NO: 2902 - DNA, 681 bp, Unknown
  Description of Unknown: unclassified Ourmiavirus sequence
caaaccgattttagtcggtctgtgtcgtgctcatcaaactggaaactgagaaattagaatctggtagcgtgaggtgaatggatagctcgtccgttcattgcgaggccccccctgagatgacgaagggagagggtactgtgcacgggtaaaagaagaaaacactctatgatccgagttgagtgaaatcctgttgtgacagacgccggttgaggcagtcgcgcagagaggaagcgattcctggatatagaggtatcggcaatactgatcagaggcgtgaagacgcaacatcagatcaaacccaacaaaccggcacaggcgttatgaccctgtgttacgacagaggccctactgtccgggacctgagggaagcgcgttcggctgagcgctgccggctttatgcccgcagaggagtcgtcagaggttgctgtggagtgaccgccgtgcggggtggtggcaatgagtgccgccgccgtcagcgaggggaggagtgagcccaacccccataccaaatcgcgaacccggtgcgtattaacgcggaagacgccggggcctgtagatccagaaacgcggggaaccaaatcccgcacaagaggacgcaggaaaaattctgcctcgttttggctagagcagattgaagtctagactgacactgacccgggcttggaattgccggaccagtgg

SEQ ID NO: 2903 - DNA, 683 bp, Unknown
  Description of Unknown: unclassified RNA viruses ShiM-2016 sequence
atgggccttaacccatgcaccttctttcgcggaatctatccgcgtcgctttaatgcgagcaatatagacgtgaatatatacgataattatatacatatatagttttagtttggtgtccatttgacattattatctttttatatatgattttgaacaatacatgattcaagcattatcttgccagagttgcgaagatttagttctgtaggactttgtagtgacttaagcacctaatagttgtggtagaagattgtagtagtttgtttcgaagctagatgaaattgtaggctgagttcagagtgagctagaggactgccatcctcgttgtagctattctaactgtactgtttctagttaactagtgatgagaacaaattagtactatgcttttatgtattctgatgaacggtggttttgtgaattatctgttgtgtgttgtgatattgattgtgtaaattgtgcgttttgtcgatgaagatgagggttttggtgtaagcagcaaaacttagtttgatacctcattgtagactgcaagcgttcgaaatcgtgaatggtcgatcggttttctttttatgactgttttatagagtttctagagtgattacaagtttatttgctggcaggcaatttttgatttaaaaggtaaaatattgagagttatttgttaaataataaattacaca

SEQ ID NO: 2904 - DNA, 695 bp, Unknown
  Description of Unknown: UNVERIFIED: Potato virus S isolate 18-1113-2, complete genome.1 sequence
cagcttaggtaatcagcttagtagtattgaataaatggatgtgtttttgcaagttttgaataaatacaagtttgagcgtgttagtagtgctttgaataaaccaatagttgtacatagcgttccaggtgctggtaaaagttccgcaatcagggaactactgaagttagatagtaggtttgagtgcatcacccgcggccggccagatattcccaatctagagggtgctttcatcaagagcgaacgtagtggtgaggataagctgttgctggttgacgagtacatagaggggcccgttccagaagacgcttttgcaatctttgcagatccgctgcagagcacagctgttagcccatatagagcgcatttcatcaaaacactaagccatcgctttggcaagtgtactgcttcgctcttaagggatttgggttgggacgtgcaagctgagggtcaggattcagtacaaattgccgatatcttcacggttgaccctaaagaaacagttgtttactttgagccggaagtcggggagttgttgaggaaccacggcgttgaggcgaattgcattggtgaggtgcgaggagctacttttgagcacgtgacgttcgtcacttctgaaaacagcccactagttgataaggccgccgccttccagtgcttaacgaggcacaccaagagcttgctcatactgtgcccag

SEQ ID NO: 2905 - DNA, 697 bp, Unknown
  Description of Unknown: unclassified RNA viruses ShiM-2016 sequence
cgtatatgagctgatcactcatatacgcacttacgtttctaggggatgctatttagcattcctaggatggtatccagaccaatccgagttctataacacatttggacctaactaaaaggcctaaatggtactagggagacatggaattatgtgtgaacgcacaaagacagagctacacgggctgcgtcttttggcgtatgcagcgagtttataacgtgtctttgatgcaatctggattagggaggggacatttatgtcaccctccagtcaacgatcacaaagagttattttgcttccgaactctataaataaaggaatataccagacccgaggctaccgcctcacctttattgtctattggcaatatttaccctactgttggtgaataaccaaccttattgtatttttatatacagtatgacacccactcaatcattataatcgaattgatgaaaaattggacaagcatgctgtgatgatgttttatgaaatattagtaaatgttttagcttttctactttaggaattgaagacgataagactaggcgcacttctctagaatctagatgggcaaaccccaaaactagactgatgtgattgcgttggttgccgagtccgcggagaatatccgttgctcctttagcgaaatctattatgttgaaattatgaattgattcattattggtacgaaatctca

SEQ ID NO: 2906 - DNA, 698 bp, Unknown
  Description of Unknown: unclassified RNA viruses ShiM-2016 sequence
tggggagaccccccagtcaacattggtagtttctatcaatgccttcgccaggatttcttaactatgataaggtttaatcaccggttcatgcattatatgatagtgcaaaatttttgagtaagatcaacatcggtctcatagatttttctctatcagttaatgttacagttacgtgaattgaagattgcgggtggcgcccgcttttgggagcatctatgctcccgcccctttttgagttttagtgttcacttttgtggacgtcactcaattatgtctctctatctagagatagctctagatataatcatttgtcagagagaggaagaacaaatgctaagtgtatagttacctgtagctccgccaagcctacctggataccttagaaatcgcggttttaaccgcattattggtctggcaaaccttctttgtttgttaaccggaggcaccaaggttaatgaacgttaaagtttttacgtgtcgcaaaccccctttatcgaagcgtaggcttcaacctttttgatgatactcctgatgagagtggattgtttgatgttgaagaaacagaatttgatcgttgcgatgatgatcgcattgatgttgccgaattgcaggcattttttgatgaggaggatatcggtcgaagagccgatgagaaaactgttgaagagacagttgaggtgaagcggcgtaaaggcaag

SEQ ID NO: 2907 - DNA, 699 bp, Unknown
  Description of Unknown: Human parainfluenza virus 4b strain HPIV4b/Seattle/USA/SC0496/ 2019,4 sequence
ttgcaaccaagaggcacattttgcaaatcttacctagatgcatctagacaaatcgcccacaaagaaaaacaaattcccaattcaccaaaagaaatccaaaatcaacggagctacagctatcctgaaacaacactgcgaccacaatgacattcctcaagaaataaaggacaaatccaggaacagaaaaaaacagcccagaacaaactaacagacagagaaagggagaggcaaacccgtctcagcaaaatctcccatcaacatcactcgaccaagaccgaaccaacagcacaaacgcagaaacccactaccgcaaaactacagaaattctcccacaatcccccaccaacattcaccaacaaaccagaaaatcattcaaccaggcaacctccacatttcaagtttaagaaaaaaactattataggggggaacgcacttctcagctctaaccacacgaggccttgtcttgtaaaacaagatcaatctcacacagttcaaaacaaaatctgactacaagtagaacctccacaattcaaagttagaccaacgatctaacaacaactcatcaactagcaactatcattgaactaaacaatccagaaggacattacatcaactcattcgtgaatctccaaaagaaataacccaagtaaatttacaatctactctttaattataaataaactgaagtaggtcacaagg

SEQ ID NO: 2908 - DNA, 702 bp, Unknown
  Description of Unknown: unclassified Orthorubulavirus sequence
caaccaaggttcatactttatgaaattcatctagatgctccaggaaaagccatccacagtgatgcaccgaccctcatctcattgaaagaaactcaaaatcaacaggatcacaaccatcccacgacaacaccacgcccacaacaacgccctccaaaaaatgaaagacaaagccaagaaaagggaaaaatggaaaagaacacaacaacagacagagaaaaagaagaagaagggcaacattgccctggcaacatcactcacaaacatctcccaaccaagaccgaaccgactgcacaggcacagaaactcaacatcacaaaaccagaaatggccctccacaatcctcccccaacaatcaccaacaaaacaaaacgacacccaatcaaacaatctccacatttcaattttaagaaaaaaactattataggggggaacacacttctcagccctaactgtacaaggccttgccctgtgcaactgagacacccccacgagcaccggaacaagacccgacaacaagtgcagcctccacgaccaaaaaccgaatcaaagatccagaaacagcccatcgcccagccatcatcatagaatctaacaatccagaaagacgctacatcaacccagccacgaatctccaaagggaacatctcagacaaaaacacagcccactctccaattacgaataaactaaaataaatcataaga

SEQ ID NO: 2909 - DNA, 702 bp, Unknown
  Description of Unknown: unclassified Dicistroviridae sequence
gtcatctgggctacaactgacgcttttgagtgattaacccgcctttatatattattgccgattaaatactcatgattcttgtgtgtgtttattttggacaaggaaactagttctgaaaagactttgaagagcgcgataacgtcgaacttttagtttgtataaccaggagctctgggaactgtcgttgacaggaaattgagaccgttgtgtatgctttgtgatcttcaccgtctcacccacctacctggacgattgtcgtccttggatttgagcctttagaaaaggaagtccttgaattatagaggtacattagtgcgttgtctgccaaaacaggtacgtacggattacactataaggacgtctagagttgttcattttgcccccttaaccggattcggcgaacactctattttatatacccacccatttatagttaaagctttataacttaaaagtaagccgactggaaatcgttaatccaattttattttattttattttatttaatttatttcaatatagattattttagatatataagaccagtatttagctgccttaagcaactattatacttattttttgttattcttaaatttttaggagctaaggtagcgttattagctattgcacttttatttattttaggaatattgtccccgaggaattatttgttaataacactttgtttgtcattatata

SEQ ID NO: 2910 - DNA, 708 bp, Hepatovirus D
ttcaaaagagggtggggagttttctccccacccccttttggatacccatggtgcgggggtataaattaccgcaccccctttgctgtgcccagggtatgggcacctttctgtctgttttgtttcgtttgtctgctttatgtgtgctcgtcccctatagggcactcatttcagctttctttcattctttcttttccccggttctcaccttaccggaggcactggccgttgcgcccggcggggtcaacctagtgattagcactaggctgtaggtgtctaaagtggtgacacaaagaggtgtttcctgattccagcactgttaactgatacagatgaaacctgattgatcttctagaaggggtaggctacgggtgaaaccccttatcttaatactactatgtagagatagatccagtaggttaagggcagtggataaggttgagttcaaatggacaataaatcttcaacactggtggacccaatctcactggctagttgccttcagtgtggattctgtggaggggtgtttcttctggatagggaaccatcacactggtgcctgagactcagggtgtctggccttaaatcacagaagccgtatggtttttgtggcctagcttctgcctctaaacagactctggggcccaatgacaccctgagcccttcggggtactcaggggcatttaggttttccacatttcaaaatagtca

SEQ ID NO: 2911 - DNA, 710 bp, Unknown
  Description of Unknown: unclassified RNA viruses ShiM-2016 sequence
actgcatctattttgccacgctccacattggcccgtgtatatggctatgtgctctggattcgtgactaattcgcgaacggtttcccgacgccgcctgtcgagcgctttgacgttatcgtagagggtttttaaaagtcgatgagtggtacctactaagtgacacaattgatatccgtttctgttcgcagtactaatttagagtagtttcgatttattttcagcattgtgtccttttcctttagtttagtctccatgtcatcgccgttagtacacggggtgccgtttgcggaggcaagactaaccacttttcaggtcaatgagctatgattgactgaggatagcaagtacggaccacgttatgaatttaacgtgatttacccgaaggttcgctccaacggggttttaggcttgtgaataggctgccaagccgttctttggaacgttgtttacgatttgattttgaagcttgggaatggcgccttttgaaggccaaccactgcttgtttcttcttatggtctgatggggcgtttttatcaccccttgtctagaagcctatttggctttgcacgacttcgattacatgcaacttcataccatgcggcttttgcctcaaacccacttgggggggaacgccccgagcatcatggtggctctgatgtcataaccactatacaaaacaacaactatcatacaacacaacttaaccaat

SEQ ID NO: 2912 - DNA, 715 bp, Unknown
  Description of Unknown: unclassified Picornavirales sequence
taaatcgtgagattgagaataaaggtaagcgagatgtagccgatcaaaatataaaaggtaattggttaatacaagatactaaaaatcgcggtctattagaattacaaaaattaatcggcagtcaaaaagaaaacataacgactaaagaaataaatggccaattagaattgttgagagagaaactgggcaatcaagataagtggaccgaagctggacgtgatgcattcactaaagctggcctcccggaatttactttctgggaccggggatctagaggaccactcgatatcggatcaacgcgatcatacatcggaggcaacaattttgtcaattcctatggaggacctgacaccaaactgcctaaaaccggtgagtcgccgttcgcagatatgaatggactatcccgcccgtactaatcttgttgctcataacatcgatcaacaatctaagctgtcttaagtggtttgtcgggtgtcgcaggctactgttccactcggggtcatggtgccgcgcttaagcgtttcactgtaaaaccatttcattcagcatcaaaaagaaaaatacctaggtgagcttaactcaccgtcatttaagctaaagttacaaaatttaaattaacttacgttctgttttcttaacctcaactttcaaaattaaagtaaagaattctagtaaagtaaatttcaaaatttgtcatccaaaaaaatcatggatc

SEQ ID NO: 2913 - DNA, 727 bp, Unknown
  Description of Unknown: unclassified RNA viruses ShiM-2016 sequence
ccatggacgcccctttgtaattcgtcgttgcatgtatttagtatgccgttatacgtattcccccgtgagaaacggtcgttgcgtgtattcctcatgctattatatgtattccccgttgaaggaatcctgaacccttattttacccatttacaaaattttctaaattttatatatttaattaggatcataccttttacatcgatttgccatacacaaggtgtaattgctatgataaccggaatgataccttccggacagtggaatctgttactttcccatctttaatcttcagatgtaaaatatagctagactgataccgtctagacagtggaatctgtatctttcccatccttaaactttggatgtaaactaaagccgccctgatatggcgtacctcgtggtgattcgctcccataaggataaaactatcaaggttctattttggacattttaacctaaagaaaaatgttctattggccagatcaatctcacttactcaacatttgtgagaggctatttgcctgtgcgttgtccagacccagatgttaatactgcatgacccactacactgtggaataagcaaaggaaatactttggtataaatacctccttattcttgaacgcaaccaggatttcgttccctggcagtgatatgctcatgtaagatctcatcaactgtcgcaaaggacttaaagttattatctctacgctgtggcttaatacaact

SEQ ID NO: 2914 - DNA, 730 bp, Unknown
  Description of Unknown: unclassified Rhabdoviridae sequence
ggccctaagaacattgaccctgaaaacaatagacctactcatccatccatatccttctgaccggttttagccaaaaggagcctttaagaacaaatcatccaatccaagcaaaacctcactctagaccaaaaaacccaattcttctcctcaaccacctatgccattgtagtaatcttcccttctttccgcaatagagaccagcaataatctgataatgcttttctctctgatttccttaatatcacgaaaaacctctatgtaacggagaaaattacaaacttctaacagcaataattttttagatctcatttttcaaaaatttgtgtcaaatacaaacattcgataggtctcttactcaaaataaaataacaatgtctattaaagaaattgattaataaacactaattattaaaaaagaatgtttagaaccgatagtggtaaaaaaccattgctcacgaaagtatagaaaatttgagagagctgaaaaactgcattaacttttcgggtctattcaatacaacagtccaaaccaacctcagataaagcaagccttaacaatcaacaactgcgtcatagtgattcgaaaccgtagatccagcaatacagctcggcccggtaggaatttaaatccgagttactctaaaaatctagtcaacgacacatcaaggaaccatttgtccaaaatcagagtccccgaacgcataccacattccattaccaaaacgcaacg

SEQ ID NO: 2915 - DNA, 730 bp, Unknown
  Description of Unknown: unclassified Negevirus sequence
ataaaactatactaacgtattggcttatcaggtttgtatccaggtacagatcatagtcggtttccatccaggtgggaactgtataccggcggctcgtaaggcgagttgctgtaaactggtacgtagccagactacgtactgtaataactggagtcccgaattacgcgactctgtaaaccccggtgttccgctagacggatcactgtataattgctgctcatctaggtgaggagtgtaaactgaataacgttaagcgctattctcaaacaccacgacgttctttcgggagcgtcgtttaactgctgactttctagaaagtcagtgtaaaaattccgcaagttcgcttgtggatctaaaataggagaaactttcgaggtttctcccgtctgtcttgtgctcagcttgcttttgacggacagtgttgcacacgcgttgttacagaagaccgaattttgctcttctacgcctcgcctacgcttcacatctctgtctctcgcagccgcactgtcttcgtgctttgcgacttgatagaacaactgcacttccatcatttggaactgctgaggaccggacttgctcctcacgcacccaactcgttgttggtgcatcgttcttctttcgggaagcactgtctcactgtctccggatttcactttccggggtctgtctagcgctctactgagcccttctctcttcgtctcttggccaaggacgattatacactttcatc

SEQ ID NO: 2916 - DNA, 736 bp, Unknown
  Description of Unknown: unclassified RNA viruses ShiM-2016 sequence
ctgggcagtattgcccagcaatctcttaaggagtttctcctttaacaatatcgcaacaattttatgcaagtttggtgatgtctaaaaatcacccgatcctttctatcttgttctttacgacttttctataatattattttattaatcatattataggcgagtaatataatatggatttcacgaaaaatattatagttctgattatggtcattttagttaggatgtgccttatcttgttgtcaggcttggtctagccttgatagaccattttaaggtttagtctaacctctaaatggactactcaattgttttagagttttgttggtgttgctagccataaatagcacactcggattgttatccagcgtcattgagtggattaacttaagcaattctctctatataattttattaatttaattatacttactgtaaatgtctagacgtgtacttgatgttttgccttttcggaaagcgagtataatgtaatcttttgaaattaggtaaacctgtaatccagagagactgatcagtagatatttcgaatgtaacctttatggtgattagtagaaagacctttcattatgagggtcctgattaggtaaattattaagttcacggtacaactccatctgttttactattaaacatccagattgtaatcctgtttttactttaataattttattttcatctgacttaagtaaattaagacgttttaaattacttttattca

SEQ ID NO: 2917 - DNA, 745 bp, Unknown
  Description of Unknown: unclassified Tombusviridae sequence
ggtttctagaaccgcttgaagaaatttcggccggctagcatggtatcctcccctcgaggataattctgcgaaccggtcagaaaggtggacctaccgcatatgcacaaacatgtgcgggggggctggtaatatccaccacaattctagatgaggccgtgtcccgcggtgcaagtaggcttggctccggcttcagcggcttgcaagggcgtatacgggtccgctcgtgtacgctaaatgggatcgcattggcatgtgcaaggtacatgccaccgcttatagggacagattgctgagtcccagttcacggaattgaacttcttccccgagaccggttgcaagtctcaaagggtcaaggttacgtgcgccttgtgtcccctcctaatcgcactactgcaaccctcatacggttgtgggagctcgaactggcacccacggtggtggaccggcattaagttggttcgagcaagtccggtcccagacgtgtgtggtatccacacgggtgtagcaaacacctaaacagtgccgcggaccgtgaaaccgaggacaacacgggttggcaacaccagccgccctggcagagggtagaaactctgctgtcacgcatctgacgatcacttcagtgatgccggtaagctaaggccgtaagccagccgttactccaagcccacaattcgcgtttgtgggtcataacgtgaggaggtcgcggaggcggttataactcaaccacccccccaacacaacaatc

SEQ ID NO: 2918 - DNA, 746 bp, Rajidapivirus A
tccgttataggattatttggacctctatattgattgacgagaggttaaacaatgtgcgtttgcttcatgatttattatgttgtgatcgttggtcttcttaacacattgatgtcaatcacccttttactttactttgtaactaagtttcatacatttctttgaaattctcatttacaatattgtcgagctgattcacatgtttcatttacttttactacaaatctaaatgttccacaatcatattttgtttattcataatcaaggttgtaagtattatgcagggcaacccacgcagtcaattggtcactcatgaagtggctgtggattaacgcctgaatgtatttgcttattaatatcttgttttacgaatagataaattatgtggtctttttaaactacccttgttgttaattgggtcgaatcatcgcacacataatgctattttagacaaacgttgttcgcgagtatgcacggtattggaccattattgcttgtcattagcaccattggtaacaatgatgacaatccccggttttcacttaagacagctccgcgcttcgtgctgtgtttgagccttgagtgttgacgtctgggatgggtggttgtgctccactttatctagactgtgtatataagttagcaagctgttgctttcttagcattatgtggtgggcccgaccacaaagggcggtgggatgtgccaccgtaaataatcatatcaaaaccctttattttaatatgtagac

SEQ ID NO: 2919 - DNA, 748 bp, Unknown
  Description of Unknown: unclassified RNA viruses ShiM-2016 sequence
catggtagtacccatgcagcgaatctacgtaaagtgtaattaactgacacacagtgcccatcttttgcacactgtctcttagtttttacatgtagttttaatcaaagtacaatttctattagtttcttctactatccttttagttttagatcaaaaccctaaaaactattataattttaaaatccaaaaatattctagttttaagtgttgagctctaattgtgatacttaaatggaaattgattgcgttggtgatgattttgatgacggatgtacctctattaggatcaagtatggcgacatactccttttggcacgggaaccctgagaatgactctagacaatattaatagaagtttttgttgatctcttatctcacctctagcgaggttaaagttagtaacacggttttatgatgtgaagctcttctttctcttttctcatctacgagattcttttattttacttcacattatttatcgtagttacggcaatacgttacttctccgggtgttatggcgtccggtaagttaggtatatgtccacgtagtaatgcgtggagtccgccttgtattctgactgtggtgagtataaggtgcctaatgtggagactaaagcttattgcaactccaatccacggagcactttacttaacgtatcgtctgttgctacataacttgatacttcacgtgtagtaataaatttcttgaaagtatcgccccttttctttcttatatggtgacaattat

SEQ ID NO: 2920 - DNA, 752 bp, Unknown
  Description of Unknown: unclassified Hypovirus sequence
gctggctagaattttaaaagaaaacttgcgtaggtatgaccgcccaccatcgcgttagcaacgtaagcggcacgctccttccttggaaaagaaggattctaagcgtccagagctggcacctaaggaggtgggcagtcggaattcggtgtgtcccggaactgacccttgggcaaggcgtgagcttcactggacctgtagacgccccggtgtctccatctctagacgaattttcctgacttaaagtcaactgtatgctacccgagatgttggaaggggaagctagaaccggggactcccggcatgttgtatacgctgaaaccgtaacgggttggggccgtccgcgcctttagctgttaacacaacatgttgggtttgccaaccgtaatgggaaggcagcctagcgggcctttaggggcgatgctttggtcctcccgggtgatgaactgtcttctgattggctgcgaaagctgtaccacagatgttcaggggattcatcgggggttaaataccggattcttccttctctcgtttcgggctgaaaccccgcagggaatgctttatggactttcaagaaaagtaccaccgtgatggaccggagatccaggttaccagatgtggcagagcttcctaaaagcggcgcccacgcccagagtacaacgactattacacgtataactcgacggtgctctcagtaaagacgggacactaggcattgaattcaagatttccgacttcccaattctcccttcgcc

SEQ ID NO: 2921 - DNA, 761 bp, Unknown
  Description of Unknown: unclassified RNA viruses ShiM-2016 sequence
cttctcacgctaaacgtatgattcttttgactttggaaacccatcctggtacccgcagtgctatgctgttcagtcattacatgccaaccatgcactgctgcactttgatgcagatgcccatggttgagatgcaattgatcaaagcagatgcccactgatgatattcagtcgtgtttccatcgtactcacgagttatcctggtgcccacaacattatgttattcagtcctcttgtgccaactatgctatgttgcacggagatgcaaatgcccatagttgagacattaggatcaaaataaatgcgtgttggtgacattcagtcaacaatctcacattctcaaaaatttcacaaatcacaaataattgctggtatcaataaatttgacactggtgcgttataatctaagtatgacttctggattccgaatgaaggcctaaaacctgatgtgcttgaaggaagtctagacataaaccggcgtagattcggcttgtgttggctgcacgagtaacgattacaaaggtgtaaggtcaaatacttattttatagtgtcatcttttgacaatttattggtaatttgcggtagtgagctaagtatggtccagcaaagccatcttagtttgaaacagatctaccatatattaaactaattcctatggaatcttgtatggatattggcgaaaacccgatacacgtagtagacggctagtagtcaagtaaatcaactccggtcgatagttatccattgatttgggtagcggtcc

SEQ ID NO: 2922 - DNA, 761 bp, Unknown
  Description of Unknown: unclassified Riboviria sequence
agcatacatgctatacccaaattttaacatcttttcttatttattctagaacaacccgtgagacggctaacccccgttgatcggcatccctagaatttagtacataggggatgaccccctatggaaccccaagggaaccctacccttacccaacgcacctggtcctcatgcgtttaatgatgttggcaccgcaaccttgcggccttgctggtatcaatggacccctaccacctaacccactcacttgacacatgtggttcgcccacgaaaccccctttgtgtggctagcgccatctgagaggagtgcggaactcccccacggtaacgtggcccgcactggcctaaagcctagtgtgcaaggacacatgctggtcggttgtacccacggcctgcctaccatgtgtcctgaagctcaccgctcagacctcgatcccggagacacactggggctagtactgtgcgcgccgcctggaccaccaagtccttgggcagtgcgtaggactgccagccttagtagacccccagcaggtacccccttggatctgagctgggccctgtgactataccgttccggtaatgcagggttagaaaaatgaacgggttggcaccacttctcttctctttttcacctttttaatgcagacatcaatggttgtattggtttttgcaatcttcaccttggctgtgatattcattgctatctgcaatctcttgtgcattatcctctggtgtgggttttgtgctgaacctccgctttcact

SEQ ID NO: 2923 - DNA, 764 bp, Unknown
  Description of Unknown: unclassified dsRNA viruses sequence
tttggaatgctgcgctagctgcgactgcccgtgagcattccatcatcattttctctcgggtacttcagctctttgaagaacctgttaaggcagccgttacagacacgttggcccgtaggagctttaaattgaggggccgaatcttttatgcattctctgaaatttgtgcagagtgggacctggctactgctcctaatttagccacgcatgagaatgagaaagtggtgaaagccattttaacctatatctttattcaccccactcctatccaggtatatgaatatataccacgcttggccgtgaatcactcaggactgtcatctaattttaaacttagttatacgagaaaagccattgaacaggtaaattctcacacacacacacaggtgggcaaatattcttattataccaacgattcgggcgtattgtccagctgcgcgactcgagtttttaccttactcggtattcaatgggagcactcgatctatgatgctgttgatcctgctaagtttggggtgatagctgatacttttaacaaatatattcgtagcagctggcatccaaagttgcaaatcctaacatattcatattgctacgatggggaagtaccaccgtttgaagggtgggagcaaggtgacaaagaacttttattatttgtgtataatgatcatgtagcctatgctttgcggcaggacatatgcgccaaattacaaaagttggatagtgatctacgcacatacaagtctagacttgctattaaagag

SEQ ID NO: 2924 - DNA, 767 bp, Unknown
  Description of Unknown: unclassified RNA viruses ShiM-2016 sequence
cctgcagctcttatcgatgttgattacttggtgtattcacccaatgtattttgaatattcagaatctagcggtgtacgtcaccgctttattttggtataatattcaagatcattgttatagtagttttcgttgatttgaacttattttacctccttatatttctgattgaggagatctttagtcaagatttatcaaaacgaaaccttatttgtcttgtgcattcaggtacaccccctgatgcgtattcatttttgtatattattgaacatattttatattttatatattgcgtatccgacgatcttcggtttacatatatagtaaaatcacaacgacggtatctactgagactgtctttgtatgacagtgtctctttaggagtccgtgtctagaatttgttctaggaaattcctcgttaatttgttacgaggtcttctgtttttagatgatttttaatttggatggatcacctcttcctatcttgtgatggttcactgtcctgaattcttacaataactctatgagtactattggttttcattatggatataactacagaacttgagaagtcgaggtttgtcacgcagaccaactgtaagtcgtgtgtgaaatctgatgatttttgattcttttaatggaaaagtgaagcgttacagtgttgttatgatacttggaccctgagaagtccacatacagctgaacgtgtataatgctcgttacggagcatggagagatccagtgaagtaactattcggttggctccggt

SEQ ID NO: 2925 - DNA, 768 bp, Unknown
  Description of Unknown: unclassified Picornavirales sequence
cggagtgatcttttaataatatagctaggtatgcttatactaccgaacagtaaggtactactttacaggcttttaatagtgcgtattaacacgtcgctactatttcataataatatgtgttacacaggtttagtgtagataaactttttatagtgcgttctagattatcgctactatatcatatgaaaatctatttagttgattggacgtaatttattttaacaatcctatttttagttttagttttaactatatatttattttattttattctacaactcgtttgtagatgtcgacaataattcattaatggctgcgtttcctttcagtttaagcatgtaataaagtagtgacagtgatttacatgatactttgggttatgttcccctcttttcggattaagtcaaaacacgttttgcgactctgccgtgtaagcagaagcccactgattttctaaattttcttttgattaatcacatacaaattttatacaaacatgtcgactcgtgtatatcacctgtctgttaacctctatgatcttgcctatatttctagcgtctatgaccacttaattgtgagcgatataggtatttttgattatgttagccttatttgtataatagctgttgagtttaaactttagtggagtatcccctaacgttctgaggattctttaaagtgaaggccgttcgcttttatgcgcgctatatgtggtagtaccaacttagtgttaaataacggaggtccacatgggagaacgaacaatca

SEQ ID NO: 2926 - DNA, 770 bp, Unknown
  Description of Unknown: Trichosanthes kirilowii marnavirus strain pt111-mar-9, complete1 sequence
agacaataacacatgcgtgcggaactaccgcacgcatgtattattggcgaccttggaaggtcggccaaatttggagtctgtgactccctctttgtttaaatgttagaattgaacctgatttgtttaccccgagacctcacttgttcaagtttacatttgggcattcttgggattacacttcggcagcctttctagacatcactttacactgaggcaatagctagctccatcttttctaaatccgatgatggtaaaccatcacccatttatatgtatagtagcgtgtgcccttaagcaaggcaagtcaaagtttactggttatctttaaaacctttattaggactatttcgtcgttgacgcttgcagtaaatcgagtacgcttcggcggtaaatccgtacatctgtcaagatagttcctgttgtaggagacaaaagctacaaacaaactctagaaaaatcttcaaacacaataagctcctataacgaaagcttaggtcaaatattaagcctttccccaaccctactagcaatccacgcaaacacctctccgctcctattggacgacgtgaaaagttaagtggtggtaaggtacagctgcagttgcagccgaggcctgcctggcaaggtaataaggattggcccaattgtggcctatgtccggtactccggtagacttcctggtttgttgaattaaaaccaggtgcggcaatctaggggccaaagaaaacaacctatttcagaaacagagacaaccacaaacgacaacgcaa

SEQ ID NO: 2927 - DNA, 781 bp, Unknown
  Description of Unknown: unclassified Ampelovirus sequence
gcgagtgtcatttttaaatatttttatttggtttaagccgatgtgtagctatttttagagccaatactttattcgtttctttgcgtaattgcctgatttgttacaatgcgcaattttgtttagcgtattgtcattttttgattctttattgcttgtaccgtcatgtgaatattagttgagcttggttttcgggttttaggttgtttctaattaatgttcgttttgttttgtacagcttcatacagaccctccgattatatcgcttgcaaggcggttagtgcggggacacggggggggtcttagtggtgatgttggcctgacacagtaggtctcctcacagcatcacacttttggttgggagaggagtttgcgagtgaggcgcatctcctttgtatatatacgcgttatattgttgttttaattatagcgttggtattactattataacatattctcagggttttttagtttatgttagtttataattaggttttcttacagttaatataattctattttttcacgattaggtattggctctatcttgcgtagagtggtagtattgtatattatcgattgtagattgtcagtaacacgagatgatatgagtgtatacattaacagatgttagacgctttcacagccataactatcatagcctctttaatcttagcttttctttttctgttgatactatttatagtggtactagtgtataattattattctagaatgcacagttcgatgcgatcgtatggagcggcgtaagtagtcacgacgt

SEQ ID NO: 2928 - DNA, 787 bp, Unknown
  Description of Unknown: unclassified Aquaparamyxovirus sequence
accgacctaggatagtccctccactggagacctcaacacacataatccgtcaagcatcacaccgaggaggtctccaggaacacccagactatatgaacagctgatccacatgtctcgttctctgctctgtcacattttcttataaataaaatatatctactgtagttctatacttgaattatttagcaacaactatctcatcagaggcttattcttagcgggtctagatatttgtgtgtttattggaaattgggtcagggttttagtagaacactcgcgaaaagcctctgagagcctatctctaaaagaacgtggaacaaagccagcaatctccagaaggcacacgtgcaatgtccattccaagcttgtaattgctcaggaatcgtaaagcatacatgaatcagtccatgagtgtcaggacatcaggtgatctctgtgttgatatatctgtcggttgtacttaaattggtgaccttcaacgaacacttaaagacccggatatttagtgactttgcacattcactaacgggtaactcaagccagtatataaaggtcttactggaaaatagttgtatgataactcgcacttatcatgtattgtctaaagccgttatagattacgaaattatttcggatatgtttgttagttttttgtctttatagattgagatatcgttgcatctcgtttatgtcacttgtcaatggattaaagaaaacttaggatcaaagcaattgatatctactctagttgataccgactactttgatctttttcccatattagcaa

SEQ ID NO: 2929 - DNA, 804 bp, Unknown
  Description of Unknown: unclassified RNA viruses ShiM-2016 sequence
gcgtagaattcctctacggaattctacgcatgtgatacgattttatcggtcatccctgcaaagggtttatttctagtcatgatataattcatgatattgcgccgctttgtgtgttgaaccaaattggcgctcccaatttgcttctatttcacatgaaccgccgtaggtatctatgagttatattatgcaaaattcggccaggcccgatccacctggccgtcttatatacggatcaccccctatttgttatttgttcactgtatgtgttataaaactaaacaatagtggtgttggattatatccattattttaaatcataaaaatgtgtgttgtatatcatcattatatattcgatttggcacatctttttaccatttctttgattgattatttgttagttgagtaatttccaagggccccctcttcggaaagacgcttaatgagcatacgaattctacaattgagaatcgtttgaagttgtttgattaactgatcgactagctcttgcttttccctctaggacctgacgacctcctattgggaactgtaagatactcgcaatactttttcatgggtatgtgtgagtttttgatgatcctgtattttgtggctctatctagagtcaaccccctgaccccagttatgtgagtcaacttaaaatgacaaactccataacatttcttatgtaagcctaagttggcaattagtgaaataatctttttcgcttggtagaatttcacacacgacaagtttgtctactaaagcaaacaatactgatcagcttgcagatcataatcccgatca

SEQ ID NO: 2930 - DNA, 805 bp, Unknown
  Description of Unknown: unclassified Totiviridae sequence
tctcggcagctcggtttataccgcccgccggggcccctcgtaagaggggtgacagggacacgatatgtgtagcgggactcgttcgcgggtctcagaggatcggtgatctgatttcccctttccttctcgaggtttcaagacgcacaatacctcgatgcgatacgtcataaccttggcggttgttcctttctgacagccggggcataatttgacgtgttaaggccgcaagcgttgttccgggcttttggctgtatctttggatcggtactgatacaggtgatgagctcgttaaccagataggaggtgggttcacgtgaatgcgtgtgtccacgcctaggctggcaagtggcaatttatttacagtgatctagtcgtctaagtggtgataatcctccctaacccacacctcggagcgagctgaaattagacgagtagagcatatgtttaggatacaggcgacgggctacccgcccggcaaggaaatctcttcggagaggcccgccttgtagaggtatagttacgggcccgagcgattccgacgaagtcgcgcttggctgcctcccatgccttctcatcctcaggctataacggtaaagatcacccgttgttgttaagtgataccgataaaagagcgacggtacgcgtatctgaggaatcatagtcgaatgtaccccgcgtgaaactatgtcgttcgaggtccgaacatatgtaaagctcgttttctagaagttcgtgtctatggttaggttagtagttaggttagttggtcgcctcacccgttagttggggcaatctcccaaaaatc

SEQ ID NO: 2931 - DNA, 827 bp, Unknown
  Description of Unknown: unclassified ssRNA positive-strand viruses sequence
aaaatgcgaggcatgggttaccttcccatgccccctccattttaaacaacattatttcaacattttgtgttttatcagactcagtttattgcgttactaattagttttgcgtttatctgcccccgtggtttagcactttatgtgtaaagactcttgattctaaccttgccgtatggtgccctaacgggttcatttaatcatgcgatgagggttgctataccgcatccattctaaggcgattcaatgcttcatttaggaattttgttgacgattaaaaggtacccccacaaaaacaaaaccaatcttacttgattttcgttttaactgaccactgcgatcccaaattttcgccttcttatcaaagtatgttgtgttctttgggtgtacaacctgagaacttgtctacaactacatattactcgaggaagaaattcggtttaagccgtgccttctcacgtttagtatatctatctagacacaccttcttcatcttctaatccccatctagtctcctgatcagagacgtcgttattaacaaataaccccccttgttaataagagacaaagtacaatcaagctaagttctcttggagttcctgtaggaacttagccattgtgatagagtcataagtctatgtgcatagacagctctagctcaccatttccttcccaacccatcttttcatcagcttaactctatgaatccgatgcaaaaaccattctaacatcttatggtgctttccaagccaaatgagagctcactcttttgagccgctatttaatggacaataaacgttttatagtgtacatcatattgtaaaaacaaa

SEQ ID NO: 2932 - DNA, 828 bp, Unknown
  Description of Unknown: unclassified RNA viruses ShiM-2016 sequence
catatgcggagttctgattttagttgtcatatatagtttgggtaaaaacccggtagtagctattacgatggctattacatggtttttgcttaaccgactgtatatgggtactaatgacgagttcccataagtttacatttttatacatacgtcaatcccacgacacgggatagaattttcgaattcttgttaaaacggcttaattggctgtattgttcatctacagtggataaacgacccagcgaccctacaatttcggttcgtcttcgatatagactgataaaaatattttagtaattttaagacaaaattactgcaacgcacacatgtggttgcggcgcactgcgccatttgatatagaccattagcctcaggtctagaaaatgagggccatgtcaccggcaaggagatattctatggggtagcatagcccatagtcttaaacccgtgctttgattttagatcacaactacaggcaataaaggacatatacagttgcctgtacccacgacggcgtagaatagtgaaaatgcctaagtaactattcgtaggagcgtaatgaacttgaggttgatgtgataggtgtgattggttagaatcacattgtaagcacacgtacctcccgtccgaagccatgccaaattgagtatggtggaaaagtgggacaacaaggcgtcaacaacaaaaccaaagatttctctttggcttgttgttgactctttgttgtgtttgtggtctgcgaaatttagctgaataatagtaggttattaaagtagcagacctttacaaatacaacaagagtcaataacagccataaagtacagcgta

SEQ ID NO: 2933 - DNA, 833 bp, Unknown
  Description of Unknown: unclassified RNA viruses ShiM-2016 sequence
agagaaccatggaacatcccgttccatggctctcccttgctgattgtagtgtgtcgttttaccgcgacacccggctacatcacatatattcatctaagcttaattgctccttttataaacagacacaagaactgataaacaggggcaacccccttgtttactgcgtcttaccctgtaacaggagaccgtacaggcaactatttgttggctgtacgaacctagcatttgaattatatgatatttagtcaccataccggattaaaaacccgttataagtgacaagcgcttgagtgtagatagttgtggctactatttactatacttttgcccttgcccaagagagtcaactctttttcaaatcaagccccttctggcacatttgtgtttaggatatgcggaacgtatcccgaatcactatgtgtcataaactattgctccgattaagatgtcaagtatattaatcgcataattaagcagtgtttggttttgttagcagaagaatcccccctactagagaatgatttcgttttaacgactgtgcctccgcagaggactcgcacagatctagatctaacaactcttttaggaagaattggtcttttggtacattttggatgctgatatacgcatcacaaactatactgtcgcaatataactctttataagtatgtttacttcctgacaacctgagggaagaggtttggacacctaaattttccataccgctgtactgagtttgaggttttgctatgattatttatttgatggactttttggactatagttttggttttgtttagcctgttgaggttagttctacgcctactaaaatt

SEQ ID NO: 2934 - DNA, 838 bp, Phyllomonavirus gysingense
gataagaacgttatctttttccttctttgacaattttcttaagtttgaacaatcactattaaaaacttgaacaatgagaaaagacactcctctaagtttacctctctttaagatcttcattatcattatccactaaccaaccattagttggaaagtcacaaggtgatatccttgatgtgtcgtaggtgtgtattgttagcctcattcactccgcattatcacagaattgtattaatattagctaaattgttcttgggtcatcaattgtcctgtctgaactgtttaactctagtcgtccatatcctagaagttacaactcgatcctattattcatccttatctcaatatttctttgtggtgtccgcgtggagtcttatattggagcatttattgtcgaatccaatttccttacagcttctagacaatcttgatctctttcttcttgtatccgatttggctcaccatttgctagtcaaacatgcttgtgctgggattggtatcgctctacgtatacaataaaattacaaggatgaccatgtttgaagtttttgaaggatcagaagttgatgaattattacgtcttaaaatagagcaagggaagcttgaccatcatgatcagattatggaagaaccaagtgttactcttgaagattacctccgttccagactgttactaccattccgtgtggaaaatgatattgttactgtagtcaatgatagaaaactcagattattccatcacattcagacaaatccgatttctgaaattgaactaactgccttagaactcttgcaatttttctctactctttaatgagaaaagccatcattttaaagt

SEQ ID NO: 2935 - DNA, 838 bp, Unknown
  Description of Unknown: unclassified RNA viruses ShiM-2016 sequence
ctgggggccaaccccaggaggatctcacctttagaagtgcgcgaagcgctgtaacggcgttagtgaaccttgaggataatttctatttgtcaaacctaatcattggagtgtgacggagccttaggccactagtccctctttggagcggcgacctggtcttgaagtcctcacctttgactcaatacagtgccttaggccactagtctcctacgtgttgcgactcactgtgacggtgttagtgactgtagacggcaacctggtcttgaagtctggagaagttaatccaacatagttcaacggaagaaggtgtgatgtgtcttttaaacccctattgtatattaacgtgttacaaagtaataatgtgatgtataaaaagctcttcaaaatggacacctggtccaccaaaaatatacgtgtaatctatctatgttttcttttcttgtttccgaaattccagttagtgctacaccttagacctaatctatcaagtcggagtcggaagtaacgtgtttagtacagatttctggaacgaccgaagtcgactaattctagtccggatttccgcctacacgaaagtggtggttggatacgggaaacaaagtaagcctttagcgaaagcgacgaaagtcggcctctgctctagaattgtcggagttactgagacgtgtagtattttctggtcataccctatgggactaagaggcaggtgtccccggtttcaaggctaccgaaaaagtccttttgataaaactccccaaagtgatgaaatattttaactcgaatgttttcttctcgcacatgatgtgactttgttaatattgaacgaataactgacaaa

SEQ ID NO: 2936 - DNA, 839 bp, Unknown
  Description of Unknown: unclassified RNA viruses ShiM-2016 sequence
gggtgttttcacccacacacttttaattagggacttattagcaaacctctcatttcgctccttttcgctatatgccattacgagccatttcatgttaattgcttttattttcttgattgattgtgtaatcacatcttatttatacccattgactccctttctttgtcaatttctctttctcatacttcatttgtacatagttatgcttatatagaggtgttctactccgacctttctatgtacccttcttctagtttagtatttctagtcagaaaaataccttatataccgttccctgtatctcttgggaatttctacctgtatatttttccgttttaaggcttaggctttatatacagtgtatttctttcttcttcctaattgtatattttctccgttttatgtttcgtttgtctccgcacgagatgtttagctatgggattttccgaattaacgttgtgaagagcgtggtggtttttaccgaccatttcacgtttcatttcgacttggattttctctacggcgactattgtgttatatgtattttcctgtttgtatgaatgctatgtttttgtttgtattatgtttctctgtttgtaatttcaatttctagacaatcactttttgtttcattgtgtactttagcggttttctgcccgccatttgaatttagacgatataagttagtaagattttgtcacaaatgctttattcccgcgtgttatcgcttcttagccccgtgacttaaaaactgctttcttcagtctttgttcttatgtgaagctattgtatgtgtgttaactggataattttgctagcccagttttcatacatacgag

SEQ ID NO: 2937 - DNA, 850 bp, Unknown
  Description of Unknown: unclassified Riboviria sequence
gaataaagcagttgatgccccctctcagtatgagggagggtgtgcccccccggtaaaacggggaagaggatctgccgtccagcagactctggaattaaacatcgatgagatgaagcccaaacttgaaggccccaacaacagcgtagtgttggtggttagcaaggatgtaggcggtcaaatcgattttctagagccgactggtttcgcgggtcttaagcagaagcttagtgattggtcatcacaacgagtggaagcaaaacatgatgatgggttagtaaccatcatctcaagtgcccttcacaatgcgccacgcgctttcgtgggattgtgggggttgaaggatgaagtgacaagtgatagtgtcattcaatcgatcgtggacggagaagtcatggtcacgcacttggaggagaaagatgaggaatctcctaacactactaagaaggtcaaatccgttgacctttgcggagacggcgtaattgtcgttagaaccaacacccacaagcgtacgaacaaacgcacagggttccgcattccagtgctagctggagacgtcgctgccaaccttaaaggtcggcacggattcctggaatacaatccagacaacgtaaagttgatccgtgctgatgctgcgcgaaaggttgaagcatggcgcaaggaaggagatgcggaatggttaaacttgagaggagttgaagccacccgaatcatcatgcatgcggctaacatgtactggcttttgtctcaagatgaggcagatgtccaggaaatgtacaacacaagccacatgcgtgcctcgcgcgccgcccggtccaagatggccggtgcggcccctagatgctagggccgc

SEQ ID NO: 2938 - DNA, 853 bp, Unknown
  Description of Unknown: unclassified RNA viruses ShiM-2016 sequence
gtgtgcaatatgcgtaacaccgcatattgcacacattaaaagttatatcatacgtttaaattcgataaacctcaatttacatgtgttctttggtaaattgatgcacattttaaagtattatagaatcatagtttatatgatctgaaatatcaaaataatttgtaatcctcacagattcttttattatgatacatgtaagaacaaatatgtatgtacttctagatattttaatctacacaactttacacatttataggatggatatcctttaaatatccaaaacaaatatacacatataaacacgcacactcattcatgctaacttaacttgttagcaatcatagtcgttacacattatatgtataaatatttgatttatgcacatcagaattggtttttactaggttcgattcctagctgatgttttaaagttaaaatttttatactacatcacatctcatgctgtattttaaagttcacaattcacatattcatctttattttggattgtttaacaaaattccgatttttaccagatagttttacggaaattaaaattagcaatcataccgtccttgattgttatttaaaataaaactactgactgctcaagcttcgagcgtccataaggagatcatgaaaactgttgaagtaattcatataaatttaagtagaagatcccgactgtgtatggtggtaaagatcacccatcatatatggtaggaaaattacctactttatttgtacggacagaaaagacagcgcagggtgatgcctgatagtgattggaggccgatgattataagccttctcgaaagagagtaaattatggatataattggacaaaataccc

SEQ ID NO: 2939 - DNA, 856 bp, Unknown
  Description of Unknown: unclassified RNA viruses ShiM-2016 sequence
tgtatgggtatttacccatatagagtctcctacttgttggcatttcgttgtctgtttgaccgcagactcggctttcttgtcaacctattcagtcttctgagaatgttgagcttcatgcgaattttcttagaagattcgcatgctagatttcgcagctcctagacgcgttgattaatacgtctagagacacattttgagtagtattcatacatcctaggtcaccacaaaatctttgtttttgatacgttagcatattaggatgttatgctgtattttaaaaacagagtgcgcacctggcgtttccaggtccactttcaccgcgtggtcacattaaccgcgggaaccaccttatttggtgtggcattatacgccctcgagagtattttgctttattgattaattcaattacaatatcaaatcgcattaagcgatccgagcactcaagtttaaaaaggaacccagagcgccttgagacattaatattttagaacctccttttggagtggcttagcacgctaaaccgtaacggttgtaggccccaacatcaagcatatatcattttctcttgataaattacacagtgggttaaattcccagctggaagaaatgatatttagaattttgtgaggcaagcctcccgagcacattacgttacgtcctaagtaaaagtattatgagaattagccttcgaacgtcgtacaaactataagctacgatatttgaaattgttttaaatctttaactgcaattattctttgtaaattcaaaatgaacatacttgattaaaattgttctgaagctgtacccagcagcactaccagcctgaaggtagtgtgttattataaggcaccttttc

SEQ ID NO: 2940 - DNA, 858 bp, Unknown
  Description of Unknown: unclassified Picornavirales sequence
tggccactttagcagcactccttgctggtggttttggcagcgatatactcggctcgtatatcaaaggccaaattcagctcaacaatgcagagagtctcgagcagttcaaacaacagacgatgacaaatgctggaatcaatcccatgttggctgcgatgcaagctgctggcagcggcggatcagtgatgtccgaccagatgaccagtggcatgctctccaacatgtccagcgcagtgatgttgggaggtgtaacaacaaaaggaatcctcccgtggatgcaaggtggtcagcttggtacacctacatctgtgacagccaattatggagggatgcgtgtgacagcttcaggaagtccctcctctggcacctcttcatcgaaccccctaggggcttacagttcgatgcctcctcccagtcgaccaacttctgggaatacttatttcaacaacccatccaatacgacgaatgtcagtggcaattcagttgccttcgttccatcaagtgcaggaaccgcagctaatgaaagtgctgcacttgtcactggcaatccccaaccgtctatgacaaattctgagtttcagactgcgaacccatataacagcgctttgacgtcgtggggttctgaaatggatgttcgaaatcctggcggcctcgacacctctgctgtcggagccagtgatccatccacaaccgacgtcatgtccagtgatgacgcagtcgcggcttctggatcgggtttagtttctgccattggctaaactacgttttctagaaactgcgtttggcgacgtagttttctcaatacgatattgagcgtttcttagtgataccagaaaaaacaagaaaaacacaaaaaac

SEQ ID NO: 2941 - DNA, 860 bp, Unknown
  Description of Unknown: unclassified RNA viruses ShiM-2016 sequence
tgagccccggggggtcatcccccccggactccgttcacttaagtgtgggcttgccgaagcagggactcttttcaccgtctgtaaaaagacaaattttagtttgtaaggaccttagttttaagaccgaggccgtaatctcactggataatcgtagtatatggatcaacttaggattgagatgaatataaaataaatgaagttggacagtgtctctatattaatatagctgtagccaacggacttgcttatatgattgccaattctttgccatagcagtattaaacctgcacagattattatcagtattatctagacttagtttgcggattcgacacccgtgtggcgacggctctaggtatacgtaaacgcccatagtcagtaatacggctattcctttaaggacatgcactgtatcaagaaaggaccagtgtcaagtgtgatatatatcccaacgaccaaacccccacgatacacaccccaatgtgcaaaattgtattactagctgcttatgctaattttcccaaataagctattttctacttatataaagtagatcgttgttagagaactaactaggatcttagtatgtagatgggatgatacgggaacgctgtatttcaaaggcatgtattttggtacatagtccgtattccttgaatctatttacgctaatttctgaaaagaggacctgtctctataaccagtagtacctacagtgccttacgggttaccactatgaggacagagggatttgacccgcagtgtggtaatattgggcgtagtcacgagagtcacttggcttcatatcgtgcttaattccgttaaacggtcgccctcttagatatttaaaaccatatacc

SEQ ID NO: 2942 - DNA, 865 bp, Unknown
  Description of Unknown: unclassified Luteovirus sequence
acgtcattcccgactttatctcttgctgtgatgttgtccaggtggacactggtgaaaagctcccttctaagaaagataaagaagggaatgaattgccgcctgagcctaagcttaaaatgtttagaagggtgaagcctgagcatgttggtgatgccaggaaatacatctgtcaacatattcgcaataataatatgaggttgatagacggctctgatgtttctcatgcaaccatcaaccgatatgcgctcaagttttgcgaagacttggagcttgatatgaccagcactgaaatgctcatcaaatatgctatggtcatggtcccactccctcgaaaatctgatattgaggctgctaaaatcgtccaatctcctgctgccaggcaaataaggcatgagttgggcgtgcttaacgccgaggttttttagaggggctctgctccgactctggttttgaatccccgttttctattttggggttgccagagatcgtggtgcgaagtggggctatccctaggaagagtcgtagtactattaattatttgagtcagtttagtttaggtctagattaccaatgccctaatcccagtttgcacaacgcattggtggcggttgaacgtagagtgttcaccgttgggaaaggaaatgaggtagtgctaccttacaagaacataccaggaatcttctctaatcttgattatttccgcaaatctattgtggataaggttggttgccccaggacgttctcccctgaagaacttgcagcgacgtatcactctggtaagagaacgttgtataatgctgctgttcaaagtcttaaacgtaaggctgttgagaggagtgacgcgaatgtgacagctttccttaag

SEQ ID NO: 2943 - DNA, 870 bp, Unknown
  Description of Unknown: unclassified RNA viruses ShiM-2016 sequence
atctcatagggtgaacccctatgcacattttgaaatagtttcaacttatgttggatttgtttgacttagtaatgaatttgtcaaatttaaaaggtcggaagcatgaaatttattggcgtatataattatataattgattggcgttttatagaattcgtagctatatcactgatttcaattatactttgtatacaggaactctcagtggttggttaactgagctgcggcgatactaaattgatgatattttgattactgattgttgtaaatatttccaatgtaaggctttatatttcaatgactcctggaaagacaggtatggtttgaaaaccaattttaggtttaagatacttagcgttgctggaagtgagtactattagtgaagtactggacttttagatgcttattgagatatattagaatatgtactagtacctctatctgatattttcaacacataagttctctctaagaaaggtatggatcttcctcatggaaaccaaggctaaactgttaaagtcagtctgtactgaggtacagaagatctagtcccgtttatggttagcatatacatatgatgccgctttgtaacccaaatgcgtgcgcgtgattactgtatatgtccggaagcggaaaacacactctagatgattctcgtctggtgaagtacgtacgtctgatcatcctatgagcatgagctatctggcaatagcgtaatggtgcctcctaagtgctactttgtgggagtgaatctcaatgtcccgtaaaacggatacagtgaaactacacatcgacaataggcattgcggtacggagtataccttgagatccgcgtcggagcggtcttcagtgtgactttcattttattcc

SEQ ID NO: 2944 - DNA, 877 bp, Unknown
  Description of Unknown: unclassified Picornavirales sequence
tcctgcaaacgcggggggcaaccacccaactgctacaccctgcacaaacaacaactaaccagcaaaagagcaaattaatcaacgccaagcatgtatgacagtctcgaggacgcgtaggggtggaaacccctacgcgccctcgagactgtcatacatgcttggctttgattaatttgctcttttgcttgttagtttttgtttttgcatggtctagaatttgactacttccccccctcttttgcactacgtgccactgtttttcaactttggttagttttgcatcccctttctccgggaacttgtttcccaccccctttttgttgttttggcggctatgttgtggcttttcaaccgcagtagcagtagacagaagaagttgagaaaacgtaagatttattagtaggacctccgaaagtaaacccctgcgcactactctgtgatgtccggacgagctatgtaaggagattcatctaaattatcgatttggacgtttagtctgccgataagcatttgtttttcccaacgtttgtaggtattcacaccccagacttctgaccgactgaattacggatttttctttttgaacaatggaattgacttgacgaagcttggctgctctttgttgtccagtgtggcatttgtaggtgtacttaagtgtatgtttacatttgtgtgatatcaaattcacagcgcaaagacaaggtttttcaaagcgtgcagtttcctaaaaactgatcacaaggtagactgggcatgcctctattattaggccaccataagtccttttagtatgcgtgtcacgacgtaccgtccatcgcgagcgaattccggagacacctcgtggatgatgtatgcaacttccggcccaaggtgaaag

SEQ ID NO: 2945 - DNA, 883 bp, Unknown
  Description of Unknown: unclassified Picornavirales sequence
gtttacgtttcttttacctgcacgttcgcgtgtagggttttcttgcaaccactatggttcgccatagttggatgcgatccccgtcctcgccaaccgacgttaaactgttggtatatgtaacctccaatcccccctaacctaagttttaccagtttctcggtatctgtaagaaccgagcgcacaccacaagtggcgacaagacttgtggaggtttgtacactaaagtacacgtctcttatagattttatctagagatctataaatagatgtaaaatattatctagacccccaccacccctgtgccatggtgcaactggcctatgagtcggattcccttttgatccgtcagcacccattctaaagactgttagcatggtcattagtctgtgaactctcgcgaaagcgttagtgttttctagcgatgcattgattgcgcgtggattccccatctggtgacagatgccccgcggcccaaaaggctagtgtgtcacaacacaccgtcaatgtgccagaaaccccatctggcaacactaattgttagtaccgattggtaaccactaatcgtccattctggctgaacattctttgggatgagcatagaagtgagtagaccccctagcgctaccttcgggcgtgactagggccagttgactataccgctccggtaataactggttaaaacaatgaaagcttactatgcgaactgccctacccaaggtagctgtacccacggctatcctgaacgtcggcagcctttcctttttattctttaaaatgttttatggtgacaatattgtgttatttagtttgttaattttgtttcttttgccttttaatttaactattgttaagcaaaacccccttgtctaattaaactgaaacc

SEQ ID NO: 2946 - DNA, 886 bp, Unknown
  Description of Unknown: unclassified Tombusviridae sequence
tcgtcaacgggaagagtgctgccgaggttgaatcgggcattgcaaagcactgggaaatcttcggcttccaatgtgttgtcgaacccaccgtccataccctagaacatattgagttttgccagatgaagccggttttcgatggtaaatcctacgttatgacacgtaatccgcatatttgtctttccaaggatgcatatagtatcggtccatttaacacgacactcggggctaggaaatgggggaaagctgtcggtgaatgtggtttagcattgaccggtggtcttcccatcatgcagagtttttacggcatgttggtacgtaacgcgggtgatgttgggggaaaggtttcacgtgatgttgcatttgctagcggctttgcagcattggctaagatggggaaacgggtgaagagtgatgtcagtgaggaagctaggttttctttctacctcgcattcgacattagcccggatactcaattagccgtagaacgcatgtatgatgacatggttcttaacatggaattcgtcccccagggatcaccagccattgattcagacttaacatggattctcaaacacctcaaacagtaaaccgcggtaggtcaaaggaaagagctcagggtaaagatgatagcaagggatctttgaagaggcgtgttgccactgatgcgatcgcagccggggagggttctgctttgggcactatggtcatacaagctgaaacggtcactatgaccattaatttcaacttctagacatgcagtgtacctgtgtagtgcccagggatagcctcctcgacactctcaaagcttatattgtacttctcatagctttcattctcttcttcatcacaatcctttcagctcaccaaacacaatacataaata

SEQ ID NO: 2947 - DNA, 889 bp, Unknown
  Description of Unknown: unclassified RNA viruses ShiM-2016 sequence
acgggagcgagagctcccgtgctttgattgtctatacgtcgttcactgatactttgcgtgtgaaccacgtatcgttgaagtgttacttcttattggcgattaattacacaggatattaatcccgtgcattattggatctgtttagtctttacgacttcttttcgcaccagagagggcccacttacctctttggcaaacatttaggttggttttgtttacaagaccatattctaaatgaatactgctttgtttatcacactagaagaagaatccctcagattgctgttggattctactctagcataacttagcccccctccatgttttatgttttatgtcaccatgtcgaaggaggatgtacctcctgccggttgcgtaagaatgtaggctaccgaaactagtacatactaaactctcattccattaggggtgttagtatatgatttttaaaattgtctgtaaatagttatacccataaaaccaaataaaaattagtctagatcatttgtcaagtcagcaacttcttcactgagggtacagctatccctatatgggatgttgcgttaccgaaatcgaggagactggaggcgtcttattagagattaggagcccaccgcaacagctgattgattgaaatcttatttagagacccctgatgataactaatattaactgtattcgatgtcgcatgttttgcgtctagtagtaggttgtgataccttcaggttatagttattgtgccaggccacctgaatagacggattgattgaagcgccatgtgtagtgaacaccacaagcttgcatggtttgccgaggccacagtggagaggccaagcccacaacccgccgttatatgtgttatagaggtttttaaaatttagcaccaaaa

SEQ ID NO: 2948 - DNA, 890 bp, Unknown
  Description of Unknown: unclassified Riboviria sequence
atggggaggaaaagagagatatagagttgtaccggccttcgggctggagggacactacatctctccggacctccaccttccagctgccggcctggggctggagagtgtattttgccgggcccccactgcctccggggagggggtgtaatcagtttcctcgggttgaaactataaaacgaggagggtgcgcccttgacagcgtgatggtgcatgggtacgcggcgtgattaaaactgagctatggtggttgtctagtcgtccaactgctgggtggatcgtcaaaagttcacgccccttctagacatcctaagtagtaggctacccgactcctctgtgagagggccgtgcaccaggtccgaagtggtcttccagaaggctttttgccgaggtaggtgaccggaccacaacgcctctattctctgttcctcctgcttcagggggagaagattaaatagaggcatccttcgcgccgcggattgctctgcgtgagcaaagcgcactgcgtcgcgggtagcttgcaactaccgaagccctagtgaagcaggtcctagggcaccttccgctaaagcctgtgagactaatggtagcaggggccttgcctatgaacctctacgctctcgggcggtatgtgacggtgagtgacctttgtggctggtggtcctttgcggctatgaacctctacaccttcgggtggtatgtgacgctgcgcacggggctattggcctgccaggtcgaatcctcctgtgtgatcacttgctccctgagtaagtgtgaagcgagtagggaaccagcatcgatggacgtaagctgggtgtggtgtggcttggtgccatgctgctaacgtagtctgcgtaggaggcctttatgcctatgaacctctacatcttcgg

SEQ ID NO: 2949 - DNA, 891 bp, Unknown
  Description of Unknown: unclassified RNA viruses ShiM-2016 sequence
tgataggatttcctcacggaaatcctatcatatgctagattagcaaatttttgttattctggaagctcggaaaattctcattgtattagtgttctgggcaaatggactttgatcggtccataccagaacttaaattagtcatatgcggactaagctactactatgaaaatctacgcaaaattatttctgtagccctaacttcgggtgaataaatagaagtgttcgattgtcgaatcgaactaaaataaggcagacaacagataaaactgtttgtttaaaacttcagtcagcactgaaggatactcttatatttgagatcgaacatgctgatcaggttcttatattataaaacataaaaacattgggaaagttaattttgatcaacctctcgttcaagttaatgatcattatcacctctcgaaccccaatggcctgattttattttgtatatctgctctagcttgtggcagatcgtgtctacaacaagcttttatttctaaaaccatagaaaaagtataaaatgagccaaaaaaaaacacataaaaattttgtatattatgctcagaaagactctttttaatggaaatgattctagatgtgacgatggaaacctctcagctgtaaagtgctcagctcacgtttacctgacttaacatggtcaagatactgccgtagcccctcgatgggtagattcttttgagtcgcagatctatgatgtcatcggttcccatgccggtggataggccttgctagatgatttgaaattaacaagatatatccctaggtaaaagtcccaagggagagaatcagaactctaaatactgatatggcgtgacggacgcatgaataaaatatccaactacgaatcagatacgaccatcgaatttcacc

SEQ ID NO: 2950 - DNA, 896 bp, Unknown
  Description of Unknown: unclassified dsRNA viruses sequence
cgagcgtacttcttccttagcagctgatgcttaacgacattaaactggtcggtatcagagatcgcgctaattagacggggtgtgtgcgttgggcatacagagtctagatgggggagagacatcaatgatggactcgaactcagccaggtcgtattgcaataaggacggttttgaaaggatctggcaaattcttttgagaatccgtgaagtcagtagaagggatgagtcaatgacgtaagcccgggccactggtttcaaatatatcaaaatctcatgtagctggctccggtcggtgcaaatcttggcggattgcttgaggtggaggtagagtagatgcggggactgtagtttcgtgacttgatcatggctcagtctgacagttaccgcggaaaattcagggctatgctcggatgctcttgctaacggctaacgccgtgcagtctagcacaagactgtgtcacagggatggccccacacatcggtaacttcatacgatgtgttaaactattacgtaaactcgtggtgcgatgtataagcattagaagcggggtgtggtgttaggaggaattctaacattgctaacgtatgctcaaccggcgaaagcagcgtttaagtagcgtatgggttgggtagaacgtgccttgatgcataagttatcaaggtggaacggccgggtaatagtattcagcgattaggcgcggggaacgaatggcctaccataactggtgtccgatagtgacgatattttatagatttaccgttgactatcgcagagaacagagaagtctggccgaatatttaatattctaatatctttctatagtagtagctgcgtttattttataaacgtgaaggccaagcatagttagacggtgacagtacattcctcaaacatc

SEQ ID NO: 2951 - DNA, 896 bp, Unknown
  Description of Unknown: unclassified Picornavirales sequence
ctttgtcccgtccgtaatgacattaaactaagtctagctctcgactttaaattgagcaccaaatccacacgcaagtgtgaagagagaatgcatggacgtggagtaacccctaggactccatggatcgcgctctctagaaataggggttcgagcttgagcacgttgatcagctaaactcaagcctatcgtgaaattggatcgccgaaaatacatttgaaaacgaacccaaaactaccgtagacagtaatggactcgtagattttatcgaagagtctaaaactgtgcgtactgctgtcccgagattaccacgacctcgtgatatctcgccttgggcagatcaaacacctgtaaagatacttgaacgtgagtatgctttggatgatgttgtttatagcacttcttcaaattccgtgctgagatatttacctaatatttttgcacaaactgcctggaaaaacgcaatgtcttcgtttcgttatataaggtgggattttcttgaatggcgttatcaaataatgtcagttcctcaggtttggggtgctgtaggatttacatgcattccaatggacccgcgtcgtcgcactgtactatcagaagattatggtttgctatctcatactgattgccaaattgccgatttttccactgctaacagcggaagaataatggttccttggtgctctttgaataagtggcttgactggtcttctcgtcaagaggagggcttcgacgctcaaaccttcaatgagctgaagattgttggtggaccttggatatattcagccgattcctcaatcccgactagtgttaccataaatttgtggtgtagcttgcatggagtgcaagtagcaggacctcgtgtccctaatactgtgacggatgaaggagaagctcag

SEQ ID NO: 2952 - DNA, 901 bp, Unknown
  Description of Unknown: unclassified RNA viruses ShiM-2016 sequence
cccatggcaagttatggtctgaagctagataagcctctcgagaccggtgtgtacaagtactgtgctcttttacctattacgatatcactagaatttcgtgttttaaagagcacgatcacactagattatcgttttcgatatttagagattttactttgcacatttgttgtgttaaatcaaacctgcatctttctttttagatgcaagctcgtcattgactttgagctagttggcaacaaattgtcaccaacgaatcaaaacgacggtataccctgtggtgacacacaggggaatccgtgcctcatttgaggaattagtcaatgtaagatagttccattaactattaaaattctcccactgggagtgtcagcagaacgactggttctgccacgcttgtttactgtcaatccgaaagcgtaatagtcggatagaatatcccattgaaatgggcggtatgaggaccaagacttcgtgttttgagcctcgctctccgatatgagccaagctatcttttaaaatagcccaattgacatcaatttacttactccacttgtggagagtccccctattatgatttttaggctgggcatgtagttgatggcttttgtcacgggccacattgtatggatacatccaggacgaaacgttctggacatgagaatcatcacacatcccgggcagtcttttgactgtttaccattgggatgtgtgggtgcaagcatgctttgtggtaggctgagggcgtctcatctagaccatgagacagcgccctatgaagcctgcggtagctggatttaatcaccagtgatggtacgtggcaccctgcagcagcagtttccaatacccggtctattccggatattggtagtgttgtgcaggaccccgggcgatctatatcaaa

SEQ ID NO: 2953 - DNA, 911 bp, Unknown
  Description of Unknown: unclassified RNA viruses ShiM-2016 sequence
ctgcatgggcgttccccatgcagacttttgcatttagttgtgagttttctaactcaccaaatatcgagcgtaaatcgctccttacaactcagttagagatatgtggattggagcgtacatcgctcctctatcactgtttcaactaagttcttacaggcgtacatcggttgtatgtatctttttaatagcttagttgtatgatttgtatatctacagaagttctgcaagattctttattaacgcaatatcttgtaaccaggatttgatcacctgaaattttagtaatgaattgtttgaattatgtgatcgataattagattcattacggtgcattaagataccaatatgatatagctcctattaagttagttagagcgtcattttggtggattttttgtgccagctccttttaattattaacttcgaaataacgtaaagtgactacgagcattcttggactcacaaggtaataagagactcgaaccccgaagcgcgaggaggcacacgcattctctattctcgaaaggaatggaggcaatatatgttctgaagttattggttagatagcccgaggcacacgactagagatggttactataggaagtaattgtatagaaaatttgttgatatgagaattgttctaacatccatctcgcttactgctgtgtagtagcaagctgtctatctagactaaaactatattgttctgctaaacggattgacacccggccgacaccttagttaatgcaaaacgtaggtaattgaaatgattcggtgaacattttaagttgagcaaagttctgatgtgcgttatagaacatatcaaaatcacgcacagaccctgttatagatcagtaaaactagacctcttcatgttatttgatcacatcatgaagattctttgatcagcc

SEQ ID NO: 2954 - DNA, 913 bp, Unknown
  Description of Unknown: unclassified RNA viruses ShiM-2016 sequence
ttgatgcgaattagctattgacagtttcgatcttgtaacgatttcttttgagaattttgttagagatctagatttcaattaagtgccagttgtggcgattttaattgtgatcgactccaacgtctcagttttatagatccagttgtggatgagacttgtatataaatgtcttacactttccatgtatgtttattttgtcttttgttcatagtttccgttgtaccagttgtggaggaaatttgacgataaagatttatgtgtgcgtgttctattgtcttatatatataggttcattcatacttgtttgctaccattttagtttcatgcaattgtaccatatcattcacgaaacttcatgttaggaactttcaacttagttttgattagcacgttaatgttttgaaagcgttgagcaattgaggttgttgggatcgcgtaaagcggctctacgttgttactctttccgtagagattttgttatgttccgaccctagttaagctttttggtggttcttaaagccggttaggttaggccctgcaaagaagcttcatatctgaaacgcccttactttgattctcgaaggcgcgcaagctaccggatgatgataagtaacatgttggcaatgtatttgtacattgtagggagatcactgaagcactcaggcattctgcatagctgtcggaatggcctgttacccgtatcagcgaaggtttgacgtattaattaacctcttttcgtgcaaaagattctattttgatatcaacccggtgaagatgcttaatccactgttccttttaggggagcaacattttgcgttcgatccaccccttatttgtgcgttgatctatcagtatgatctcgtagtgatgcgcgtatttaaggtttttccaccccaggtggcttattttaacc

SEQ ID NO: 2955 - DNA, 933 bp, Unknown
  Description of Unknown: unclassified RNA viruses ShiM-2016 sequence
tgtgggtacaaacccacatacatctgtcgtagatcgcgacgtaaaataagcgatcattcgtagctcacgaatttaaataagcgagcagtcgtagatcgcgactctaaataagcgatccggagttgatatgcttacgtgacaaaaatatattcatcttttcatgatgtaaactgaatttgtgttttataacacacttctataactcttttacttattttatatttacttgagtttcccctcattttctatgaggatctaacctgtatttataccgtctagaattttataagtacgggccattgcctattttctgaaggtatacgtttacgcctatagccctatagtattcgtgtatctttctttcctttcttaatagcactttgcttagtaagagtctatctctcttagctactcctgctataaagaggatgtcgttgtcacgactttaaatgaaagacagacctgtgtgaagacacaataaaatacttccttatatatcgttttagtatttgaaatgttgttcttaggtagtagtacgttcggaggtgtgaaaacctctttcgcggaacctactggtatgagcttcaggacattgaacgaattatatatatgagagttggtagactactctactcgtcagactcatgacgttaattatgatagctagcttgacatctagtgaatgattttctgtataaagatattgtttcattgtgctaagtactcaggtaagctgtacagcaatgtatagtttcagagagctgtttcacaaccagttcttttgtgagtatgtcgagagtaaatcttagtgcgcctacgtggacaataatcttgtgatgaaggattttcattttatggtcggaaggtatccatatgacttccctctattgatgttccccgttcgattggattaatcaactaccatttctttat

SEQ ID NO: 2956 - DNA, 934 bp, Unknown
  Description of Unknown: unclassified RNA viruses ShiM-2016 sequence
cacggggggaacccccgtgcgtccttttcttctatagacactttgttgtttgctttgaactaacttctgcaagtgtattttgaatttcgatttgaagtgattcattgagatttcattagtgctttgctggagtttttcgagaattgtgagtttgtgttggattgtttagtgtctctagaagagaaggtaactttttcataacataggttaattatgaatgaatgtgtgtatgtttggttgtgaattgaaagctcagctctgcacacaattgttattcttgtgttatgagttttgtttcagtttgcttgaaaccagttattttgaaagcagttatgttagtaagtatcctcctcccagaaggagcctggtgaaagcaaccgctaattgtaagtaaagtaactagtttagtaaattaatgttcgttttattatgtgcttcgaatgttttttagtaaagaaagcatatacctcatgtacttgacatgtacttgttgtatgtatctttaagatacaattgtcccatagatctgttgttctctagtagttgagaccttatcagtatgagcagagcgtagcctatacctcaaaacacacactgtatctgtttggagcagtggaaagaagttagggttttgcagagtgatatgatctgcaatgtcagctagccggcaggtgttctgtatgctagtgattacgcgtagtcctaaaccgctgataagctttccgaacgatgaactaagactgtgaagaatctgtgggttgaccgaccatggattgtaaagattgctatggtacgcccaggcatgaggttggccagttcggggtcgctccgttcatttccttaattacgataattacgatttttgttttgttgtttccttgtactgtctctaatcttgatatttttgaatttattgtaatttaatttttattgt

SEQ ID NO: 2957 - DNA, 940 bp, Apple stem grooving virus
aaatttaacagcgcttaatttccgcgcattacgtcaatggctttcacttacagaaaccctctagaaattgcaattaacaaacttccaagtaagcaatctgatcaattgctttctttgaccaccgacgagattgaaaagaccttggaagtgacaaatcgcttcttttctttttcaatcactccagaagatcaagaactgttgaccaaacatggtttgacacttgcaccaattggatttaaatcacactcccatccagtatccaaaatgattgaaaaccatcttctgtatatatgtattcctagtcttctatcttctttcagatcagttgccttcttttctttaagagaaagtaaggtcaatagttttattaagatgcattcagtcttctcacatggaaaaatcaagtctttagggatgtataatgcaatcatcgatggaaaggacaaatataggtatggtgaggtctctttcacttctttcagagacagagtgattggtttgagagaccaatgcttgacgcgtaataaatttccgaaagtccttttcatccatgacgagttacactttttaagcccttttgatatggccttttttatttgagactataccagagattgacagagttgtagctacaactgtctttccaattgaactactttttggtgataaggtttcaaaagaacccagggtttacacttacaaggttcatggtccccctttctccttttaccctgatggtgttgcctctgaatgctatgagcaaaatctcgctaactcaaaatggccttttacctgtagtggtatccaatgggccaacaggaagatcagagttaccaaattacagagcctttttgctcaccacgttttttcatttgacagaggaagggcttgcaatgaattcaatcacttcaataagccgagttgcctacttgcagaagag

SEQ ID NO: 2958 - DNA, 957 bp, Unknown
  Description of Unknown: unclassified Mitovirus sequence
tcggcaagggctcgggaaggtgccgaccttcctcagagtcctgatcagactctggaacaatctacagactactctgttgttaaacactgtacgtagtggatatcggcaagggctaatttatagatctgatcaatctatatctaatagtaacagcttattcttaagactgatcatcttaagtagaaagctttctcataatttcactctctactaaccttcaaattgttctcataatcttaaagcgctatatctaactcttcttcattaataacattaccaactatggttaaatagtaaagtatacactatgcttgacactaatccaaccttaatgtacagtaaggccattagtgatgtggacttcactcagtttctcttacattccttccaatactaaatcggatacttgttactctatgataagagttgtcttggtcacggctactagcagctgagtggcgaaatcctctcagggcgtgtacacccaccaaggttaagcaattctaggattagggagcctaacaggttcaaattcgatggacaatctggaaaatagggagacgatccaacatctaacgctaccgcggcacaggttcttctgtggaaggtttgcagtcacctaccacggtttgtcaccggtctctctaataaactctccccccttcaatttaccattttcccttccattggtatctttgtaacctatcgcagacactgtgtgggtagagcctcaaaaactgaagcacagatgataggtaagtttaacctagcactttacaataactaggccgtgcttatgcatgcaaatctttatccttccactcctcttcgtgcaagcatggctgacgcaacgagtgatgtaacacttatgcttgaatcagcttaatagattcttgtatctaggtttctagattttattggacttcttatgattagtaaacatacgcctaaagtgct

SEQ ID NO: 2959 - DNA, 969 bp, Artificial Sequence
  Description of Artificial Sequence: Synthetic polynucleotide
taaggctgactaaaacactatataaccttctacttgatcacaatactccgtatacctatcatcatatatttaatcaagacgatatcctttaaaacttattcagtactataatcactctcgtttcaaattaataagatgtgcatgattgccctaatatatgaagaggtatgatacaaccctaacagtgatcaaagaaaatcataatctcgtatcgctcgtaatataacctgccaagcatacctcttgcacaaagtgattcttgtacacaaataatgttttactctacaggaggtagcaacgatccatcccatcaaaaaataagtatttcatgacttactaatgatctcttaaaatattaagaaaaactgacggaacataaattctttatgcttcaagctgtggaggaggtgtttggtattggctattgttatattacaatcaataacaagcttgtaaaaatattgttcttgtttcaagaggtagattgtgaccggaaatgctaaactaatgatgaagattaatgcggaggtctgataagaataaaccttattattcagattaggccccaagaggcattcttcatctccttttagcaaagtactatttcagggtagtccaattagtggcacgtcttttagctgtatatcagtcgcccctgagatacgccacaaaagtgtctctaagctaaattggtctgtacacatcccatacattgtattaggggcaataatatctaattgaacttagccgtttaaaatttagtgcataaatctgggctaacaccaccaggtcaactccattggctgaaaagaagcttacctacaacgaacatcactttgagcgccctcacaattaaaaaataggaacgtcgttccaacaatcgagcgcaaggtttcaaggttgaactgagagtgtctagacaacaaaatattgatactccagacaccaagcaagacctgagaaaaaacc

SEQ ID NO: 2960 - DNA, 975 bp, Unknown
  Description of Unknown: unclassified Sobemovirus sequence
acaggcatggggacctagtgtacatagcagtagcggaaagaatatgtatgttggctgaggctgatcttgcagatgctccagatccagtggaccttgtgaaagctggatactgtgatccgataagattatttgtcaaacaggagccccacccactcaagaaggttgtggaagggagattccgtttgatttcttcagtatcactagttgatcaactagttgagagactgctcttcggcccacaaaacgaaaccgaaatcgatctctggcaatcagtcccgtccaaacccggaatggggctgtcgcaaccgtggcaggtgtccgctctgtggaatgacttagagcataagcataagctcagtcctgcagcagaggcagacatctccggctttgattggtcagtccaatcatgggagatcttagctgatgtgtgcattaggatagatagagggggttttaaaggtaacctccgtaaagccgccctgaataggttcaaatgtttctccaatgctgttttccaactcagcgacggaacattgataagtcaaggcttaccgggtctgatgaaatctggaagttattgtacctcgagtaccaacagccggataagatgtctaatggctaaaatcattggagccccgtggtgcattgccatgggcgacgactcggtagaaggatatgttgagggcgccagggagatgtacgactctctcggccacacttgcaaggattatataccttgcaaagctgatctagacaagttagaggaagtgaatttttgctcccacactataaggaaagacagctactacctccaatcctgggcgaaaaccttgtttcgattcctcagtcaacctgaagatgtcaatgaacttgctgtggaattgaaaggatgtcctgaatggccccggatatccaagtacctccgtcggattggaaagatctccgacaaaacttcagaaggagagggaaaacaaa

SEQ ID NO: 2961 - DNA, 988 bp, Unknown
  Description of Unknown: unclassified Iflaviridae sequence
attgaaagagcggcggcgcgtgtttttcacgcgtcgtcgtcttattcgggttgcccaagtgcctgctacattgtttatttgtaaattctttaccaggcctactctcgaagtacactgctaaagttttgcatctcgccttgtacctcgtcttggttttcttgagtagatttcgattgttgtgttttacatagttgccgtctctttcataccctttattggaacttattttataatttatattattattatacattatctggttataaatgttaatattctttgtgaagggccgcattacactaatttagtgttgattcaattatatttttgctttgttacattatttatcgtgagggaagtagtccatgatagtttaatgtgatttggccggggtatttattgaattaggaatcttttacagcaatatgtgtgatagcgtcaaaattttgtttattgttctcattctaaattatgtttatatctttagagcgatgattctatcatattgtaatgtaatttgtgttagagcctgctgagtttcttttcggacattcccaagaagaaagatcaactcagtaggatagcttttagtagccagtacatacttatttagtcactgtgcgtatggtgaagaagcctctacaagatttcagatgtgtataactggtgctagtcattttccgccagcctgtcttaacttagcgattaacctctttatataccaagcgctgattctgtattttagtagtgtattttatttaattggttgggcttagttataagctaggatattcaattgtctatctagatattttcttttatctcaaacggatatgatatcaaattgatgattttccaatttaccgtcatatcgtctgtgtgtgatctatatcccagtgtccttattcatccagtctaaggaaggtaagatatacgtagaaattattttaactgacaattgtctagagttggaaattttattttaaaa

SEQ ID NO: 2962 - DNA, 991 bp, Tropivirus B
ccggggggaatccccggtaatccacttttcggccagcgtctgttgctggcactctcgcccaatcttataacactaggtattgggtcttacccgaaaggagaatcccactacaatagattataatgataaagagatagatcgacggttgcgggtcttaccttaaccgggaatcccaaaacaagcgtctatactccagagagagatcaaataagcagcgtaatggtgatacgttaaacaatccgtcatgagaagacgtaaaaatccttgtactgcaagtaaaattgcaacttttgtaattaagtaaatatgtacctcacacatgtgagcactctctaacatcagagaggaaataatcttaaattgtaatacgtgttctggtgaaccgtttagaaaccacgtccgactagagagactagtccacggagaaatccagatgttcaagttcactacgctttcctgcggaaacaatggttagctgagatttgaacgggcgtttaagttctagacacctcacagtggagcgatccacaacagagctacaatcttcagggctaactctggtgcgccgaggcatagcggcaactgtgtattaggagcatttcagggcttgaagagcaggcacgtgcttaaaatgtagcaaaactcaagatgttgagcaatgcgttctgtttgaaaaccatgagtacatggtaacctaccacattgacctatagtgcataacgagtgaagatgtagtttgaaaacatgcagcggatcatggaattgatcgcggtgtttcagatgaaattttcattgcagtgaacattatagagggctcgtttttcgataaccctttgtcagataatgttggaggtgggtacacccacttacagaaggtaccgttttcgtgtgggttgcgaaaatggcgttattagttaacacctaataatgttgtgcagggtgacagcctgtcggcgggtgcacatcttgttttaatccgttgtcttgccat

SEQ ID NO: 2963 - DNA, 1000 bp, Unknown
  Description of Unknown: unclassified viruses sequence
attctaggaattgatgttctttcaaacaagatttcgattggatcattcaaacattgattgtttgtttgttaagcttgcgcccatcatgttcgcgtttgactgttaattcttttccctggcaacttgacgtcttgtcacccggttacgtatttatggcttgccttgctagggcgcgtccgcctataaacgacttaagcttcggtctagatttgctgaaagtagccctttcaccatcactctgccgtgcgtagtgagttttgtagaacattgagtgtttgagcccgtactcatcacgtgcagtcttttcaactatgctaccttgagttgtaactcttgatgctctattggaggctgtatctcgaaggctatatacctctgtatcctgggtgaaagtacccgtccctcggagcatgtactaatttccttgtgtaagatgttgctcgatcaactctacttggagagtagctttcattaacctcttggagaagaacaatgtttatacccattctttgacgttcgatgtcgatgacacaccaactctggtgagtttgatactgttgaactcgtgagtacgtctttgatgtttccccctcagaaagttgcttcaagttggttccggttccgcttgccttttcaaatcatctttgggtagacactggtgtctgtaaattcaaactggtggtaagatccggtttcccaaatctctgtctattggaggtaacgattcatgcggtgacactattagttttgacctatacccgtttgtaacgtttcgatgtccaagacacaccaactctggtgaactgaatcccacatttggttcgtgagtgcgttgcagatatctcttgtcaaacttggttgttcatggcaattttcacatggtaagattgtgagaagacccctgactcaacagtagttaattgcgccgcggttccgtattttcatctaatttaccctactttcatgatgttgaggagtaaacctcctcttttcgtttata

SEQ ID NO: 2964 - DNA, 1000 bp, Unknown
  Description of Unknown: unclassified dsRNA viruses sequence
gtacagatccgatgataaattccggtgatgtttaatatagcgagtttagtctcaaagctcgtcctgcggatatacaccagctcaagggggtatggactgcccttgtaaagtctacaattctagaggagaaggtgtaatttgctaacctccttagataaactgcctcatttatacatcctgtgctcaccataagctaggatggcgcttggtattaaattgagcgcaatacctccctcgaggaaagccgggggcccatcaatggggatatgaaactaggccctggtagcaatctcaccagtaagatgattttagctctaatgtataggcccggacattagtaagattacagggcaagaactatcctagtgggtctgttctcgtcgttgcgtttaacgccggcattcaggtccaggtgcgaggtaactgagattttcgactcaggtgtgatccggtggtgtcggctaccccggtgagctatcgtaacatcctacgccgttagcctcctatctagcctctagtaattatttccactgctatgctaatccaggagtgagtagggatgggaacgagcctttcgatggaataagtccctaaatagagtggcatcctacaaagaaaggtggacagactgacactcgacacagagcaaggtgaatcctgctcctagcaaacagtcggttggggaaataagagtacccaatgatggttcatcccttcaccgggtggtatagaacggcgcgtgaggtaatacatagtattatccacctcacgtatacctacccacttgaagtagggttgttggacgtcccttgaccaacttatatataccgggctgcgcaaagcctttgtcacccatttgtctaatcaagatgccagtatcgcctaccacatcctcatccccattaattttggacgaaagaagccggtagatagttgctatccaagatacactgattagagatctgaaagtaccgagtcataaatttgctgcacgaacaaa

SEQ ID NO: 2965 - DNA, 1000 bp, Unknown
  Description of Unknown: unclassified Tobamovirus sequence
caagtcactattgggcaattgtctgattttgactttgtggatctgcctgcagttgatcagtatagacatatgattaaagcacagccgaaacagaagttggatacttccattcaaacggaatatccggctctgcagacgattgtgtatcattctaagaagatcaatgcaatttttggaccgctcttcagcgaactgacaaggcaactactggacagtgttgactcaagcagatttttgttcttcacgagaaagacaccagctcaaatcgaagatttcttcggagatctagatagtcatgtccccatggatgtgttggagttggatatttccaaatacgacaaatctcagaatgagtttcactgcgcagtagagtatgaaatctggagaagactgggtctagaagattttctggcagaagtgtggaaacaagggcataggaaaaccactcttaaagattacacagctggtataaaaacatgtttatggtaccagagaaagagtggtgatgttacaactttcataggaaatactgtcattatcgccgcgtgcctagcctcaatgttaccgatggaaaaactgattaaaggggcgttttgtggtgatgacagtctgctgtacttcccaaagggctgtgagttccctgatatacaacaggctgcaaacttaatgtggaactttgaagctaagttgtacaagaaaaagtacgggtacttctgtggaaggtacgtgatacatcatgatagaggttgtatagtatattatgatcctcttaagttgatttcaaaactcggtgcaaaacacatcaaggattgggatcatctagaagagttcagaagatccctctgtgatgttgctggctcgttgaacaattgtgcgtattacatgcaattggacgacgctgttggggaggttcataaaaccgccccccctggttcgtttgtttataaaagtttagttaaatatctgtcagataaggttttgtttagaagtttgtttatca

SEQ ID NO: 2966 - DNA, 1000 bp, Unknown
  Description of Unknown: unclassified Cucumovirus sequence
aacagaacattggaagaaaccccacaacaacatctttgtccgactctagtacccacttcaatctttctttttatctttcaaaggtcctttgggtatcttgctcaaaaccttcgcatcgaacactgcatattgcttcttaatctcggcaatcgccttttcaccaaaagagtccacttgatcttcatatttctcatagagcacaggcacagtatgaagcaaaacaaaagctatgtagaacaacgtcaagaagttcgcccagctccccagaatagagaaaacccataatccagcaatcactgataagaacttcttgagatcccttccggatgcaatatcccttaacactgaaaatgcccgattaatctcaattctaagagcagaggcaaattgtaaaatagggtcctctggaatgtgcacttgtgggatctttggcggcctcttgttgatgaaagtggatgcattggaccacaagaacaaacccgcgagggcaagtattacgaagtggcaaaccagagtgaggaggtggtactcaagcaattcaaacagaatccatatgactgtagcaactccgagtgtcgatgctgatatcttcttatttctccacagaaaaacatcagcctgttttccgccaccaagaacatggtgaatgggcttttcccttccgaaaagcctgaaaacctttgacttcaaggaatcagagggcccggttttctcgttgtcggaatccgaggaagacgatgaatcgtggtcgtggatcttcccggaaatcttgtccaacaaggactcacccttggcctcctcgtgctcgtggtgctccgccatcacagaatcgccgatcaatggaagcgtctagaaggaataagaaactccctttttcaccaagagagagagtatgtgtgtgtgcgtgtgtgtgtgtgtcgcgtcgtgtcgagtcgtgttgtccacacatttgagtcgtgctgtccgcaccttcttttcagtgtgttagaatacccgaggc

SEQ ID NO: 2967 - DNA, 1000 bp, Unknown
  Description of Unknown: unclassified Arlivirus sequence
actcatagtaggccaacaatatacttgtcgattctactagcgtcctgtatcaagacaccatcggttgagtaagattatgtctaaccattataaaataatagcagatattggtttgttggaactagacactggaataactagaagagtcaaggctggattagggacaatatccatctcaaatgataaacttcctaaagttagagaaattctagccaatcttatattactatatcaggtacaagagttagagcactggtatcttcgtctagatttccactctcccagtatgaaaaccctaattgatatgtattcagcagagttattatctcaagagcaagtttggtatatgagaattagaaccctgctaggatctggaagtgcatgtttggttaaaagtggctttgaagtgccgactatgcaaattatattagtgaaatatgtttacccatcggcattcatacctgaatagattcttttaaacagggaactttatttataacactttcttttctttacgcaaatttatcaatatacttgcatatctagcagtctcaactggaagtctctttaatttatttatcaatacacaagccagcttatctatatgattatattatgtatcaaatgcatgcgttcttagaacattaattaataaaatatgtctgctatacacaggtgataaccaatgagattatagagtaccattacaaaattgtgtctttattggcaataactagatgcttatctttctgctttaatttacacttagaaaaactcaagaagtgccatctaatagctacaatataaacataagcgcgaatacaaccaatataaatcgtcaccaaaggcttatgcgccagacatctcaaaaagaactcttgccagaggaatcagaagctataaataaagaagcatcagcattgcgagaacagaaatcaattgaccagaatatataattgaaattcaaagtgaataaatcttgcttaacataatctccagt

SEQ ID NO: 2968 - DNA, 1000 bp, Berhavirus beihaiense
atgcttgaatcttgagggaactcacatcgacatctcataactatgatattgattgctctggttttgattttatactttgatgttgagatatgcggggggaaacaggccagagtgctctttatagaaaactgaatttttaatcatgcatggaagggaaactgcccgatcctccgggaggttagtgctataggatttctagagcagatcagtagaattagtgttataactttggcttcttgatgtatgttattattcttgttatattacctgtgtactctatatcatactttactctattaaatccagctatccattcctgtaatgtatgcctaaatgtaaccttatagtgctataaaaaaagtaacattacccaacaaaactcggaatcctctttaacaatgaatagtgattttactgatataagctcagaatatagcgactctgctaaaggagacaaacaaactcaatctaagcaactgattaagaaaataaggagaaagttaaagacaagaaagaacactaaacagaaaaaaacctgtgccagaagggacagactcatcagatcaggaaattcacccctatcagctattatacgacagagaaaagagactaattgagaaggagtcaattgagaaacgcgtcttgaagaggaaatctgccccaccgcctgagcctcctcaaatagaaggtgatttatcggacgagttgcacctcttgatagacgatcaatcctccaagagagcttgcaggccgacagaaatacctacggacataaacagccatatcgtgacagctctgcacggcctcggagagcagatcgggaagctatccaagaaggtggatgagatcttggtgaatcagcgcgatcagtggtcagcaattagaggactgcaggctcaggtggctaagctgaacggagaagccgtagagggtctgctgtctccccaacaggaacttcggctagagtcattcaacacgaggaaggctgctaggaccatcg

SEQ ID NO: 2969 - DNA, 1000 bp, Unknown
  Description of Unknown: unclassified Morbillivirus sequence
tcctaaattacttgttaagccgccacctagggtaaaaacaagcgttgatcacagtaatccattaaaaggggccacaggagggaaattagcctcacctgggatggagactacattattcgagaggagtggtgcaaccccatctgtacacccatatactcaacctgcaagcgacttcaatgtaggtgcaagcaatgtccatcaacctgccctaaatgtgaataataattgcaatgatggtagggtaacagcgcctaactcacataaagatatcgagggtgagtctgaaatatctattcaagatatatataacttgattcttggatttaaggatgattacaggaaattatcaaacaaattagatatggtattagagatgaaacaagacattgacaatctaaaaaagaatagtgctaaagtgcaattggctctatcaactattgagggacatctatccagtgttatgattgccatccctggttcaggtattgattccacaggggatgaggaaaaggatcagataaattctgacttaaaaccactgctaggaagggatcattgtagagcatttcgagaagttaccaatcctctagatgagtcttcactagccaattctccaacaaaacatgttgccaaggtaaacaaaaactgcactcttcagaagatcaacaagaacgaaacatctgcaatcaaatttgttcctagtgacagtcatgcaagcacatcaaccatcagatcaattatcaggtcatctaatctcgatcaggatttgaaaacaaaattgctcacaattctatcccagattagaggggcagacaatattagagaattctatgaaaaggttatgatattaataaagaataagaattaaatattacaaatctacattcattataggttgtaattgtcttcaataagatttggtcagtttcatatatatggttattgatttgtgataattataaaaaacttaggagctaaaggttactcagtcatatacagc

SEQ ID NO: 2970 - DNA, 1000 bp, Small ruminant morbillivirus
gggtcccggaaatacccgatgtcaagaactctagaccatcagcccaatcaattaaaaagggcacagacgggaactcagtcttatctggaacggtgacagagtgttcatcgataagtggtgcaacccaagctgtgccagagtccagatgggagtcatcagagcgaaatgcgtctgtggggagtgtccccaaatctgcgaggagtgcaaagacgatccaggggttgacacaagaatctggtaccatagcatcactgactcagcctaaagagaatgactccgagtttgagtatgaggatgatctattcacagagatgcaggagattcgtgcaagcattgctaagatccatgatgacaacaaaactatcctctcaaaacttgattctctactgttattgaaaggagaaatcgatactatcaagaaacaaatcagcaaacaaaatataagtatatctaccattgagggccatctatccagtataatgatagccatcccgggctttgggaaggacatcaaggacccaacatctgaggttgagttgaacccggatttgagacctataatcagccgtgattctggcagggctcttgcggaggtcctcaagaaacccgctgttgataggtctcagaaaagcggaatcaaagtcaactccggttcaaagggtcagctccttaaggatctccagctaaaacctgtcgacaaacaggcaagctctgcaatcgagtttgttccatctgaccatgaatcatccaggagtgtcatccgctccataatcaagtcgagcaagcttaacattgatcacaaggactatcttctagatttactgaatgatgtgaaaggctccaaggatcttaaggaattccacaagatgctaacagccattcttgccaagcagccgtaacacatcctataatcaacatctcatactcggttgaaaacatcctctcaatcaggctattacaaaaaacttaggagcaagggcaactgagcttcacagacaag

SEQ ID NO: 2971 - DNA, 1000 bp, Unknown
  Description of Unknown: unclassified Bunyavirales sequence
ggtttgacaaatgtacttgactgaccagcaggtatgaccgatgtatttggttttaaacaggtaggtatgtcaggtgtatttgattgacgggtaggtatgccaggtgtaacggggagtctattttaacaatgaggtggttgctttggctgactgatttttagtaaacgtgcttcctctgaatgtggataagactcaaataatacattttaaagcaaattacacaaacagttttcagcaaatcagacttctaaattctcggctggtccctgaagatatttgttgaaaataaaaatctgtttcctcacatttataaattgggtaaaaaactaagttcaccaatctttttccttagaattatcactaaagtcacaaagacccaattggatatctatcatccttatttttaatccctgttgaattagggaatttttgtatgggaaaattcaagccactccataagttcttaaaacatcagaaaaaaatcaatgtgtactatagccaactatacttacaatattcatgacaatatatttttcagcagtttcaagttttcatattttatgacaactacattttaaaatagcttattgggtaaagaataactggttcacattcagagaatgccaatcaaatgtgtctatgccactagatataagcataagattaagcctgtaaatcataggctaagcctgtaaatcatgggctaagcctgtatcagtgatcagtatactagaccacaaatatataacgttccaacaaatttaaaaatatcaccataagttttagattttggaaaaactaaagaatggcttttaacaaaaacattttattctctagaagaataatttaaaggaaacgggaaaacttgaattcattaatagattaatttttctcttcattagtactgtaatttgacaaaagtgttctgtcattgtttaagggcagataggtacgactcaagcacgctgaggttaaacacaaatgagtaatctaaagaaaa

SEQ ID NO: 2972 - DNA, 1000 bp, Mamastrovirus 9
ctaaagataagtaaaattgaggaagaagacattaggcaaattgtttgtgctgatcccattttttctagaattggttgtgtatttgaagagtaccaaaatcaattgatgaaaaatagaaccctgacacgtatgggtcaatgtggatggtcgccgtttatgggaggtttccataaacgcataaagcgcttagttgataaaggcaatgattatttcattgaattcgactggacgcgttatgatggtaccatccctaatgaagtctttagggtcattaaggactttagattctcgtgtcttaggggggatttgcaaacaaaggaaaatagagatgtctataattggtattgtgagaatatatttagaagatatgtgatgttaccttcaggagaagttacaatccaggacagggggaatccctctgggcaaatatccacaactatggataataacatttgtaatgtctttttccaggcatttgagtttgcatatctgaatactgaattggattctgatgaattaaaggaaaattgggataagtatgattcacttatatatggagatgacaggctaactacaacccctattttatgtgataattatgtagacagagttattaaaatgtatgctgatgtctttgggatgtgggtcaagagagagaaagtaaaagtttcaaataaaattaatggattgaccttttgtggctttactgttcaagagtcaaatggcctttttgtccccataccaactgatacagataaattacttgctggtttaataacaccaataaagaaattgcctgatattttgtcactctatgggaagctcctttgctaccgcatccttggccataacttgccggatgaccataaatttaaaaattatattttggtcgccttggaggtagtggccaggcacatccgtgctagtggtggggaagaaccctactatatcacggatagcatgctggataggctttggaggggaggtccaaagcaaagtc

SEQ ID NO: 2973 - DNA, 1000 bp, Unknown
  Description of Unknown: unclassified Picornavirales sequence
gccgcttatgttaagtcagaacggttatggatcttgagcatttactttataggtttaggcccgaagcgaagggtggcgtaatgatcaccgccgtgaaagccagtcgtgggggtacctctatggagtacgtgttccttctaatctgggtatggttttgattaaccagtacacttatgaatgagcaccttgaatgaatgtagagtgaatgtttgtatactatttagtgaagctgtaatttggaagtagtacggaagtagtacggaaaccgaagcctgaagccgaattacagaagtagtagcttagtgtgtgtatacaaaacagtagacatctgtggcttgtctagaagctgagtatcttctttaaatattactcaattctgcgtgttatattatctattatattagtaatattagtagtgcgtaactaagtacctcctctttgagtttgagtctacttagaccactgcagtatcgagtagtaatctttaagaatagtgcaatatgttgatcgattgtcaaccaccgttaagggtaacccttagcctgtggtaaaccaatgcatgcgaaggtctagcaaactggaacatgtgagttggtattccctatacagtgtgccaccccagagagcgggtatagggcatgtcatgtcaacatatgaattttctaaaggatgtgctgcgatgaggtagggacccctctatcctctaggtactgtatgtcgcgaaagtatgaaagtataagaacgtaatataatattcagacgtacaatggtatactttaagcaagtaatactggtgtgttgtacgttaaatttgcttcggtatcactctcacaccacagccgttagtgtctcacagtggagtagggaatctttatttatttatttattgctgattccattgctgattatactgctgcgctcttgctaatttatttgctgatctatttatttatttattgctatttattgctgattatttattgctaataaatcatataca

SEQ ID NO: 2974 - DNA, 1000 bp, Unknown
  Description of Unknown: unclassified Picornavirales sequence
ttagttcagtggaaagcacaacaccgcttcccccgattatgtgacatcaagtaagtgggcggatgggagcccctcagaatccccgtctcccttgacgggtttgacttttaaaattcccataccggacgaaggcgcttgcaacaagtcaggtttattttctagaattcttgtttttcttaaccctacgtgatctatgcgtagtgggcggtttagtgaggaaccgttctcaggtgatccccgcacgcttgtgcggaactttggacaccacctcaggtcaggtgagacgaaggtagtgtatcctttctggaaatcttgtaatgaaaccctaacagttcatcctcttggtataagctgttcccacggctgaaacttgaggctctgatttgcacggaggctgtggacgaacatctggtaacagatgccacagtggccaaaagccaagtgagcaagaaagtccccttaataggctgtacccacggctgaagactgggatggactgcgttcaccacgtgtatccactttaagtggctgtttggttagtaagagcttgatggaaggtttggacgactgctataagtccacttgattggtttgtgtaggaatgctgggcaggtacccctatctagggatctgagctcaggctaattgtctaagcaaacccaaacttcttttcccttttttcttttcattggtgacgatcacaggagctatcatggcttctcaggcaattcacggtgtctataatctcccaatggattctcttgaagctttcaacatgattcgcgttttttaccgcgataaccaccttgacttcatttcttactgtgcctcagtggtgcggacctatcccgcggtgctgcaggagttggctcaactggttcgagacccggaacgttatgttctgttttgtgccttacattggcagaacaaccatgatgaaggttatgagactgaccctaacccggaacctatggaccaagatgaatctggagatgaacag

SEQ ID NO: 2975 - DNA, 1000 bp, Cardiovirus E
tcatgtgtgtcgcggtccactccctcagcaacccgtctttggacgtgggtactacgatagtgccatccaattcccctaaccttgttaccttccgagcgacctccaacacccgaggtgctcaccaccctgtaaggaaaaatgaaatttcgtctggtgctggctaacagataagatctagcattttccggcccaggctaagaaacctctataaagtagatcgataaacttaaattggcgaactgtacaaagaacggtcctctaccttgccgccacacacacccaaccctaaaatttggcctttagtgtgtggccccttgtgtatgacctcaactcttgcgtacacgcggaatttaacatctttccgctgaaaggagttttcgtgcctccccgattatgtgatgctcgtcctttgctgggcggagcaacgcacgaaacaagccttttctttactaatggaatccaattcccccggtctaagccgcttggaataagacagggttattttcaccccctcttcttctactctcacagagctctattctgtgagaagggaatgttgcgcccctccttcttgggagctcgcttggcggtctttccgtctctgtgcaagagcgagtgcgcaatgtgttagaaggtgaagaaagatattttgggactaacgtttgacacggaacgaaaacgtctgtagcgacctcacaaaggcagcggaacccccctcctggtgacaggagcctctgcggccaaaagccacgtggttagcagccacctttgtgagcggcgtgaacccgacgccacggtttcgttgtgtgacactcactacccccattcggtctttcttaagccctaacacaggtccaccaagaatgtcctgaaggtacctcttcggagatctgatcaggagcttcatgccggtgctttacaccggttcggaagttaaaaactgtcacagtggacccaaatctagatggttctagatttctattggttttaaaatttcatt

SEQ ID NO: 2976 - DNA, 1000 bp, Unknown
  Description of Unknown: unclassified RNA viruses ShiM-2016 sequence
aacccgcaccagtgctgtctattagtttacaaagtgatcgcttggcgtaaattattagagagcttgcattgctctcctctacactttctttcgtagagtcattttatttgtccgttgaaacgtattaaaggacctattttgtgtctaaggtcttgtatatgtgtgtggttaaattcatcaaaatcttaactatcactattatatgttattgtcctttgttctatgttgtatgaaagtgtttgtgcttatattcttcaaaacacaaaaacattgttgttgactcctatagtcactatatgtgtatgaatgttgtatgaatgtatcccggattacactaaatgtacctgcttcagcatacaatggctgtgtgtagtaagggtccagcggtgctgcccccatgatagggaggagatttgcttgtgtgtctagaggagtttgttctaccggcggctgaattgctgcgtctgagagacaacttcttgaaccaccgtttgcatttggccttccttgagggatgttcccgtcacgcccggaaccacctgtcctgtcgtatttagtgtgggaaacagtgtaagatggcgttaccagatcgaaactggacctcagcacttcttcgctgagaggctggttatgcaccaccagctaaacaaacaacggttgttcttactaggcactctgtggtggagtagccgaggcgtaggaccattaacataattggagcatacaggcgagaggcccatgttgcgaggtctgtccataggggacctcaagacatcggataccaactctcgggctaagttcagcaataatgcacctctgccggcagtgttctaggcaagtgtcacactccaattccctgttattgtaagacaactaaccttccacatattgacgcccgagcccgaagggactaacgtcgaactgtgagtgcacacagtaaatctagggatctttgggtgagctcccgttatcagctcaatccttttctcatttcgtcacc

SEQ ID NO: 2977 - DNA, 1000 bp, Unknown
  Description of Unknown: unclassified ssRNA viruses sequence
tttaaaaatttgatgtttttactgcttctgttaatcttcttgcaagttcttttcttcttttactatctattgcatgtggacactggagaactgggacagctctatcctgatctcgactagcctgttactactatcatttatcttttcacctagatcaacaacagtggtagtactgtcttacacagtgctactttatcgcctatggcagacttggaaaatctttgcaagcaactaaaagacttgacaaccaaggttaaccaaattgcccaaagccaaaaacaaacagacccaaaacaacaaagacgcggaagatctaggagccgtagccgctccagagaacgcaaaaacatccgctactttgacgaggacaaggtaaaacctggggatattgtacacgttcgtacttgtccaggtactattactggtaaacactccgattgtcagtggaactacatcgaaatcaaattcccaaagaaacctaaaacagagggttcaaactaagtggtcagaatttgtagccaaacataatttgactgctaccaaaaacacaaacggcaaaacttgtgtcttcctctgtgacgcaacctattgtgacaacgacaacacagagttccaaaattggcgcataacaccaaaccttgaactcttagtttattcgtcaacccaaatttcaggtgggcgtagaacaaccctacagctagcctgtaaaaactactcttgtccttggcgagaagaggttcaacaattacgcaataaaacaatagttagacaccaaccgtgtctacccaaaaatttaactcaaaaaatcttaaacggctcgctttgtaccggtctagaagacggtagtaatctgatctgcgtcaaaaaaccaccaagaccaagaccaacctctctcgcgctagttttcgctagtacgatccaaatacaaacaacaactgtagtgacaaccggttctactactcaaataaccacctcacaacagacaaccaaactaacaaca

SEQ ID NO: 2978 - DNA, 1000 bp, Unknown
  Description of Unknown: unclassified RNA viruses ShiM-2016 sequence
gttgtctcttttgagacagattggcaaccaaacatatatttattatattactactcaagcgtagcccgctagagttaatagctgtcattaacagcgacccctcggcaagaggttaactgtccaaaatcgaatctgatcgaggaagaaatccaaaaacagacgtcgctaacccgctacgaaaacgcggaattattatcgtaggataagaatcgactctatgtcgtgtgcgagtccaacggttcagattacatatgtttgtgacatgtgcaaattcggttgcacaacagccattctttgtaattcatcttattaagaagatggaagaactccctcctatggcgccctgtaatggggattggaggtactctagatttggaaacctggagtgaacgagaacggtttggagcagtggccttttataggtatagactccatctgtaattagttgaattcttagaatcagcctgtatttgatcttacttgttttccacgcaagtattgcagtataggtgctgtccttgtttgacataacgaaggcttgagttattataacacttcgaggaaagtataaagactttattaggtcagtggaaagatctggcgctgtgtttggggttaatagccccctcagcatcaatatagcaatgaagttacgaacagccaaaattttaattccggactttttgtcacacccaattccggttgtggtgatgataaatcatttgcaagagttaaatttcagaagtctaaggcttctaagcttcgtcagaagggaaaggatgctggcaagtttggcgctcccaaggggaggcgaactcagatcgctcagcaattggataaggccaatagggaatataaggcaggtagatataacctgcaggctaatagtggcatcgtcgaggaccttgagaaggtgcgacggagcctcgccggttttaaggcttcaataccgaagaagctcggcaatatttttaacgttattgaggacgtaatattacat

SEQ ID NO: 2979 - DNA, 1000 bp, Unknown
  Description of Unknown: unclassified RNA viruses ShiM-2016 sequence
gaatgtgcaagcacgaattcacctcctgcttgtatgttttccacgaaactagatttttggcaaattagcctccatcatgtttcgtcagcccttgagtaacgggtgcaaatggtataaccctggcatgttgctcaccccaaacccgaccgaaattgtcattaaactaatgtcgaccgaaatgtcattaaactaatctaactatcttttgttctttataagattttagatgtgcatctcaccttgtagatgcttttagccggttttaagaactggcaacccagccccctattccgactctttaagagattaattttagatttggaatgtttttgcagcagtttagctcatgctgactgtttgccccatacttttattagcgtggagtaatttatttaaatcacttgtgaacgattttgaggaatcactgtctagaagatgtcacaaagcgacttagtcgtagttttgctctttacttatgatatattaccgataaatttgaagcatttaaaagtcccacatcagatgggatggtttcgatattgacctctatcacttttacgagtatgaagtgatcgaatttcatgtcatacactgataaaacgcatatctggcgaattgcgggtgttagtgaagtttgtatatggggcctcgtacccccaggcgacgagccgaatacgagtatataggttggttaatttattagcccatatctgcgtgacctgagtaacaacccatgcgggaaaagttacaaattgccacatcgacgtagatctccgcctattggtcaataagcggagaaagtatttatttgactactaacaattatcaacaactttttgtaggatgtgagaatttatcagctcccatctgtgaaatttttgatagtacttttcttgataacactcaagaaacactttttggaccccgcctttgtggtcctcgtttatgtagcgatgcgtatgatcctaaggaatatgcgcgtagcaagtaccggcgtcgt

SEQ ID NO: 2980 - DNA, 1000 bp, Unknown
  Description of Unknown: unclassified RNA viruses ShiM-2016 sequence
ttttctaacttaaacaagaaaatgccgctcaacttgatgggcgtcattttgttgtcagtgaacagagttcagccaactctatgtatcgcatcatttaatgctctgactttcgggtcatcagatgccttttcttggttatttgataagtatgctatagatttgcgatgtattgtatcacaagagcgctatagatttgcgctgtattgttgacgtcacatgtggcggtaccatggttgaaccctgccgctcatgtgtattcagcacgtcacgtacgtctcgcctgactgcttattttaatgatatagtttgcaaattgtcttttcagaaggtaattatcagttccttgtccaaaattctgattaaccttaggagattatatatctccgcacactagctttactaggtcgagctatttctccccttcataggaggaaaggacatctagactttaagctctttggtcctgagctatttcccgatgggcatacacagatgtccacagtaacaactcgtaaaagaaataaaaatattttgaaaacggaccattacccttacccttgtaacaaaggaactccccttctcaaatttagaaatcccataaaaatctttaaaacagaaatgtaaacaagatccacctttgttgcagagaaccatatgcttgtgaggaaatacactgaatataaatccctaaacgctgggtttcactgtatgagtttcctaacctacacagtcgagagattgtgggctcaattgagtttggttctagacctaagcgcccctcttactagatatagtttgcacttgaggaaatgcgatatgggaaagcgtgcacttacccctgcgaaggaagggtgcatgtgttggaaacagatgtgtagaggttcataaccactcacatgccatacgtactgatcacggtaagagtccgagagctagggtttccccctgaaagtgggatatcccgacaccaggagaaataataggtgataatgtgaaagcg

SEQ ID NO: 2981 - DNA, 1000 bp, Unknown
  Description of Unknown: unclassified RNA viruses ShiM-2016 sequence
ccatcgagctgtaaggagttagggaaacccctggcagtttatcggtcctgccataaccaaataccgacaccccctcccttcatagtttgtagatattttcaacacgaagcgttgagaacaatagtataacaccatcgcgagcgcactttgtctgtgctactggtcttatatgaggtgtttatacgccactgttatagttttagagaattgttggaattagtggacacatgtccacatgcacgaaatactacgtgagtgcatgctggcttgaccccaaaaacaaaatcaaaattataaatgttcttgccctttgtcggtttagaacatacaaaaatcgcagataggtgcctcttggtgacttaatcagtcccatatcgtactgttgccatcacatatcaatcgtaagtgagacagcgttgctggtggctactctagagaccagcacacagcgtaagctgttcaggtgtccactttacccgagagggtatgtagcagcgattgttgttgtgacacgggcgggtacacctgacttagtaaggttccgattaactggaactctgaaacgttagccccctggaccattagggtcgtgagggttccatgcggagtgcttatcactcctgaatggatatggagcattcacagaagccgcggagtaaaggcccggaggaatgccagtacgtctagctcagccggatgaggagtccggcgttgtcgagacaatgtgtattgcgatgcactaggtaagacagagcgccactgagcctgctcgtggtatgaagggacgtgcacggatctggcaatgtccgatgatggtgataccgtcagctggatgtgaatgtttccagagtcaggcactggatgtagtgccgaagtttccttggtgacgttcctccctttgatgaggtaatgttacaacaaaaacactccgtgcaacccaggaacaatcgcaaaacccctccacccccaaaactaaacacacgacacagatacaacaatc

SEQ ID NO: 2982 - DNA, 1000 bp, Unknown
  Description of Unknown: unclassified RNA viruses ShiM-2016 sequence
ctttgcctacaacctttatagtttttatgccggcccactttgatttatcaatgtggccccttgatttgtatctcgcgggatacgcccatacatttccggcatcctatttgatatttcattcgaattattttattaacatataatatttatttattcgttagtcactataattagtgcaaccggtcttcgggccattattagtccttttattagttctatcacgtgtcttcgggcacacaaatagtaaagtatttttattagatctctggagcatttaagatgctatagccttaacgaactggcgtttatcggctttttaaattgaacggtatggttaccacattgcccgggagcctattttaagctttttcctttagcggggaattatcacttattttagaataaactcctttatccaggtgactaggtattcctatcaagccaagtttcaactattaagtgtcaggataagtctttagagttaagttgcacatcgctgcgcgttgagtgcgtagttacccatggtgtgcattttgctatgataaccatcttgcatgtttcatgtcttttattaatgaggtagttgttctataacagcatttcggctgagaagctgaggtgttggaacactaatgtttacccacctatcgaatattctatacactgggttaactgcccgtatagtcttaaactagttccttctattttatctagacatggaaaagcaattcctacccctcgagtcggggaaactaattctcttcaacacatactagtctcttcggagagtgttgaagcccttaatcattcttgtaatgaacatgtgcagttacatggtttatttcattttactgccaagtgtagttgtttcaatgttgacttgattgtctcaaaggatgacacacacgaatcaaaagtggatctatcttcggatgattccaatgtcaaagaagtactatttactgagagcgattatttttcgatttcgcaacagacaggg

SEQ ID NO: 2983 - DNA, 1000 bp, Unknown
  Description of Unknown: unclassified RNA viruses ShiM-2016 sequence
cctaaaaatatatgtgtgaattgctctccgtgaaaggagatactgatcatgtaataggtgctttaagcactgaagctgcaagaactacagcgtaatcaacgcgaaccccgcttgctcagcgggaaataaatagagcatttttggtaatcttcttacctctgaatatagaaaaagaagacgtcgttcgaagccggaacgtaatccggattttacattacagtaccttcgcgtaggtgcagtaacaaatagttggtggagccaaccgtctagatatagtgatctaggacacactaccactttttaattttacattataaagaacacacgaactcacctcttggcgggctacgtaacgtagttttgaggttctcttataggtatacttatcctgttagagagtgcgatgtacggcatggagcagtaatatacttttatagtattcagactgtgttcgttacttatatttgtaataaatattgattagtggtcagctctttcatcttatcccaaggctttattcgaccttgggtgtttgttagagtgtgtggcttgttagactgaagcaaaggcttgagcttcgacttttcgagcaaagaattagaatagatctggcgccgttgggcttaactagcccctcggcatcaaatagcatgaaattactaacgccttttcaaaagtactagaccctctttcctttgaaggaggaacttacgatttgtactctccccaatcttttaatttgtggtcaagatggcaatttattagcaaatacttggcacgggaactttctaaagaagttctttccaaaattgaaggattggtggctttgtttttggcactcagtgaggttcagacggagaaaggtttcttgtctgtgttaatactttatgtaaaaacacattgtgacgagtctcttattaaattcgtgactgaacaggttgcagtcctgtttaagggctatacggcacagagttctggccgtccaaagtggttggatgat

SEQ ID NO: 2984 - DNA, 240 bp, Artificial Sequence
  Description of Artificial Sequence: Synthetic polynucleotide
gaagaaattctttaagtggatgctctcaaactcagggaaacctaaatctagttatagacaaggcaatcctgagccaagccgaagtagtaattagtaagttaacaatagatgacttacaactaatcggaaggtgcagagactcgacgggagctaccctaacgtcaagacgagggtaaagagagagtccaattctcaaagccaataggcagtagcgaaagctgcaagagaatgaaaatccgt

SEQ ID NO: 2985 - DNA, 239 bp, Artificial Sequence
  Description of Artificial Sequence: Synthetic polynucleotide
aagaaattctttaagtggatgctctcaaactcagggaaacctaaatctagttatagacaaggcaatcctgagccaagccgaagtagtaattagtaagttaacaatagatgacttacaactaatcggaaggtgcagagactcgacgggagctaccctaacgtcaagacgagggtaaagagagagtccaattctcaaagccaataggcagtagcgaaagctgcaagagaatgaaaatccgt

SEQ ID NO: 2986 - DNA, 238 bp, Artificial Sequence
  Description of Artificial Sequence: Synthetic polynucleotide
agaaattctttaagtggatgctctcaaactcagggaaacctaaatctagttatagacaaggcaatcctgagccaagccgaagtagtaattagtaagttaacaatagatgacttacaactaatcggaaggtgcagagactcgacgggagctaccctaacgtcaagacgagggtaaagagagagtccaattctcaaagccaataggcagtagcgaaagctgcaagagaatgaaaatccgt

SEQ ID NO: 2987 - DNA, 190 bp, Artificial Sequence
  Description of Artificial Sequence: Synthetic polynucleotide
gttatagacaaggcaatcctgagccaagccgaagtagtaattagtaagttaacaatagatgacttacaactaatcggaaggtgcagagactcgacgggagctaccctaacgtcaagacgagggtaaagagagagtccaattctcaaagccaataggcagtagcgaaagctgcaagagaatgaaaatccgt

SEQ ID NO: 2988 - DNA, 189 bp, Artificial Sequence
  Description of Artificial Sequence: Synthetic polynucleotide
ttatagacaaggcaatcctgagccaagccgaagtagtaattagtaagttaacaatagatgacttacaactaatcggaaggtgcagagactcgacgggagctaccctaacgtcaagacgagggtaaagagagagtccaattctcaaagccaataggcagtagcgaaagctgcaagagaatgaaaatccgt

SEQ ID NO: 2989 - DNA, 188 bp, Artificial Sequence
  Description of Artificial Sequence: Synthetic polynucleotide
tatagacaaggcaatcctgagccaagccgaagtagtaattagtaagttaacaatagatgacttacaactaatcggaaggtgcagagactcgacgggagctaccctaacgtcaagacgagggtaaagagagagtccaattctcaaagccaataggcagtagcgaaagctgcaagagaatgaaaatccgt

SEQ ID NO: 2990 - DNA, 187 bp, Artificial Sequence
  Description of Artificial Sequence: Synthetic polynucleotide
atagacaaggcaatcctgagccaagccgaagtagtaattagtaagttaacaatagatgacttacaactaatcggaaggtgcagagactcgacgggagctaccctaacgtcaagacgagggtaaagagagagtccaattctcaaagccaataggcagtagcgaaagctgcaagagaatgaaaatccgt

SEQ ID NO: 2991 - DNA, 186 bp, Artificial Sequence
  Description of Artificial Sequence: Synthetic polynucleotide
tagacaaggcaatcctgagccaagccgaagtagtaattagtaagttaacaatagatgacttacaactaatcggaaggtgcagagactcgacgggagctaccctaacgtcaagacgagggtaaagagagagtccaattctcaaagccaataggcagtagcgaaagctgcaagagaatgaaaatccgt

SEQ ID NO: 2992 - DNA, 139 bp, Artificial Sequence
  Description of Artificial Sequence: Synthetic polynucleotide
acaatagatgacttacaactaatcggaaggtgcagagactcgacgggagctaccctaacgtcaagacgagggtaaagagagagtccaattctcaaagccaataggcagtagcgaaagctgcaagagaatgaaaatccgt

SEQ ID NO: 2993 - DNA, 138 bp, Artificial Sequence
  Description of Artificial Sequence: Synthetic polynucleotide
caatagatgacttacaactaatcggaaggtgcagagactcgacgggagctaccctaacgtcaagacgagggtaaagagagagtccaattctcaaagccaataggcagtagcgaaagctgcaagagaatgaaaatccgt

SEQ ID NO: 2994 - DNA, 137 bp, Artificial Sequence
  Description of Artificial Sequence: Synthetic polynucleotide
aatagatgacttacaactaatcggaaggtgcagagactcgacgggagctaccctaacgtcaagacgagggtaaagagagagtccaattctcaaagccaataggcagtagcgaaagctgcaagagaatgaaaatccgt

SEQ ID NO: 2995 - DNA, 136 bp, Artificial Sequence
  Description of Artificial Sequence: Synthetic polynucleotide
atagatgacttacaactaatcggaaggtgcagagactcgacgggagctaccctaacgtcaagacgagggtaaagagagagtccaattctcaaagccaataggcagtagcgaaagctgcaagagaatgaaaatccgt

SEQ ID NO: 2996 - DNA, 135 bp, Artificial Sequence
  Description of Artificial Sequence: Synthetic polynucleotide
tagatgacttacaactaatcggaaggtgcagagactcgacgggagctaccctaacgtcaagacgagggtaaagagagagtccaattctcaaagccaataggcagtagcgaaagctgcaagagaatgaaaatccgt

SEQ ID NO: 2997 - DNA, 134 bp, Artificial Sequence
  Description of Artificial Sequence: Synthetic polynucleotide
agatgacttacaactaatcggaaggtgcagagactcgacgggagctaccctaacgtcaagacgagggtaaagagagagtccaattctcaaagccaataggcagtagcgaaagctgcaagagaatgaaaatccgt

SEQ ID NO: 2998 - DNA, 133 bp, Artificial Sequence
  Description of Artificial Sequence: Synthetic polynucleotide
gatgacttacaactaatcggaaggtgcagagactcgacgggagctaccctaacgtcaagacgagggtaaagagagagtccaattctcaaagccaataggcagtagcgaaagctgcaagagaatgaaaatccgt

SEQ ID NO: 2999 - DNA, 132 bp, Artificial Sequence
  Description of Artificial Sequence: Synthetic polynucleotide
atgacttacaactaatcggaaggtgcagagactcgacgggagctaccctaacgtcaagacgagggtaaagagagagtccaattctcaaagccaataggcagtagcgaaagctgcaagagaatgaaaatccgt

SEQ ID NO: 3000 - DNA, 131 bp, Artificial Sequence
  Description of Artificial Sequence: Synthetic polynucleotide
tgacttacaactaatcggaaggtgcagagactcgacgggagctaccctaacgtcaagacgagggtaaagagagagtccaattctcaaagccaataggcagtagcgaaagctgcaagagaatgaaaatccgt

SEQ ID NO: 3001 - DNA, 78 bp, Artificial Sequence
  Description of Artificial Sequence: Synthetic oligonucleotide
caagacgagggtaaagagagagtccaattctcaaagccaataggcagtagcgaaagctgcaagagaatgaaaatccgt

SEQ ID NO: 3002 - DNA, 77 bp, Artificial Sequence
  Description of Artificial Sequence: Synthetic oligonucleotide
aagacgagggtaaagagagagtccaattctcaaagccaataggcagtagcgaaagctgcaagagaatgaaaatccgt

SEQ ID NO: 3003 - DNA, 76 bp, Artificial Sequence
  Description of Artificial Sequence: Synthetic oligonucleotide
agacgagggtaaagagagagtccaattctcaaagccaataggcagtagcgaaagctgcaagagaatgaaaatccgt

SEQ ID NO: 3004 - DNA, 75 bp, Artificial Sequence
  Description of Artificial Sequence: Synthetic oligonucleotide
gacgagggtaaagagagagtccaattctcaaagccaataggcagtagcgaaagctgcaagagaatgaaaatccgt

SEQ ID NO: 3005 - DNA, 74 bp, Artificial Sequence
  Description of Artificial Sequence: Synthetic oligonucleotide
acgagggtaaagagagagtccaattctcaaagccaataggcagtagcgaaagctgcaagagaatgaaaatccgt

SEQ ID NO: 3006 - DNA, 40 bp, Artificial Sequence
  Description of Artificial Sequence: Synthetic oligonucleotide
aataggcagtagcgaaagctgcaagagaatgaaaatccgt

SEQ ID NO: 3007 - DNA, 39 bp, Artificial Sequence
  Description of Artificial Sequence: Synthetic oligonucleotide
ataggcagtagcgaaagctgcaagagaatgaaaatccgt

SEQ ID NO: 3008 - DNA, 38 bp, Artificial Sequence
  Description of Artificial Sequence: Synthetic oligonucleotide
taggcagtagcgaaagctgcaagagaatgaaaatccgt

SEQ ID NO: 3009 - DNA, 37 bp, Artificial Sequence
  Description of Artificial Sequence: Synthetic oligonucleotide
aggcagtagcgaaagctgcaagagaatgaaaatccgt

SEQ ID NO: 3010 - DNA, 36 bp, Artificial Sequence
  Description of Artificial Sequence: Synthetic oligonucleotide
ggcagtagcgaaagctgcaagagaatgaaaatccgt

SEQ ID NO: 3011 - DNA, 27 bp, Artificial Sequence
  Description of Artificial Sequence: Synthetic oligonucleotide
gaaagctgcaagagaatgaaaatccgt

SEQ ID NO: 3012 - DNA, 26 bp, Artificial Sequence
  Description of Artificial Sequence: Synthetic oligonucleotide
aaagctgcaagagaatgaaaatccgt

SEQ ID NO: 3013 - DNA, 25 bp, Artificial Sequence
  Description of Artificial Sequence: Synthetic oligonucleotide
aagctgcaagagaatgaaaatccgt

SEQ ID NO: 3014 - DNA, 24 bp, Artificial Sequence
  Description of Artificial Sequence: Synthetic oligonucleotide
agctgcaagagaatgaaaatccgt

SEQ ID NO: 3015 - DNA, 23 bp, Artificial Sequence
  Description of Artificial Sequence: Synthetic oligonucleotide
gctgcaagagaatgaaaatccgt

SEQ ID NO: 3016 - DNA, 22 bp, Artificial Sequence
  Description of Artificial Sequence: Synthetic oligonucleotide
ctgcaagagaatgaaaatccgt

SEQ ID NO: 3017 - DNA, 18 bp, Artificial Sequence
  Description of Artificial Sequence: Synthetic oligonucleotide
aagagaatgaaaatccgt

SEQ ID NO: 3018 - DNA, 17 bp, Artificial Sequence
  Description of Artificial Sequence: Synthetic oligonucleotide
agagaatgaaaatccgt

SEQ ID NO: 3019 - DNA, 16 bp, Artificial Sequence
  Description of Artificial Sequence: Synthetic oligonucleotide
gagaatgaaaatccgt

SEQ ID NO: 3020 - DNA, 35 bp, Artificial Sequence
  Description of Artificial Sequence: Synthetic oligonucleotide
gcagtagcgaaagctgcaagagaatgaaaatccgt

SEQ ID NO: 3021 - DNA, 33 bp, Artificial Sequence
  Description of Artificial Sequence: Synthetic oligonucleotide
agtagcgaaagctgcaagagaatgaaaatccgt

SEQ ID NO: 3022 - DNA, 32 bp, Artificial Sequence
  Description of Artificial Sequence: Synthetic oligonucleotide
gtagcgaaagctgcaagagaatgaaaatccgt

SEQ ID NO: 3023 - DNA, 26 bp, Artificial Sequence
  Description of Artificial Sequence: Synthetic oligonucleotide
acggacttaaataattgagccttaaa

SEQ ID NO: 3024 - DNA, 27 bp, Artificial Sequence
  Description of Artificial Sequence: Synthetic oligonucleotide
acggacttaaataattgagccttaaag

SEQ ID NO: 3025 - DNA, 28 bp, Artificial Sequence
  Description of Artificial Sequence: Synthetic oligonucleotide
acggacttaaataattgagccttaaaga

SEQ ID NO: 3026 - DNA, 76 bp, Artificial Sequence
  Description of Artificial Sequence: Synthetic oligonucleotide
acggacttaaataattgagccttaaagaagaaattctttaagtggatgctctcaaactcagggaaacctaaatcta

SEQ ID NO: 3027 - DNA, 77 bp, Artificial Sequence
  Description of Artificial Sequence: Synthetic oligonucleotide
acggacttaaataattgagccttaaagaagaaattctttaagtggatgctctcaaactcagggaaacctaaatctag

SEQ ID NO: 3028 - DNA, 78 bp, Artificial Sequence
  Description of Artificial Sequence: Synthetic oligonucleotide
acggacttaaataattgagccttaaagaagaaattctttaagtggatgctctcaaactcagggaaacctaaatctagt

SEQ ID NO: 3029 - DNA, 79 bp, Artificial Sequence
  Description of Artificial Sequence: Synthetic oligonucleotide
acggacttaaataattgagccttaaagaagaaattctttaagtggatgctctcaaactcagggaaacctaaatctagtt

SEQ ID NO: 3030 - DNA, 80 bp, Artificial Sequence
  Description of Artificial Sequence: Synthetic oligonucleotide
acggacttaaataattgagccttaaagaagaaattctttaagtggatgctctcaaactcagggaaacctaaatctagtta

SEQ ID NO: 3031 - DNA, 127 bp, Artificial Sequence
  Description of Artificial Sequence: Synthetic polynucleotide
acggacttaaataattgagccttaaagaagaaattctttaagtggatgctctcaaactcagggaaacctaaatctagttatagacaaggcaatcctgagccaagccgaagtagtaattagtaagtta

SEQ ID NO: 3032 - DNA, 128 bp, Artificial Sequence
  Description of Artificial Sequence: Synthetic polynucleotide
acggacttaaataattgagccttaaagaagaaattctttaagtggatgctctcaaactcagggaaacctaaatctagttatagacaaggcaatcctgagccaagccgaagtagtaattagtaagttaa

SEQ ID NO: 3033 - DNA, 129 bp, Artificial Sequence
  Description of Artificial Sequence: Synthetic polynucleotide
acggacttaaataattgagccttaaagaagaaattctttaagtggatgctctcaaactcagggaaacctaaatctagttatagacaaggcaatcctgagccaagccgaagtagtaattagtaagttaac

SEQ ID NO: 3034 - DNA, 130 bp, Artificial Sequence
  Description of Artificial Sequence: Synthetic polynucleotide
acggacttaaataattgagccttaaagaagaaattctttaagtggatgctctcaaactcagggaaacctaaatctagttatagacaaggcaatcctgagccaagccgaagtagtaattagtaagttaaca

SEQ ID NO: 3035 - DNA, 131 bp, Artificial Sequence
  Description of Artificial Sequence: Synthetic polynucleotide
acggacttaaataattgagccttaaagaagaaattctttaagtggatgctctcaaactcagggaaacctaaatctagttatagacaaggcaatcctgagccaagccgaagtagtaattagtaagttaacaa

SEQ ID NO: 3036 - DNA, 132 bp, Artificial Sequence
  Description of Artificial Sequence: Synthetic polynucleotide
acggacttaaataattgagccttaaagaagaaattctttaagtggatgctctcaaactcagggaaacctaaatctagttatagacaaggcaatcctgagccaagccgaagtagtaattagtaagttaacaat

SEQ ID NO: 3037 - DNA, 133 bp, Artificial Sequence
  Description of Artificial Sequence: Synthetic polynucleotide
acggacttaaataattgagccttaaagaagaaattctttaagtggatgctctcaaactcagggaaacctaaatctagttatagacaaggcaatcctgagccaagccgaagtagtaattagtaagttaacaata

SEQ ID NO: 3038 - DNA, 134 bp, Artificial Sequence
  Description of Artificial Sequence: Synthetic polynucleotide
acggacttaaataattgagccttaaagaagaaattctttaagtggatgctctcaaactcagggaaacctaaatctagttatagacaaggcaatcctgagccaagccgaagtagtaattagtaagttaacaatag

SEQ ID NO: 3039 - DNA, 135 bp, Artificial Sequence
  Description of Artificial Sequence: Synthetic polynucleotide
acggacttaaataattgagccttaaagaagaaattctttaagtggatgctctcaaactcagggaaacctaaatctagttatagacaaggcaatcctgagccaagccgaagtagtaattagtaagttaacaataga

SEQ ID NO: 3040 - DNA, 188 bp, Artificial Sequence
  Description of Artificial Sequence: Synthetic polynucleotide
acggacttaaataattgagccttaaagaagaaattctttaagtggatgctctcaaactcagggaaacctaaatctagttatagacaaggcaatcctgagccaagccgaagtagtaattagtaagttaacaatagatgacttacaactaatcggaaggtgcagagactcgacgggagctaccctaacgt

SEQ ID NO: 3041 - DNA, 189 bp, Artificial Sequence
  Description of Artificial Sequence: Synthetic polynucleotide
acggacttaaataattgagccttaaagaagaaattctttaagtggatgctctcaaactcagggaaacctaaatctagttatagacaaggcaatcctgagccaagccgaagtagtaattagtaagttaacaatagatgacttacaactaatcggaaggtgcagagactcgacgggagctaccctaacgtc

SEQ ID NO: 3042 - DNA, 190 bp, Artificial Sequence
  Description of Artificial Sequence: Synthetic polynucleotide
acggacttaaataattgagccttaaagaagaaattctttaagtggatgctctcaaactcagggaaacctaaatctagttatagacaaggcaatcctgagccaagccgaagtagtaattagtaagttaacaatagatgacttacaactaatcggaaggtgcagagactcgacgggagctaccctaacgtca

SEQ ID NO: 3043 - DNA, 191 bp, Artificial Sequence
  Description of Artificial Sequence: Synthetic polynucleotide
acggacttaaataattgagccttaaagaagaaattctttaagtggatgctctcaaactcagggaaacctaaatctagttatagacaaggcaatcctgagccaagccgaagtagtaattagtaagttaacaatagatgacttacaactaatcggaaggtgcagagactcgacgggagctaccctaacgtcaa

SEQ ID NO: 3044 - DNA, 192 bp, Artificial Sequence
  Description of Artificial Sequence: Synthetic polynucleotide
acggacttaaataattgagccttaaagaagaaattctttaagtggatgctctcaaactcagggaaacctaaatctagttatagacaaggcaatcctgagccaagccgaagtagtaattagtaagttaacaatagatgacttacaactaatcggaaggtgcagagactcgacgggagctaccctaacgtcaag

SEQ ID NO: 3045 - DNA, 226 bp, Artificial Sequence
  Description of Artificial Sequence: Synthetic polynucleotide
acggacttaaataattgagccttaaagaagaaattctttaagtggatgctctcaaactcagggaaacctaaatctagttatagacaaggcaatcctgagccaagccgaagtagtaattagtaagttaacaatagatgacttacaactaatcggaaggtgcagagactcgacgggagctaccctaacgtcaagacgagggtaaagagagagtccaattctcaaagcc

SEQ ID NO: 3046 - DNA, 227 bp, Artificial Sequence
  Description of Artificial Sequence: Synthetic polynucleotide
acggacttaaataattgagccttaaagaagaaattctttaagtggatgctctcaaactcagggaaacctaaatctagttatagacaaggcaatcctgagccaagccgaagtagtaattagtaagttaacaatagatgacttacaactaatcggaaggtgcagagactcgacgggagctaccctaacgtcaagacgagggtaaagagagagtccaattctcaaagcca

SEQ ID NO: 3047 - DNA, 228 bp, Artificial Sequence
  Description of Artificial Sequence: Synthetic polynucleotide
acggacttaaataattgagccttaaagaagaaattctttaagtggatgctctcaaactcagggaaacctaaatctagttatagacaaggcaatcctgagccaagccgaagtagtaattagtaagttaacaatagatgacttacaactaatcggaaggtgcagagactcgacgggagctaccctaacgtcaagacgagggtaaagagagagtccaattctcaaagccaa

SEQ ID NO: 3048 - DNA, 229 bp, Artificial Sequence
  Description of Artificial Sequence: Synthetic polynucleotide
acggacttaaataattgagccttaaagaagaaattctttaagtggatgctctcaaactcagggaaacctaaatctagttatagacaaggcaatcctgagccaagccgaagtagtaattagtaagttaacaatagatgacttacaactaatcggaaggtgcagagactcgacgggagctaccctaacgtcaagacgagggtaaagagagagtccaattctcaaagccaat

SEQ ID NO: 3049 - DNA, 230 bp, Artificial Sequence
  Description of Artificial Sequence: Synthetic polynucleotide
acggacttaaataattgagccttaaagaagaaattctttaagtggatgctctcaaactcagggaaacctaaatctagttatagacaaggcaatcctgagccaagccgaagtagtaattagtaagttaacaatagatgacttacaactaatcggaaggtgcagagactcgacgggagctaccctaacgtcaagacgagggtaaagagagagtccaattctcaaagccaata

SEQ ID NO: 3050 - DNA, 239 bp, Artificial Sequence
  Description of Artificial Sequence: Synthetic polynucleotide
acggacttaaataattgagccttaaagaagaaattctttaagtggatgctctcaaactcagggaaacctaaatctagttatagacaaggcaatcctgagccaagccgaagtagtaattagtaagttaacaatagatgacttacaactaatcggaaggtgcagagactcgacgggagctaccctaacgtcaagacgagggtaaagagagagtccaattctcaaagccaataggcagtagc

SEQ ID NO: 3051 - DNA, 240 bp, Artificial Sequence
  Description of Artificial Sequence: Synthetic polynucleotide
acggacttaaataattgagccttaaagaagaaattctttaagtggatgctctcaaactcagggaaacctaaatctagttatagacaaggcaatcctgagccaagccgaagtagtaattagtaagttaacaatagatgacttacaactaatcggaaggtgcagagactcgacgggagctaccctaacgtcaagacgagggtaaagagagagtccaattctcaaagccaataggcagtagcg

SEQ ID NO: 3052 - DNA, 241 bp, Artificial Sequence
  Description of Artificial Sequence: Synthetic polynucleotide
acggacttaaataattgagccttaaagaagaaattctttaagtggatgctctcaaactcagggaaacctaaatctagttatagacaaggcaatcctgagccaagccgaagtagtaattagtaagttaacaatagatgacttacaactaatcggaaggtgcagagactcgacgggagctaccctaacgtcaagacgagggtaaagagagagtccaattctcaaagccaataggcagtagcga

SEQ ID NO: 3053 - DNA, 242 bp, Artificial Sequence
  Description of Artificial Sequence: Synthetic polynucleotide
acggacttaaataattgagccttaaagaagaaattctttaagtggatgctctcaaactcagggaaacctaaatctagttatagacaaggcaatcctgagccaagccgaagtagtaattagtaagttaacaatagatgacttacaactaatcggaaggtgcagagactcgacgggagctaccctaacgtcaagacgagggtaaagagagagtccaattctcaaagccaataggcagtagcgaa

SEQ ID NO: 3054 - DNA, 243 bp, Artificial Sequence
  Description of Artificial Sequence: Synthetic polynucleotide
acggacttaaataattgagccttaaagaagaaattctttaagtggatgctctcaaactcagggaaacctaaatctagttatagacaaggcaatcctgagccaagccgaagtagtaattagtaagttaacaatagatgacttacaactaatcggaaggtgcagagactcgacgggagctaccctaacgtcaagacgagggtaaagagagagtccaattctcaaagccaataggcagtagcgaaa

SEQ ID NO: 3055 - DNA, 244 bp, Artificial Sequence
  Description of Artificial Sequence: Synthetic polynucleotide
acggacttaaataattgagccttaaagaagaaattctttaagtggatgctctcaaactcagggaaacctaaatctagttatagacaaggcaatcctgagccaagccgaagtagtaattagtaagttaacaatagatgacttacaactaatcggaaggtgcagagactcgacgggagctaccctaacgtcaagacgagggtaaagagagagtccaattctcaaagccaataggcagtagcgaaag

SEQ ID NO: 3056 - DNA, 248 bp, Artificial Sequence
  Description of Artificial Sequence: Synthetic polynucleotide
acggacttaaataattgagccttaaagaagaaattctttaagtggatgctctcaaactcagggaaacctaaatctagttatagacaaggcaatcctgagccaagccgaagtagtaattagtaagttaacaatagatgacttacaactaatcggaaggtgcagagactcgacgggagctaccctaacgtcaagacgagggtaaagagagagtccaattctcaaagccaataggcagtagcgaaagctgc

SEQ ID NO: 3057 - DNA, 249 bp, Artificial Sequence
  Description of Artificial Sequence: Synthetic polynucleotide
acggacttaaataattgagccttaaagaagaaattctttaagtggatgctctcaaactcagggaaacctaaatctagttatagacaaggcaatcctgagccaagccgaagtagtaattagtaagttaacaatagatgacttacaactaatcggaaggtgcagagactcgacgggagctaccctaacgtcaagacgagggtaaagagagagtccaattctcaaagccaataggcagtagcgaaagctgca

SEQ ID NO: 3058 - DNA, 250 bp, Artificial Sequence
  Description of Artificial Sequence: Synthetic polynucleotide
acggacttaaataattgagccttaaagaagaaattctttaagtggatgctctcaaactcagggaaacctaaatctagttatagacaaggcaatcctgagccaagccgaagtagtaattagtaagttaacaatagatgacttacaactaatcggaaggtgcagagactcgacgggagctaccctaacgtcaagacgagggtaaagagagagtccaattctcaaagccaataggcagtagcgaaagctgcaa

SEQ ID NO: 3059 - DNA, 231 bp, Artificial Sequence
  Description of Artificial Sequence: Synthetic polynucleotide
acggacttaaataattgagccttaaagaagaaattctttaagtggatgctctcaaactcagggaaacctaaatctagttatagacaaggcaatcctgagccaagccgaagtagtaattagtaagttaacaatagatgacttacaactaatcggaaggtgcagagactcgacgggagctaccctaacgtcaagacgagggtaaagagagagtccaattctcaaagccaatag

SEQ ID NO: 3060 - DNA, 233 bp, Artificial Sequence
  Description of Artificial Sequence: Synthetic polynucleotide
acggacttaaataattgagccttaaagaagaaattctttaagtggatgctctcaaactcagggaaacctaaatctagttatagacaaggcaatcctgagccaagccgaagtagtaattagtaagttaacaatagatgacttacaactaatcggaaggtgcagagactcgacgggagctaccctaacgtcaagacgagggtaaagagagagtccaattctcaaagccaataggc

SEQ ID NO: 3061 - DNA, 234 bp, Artificial Sequence
  Description of Artificial Sequence: Synthetic polynucleotide
acggacttaaataattgagccttaaagaagaaattctttaagtggatgctctcaaactcagggaaacctaaatctagttatagacaaggcaatcctgagccaagccgaagtagtaattagtaagttaacaatagatgacttacaactaatcggaaggtgcagagactcgacgggagctaccctaacgtcaagacgagggtaaagagagagtccaattctcaaagccaataggca

SEQ ID NO: 3062 - DNA, 104 bp, Artificial Sequence
  Description of Artificial Sequence: Synthetic polynucleotide
tgcgccgatgaaggtgtagagactagacggcacccacctaaggcaaacgctatggtgaaggcatagtccagggagtggcgaaagtcacacaaaccggaatccgt

SEQ ID NO: 3063 - DNA, 141 bp, Artificial Sequence
  Description of Artificial Sequence: Synthetic polynucleotide
ccgggcgtatggcaacgccgagccaagcttcggcgcctgcgccgatgaaggtgtagagactagacggcacccacctaaggcaaacgctatggtgaaggcatagtccagggagtggcgaaagtcacacaaaccggaatccgt

SEQ ID NO: 3064 - DNA, 78 bp, Artificial Sequence
  Description of Artificial Sequence: Synthetic oligonucleotide
acggcacccacctaaggcaaacgctatggtgaaggcatagtccagggagtggcgaaagtcacacaaaccggaatccgt

SEQ ID NO: 3065 - DNA, 58 bp, Artificial Sequence
  Description of Artificial Sequence: Synthetic oligonucleotide
acgctatggtgaaggcatagtccagggagtggcgaaagtcacacaaaccggaatccgt

SEQ ID NO: 3066 - DNA, 75 bp, Artificial Sequence
  Description of Artificial Sequence: Synthetic oligonucleotide
attaaagttatagaattatcagagaatgatatagtccaagccttatggtaacatgagggcacttgaccctggtag

SEQ ID NO: 3067 - DNA, 195 bp, Artificial Sequence
  Description of Artificial Sequence: Synthetic polynucleotide
aagatgtaggcaatcctgagctaagctcttagtaataagagaaagtgcaacgactattccgataggaagtagggtcaagtgactcgaaatggggattacccttctagggtagtgatatagtctgaacatatatggaaacatatagaaggataggagtaacgaacctattcgtaacataattgaacttttagttat

SEQ ID NO: 3068 - DNA, 163 bp, Artificial Sequence
  Description of Artificial Sequence: Synthetic polynucleotide
taataagagaaagtgcaacgactattccgataggaagtagggtcaagtgactcgaaatggggattacccttctagggtagtgatatagtctgaacatatatggaaacatatagaaggataggagtaacgaacctattcgtaacataattgaacttttagttat

SEQ ID NO: 3069 - DNA, 133 bp, Artificial Sequence
  Description of Artificial Sequence: Synthetic polynucleotide
taggaagtagggtcaagtgactcgaaatggggattacccttctagggtagtgatatagtctgaacatatatggaaacatatagaaggataggagtaacgaacctattcgtaacataattgaacttttagttat

SEQ ID NO: 3070 - DNA, 92 bp, Artificial Sequence
  Description of Artificial Sequence: Synthetic oligonucleotide
ctagggtagtgatatagtctgaacatatatggaaacatatagaaggataggagtaacgaacctattcgtaacataattgaacttttagttat

SEQ ID NO: 3071 - DNA, 92 bp, Artificial Sequence
  Description of Artificial Sequence: Synthetic oligonucleotide
agttaataaagatgatgaaatagtctgaaccattttgagaaaagtggaaataaaagaaaatcttttatgataacataaattgaacaggctaa

SEQ ID NO: 3072 - DNA, 62 bp, Artificial Sequence
  Description of Artificial Sequence: Synthetic oligonucleotide
caaagactgatgatatagtccgacactcctagtaataggagaatacagaaaggatgaaatcc

SEQ ID NO: 3073 - DNA, 76 bp, Artificial Sequence
  Description of Artificial Sequence: Synthetic oligonucleotide
agtcgagggtaaagggagagtccaattctcaaagcctattggcagtagcgaaagctgcgggagaatgaaaatccgt

SEQ ID NO: 3074 - DNA, 76 bp, Artificial Sequence
  Description of Artificial Sequence: Synthetic oligonucleotide
agccgagggtaaagggagagtccaattctcaaagccaataggcagtagcgaaagctgcgggagaatgaaaatccgt

SEQ ID NO: 3075 - DNA, 89 bp, Artificial Sequence
  Description of Artificial Sequence: Synthetic oligonucleotide
agccgagggtaaagggagagtccaattctcaaagccgaaggttattaaaacctggcagcagtgaaagctgcgggagaatgaaaatccgt

SEQ ID NO: 3076 - DNA, 79 bp, Artificial Sequence
  Description of Artificial Sequence: Synthetic oligonucleotide
agctgagggtaaagagagagtccaattctcaaagccagcagatggcagtagcgaaagctgcgggagaatgaaaatccgt

SEQ ID NO: 3077 - DNA, 76 bp, Artificial Sequence
  Description of Artificial Sequence: Synthetic oligonucleotide
agccgagggtaaagagagagtccaattctcaaagccaattggtagtagcgaaagctacgggagaatgaaaatccgt

SEQ ID NO: 3078 - DNA, 118 bp, Artificial Sequence
  Description of Artificial Sequence: Synthetic polynucleotide
gcggactcatatttcgatgtgccttgcgccgggaaaccacgcaagggatggtgtcaaattcggcgaaacctaagcgcccgcccgggcgtatggcaacgccgagccaagcttcggcgcc

SEQ ID NO: 3079 - DNA, 81 bp, Artificial Sequence
  Description of Artificial Sequence: Synthetic oligonucleotide
gcggactcatatttcgatgtgccttgcgccgggaaaccacgcaagggatggtgtcaaattcggcgaaacctaagcgcccgc

SEQ ID NO: 3080 - DNA, 144 bp, Artificial Sequence
  Description of Artificial Sequence: Synthetic polynucleotide
gcggactcatatttcgatgtgccttgcgccgggaaaccacgcaagggatggtgtcaaattcggcgaaacctaagcgcccgcccgggcgtatggcaacgccgagccaagcttcggcgcctgcgccgatgaaggtgtagagactag

SEQ ID NO: 3081 - DNA, 164 bp, Artificial Sequence
  Description of Artificial Sequence: Synthetic polynucleotide
gcggactcatatttcgatgtgccttgcgccgggaaaccacgcaagggatggtgtcaaattcggcgaaacctaagcgcccgcccgggcgtatggcaacgccgagccaagcttcggcgcctgcgccgatgaaggtgtagagactagacggcacccacctaaggcaa

SEQ ID NO: 3082 - DNA, 179 bp, Artificial Sequence
  Description of Artificial Sequence: Synthetic polynucleotide
aggattagatactacactaagtgtcccccagactggtgacagtctggtgtgcatccagctatatcggtgaaaccccattggggtaataccgagggaagctatattatatatatattaataaatagccccgtagagactatgtaggtaaggagatagaagatgataaaatcaaaatcatc

SEQ ID NO: 3083 - DNA, 84 bp, Artificial Sequence
  Description of Artificial Sequence: Synthetic oligonucleotide
actactgaaagcataaataattgtgcctttatacagtaatgtatatcgaaaaatcctctaattcagggaacacctaaacaaact

SEQ ID NO: 3084 - DNA, 116 bp, Artificial Sequence
  Description of Artificial Sequence: Synthetic polynucleotide
actactgaaagcataaataattgtgcctttatacagtaatgtatatcgaaaaatcctctaattcagggaacacctaaacaaactaagatgtaggcaatcctgagctaagctcttag

SEQ ID NO: 3085 - DNA, 146 bp, Artificial Sequence
  Description of Artificial Sequence: Synthetic polynucleotide
actactgaaagcataaataattgtgcctttatacagtaatgtatatcgaaaaatcctctaattcagggaacacctaaacaaactaagatgtaggcaatcctgagctaagctcttagtaataagagaaagtgcaacgactattccga

SEQ ID NO: 3086 - DNA, 187 bp, Artificial Sequence
  Description of Artificial Sequence: Synthetic polynucleotide
actactgaaagcataaataattgtgcctttatacagtaatgtatatcgaaaaatcctctaattcagggaacacctaaacaaactaagatgtaggcaatcctgagctaagctcttagtaataagagaaagtgcaacgactattccgataggaagtagggtcaagtgactcgaaatggggattaccctt

SEQ ID NO: 3087 - DNA, 216 bp, Artificial Sequence
  Description of Artificial Sequence: Synthetic polynucleotide
cgctagggatttataactgtgagtcctccaatattataaaatgttggtaatatattgggtaaatttcaaagacaacttttctccacgtcaggatatagtgtatttgaagcgaaacttattttagcagtgaaaaagcaaataaggacgttcaacgactaaaaggtgagtattgctaacaataatccttttttttaatgcccaacatctttattaact

SEQ ID NO: 3088 - DNA, 559 bp, Artificial Sequence
  Description of Artificial Sequence: Synthetic polynucleotide
gtgggtgcataaactatttcattgtgcacattaaatctggtgaactcggtgaaaccctaatggggcaataccgagccaagccatagggaggatatatgagaggcaagaagttaattcttgaggccactgagactggctgtatcatccctacgtcacacaaacttaatgccgatggttatttcagaaagaaaaccaatggcgtcttagagatgtatcacagaacggtgtggaaggagcataacggagacatacctgatggcttcgagatagaccataagtgtcgcaatagggcttgctgtaatatagagcatttacagatgcttgagggtacagcccacactgttaagaccaatcgtgaacgctacgcagacagaaaggaaacagctagggaatactggctggagactggatgtaccggcctagcactcggtgagaagtttggtgtgtcgttctcttctgcttgtaagtggattagagaatggaaggcgtagagactatccgaaaggagtagggccgagggtgagactccctcgtaacccgaagcgccagacagtcaact

SEQ ID NO: 3089 - DNA, 218 bp, Artificial Sequence
  Description of Artificial Sequence: Synthetic polynucleotide
acggacttaagtaattgagccttaaagaagaaattctttaagtggcagctctcaaactcagggaaacctaaatctgttcacagacaaggcaatcctgagccaagccgaaagagtcatgagtgctgagtagtgagtaaaataaaagctcacaactcagaggttgtaactctaagctagtcggaaggtgcagagactcgacgggagctaccctaacgtaa

SEQ ID NO: 3090 - DNA, 165 bp, Artificial Sequence
  Description of Artificial Sequence: Synthetic polynucleotide
acggacttaaactgaattgagccttagagaagaaattctttaagtgtcagctctcaaactcagggaaacctaaatctgttgacagacaaggcaatcctgagccaagccgagaactctaagttattcggaaggtgcagagactcgacgggagctaccctaacgtca

SEQ ID NO: 3091 - DNA, 181 bp, Artificial Sequence
  Description of Artificial Sequence: Synthetic polynucleotide
acggacttagaaaactgagccttgatcgagaaatctttcaagtggaagctctcaaattcagggaaacctaaatctgtttacagatatggcaatcctgagccaagccgaaacaagtcctgagtgttaaagctcataactcatcggaaggtgcagagactcgacgggagctaccctaacgtta

SEQ ID NO: 3092 - DNA, 188 bp, Artificial Sequence
  Description of Artificial Sequence: Synthetic polynucleotide
acggacttaaaaaaattgagccttggcagagaaatctgtcatgcgaacgctctcaaattcagggaaacctaagtctggcaacagatatggcaatcctgagccaagccttaatcaaggaaaaaaacatttttaccttttaccttgaaaggaaggtgcagagactcaacgggagctaccctaacaggtca

SEQ ID NO: 3093 - DNA, 200 bp, Artificial Sequence
  Description of Artificial Sequence: Synthetic polynucleotide
acggacttaaagataaattgagccttgaggcgagaaatctctcaagtgtaagctgtcaaattcagggaaacctaaatctgtaaattcagacaaggcaatcctgagccaagcctaggggtattagaaatgagggagtttccccaatctaagatcaatacctaggaaggtgcagagactcgacgggagctaccctaacgtta

SEQ ID NO: 3094 - DNA, 162 bp, Artificial Sequence
  Description of Artificial Sequence: Synthetic polynucleotide
gctgcgagccacggacttaaataattgagccttaaagaagaaattctttaagtggatgctctcaaactcagggaaacctaaatctagttatagacaaggcaatcctgagccaagccgaagtagtaattagtaagttaacaacacaaacacaacttatatact

SEQ ID NO: 3095 - DNA, 172 bp, Artificial Sequence
  Description of Artificial Sequence: Synthetic polynucleotide
gctgcgagccacggacttaaataattgagccttaaagaagaaattctttaagtggatgctctcaaactcagggaaacctaaatctagttatagacaaggcaatcctgagccaagccgaagtagtaattagtaagttaacaacacaaacacaagagtataagtataatttcag

SEQ ID NO: 3096 - DNA, 182 bp, Artificial Sequence
  Description of Artificial Sequence: Synthetic polynucleotide
gctgcgagccacggacttaaataattgagccttaaagaagaaattctttaagtggatgctctcaaactcagggaaacctaaatctagttatagacaaggcaatcctgagccaagccgaagtagtaattagtaagttaacaacacaaacacaagtcatatactgagtataagtataatttcag

SEQ ID NO: 3097 - DNA, 192 bp, Artificial Sequence
  Description of Artificial Sequence: Synthetic polynucleotide
gctgcgagccacggacttaaataattgagccttaaagaagaaattctttaagtggatgctctcaaactcagggaaacctaaatctagttatagacaaggcaatcctgagccaagccgaagtagtaattagtaagttaacaacacaaacacaagtcatatactgagtataagtataatttcatattgttgatg

SEQ ID NO: 3098 - DNA, 202 bp, Artificial Sequence
  Description of Artificial Sequence: Synthetic polynucleotide
gctgcgagccacggacttaaataattgagccttaaagaagaaattctttaagtggatgctctcaaactcagggaaacctaaatctagttatagacaaggcaatcctgagccaagccgaagtagtaattagtaagttaacaacacaaacacaagcgataatgcttcatatactgagtataagtatagtttcatattgttgatg

SEQ ID NO: 3099 - DNA, 162 bp, Artificial Sequence
  Description of Artificial Sequence: Synthetic polynucleotide
gctgcgagccacggacttaaataattgagccttaaagaagaaattctttaagtggatgctctcaaactcagggaaacctaaatctagttatagacaaggcaatcctgagccaagccgaagtagtaattagtaagttaacaaaacaaaaacaagctgacgcta

SEQ ID NO: 3100 - DNA, 172 bp, Artificial Sequence
  Description of Artificial Sequence: Synthetic polynucleotide
gctgcgagccacggacttaaataattgagccttaaagaagaaattctttaagtggatgctctcaaactcagggaaacctaaatctagttatagacaaggcaatcctgagccaagccgaagtagtaattagtaagttaacaaaacaaaaacaagctgacgctagtatgagtat

SEQ ID NO: 3101 - DNA, 182 bp, Artificial Sequence
  Description of Artificial Sequence: Synthetic polynucleotide
gctgcgagccacggacttaaataattgagccttaaagaagaaattctttaagtggatgctctcaaactcagggaaacctaaatctagttatagacaaggcaatcctgagccaagccgaagtagtaattagtaagttaacaaaacaaaaacaagctgacgctagtatgagtatagcttcacac

SEQ ID NO: 3102 - DNA, 192 bp, Artificial Sequence
  Description of Artificial Sequence: Synthetic polynucleotide
gctgcgagccacggacttaaataattgagccttaaagaagaaattctttaagtggatgctctcaaactcagggaaacctaaatctagttatagacaaggcaatcctgagccaagccgaagtagtaattagtaagttaacaaaacaaaaacaagctgacgctagtatgagtatagcttcacactcaggtgagg

SEQ ID NO: 3103 - DNA, 202 bp, Artificial Sequence
  Description of Artificial Sequence: Synthetic polynucleotide
gctgcgagccacggacttaaataattgagccttaaagaagaaattctttaagtggatgctctcaaactcagggaaacctaaatctagttatagacaaggcaatcctgagccaagccgaagtagtaattagtaagttaacaaaacaaaaacaagctgacgctagtatgagtatagcttcacactcaggtgaggcatcattcgg

SEQ ID NO: 3104 - DNA, 162 bp, Artificial Sequence
  Description of Artificial Sequence: Synthetic polynucleotide
gctgcgagccacggacttaaataattgagccttaaagaagaaattctttaagtggatgctctcaaactcagggaaacctaaatctagttatagacaaggcaatcctgagccaagccgaagtagtaattagtaagttaacaaaacaaaaacaagctcgcaccg

SEQ ID NO: 3105 - DNA, 172 bp, Artificial Sequence
  Description of Artificial Sequence: Synthetic polynucleotide
gctgcgagccacggacttaaataattgagccttaaagaagaaattctttaagtggatgctctcaaactcagggaaacctaaatctagttatagacaaggcaatcctgagccaagccgaagtagtaattagtaagttaacaaaacaaaaacaagctcgcactgggtcggagcg

SEQ ID NO: 3106 - DNA, 182 bp, Artificial Sequence
  Description of Artificial Sequence: Synthetic polynucleotide
gctgcgagccacggacttaaataattgagccttaaagaagaaattctttaagtggatgctctcaaactcagggaaacctaaatctagttatagacaaggcaatcctgagccaagccgaagtagtaattagtaagttaacaacacaaacacaagtaacttagagagtataagtataatttcag

SEQ ID NO: 3107 - DNA, 182 bp, Artificial Sequence
  Description of Artificial Sequence: Synthetic polynucleotide
gctgcgagccacggacttaaataattgagccttaaagaagaaattctttaagtggatgctctcaaactcagggaaacctaaatctagttatagacaaggcaatcctgagccaagccgaagtagtaattagtaagttaacaacacaaacacaagtaacttagatgtaacacacataatttcag

SEQ ID NO: 3108 - DNA, 182 bp, Artificial Sequence
  Description of Artificial Sequence: Synthetic polynucleotide
gctgcgagccacggacttaaataattgagccttaaagaagaaattctttaagtggatgctctcaaactcagggaaacctaaatctagttatagacaaggcaatcctgagccaagccgaagtagtaattagtaagttaacaacacaaacacaagtaacttagatgtaacacacaccgatcaac

SEQ ID NO: 3109 - DNA, 182 bp, Artificial Sequence
  Description of Artificial Sequence: Synthetic polynucleotide
ctgtttaatcacggacttaaataattgagccttaaagaagaaattctttaagtggatgctctcaaactcagggaaacctaaatctagttatagacaaggcaatcctgagccaagccgaagtagtaattagtaagttaacaacacaaacacaagtcatatactgagtataagtataatttcag

SEQ ID NO: 3110 - DNA, 192 bp, Artificial Sequence
  Description of Artificial Sequence: Synthetic polynucleotide
cgtaatttatattgtgaatcacggacttaaataattgagccttaaagaagaaattctttaagtggatgctctcaaactcagggaaacctaaatctagttatagacaaggcaatcctgagccaagccgaagtagtaattagtaagttaacaacacaaacacaagtcatatactgagtataagtataatttcag

SEQ ID NO: 3111 - DNA, 182 bp, Artificial Sequence
  Description of Artificial Sequence: Synthetic polynucleotide
gctatgatccacggacttaaataattgagccttaaagaagaaattctttaagtggatgctctcaaactcagggaaacctaaatctagttatagacaaggcaatcctgagccaagccgaagtagtaattagtaagttaacaacacaaacacaagtcatatactgagtataagtataatttcag

SEQ ID NO: 3112 - DNA, 192 bp, Artificial Sequence
  Description of Artificial Sequence: Synthetic polynucleotide
cggatattatgctgcgatccacggacttaaataattgagccttaaagaagaaattctttaagtggatgctctcaaactcagggaaacctaaatctagttatagacaaggcaatcctgagccaagccgaagtagtaattagtaagttaacaacacaaacacaagtcatatactgagtataagtataatttcag

SEQ ID NO: 3113 - DNA, 192 bp, Artificial Sequence
  Description of Artificial Sequence: Synthetic polynucleotide
cggtaggcgcgctgcgagccacggacttaaataattgagccttaaagaagaaattctttaagtggatgctctcaaactcagggaaacctaaatctagttatagacaaggcaatcctgagccaagccgaagtagtaattagtaagttaacaacacaaacacaagtcatatactgagtataagtataatttcag

SEQ ID NO: 3114 - DNA, 215 bp, Artificial Sequence
  Description of Artificial Sequence: Synthetic polynucleotide
gcgctaacgtcgacgccggcaaacggtaggcgcgctgcgagccacggacttaaataattgagccttaaagaagaaattctttaagtggatgctctcaaactcagggaaacctaaatctagttatagacaaggcaatcctgagccaagccgaagtagtaattagtaagttaacaacacaaacacaagtcatatactgagtataagtataatttcag

SEQ ID NO: 3115 - DNA, 215 bp, Artificial Sequence
  Description of Artificial Sequence: Synthetic polynucleotide
gcatgtcacttgtatcctcgaaacggatattatgctgcgatccacggacttaaataattgagccttaaagaagaaattctttaagtggatgctctcaaactcagggaaacctaaatctagttatagacaaggcaatcctgagccaagccgaagtagtaattagtaagttaacaacacaaacacaagtcatatactgagtataagtataatttcag

SEQ ID NO: 3116 - DNA, 215 bp, Artificial Sequence
  Description of Artificial Sequence: Synthetic polynucleotide
gttagagttatcatttatcgaaacgtaatttagattgtgaatcacggacttaaataattgagccttaaagaagaaattctttaagtggatgctctcaaactcagggaaacctaaatctagttatagacaaggcaatcctgagccaagccgaagtagtaattagtaagttaacaacacaaacacaagtcatatactgagtataagtataatttcag

SEQ ID NO: 3117 - DNA, 152 bp, Artificial Sequence
  Description of Artificial Sequence: Synthetic polynucleotide
gctgcgagccacggacttaaataattgagccttaaagaagaaattctttaagtggatgctctcaaactcagggaaacctaaatctagttatagacaaggcaatcctgagccaagccgaagtagtaattagtaagttaacaacacaaacacaa

SEQ ID NO: 3118 - DNA, 157 bp, Artificial Sequence
  Description of Artificial Sequence: Synthetic polynucleotide
gctgcgagccacggacttaaataattgagccttaaagaagaaattctttaagtggatgctctcaaactcagggaaacctaaatctagttatagacaaggcaatcctgagccaagccgaagtagtaattagtaagttaacaaaacaaaaacaagcccg

SEQ ID NO: 3119 - DNA, 182 bp, Artificial Sequence
  Description of Artificial Sequence: Synthetic polynucleotide
gctgcgagccacggacttaaataattgagccttaaagaagaaattctttaagtggatgctctcaaactcagggaaacctaaatctagttatagacaaggcaatcctgagccaagccgaagtagtaattagtaagttaacaaaacaaaaacaagctcgcactggccggaagctcgtcggagcg

SEQ ID NO: 3120 - DNA, 251 bp, Artificial Sequence
  Description of Artificial Sequence: Synthetic polynucleotide
gctgcgagccacggacttaaataattgagccttaaagaagaaattctttaagtggatgctctcaaactcagggaaacctaaatctagttatagacaaggcaatcctgagccaagccgaagtagtaattagtaagttaacaatagatgacttacaactaatcggaaggtgcagagactcgacgggagctaccctaacgtcaagacgagggtaaagagagagtccaattctcaaagccaatacacaaacacaa

SEQ ID NO: 3121 - DNA, 261 bp, Artificial Sequence
  Description of Artificial Sequence: Synthetic polynucleotide
gctgcgagccacggacttaaataattgagccttaaagaagaaattctttaagtggatgctctcaaactcagggaaacctaaatctagttatagacaaggcaatcctgagccaagccgaagtagtaattagtaagttaacaatagatgacttacaactaatcggaaggtgcagagactcgacgggagctaccctaacgtcaagacgagggtaaagagagagtccaattctcaaagccaatacacaaacacaacttatatact

SEQ ID NO: 3122 - DNA, 271 bp, Artificial Sequence
  Description of Artificial Sequence: Synthetic polynucleotide
gctgcgagccacggacttaaataattgagccttaaagaagaaattctttaagtggatgctctcaaactcagggaaacctaaatctagttatagacaaggcaatcctgagccaagccgaagtagtaattagtaagttaacaatagatgacttacaactaatcggaaggtgcagagactcgacgggagctaccctaacgtcaagacgagggtaaagagagagtccaattctcaaagccaatacacaaacacaagagtataagtataatttcag

SEQ ID NO: 3123 - DNA, 281 bp, Artificial Sequence
  Description of Artificial Sequence: Synthetic polynucleotide
gctgcgagccacggacttaaataattgagccttaaagaagaaattctttaagtggatgctctcaaactcagggaaacctaaatctagttatagacaaggcaatcctgagccaagccgaagtagtaattagtaagttaacaatagatgacttacaactaatcggaaggtgcagagactcgacgggagctaccctaacgtcaagacgagggtaaagagagagtccaattctcaaagccaatacacaaacacaagtcatatactgagtataagtataatttcag

SEQ ID NO: 3124 - DNA, 261 bp, Artificial Sequence
  Description of Artificial Sequence: Synthetic polynucleotide
gctgcgagccacggacttaaataattgagccttaaagaagaaattctttaagtggatgctctcaaactcagggaaacctaaatctagttatagacaaggcaatcctgagccaagccgaagtagtaattagtaagttaacaatagatgacttacaactaatcggaaggtgcagagactcgacgggagctaccctaacgtcaagacgagggtaaagagagagtccaattctcaaagccaataaacaaaaacaagctgacgcta

SEQ ID NO: 3125 - DNA, 271 bp, Artificial Sequence
  Description of Artificial Sequence: Synthetic polynucleotide
gctgcgagccacggacttaaataattgagccttaaagaagaaattctttaagtggatgctctcaaactcagggaaacctaaatctagttatagacaaggcaatcctgagccaagccgaagtagtaattagtaagttaacaatagatgacttacaactaatcggaaggtgcagagactcgacgggagctaccctaacgtcaagacgagggtaaagagagagtccaattctcaaagccaataaacaaaaacaagctgacgctagtatgagtat

SEQ ID NO: 3126 - DNA, 281 bp, Artificial Sequence
  Description of Artificial Sequence: Synthetic polynucleotide
gctgcgagccacggacttaaataattgagccttaaagaagaaattctttaagtggatgctctcaaactcagggaaacctaaatctagttatagacaaggcaatcctgagccaagccgaagtagtaattagtaagttaacaatagatgacttacaactaatcggaaggtgcagagactcgacgggagctaccctaacgtcaagacgagggtaaagagagagtccaattctcaaagccaataaacaaaaacaagctgacgctagtatgagtatagcttcacac

SEQ ID NO: 3127 - DNA, 261 bp, Artificial Sequence
  Description of Artificial Sequence: Synthetic polynucleotide
gctgcgagccacggacttaaataattgagccttaaagaagaaattctttaagtggatgctctcaaactcagggaaacctaaatctagttatagacaaggcaatcctgagccaagccgaagtagtaattagtaagttaacaatagatgacttacaactaatcggaaggtgcagagactcgacgggagctaccctaacgtcaagacgagggtaaagagagagtccaattctcaaagccaataaacaaaaacaagctcgcaccg

SEQ ID NO: 3128 - DNA, 271 bp, Artificial Sequence
  Description of Artificial Sequence: Synthetic polynucleotide
gctgcgagccacggacttaaataattgagccttaaagaagaaattctttaagtggatgctctcaaactcagggaaacctaaatctagttatagacaaggcaatcctgagccaagccgaagtagtaattagtaagttaacaatagatgacttacaactaatcggaaggtgcagagactcgacgggagctaccctaacgtcaagacgagggtaaagagagagtccaattctcaaagccaataaacaaaaacaagctcgcactgggtcggagcg

SEQ ID NO: 3129 - DNA, 281 bp, Artificial Sequence
  Description of Artificial Sequence: Synthetic polynucleotide
gctgcgagccacggacttaaataattgagccttaaagaagaaattctttaagtggatgctctcaaactcagggaaacctaaatctagttatagacaaggcaatcctgagccaagccgaagtagtaattagtaagttaacaatagatgacttacaactaatcggaaggtgcagagactcgacgggagctaccctaacgtcaagacgagggtaaagagagagtccaattctcaaagccaataaacaaaaacaagctcgcactggccggaagctcgtcggagcg

SEQ ID NO: 3130 - DNA, 210 bp, Artificial Sequence
  Description of Artificial Sequence: Synthetic polynucleotide
gctgcgagccacggacttaaataattgagccttaaagaagaaattctttaagtggatgctctcaaactcagggaaacctaaatctagttatagacaaggcaatcctgagccaagccgaagtagtaattagtaagttaacaatagatgacttacaactaatcggaaggtgcagagactcgacgggagctaccctaacgtccacaaacacaa

SEQ ID NO: 3131 - DNA, 220 bp, Artificial Sequence
  Description of Artificial Sequence: Synthetic polynucleotide
gctgcgagccacggacttaaataattgagccttaaagaagaaattctttaagtggatgctctcaaactcagggaaacctaaatctagttatagacaaggcaatcctgagccaagccgaagtagtaattagtaagttaacaatagatgacttacaactaatcggaaggtgcagagactcgacgggagctaccctaacgtccacaaacacaacttatatact

SEQ ID NO: 3132 - DNA, 230 bp, Artificial Sequence
  Description of Artificial Sequence: Synthetic polynucleotide
gctgcgagccacggacttaaataattgagccttaaagaagaaattctttaagtggatgctctcaaactcagggaaacctaaatctagttatagacaaggcaatcctgagccaagccgaagtagtaattagtaagttaacaatagatgacttacaactaatcggaaggtgcagagactcgacgggagctaccctaacgtccacaaacacaagagtataagtataatttcag

SEQ ID NO: 3133 - DNA, 240 bp, Artificial Sequence
  Description of Artificial Sequence: Synthetic polynucleotide
gctgcgagccacggacttaaataattgagccttaaagaagaaattctttaagtggatgctctcaaactcagggaaacctaaatctagttatagacaaggcaatcctgagccaagccgaagtagtaattagtaagttaacaatagatgacttacaactaatcggaaggtgcagagactcgacgggagctaccctaacgtccacaaacacaagtcatatactgagtataagtataatttcag

SEQ ID NO: 3134 - DNA, 220 bp, Artificial Sequence
  Description of Artificial Sequence: Synthetic polynucleotide
gctgcgagccacggacttaaataattgagccttaaagaagaaattctttaagtggatgctctcaaactcagggaaacctaaatctagttatagacaaggcaatcctgagccaagccgaagtagtaattagtaagttaacaatagatgacttacaactaatcggaaggtgcagagactcgacgggagctaccctaacgtcaacaaaaacaagctgacgcta

SEQ ID NO: 3135 - DNA, 230 bp, Artificial Sequence
  Description of Artificial Sequence: Synthetic polynucleotide
gctgcgagccacggacttaaataattgagccttaaagaagaaattctttaagtggatgctctcaaactcagggaaacctaaatctagttatagacaaggcaatcctgagccaagccgaagtagtaattagtaagttaacaatagatgacttacaactaatcggaaggtgcagagactcgacgggagctaccctaacgtcaacaaaaacaagctgacgctagtatgagtat

SEQ ID NO: 3136 - DNA, 240 bp, Artificial Sequence
  Description of Artificial Sequence: Synthetic polynucleotide
gctgcgagccacggacttaaataattgagccttaaagaagaaattctttaagtggatgctctcaaactcagggaaacctaaatctagttatagacaaggcaatcctgagccaagccgaagtagtaattagtaagttaacaatagatgacttacaactaatcggaaggtgcagagactcgacgggagctaccctaacgtcaacaaaaacaagctgacgctagtatgagtatagcttcacac

SEQ ID NO: 3137 - DNA, 220 bp, Artificial Sequence
  Description of Artificial Sequence: Synthetic polynucleotide
gctgcgagccacggacttaaataattgagccttaaagaagaaattctttaagtggatgctctcaaactcagggaaacctaaatctagttatagacaaggcaatcctgagccaagccgaagtagtaattagtaagttaacaatagatgacttacaactaatcggaaggtgcagagactcgacgggagctaccctaacgtcaacaaaaacaagctcgcaccg

SEQ ID NO: 3138 - DNA, 230 bp, Artificial Sequence
  Description of Artificial Sequence: Synthetic polynucleotide
gctgcgagccacggacttaaataattgagccttaaagaagaaattctttaagtggatgctctcaaactcagggaaacctaaatctagttatagacaaggcaatcctgagccaagccgaagtagtaattagtaagttaacaatagatgacttacaactaatcggaaggtgcagagactcgacgggagctaccctaacgtcaacaaaaacaagctcgcactgggtcggagcg

SEQ ID NO: 3139 - DNA, 240 bp, Artificial Sequence
  Description of Artificial Sequence: Synthetic polynucleotide
gctgcgagccacggacttaaataattgagccttaaagaagaaattctttaagtggatgctctcaaactcagggaaacctaaatctagttatagacaaggcaatcctgagccaagccgaagtagtaattagtaagttaacaatagatgacttacaactaatcggaaggtgcagagactcgacgggagctaccctaacgtcaacaaaaacaagctcgcactggccggaagctcgtcggagcg

SEQ ID NO: 3140 - DNA, 172 bp, Artificial Sequence
  Description of Artificial Sequence: Synthetic polynucleotide
acggacttaaataattgagccttaaagaagaaattctttaagtggatgctctcaaactcagggaaacctaaatctagttatagacaaggcaatcctgagccaagccgaagtagtaattagtaagttaacaacacaaacacaagtcatatactgagtataagtataatttcag

SEQ ID NO: 3141 - DNA, 271 bp, Artificial Sequence
  Description of Artificial Sequence: Synthetic polynucleotide
acggacttaaataattgagccttaaagaagaaattctttaagtggatgctctcaaactcagggaaacctaaatctagttatagacaaggcaatcctgagccaagccgaagtagtaattagtaagttaacaatagatgacttacaactaatcggaaggtgcagagactcgacgggagctaccctaacgtcaagacgagggtaaagagagagtccaattctcaaagccaatacacaaacacaagtcatatactgagtataagtataatttcag

SEQ ID NO: 3142 - DNA, 281 bp, Artificial Sequence
  Description of Artificial Sequence: Synthetic polynucleotide
ctgtttaatcacggacttaaataattgagccttaaagaagaaattctttaagtggatgctctcaaactcagggaaacctaaatctagttatagacaaggcaatcctgagccaagccgaagtagtaattagtaagttaacaatagatgacttacaactaatcggaaggtgcagagactcgacgggagctaccctaacgtcaagacgagggtaaagagagagtccaattctcaaagccaatacacaaacacaagtcatatactgagtataagtataatttcag

SEQ ID NO: 3143 - DNA, 291 bp, Artificial Sequence
  Description of Artificial Sequence: Synthetic polynucleotide
cgtaatttatattgtgaatcacggacttaaataattgagccttaaagaagaaattctttaagtggatgctctcaaactcagggaaacctaaatctagttatagacaaggcaatcctgagccaagccgaagtagtaattagtaagttaacaatagatgacttacaactaatcggaaggtgcagagactcgacgggagctaccctaacgtcaagacgagggtaaagagagagtccaattctcaaagccaatacacaaacacaagtcatatactgagtataagtataatttcag

SEQ ID NO: 3144 - DNA, 281 bp, Artificial Sequence
  Description of Artificial Sequence: Synthetic polynucleotide
gctatgatccacggacttaaataattgagccttaaagaagaaattctttaagtggatgctctcaaactcagggaaacctaaatctagttatagacaaggcaatcctgagccaagccgaagtagtaattagtaagttaacaatagatgacttacaactaatcggaaggtgcagagactcgacgggagctaccctaacgtcaagacgagggtaaagagagagtccaattctcaaagccaatacacaaacacaagtcatatactgagtataagtataatttcag

SEQ ID NO: 3145 - DNA, 291 bp, Artificial Sequence
  Description of Artificial Sequence: Synthetic polynucleotide
cggatattatgctgcgatccacggacttaaataattgagccttaaagaagaaattctttaagtggatgctctcaaactcagggaaacctaaatctagttatagacaaggcaatcctgagccaagccgaagtagtaattagtaagttaacaatagatgacttacaactaatcggaaggtgcagagactcgacgggagctaccctaacgtcaagacgagggtaaagagagagtccaattctcaaagccaatacacaaacacaagtcatatactgagtataagtataatttcag

SEQ ID NO: 3146 - DNA, 291 bp, Artificial Sequence
  Description of Artificial Sequence: Synthetic polynucleotide
cggtaggcgcgctgcgagccacggacttaaataattgagccttaaagaagaaattctttaagtggatgctctcaaactcagggaaacctaaatctagttatagacaaggcaatcctgagccaagccgaagtagtaattagtaagttaacaatagatgacttacaactaatcggaaggtgcagagactcgacgggagctaccctaacgtcaagacgagggtaaagagagagtccaattctcaaagccaatacacaaacacaagtcatatactgagtataagtataatttcag

SEQ ID NO: 3147 - DNA, 230 bp, Artificial Sequence
  Description of Artificial Sequence: Synthetic polynucleotide
acggacttaaataattgagccttaaagaagaaattctttaagtggatgctctcaaactcagggaaacctaaatctagttatagacaaggcaatcctgagccaagccgaagtagtaattagtaagttaacaatagatgacttacaactaatcggaaggtgcagagactcgacgggagctaccctaacgtccacaaacacaagtcatatactgagtataagtataatttcag

SEQ ID NO: 3148 - DNA, 240 bp, Artificial Sequence
  Description of Artificial Sequence: Synthetic polynucleotide
ctgtttaatcacggacttaaataattgagccttaaagaagaaattctttaagtggatgctctcaaactcagggaaacctaaatctagttatagacaaggcaatcctgagccaagccgaagtagtaattagtaagttaacaatagatgacttacaactaatcggaaggtgcagagactcgacgggagctaccctaacgtccacaaacacaagtcatatactgagtataagtataatttcag

SEQ ID NO: 3149 - DNA, 250 bp, Artificial Sequence
  Description of Artificial Sequence: Synthetic polynucleotide
cgtaatttatattgtgaatcacggacttaaataattgagccttaaagaagaaattctttaagtggatgctctcaaactcagggaaacctaaatctagttatagacaaggcaatcctgagccaagccgaagtagtaattagtaagttaacaatagatgacttacaactaatcggaaggtgcagagactcgacgggagctaccctaacgtccacaaacacaagtcatatactgagtataagtataatttcag

SEQ ID NO: 3150 - DNA, 240 bp, Artificial Sequence
  Description of Artificial Sequence: Synthetic polynucleotide
gctatgatccacggacttaaataattgagccttaaagaagaaattctttaagtggatgctctcaaactcagggaaacctaaatctagttatagacaaggcaatcctgagccaagccgaagtagtaattagtaagttaacaatagatgacttacaactaatcggaaggtgcagagactcgacgggagctaccctaacgtccacaaacacaagtcatatactgagtataagtataatttcag

SEQ ID NO: 3151 - DNA, 250 bp, Artificial Sequence
  Description of Artificial Sequence: Synthetic polynucleotide
cggatattatgctgcgatccacggacttaaataattgagccttaaagaagaaattctttaagtggatgctctcaaactcagggaaacctaaatctagttatagacaaggcaatcctgagccaagccgaagtagtaattagtaagttaacaatagatgacttacaactaatcggaaggtgcagagactcgacgggagctaccctaacgtccacaaacacaagtcatatactgagtataagtataatttcag

SEQ ID NO: 3152 - DNA, 250 bp, Artificial Sequence
  Description of Artificial Sequence: Synthetic polynucleotide
cggtaggcgcgctgcgagccacggacttaaataattgagccttaaagaagaaattctttaagtggatgctctcaaactcagggaaacctaaatctagttatagacaaggcaatcctgagccaagccgaagtagtaattagtaagttaacaatagatgacttacaactaatcggaaggtgcagagactcgacgggagctaccctaacgtccacaaacacaagtcatatactgagtataagtataatttcag

SEQ ID NO: 3153 - DNA, 1137 bp, Artificial Sequence
  Description of Artificial Sequence: Synthetic polynucleotide
atgctgctgctggtcacatctctgctgctgtgcgagctgccccatcctgcctttctgctgatccccgacatccagatgacccagaccacaagcagcctgtctgccagcctgggcgatagagtgaccatcagctgtagagccagccaggacatcagcaagtacctgaactggtatcagcaaaagcccgacggcaccgtgaagctgctgatctaccacaccagcagactgcacagcggcgtgccaagcagattttctggcagcggctctggcaccgactacagcctgacaatcagcaacctggaacaagaggatatcgctacctacttctgccagcaaggcaacaccctgccttacacctttggcggaggcaccaagctggaaatcaccggctctacaagcggcagcggcaaacctggatctggcgagggatctaccaagggcgaagtgaaactgcaagagtctggccctggactggtggccccatctcagtctctgagcgtgacctgtacagtcagcggagtgtccctgcctgattacggcgtgtcctggatcagacagcctcctcggaaaggcctggaatggctgggagtgatctggggcagcgagacaacctactacaacagcgccctgaagtcccggctgaccatcatcaaggacaactccaagagccaggtgttcctgaagatgaacagcctgcagaccgacgacaccgccatctactattgcgccaagcactactactacggcggcagctacgccatggattattggggccagggcaccagcgtgaccgtttcttctgccgccgctatcgaagtgatgtaccctcctccttacctggacaacgagaagtccaacggcaccatcatccacgtgaagggcaagcacctgtgtccttctccactgttccccggacctagcaagcctttctgggtgctcgttgttgttggcggcgtgctggcctgttacagcctgctggttaccgtggccttcatcatcttttgggtcaagagaggccggaagaaacttctttatatattcaagcagccctttatgcgacccgttcagactacccaagaggaagatggatgcagttgccgctttccagaagaggaggagggcgggtgcgaactgtaa

SEQ ID NO: 3154 - DNA, 1134 bp, Artificial Sequence
  Description of Artificial Sequence: Synthetic polynucleotide
atgctgctgctggtcacatctctgctgctgtgcgagctgccccatcctgcctttctgctgatccccgacatccagatgacccagaccacaagcagcctgtctgccagcctgggcgatagagtgaccatcagctgtagagccagccaggacatcagcaagtacctgaactggtatcagcaaaagcccgacggcaccgtgaagctgctgatctaccacaccagcagactgcacagcggcgtgccaagcagattttctggcagcggctctggcaccgactacagcctgacaatcagcaacctggaacaagaggatatcgctacctacttctgccagcaaggcaacaccctgccttacacctttggcggaggcaccaagctggaaatcaccggctctacaagcggcagcggcaaacctggatctggcgagggatctaccaagggcgaagtgaaactgcaagagtctggccctggactggtggccccatctcagtctctgagcgtgacctgtacagtcagcggagtgtccctgcctgattacggcgtgtcctggatcagacagcctcctcggaaaggcctggaatggctgggagtgatctggggcagcgagacaacctactacaacagcgccctgaagtcccggctgaccatcatcaaggacaactccaagagccaggtgttcctgaagatgaacagcctgcagaccgacgacaccgccatctactattgcgccaagcactactactacggcggcagctacgccatggattattggggccagggcaccagcgtgaccgtttcttctgccgccgctatcgaagtgatgtaccctcctccttacctggacaacgagaagtccaacggcaccatcatccacgtgaagggcaagcacctgtgtccttctccactgttccccggacctagcaagcctttctgggtgctcgttgttgttggcggcgtgctggcctgttacagcctgctggttaccgtggccttcatcatcttttgggtccgaagcaagcggagccggctgctgcactccgactacatgaacatgacccctagacggcccggaccaaccagaaagcactaccagccttacgctcctcctagagacttcgccgcctaccggtcctaa

SEQ ID NO: 3155 - DNA, 1470 bp, Artificial Sequence
  Description of Artificial Sequence: Synthetic polynucleotide
atgctgctgctggtcacatctctgctgctgtgcgagctgccccatcctgcctttctgctgatccccgacatccagatgacccagaccacaagcagcctgtctgccagcctgggcgatagagtgaccatcagctgtagagccagccaggacatcagcaagtacctgaactggtatcagcaaaagcccgacggcaccgtgaagctgctgatctaccacaccagcagactgcacagcggcgtgccaagcagattttctggcagcggctctggcaccgactacagcctgacaatcagcaacctggaacaagaggatatcgctacctacttctgccagcaaggcaacaccctgccttacacctttggcggaggcaccaagctggaaatcaccggctctacaagcggcagcggcaaacctggatctggcgagggatctaccaagggcgaagtgaaactgcaagagtctggccctggactggtggccccatctcagtctctgagcgtgacctgtacagtcagcggagtgtccctgcctgattacggcgtgtcctggatcagacagcctcctcggaaaggcctggaatggctgggagtgatctggggcagcgagacaacctactacaacagcgccctgaagtcccggctgaccatcatcaaggacaactccaagagccaggtgttcctgaagatgaacagcctgcagaccgacgacaccgccatctactattgcgccaagcactactactacggcggcagctacgccatggattattggggccagggcaccagcgtgaccgtttcttctgccgccgctatcgaagtgatgtaccctcctccttacctggacaacgagaagtccaacggcaccatcatccacgtgaagggcaagcacctgtgtccttctccactgttccccggacctagcaagcctttctgggtgctcgttgttgttggcggcgtgctggcctgttacagcctgctggttaccgtggccttcatcatcttttgggtccgaagcaagcggagccggctgctgcactccgactacatgaacatgacccctagacggcccggaccaaccagaaagcactaccagccttacgctcctcctagagacttcgccgcctaccggtccagagtgaagttcagcagatccgccgatgctcccgcctatcagcagggccaaaaccagctgtacaacgagctgaacctggggagaagagaagagtacgacgtgctggacaagcggagaggcagagatcctgaaatgggcggcaagcccagacggaagaatcctcaagagggcctgtataatgagctgcagaaagacaagatggccgaggcctacagcgagatcggaatgaagggcgagcgcagaagaggcaagggacacgatggactgtaccagggactgagcaccgccaccaaggatacctatgacgccctgcacatgcaggccctgcctccaagataa

SEQ ID NO: 3156 - DNA, 1347 bp, Artificial Sequence
  Description of Artificial Sequence: Synthetic polynucleotide
atgctgctgctggtcacatctctgctgctgtgcgagctgccccatcctgcctttctgctgatccccgacatccagatgacccagaccacaagcagcctgtctgccagcctgggcgatagagtgaccatcagctgtagagccagccaggacatcagcaagtacctgaactggtatcagcaaaagcccgacggcaccgtgaagctgctgatctaccacaccagcagactgcacagcggcgtgccaagcagattttctggcagcggctctggcaccgactacagcctgacaatcagcaacctggaacaagaggatatcgctacctacttctgccagcaaggcaacaccctgccttacacctttggcggaggcaccaagctggaaatcaccggctctacaagcggcagcggcaaacctggatctggcgagggatctaccaagggcgaagtgaaactgcaagagtctggccctggactggtggccccatctcagtctctgagcgtgacctgtacagtcagcggagtgtccctgcctgattacggcgtgtcctggatcagacagcctcctcggaaaggcctggaatggctgggagtgatctggggcagcgagacaacctactacaacagcgccctgaagtcccggctgaccatcatcaaggacaactccaagagccaggtgttcctgaagatgaacagcctgcagaccgacgacaccgccatctactattgcgccaagcactactactacggcggcagctacgccatggattattggggccagggcaccagcgtgaccgtttcttctgccgccgctatcgaagtgatgtaccctcctccttacctggacaacgagaagtccaacggcaccatcatccacgtgaagggcaagcacctgtgtccttctccactgttccccggacctagcaagcctttctgggtgctcgttgttgttggcggcgtgctggcctgttacagcctgctggttaccgtggccttcatcatcttttgggtcagagtgaagttcagcagatccgccgatgctcccgcctatcagcagggccaaaaccagctgtacaacgagctgaacctggggagaagagaagagtacgacgtgctggacaagcggagaggcagagatcctgaaatgggcggcaagcccagacggaagaatcctcaagagggcctgtataatgagctgcagaaagacaagatggccgaggcctacagcgagatcggaatgaagggcgagcgcagaagaggcaagggacacgatggactgtaccagggactgagcaccgccaccaaggatacctatgacgccctgcacatgcaggccctgcctccaagataa

SEQ ID NO: 3157 - DNA, 1461 bp, Artificial Sequence
  Description of Artificial Sequence: Synthetic polynucleotide
atggctctcccggtcacagcccttctcctgcccctggcactcttgctgcatgcggcacgacccgacatccagatgacccagaccacaagcagcctgtctgccagcctgggcgatagagtgaccatcagctgtagagccagccaggacatcagcaagtacctgaactggtatcagcaaaagcccgacggcaccgtgaagctgctgatctaccacaccagcagactgcacagcggcgtgccaagcagattttctggcagcggctctggcaccgactacagcctgacaatcagcaacctggaacaagaggatatcgctacctacttctgccagcaaggcaacaccctgccttacacctttggcggaggcaccaagctggaaatcaccggtggaggtggttctggcggagggggatctggtggaggcggttcagaagtgaaactgcaagagtctggccctggactggtggccccatctcagtctctgagcgtgacctgtacagtcagcggagtgtccctgcctgattacggcgtgtcctggatcagacagcctcctcggaaaggcctggaatggctgggagtgatctggggcagcgagacaacctactacaacagcgccctgaagtcccggctgaccatcatcaaggacaactccaagagccaggtgttcctgaagatgaacagcctgcagaccgacgacaccgccatctactattgcgccaagcactactactacggcggcagctacgccatggattattggggccagggcaccagcgtgaccgtttcttctaccacaacgcccgccccgcgaccgcctactcccgctcccacaattgcatcacaacccctgtctttgagacccgaagcttgtcgaccagctgccggtggcgcggttcacacgcgggggctcgatttcgcctgtgatatatatatatgggccccattggctggaacatgcggagtattgcttctgagcctggtgattaccctctactgtaagagaggccggaagaaacttctttatatattcaagcagccctttatgcgacccgttcagactacccaagaggaagatggatgcagttgccgctttccagaagaggaggagggcgggtgcgaactgagagtgaagttcagcagatccgccgatgctcccgcctatcagcagggccaaaaccagctgtacaacgagctgaacctggggagaagagaagagtacgacgtgctggacaagcggagaggcagagatcctgaaatgggcggcaagcccagacggaagaatcctcaagagggcctgtataatgagctgcagaaagacaagatggccgaggcctacagcgagatcggaatgaagggcgagcgcagaagaggcaagggacacgatggactgtaccagggactgagcaccgccaccaaggatacctatgacgccctgcacatgcaggccctgcctccaagataa

SEQ ID NO: 3158 - DNA, 1461 bp, Artificial Sequence
  Description of Artificial Sequence: Synthetic polynucleotide
atggctctcccggtcacagcccttctcctgcccctggcactcttgctgcatgcggcacgacccgacatccagatgacccagaccacaagcagcctgtctgccagcctgggcgatagagtgaccatcagctgtagagccagccaggacatcagcaagtacctgaactggtatcagcaaaagcccgacggcaccgtgaagctgctgatctaccacaccagcagactgcacagcggcgtgccaagcagattttctggcagcggctctggcaccgactacagcctgacaatcagcaacctggaacaagaggatatcgctacctacttctgccagcaaggcaacaccctgccttacacctttggcggaggcaccaagctggaaatcaccggtggaggtggttctggcggagggggatctggtggaggcggttcagaagtgaaactgcaagagtctggccctggactggtggccccatctcagtctctgagcgtgacctgtacagtcagcggagtgtccctgcctgattacggcgtgtcctggatcagacagcctcctcggaaaggcctggaatggctgggagtgatctggggcagcgagacaacctactacaacagcgccctgaagtcccggctgaccatcatcaaggacaactccaagagccaggtgttcctgaagatgaacagcctgcagaccgacgacaccgccatctactattgcgccaagcactactactacggcggcagctacgccatggattattggggccagggcaccagcgtgaccgtttcttctaccacaacgcccgccccgcgaccgcctactcccgctcccacaattgcatcacaacccctgtctttgagacccgaagcttgtcgaccagctgccggtggcgcggttcacacgcgggggctcgatttcgcctgtgatatatatatatgggccccattggctggaacatgcggagtattgcttctgagcctggtgattaccctctactgtaagagaggccggaagaaacttctttatatattcaagcagccctttatgcgacccgttcagactacccaagaggaagatggatgcagttgccgctttccagaagaggaggagggcgggtgcgaactgagagtgaagttcagcagatccgccgatgctcccgcctataagcagggccaaaaccagctgtacaacgagctgaacctggggagaagagaagagtacgacgtgctggacaagcggagaggcagagatcctgaaatgggcggcaagcccagacggaagaatcctcaagagggcctgtataatgagctgcagaaagacaagatggccgaggcctacagcgagatcggaatgaagggcgagcgcagaagaggcaagggacacgatggactgtaccagggactgagcaccgccaccaaggatacctatgacgccctgcacatgcaggccctgcctccaagataa

SEQ ID NO: 3159 - DNA, 1452 bp, Artificial Sequence
  Description of Artificial Sequence: Synthetic polynucleotide
atgctgctgctggtcacatctctgctgctgtgcgagctgccccatcctgcctttctgctgatcccccaggttcaactccagcagtctggtcccggcctcgttaaaccaagccagactttgtctcttacctgtgctatcagtggcgatagcgtgtctagtaattcagccgcatggaactggatccgacaatcaccgagtaggggacttgaatggctgggtagaacctattaccggtccaaatggtacaatgactatgcagtgtctgtaaaaagcaggatcacgatcaaccctgatacgtctaaaaaccagttttctctgcaacttaatagtgtgacccctgaagacaccgctgtgtattactgtgcacgggaggttaccggtgatcttgaagatgcttttgatatatggggccaaggtacgatggtcacggtgtctagtgggggaggcggcagcgacatacagatgacgcagagcccatccagtctctccgcgtctgttggtgacagagtgactattacatgtagggcgtctcagaccatttggtcttacctcaattggtatcaacagcgaccaggcaaagcaccgaacttgctcatttacgctgccagctcactccaaagtggtgtgccgtccagatttagtggtaggggcagtggcactgatttcactctgactatttcaagtcttcaagctgaggattttgccacatactactgccagcaaagttactcaatacctcagacttttggacaggggacaaaattggagattaaatccggaaccacaacgcccgccccgcgaccgcctactcccgctcccacaattgcatcacaacccctgtctttgagacccgaagcttgtcgaccagctgccggtggcgcggttcacacgcgggggctcgatttcgcctgtgatatatatatatgggccccattggctggaacatgcggagtattgcttctgagcctggtgattaccctctactgtaagagaggccggaagaaacttctttatatattcaagcagccctttatgcgacccgttcagactacccaagaggaagatggatgcagttgccgctttccagaagaggaggagggcgggtgcgaactgagagtgaagttcagcagatccgccgatgctcccgcctataagcagggccaaaaccagctgtacaacgagctgaacctggggagaagagaagagtacgacgtgctggacaagcggagaggcagagatcctgaaatgggcggcaagcccagacggaagaatcctcaagagggcctgtataatgagctgcagaaagacaagatggccgaggcctacagcgagatcggaatgaagggcgagcgcagaagaggcaagggacacgatggactgtaccagggactgagcaccgccaccaaggatacctatgacgccctgcacatgcaggccctgcctccaagataa

SEQ ID NO: 3160 - DNA, 2202 bp, Artificial Sequence
  Description of Artificial Sequence: Synthetic polynucleotide
atgctgctgctggtcacatctctgctgctgtgcgagctgccccatcctgcctttctgctgatccccgacatccagatgacccagaccacaagcagcctgtctgccagcctgggcgatagagtgaccatcagctgtagagccagccaggacatcagcaagtacctgaactggtatcagcaaaagcccgacggcaccgtgaagctgctgatctaccacaccagcagactgcacagcggcgtgccaagcagattttctggcagcggctctggcaccgactacagcctgacaatcagcaacctggaacaagaggatatcgctacctacttctgccagcaaggcaacaccctgccttacacctttggcggaggcaccaagctggaaatcaccggcggcggaggatcccaggttcaactccagcagtctggtcccggcctcgttaaaccaagccagactttgtctcttacctgtgctatcagtggcgatagcgtgtctagtaattcagccgcatggaactggatccgacaatcaccgagtaggggacttgaatggctgggtagaacctattaccggtccaaatggtacaatgactatgcagtgtctgtaaaaagcaggatcacgatcaaccctgatacgtctaaaaaccagttttctctgcaacttaatagtgtgacccctgaagacaccgctgtgtattactgtgcacgggaggttaccggtgatcttgaagatgcttttgatatatggggccaaggtacgatggtcacggtgtctagtggctctacaagcggcagcggcaaacctggatctggcgagggatctaccaagggcgacatacagatgacgcagagcccatccagtctctccgcgtctgttggtgacagagtgactattacatgtagggcgtctcagaccatttggtcttacctcaattggtatcaacagcgaccaggcaaagcaccgaacttgctcatttacgctgccagctcactccaaagtggtgtgccgtccagatttagtggtaggggcagtggcactgatttcactctgactatttcaagtcttcaagctgaggattttgccacatactactgccagcaaagttactcaatacctcagacttttggacaggggacaaaattggagattaaagggggaggcggcagcgaagtgaaactgcaagagtctggccctggactggtggccccatctcagtctctgagcgtgacctgtacagtcagcggagtgtccctgcctgattacggcgtgtcctggatcagacagcctcctcggaaaggcctggaatggctgggagtgatctggggcagcgagacaacctactacaacagcgccctgaagtcccggctgaccatcatcaaggacaactccaagagccaggtgttcctgaagatgaacagcctgcagaccgacgacaccgccatctactattgcgccaagcactactactacggcggcagctacgccatggattattggggccagggcaccagcgtgaccgtttcttcttccggaaccacaacgcccgccccgcgaccgcctactcccgctcccacaattgcatcacaacccctgtctttgagacccgaagcttgtcgaccagctgccggtggcgcggttcacacgcgggggctcgatttcgcctgtgatatatatatatgggccccattggctggaacatgcggagtattgcttctgagcctggtgattaccctctactgtaagagaggccggaagaaacttctttatatattcaagcagccctttatgcgacccgttcagactacccaagaggaagatggatgcagttgccgctttccagaagaggaggagggcgggtgcgaactgagagtgaagttcagcagatccgccgatgctcccgcctataagcagggccaaaaccagctgtacaacgagctgaacctggggagaagagaagagtacgacgtgctggacaagcggagaggcagagatcctgaaatgggcggcaagcccagacggaagaatcctcaagagggcctgtataatgagctgcagaaagacaagatggccgaggcctacagcgagatcggaatgaagggcgagcgcagaagaggcaagggacacgatggactgtaccagggactgagcaccgccaccaaggatacctatgacgccctgcacatgcaggccctgcctccaagataa

SEQ ID NO: 3161 - DNA, 2262 bp, Artificial Sequence
  Description of Artificial Sequence: Synthetic polynucleotide
atgctgctgctggtcacatctctgctgctgtgcgagctgccccatcctgcctttctgctgatcccccaggttcaactccagcagtctggtcccggcctcgttaaaccaagccagactttgtctcttacctgtgctatcagtggcgatagcgtgtctagtaattcagccgcatggaactggatccgacaatcaccgagtaggggacttgaatggctgggtagaacctattaccggtccaaatggtacaatgactatgcagtgtctgtaaaaagcaggatcacgatcaaccctgatacgtctaaaaaccagttttctctgcaacttaatagtgtgacccctgaagacaccgctgtgtattactgtgcacgggaggttaccggtgatcttgaagatgcttttgatatatggggccaaggtacgatggtcacggtgtctagtgggggaggcggcagcgacatacagatgacgcagagcccatccagtctctccgcgtctgttggtgacagagtgactattacatgtagggcgtctcagaccatttggtcttacctcaattggtatcaacagcgaccaggcaaagcaccgaacttgctcatttacgctgccagctcactccaaagtggtgtgccgtccagatttagtggtaggggcagtggcactgatttcactctgactatttcaagtcttcaagctgaggattttgccacatactactgccagcaaagttactcaatacctcagacttttggacaggggacaaaattggagattaaagggggaggcggatccggcggtggtggctccggcggtggtggttctggaggcggcggaagcggtgggggtggtagcgacatccagatgacccagaccacaagcagcctgtctgccagcctgggcgatagagtgaccatcagctgtagagccagccaggacatcagcaagtacctgaactggtatcagcaaaagcccgacggcaccgtgaagctgctgatctaccacaccagcagactgcacagcggcgtgccaagcagattttctggcagcggctctggcaccgactacagcctgacaatcagcaacctggaacaagaggatatcgctacctacttctgccagcaaggcaacaccctgccttacacctttggcggaggcaccaagctggaaatcaccggctctacaagcggcagcggcaaacctggatctggcgagggatctaccaagggcgaagtgaaactgcaagagtctggccctggactggtggccccatctcagtctctgagcgtgacctgtacagtcagcggagtgtccctgcctgattacggcgtgtcctggatcagacagcctcctcggaaaggcctggaatggctgggagtgatctggggcagcgagacaacctactacaacagcgccctgaagtcccggctgaccatcatcaaggacaactccaagagccaggtgttcctgaagatgaacagcctgcagaccgacgacaccgccatctactattgcgccaagcactactactacggcggcagctacgccatggattattggggccagggcaccagcgtgaccgtttcttcttccggaaccacaacgcccgccccgcgaccgcctactcccgctcccacaattgcatcacaacccctgtctttgagacccgaagcttgtcgaccagctgccggtggcgcggttcacacgcgggggctcgatttcgcctgtgatatatatatatgggccccattggctggaacatgcggagtattgcttctgagcctggtgattaccctctactgtaagagaggccggaagaaacttctttatatattcaagcagccctttatgcgacccgttcagactacccaagaggaagatggatgcagttgccgctttccagaagaggaggagggcgggtgcgaactgagagtgaagttcagcagatccgccgatgctcccgcctataagcagggccaaaaccagctgtacaacgagctgaacctggggagaagagaagagtacgacgtgctggacaagcggagaggcagagatcctgaaatgggcggcaagcccagacggaagaatcctcaagagggcctgtataatgagctgcagaaagacaagatggccgaggcctacagcgagatcggaatgaagggcgagcgcagaagaggcaagggacacgatggactgtaccagggactgagcaccgccaccaaggatacctatgacgccctgcacatgcaggccctgcctccaagataa

SEQ ID NO: 3162 - protein, 42 aa, Artificial Sequence
  Description of Artificial Sequence: Synthetic polypeptide
KRGRKKLLYIFKQPFMRPVQTTQEEDGCSCRFPEEEEGGCEL

SEQ ID NO: 3163 - protein, 112 aa, Artificial Sequence
  Description of Artificial Sequence: Synthetic polypeptide
RVKFSRSADAPAYKQGQNQLYNELNLGRREEYDVLDKRRGRDPEMGGKPRRKNPQEGLYNELQKDKMAEAYSEIGMKGERRRGKGHDGLYQGLSTATKDTYDALHMQALPPR

SEQ ID NO: 3164 - protein, 241 aa, Artificial Sequence
  Description of Artificial Sequence: Synthetic polypeptide
QVQLVQSGAEVEKPGASVKVSCKASGYTFTDYYMHWVRQAPGQGLEWMGWINPNSGGTNYAQKFQGRVTMTRDTSISTAYMELSRLRSDDTAVYYCASGWDFDYWGQGTLVTVSSGGGGSGGGGSGGGGSGGGGSDIVMTQSPSSLSASVGDRVTITCRASQSIRYYLSWYQQKPGKAPKLLIYTASILQNGVPSRFSGSGSGTDFTLTISSLQPEDFATYYCLQTYTTPDFGPGTKVEIK

SEQ ID NO: 3165 - protein, 120 aa, Artificial Sequence
  Description of Artificial Sequence: Synthetic polypeptide
EVKLQESGPGLVAPSQSLSVTCTVSGVSLPDYGVSWIRQPPRKGLEWLGVIWGSETTYYNSALKSRLTIIKDNSKSQVFLKMNSLQTDDTAIYYCAKHYYYGGSYAMDYWGQGTSVTVSS

SEQ ID NO: 3166 - protein, 107 aa, Artificial Sequence
  Description of Artificial Sequence: Synthetic polypeptide
DIQMTQTTSSLSASLGDRVTISCRASQDISKYLNWYQQKPDGTVKLLIYHTSRLHSGVPSRFSGSGSGTDYSLTISNLEQEDIATYFCQQGNTLPYTFGGGTKLEIT

SEQ ID NO: 3167 - protein, 447 aa, Artificial Sequence
  Description of Artificial Sequence: Synthetic polypeptide
QVQLVQSGVEVKKPGASVKVSCKASGYTFTNYYMYWVRQAPGQGLEWMGGINPSNGGTNFNEKFKNRVTLTTDSSTTTAYMELKSLQFDDTAVYYCARRDYRFDMGFDYWGQGTTVTVSSASTKGPSVFPLAPCSRSTSESTAALGCLVKDYFPEPVTVSWNSGALTSGVHTFPAVLQSSGLYSLSSVVTVPSSSLGTKTYTCNVDHKPSNTKVDKRVESKYGPPCPPCPAPEFLGGPSVFLFPPKPKDTLMISRTPEVTCVVVDVSQEDPEVQFNWYVDGVEVHNAKTKPREEQFNSTYRVVSVLTVLHQDWLNGKEYKCKVSNKGLPSSIEKTISKAKGQPREPQVYTLPPSQEEMTKNQVSLTCLVKGFYPSDIAVEWESNGQPENNYKTTPPVLDSDGSFFLYSRLTVDKSRWQEGNVFSCSVMHEALHNHYTQKSLSLSLGK

SEQ ID NO: 3168 - protein, 218 aa, Artificial Sequence
  Description of Artificial Sequence: Synthetic polypeptide
EIVLTQSPATLSLSPGERATLSCRASKGVSTSGYSYLHWYQQKPGQAPRLLIYLASYLESGVPARFSGSGSGTDFTLTISSLEPEDFAVYYCQHSRDLPLTFGGGTKVEIKRTVAAPSVFIFPPSDEQLKSGTASVVCLLNNFYPREAKVQWKVDNALQSGNSQESVTEQDSKDSTYSLSSTLTLSKADYEKHKVYACEVTHQGLSSPVTKSFNRGEC

SEQ ID NO: 3169 - protein, 440 aa, Artificial Sequence
  Description of Artificial Sequence: Synthetic polypeptide
QVQLVESGGGVVQPGRSLRLDCKASGITFSNSGMHWVRQAPGKGLEWVAVIWYDGSKRYYADSVKGRFTISRDNSKNTLFLQMNSLRAEDTAVYYCATNDDYWGQGTLVTVSSASTKGPSVFPLAPCSRSTSESTAALGCLVKDYFPEPVTVSWNSGALTSGVHTFPAVLQSSGLYSLSSVVTVPSSSLGTKTYTCNVDHKPSNTKVDKRVESKYGPPCPPCPAPEFLGGPSVFLFPPKPKDTLMISRTPEVTCVVVDVSQEDPEVQFNWYVDGVEVHNAKTKPREEQFNSTYRVVSVLTVLHQDWLNGKEYKCKVSNKGLPSSIEKTISKAKGQPREPQVYTLPPSQEEMTKNQVSLTCLVKGFYPSDIAVEWESNGQPENNYKTTPPVLDSDGSFFLYSRLTVDKSRWQEGNVFSCSVMHEALHNHYTQKSLSLSLGK

SEQ ID NO: 3170 - protein, 214 aa, Artificial Sequence
  Description of Artificial Sequence: Synthetic polypeptide
EIVLTQSPATLSLSPGERATLSCRASQSVSSYLAWYQQKPGQAPRLLIYDASNRATGIPARFSGSGSGTDFTLTISSLEPEDFAVYYCQQSSNWPRTFGQGTKVEIKRTVAAPSVFIFPPSDEQLKSGTASVVCLLNNFYPREAKVQWKVDNALQSGNSQESVTEQDSKDSTYSLSSTLTLSKADYEKHKVYACEVTHQGLSSPVTKSFNRGEC

SEQ ID NO: 3171 - protein, 448 aa, Artificial Sequence
  Description of Artificial Sequence: Synthetic polypeptide
EVQLVESGGGLVQPGGSLRLSCAASGFTFSDSWIHWVRQAPGKGLEWVAWISPYGGSTYYADSVKGRFTISADTSKNTAYLQMNSLRAEDTAVYYCARRHWPGGFDYWGQGTLVTVSSASTKGPSVFPLAPSSKSTSGGTAALGCLVKDYFPEPVTVSWNSGALTSGVHTFPAVLQSSGLYSLSSVVTVPSSSLGTQTYICNVNHKPSNTKVDKKVEPKSCDKTHTCPPCPAPELLGGPSVFLFPPKPKDTLMISRTPEVTCVVVDVSHEDPEVKFNWYVDGVEVHNAKTKPREEQYASTYRVVSVLTVLHQDWLNGKEYKCKVSNKALPAPIEKTISKAKGQPREPQVYTLPPSREEMTKNQVSLTCLVKGFYPSDIAVEWESNGQPENNYKTTPPVLDSDGSFFLYSKLTVDKSRWQQGNVFSCSVMHEALHNHYTQKSLSLSPGK

SEQ ID NO: 3172 - protein, 214 aa, Artificial Sequence
  Description of Artificial Sequence: Synthetic polypeptide
DIQMTQSPSSLSASVGDRVTITCRASQDVSTAVAWYQQKPGKAPKLLIYSASFLYSGVPSRFSGSGSGTDFTLTISSLQPEDFATYYCQQYLYHPATFGQGTKVEIKRTVAAPSVFIFPPSDEQLKSGTASVVCLLNNFYPREAKVQWKVDNALQSGNSQESVTEQDSKDSTYSLSSTLTLSKADYEKHKVYACEVTHQGLSSPVTKSFNRGEC

SEQ ID NO: 3173 - protein, 450 aa, Artificial Sequence
  Description of Artificial Sequence: Synthetic polypeptide
EVQLLESGGGLVQPGGSLRLSCAASGFTFSSYIMMWVRQAPGKGLEWVSSIYPSGGITFYADTVKGRFTISRDNSKNTLYLQMNSLRAEDTAVYYCARIKLGTVTTVDYWGQGTLVTVSSASTKGPSVFPLAPSSKSTSGGTAALGCLVKDYFPEPVTVSWNSGALTSGVHTFPAVLQSSGLYSLSSVVTVPSSSLGTQTYICNVNHKPSNTKVDKKVEPKSCDKTHTCPPCPAPELLGGPSVFLFPPKPKDTLMISRTPEVTCVVVDVSHEDPEVKFNWYVDGVEVHNAKTKPREEQYNSTYRVVSVLTVLHQDWLNGKEYKCKVSNKALPAPIEKTISKAKGQPREPQVYTLPPSRDELTKNQVSLTCLVKGFYPSDIAVEWESNGQPENNYKTTPPVLDSDGSFFLYSKLTVDKSRWQQGNVFSCSVMHEALHNHYTQKSLSLSPGK

SEQ ID NO: 3174 - protein, 216 aa, Artificial Sequence
  Description of Artificial Sequence: Synthetic polypeptide
QSALTQPASVSGSPGQSITISCTGTSSDVGGYNYVSWYQQHPGKAPKLMIYDVSNRPSGVSNRFSGSKSGNTASLTISGLQAEDEADYYCSSYTSSSTRVFGTGTKVTVLGQPKANPTVTLFPPSSEELQANKATLVCLISDFYPGAVTVAWKADGSPVKAGVETTKPSKQSNNKYAASSYLSLTPEQWKSHRSYSCQVTHEGSTVEKTVAPTECS

SEQ ID NO: 3175 - protein, 451 aa, Artificial Sequence
  Description of Artificial Sequence: Synthetic polypeptide
EVQLVESGGGLVQPGGSLRLSCAASGFTFSRYWMSWVRQAPGKGLEWVANIKQDGSEKYYVDSVKGRFTISRDNAKNSLYLQMNSLRAEDTAVYYCAREGGWFGELAFDYWGQGTLVTVSSASTKGPSVFPLAPSSKSTSGGTAALGCLVKDYFPEPVTVSWNSGALTSGVHTFPAVLQSSGLYSLSSVVTVPSSSLGTQTYICNVNHKPSNTKVDKRVEPKSCDKTHTCPPCPAPEFEGGPSVFLFPPKPKDTLMISRTPEVTCVVVDVSHEDPEVKFNWYVDGVEVHNAKTKPREEQYNSTYRVVSVLTVLHQDWLNGKEYKCKVSNKALPASIEKTISKAKGQPREPQVYTLPPSREEMTKNQVSLTCLVKGFYPSDIAVEWESNGQPENNYKTTPPVLDSDGSFFLYSKLTVDKSRWQQGNVFSCSVMHEALHNHYTQKSLSLSPGK

SEQ ID NO: 3176 - protein, 215 aa, Artificial Sequence
  Description of Artificial Sequence: Synthetic polypeptide
EIVLTQSPGTLSLSPGERATLSCRASQRVSSSYLAWYQQKPGQAPRLLIYDASSRATGIPDRFSGSGSGTDFTLTISRLEPEDFAVYYCQQYGSLPWTFGQGTKVEIKRTVAAPSVFIFPPSDEQLKSGTASVVCLLNNFYPREAKVQWKVDNALQSGNSQESVTEQDSKDSTYSLSSTLTLSKADYEKHKVYACEVTHQGLSSPVTKSFNRGEC

SEQ ID NO: 3177 - protein, 133 aa, Unknown [sequence omitted]

SEQ ID NO: 3178 - protein, 197 aa, Unknown
  Description of Unknown: IL-12A sequence
RNLPVATPDPGMFPCLHHSQNLLRAVSNMLQKARQTLEFYPCTSEEIDHEDITKDKTSTVEACLPLELTKNESCLNSRETSFITNGSCLASRKTSFMMALCLSSIYEDLKMYQVEFKTMNAKLLMDPKRQIFLDQNMLAVIDELMQALNFNSETVPQKSSLEEPDFYKTKIKLCILLHAFRIRAVTIDRVMSYLNAS

SEQ ID NO: 3179 - protein, 306 aa, Unknown
  Description of Unknown: IL-12B sequence
IWELKKDVYVVELDWYPDAPGEMVVLTCDTPEEDGITWTLDQSSEVLGSGKTLTIQVKEFGDAGQYTCHKGGEVLSHSLLLLHKKEDGIWSTDILKDQKEPKNKTFLRCEAKNYSGRFTCWWLTTISTDLTFSVKSSRGSSDPQGVTCGAATLSAERVRGDNKEYEYSVECQEDSACPAAEESLPIEVMVDAVHKLKYENYTSSFFIRDIIKPDPPKNLQLKPLKNSRQVEVSWEYPDTWSTPHSYFSLTFCVQVQGKSKREKKDRVFTDKTSATVICRKNASISVRAQDRYYSSSWSEWASVPCS

SEQ ID NO: 3180 - protein, 152 aa, Unknown
  Description of Unknown: IL-7 sequence
DCDIEGKDGKQYESVLMVSIDQLLDSMKEIGSNCLNNEFNFFKRHICDANKEGMFLFRAARKLRQFLKMNSTGDFDLHLLKVSEGTTILLNCTGQVKGRKPAALGEAQPTKSLEENKSLKEQKKLNDLCFLKRLLQEIKTCWNKILMGTKEH

SEQ ID NO: 3181 - protein, 160 aa, Unknown
  Description of Unknown: IL-10 sequence
SPGQGTQSENSCTHFPGNLPNMLRDLRDAFSRVKTFFQMKDQLDNLLLKESLLEDFKGYLGCQALSEMIQFYLEEVMPQAENQDPDIKAHVNSLGENLKTLRLRLRRCHRFLPCENKSKAVEQVKNAFNKLQEKGIYKAMSEFDIFINYIEAYMTMKIRN

SEQ ID NO: 3182 - protein, 114 aa, Unknown
  Description of Unknown: IL-15 sequence
NWVNVISDLKKIEDLIQSMHIDATLYTESDVHPSCKVTAMKCFLLELQVISLESGDASIHDTVENLIILANNSLSSNGNVTESGCKECEELEEKNIKEFLQSFVHIVQMFINTS

SEQ ID NO: 3183 - protein, 157 aa, Unknown
  Description of Unknown: IL-18 sequence
YFGKLESKLSVIRNLNDQVLFIDQGNRPLFEDMTDSDCRDNAPRTIFIISMYKDSQPRGMAVTISVKCEKISTLSCENKIISFKEMNPPDNIKDTKSDIIFFQRSVPGHDNKMQFESSSYEGYFLACEKERDLFKLILKKEDELGDRSIMFTVQNED

SEQ ID NO: 3184 - protein, 209 aa, Unknown
  Description of Unknown: IL-27beta sequence
RKGPPAALTLPRVQCRASRYPIAVDCSWTLPPAPNSTSPVSFIATYRLGMAARGHSWPCLQQTPTSTSCTITDVQLFSMAPYVLNVTAVHPWGSSSSFVPFITEHIIKPDPPEGVRLSPLAERQLQVQWEPPGSWPFPEIFSLKYWIRYKRQGAARFHRVGPIEATSFILRAVRPRARYYVQVAAQDLTDYGELSDWSLPATATMSLGK

SEQ ID NO: 3185 - protein, 138 aa, Unknown
  Description of Unknown: IFNgamma sequence
QDPYVKEAENLKKYFNAGHSDVADNGTLFLGILKNWKEESDRKIMQSQIVSFYFKLFKNFKDDQSIQKSVETIKEDMNVKFFNSNKKKRDDFEKLTNYSVTDLNVQRKAIHELIQVMAELSPAAKTGKRKRSQMLFRG

SEQ ID NO: 3186 - protein, 112 aa, Unknown
  Description of Unknown: TGFbeta1 sequence
ALDTNYCFSSTEKNCCVRQLYIDFRKDLGWKWIHEPKGYHANFCLGPCPYIWSLDTQYSKVLALYNQHNPGASAAPCCVPQALEPLPIVYYVGRKPKVEQLSNMIVRSCKCS

SEQ ID NO: 3187 - protein, 431 aa, Unknown
  Description of Unknown: FOXP3 sequence
MPNPRPGKPSAPSLALGPSPGASPSWRAAPKASDLLGARGPGGTFQGRDLRGGAHASSSSLNPMPPSQLQLPTLPLVMVAPSGARLGPLPHLQALLQDRPHFMHQLSTVDAHARTPVLQVHPLESPAMISLTPPTTATGVFSLKARPGLPPGINVASLEWVSREPALLCTFPNPSAPRKDSTLSAVPQSSYPLLANGVCKWPGCEKVFEEPEDFLKHCQADHLLDEKGRAQCLLQREMVQSLEQQLVLEKEKLSAMQAHLAGKMALTKASSVASSDKGSCCIVAAGSQGPVVPAWSGPREAPDSLFAVRRHLWGSHGNSTFPEFLHNMDYFKFHNMRPPFTYATLIRWAILEAPEKQRTLNEIYHWFTRMFAFFRNHPATWKNAIRHNLSLHKCFVRVESEKGAVWTVDELEFRKKRSQRPSRCSNPTPGP

SEQ ID NO: 3188 - protein, 417 aa, Unknown
  Description of Unknown: FOXP3 sequence
MPNPRPGKPSAPSLALGPSPGASPSWRAAPKASDLLGARGPGGTFQGRDLRGGAHASSSSLNPMPPSQLQLPTLPLVMVAPSGARLGPLPHLQALLQDRPHFMHQLSTVDAHARTPVLQVHPLESPAMISLTPPTTATGVFSLKARPGLPPGINVASLEWVSREPALLCTFPNPSAPRKDSTLSAVPQSSYPLLANGVCKWPGCEKVFEEPEDFLKHCQADHLLDEKGRAQCLLQREMVQSLEQQLVLEKEKLSAMQAHLAGKMALTKASSVASSDKGSCCIVAAGSQGPVVPAWSGPREAPDSLFAVRRHLWGSHGNSTFPEFLHNMDYFKFHNMRPPFTYATLIRWAILEAPEKQRTLNEIYHWFTRMFAFFRNHPATWKNAIRHNLSLHKCFVRVESEKGAVWTVDELEFRKKR

SEQ ID NO: 3189 - protein, 366 aa, Unknown
  Description of Unknown: FOXP3 sequence
GGAHASSSSLNPMPPSQLQLPTLPLVMVAPSGARLGPLPHLQALLQDRPHFMHQLSTVDAHARTPVLQVHPLESPAMISLTPPTTATGVFSLKARPGLPPGINVASLEWVSREPALLCTFPNPSAPRKDSTLSAVPQSSYPLLANGVCKWPGCEKVFEEPEDFLKHCQADHLLDEKGRAQCLLQREMVQSLEQQLVLEKEKLSAMQAHLAGKMALTKASSVASSDKGSCCIVAAGSQGPVVPAWSGPREAPDSLFAVRRHLWGSHGNSTFPEFLHNMDYFKFHNMRPPFTYATLIRWAILEAPEKQRTLNEIYHWFTRMFAFFRNHPATWKNAIRHNLSLHKCFVRVESEKGAVWTVDELEFRKKR

SEQ ID NO: 3190 - protein, 787 aa, Unknown
  Description of Unknown: STAT5B sequence
MAVWIQAQQLQGEALHQMQALYGQHFPIEVRHYLSQWIESQAWDSVDLDNPQENIKATQLLEGLVQELQKKAEHQVGEDGFLLKIKLGHYATQLQNTYDRCPMELVRCIRHILYNEQRLVREANNGSSPAGSLADAMSQKHLQINQTFEELRLVTQDTENELKKLQQTQEYFIIQYQESLRIQAQFGPLAQLSPQERLSRETALQQKQVSLEAWLQREAQTLQQYRVELAEKHQKTLQLLRKQQTIILDDELIQWKRRQQLAGNGGPPEGSLDVLQSWCEKLAEIIWQNRQQIRRAEHLCQQLPIPGPVEEMLAEVNATITDIISALVTSTFIIEKQPPQVLKTQTKFAATVRLLVGGKLNVHMNPPQVKATIISEQQAKSLLKNENTRNDYSGEILNNCCVMEYHQATGTLSAHFRNMSLKRIKRSDRRGAESVTEEKFTILFESQFSVGGNELVFQVKTLSLPVVVIVHGSQDNNATATVLWDNAFAEPGRVPFAVPDKVLWPQLCEALNMKFKAEVQSNRGLTKENLVFLAQKLFNNSSSHLEDYSGLSVSWSQFNRENLPGRNYTFWQWFDGVMEVLKKHLKPHWNDGAILGFVNKQQAHDLLINKPDGTFLLRFSDSEIGGITIAWKFDSQERMFWNLMPFTTRDFSIRSLADRLGDLNYLIYVFPDRPKDEVYSKYYTPVPCESATAKAVDGYVKPQIKQVVPEFVNASADAGGGSATYMDQAPSPAVCPQAHYNMYPQNPDSVLDTDGDFDLEDTMDVARRVEELLGRPMDSQWIPHAQS

SEQ ID NO: 3191 - protein, 526 aa, Unknown [sequence omitted]

SEQ ID NO: 3192 - DNA, 167 bp, Artificial Sequence
  Description of Artificial Sequence: Synthetic polynucleotide
ccctgcagccgtcaccgtaagtttgaagttaccgcatatcagcctctgcttcccagcgcgtccaattcctgttcttattgtttcccctccaggcgttacgcgtgacgacgaactgtgtcgcagctaccacattattccggagccttcattctcgcggctctgatcgt

SEQ ID NO: 3193 - DNA, 43 bp, Artificial Sequence
  Description of Artificial Sequence: Synthetic oligonucleotide
ggagaccgcggccacgccgagtaggatcgagggtacagtctcc

SEQ ID NO: 3194 - DNA, 167 bp, Artificial Sequence
  Description of Artificial Sequence: Synthetic polynucleotide
gacaccaggatcactcttgctctgacccgccctgtgtagaatagactcatgcttccctaagacctggatttcttcccaggcactttcacccgcctgccctgctccttcagtggactgcacccagggaggcggtctctgactgtcctttactttctattctggattgc

SEQ ID NO: 3195 - DNA, 30 bp, Artificial Sequence
  Description of Artificial Sequence: Synthetic oligonucleotide
aaacccccctaagccgccgccgccgccacc

SEQ ID NO: 3196 - DNA, 18 bp, Artificial Sequence
  Description of Artificial Sequence: Synthetic oligonucleotide
cccccccaacccgtcacg

SEQ ID NO: 3197 - DNA, 6 bp, Artificial Sequence
  Description of Artificial Sequence: Synthetic oligonucleotide
gtcacg

SEQ ID NO: 3198 - DNA, 141 bp, Artificial Sequence
  Description of Artificial Sequence: Synthetic polynucleotide
tctgcgcactcgtaatcagtactaacccccctttgtcggacactatgcgataatcgatccgcctttttcaccgccttcggaattttatttacctcaactgatcctggagtctctcttggttttcacggaggcctccgccca

SEQ ID NO: 3199 - DNA, 141 bp, Artificial Sequence
  Description of Artificial Sequence: Synthetic polynucleotide
ccccttgaaacccccgccccaggttcagtctctcttcatccctctgtcctgcatggtgatacaaagaccctttgtggaccctaagccatgtagttgctgctccctccttccagttgtgaatattggtttctgttaatcaca

SEQ ID NO: 3200 - DNA, 43 bp, Artificial Sequence
  Description of Artificial Sequence: Synthetic oligonucleotide
aataagagagaaaagaagagtaagaagaaatataagagccacc

SEQ ID NO: 3201 - DNA, 49 bp, Artificial Sequence
  Description of Artificial Sequence: Synthetic oligonucleotide
cgaactagtattcttctggtccccacagactcagagagaacccgccacc

SEQ ID NO: 3202 - DNA, 7 bp, Artificial Sequence
  Description of Artificial Sequence: Synthetic oligonucleotide
agccacc

SEQ ID NO: 3203 - DNA, 14 bp, Artificial Sequence
  Description of Artificial Sequence: Synthetic oligonucleotide
tgatagctaactag

SEQ ID NO: 3204 - DNA, 14 bp, Artificial Sequence
  Description of Artificial Sequence: Synthetic oligonucleotide
tagtagctaactag

SEQ ID NO: 3205 - DNA, 14 bp, Artificial Sequence
  Description of Artificial Sequence: Synthetic oligonucleotide
tgatgactgagtga

SEQ ID NO: 3206 - DNA, 14 bp, Artificial Sequence
  Description of Artificial Sequence: Synthetic oligonucleotide
tagtagctaggtag

SEQ ID NO: 3207 - DNA, 3 bp, Artificial Sequence
  Description of Artificial Sequence: Synthetic oligonucleotide
taa

SEQ ID NO: 3208 - DNA, 14 bp, Artificial Sequence
  Description of Artificial Sequence: Synthetic oligonucleotide
taatagctaactag

SEQ ID NO: 3209 - DNA, 15 bp, Artificial Sequence
  Description of Artificial Sequence: Synthetic oligonucleotide
taactagctaactag

SEQ ID NO: 3210 - protein, 329 aa, Homo sapiens
MKFGSKIRRLAVAAVAGAIALGASFAVAQAPTFFRIGTGGTAGTYYPIGGLIANAISGAGEKGVPGLVATAVSSNGSVANINAIKSGALESGFTQSDVAYWAYNGTGLYDGKGKVEDLRLLATLYPETIHIVARKDANIKSVADLKGKRVSLDEPGSGTIVDARIVLEAYGLTEDDIKAEHLKPGPAGERLKDGALDAYFFVGGYPTGAISELAISNGISLVPISGPEADKILEKYSFFSKDVVPAGAYKDVAETPTLAVAAQWVTSAKQPDDLIYNITKVLWNEDTRKALDAGHAKGKLIKLDSATSSLGIPLHPGAERFYKEAGVLK

SEQ ID NO: 3211 - protein, 402 aa, Homo sapiens
MKKLLKSALLFAATGSALSLQALPVGNPAEPSLLIDGTMWEGASGDPCDPCATWCDAISIRAGYYGDYVFDRVLKVDVNKTFSGMAATPTQATGNASNTNQPEANGRPNIAYGRHMQDAEWFSNAAFLALNIWDRFDIFCTLGASNGYFKASSAAFNLVGLIGFSAASSISTDLPMQLPNVGITQGVVEFYTDTSFSWSVGARGALWECGCATLGAEFQYAQSNPKIEMLNVTSSPAQFVIHKPRGYKGASSNFPLPITAGTTEATDTKSATIKYHEWQVGLALSYRLNMLVPYIGVNWSRATFDADTIRIAQPKLKSEILNITTWNPSLIGSTTALPNNSGKDVLSDVLQIASIQINKMKSRKACGVAVGATLIDADKWSITGEARLINERAAHMNAQFRF

SEQ ID NO: 3212 - protein, 370 aa, Fusobacterium nucleatum
MKKLALVLGLLLVVGSVASAKEVMPAPTPAPEKVVEYVEKPVIVYRDREVAPAWRPNGSVDVQYRWYGEVEKKNPKDDKDENWATGKVNAGRLQTLTKVNFTEKQTLEVRTRNHHTLNDTDANNKKSNGAADEYRLRHFYNFGKLGSSKVNATSRVEFKQKTNDGEKSLGASVLFDFADYIYSNNFFKVDKLGLRPGYKYVWKGHGNGEEGTPTVHNEYHLAFESDFTLPFNFALNLEYDLSYNRYREKFETTDGLKKAEWYGELTAVLSNYTPLYKAGAFELGFNAEGGYDTYNMHQYKRIGGEDGTSVDRRDYELYLEPTLQVSYKPTDFVKLYAAAGADYRNRITGESEVKRWRWQPTASAGMKVTF

SEQ ID NO: 3213 - protein, 495 aa, Mycobacterium tuberculosis
MNQHFDVLIIGAGLSGIGTACHVTAEFPDKTIALLERRERLGGTWDLFRYPGVRSDSDMFTFGYKFRPWRDVKVLADGASIRQYIADTATEFGVDEKIHYGLKVNTAEWSSRQCRWTVAGVHEATGETRTYTCDYLISCTGYYNYDAGYLPDFPGVHRFGGRCVHPQHWPEDLDYSGKKVVVIGSGATAVTLVPAMAGSNPGSAAHVTMLQRSPSYIFSLPAVDKISEVLGRFLPDRWVYEFGRRRNIAIQRKLYQACRRWPKLMRRLLLWEVRRRLGRSVDMSNFTPNYLPWDERLCAVPNGDLFKTLASGAASVVTDQIETFTEKGILCKSGREIEADIIVTATGLNIQMLGGMRLIVDGAEYQLPEKMTYKGVLLENAPNLAWIIGYTNASWTLKSDIAGAYLCRLLRHMADNGYTVATPRDAQDCALDVGMFDQLNSGYVKRGQDIMPRQGSKHPWRVLMHYEKDAKILLEDPIDDGVLHFAAAAQDHAAA

SEQ ID NO: 3214 - protein, 95 aa, Mycobacterium tuberculosis
MTEQQWNFAGIEAAASAIQGNVTSIHSLLDEGKQSLTKLAAAWGGSGSEAYQGVQQKWDATATELNNALQNLARTISEAGQAMASTEGNVTGMFA

SEQ ID NO: 3215 - protein, 311 aa, Neisseria gonorrhoeae
MKKSLIALTLAALPVAAMADVTLYGTIKAGVETYRFVAHNGAQASGVETATEIADLGSKIGFKGQEDLGNGLKAIWQLEQKAYVSGTNTGWGNRQSFIGLKGGFGKVRVGRLNSVLKDTGGFNPWEGKSEYLSLSNIARPEERPISVRYDSPEFAGFSGSVQYVPNDNSGENKSESYHAGFNYKNSGFFVQYAGSYKRHNYTTEKHQIHRLVGGYDHDALYASVAVQQQDAKLAWPDDNSHNSQTEVATTVAYRFGNVTPRVSYAHGFKGSVYEANHDNTYDQVVVGAEYDFSKRTSALVSAGWLQEGKGA

SEQ ID NO: 3216 - protein, 107 aa, Staphylococcus aureus
FVGYKPYSQNPRDYFVPDNELPPLVHSGFNPSFIATVSHEKGSGDTSEFEITYGRNMDVTHATRRTTHYGNSYLEGSRIHNAFVNRNYTVKYEVNWKTHEIKVKGHN

SEQ ID NO: 3217 - protein, 301 aa, Rhodobacter capsulatus
EVKLSGDARMGVMYNGDDWNFSSRSRVLFTMSGTTDSGLEFGASFKAHESVGAETGEDGTVFLSGAFGKIEMGDALGASEALFGDLYEVGYTDLDDRGGNDIPYLTGDERLTAEDNPVLLYTYSAGAFSVAASMSDGKVGETSEDDAQEMAVAAAYTFGNYTVGLGYEKIDSPDTALMADMEQLELAAIAKFGATNVKAYYADGELDRDFARAVFDLTPVAAAATAVDHKAYGLSVDSTFGATTVGGYVQVLDIDTIDDVTYYGLGASYDLGGGASIVGGIADNDLPNSDMVADLGVKFKF

SEQ ID NO: 3218 - protein, 346 aa, Escherichia coli
MKKTAIAIAVALAGFATVAQAAPKDNTWYTGAKLGWSQYHDTGFINNNGPTHENQLGAGAFGGYQVNPYVGFEMGYDWLGRMPYKGSVENGAYKAQGVQLTAKLGYPITDDLDIYTRLGGMVWRADTKSNVYGKNHDTGVSPVFAGGVEYAITPEIATRLEYQWTNNIGDAHTIGTRPDNGMLSLGVSYRFGQGEAAPVVAPAPAPAPEVQTKHFTLKSDVLFNFNKATLKPEGQAALDQLYSQLSNLDPKDGSVVVLGYTDRIGSDAYNQGLSERRAQSVVDYLISKGIPADKISARGMGESNPVTGNTCDNVKQRAALIDCLAPDRRVEIEVKGIKDVVTQPQA

SEQ ID NO: 3219 - protein, 87 aa, Chlamydia pneumoniae
AGVATATGTKSATINYHEWQVGASLSYRLNSLVPYIGVQWSRATFDADNIRIAQPKLPTAVLNLTAWNPSLLGNATALSTTDSFSDF

SEQ ID NO: 3220 - protein, 631 aa, Streptococcus pyogenes
MTTYQDDFYQAVNGKWAETAVIPDDKPRTGGFSDLADEIEALMLDTTDAWLAGENIPDDAILKNFVKFHRLVADYAKRDEVGVSPILPLIEEYQSLKSFSEFVANIAKYELAGLPNEFPFSVAPDFMNAQLNVLWAEAPSILLPDTTYYEEGNEKAEELRGIWRQSQEKLLPQFGFSTEEIKDLLDKVIELDKQLAKYVLSREEGSEYAKLYHPYVWADFKKLAPELPLDSIFEKILGQVPDKVIVPEERFWTEFAATYYSEANWDLLKANLIVDAANAYNAYLTDDIRVESGAYSRALSGTPQAMDKQKAAFYLAQGPFSQALGLWYAGQKFSPEAKADVESKVARMIEVYKSRLETADWLAPATREKAITKLNVITPHIGYPEKLPETYAKKVIDESLSLVENAQNLAKITIAHTWSKWNKPVDRSEWHMPAHLVNAYYDPQQNQIVFPAAILQEPFYSLDQSSSANYGGIGAVIAHEISHAFDTNGASFDEHGSLNDWWTQEDYAAFKERTDKIVAQFDGLESHGAKVNGKLTVSENVADLGGVACALEAAQSEEDFSARDFFINFATIWRMKAREEYMQMLASIDVHAPGELRTNVTLTNFDAFHETFDIKEGDAMWRAPKDRVIIW

SEQ ID NO: 3221 - protein, 341 aa, Vibrio cholerae
MNKTLIALAVSAAAVATGAYADGINQSGDKAGSTVYSAKGTSLEVGGRAEARLSLKDGKAQDNSRVRLNFLGKAEINDSLYGVGFYEGEFTTNDQGKNASNNSLDNRYTYAGIGGTYGEVTYGKNDGALGVITDFTDIMSYHGNTAAEKIAVADRVDNMLAYKGQFGDLGVKASYRFADRNAVDAMGNVVTETNAAKYSDNGEDGYSLSAIYTFGDTGFNVGAGYADQDDQNEYMLAASYRMENLYFAGLFTDGELAKDVDYTGYELAAGYKLGQAAFTATYNNAETAKETSADNFAIDATYYFKPNFRSYISYQFNLLDSDKVGKVASEDELAIGLRYDF

SEQ ID NO: 3222 - protein, 160 aa, Mycobacterium tuberculosis
MKGGAGVPDLPSLDASGVRLAIVASSWHGKICDALLDGARKVAAGCGLDDPTVVRVLGAIEIPVVAQELARNHDAVVALGVVIRGQTPHFDYVCDAVTQGLTRVSLDSSTPIANGVLTTNTEEQALDRAGLPTSAEDKGAQATVAALATALTLRELRAHS

SEQ ID NO: 3223 - protein, 150 aa, Pasteurella multocida
MKKLTKVLLVAGSVAVLAACGSSKKDESAGQMFGGYSVQDLQQRYNTVYFGFDKYNIEGEYVQILDAHAAFLNATPATKVVVEGNTDERGTPEYNIALGQRRADAVKHYLSAKGVQAGQVSTVSYGEEKPAVLGHDEAAYSKNRRAVLAY

SEQ ID NO: 3224 - protein, 177 aa, Brucella melitensis
MGISKASLLSLAAAGIVLAGCQSSRLGNLDNVSPPPPPAPVNAVPAGTVQKGNLDSPTQFPNAPSTDMSAQSGTQVASLPPASAPDLTPGAVAGVWNASLGGQSCKIATPQTKYGQGYRAGPLRCPGELANLASWAVNGKQLVLYDANGGTVASLYSSGQGRFDGQTTGGQAVTLSR

SEQ ID NO: 3225 - protein, 359 aa, Escherichia coli
MQILADLLNTIPAIDSTAMSRAQRHIDGLLKPVGSLGKLEVLAIQLAGMPGLNGIPHVGKKAVLVMCADHGVWEEGVAISPKEVTAIQAENMTRGTTGVCVLAEQAGANVHVIDVGIDTAEPIPGLINMRVARGSGNIASAPAMSRRQAEKLLLDVICYTQELAKNGVTLFGVGELGMANTTPAAAIVSTITGRDPEEVVGIGANLPTDKLANKIDVVRRAITLNQPNPQDGVDVLAKVGGFDLVGIAGVMLGAASCGLPVLLDGFLSYAAALAACQMSPAIKPYLIPSHLSAEKGARIALSHLGLEPYLNMEMRLGEGSGAALAMPIIEAACAIYNNMGELAASNIVLPGNTTSDLNS

SEQ ID NO: 3226 - protein, 172 aa, Mycobacterium tuberculosis
MKNARTTLIAAAIAGTLVTTSPAGIANADDAGLDPNAAAGPDAVGFDPNLPPAPDAAPVDTPPAPEDAGFDPNLPPPLAPDFLSPPAEEAPPVPVAYSVNWDAIAQCESGGNWSINTGNGYYGGLRFTAGTWRANGGSGSAANASREEQIRVAENVLRSQGIRAWPVCGRRG

SEQ ID NO: 3227 - protein, 130 aa, Mycobacterium tuberculosis
MAKLSTDELLDAFKEMTLLELSDFVKKFEETFEVTAAAPVAVAAAGAAPAGAAVEAAEEQSEFDVILEAAGDKKIGVIKVVREIVSGLGLKEAKDLVDGAPKPLLEKVAKEAADEAKAKLEAAGATVTVK

SEQ ID NO: 3228 - protein, 199 aa, Mycobacterium tuberculosis
MAENSNIDDIKAPLLAALGAADLALATVNELITNLRERAEETRTDTRSRVEESRARLTKLQEDLPEQLTELREKFTAEELRKAAEGYLEAATSRYNELVERGEAALERLRSQQSFEEVSARAEGYVDQAVELTQEALGTVASQTRAVGERAAKLVGIELPKKAAPAKKAAPAKKAAPAKKAAAKKAPAKKAAAKKVTQK

SEQ ID NO: 3229 - protein, 594 aa, Homo sapiens
MNKIYRIIWNSALNAWVAVSELTRNHTKRASATVATAVLATLLFATVQASTTDDDDLYLEPVQRTAVVLSFRSDKEGTGEKEVTEDSNWGVYFDKKGVLTAGTITLKAGDNLKIKQNTNENTNASSFTYSLKKDLTDLTSVGTEKLSFSANSNKVNITSDTKGLNFAKKTAETNGDTTVHLNGIGSTLTDTLLNTGATTNVTNDNVTDDEKKRAASVKDVLNAGWNIKGVKPGTTASDNVDFVRTYDTVEFLSADTKTTTVNVESKDNGKRTEVKIGAKTSVIKEKDGKLVTGKDKGENDSSTDKGEGLVTAKEVIDAVNKAGWRMKTTTANGQTGQADKFETVTSGTNVTFASGKGTTATVSKDDQGNITVMYDVNVGDALNVNQLQNSGWNLDSKAVAGSSGKVISGNVSPSKGKMDETVNINAGNNIEITRNGKNIDIATSMTPQFSSVSLGAGADAPTLSVDDEGALNVGSKDANKPVRITNVAPGVKEGDVTNVAQLKGVAQNLNNHIDNVDGNARAGIAQAIATAGLVQAYLPGKSMMAIGGGTYRGEAGYAIGYSSISDGGNWIIKGTASGNSRGHFGASASVGYQW

SEQ ID NO: 3230 - protein, 376 aa, Escherichia coli
MAKQDYYEILGVSKTAEEREIRKAYKRLAMKYHPDRNQGDKEAEAKFKEIKEAYEVLTDSQKRAAYDQYGHAAFEQGGMGGGGFGGGADFSDIFGDVFGDIFGGGRGRQRAARGADLRYNMELTLEEAVRGVTKEIRIPTLEECDVCHGSGAKPGTQPQTCPTCHGSGQVQMRQGFFAVQQTCPHCQGRGTLIKDPCNKCHGHGRVERSKTLSVKIPAGVDTGDRIRLAGEGEAGEHGAPAGDLYVQVQVKQHPIFEREGNNLYCEVPINFAMAALGGEIEVPTLDGRVKLKVPGETQTGKLFRMRGKGVKSVRGGAQGDLLCRVVVETPVGLNERQKQLLQELQESFGGPTGEHNSPRSKSFFDGVKKFFDDLTR

SEQ ID NO: 3231 - protein, 471 aa, Streptococcus pneumoniae
MANKAVNDFILAMNYDKKKLLTHQGESIENRFIKEGNQLPDEFVVIERKKRSLSTNTSDISVTATNDSRLYPGALLVVDETLLENNPTLLAVDRAPMTYSIDLPGLASSDSFLQVEDPSNSSVRGAVNDLLAKWHQDYGQVNNVPARMQYEKITAHSMEQLKVKFGSDFEKTGNSLDIDFNSVHSGEKQIQIVNFKQIYYTVSVDAVKNPGDVFQDTVTVEDLKQRGISAERPLVYISSVAYGRQVYLKLETTSKSDEVEAAFEALIKGVKVAPQTEWKQILDNTEVKAVILGGDPSSGARVVTGKVDMVEDLIQEGSRFTADHPGLPISYTTSFLRDNVVATFQNSTDYVETKVTAYRNGDLLLDHSGAYVAQYYITWDELSYDHQGKEVLTPKAWDRNGQDLTAHFTTSIPLKGNVRNLSVKIRECTGLAWEWWRTVYEKTDLPLVRKRTISIWGTTLYPQVEDKVEND

SEQ ID NO: 3232 - protein, 498 aa, Homo sapiens
MAQVINTNSLSLITQNNINKNQSALSSSIERLSSGLRINSAKDDAAGQAIANRFTSNIKGLTQAARNANDGISVAQTTEGALSEINNNLQRVRELTVQATTGTNSESDLSSIQDEIKSRLDEIDRVSGQTQFNGVNVLAKNGSMKIQVGANDNQTITIDLKQIDAKTLGLDGFSVKNNDTVTTSAPVTAFGATTTNNIKLTGITLSTEAATDTGGTNPASIEGVYTDNGNDYYAKITGGDNDGKYYAVTVANDGTVTMATGATANATVTDANTTKATTITSGGTPVQIDNTAGSATANLGAVSLVKLQDSKGNDTDTYALKDTNGNLYAADVNETTGAVSVKTITYTDSSGAASSPTAVKLGGDDGKTEVVDIDGKTYDSADLNGGNLQTGLTAGGEALTAVANGKTTDPLKALDDAIASVDKFRSSLGAVQNRLDSAVTNLNNTTTNLSEAQSRIQDADYATEVSNMSKAQIIQQAGNSVLAKANQVPQQVLSLLQG

SEQ ID NO: 3233 - protein, 189 aa, Homo sapiens
MASPFALLMVLVVLSCKSSCSLGCDLPETHSLDNRRTLMLLAQMSRISPSSCLMDRHDFGFPQEEFDGNQFQKAPAISVLHELIQQIFNLFTTKDSSAAWDEDLLDKFCTELYQQLNDLEACVMQEERVGETPLMNADSILAVKKYFRRITLYLTEKKYSPCAWEVVRAEIMRSLSLSTNLQERLRRKE

SEQ ID NO: 3234 - protein, 166 aa, Homo sapiens
MKYTSYILAFQLCIVLGSLGCYCQDPYVKEAENLKKYFNAGHSDVADNGTLFLGILKNWKEESDRKIMQSQIVSFYFKLFKNFKDDQSIQKSVETIKEDMNVKFFNSNKKKRDDFEKLTNYSVTDLNVQRKAIHELIQVMAELSPAAKTGKRKRSQMLFRGRRASQ

SEQ ID NO: 3235 - protein, 153 aa, Homo sapiens
MYRMQLLSCIALSLALVTNSAPTSSSTKKTQLQLEHLLLDLQMILNGINNYKNPKLTRMLTFKFYMPKKATELKHLQCLEEELKPLEEVLNLAQSKNFHLRPRDLISNINVIVLELKGSETTFMCEYADETATIVEFLNRWITFCQSIISTLT

SEQ ID NO: 3236 - protein, 39 aa, Homo sapiens
MWPPGSASQPPPSPAAATGLHPAARPVSLQCRLSMCPAR

SEQ ID NO: 3237 - protein, 338 aa, Homo sapiens [sequence omitted]

SEQ ID NO: 3238 - protein, 162 aa, Homo sapiens
MRISKPHLRSISIQCYLCLLLNSHFLTEAGIHVFILGCFSAGLPKTEANWVNVISDLKKIEDLIQSMHIDATLYTESDVHPSCKVTAMKCFLLELQVISLESGDASIHDTVENLIILANNSLSSNGNVTESGCKECEELEEKNIKEFLQSFVHIVQMFINTS

SEQ ID NO: 3239 - protein, 193 aa, Homo sapiens
MAAEPVEDNCINFVAMKFIDNTLYFIAEDDENLESDYFGKLESKLSVIRNLNDQVLFIDQGNRPLFEDMTDSDCRDNAPRTIFIISMYKDSQPRGMAVTISVKCEKISTLSCENKIISFKEMNPPDNIKDTKSDIIFFQRSVPGHDNKMQFESSSYEGYFLACEKERDLFKLILKKEDELGDRSIMFTVQNED

SEQ ID NO: 3240 - protein, 162 aa, Homo sapiens
MRSSPGNMERIVICLMVIFLGTLVHKSSSQGQDRHMIRMRQLIDIVDQLKNYVNDLVPEFLPAPEDVETNCEWSAFSCFQKAQLKSANTGNNERIINVSIKKLKRKPPSTNAGRRQKHRLTCPSCDSYEKKPPKEFLERFKSLLQKMIHQHLSSRTHGSEDS

SEQ ID NO: 3241 - protein, 144 aa, Homo sapiens
MWLQSLLLLGTVACSISAPARSPSPSTQPWEHVNAIQEARRLLNLSRDTAAEMNETVEVISEMFDLQEPTCLQTRLELYKQGLRGSLTKLKGPLTMMASHYKQHCPPTPETSCATQIITFESFKENLKDFLLVIPFDCWEPVQE

SEQ ID NO: 3242 - protein, 269 aa, Homo sapiens
MAEVPELASEMMAYYSGNEDDLFFEADGPKQMKCSFQDLDLCPLDGGIQLRISDHHYSKGFRQAASVVVAMDKLRKMLVPCPQTFQENDLSTFFPFIFEEEPIFFDTWDNEAYVHDAPVRSLNCTLRDSQQKSLVMSGPYELKALHLQGQDMEQQVVFSMSFVQGEESNDKIPVALGLKEKNLYLSCVLKDDKPTLQLESVDPKNYPKKKMEKRFVFNKIEINNKLEFESAQFPNWYISTSQAENMPVFLGGTKGGQDITDFTMQFVSS

SEQ ID NO: 3243 - protein, 212 aa, Homo sapiens
MNSFSTSAFGPVAFSLGLLLVLPAAFPAPVPPGEDSKDVAAPHRQPLTSSERIDKQIRYILDGISALRKETCNKSNMCESSKEALAENNLNLPKMAEKDGCFQSGFNEETCLVKIITGLLEFEVYLEYLQNRFESSEEQARAVQMSTKVLIQFLQKKAKNLDAITTPDPTTNASLLTKLQAQNQWLQDMTTHLILRSFKEFLQSSLRALRQM

SEQ ID NO: 3244 - protein, 233 aa, Homo sapiens
MSTESMIRDVELAEEALPKKTGGPQGSRRCLFLSLFSFLIVAGATTLFCLLHFGVIGPQREEFPRDLSLISPLAQAVRSSSRTPSDKPVAHVVANPQAEGQLQWLNRRANALLANGVELRDNQLVVPSEGLYLIYSQVLFKGQGCPSTHVLLTHTISRIAVSYQTKVNLLSAIKSPCQRETPEGAEAKPWYEPIYLGGVFQLEKGDRLSAEINRPDYLDFAESGQVYFGIIAL

SEQ ID NO: 3245 - protein, 177 aa, Homo sapiens
MFHVSFRYIFGLPPLILVLLPVASSDCDIEGKDGKQYESVLMVSIDQLLDSMKEIGSNCLNNEFNFFKRHICDANKEGMFLFRAARKLRQFLKMNSTGDFDLHLLKVSEGTTILLNCTGQVKGRKPAALGEAQPTKSLEENKSLKEQKKLNDLCFLKRLLQEIKTCWNKILMGTKEH

SEQ ID NO: 3246 - protein, 155 aa, Homo sapiens
MTPGKTSLVSLLLLLSLEAIVKAGITIPRNPGCPNSEDKNFPRTVMVNLNIHNRNTNTNPKRSSDYYNRSTSPWNLHRNEDPERYPSVIWEAKCRHLGCINADGNVDYHMNSVPIQQEILVLRREPPHCPNSFRLEKILVSVGCTCVTPIVHHVA

SEQ ID NO: 3247 - protein, 235 aa, Homo sapiens
MTVLAPAWSPTTYLLLLLLLSSGLSGTQDCSFQHSPISSDFAVKIRELSDYLLQDYPVTVASNLQDEELCGGLWRLVLAQRWMERLKTVAGSKMQGLLERVNTEIHFVTKCAFQPPPSCLRFVQTNISRLLQETSEQLVALKPWITRQNFSRCLELQCQPDSSTLPPPWSPRPLEATAPTAPQPPLLLLLLLPVGLLLLAAAWCLHWQRTRRRTPRPGEQVPPVPSPQDLLLVEH

SEQ ID NO: 3248 - protein, 448 aa, Homo sapiens
QVQLVESGGGVVQPGRSLRLSCAASGFTFSSYTMHWVRQAPGKGLEWVTFISYDGNNKYYADSVKGRFTISRDNSKNTLYLQMNSLRAEDTAIYYCARTGWLGPFDYWGQGTLVTVSSASTKGPSVFPLAPSSKSTSGGTAALGCLVKDYFPEPVTVSWNSGALTSGVHTFPAVLQSSGLYSLSSVVTVPSSSLGTQTYICNVNHKPSNTKVDKRVEPKSCDKTHTCPPCPAPELLGGPSVFLFPPKPKDTLMISRTPEVTCVVVDVSHEDPEVKFNWYVDGVEVHNAKTKPREEQYNSTYRVVSVLTVLHQDWLNGKEYKCKVSNKALPAPIEKTISKAKGQPREPQVYTLPPSRDELTKNQVSLTCLVKGFYPSDIAVEWESNGQPENNYKTTPPVLDSDGSFFLYSKLTVDKSRWQQGNVFSCSVMHEALHNHYTQKSLSLSPGK

SEQ ID NO: 3249 - protein, 440 aa, Homo sapiens; identical to SEQ ID NO: 3169

SEQ ID NO: 3250 - protein, 442 aa, Homo sapiens
EVQLVQSGAEVKKPGESLRISCKGSGYSFSTYWISWVRQMPGKGLEWMGKIYPGDSYTNYSPSFQGQVTISADKSISTAYLQWSSLKASDTAMYYCARGYGIFDYWGQGTLVTVSSASTKGPSVFPLAPCSRSTSESTAALGCLVKDYFPEPVTVSWNSGALTSGVHTFPAVLQSSGLYSLSSVVTVPSSNFGTQTYTCNVDHKPSNTKVDKTVERKCCVECPPCPAPPVAGPSVFLFPPKPKDTLMISRTPEVTCVVVDVSHEDPEVQFNWYVDGVEVHNAKTKPREEQFNSTFRVVSVLTVVHQDWLNGKEYKCKVSNKGLPAPIEKTISKTKGQPREPQVYTLPPSREEMTKNQVSLTCLVKGFYPSDIAVEWESNGQPENNYKTTPPMLDSDGSFFLYSKLTVDKSRWQQGNVFSCSVMHEALHNHYTQKSLSLSPGK

SEQ ID NO: 3251 - protein, 1464 aa, Homo sapiens
MPEQERQITAREGASRKILSKLSLPTRAWEPAMKKSFAFDNVGYEGGLDGLGPSSQVATSTVRILGMTCQSCVKSIEDRISNLKGIISMKVSLEQGSATVKYVPSVVCLQQVCHQIGDMGFEASIAEGKAASWPSRSLPAQEAVVKLRVEGMTCQSCVSSIEGKVRKLQGVVRVKVSLSNQEAVITYQPYLIQPEDLRDHVNDMGFEAAIKSKVAPLSLGPIDIERLQSTNPKRPLSSANQNFNNSETLGHQGSHVVTLQLRIDGMHCKSCVLNIEENIGQLLGVQSIQVSLENKTAQVKYDPSCTSPVALQRAIEALPPGNFKVSLPDGAEGSGTDHRSSSSHSPGSPPRNQVQGTCSTTLIAIAGMTCASCVHSIEGMISQLEGVQQISVSLAEGTATVLYNPSVISPEELRAAIEDMGFEASVVSESCSTNPLGNHSAGNSMVQTTDGTPTSVQEVAPHTGRLPANHAPDILAKSPQSTRAVAPQKCFLQIKGMTCASCVSNIERNLQKEAGVLSVLVALMAGKAEIKYDPEVIQPLEIAQFIQDLGFEAAVMEDYAGSDGNIELTITGMTCASCVHNIESKLTRTNGITYASVALATSKALVKFDPEIIGPRDIIKIIEEIGFHASLAQRNPNAHHLDHKMEIKQWKKSFLCSLVFGIPVMALMIYMLIPSNEPHQSMVLDHNIIPGLSILNLIFFILCTFVQLLGGWYFYVQAYKSLRHRSANMDVLIVLATSIAYVYSLVILVVAVAEKAERSPVTFFDTPPMLFVFIALGRWLEHLAKSKTSEALAKLMSLQATEATVVTLGEDNLIIREEQVPMELVQRGDIVKVVPGGKFPVDGKVLEGNTMADESLITGEAMPVTKKPGSTVIAGSINAHGSVLIKATHVGNDTTLAQIVKLVEEAQMSKAPIQQLADRFSGYFVPFIIIMSTLTLVVWIVIGFIDFGVVQRYFPNPNKHISQTEVIIRFAFQTSITVLCIACPCSLGLATPTAVMVGTGVAAQNGILIKGGKPLEMAHKIKTMFDKTGTITHGVPRVMRVLLLGDVATLPLRKVLAVVGTAEASSEHPLGVAVTKYCKEELGTETLGYCTDFQAVPGCGIGCKVSNVEGILAHSERPLSAPASHLNEAGSLPAEKDAVPQTFSVLIGNREWLRRNGLTISSDVSDAMTDHEMKGQTAILVAIDGVLCGMIAIADAVKQEAALAVHTLQSMGVDVVLITGDNRKTARAIATQVGINKVFAEVLPSHKVAKVQELQNKGKKVAMVGDGVNDSPALAQADMGVAIGTGTDVAIEAADVVLIRNDLLDVVASIHLSKRTVRRIRINLVLALIYNLVGIPIAAGVFMPIGIVLQPWMGSAAMAASSVSVVLSSLQLKCYKKPDLERYEAQAHGHMKPLTASQVSVHIGMDDRWRDSPRATPWDQVSYVSQVSLSSLTSDKPSRHSAAADDDGDKWSLLLNGRDEEQYI

SEQ ID NO: 3252 - protein, 1321 aa, Homo sapiens
MSDSVILRSIKKFGEENDGFESDKSYNNDKKSRLQDEKKGDGVRVGFFQLFRFSSSTDIWLMFVGSLCAFLHGIAQPGVLLIFGTMTDVFIDYDVELQELQIPGKACVNNTIVWTNSSLNQNMTNGTRCGLLNIESEMIKFASYYAGIAVAVLITGYIQICFWVIAAARQIQKMRKFYFRRIMRMEIGWFDCNSVGELNTRFSDDINKINDAIADQMALFIQRMTSTICGFLLGFFRGWKLTLVIISVSPLIGIGAATIGLSVSKFTDYELKAYAKAGVVADEVISSMRTVAAFGGEKREVERYEKNLVFAQRWGIRKGIVMGFFTGFVWCLIFLCYALAFWYGSTLVLDEGEYTPGTLVQIFLSVIVGALNLGNASPCLEAFATGRAAATSIFETIDRKPIIDCMSEDGYKLDRIKGEIEFHNVTFHYPSRPEVKILNDLNMVIKPGEMTALVGPSGAGKSTALQLIQRFYDPCEGMVTVDGHDIRSLNIQWLRDQIGIVEQEPVLFSTTIAENIRYGREDATMEDIVQAAKEANAYNFIMDLPQQFDTLVGEGGGQMSGGQKQRVAIARALIRNPKILLLDMATSALDNESEAMVQEVLSKIQHGHTIISVAHRLSTVRAADTIIGFEHGTAVERGTHEELLERKGVYFTLVTLQSQGNQALNEEDIKDATEDDMLARTFSRGSYQDSLRASIRQRSKSQLSYLVHEPPLAVVDHKSTYEEDRKDKDIPVQEEVEPAPVRRILKFSAPEWPYMLVGSVGAAVNGTVTPLYAFLFSQILGTFSIPDKEEQRSQINGVCLLFVAMGCVSLFTQFLQGYAFAKSGELLTKRLRKFGFRAMLGQDIAWFDDLRNSPGALTTRLATDASQVQGAAGSQIGMIVNSFTNVTVAMIIAFSFSWKLSLVILCFFPFLALSGATQTRMLTGFASRDKQALEMVGQITNEALSNIRTVAGIGKERRFIEALETELEKPFKTAIQKANIYGFCFAFAQCIMFIANSASYRYGGYLISNEGLHFSYVFRVISAVVLSATALGRAFSYTPSYAKAKISAARFFQLLDRQPPISVYNTAGEKWDNFQGKIDFVDCKFTYPSRPDSQVLNGLSVSISPGQTLAFVGSSGCGKSTSIQLLERFYDPDQGKVMIDGHDSKKVNVQFLRSNIGIVSQEPVLFACSIMDNIKYGDNTKEIPMERVIAAAKQAQLHDFVMSLPEKYETNVGSQGSQLSRGEKQRIAIARAIVRDPKILLLDEATSALDTESEKTVQVALDKAREGRTCIVIAHRLSTIQNADIIAVMAQGVVIEKGTHEELMAQKGAYYKLVTTGSPIS

SEQ ID NO: 3253 - protein, 654 aa, Homo sapiens
MQAARMAASLGRQLLRLGGGSSRLTALLGQPRPGPARRPYAGGAAQLALDKSDSHPSDALTRKKPAKAESKSFAVGFKGQLTTDQVFPYPSVLNEEQTQFLKELVEPVSRFFEEVNDPAKNDALEMVEETTWQGLKELGAFGLQVPSELGGVGLCNTQYARLVEIVGMHDLGVGITLGAHQSIGFKGILLFGTKAQKEKYLPKLASGETVAAFCLTEPSSGSDAASIRTSAVPSPCGKYYTLNGSKLWISNGGLADIFTVFAKTPVTDPATGAVKEKITAFVVERGFGGITHGPPEKKMGIKASNTAEVFFDGVRVPSENVLGEVGSGFKVAMHILNNGRFGMAAALAGTMRGIIAKAVDHATNRTQFGEKIHNFGLIQEKLARMVMLQYVTESMAYMVSANMDQGATDFQIEAAISKIFGSEAAWKVTDECIQIMGGMGFMKEPGVERVLRDLRIFRIFEGTNDILRLFVALQGCMDKGKELSGLGSALKNPFGNAGLLLGEAGKQLRRRAGLGSGLSLSGLVHPELSRSGELAVRALEQFATVVEAKLIKHKKGIVNEQFLLQRLADGAIDLYAMVVVLSRASRSLSEGHPTAQHEKMLCDTWCIEAAARIREGMAALQSDPWQQELYRNFKSISKALVERGGVVTSNPLGF

SEQ ID NO: 3254 - protein, 1532 aa, Homo sapiens
MGHSKQIRILLLNEMEKLEKTLFRLEQGYELQFRLGPTLQGKAVTVYTNYPFPGETFNREKFRSLDWENPTEREDDSDKYCKLNLQQSGSFQYYFLQGNEKSGGGYIVVDPILRVGADNHVLPLDCVTLQTFLAKCLGPFDEWESRLRVAKESGYNMIHFTPLQTLGLSRSCYSLANQLELNPDFSRPNRKYTWNDVGQLVEKLKKEWNVICITDVVYNHTAANSKWIQEHPECAYNLVNSPHLKPAWVLDRALWRFSCDVAEGKYKEKGIPALIENDHHMNSIRKIIWEDIFPKLKLWEFFQVDVNKAVEQFRRLLTQENRRVTKSDPNQHLTIIQDPEYRRFGCTVDMNIALTTFIPHDKGPAAIEECCNWFHKRMEELNSEKHRLINYHQEQAVNCLLGNVFYERLAGHGPKLGPVTRKHPLVTRYFTFPFEEIDFSMEESMIHLPNKACFLMAHNGWVMGDDPLRNFAEPGSEVYLRRELICWGDSVKLRYGNKPEDCPYLWAHMKKYTEITATYFQGVRLDNCHSTPLHVAEYMLDAARNLQPNLYVVAELFTGSEDLDNVFVTRLGISSLIREAMSAYNSHEEGRLVYRYGGEPVGSFVQPCLRPLMPAIAHALFMDITHDNECPIVHRSAYDALPSTTIVSMACCASGSTRGYDELVPHQISVVSEERFYTKWNPEALPSNTGEVNFQSGIIAARCAISKLHQELGAKGFIQVYVDQVDEDIVAVTRHSPSIHQSVVAVSRTAFRNPKTSFYSKEVPQMCIPGKIEEVVLEARTIERNTKPYRKDENSINGTPDITVEIREHIQLNESKIVKQAGVATKGPNEYIQEIEFENLSPGSVIIFRVSLDPHAQVAVGILRNHLTQFSPHFKSGSLAVDNADPILKIPFASLASRLTLAELNQILYRCESEEKEDGGGCYDIPNWSALKYAGLQGLMSVLAEIRPKNDLGHPFCNNLRSGDWMIDYVSNRLISRSGTIAEVGKWLQAMFFYLKQIPRYLIPCYFDAILIGAYTTLLDTAWKQMSSFVQNGSTFVKHLSLGSVQLCGVGKFPSLPILSPALMDVPYRLNEITKEKEQCCVSLAAGLPHFSSGIFRCWGRDTFIALRGILLITGRYVEARNIILAFAGTLRHGLIPNLLGEGIYARYNCRDAVWWWLQCIQDYCKMVPNGLDILKCPVSRMYPTDDSAPLPAGTLDQPLFEVIQEAMQKHMQGIQFRERNAGPQIDRNMKDEGFNITAGVDEETGFVYGGNRFNCGTWMDKMGESDRARNRGIPATPRDGSAVEIVGLSKSAVRWLLELSKKNIFPYHEVTVKRHGKAIKVSYDEWNRKIQDNFEKLFHVSEDPSDLNEKHPNLVHKRGIYKDSYGASSPWCDYQLRPNFTIAMVVAPELFTTEKAWKALEIAEKKLLGPLGMKTLDPDDMVYCGIYDNALDNDNYNLAKGFNYHQGPEWLWPIGYFLRAKLYFSRLMGPETTAKTIVLVKNVLSRHYVHLERSPWKGLPELTNENAQYCPFSCETQAWSIATILETLYDL

SEQ ID NO: 3255 - protein, 2351 aa, Homo sapiens
MQIELSTCFFLCLLRFCFSATRRYYLGAVELSWDYMQSDLGELPVDARFPPRVPKSFPFNTSVVYKKTLFVEFTDHLFNIAKPRPPWMGLLGPTIQAEVYDTVVITLKNMASHPVSLHAVGVSYWKASEGAEYDDQTSQREKEDDKVFPGGSHTYVWQVLKENGPMASDPLCLTYSYLSHVDLVKDLNSGLIGALLVCREGSLAKEKTQTLHKFILLFAVFDEGKSWHSETKNSLMQDRDAASARAWPKMHTVNGYVNRSLPGLIGCHRKSVYWHVIGMGTTPEVHSIFLEGHTFLVRNHRQASLEISPITFLTAQTLLMDLGQFLLFCHISSHQHDGMEAYVKVDSCPEEPQLRMKNNEEAEDYDDDLTDSEMDVVRFDDDNSPSFIQIRSVAKKHPKTWVHYIAAEEEDWDYAPLVLAPDDRSYKSQYLNNGPQRIGRKYKKVRFMAYTDETFKTREAIQHESGILGPLLYGEVGDTLLIIFKNQASRPYNIYPHGITDVRPLYSRRLPKGVKHLKDFPILPGEIFKYKWTVTVEDGPTKSDPRCLTRYYSSFVNMERDLASGLIGPLLICYKESVDQRGNQIMSDKRNVILFSVFDENRSWYLTENIQRFLPNPAGVQLEDPEFQASNIMHSINGYVFDSLQLSVCLHEVAYWYILSIGAQTDFLSVFFSGYTFKHKMVYEDTLTLFPFSGETVFMSMENPGLWILGCHNSDFRNRGMTALLKVSSCDKNTGDYYEDSYEDISAYLLSKNNAIEPRSFSQNSRHPSTRQKQFNATTIPENDIEKTDPWFAHRTPMPKIQNVSSSDLLMLLRQSPTPHGLSLSDLQEAKYETFSDDPSPGAIDSNNSLSEMTHFRPQLHHSGDMVFTPESGLQLRLNEKLGTTAATELKKLDFKVSSTSNNLISTIPSDNLAAGTDNTSSLGPPSMPVHYDSQLDTTLFGKKSSPLTESGGPLSLSEENNDSKLLESGLMNSQESSWGKNVSSTESGRLFKGKRAHGPALLTKDNALFKVSISLLKTNKTSNNSATNRKTHIDGPSLLIENSPSVWQNILESDTEFKKVTPLIHDRMLMDKNATALRLNHMSNKTTSSKNMEMVQQKKEGPIPPDAQNPDMSFFKMLFLPESARWIQRTHGKNSLNSGQGPSPKQLVSLGPEKSVEGQNFLSEKNKVVVGKGEFTKDVGLKEMVFPSSRNLFLTNLDNLHENNTHNQEKKIQEEIEKKETLIQENVVLPQIHTVTGTKNFMKNLFLLSTRQNVEGSYDGAYAPVLQDFRSLNDSTNRTKKHTAHFSKKGEEENLEGLGNQTKQIVEKYACTTRISPNTSQQNFVTQRSKRALKQFRLPLEETELEKRIIVDDTSTQWSKNMKHLTPSTLTQIDYNEKEKGAITQSPLSDCLTRSHSIPQANRSPLPIAKVSSFPSIRPIYLTRVLFQDNSSHLPAASYRKKDSGVQESSHFLQGAKKNNLSLAILTLEMTGDQREVGSLGTSATNSVTYKKVENTVLPKPDLPKTSGKVELLPKVHIYQKDLFPTETSNGSPGHLDLVEGSLLQGTEGAIKWNEANRPGKVPFLRVATESSAKTPSKLLDPLAWDNHYGTQIPKEEWKSQEKSPEKTAFKKKDTILSLNACESNHAIAAINEGQNKPEIEVTWAKQGRTERLCSQNPPVLKRHQREITRTTLQSDQEEIDYDDTISVEMKKEDFDIYDEDENQSPRSFQKKTRHYFIAAVERLWDYGMSSSPHVLRNRAQSGSVPQFKKVVFQEFTDGSFTQPLYRGELNEHLGLLGPYIRAEVEDNIMVTFRNQASRPYSFYSSLISYEEDQRQGAEPRKNFVKPNETKTYFWKVQHHMAPTKDEFDCKAWAYFSDVDLEKDVHSGLIGPLLVCHTNTLNPAHGRQVTVQEFALFFTIFDETKSWYFTENMERNCRAPCNIQMEDPTFKENYRFHAINGYIMDTLPGLVMAQDQRIRWYLLSMGSNENIHSIHFSGHVFTVRKKEEYKMALYNLYPGVFETVEMLPSKAGIWRVECLIGEHLHAGMSTLFLVYSNKCQTPLGMASGHIRDFQITASGQYGQWAPKLARLHYSGSINAWSTKEPFSWIKVDLLAPMIIHGIKTQGARQKFSSLYISQFIIMYSLDGKKWQTYRGNSTGTLMVFFGNVDSSGIKHNIFNPPIIARYIRLHPTHYSIRSTLRMELMGCDLNSCSMPLGMESKAISDAQITASSYFTNMFATWSPSKARLHLQGRSNAWRPQVNNPKEWLQVDFQKTMKVTGVTTQGVKSLLTSMYVKEFLISSSQDGHQWTLFFQNGKVKVFQGNQDSFTPVVNSLDPPLLTRYLRIHPQSWVHQIALRMEVLGCEAQDLY

SEQ ID NO: 3256 - protein, 461 aa, Homo sapiens
MQRVNMIMAESPGLITICLLGYLLSAECTVFLDHENANKILNRPKRYNSGKLEEFVQGNLERECMEEKCSFEEAREVFENTERTTEFWKQYVDGDQCESNPCLNGGSCKDDINSYECWCPFGFEGKNCELDVTCNIKNGRCEQFCKNSADNKVVCSCTEGYRLAENQKSCEPAVPFPCGRVSVSQTSKLTRAETVFPDVDYVNSTEAETILDNITQSTQSFNDFTRVVGGEDAKPGQFPWQVVLNGKVDAFCGGSIVNEKWIVTAAHCVETGVKITVVAGEHNIEETEHTEQKRNVIRIIPHHNYNAAINKYNHDIALLELDEPLVLNSYVTPICIADKEYTNIFLKFGSGYVSGWGRVFHKGRSALVLQYLRVPLVDRATCLRSTKFTIYNNMFCAGFHEGGRDSCQGDSGGPHVTEVEGTSFLTGIISWGEECAMKGKYGIYTKVSRYVNWIKEKTKLT

SEQ ID NO: 3257 - protein, 452 aa, Homo sapiens
MSTAVLENPGLGRKLSDFGQETSYIEDNCNQNGAISLIFSLKEEVGALAKVLRLFEENDVNLTHIESRPSRLKKDEYEFFTHLDKRSLPALTNIIKILRHDIGATVHELSRDKKKDTVPWFPRTIQELDRFANQILSYGAELDADHPGFKDPVYRARRKQFADIAYNYRHGQPIPRVEYMEEEKKTWGTVFKTLKSLYKTHACYEYNHIFPLLEKYCGFHEDNIPQLEDVSQFLQTCTGFRLRPVAGLLSSRDFLGGLAFRVFHCTQYIRHGSKPMYTPEPDICHELLGHVPLFSDRSFAQFSQEIGLASLGAPDEYIEKLATIYWFTVEFGLCKQGDSIKAYGAGLLSSFGELQYCLSEKPKLLPLELEKTAIQNYTVTEFQPLYYVAESFNDAKEKVRNFAATIPRPFSVRYDPYTQRIEVLDNTQQLKILADSINSEIGILCSALQKIK

SEQ ID NO: 3258 - protein, 361 aa, Homo sapiens [sequence omitted]

SEQ ID NO: 3259 - protein, 952 aa, Homo sapiens
MGVRHPPCSHRLLAVCALVSLATAALLGHILLHDFLLVPRELSGSSPVLEETHPAHQQGASRPGPRDAQAHPGRPRAVPTQCDVPPNSRFDCAPDKAITQEQCEARGCCYIPAKQGLQGAQMGQPWCFFPPSYPSYKLENLSSSEMGYTATLTRTTPTFFPKDILTLRLDVMMETENRLHFTIKDPANRRYEVPLETPHVHSRAPSPLYSVEFSEEPFGVIVRRQLDGRVLLNTTVAPLFFADQFLQLSTSLPSQYITGLAEHLSPLMLSTSWTRITLWNRDLAPTPGANLYGSHPFYLALEDGGSAHGVFLLNSNAMDVVLQPSPALSWRSTGGILDVYIFLGPEPKSVVQQYLDVVGYPFMPPYWGLGFHLCRWGYSSTAITRQVVENMTRAHFPLDVQWNDLDYMDSRRDFTFNKDGFRDFPAMVQELHQGGRRYMMIVDPAISSSGPAGSYRPYDEGLRRGVFITNETGQPLIGKVWPGSTAFPDFTNPTALAWWEDMVAEFHDQVPFDGMWIDMNEPSNFIRGSEDGCPNNELENPPYVPGVVGGTLQAATICASSHQFLSTHYNLHNLYGLTEAIASHRALVKARGTRPFVISRSTFAGHGRYAGHWTGDVWSSWEQLASSVPEILQFNLLGVPLVGADVCGFLGNTSEELCVRWTQLGAFYPFMRNHNSLLSLPQEPYSFSEPAQQAMRKALTLRYALLPHLYTLFHQAHVAGETVARPLFLEFPKDSSTWTVDHQLLWGEALLITPVLQAGKAEVTGYFPLGTWYDLQTVPVEALGSLPPPPAAPREPAIHSEGQWVTLPAPLDTINVHLRAGYIIPLQGPGLTTTESRQQPMALAVALTKGGEARGELFWDDGESLEVLERGAYTQVIFLARNNTIVNELVRVTSEGAGLQLQKVTVLGVATAPQQVLSNGVPVSNFTYSPDTKVLDICVSLLMGEQFLVSWC

SEQ ID NO: 3260 - protein, 412 aa, Homo sapiens
MSSKGSVVLAYSGGLDTSCILVWLKEQGYDVIAYLANIGQKEDFEEARKKALKLGAKKVFIEDVSREFVEEFIWPAIQSSALYEDRYLLGTSLARPCIARKQVEIAQREGAKYVSHGATGKGNDQVRFELSCYSLAPQIKVIAPWRMPEFYNRFKGRNDLMEYAKQHGIPIPVTPKNPWSMDENLMHISYEAGILENPKNQAPPGLYTKTQDPAKAPNTPDILEIEFKKGVPVKVTNVKDGTTHQTSLELFMYLNEVAGKHGVGRIDIVENRFIGMKSRGIYETPAGTILYHAHLDIEAFTMDREVRKIKQGLGLKFAELVYTGFWHSPECEFVRHCIAKSQERVEGKVQVSVLKGQVYILGRESPLSLYNEELVSMNVQGDYEPTDATGFININSLRLKEYHRLQSKVTAK

SEQ ID NO: 3261 - protein, 357 aa, Homo sapiens
MEEGMNVLHDFGIQSTHYLQVNYQDSQDWFILVSVIADLRNAFYVLFPIWFHLQEAVGIKLLWVAVIGDWLNLVFKWILFGQRPYWWVLDTDYYSNTSVPLIKQFPVTCETGPGSPSGHAMGTAGVYYVMVTSTLSIFQGKIKPTYRFRCLNVILWLGFWAVQLNVCLSRIYLAAHFPHQVVAGVLSGIAVAETFSHIHSIYNASLKKYFLITFFLFSFAIGFYLLLKGLGVDLLWTLEKAQRWCEQPEWVHIDTTPFASLLKNLGTLFGLGLALNSSMYRESCKGKLSKWLPFRLSSIVASLVLLHVFDSLKPPSQVELVFYVLSFCKSAVVPLASVSVIPYCLAQVLGQPHKKSL

SEQ ID NO: 3262 - protein, 354 aa, Homo sapiens
MLFNLRILLNNAAFRNGHNFMVRNFRCGQPLQNKVQLKGRDLLTLKNFTGEEIKYMLWLSADLKFRIKQKGEYLPLLQGKSLGMIFEKRSTRTRLSTETGFALLGGHPCFLTTQDIHLGVNESLTDTARVLSSMADAVLARVYKQSDLDTLAKEASIPIINGLSDLYHPIQILADYLTLQEHYSSLKGLTLSWIGDGNNILHSIMMSAAKFGMHLQAATPKGYEPDASVTKLAEQYAKENGTKLLLTNDPLEAAHGGNVLITDTWISMGQEEEKKKRLQAFQGYQVTMKTAKVAASDWTFLHCLPRKPEEVDDEVFYSPRSLVFPEAENRKWTIMAVMVSLLTDYSPQLQKPKF

SEQ ID NO: 3263 - protein, 3684 aa, Homo sapiens
MLWWEEVEDCYEREDVQKKTFTKWVNAQFSKFGKQHIENLFSDLQDGRRLLDLLEGLTGQKLPKEKGSTRVHALNNVNKALRVLQNNNVDLVNIGSTDIVDGNHKLTLGLIWNIILHWQVKNVMKNIMAGLQQTNSEKILLSWVRQSTRNYPQVNVINFTTSWSDGLALNALIHSHRPDLFDWNSVVCQQSATQRLEHAFNIARYQLGIEKLLDPEDVDTTYPDKKSILMYITSLFQVLPQQVSIEAIQEVEMLPRPPKVTKEEHFQLHHQMHYSQQITVSLAQGYERTSSPKPRFKSYAYTQAAYVTTSDPTRSPFPSQHLEAPEDKSFGSSLMESEVNLDRYQTALEEVLSWLLSAEDTLQAQGEISNDVEVVKDQFHTHEGYMMDLTAHQGRVGNILQLGSKLIGTGKLSEDEETEVQEQMNLLNSRWECLRVASMEKQSNLHRVLMDLQNQKLKELNDWLTKTEERTRKMEEEPLGPDLEDLKRQVQQHKVLQEDLEQEQVRVNSLTHMVVVVDESSGDHATAALEEQLKVLGDRWANICRWTEDRWVLLQDILLKWQRLTEEQCLFSAWLSEKEDAVNKIHTTGFKDQNEMLSSLQKLAVLKADLEKKKQSMGKLYSLKQDLLSTLKNKSVTQKTEAWLDNFARCWDNLVQKLEKSTAQISQAVTTTQPSLTQTTVMETVTTVTTREQILVKHAQEELPPPPPQKKRQITVDSEIRKRLDVDITELHSWITRSEAVLQSPEFAIFRKEGNFSDLKEKVNAIEREKAEKFRKLQDASRSAQALVEQMVNEGVNADSIKQASEQLNSRWIEFCQLLSERLNWLEYQNNIIAFYNQLQQLEQMTTTAENWLKIQPTTPSEPTAIKSQLKICKDEVNRLSDLQPQIERLKIQSIALKEKGQGPMFLDADFVAFTNHFKQVFSDVQAREKELQTIFDTLPPMRYQETMSAIRTWVQQSETKLSIPQLSVTDYEIMEQRLGELQALQSSLQEQQSGLYYLSTTVKEMSKKAPSEISRKYQEFEEIEGRWKKLSSQLVEHCQKLEEQMNKLRKIQNHIQTLKKWMAEVDVFLKEEWPALGDSEILKKQLKQCRLLVSDIQTIQPSLNSVNEGGQKIKNEAEPEFASRLETELKELNTQWDHMCQQVYARKEALKGGLEKTVSLQKDLSEMHEWMTQAEEEYLERDFEYKTPDELQKAVEEMKRAKEEAQQKEAKVKLLTESVNSVIAQAPPVAQEALKKELETLTTNYQWLCTRLNGKCKTLEEVWACWHELLSYLEKANKWLNEVEFKLKTTENIPGGAEEISEVLDSLENLMRHSEDNPNQIRILAQTLTDGGVMDELINEELETFNSRWRELHEEAVRRQKLLEQSIQSAQETEKSLHLIQESLTFIDKQLAAYIADKVDAAQMPQEAQKIQSDLTSHEISLEEMKKHNQGKEAAQRVLSQIDVAQKKLQDVSMKFRLFQKPANFEQRLQESKMILDEVKMHLPALETKSVEQEVVQSQLNHCVNLYKSLSEVKSEVEMVIKTGRQIVQKKQTENPKELDERVTALKLHYNELGAKVTERKQQLEKCLKLSRKMRKEMNVLTEWLAATDMELTKRSAVEGMPSNLDSEVAWGKATQKEIEKQKVHLKSITEVGEALKTVLGKKETLVEDKLSLLNSNWIAVTSRAEEWLNLLLEYQKHMETFDQNVDHITKWIIQADTLLDESEKKKPQQKEDVLKRLKAELNDIRPKVDSTRDQAANLMANRGDHCRKLVEPQISELNHRFAAISHRIKTGKASIPLKELEQFNSDIQKLLEPLEAEIQQGVNLKEEDFNKDMNEDNEGTVKELLQRGDNLQQRITDERKREEIKIKQQLLQTKHNALKDLRSQRRKKALEISHQWYQYKRQADDLLKCLDDIEKKLASLPEPRDERKIKEIDRELQKKKEELNAVRRQAEGLSEDGAAMAVEPTQIQLSKRWREIESKFAQFRRLNFAQIHTVREETMMVMTEDMPLEISYVPSTYLTEITHVSQALLEVEQLLNAPDLCAKDFEDLFKQEESLKNIKDSLQQSSGRIDIIHSKKTAALQSATPVERVKLQEALSQLDFQWEKVNKMYKDRQGRFDRSVEKWRRFHYDIKIFNQWLTEAEQFLRKTQIPENWEHAKYKWYLKELQDGIGQRQTVVRTLNATGEEIIQQSSKTDASILQEKLGSLNLRWQEVCKQLSDRKKRLEEQKNILSEFQRDLNEFVLWLEEADNIASIPLEPGKEQQLKEKLEQVKLLVEELPLRQGILKQLNETGGPVLVSAPISPEEQDKLENKLKQTNLQWIKVSRALPEKQGEIEAQIKDLGQLEKKLEDLEEQLNHLLLWLSPIRNQLEIYNQPNQEGPFDVKETEIAVQAKQPDVEEILSKGQHLYKEKPATQPVKRKLEDLSSEWKAVNRLLQELRAKQPDLAPGLTTIGASPTQTVTLVTQPVVTKETAISKLEMPSSLMLEVPALADFNRAWTELTDWLSLLDQVIKSQRVMVGDLEDINEMIIKQKATMQDLEQRRPQLEELITAAQNLKNKTSNQEARTIITDRIERIQNQWDEVQEHLQNRRQQLNEMLKDSTQWLEAKEEAEQVLGQARAKLESWKEGPYTVDAIQKKITETKQLAKDLRQWQTNVDVANDLALKLLRDYSADDTRKVHMITENINASWRSIHKRVSEREAALEETHRLLQQFPLDLEKFLAWLTEAETTANVLQDATRKERLLEDSKGVKELMKQWQDLQGEIEAHTDVYHNLDENSQKILRSLEGSDDAVLLQRRLDNMNFKWSELRKKSLNIRSHLEASSDQWKRLHLSLQELLVWLQLKDDELSRQAPIGGDFPAVQKQNDVHRAFKRELKTKEPVIMSTLETVRIFLTEQPLEGLEKLYQEPRELPPEERAQNVTRLLRKQAEEVNTEWEKLNLHSADWQRKIDETLERLQELQEATDELDLKLRQAEVIKGSWQPVGDLLIDSLQDHLEKVKALRGEIAPLKENVSHVNDLARQLTTLGIQLSPYNLSTLEDLNTRWKLLQVAVEDRVRQLHEAHRDFGPASQHFLSTSVQGPWERAISPNKVPYYINHETQTTCWDHPKMTELYQSLADLNNVRFSAYRTAMKLRRLQKALCLDLLSLSAACDALDQHNLKQNDQPMDILQIINCLTTIYDRLEQEHNNLVNVPLCVDMCLNWLLNVYDTGRTGRIRVLSFKTGIISLCKAHLEDKYRYLFKQVASSTGFCDQRRLGLLLHDSIQIPRQLGEVASFGGSNIEPSVRSCFQFANNKPEIEAALFLDWMRLEPQSMVWLPVLHRVAAAETAKHQAKCNICKECPIIGFRYRSLKHFNYDICQSCFFSGRVAKGHKMHYPMVEYCTPTTSGEDVRDFAKVLKNKFRTKRYFAKHPRMGYLPVQTVLEGDNMETPVTLINFWPVDSAPASSPQLSHDDTHSRIEHYASRLAEMENSNGSYLNDSISPNESIDDEHLLIQHYCQSLNQDSPLSQPRSPAQILISLESEERGELERILADLEEENRNLQAEYDRLKQQHEHKGLSPLPSPPEMMPTSPQSPRDAELIAEAKLLRQHKGRLEARMQILEDHNKQLESQLHRLRQLLEQPQAEAKVNGTTVSSPSTSLQRSDSSQPMLLRVVGSQTSDSMGEEDLLSPPQDTSTGLEEVMEQLNNSFPSSRGRNTPGKPMREDTM

SEQ ID NO: 3264 - protein, 3121 aa, Homo sapiens
MPGAAGVLLLLLLSGGLGGVQAQRPQQQRQSQAHQQRGLFPAVLNLASNALITTNATCGEKGPEMYCKLVEHVPGQPVRNPQCRICNQNSSNPNQRHPITNAIDGKNTWWQSPSIKNGIEYHYVTITLDLQQVFQIAYVIVKAANSPRPGNWILERSLDDVEYKPWQYHAVTDTECLTLYNIYPRTGPPSYAKDDEVICTSFYSKIHPLENGEIHISLINGRPSADDPSPELLEFTSARYIRLRFQRIRTLNADLMMFAHKDPREIDPIVTRRYYYSVKDISVGGMCICYGHARACPLDPATNKSRCECEHNTCGDSCDQCCPGFHQKPWRAGTFLTKTECEACNCHGKAEECYYDENVARRNLSLNIRGKYIGGGVCINCTQNTAGINCETCTDGFFRPKGVSPNYPRPCQPCHCDPIGSLNEVCVKDEKHARRGLAPGSCHCKTGFGGVSCDRCARGYTGYPDCKACNCSGLGSKNEDPCFGPCICKENVEGGDCSRCKSGFFNLQEDNWKGCDECFCSGVSNRCQSSYWTYGKIQDMSGWYLTDLPGRIRVAPQQDDLDSPQQISISNAEARQALPHSYYWSAPAPYLGNKLPAVGGQLTFTISYDLEEEEEDTERVLQLMIILEGNDLSISTAQDEVYLHPSEEHTNVLLLKEESFTIHGTHFPVRRKEFMTVLANLKRVLLQITYSFGMDAIFRLSSVNLESAVSYPTDGSIAAAVEVCQCPPGYTGSSCESCWPRHRRVNGTIFGGICEPCQCFGHAESCDDVTGECLNCKDHTGGPYCDKCLPGFYGEPTKGTSEDCQPCACPLNIPSNNFSPTCHLDRSLGLICDGCPVGYTGPRCERCAEGYFGQPSVPGGSCQPCQCNDNLDFSIPGSCDSLSGSCLICKPGTTGRYCELCADGYFGDAVDAKNCQPCRCNAGGSFSEVCHSQTGQCECRANVQGQRCDKCKAGTFGLQSARGCVPCNCNSFGSKSFDCEESGQCWCQPGVTGKKCDRCAHGYFNFQEGGCTACECSHLGNNCDPKTGRCICPPNTIGEKCSKCAPNTWGHSITTGCKACNCSTVGSLDFQCNVNTGQCNCHPKFSGAKCTECSRGHWNYPRCNLCDCFLPGTDATTCDSETKKCSCSDQTGQCTCKVNVEGIHCDRCRPGKFGLDAKNPLGCSSCYCFGTTTQCSEAKGLIRTWVTLKAEQTILPLVDEALQHTTTKGIVFQHPEIVAHMDLMREDLHLEPFYWKLPEQFEGKKLMAYGGKLKYAIYFEAREETGFSTYNPQVIIRGGTPTHARIIVRHMAAPLIGQLTRHEIEMTEKEWKYYGDDPRVHRTVTREDFLDILYDIHYILIKATYGNFMRQSRISEISMEVAEQGRGTTMTPPADLIEKCDCPLGYSGLSCEACLPGFYRLRSQPGGRTPGPTLGTCVPCQCNGHSSLCDPETSICQNCQHHTAGDFCERCALGYYGIVKGLPNDCQQCACPLISSSNNFSPSCVAEGLDDYRCTACPRGYEGQYCERCAPGYTGSPGNPGGSCQECECDPYGSLPVPCDPVTGFCTCRPGATGRKCDGCKHWAREGWECVFCGDECTGLLLGDLARLEQMVMSINLTGPLPAPYKMLYGLENMTQELKHLLSPQRAPERLIQLAEGNLNTLVTEMNELLTRATKVTADGEQTGQDAERTNTRAKSLGEFIKELARDAEAVNEKAIKLNETLGTRDEAFERNLEGLQKEIDQMIKELRRKNLETQKEIAEDELVAAEALLKKVKKLFGESRGENEEMEKDLREKLADYKNKVDDAWDLLREATDKIREANRLFAVNQKNMTALEKKKEAVESGKRQIENTLKEGNDILDEANRLADEINSIIDYVEDIQTKLPPMSEELNDKIDDLSQEIKDRKLAEKVSQAESHAAQLNDSSAVLDGILDEAKNISFNATAAFKAYSNIKDYIDEAEKVAKEAKDLAHEATKLATGPRGLLKEDAKGCLQKSFRILNEAKKLANDVKENEDHLNGLKTRIENADARNGDLLRTLNDTLGKLSAIPNDTAAKLQAVKDKARQANDTAKDVLAQITELHQNLDGLKKNYNKLADSVAKTNAVVKDPSKNKIIADADATVKNLEQEADRLIDKLKPIKELEDNLKKNISEIKELINQARKQANSIKVSVSSGGDCIRTYKPEIKKGSYNNIVVNVKTAVADNLLFYLGSAKFIDFLAIEMRKGKVSFLWDVGSGVGRVEYPDLTIDDSYWYRIVASRTGRNGTISVRALDGPKASIVPSTHHSTSPPGYTILDVDANAMLFVGGLTGKLKKADAVRVITFTGCMGETYFDNKPIGLWNFREKEGDCKGCTVSPQVEDSEGTIQFDGEGYALVSRPIRWYPNISTVMFKFRTFSSSALLMYLATRDLRDFMSVELTDGHIKVSYDLGSGMASVVSNQNHNDGKWKSFTLSRIQKQANISIVDIDTNQEENIATSSSGNNFGLDLKADDKIYFGGLPTLRNLSMKARPEVNLKKYSGCLKDIEISRTPYNILSSPDYVGVTKGCSLENVYTVSFPKPGFVELSPVPIDVGTEINLSFSTKNESGIILLGSGGTPAPPRRKRRQTGQAYYAILLNRGRLEVHLSTGARTMRKIVIRPEPNLFHDGREHSVHVERTRGIFTVQVDENRRYMQNLTVEQPIEVKKLFVGGAPPEFQPSPLRNIPPFEGCIWNLVINSVPMDFARPVSFKNADIGRCAHQKLREDEDGAAPAEIVIQPEPVPTPAFPTPTPVLTHGPCAAESEPALLIGSKQFGLSRNSHIAIAFDDTKVKNRLTIELEVRTEAESGLLFYMARINHADFATVQLRNGLPYFSYDLGSGDTHTMIPTKINDGQWHKIKIMRSKQEGILYVDGASNRTISPKKADILDVVGMLYVGGLPINYTTRRIGPVTYSIDGCVRNLHMAEAPADLEQPTSSFHVGTCFANAQRGTYFDGTGFAKAVGGFKVGLDLLVEFEFRTTTTTGVLLGISSQKMDGMGIEMIDEKLMFHVDNGAGRFTAVYDAGVPGHLCDGQWHKVTANKIKHRIELTVDGNQVEAQSPNPASTSADTNDPVFVGGFPDDLKQFGLTTSIPFRGCIRSLKLTKGTGKPLEVNFAKALELRGVQPVSCPAN

SEQ ID NO: 3265 - protein, 474 aa, Homo sapiens
MRLSKTLVDMDMADYSAALDPAYTTLEFENVQVLTMGNDTSPSEGTNLNAPNSLGVSALCAICGDRATGKHYGASSCDGCKGFFRRSVRKNHMYSCRFSRQCVVDKDKRNQCRYCRLKKCFRAGMKKEAVQNERDRISTRRSSYEDSSLPSINALLQAEVLSRQITSPVSGINGDIRAKKIASIADVCESMKEQLLVLVEWAKYIPAFCELPLDDQVALLRAHAGEHLLLGATKRSMVFKDVLLLGNDYIVPRHCPELAEMSRVSIRILDELVLPFQELQIDDNEYAYLKAIIFFDPDAKGLSDPGKIKRLRSQVQVSLEDYINDRQYDSRGRFGELLLLLPTLQSITWQMIEQIQFIKLFGMAKIDNLLQEMLLGGSPSDAPHAHHPLHPHLMQEHMGTNVIVANTMPTHLSNGQMCEWPRPRGQAATPETPQPSPPGGSGSEPYKLLPGAVATIVKPLSAIPQPTITKQEVI

SEQ ID NO: 3266 - RNA, 40 nt, Artificial Sequence
  Description of Artificial Sequence: Synthetic oligonucleotide
acucacuauuuguuuucgcgcccaguugcaaaaagugucg

SEQ ID NO: 3267 - RNA, 39 nt, Artificial Sequence
  Description of Artificial Sequence: Synthetic oligonucleotide
gccagagcaacaaccuuccgagccgcgggauaaaccgag

SEQ ID NO: 3268 - RNA, 40 nt, Artificial Sequence
  Description of Artificial Sequence: Synthetic oligonucleotide
ggggaccgcgccccacaugugagugaggccgaaacguaga

SEQ ID NO: 3269 - DNA, 30 bp, Artificial Sequence
  Description of Artificial Sequence: Synthetic oligonucleotide
tataattctaccctattgaggcattgacta

SEQ ID NO: 3270 - protein, 493 aa, Artificial Sequence
  Description of Artificial Sequence: Synthetic polypeptide
MALPVTALLLPLALLLHAARPDIVLTQSPASLAVSLGERATINCRASESVSVIGAHLIHWYQQKPGQPPKLLIYLASNLETGVPARFSGSGSGTDFTLTISSLQAEDAAIYYCLQSRIFPRTFGQGTKLEIKGSTSGSGKPGSGEGSTKGQVQLVQSGSELKKPGASVKVSCKASGYTFTDYSINWVRQAPGQGLEWMGWINTETREPAYAYDFRGRFVFSLDTSVSTAYLQISSLKAEDTAVYYCARDYSYAMDYWGQGTLVTVSSAAATTTPAPRPPTPAPTIASQPLSLRPEACRPAAGGAVHTRGLDFACDIYIWAPLAGTCGVLLLSLVITLYCKRGRKKLLYIFKQPFMRPVQTTQEEDGCSCRFPEEEEGGCELRVKFSRSADAPAYQQGQNQLYNELNLGRREEYDVLDKRRGRDPEMGGKPRRKNPQEGLYNELQKDKMAEAYSEIGMKGERRRGKGHDGLYQGLSTATKDTYDALHMQALPPR

SEQ ID NO: 3271 - protein, 207 aa, Artificial Sequence
  Description of Artificial Sequence: Synthetic polypeptide
KNQVEQSPQSLIILEGKNCTLQCNYTVSPFSNLRWYKQDTGRGPVSLTIMTFSENTKSNGRYTATLDADTKQSSLHITASQLSDSASYICVVNHSGGSYIPTFGRGTSLIVHPYIQKPDPAVYQLRDSKSSDKSVCLFTDFDSQTNVSQSKDSDVYITDKTVLDMRSMDFKSNSAVAWSNKSDFACANAFNNSIIPEDTFFPSPESS

SEQ ID NO: 3272 - protein, 246 aa, Artificial Sequence
  Description of Artificial Sequence: Synthetic polypeptide
DVKVTQSSRYLVKRTGEKVFLECVQDMDHENMFWYRQDPGLGLRLIYFSYDVKMKEKGDIPEGYSVSREKKERFSLILESASTNQTSMYLCASSFLMTSGDPYEQYFGPGTRLTVTEDLKNVFPPEVAVFEPSEAEISHTQKATLVCLATGFYPDHVELSWWVNGKEVHSGVSTDPQPLKEQPALNDSRYCLSSRLRVSATFWQNPRNHFRCQVQFYGLSENDEWTQDRAKPVTQIVSAEAWGRAD

SEQ ID NO: 3273 - protein, 115 aa, Artificial Sequence
  Description of Artificial Sequence: Synthetic polypeptide
MQEVTQIPAALSVPEGENLVLNCSFTDSAIYNLQWFRQDPGKGLTSLLLIQSSQREQTSGRLNASLDKSSGRSTLYIAASQPGDSATYLCAVRPTSGGSYIPTFGRGTSLIVHPY

SEQ ID NO: 3274 - protein, 112 aa, Artificial Sequence
  Description of Artificial Sequence: Synthetic polypeptide
MGVTQTPKFQVLKTGQSMTLQCAQDMNHEYMSWYRQDPGMGLRLIHYSVGAGITDQGEVPNGYNVSRSTTEDFPLRLLSAAPSQTSVYFCASSYVGNTGELFFGEGSRLTVL

SEQ ID NO: 3275 - protein, 166 aa, Artificial Sequence
  Description of Artificial Sequence: Synthetic polypeptide
APPRLICDSRVLERYLLEAKEAENITTGCAEHCSLNENITVPDTKVNFYAWKRMEVGQQAVEVWQGLALLSEAVLRGQALLVNSSQPWEPLQLHVDKAVSGLRSLTTLLRALGAQKEAISPPDAASAAPLRTITADTFRKLFRVYSNFLRGKLKLYTGEACRTGDR

SEQ ID NO: 3276 - protein, 1462 aa, Artificial Sequence
  Description of Artificial Sequence: Synthetic polypeptide
LSVKAQTAHIVLEDGTKMKGYSFGHPSSVAGEVVFNTGLGGYPEAITDPAYKGQILTMANPIIGNGGAPDTTALDELGLSKYLESNGIKVSGLLVLDYSKDYNHWLATKSLGQWLQEEKVPAIYGVDTRMLTKIIRDKGTMLGKIEFEGQPVDFVDPNKQNLIAEVSTKDVKVYGKGNPTKVVAVDCGIKNNVIRLLVKRGAEVHLVPWNHDFTKMEYDGILIAGGPGNPALAEPLIQNVRKILESDRKEPLFGISTGNLITGLAAGAKTYKMSMANRGQNQPVLNITNKQAFITAQNHGYALDNTLPAGWKPLFVNVNDQTNEGIMHESKPFFAVQFHPEVTPGPIDTEYLFDSFFSLIKKGKATTITSVLPKPALVASRVEVSKVLILGSGGLSIGQAGEFDYSGSQAVKAMKEENVKTVLMNPNIASVQTNEVGLKQADTVYFLPITPQFVTEVIKAEQPDGLILGMGGQTALNCGVELFKRGVLKEYGVKVLGTSVESIMATEDRQLFSDKLNEINEKIAPSFAVESIEDALKAADTIGYPVMIRSAYALGGLGSGICPNRETLMDLSTKAFAMTNQILVEKSVTGWKEIEYEVVRDADDNCVTVCNMENVDAMGVHTGDSVVVAPAQTLSNAEFQMLRRTSINVVRHLGIVGECNIQFALHPTSMEYCIIEVNARLSRSSALASKATGYPLAFIAAKIALGIPLPEIKNVVSGKTSACFEPSLDYMVTKIPRWDLDRFHGTSSRIGSSMKSVGEVMAIGRTFEESFQKALRMCHPSIEGFTPRLPMNKEWPSNLDLRKELSEPSSTRIYAIAKAIDDNMSLDEIEKLTYIDKWFLYKMRDILNMEKTLKGLNSESMTEETLKRAKEIGFSDKQISKCLGLTEAQTRELRLKKNIHPWVKQIDTLAAEYPSVTNYLYVTYNGQEHDVNFDDHGMMVLGCGPYHIGSSVEFDWCAVSSIRTLRQLGKKTVVVNCNPETVSTDFDECDKLYFEELSLERILDIYHQEACGGCIISVGGQIPNNLAVPLYKNGVKIMGTSPLQIDRAEDRSIFSAVLDELKVAQAPWKAVNTLNEALEFAKSVDYPCLLRPSYVLSGSAMNVVFSEDEMKKFLEEATRVSQEHPVVLTKFVEGAREVEMDAVGKDGRVISHAISEHVEDAGVHSGDATLMLPTQTISQGAIEKVKDATRKIAKAFAISGPFNVQFLVKGNDVLVIECNLRASRSFPFVSKTLGVDFIDVATKVMIGENVDEKHLPTLDHPIIPADYVAIKAPMFSWPRLRDADPILRCEMASTGEVACFGEGIHTAFLKAMLSTGFKIPQKGILIGIQQSFRPRFLGVAEQLHNEGFKLFATEATSDWLNANNVPATPVAWPSQEGQNPSLSSIRKLIRDGSIDLVINLPNNNTKFVHDNYVIRRTAVDSGIPLLTNFQVTKLFAEAVQKSRKVDSKSLFHYRQYSAGKAA

SEQ ID NO: 3277 - protein, 1053 aa, Artificial Sequence
  Description of Artificial Sequence: Synthetic polypeptide
MKRNYILGLDIGITSVGYGIIDYETRDVIDAGVRLFKEANVENNEGRRSKRGARRLKRRRRHRIQRVKKLLFDYNLLTDHSELSGINPYEARVKGLSQKLSEEEFSAALLHLAKRRGVHNVNEVEEDTGNELSTKEQISRNSKALEEKYVAELQLERLKKDGEVRGSINRFKTSDYVKEAKQLLKVQKAYHQLDQSFIDTYIDLLETRRTYYEGPGEGSPFGWKDIKEWYEMLMGHCTYFPEELRSVKYAYNADLYNALNDLNNLVITRDENEKLEYYEKFQIIENVFKQKKKPTLKQIAKEILVNEEDIKGYRVTSTGKPEFTNLKVYHDIKDITARKEIIENAELLDQIAKILTIYQSSEDIQEELTNLNSELTQEEIEQISNLKGYTGTHNLSLKAINLILDELWHTNDNQIAIFNRLKLVPKKVDLSQQKEIPTTLVDDFILSPVVKRSFIQSIKVINAIIKKYGLPNDIIIELAREKNSKDAQKMINEMQKRNRQTNERIEEIIRTTGKENAKYLIEKIKLHDMQEGKCLYSLEAIPLEDLLNNPFNYEVDHIIPRSVSFDNSFNNKVLVKQEENSKKGNRTPFQYLSSSDSKISYETFKKHILNLAKGKGRISKTKKEYLLEERDINRFSVQKDFINRNLVDTRYATRGLMNLLRSYFRVNNLDVKVKSINGGFTSFLRRKWKFKKERNKGYKHHAEDALIIANADFIFKEWKKLDKAKKVMENQMFEEKQAESMPEIETEQEYKEIFITPHQIKHIKDFKDYKYSHRVDKKPNRELINDTLYSTRKDDKGNTLIVNNLNGLYDKDNDKLKKLINKSPEKLLMYHHDPQTYQKLKLIMEQYGDEKNPLYKYYEETGNYLTKYSKKDNGPVIKKIKYYGNKLNAHLDITDDYPNSRNKVVKLSLKPYRFDVYLDNGVYKFVTVKNLDVIKKENYYEVNSKCYEEAKKLKKISNQAEFIASFYNNDLIKINGELYRVIGVNNDLLNRIEVNMIDITYREYLENMNDKRPPRIIKTIASKTQSIKKYSTDILGNLYEVKSKKHPQIIKKG

SEQ ID NO: 3278 - protein, 1353 aa, Artificial Sequence
  Description of Artificial Sequence: Synthetic polypeptide
AAGGILHLELLVAVGPDVFQAHQEDTERYVLTNLNIGAELLRDPSLGAQFRVHLVKMVILTEPEGAPNITANLTSSLLSVCGWSQTINPEDDTDPGHADLVLYITRFDLELPDGNRQVRGVTQLGGACSPTWSCLITEDTGFDLGVTIAHEIGHSFGLEHDGAPGSGCGPSGHVMASDGAAPRAGLAWSPCSRRQLLSLLSAGRARCVWDPPRPQPGSAGHPPDAQPGLYYSANEQCRVAFGPKAVACTFAREHLDMCQALSCHTDPLDQSSCSRLLVPLLDGTECGVEKWCSKGRCRSLVELTPIAAVHGRWSSWGPRSPCSRSCGGGVVTRRRQCNNPRPAFGGRACVGADLQAEMCNTQACEKTQLEFMSQQCARTDGQPLRSSPGGASFYHWGAAVPHSQGDALCRHMCRAIGESFIMKRGDSFLDGTRCMPSGPREDGTLSLCVSGSCRTFGCDGRMDSQQVWDRCQVCGGDNSTCSPRKGSFTAGRAREYVTFLTVTPNLTSVYIANHRPLFTHLAVRIGGRYVVAGKMSISPNTTYPSLLEDGRVEYRVALTEDRLPRLEEIRIWGPLQEDADIQVYRRYGEEYGNLTRPDITFTYFQPKPRQAWVWAAVRGPCSVSCGAGLRWVNYSCLDQARKELVETVQCQGSQQPPAWPEACVLEPCPPYWAVGDFGPCSASCGGGLRERPVRCVEAQGSLLKTLPPARCRAGAQQPAVALETCNPQPCPARWEVSEPSSCTSAGGAGLALENETCVPGADGLEAPVTEGPGSVDEKLPAPEPCVGMSCPPGWGHLDATSAGEKAPSPWGSIRTGAQAAHVWTPAAGSCSVSCGRGLMELRFLCMDSALRVPVQEELCGLASKPGSRREVCQAVPCPARWQYKLAACSVSCGRGVVRRILYCARAHGEDDGEEILLDTQCQGLPRPEPQEACSLEPCPPRWKVMSLGPCSASCGLGTARRSVACVQLDQGQDVEVDEAACAALVRPEASVPCLIADCTYRWHVGTWMECSVSCGDGIQRRRDTCLGPQAQAPVPADFCQHLPKPVTVRGCWAGPCVGQGTPSLVPHEEAAAPGRTTATPAGASLEWSQARGLLFSPAPQPRRLLPGPQENSVQSSACGRQHLEPTGTIDMRGPGQADCAVAIGRPLGEVVTLRVLESSLNCSAGDMLLLWGRLTWRKMCRKLLDMTFSSKTNTLVVRQRCGRPGGGVLLRYGSQLAPETFYRECDMQLFGPWGEIVSPSLSPATSNAGGCRLFINVAPHARIAIHALATNMGAGTEGANASYILIRDTHSLRTTAFHGQQVLYWESESSQAEMEFSEGFLKAQASLRGQYWTLQSWVPEMQDPQSWKGKEGT

SEQ ID NO: 3279 - RNA, 150 nt, Artificial Sequence
  Description of Artificial Sequence: Synthetic polynucleotide
aaaaaaaaaaaaaaaaaaaaaaaaaaaaaaaaaaaaaaaaaaaaaaaaaaaaaaaaaaaaaaaaaaaaaaaaaaaaaaaaaaaaaaaaaaaaaaaaaaaaaaaaaaaaaaaaaaaaaaaaaaaaaaaaaaaaaaaaaaaaaaaaaaaaaa

SEQ ID NO: 3280 - protein, 5 aa, Artificial Sequence
  Description of Artificial Sequence: Synthetic peptide
GGGGS

SEQ ID NO: 3281 - protein, 15 aa, Artificial Sequence
  Description of Artificial Sequence: Synthetic peptide
GGGGSGGGGSGGGGS

(The sequence listing continues in the following parts.)
